United States Patent Application Publication US 2020/0216857 A1 - sequence listing, part 4

SEQ ID NO: 40412 - DNA, 20 bp, Artificial Sequence
  Description of Artificial Sequence: Synthetic oligonucleotide
  Target: ATXN2; (+) strand; PAM type: NRG; PAM sequence: TGG
gcctcagcctcccgagtagc

SEQ ID NO: 40413 - DNA, 20 bp, Artificial Sequence
  Description of Artificial Sequence: Synthetic oligonucleotide
  Target: ATXN2; (+) strand; PAM type: NRG; PAM sequence: GGG
cctcagcctcccgagtagct

SEQ ID NO: 40414 - DNA, 20 bp, Artificial Sequence
  Description of Artificial Sequence: Synthetic oligonucleotide
  Target: ATXN2; (+) strand; PAM type: NRG; PAM sequence: CAG
cctcccgagtagctgggata

SEQ ID NO: 40415 - DNA, 20 bp, Artificial Sequence
  Description of Artificial Sequence: Synthetic oligonucleotide
  Target: ATXN2; (+) strand; PAM type: NRG; PAM sequence: AGG
ctcccgagtagctgggatac

SEQ ID NO: 40416 - DNA, 20 bp, Artificial Sequence
  Description of Artificial Sequence: Synthetic oligonucleotide
  Target: ATXN2; (+) strand; PAM type: NRG; PAM sequence: TGG
caggcacctaccaccatgcc

SEQ ID NO: 40417 - DNA, 20 bp, Artificial Sequence
  Description of Artificial Sequence: Synthetic oligonucleotide
  Target: ATXN2; (+) strand; PAM type: NRG; PAM sequence: TAG
ctggctaatttttgtatttt

SEQ ID NO: 40418 - DNA, 20 bp, Artificial Sequence
  Description of Artificial Sequence: Synthetic oligonucleotide
  Target: ATXN2; (+) strand; PAM type: NRG; PAM sequence: CAG
taatttttgtatttttagta

SEQ ID NO: 40419 - DNA, 20 bp, Artificial Sequence
  Description of Artificial Sequence: Synthetic oligonucleotide
  Target: ATXN2; (+) strand; PAM type: NRG; PAM sequence: CAG
ttttgtatttttagtacaga

SEQ ID NO: 40420 - DNA, 20 bp, Artificial Sequence
  Description of Artificial Sequence: Synthetic oligonucleotide
  Target: ATXN2; (+) strand; PAM type: NRG; PAM sequence: AGG
tttgtatttttagtacagac

SEQ ID NO: 40421 - DNA, 20 bp, Artificial Sequence
  Description of Artificial Sequence: Synthetic oligonucleotide
  Target: ATXN2; (+) strand; PAM type: NRG; PAM sequence: GGG
ttgtatttttagtacagaca

SEQ ID NO: 40422 - DNA, 20 bp, Artificial Sequence
  Description of Artificial Sequence: Synthetic oligonucleotide
  Target: ATXN2; (+) strand; PAM type: NRG; PAM sequence: TGG
acagacagggtttcacatgt

SEQ ID NO: 40423 - DNA, 20 bp, Artificial Sequence
  Description of Artificial Sequence: Synthetic oligonucleotide
  Target: ATXN2; (+) strand; PAM type: NRG; PAM sequence: CAG
acagggtttcacatgttggc

SEQ ID NO: 40424 - DNA, 20 bp, Artificial Sequence
  Description of Artificial Sequence: Synthetic oligonucleotide
  Target: ATXN2; (+) strand; PAM type: NRG; PAM sequence: AGG
cagggtttcacatgttggcc

SEQ ID NO: 40425 - DNA, 20 bp, Artificial Sequence
  Description of Artificial Sequence: Synthetic oligonucleotide
  Target: ATXN2; (+) strand; PAM type: NRG; PAM sequence: TGG
gtttcacatgttggccaggc

SEQ ID NO: 40426 - DNA, 20 bp, Artificial Sequence
  Description of Artificial Sequence: Synthetic oligonucleotide
  Target: ATXN2; (+) strand; PAM type: NRG; PAM sequence: AAG
ggtcttcaactcctaacctc

SEQ ID NO: 40427 - DNA, 20 bp, Artificial Sequence
  Description of Artificial Sequence: Synthetic oligonucleotide
  Target: ATXN2; (+) strand; PAM type: NRG; PAM sequence: TGG
cctcaagtaatctacctgct

SEQ ID NO: 40428 - DNA, 20 bp, Artificial Sequence
  Description of Artificial Sequence: Synthetic oligonucleotide
  Target: ATXN2; (+) strand; PAM type: NRG; PAM sequence: CAG
atctacctgcttggacctcc

SEQ ID NO: 40429 - DNA, 20 bp, Artificial Sequence
  Description of Artificial Sequence: Synthetic oligonucleotide
  Target: ATXN2; (+) strand; PAM type: NRG; PAM sequence: GAG
ctacctgcttggacctccca

SEQ ID NO: 40430 - DNA, 20 bp, Artificial Sequence
  Description of Artificial Sequence: Synthetic oligonucleotide
  Target: ATXN2; (+) strand; PAM type: NRG; PAM sequence: TGG
gcttggacctcccagagtgc

SEQ ID NO: 40431 - DNA, 20 bp, Artificial Sequence
  Description of Artificial Sequence: Synthetic oligonucleotide
  Target: ATXN2; (+) strand; PAM type: NRG; PAM sequence: GGG
cttggacctcccagagtgct

SEQ ID NO: 40432 - DNA, 20 bp, Artificial Sequence
  Description of Artificial Sequence: Synthetic oligonucleotide
  Target: ATXN2; (+) strand; PAM type: NRG; PAM sequence: TAG
ctcccagagtgctgggatta

SEQ ID NO: 40433 - DNA, 20 bp, Artificial Sequence
  Description of Artificial Sequence: Synthetic oligonucleotide
  Target: ATXN2; (+) strand; PAM type: NRG; PAM sequence: AGG
tcccagagtgctgggattat

SEQ ID NO: 40434 - DNA, 20 bp, Artificial Sequence
  Description of Artificial Sequence: Synthetic oligonucleotide
  Target: ATXN2; (+) strand; PAM type: NRG; PAM sequence: GAG
agtgctgggattataggtat

SEQ ID NO: 40435 - DNA, 20 bp, Artificial Sequence
  Description of Artificial Sequence: Synthetic oligonucleotide
  Target: ATXN2; (+) strand; PAM type: NRG; PAM sequence: CAG
ggattataggtatgagctac

SEQ ID NO: 40436 - DNA, 20 bp, Artificial Sequence
  Description of Artificial Sequence: Synthetic oligonucleotide
  Target: ATXN2; (+) strand; PAM type: NRG; PAM sequence: TAG
cagtcaacataccaatattc

SEQ ID NO: 40437 - DNA, 20 bp, Artificial Sequence
  Description of Artificial Sequence: Synthetic oligonucleotide
  Target: ATXN2; (+) strand; PAM type: NRG; PAM sequence: CAG
cataccaatattctagcatg

SEQ ID NO: 40438 - DNA, 20 bp, Artificial Sequence
  Description of Artificial Sequence: Synthetic oligonucleotide
  Target: ATXN2; (+) strand; PAM type: NRG; PAM sequence: GAG
gcatgcagtaattcttatgt

SEQ ID NO: 40439 - DNA, 20 bp, Artificial Sequence
  Description of Artificial Sequence: Synthetic oligonucleotide
  Target: ATXN2; (+) strand; PAM type: NRG; PAM sequence: AAG
tgcagtaattcttatgtgag

SEQ ID NO: 40440 - DNA, 20 bp, Artificial Sequence
  Description of Artificial Sequence: Synthetic oligonucleotide
  Target: ATXN2; (+) strand; PAM type: NRG; PAM sequence: TGG
gatattttacatgacatacc

SEQ ID NO: 40441 - DNA, 20 bp, Artificial Sequence
  Description of Artificial Sequence: Synthetic oligonucleotide
  Target: ATXN2; (+) strand; PAM type: NRG; PAM sequence: AAG
ttacatgacatacctggaaa

SEQ ID NO: 40442 - DNA, 20 bp, Artificial Sequence
  Description of Artificial Sequence: Synthetic oligonucleotide
  Target: ATXN2; (+) strand; PAM type: NRG; PAM sequence: TGG
gacatacctggaaaaagtca

SEQ ID NO: 40443 - DNA, 20 bp, Artificial Sequence
  Description of Artificial Sequence: Synthetic oligonucleotide
  Target: ATXN2; (+) strand; PAM type: NRG; PAM sequence: AAG
aaaaaaaattgcctcaaatc

SEQ ID NO: 40444 - DNA, 20 bp, Artificial Sequence
  Description of Artificial Sequence: Synthetic oligonucleotide
  Target: ATXN2; (+) strand; PAM type: NRG; PAM sequence: AAG
aattgcctcaaatcaagaat

SEQ ID NO: 40445 - DNA, 20 bp, Artificial Sequence
  Description of Artificial Sequence: Synthetic oligonucleotide
  Target: ATXN2; (+) strand; PAM type: NRG; PAM sequence: CAG
tgcctcaaatcaagaataag

SEQ ID NO: 40446 - DNA, 20 bp, Artificial Sequence
  Description of Artificial Sequence: Synthetic oligonucleotide
  Target: ATXN2; (+) strand; PAM type: NRG; PAM sequence: AAG
gcagtccccaatttatcaat

SEQ ID NO: 40447 - DNA, 20 bp, Artificial Sequence
  Description of Artificial Sequence: Synthetic oligonucleotide
  Target: ATXN2; (+) strand; PAM type: NRG; PAM sequence: CAG
taagctgcattccaaaactt

SEQ ID NO: 40448 - DNA, 20 bp, Artificial Sequence
  Description of Artificial Sequence: Synthetic oligonucleotide
  Target: ATXN2; (+) strand; PAM type: NRG; PAM sequence: TGG
tccaaaacttcagctttaac

SEQ ID NO: 40449 - DNA, 20 bp, Artificial Sequence
  Description of Artificial Sequence: Synthetic oligonucleotide
  Target: ATXN2; (+) strand; PAM type: NRG; PAM sequence: TGG
tcagctttaactggattgtt

SEQ ID NO: 40450 - DNA, 20 bp, Artificial Sequence
  Description of Artificial Sequence: Synthetic oligonucleotide
  Target: ATXN2; (+) strand; PAM type: NRG; PAM sequence: AAG
tgtttggtacccaaacacct

SEQ ID NO: 40451 - DNA, 20 bp, Artificial Sequence
  Description of Artificial Sequence: Synthetic oligonucleotide
  Target: ATXN2; (+) strand; PAM type: NRG; PAM sequence: TGG
tacccaaacacctaagtcaa

SEQ ID NO: 40452 - DNA, 20 bp, Artificial Sequence
  Description of Artificial Sequence: Synthetic oligonucleotide
  Target: ATXN2; (+) strand; PAM type: NRG; PAM sequence: TAG
ccaaacacctaagtcaatgg

SEQ ID NO: 40453 - DNA, 20 bp, Artificial Sequence
  Description of Artificial Sequence: Synthetic oligonucleotide
  Target: ATXN2; (+) strand; PAM type: NRG; PAM sequence: AAG
cacctaagtcaatggtagtt

SEQ ID NO: 40454 - DNA, 20 bp, Artificial Sequence
  Description of Artificial Sequence: Synthetic oligonucleotide
  Target: ATXN2; (+) strand; PAM type: NRG; PAM sequence: GAG
gtcaatggtagttaagttct

SEQ ID NO: 40455 - DNA, 20 bp, Artificial Sequence
  Description of Artificial Sequence: Synthetic oligonucleotide
  Target: ATXN2; (+) strand; PAM type: NRG; PAM sequence: AGG
tcaatggtagttaagttctg

SEQ ID NO: 40456 - DNA, 20 bp, Artificial Sequence
  Description of Artificial Sequence: Synthetic oligonucleotide
  Target: ATXN2; (+) strand; PAM type: NRG; PAM sequence: TAG
tggtagttaagttctgaggt

SEQ ID NO: 40457 - DNA, 20 bp, Artificial Sequence
  Description of Artificial Sequence: Synthetic oligonucleotide
  Target: ATXN2; (+) strand; PAM type: NRG; PAM sequence: AAG
gttctgaggttagcccctaa

SEQ ID NO: 40458 - DNA, 20 bp, Artificial Sequence
  Description of Artificial Sequence: Synthetic oligonucleotide
  Target: ATXN2; (+) strand; PAM type: NRG; PAM sequence: CAG
taattaatatactgaatgtg

SEQ ID NO: 40459 - DNA, 20 bp, Artificial Sequence
  Description of Artificial Sequence: Synthetic oligonucleotide
  Target: ATXN2; (+) strand; PAM type: NRG; PAM sequence: AAG
tatactgaatgtgcagaatt

SEQ ID NO: 40460 - DNA, 20 bp, Artificial Sequence
  Description of Artificial Sequence: Synthetic oligonucleotide
  Target: ATXN2; (+) strand; PAM type: NRG; PAM sequence: CAG
tctaaacattaactaaaaca

SEQ ID NO: 40461 - DNA, 20 bp, Artificial Sequence
  Description of Artificial Sequence: Synthetic oligonucleotide
  Target: ATXN2; (+) strand; PAM type: NRG; PAM sequence: AAG
tgaaaaatattttgaattcc

SEQ ID NO: 40462 - DNA, 20 bp, Artificial Sequence
  Description of Artificial Sequence: Synthetic oligonucleotide
  Target: ATXN2; (+) strand; PAM type: NRG; PAM sequence: TAG
aaaatattttgaattccaag

SEQ ID NO: 40463 - DNA, 20 bp, Artificial Sequence
  Description of Artificial Sequence: Synthetic oligonucleotide
  Target: ATXN2; (+) strand; PAM type: NRG; PAM sequence: AAG
atattttgaattccaagtag

SEQ ID NO: 40464 - DNA, 20 bp, Artificial Sequence
  Description of Artificial Sequence: Synthetic oligonucleotide
  Target: ATXN2; (+) strand; PAM type: NRG; PAM sequence: CAG
ccgcatgcttctctccttga

SEQ ID NO: 40465 - DNA, 20 bp, Artificial Sequence
  Description of Artificial Sequence: Synthetic oligonucleotide
  Target: ATXN2; (+) strand; PAM type: NRG; PAM sequence: TGG
catgcttctctccttgacag

SEQ ID NO: 40466 - DNA, 20 bp, Artificial Sequence
  Description of Artificial Sequence: Synthetic oligonucleotide
  Target: ATXN2; (+) strand; PAM type: NRG; PAM sequence: CAG
gcttctctccttgacagtgg

SEQ ID NO: 40467 - DNA, 20 bp, Artificial Sequence
  Description of Artificial Sequence: Synthetic oligonucleotide
  Target: ATXN2; (+) strand; PAM type: NRG; PAM sequence: TAG
acagtggcagtttttcaacc

SEQ ID NO: 40468 - DNA, 20 bp, Artificial Sequence
  Description of Artificial Sequence: Synthetic oligonucleotide
  Target: ATXN2; (+) strand; PAM type: NRG; PAM sequence: CAG
gtggcagtttttcaacctag

SEQ ID NO: 40469 - DNA, 20 bp, Artificial Sequence
  Description of Artificial Sequence: Synthetic oligonucleotide
  Target: ATXN2; (+) strand; PAM type: NRG; PAM sequence: CAG
agtttttcaacctagcagca

SEQ ID NO: 40470 - DNA, 20 bp, Artificial Sequence
  Description of Artificial Sequence: Synthetic oligonucleotide
  Target: ATXN2; (+) strand; PAM type: NRG; PAM sequence: GAG
tttcaacctagcagcacagt

SEQ ID NO: 40471 - DNA, 20 bp, Artificial Sequence
  Description of Artificial Sequence: Synthetic oligonucleotide
  Target: ATXN2; (+) strand; PAM type: NRG; PAM sequence: AGG
ttcaacctagcagcacagtg

SEQ ID NO: 40472 - DNA, 20 bp, Artificial Sequence
  Description of Artificial Sequence: Synthetic oligonucleotide
  Target: ATXN2; (+) strand; PAM type: NRG; PAM sequence: GGG
tcaacctagcagcacagtga

SEQ ID NO: 40473 - DNA, 20 bp, Artificial Sequence
  Description of Artificial Sequence: Synthetic oligonucleotide
  Target: ATXN2; (+) strand; PAM type: NRG; PAM sequence: GAG
gcacagtgagggtgactaat

SEQ ID NO: 40474 - DNA, 20 bp, Artificial Sequence
  Description of Artificial Sequence: Synthetic oligonucleotide
  Target: ATXN2; (+) strand; PAM type: NRG; PAM sequence: TGG
cagtgagggtgactaatgag

SEQ ID NO: 40475 - DNA, 20 bp, Artificial Sequence
  Description of Artificial Sequence: Synthetic oligonucleotide
  Target: ATXN2; (+) strand; PAM type: NRG; PAM sequence: CAG
ggtgactaatgagtggaatc

SEQ ID NO: 40476 - DNA, 20 bp, Artificial Sequence
  Description of Artificial Sequence: Synthetic oligonucleotide
  Target: ATXN2; (+) strand; PAM type: NRG; PAM sequence: AAG
ctaatgagtggaatccagta

SEQ ID NO: 40477 - DNA, 20 bp, Artificial Sequence
  Description of Artificial Sequence: Synthetic oligonucleotide
  Target: ATXN2; (+) strand; PAM type: NRG; PAM sequence: TAG
tgagtggaatccagtaaaga

SEQ ID NO: 40478 - DNA, 20 bp, Artificial Sequence
  Description of Artificial Sequence: Synthetic oligonucleotide
  Target: ATXN2; (+) strand; PAM type: NRG; PAM sequence: AGG
gagtggaatccagtaaagat

SEQ ID NO: 40479 - DNA, 20 bp, Artificial Sequence
  Description of Artificial Sequence: Synthetic oligonucleotide
  Target: ATXN2; (+) strand; PAM type: NRG; PAM sequence: CAG
tttcaactcctgttcattta

SEQ ID NO: 40480 - DNA, 20 bp, Artificial Sequence
  Description of Artificial Sequence: Synthetic oligonucleotide
  Target: ATXN2; (+) strand; PAM type: NRG; PAM sequence: TAG
taatttatgccttgtttttc

SEQ ID NO: 40481 - DNA, 20 bp, Artificial Sequence
  Description of Artificial Sequence: Synthetic oligonucleotide
  Target: ATXN2; (+) strand; PAM type: NRG; PAM sequence: TGG
atgccttgtttttctagccc

SEQ ID NO: 40482 - DNA, 20 bp, Artificial Sequence
  Description of Artificial Sequence: Synthetic oligonucleotide
  Target: ATXN2; (+) strand; PAM type: NRG; PAM sequence: GGG
tgccttgtttttctagccct

SEQ ID NO: 40483 - DNA, 20 bp, Artificial Sequence
  Description of Artificial Sequence: Synthetic oligonucleotide
  Target: ATXN2; (+) strand; PAM type: NRG; PAM sequence: GGG
gccttgtttttctagccctg

SEQ ID NO: 40484 - DNA, 20 bp, Artificial Sequence
  Description of Artificial Sequence: Synthetic oligonucleotide
  Target: ATXN2; (+) strand; PAM type: NRG; PAM sequence: AAG
tctagccctggggtacaaaa

SEQ ID NO: 40485 - DNA, 20 bp, Artificial Sequence
  Description of Artificial Sequence: Synthetic oligonucleotide
  Target: ATXN2; (+) strand; PAM type: NRG; PAM sequence: AGG
ctagccctggggtacaaaaa

SEQ ID NO: 40486 - DNA, 20 bp, Artificial Sequence
  Description of Artificial Sequence: Synthetic oligonucleotide
  Target: ATXN2; (+) strand; PAM type: NRG; PAM sequence: GGG
tagccctggggtacaaaaaa

SEQ ID NO: 40487 - DNA, 20 bp, Artificial Sequence
  Description of Artificial Sequence: Synthetic oligonucleotide
  Target: ATXN2; (+) strand; PAM type: NRG; PAM sequence: GGG
agccctggggtacaaaaaag

SEQ ID NO: 40488 - DNA, 20 bp, Artificial Sequence
  Description of Artificial Sequence: Synthetic oligonucleotide
  Target: ATXN2; (+) strand; PAM type: NRG; PAM sequence: AAG
cctggggtacaaaaaagggg

SEQ ID NO: 40489 - DNA, 20 bp, Artificial Sequence
  Description of Artificial Sequence: Synthetic oligonucleotide
  Target: ATXN2; (+) strand; PAM type: NRG; PAM sequence: CAG
ggtacaaaaaaggggaagaa

SEQ ID NO: 40490 - DNA, 20 bp, Artificial Sequence
  Description of Artificial Sequence: Synthetic oligonucleotide
  Target: ATXN2; (+) strand; PAM type: NRG; PAM sequence: AAG
acaaaaaaggggaagaacag

SEQ ID NO: 40491 - DNA, 20 bp, Artificial Sequence
  Description of Artificial Sequence: Synthetic oligonucleotide
  Target: ATXN2; (+) strand; PAM type: NRG; PAM sequence: GAG
aaaaaaggggaagaacagaa

SEQ ID NO: 40492 - DNA, 20 bp, Artificial Sequence
  Description of Artificial Sequence: Synthetic oligonucleotide
  Target: ATXN2; (+) strand; PAM type: NRG; PAM sequence: TAG
aaaggggaagaacagaagag

SEQ ID NO: 40493 - DNA, 20 bp, Artificial Sequence
  Description of Artificial Sequence: Synthetic oligonucleotide
  Target: ATXN2; (+) strand; PAM type: NRG; PAM sequence: CAG
ggaagaacagaagagtagca

SEQ ID NO: 40494 - DNA, 20 bp, Artificial Sequence
  Description of Artificial Sequence: Synthetic oligonucleotide
  Target: ATXN2; (+) strand; PAM type: NRG; PAM sequence: AGG
gaagaacagaagagtagcac

SEQ ID NO: 40495 - DNA, 20 bp, Artificial Sequence
  Description of Artificial Sequence: Synthetic oligonucleotide
  Target: ATXN2; (+) strand; PAM type: NRG; PAM sequence: GGG
aagaacagaagagtagcaca

SEQ ID NO: 40496 - DNA, 20 bp, Artificial Sequence
  Description of Artificial Sequence: Synthetic oligonucleotide
  Target: ATXN2; (+) strand; PAM type: NRG; PAM sequence: AAG
tgcaataacctcatttactt

SEQ ID NO: 40497 - DNA, 20 bp, Artificial Sequence
  Description of Artificial Sequence: Synthetic oligonucleotide
  Target: ATXN2; (+) strand; PAM type: NRG; PAM sequence: TGG
tacttaagatgtcatttgtt

SEQ ID NO: 40498 - DNA, 20 bp, Artificial Sequence
  Description of Artificial Sequence: Synthetic oligonucleotide
  Target: ATXN2; (+) strand; PAM type: NRG; PAM sequence: TAG
aagatgtcatttgtttggac

SEQ ID NO: 40499 - DNA, 20 bp, Artificial Sequence
  Description of Artificial Sequence: Synthetic oligonucleotide
  Target: ATXN2; (+) strand; PAM type: NRG; PAM sequence: AAG
ggactagctgtttgtaaact

SEQ ID NO: 40500 - DNA, 20 bp, Artificial Sequence
  Description of Artificial Sequence: Synthetic oligonucleotide
  Target: ATXN2; (+) strand; PAM type: NRG; PAM sequence: AGG
gactagctgtttgtaaacta

SEQ ID NO: 40501 - DNA, 20 bp, Artificial Sequence
  Description of Artificial Sequence: Synthetic oligonucleotide
  Target: ATXN2; (+) strand; PAM type: NRG; PAM sequence: GGG
actagctgtttgtaaactaa

SEQ ID NO: 40502 - DNA, 20 bp, Artificial Sequence
  Description of Artificial Sequence: Synthetic oligonucleotide
  Target: ATXN2; (+) strand; PAM type: NRG; PAM sequence: AAG
taaactaagggcaatgtata

SEQ ID NO: 40503 - DNA, 20 bp, Artificial Sequence
  Description of Artificial Sequence: Synthetic oligonucleotide
  Target: ATXN2; (+) strand; PAM type: NRG; PAM sequence: TAG
actaagggcaatgtataaag

SEQ ID NO: 40504 - DNA, 20 bp, Artificial Sequence
  Description of Artificial Sequence: Synthetic oligonucleotide
  Target: ATXN2; (+) strand; PAM type: NRG; PAM sequence: AAG
caatgtataaagtagtctaa

SEQ ID NO: 40505 - DNA, 20 bp, Artificial Sequence
  Description of Artificial Sequence: Synthetic oligonucleotide
  Target: ATXN2; (+) strand; PAM type: NRG; PAM sequence: CAG
tataaagtagtctaaaagtc

SEQ ID NO: 40506 - DNA, 20 bp, Artificial Sequence
  Description of Artificial Sequence: Synthetic oligonucleotide
  Target: ATXN2; (+) strand; PAM type: NRG; PAM sequence: TGG
aagtagtctaaaagtccaga

SEQ ID NO: 40507 - DNA, 20 bp, Artificial Sequence
  Description of Artificial Sequence: Synthetic oligonucleotide
  Target: ATXN2; (+) strand; PAM type: NRG; PAM sequence: CAG
aagtccagatggattcttca

SEQ ID NO: 40508 - DNA, 20 bp, Artificial Sequence
  Description of Artificial Sequence: Synthetic oligonucleotide
  Target: ATXN2; (+) strand; PAM type: NRG; PAM sequence: TGG
ccagatggattcttcacagt

SEQ ID NO: 40509 - DNA, 20 bp, Artificial Sequence
  Description of Artificial Sequence: Synthetic oligonucleotide
  Target: ATXN2; (+) strand; PAM type: NRG; PAM sequence: AAG
gatggattcttcacagttgg

SEQ ID NO: 40510 - DNA, 20 bp, Artificial Sequence
  Description of Artificial Sequence: Synthetic oligonucleotide
  Target: ATXN2; (+) strand; PAM type: NRG; PAM sequence: AGG
atggattcttcacagttgga

SEQ ID NO: 40511 - DNA, 20 bp, Artificial Sequence
  Description of Artificial Sequence: Synthetic oligonucleotide
  Target: ATXN2; (+) strand; PAM type: NRG; PAM sequence: AAG
aaatgcctttaaaaaaaaaa

SEQ ID NO: 40512 - DNA, 20 bp, Artificial Sequence
  Description of Artificial Sequence: Synthetic oligonucleotide
  Target: ATXN2; (+) strand; PAM type: NRG; PAM sequence: GAG
taaaaaaaaaaaagttaatt

SEQ ID NO: 40513 - DNA, 20 bp, Artificial Sequence
  Description of Artificial Sequence: Synthetic oligonucleotide
  Target: ATXN2; (+) strand; PAM type: NRG; PAM sequence: CAG
aaaaaaagttaattgagtaa

SEQ ID NO: 40514 - DNA, 20 bp, Artificial Sequence
  Description of Artificial Sequence: Synthetic oligonucleotide
  Target: ATXN2; (+) strand; PAM type: NRG; PAM sequence: AGG
aaaaaagttaattgagtaac

SEQ ID NO: 40515 - DNA, 20 bp, Artificial Sequence
  Description of Artificial Sequence: Synthetic oligonucleotide
  Target: ATXN2; (+) strand; PAM type: NRG; PAM sequence: TGG
aagttaattgagtaacagga

SEQ ID NO: 40516 - DNA, 20 bp, Artificial Sequence
  Description of Artificial Sequence: Synthetic oligonucleotide
  Target: ATXN2; (+) strand; PAM type: NRG; PAM sequence: AAG
attgagtaacaggatggtct

SEQ ID NO: 40517 - DNA, 20 bp, Artificial Sequence
  Description of Artificial Sequence: Synthetic oligonucleotide
  Target: ATXN2; (+) strand; PAM type: NRG; PAM sequence: CAG
taacaggatggtctaagttc

SEQ ID NO: 40518 - DNA, 20 bp, Artificial Sequence
  Description of Artificial Sequence: Synthetic oligonucleotide
  Target: ATXN2; (+) strand; PAM type: NRG; PAM sequence: AGG
aacaggatggtctaagttcc

SEQ ID NO: 40519 - DNA, 20 bp, Artificial Sequence
  Description of Artificial Sequence: Synthetic oligonucleotide
  Target: ATXN2; (+) strand; PAM type: NRG; PAM sequence: CAG
aagttccaggtttactcact

SEQ ID NO: 40520 - DNA, 20 bp, Artificial Sequence
  Description of Artificial Sequence: Synthetic oligonucleotide
  Target: ATXN2; (+) strand; PAM type: NRG; PAM sequence: TGG
tctttctcttgtttacatgc

SEQ ID NO: 40521 - DNA, 20 bp, Artificial Sequence
  Description of Artificial Sequence: Synthetic oligonucleotide
  Target: ATXN2; (+) strand; PAM type: NRG; PAM sequence: GGG
ctttctcttgtttacatgct

SEQ ID NO: 40522 - DNA, 20 bp, Artificial Sequence
  Description of Artificial Sequence: Synthetic oligonucleotide
  Target: ATXN2; (+) strand; PAM type: NRG; PAM sequence: TGG
ctcttgtttacatgctgggc

SEQ ID NO: 40523 - DNA, 20 bp, Artificial Sequence
  Description of Artificial Sequence: Synthetic oligonucleotide
  Target: ATXN2; (+) strand; PAM type: NRG; PAM sequence: AAG
ttgtttacatgctgggctgg

SEQ ID NO: 40524 - DNA, 20 bp, Artificial Sequence
  Description of Artificial Sequence: Synthetic oligonucleotide
  Target: ATXN2; (+) strand; PAM type: NRG; PAM sequence: TGG
ggctggaagtctgaacccct

SEQ ID NO: 40525 - DNA, 20 bp, Artificial Sequence
  Description of Artificial Sequence: Synthetic oligonucleotide
  Target: ATXN2; (+) strand; PAM type: NRG; PAM sequence: GGG
gctggaagtctgaacccctt

SEQ ID NO: 40526 - DNA, 20 bp, Artificial Sequence
  Description of Artificial Sequence: Synthetic oligonucleotide
  Target: ATXN2; (+) strand; PAM type: NRG; PAM sequence: AAG
ggaagtctgaaccccttggg

SEQ ID NO: 40527 - DNA, 20 bp, Artificial Sequence
  Description of Artificial Sequence: Synthetic oligonucleotide
  Target: ATXN2; (+) strand; PAM type: NRG; PAM sequence: CAG
aaccccttgggaagtgacct

SEQ ID NO: 40528 - DNA, 20 bp, Artificial Sequence
  Description of Artificial Sequence: Synthetic oligonucleotide
  Target: ATXN2; (+) strand; PAM type: NRG; PAM sequence: AGG
accccttgggaagtgacctc

SEQ ID NO: 40529 - DNA, 20 bp, Artificial Sequence
  Description of Artificial Sequence: Synthetic oligonucleotide
  Target: ATXN2; (+) strand; PAM type: NRG; PAM sequence: AAG
ctcttgtgctccgtgttact

SEQ ID NO: 40530 - DNA, 20 bp, Artificial Sequence
  Description of Artificial Sequence: Synthetic oligonucleotide
  Target: ATXN2; (+) strand; PAM type: NRG; PAM sequence: AAG
ctccgtgttactaagtattg

SEQ ID NO: 40531 - DNA, 20 bp, Artificial Sequence
  Description of Artificial Sequence: Synthetic oligonucleotide
  Target: ATXN2; (+) strand; PAM type: NRG; PAM sequence: AGG
tccgtgttactaagtattga

SEQ ID NO: 40532 - DNA, 20 bp, Artificial Sequence
  Description of Artificial Sequence: Synthetic oligonucleotide
  Target: ATXN2; (+) strand; PAM type: NRG; PAM sequence: GGG
ccgtgttactaagtattgaa

SEQ ID NO: 40533 - DNA, 20 bp, Artificial Sequence
  Description of Artificial Sequence: Synthetic oligonucleotide
  Target: ATXN2; (+) strand; PAM type: NRG; PAM sequence: GGG
cgtgttactaagtattgaag

SEQ ID NO: 40534 - DNA, 20 bp, Artificial Sequence
  Description of Artificial Sequence: Synthetic oligonucleotide
  Target: ATXN2; (+) strand; PAM type: NRG; PAM sequence: TGG
aagtattgaaggggaaatgc

SEQ ID NO: 40535 - DNA, 20 bp, Artificial Sequence
  Description of Artificial Sequence: Synthetic oligonucleotide
  Target: ATXN2; (+) strand; PAM type: NRG; PAM sequence: GGG
agtattgaaggggaaatgct

SEQ ID NO: 40536 - DNA, 20 bp, Artificial Sequence
  Description of Artificial Sequence: Synthetic oligonucleotide
  Target: ATXN2; (+) strand; PAM type: NRG; PAM sequence: GGG
gtattgaaggggaaatgctg

SEQ ID NO: 40537 - DNA, 20 bp, Artificial Sequence
  Description of Artificial Sequence: Synthetic oligonucleotide
  Target: ATXN2; (+) strand; PAM type: NRG; PAM sequence: CGG
ggggaaatgctggggctatt

SEQ ID NO: 40538 - DNA, 20 bp, Artificial Sequence
  Description of Artificial Sequence: Synthetic oligonucleotide
  Target: ATXN2; (+) strand; PAM type: NRG; PAM sequence: TGG
attcggcttgctgctgccac

SEQ ID NO: 40539 - DNA, 20 bp, Artificial Sequence
  Description of Artificial Sequence: Synthetic oligonucleotide
  Target: ATXN2; (+) strand; PAM type: NRG; PAM sequence: CAG
gcttgctgctgccactggta

SEQ ID NO: 40540 - DNA, 20 bp, Artificial Sequence
  Description of Artificial Sequence: Synthetic oligonucleotide
  Target: ATXN2; (+) strand; PAM type: NRG; PAM sequence: AAG
gctgctgctattttcaatga

SEQ ID NO: 40541 - DNA, 20 bp, Artificial Sequence
  Description of Artificial Sequence: Synthetic oligonucleotide
  Target: ATXN2; (+) strand; PAM type: NRG; PAM sequence: TAG
attttcaatgaaagaatcct

SEQ ID NO: 40542 - DNA, 20 bp, Artificial Sequence
  Description of Artificial Sequence: Synthetic oligonucleotide
  Target: ATXN2; (+) strand; PAM type: NRG; PAM sequence: TGG
atgaaagaatccttagcact

SEQ ID NO: 40543 - DNA, 20 bp, Artificial Sequence
  Description of Artificial Sequence: Synthetic oligonucleotide
  Target: ATXN2; (+) strand; PAM type: NRG; PAM sequence: TAG
tctccctctctatttttgtt

SEQ ID NO: 40544 - DNA, 20 bp, Artificial Sequence
  Description of Artificial Sequence: Synthetic oligonucleotide
  Target: ATXN2; (+) strand; PAM type: NRG; PAM sequence: TAG
ccctctctatttttgtttag

SEQ ID NO: 40545 - DNA, 20 bp, Artificial Sequence
  Description of Artificial Sequence: Synthetic oligonucleotide
  Target: ATXN2; (+) strand; PAM type: NRG; PAM sequence: TAG
tttgtttagtagttgatcca

SEQ ID NO: 40546 - DNA, 20 bp, Artificial Sequence
  Description of Artificial Sequence: Synthetic oligonucleotide
  Target: ATXN2; (+) strand; PAM type: NRG; PAM sequence: CAG
tagtagttgatccatagatt

SEQ ID NO: 40547 - DNA, 20 bp, Artificial Sequence
  Description of Artificial Sequence: Synthetic oligonucleotide
  Target: ATXN2; (+) strand; PAM type: NRG; PAM sequence: AAG
tagttgatccatagattcag

SEQ ID NO: 40548 - DNA, 20 bp, Artificial Sequence
  Description of Artificial Sequence: Synthetic oligonucleotide
  Target: ATXN2; (+) strand; PAM type: NRG; PAM sequence: TAG
ttgatccatagattcagaag

SEQ ID NO: 40549 - DNA, 20 bp, Artificial Sequence
  Description of Artificial Sequence: Synthetic oligonucleotide
  Target: ATXN2; (+) strand; PAM type: NRG; PAM sequence: TGG
atagattcagaagtagaact

SEQ ID NO: 40550 - DNA, 20 bp, Artificial Sequence
  Description of Artificial Sequence: Synthetic oligonucleotide
  Target: ATXN2; (+) strand; PAM type: NRG; PAM sequence: AAG
aacttggctgtaactaaata

SEQ ID NO: 40551 - DNA, 20 bp, Artificial Sequence
  Description of Artificial Sequence: Synthetic oligonucleotide
  Target: ATXN2; (+) strand; PAM type: NRG; PAM sequence: AGG
acttggctgtaactaaataa

SEQ ID NO: 40552 - DNA, 20 bp, Artificial Sequence
  Description of Artificial Sequence: Synthetic oligonucleotide
  Target: ATXN2; (+) strand; PAM type: NRG; PAM sequence: TAG
ttaaatatcttaaataactt

SEQ ID NO: 40553 - DNA, 20 bp, Artificial Sequence
  Description of Artificial Sequence: Synthetic oligonucleotide
  Target: ATXN2; (+) strand; PAM type: NRG; PAM sequence: GAG
tagtaatacatttttgccat

SEQ ID NO: 40554 - DNA, 20 bp, Artificial Sequence
  Description of Artificial Sequence: Synthetic oligonucleotide
  Target: ATXN2; (+) strand; PAM type: NRG; PAM sequence: AAG
tacatttttgccatgagcac

SEQ ID NO: 40555 - DNA, 20 bp, Artificial Sequence
  Description of Artificial Sequence: Synthetic oligonucleotide
  Target: ATXN2; (+) strand; PAM type: NRG; PAM sequence: AAG
acgcatgaaatgttctgaat

SEQ ID NO: 40556 - DNA, 20 bp, Artificial Sequence
  Description of Artificial Sequence: Synthetic oligonucleotide
  Target: ATXN2; (+) strand; PAM type: NRG; PAM sequence: AGG
cgcatgaaatgttctgaata

SEQ ID NO: 40557 - DNA, 20 bp, Artificial Sequence
  Description of Artificial Sequence: Synthetic oligonucleotide
  Target: ATXN2; (+) strand; PAM type: NRG; PAM sequence: AAG
taaggcttttttcatacttt

SEQ ID NO: 40558 - DNA, 20 bp, Artificial Sequence
  Description of Artificial Sequence: Synthetic oligonucleotide
  Target: ATXN2; (+) strand; PAM type: NRG; PAM sequence: GAG
aggcttttttcatactttaa

SEQ ID NO: 40559 - DNA, 20 bp, Artificial Sequence
  Description of Artificial Sequence: Synthetic oligonucleotide
  Target: ATXN2; (+) strand; PAM type: NRG; PAM sequence: CAG
ttactataaactaacaataa

SEQ ID NO: 40560 - DNA, 20 bp, Artificial Sequence
  Description of Artificial Sequence: Synthetic oligonucleotide
  Target: ATXN2; (+) strand; PAM type: NRG; PAM sequence: GAG
actataaactaacaataaca

SEQ ID NO: 40561 - DNA, 20 bp, Artificial Sequence
  Description of Artificial Sequence: Synthetic oligonucleotide
  Target: ATXN2; (+) strand; PAM type: NRG; PAM sequence: TAG
acaataacagagtacctata

SEQ ID NO: 40562 - DNA, 20 bp, Artificial Sequence
  Description of Artificial Sequence: Synthetic oligonucleotide
  Target: ATXN2; (+) strand; PAM type: NRG; PAM sequence: CAG
gtacctatatagcacaacca

SEQ ID NO: 40563 - DNA, 20 bp, Artificial Sequence
  Description of Artificial Sequence: Synthetic oligonucleotide
  Target: ATXN2; (+) strand; PAM type: NRG; PAM sequence: AAG
tagcacaaccacagtcacca

SEQ ID NO: 40564 - DNA, 20 bp, Artificial Sequence
  Description of Artificial Sequence: Synthetic oligonucleotide
  Target: ATXN2; (+) strand; PAM type: NRG; PAM sequence: TAG
accaaagcactcaaatgtcc

SEQ ID NO: 40565 - DNA, 20 bp, Artificial Sequence
  Description of Artificial Sequence: Synthetic oligonucleotide
  Target: ATXN2; (+) strand; PAM type: NRG; PAM sequence: AAG
ctcaaatgtcctagcctcta

SEQ ID NO: 40566 - DNA, 20 bp, Artificial Sequence
  Description of Artificial Sequence: Synthetic oligonucleotide
  Target: ATXN2; (+) strand; PAM type: NRG; PAM sequence: GAG
tctaaagttcaatatttact

SEQ ID NO: 40567 - DNA, 20 bp, Artificial Sequence
  Description of Artificial Sequence: Synthetic oligonucleotide
  Target: ATXN2; (+) strand; PAM type: NRG; PAM sequence: CAG
actgagtgcttaccacatgt

SEQ ID NO: 40568 - DNA, 20 bp, Artificial Sequence
  Description of Artificial Sequence: Synthetic oligonucleotide
  Target: ATXN2; (+) strand; PAM type: NRG; PAM sequence: TGG
atgtcagaaattgtgcctgc

SEQ ID NO: 40569 - DNA, 20 bp, Artificial Sequence
  Description of Artificial Sequence: Synthetic oligonucleotide
  Target: ATXN2; (+) strand; PAM type: NRG; PAM sequence: GGG
tgtcagaaattgtgcctgct

SEQ ID NO: 40570 - DNA, 20 bp, Artificial Sequence
  Description of Artificial Sequence: Synthetic oligonucleotide
  Target: ATXN2; (+) strand; PAM type: NRG; PAM sequence: GAG
agaaattgtgcctgctgggt

SEQ ID NO: 40571 - DNA, 20 bp, Artificial Sequence
  Description of Artificial Sequence: Synthetic oligonucleotide
  Target: ATXN2; (+) strand; PAM type: NRG; PAM sequence: TAG
tgggtgagaaaaatatgaaa

SEQ ID NO: 40572 - DNA, 20 bp, Artificial Sequence
  Description of Artificial Sequence: Synthetic oligonucleotide
  Target: ATXN2; (+) strand; PAM type: NRG; PAM sequence: AAG
cttatacttgtcatttaaat

SEQ ID NO: 40573 - DNA, 20 bp, Artificial Sequence
  Description of Artificial Sequence: Synthetic oligonucleotide
  Target: ATXN2; (+) strand; PAM type: NRG; PAM sequence: CAG
acttgtcatttaaataagat

SEQ ID NO: 40574 - DNA, 20 bp, Artificial Sequence
  Description of Artificial Sequence: Synthetic oligonucleotide
  Target: ATXN2; (+) strand; PAM type: NRG; PAM sequence: GAG
cagacacttcacaataaaat

SEQ ID NO: 40575 - DNA, 20 bp, Artificial Sequence
  Description of Artificial Sequence: Synthetic oligonucleotide
  Target: ATXN2; (+) strand; PAM type: NRG; PAM sequence: AAG
caataaaatgagtaaatgct

SEQ ID NO: 40576 - DNA, 20 bp, Artificial Sequence
  Description of Artificial Sequence: Synthetic oligonucleotide
  Target: ATXN2; (+) strand; PAM type: NRG; PAM sequence: GAG
ataaaatgagtaaatgctaa

SEQ ID NO: 40577 - DNA, 20 bp, Artificial Sequence
  Description of Artificial Sequence: Synthetic oligonucleotide
  Target: ATXN2; (+) strand; PAM type: NRG; PAM sequence: GAG
aaaatgagtaaatgctaaga

SEQ ID NO: 40578 - DNA, 20 bp, Artificial Sequence
  Description of Artificial Sequence: Synthetic oligonucleotide
  Target: ATXN2; (+) strand; PAM type: NRG; PAM sequence: TAG
gtaaatgctaagagagtcta

SEQ ID NO: 40579 - DNA, 20 bp, Artificial Sequence
  Description of Artificial Sequence: Synthetic oligonucleotide
  Target: ATXN2; (+) strand; PAM type: NRG; PAM sequence: AAG
gctaagagagtctatagaaa

SEQ ID NO: 40580 - DNA, 20 bp, Artificial Sequence
  Description of Artificial Sequence: Synthetic oligonucleotide
  Target: ATXN2; (+) strand; PAM type: NRG; PAM sequence: AAG
agaaaaagcaacctataaaa

SEQ ID NO: 40581 - DNA, 20 bp, Artificial Sequence
  Description of Artificial Sequence: Synthetic oligonucleotide
  Target: ATXN2; (+) strand; PAM type: NRG; PAM sequence: AAG
aaagcaacctataaaaaaga

SEQ ID NO: 40582 - DNA, 20 bp, Artificial Sequence
  Description of Artificial Sequence: Synthetic oligonucleotide
  Target: ATXN2; (+) strand; PAM type: NRG; PAM sequence: AGG
aagcaacctataaaaaagaa

SEQ ID NO: 40583 - DNA, 20 bp, Artificial Sequence
  Description of Artificial Sequence: Synthetic oligonucleotide
  Target: ATXN2; (+) strand; PAM type: NRG; PAM sequence: CAG
tataaaaaagaaaggtttct

SEQ ID NO: 40584 - DNA, 20 bp, Artificial Sequence
  Description of Artificial Sequence: Synthetic oligonucleotide
  Target: ATXN2; (+) strand; PAM type: NRG; PAM sequence: AAG
aaaagaaaggtttctcagta

SEQ ID NO: 40585 - DNA, 20 bp, Artificial Sequence
  Description of Artificial Sequence: Synthetic oligonucleotide
  Target: ATXN2; (+) strand; PAM type: NRG; PAM sequence: CAG
aaggtttctcagtaaagtgt

SEQ ID NO: 40586 - DNA, 20 bp, Artificial Sequence
  Description of Artificial Sequence: Synthetic oligonucleotide
  Target: ATXN2; (+) strand; PAM type: NRG; PAM sequence: TAG
tttctcagtaaagtgtcagc

SEQ ID NO: 40587 - DNA, 20 bp, Artificial Sequence
  Description of Artificial Sequence: Synthetic oligonucleotide
  Target: ATXN2; (+) strand; PAM type: NRG; PAM sequence: AAG
agtaaagtgtcagctagtct

SEQ ID NO: 40588 - DNA, 20 bp, Artificial Sequence
  Description of Artificial Sequence: Synthetic oligonucleotide
  Target: ATXN2; (+) strand; PAM type: NRG; PAM sequence: AGG
gtaaagtgtcagctagtcta

SEQ ID NO: 40589 - DNA, 20 bp, Artificial Sequence
  Description of Artificial Sequence: Synthetic oligonucleotide
  Target: ATXN2; (+) strand; PAM type: NRG; PAM sequence: AAG
tcagctagtctaaggtgtga

SEQ ID NO: 40590 - DNA, 20 bp, Artificial Sequence
  Description of Artificial Sequence: Synthetic oligonucleotide
  Target: ATXN2; (+) strand; PAM type: NRG; PAM sequence: AAG
gctagtctaaggtgtgaaag

SEQ ID NO: 40591 - DNA, 20 bp, Artificial Sequence
  Description of Artificial Sequence: Synthetic oligonucleotide
  Target: ATXN2; (+) strand; PAM type: NRG; PAM sequence: TAG
tctaaggtgtgaaagaagtt

SEQ ID NO: 40592 - DNA, 20 bp, Artificial Sequence
  Description of Artificial Sequence: Synthetic oligonucleotide
  Target: ATXN2; (+) strand; PAM type: NRG; PAM sequence: AGG
ctaaggtgtgaaagaagttt

SEQ ID NO: 40593 - DNA, 20 bp, Artificial Sequence
  Description of Artificial Sequence: Synthetic oligonucleotide
  Target: ATXN2; (+) strand; PAM type: NRG; PAM sequence: AAG
ggtgtgaaagaagtttagga

SEQ ID NO: 40594 - DNA, 20 bp, Artificial Sequence
  Description of Artificial Sequence: Synthetic oligonucleotide
  Target: ATXN2; (+) strand; PAM type: NRG; PAM sequence: AGG
gtgtgaaagaagtttaggaa

SEQ ID NO: 40595 - DNA, 20 bp, Artificial Sequence
  Description of Artificial Sequence: Synthetic oligonucleotide
  Target: ATXN2; (+) strand; PAM type: NRG; PAM sequence: TGG
aagaagtttaggaaaggtgt

SEQ ID NO: 40596 - DNA, 20 bp, Artificial Sequence
  Description of Artificial Sequence: Synthetic oligonucleotide
  Target: ATXN2; (+) strand; PAM type: NRG; PAM sequence: GGG
agaagtttaggaaaggtgtt

SEQ ID NO: 40597 - DNA, 20 bp, Artificial Sequence
  Description of Artificial Sequence: Synthetic oligonucleotide
  Target: ATXN2; (+) strand; PAM type: NRG; PAM sequence: TGG
gtttaggaaaggtgttggga

SEQ ID NO: 40598 - DNA, 20 bp, Artificial Sequence
  Description of Artificial Sequence: Synthetic oligonucleotide
  Target: ATXN2; (+) strand; PAM type: NRG; PAM sequence: GAG
ttaggaaaggtgttgggatg

SEQ ID NO: 40599 - DNA, 20 bp, Artificial Sequence
  Description of Artificial Sequence: Synthetic oligonucleotide
  Target: ATXN2; (+) strand; PAM type: NRG; PAM sequence: TAG
aaaggtgttgggatggagaa

SEQ ID NO: 40600 - DNA, 20 bp, Artificial Sequence
  Description of Artificial Sequence: Synthetic oligonucleotide
  Target: ATXN2; (+) strand; PAM type: NRG; PAM sequence: AAG
gttgggatggagaatagtct

SEQ ID NO: 40601 - DNA, 20 bp, Artificial Sequence
  Description of Artificial Sequence: Synthetic oligonucleotide
  Target: ATXN2; (+) strand; PAM type: NRG; PAM sequence: AAG
atggagaatagtctaagtaa

SEQ ID NO: 40602 - DNA, 20 bp, Artificial Sequence
  Description of Artificial Sequence: Synthetic oligonucleotide
  Target: ATXN2; (+) strand; PAM type: NRG; PAM sequence: AGG
tggagaatagtctaagtaaa

SEQ ID NO: 40603 - DNA, 20 bp, Artificial Sequence
  Description of Artificial Sequence: Synthetic oligonucleotide
  Target: ATXN2; (+) strand; PAM type: NRG; PAM sequence: AAG
agaatagtctaagtaaaagg

SEQ ID NO: 40604 - DNA, 20 bp, Artificial Sequence
  Description of Artificial Sequence: Synthetic oligonucleotide
  Target: ATXN2; (+) strand; PAM type: NRG; PAM sequence: GAG
aatagtctaagtaaaaggaa

SEQ ID NO: 40605 - DNA, 20 bp, Artificial Sequence
  Description of Artificial Sequence: Synthetic oligonucleotide
  Target: ATXN2; (+) strand; PAM type: NRG; PAM sequence: AAG
agagtatgtttaaaaatcca

SEQ ID NO: 40606 - DNA, 20 bp, Artificial Sequence
  Description of Artificial Sequence: Synthetic oligonucleotide
  Target: ATXN2; (+) strand; PAM type: NRG; PAM sequence: AAG
atgtttaaaaatccaaagaa

SEQ ID NO: 40607 - DNA, 20 bp, Artificial Sequence
  Description of Artificial Sequence: Synthetic oligonucleotide
  Target: ATXN2; (+) strand; PAM type: NRG; PAM sequence: AGG
tgtttaaaaatccaaagaaa

SEQ ID NO: 40608 - DNA, 20 bp, Artificial Sequence
  Description of Artificial Sequence: Synthetic oligonucleotide
  Target: ATXN2; (+) strand; PAM type: NRG; PAM sequence: GGG
gtttaaaaatccaaagaaaa

SEQ ID NO: 40609 - DNA, 20 bp, Artificial Sequence
  Description of Artificial Sequence: Synthetic oligonucleotide
  Target: ATXN2; (+) strand; PAM type: NRG; PAM sequence: GAG
ttaaaaatccaaagaaaagg

SEQ ID NO: 40610 - DNA, 20 bp, Artificial Sequence
  Description of Artificial Sequence: Synthetic oligonucleotide
  Target: ATXN2; (+) strand; PAM type: NRG; PAM sequence: AAG
aaaatccaaagaaaagggag

SEQ ID NO: 40611 - DNA, 20 bp, Artificial Sequence
  Description of Artificial Sequence: Synthetic oligonucleotide
  Target: ATXN2; (+) strand; PAM type: NRG; PAM sequence: TGG
tccaaagaaaagggagaagc

SEQ ID NO: 40612 - DNA, 20 bp, Artificial Sequence
  Description of Artificial Sequence: Synthetic oligonucleotide
  Target: ATXN2; (+) strand; PAM type: NRG; PAM sequence: TAG
ggctctatcacataaaacaa

SEQ ID NO: 40613 - DNA, 20 bp, Artificial Sequence
  Description of Artificial Sequence: Synthetic oligonucleotide
  Target: ATXN2; (+) strand; PAM type: NRG; PAM sequence: TGG
acataaaacaatagcaccaa

SEQ ID NO: 40614 - DNA, 20 bp, Artificial Sequence
  Description of Artificial Sequence: Synthetic oligonucleotide
  Target: ATXN2; (+) strand; PAM type: NRG; PAM sequence: GGG
cataaaacaatagcaccaat

SEQ ID NO: 40615 - DNA, 20 bp, Artificial Sequence
  Description of Artificial Sequence: Synthetic oligonucleotide
  Target: ATXN2; (+) strand; PAM type: NRG; PAM sequence: GGG
ataaaacaatagcaccaatg

SEQ ID NO: 40616 - DNA, 20 bp, Artificial Sequence
  Description of Artificial Sequence: Synthetic oligonucleotide
  Target: ATXN2; (+) strand; PAM type: NRG; PAM sequence: GGG
taaaacaatagcaccaatgg

SEQ ID NO: 40617 - DNA, 20 bp, Artificial Sequence
  Description of Artificial Sequence: Synthetic oligonucleotide
  Target: ATXN2; (+) strand; PAM type: NRG; PAM sequence: CGG
acaatagcaccaatgggggc

SEQ ID NO: 40618 - DNA, 20 bp, Artificial Sequence
  Description of Artificial Sequence: Synthetic oligonucleotide
  Target: ATXN2; (+) strand; PAM type: NRG; PAM sequence: GGG
caatagcaccaatgggggcc

SEQ ID NO: 40619 - DNA, 20 bp, Artificial Sequence
  Description of Artificial Sequence: Synthetic oligonucleotide
  Target: ATXN2; (+) strand; PAM type: NRG; PAM sequence: CGG
gcaccaatgggggccgggca

SEQ ID NO: 40620 - DNA, 20 bp, Artificial Sequence
  Description of Artificial Sequence: Synthetic oligonucleotide
  Target: ATXN2; (+) strand; PAM type: NRG; PAM sequence: TGG
ccaatgggggccgggcacgg

SEQ ID NO: 40621 - DNA, 20 bp, Artificial Sequence
  Description of Artificial Sequence: Synthetic oligonucleotide
  Target: ATXN2; (+) strand; PAM type: NRG; PAM sequence: CAG
gtggctcacgcctgtaatcc

SEQ ID NO: 40622 - DNA, 20 bp, Artificial Sequence
  Description of Artificial Sequence: Synthetic oligonucleotide
  Target: ATXN2; (+) strand; PAM type: NRG; PAM sequence: TGG
cgcctgtaatcccagcactt

SEQ ID NO: 40623 - DNA, 20 bp, Artificial Sequence
  Description of Artificial Sequence: Synthetic oligonucleotide
  Target: ATXN2; (+) strand; PAM type: NRG; PAM sequence: GGG
gcctgtaatcccagcacttt

SEQ ID NO: 40624 - DNA, 20 bp, Artificial Sequence
  Description of Artificial Sequence: Synthetic oligonucleotide
  Target: ATXN2; (+) strand; PAM type: NRG; PAM sequence: GAG
ctgtaatcccagcactttgg

SEQ ID NO: 40625 - DNA, 20 bp, Artificial Sequence
  Description of Artificial Sequence: Synthetic oligonucleotide
  Target: ATXN2; (+) strand; PAM type: NRG; PAM sequence: AGG
tgtaatcccagcactttggg

SEQ ID NO: 40626 - DNA, 20 bp, Artificial Sequence
  Description of Artificial Sequence: Synthetic oligonucleotide
  Target: ATXN2; (+) strand; PAM type: NRG; PAM sequence: AAG
tcccagcactttgggaggcc

SEQ ID NO: 40627 - DNA, 20 bp, Artificial Sequence
  Description of Artificial Sequence: Synthetic oligonucleotide
  Target: ATXN2; (+) strand; PAM type: NRG; PAM sequence: AGG
cccagcactttgggaggcca

SEQ ID NO: 40628 - DNA, 20 bp, Artificial Sequence
  Description of Artificial Sequence: Synthetic oligonucleotide
  Target: ATXN2; (+) strand; PAM type: NRG; PAM sequence: CAG
agcactttgggaggccaagg

SEQ ID NO: 40629 - DNA, 20 bp, Artificial Sequence
  Description of Artificial Sequence: Synthetic oligonucleotide
  Target: ATXN2; (+) strand; PAM type: NRG; PAM sequence: AGG
gcactttgggaggccaaggc

SEQ ID NO: 40630 - DNA, 20 bp, Artificial Sequence
  Description of Artificial Sequence: Synthetic oligonucleotide
  Target: ATXN2; (+) strand; PAM type: NRG; PAM sequence: CGG
ctttgggaggccaaggcagg

SEQ ID NO: 40631 - DNA, 20 bp, Artificial Sequence
  Description of Artificial Sequence: Synthetic oligonucleotide
  Target: ATXN2; (+) strand; PAM type: NRG; PAM sequence: GAG
ggccaaggcaggcggatcac

SEQ ID NO: 40632 - DNA, 20 bp, Artificial Sequence
  Description of Artificial Sequence: Synthetic oligonucleotide
  Target: ATXN2; (+) strand; PAM type: NRG; PAM sequence: AGG
gccaaggcaggcggatcacg

SEQ ID NO: 40633 - DNA, 20 bp, Artificial Sequence
  Description of Artificial Sequence: Synthetic oligonucleotide
  Target: ATXN2; (+) strand; PAM type: NRG; PAM sequence: CAG
aggcaggcggatcacgaggt

SEQ ID NO: 40634 - DNA, 20 bp, Artificial Sequence
  Description of Artificial Sequence: Synthetic oligonucleotide
  Target: ATXN2; (+) strand; PAM type: NRG; PAM sequence: AGG
ggcaggcggatcacgaggtc

SEQ ID NO: 40635 - DNA, 20 bp, Artificial Sequence
  Description of Artificial Sequence: Synthetic oligonucleotide
  Target: ATXN2; (+) strand; PAM type: NRG; PAM sequence: GAG
caggcggatcacgaggtcag

SEQ ID NO: 40636 - DNA, 20 bp, Artificial Sequence
  Description of Artificial Sequence: Synthetic oligonucleotide
  Target: ATXN2; (+) strand; PAM type: NRG; PAM sequence: GAG
gatcacgaggtcaggagatc

SEQ ID NO: 40637 - DNA, 20 bp, Artificial Sequence
  Description of Artificial Sequence: Synthetic oligonucleotide
  Target: ATXN2; (+) strand; PAM type: NRG; PAM sequence: TGG
tcaggagatcgagaccatct

SEQ ID NO: 40638 - DNA, 20 bp, Artificial Sequence
  Description of Artificial Sequence: Synthetic oligonucleotide
  Target: ATXN2; (+) strand; PAM type: NRG; PAM sequence: TAG
tctactaaaaatacaaaaat

SEQ ID NO: 40639 - DNA, 20 bp, Artificial Sequence
  Description of Artificial Sequence: Synthetic oligonucleotide
  Target: ATXN2; (+) strand; PAM type: NRG; PAM sequence: CAG
ctaaaaatacaaaaattagc

SEQ ID NO: 40640 - DNA, 20 bp, Artificial Sequence
  Description of Artificial Sequence: Synthetic oligonucleotide
  Target: ATXN2; (+) strand; PAM type: NRG; PAM sequence: AGG
taaaaatacaaaaattagcc

SEQ ID NO: 40641 - DNA, 20 bp, Artificial Sequence
  Description of Artificial Sequence: Synthetic oligonucleotide
  Target: ATXN2; (+) strand; PAM type: NRG; PAM sequence: TGG
atacaaaaattagccaggca

SEQ ID NO: 40642 - DNA, 20 bp, Artificial Sequence
  Description of Artificial Sequence: Synthetic oligonucleotide
  Target: ATXN2; (+) strand; PAM type: NRG; PAM sequence: TGG
caaaaattagccaggcatgg

SEQ ID NO: 40643 - DNA, 20 bp, Artificial Sequence
  Description of Artificial Sequence: Synthetic oligonucleotide
  Target: ATXN2; (+) strand; PAM type: NRG; PAM sequence: CAG
aaattagccaggcatggtgg

SEQ ID NO: 40644 - DNA, 20 bp, Artificial Sequence
  Description of Artificial Sequence: Synthetic oligonucleotide
  Target: ATXN2; (+) strand; PAM type: NRG; PAM sequence: AGG
aattagccaggcatggtggc

SEQ ID NO: 40645 - DNA, 20 bp, Artificial Sequence
  Description of Artificial Sequence: Synthetic oligonucleotide
  Target: ATXN2; (+) strand; PAM type: NRG; PAM sequence: TAG
ggcatggtggcaggcgccta

SEQ ID NO: 40646 - DNA, 20 bp, Artificial Sequence
  Description of Artificial Sequence: Synthetic oligonucleotide
  Target: ATXN2; (+) strand; PAM type: NRG; PAM sequence: CGG
cgcctatagtccctgctact

SEQ ID NO: 40647 - DNA, 20 bp, Artificial Sequence
  Description of Artificial Sequence: Synthetic oligonucleotide
  Target: ATXN2; (+) strand; PAM type: NRG; PAM sequence: GGG
gcctatagtccctgctactc

SEQ ID NO: 40648 - DNA, 20 bp, Artificial Sequence
  Description of Artificial Sequence: Synthetic oligonucleotide
  Target: ATXN2; (+) strand; PAM type: NRG; PAM sequence: GAG
ctatagtccctgctactcgg

SEQ ID NO: 40649 - DNA, 20 bp, Artificial Sequence
  Description of Artificial Sequence: Synthetic oligonucleotide
  Target: ATXN2; (+) strand; PAM type: NRG; PAM sequence: AGG
tatagtccctgctactcggg

SEQ ID NO: 40650 - DNA, 20 bp, Artificial Sequence
  Description of Artificial Sequence: Synthetic oligonucleotide
  Target: ATXN2; (+) strand; PAM type: NRG; PAM sequence: GAG
tccctgctactcgggaggct

SEQ ID NO: 40651 - DNA, 20 bp, Artificial Sequence
  Description of Artificial Sequence: Synthetic oligonucleotide
  Target: ATXN2; (+) strand; PAM type: NRG; PAM sequence: AGG
ccctgctactcgggaggctg

SEQ ID NO: 40652 - DNA, 20 bp, Artificial Sequence
  Description of Artificial Sequence: Synthetic oligonucleotide
  Target: ATXN2; (+) strand; PAM type: NRG; PAM sequence: TAG
tgctactcgggaggctgagg

SEQ ID NO: 40653 - DNA, 20 bp, Artificial Sequence
  Description of Artificial Sequence: Synthetic oligonucleotide
  Target: ATXN2; (+) strand; PAM type: NRG; PAM sequence: AGG
gctactcgggaggctgaggt

SEQ ID NO: 40654 - DNA, 20 bp, Artificial Sequence
  Description of Artificial Sequence: Synthetic oligonucleotide
  Target: ATXN2; (+) strand; PAM type: NRG; PAM sequence: GAG
tactcgggaggctgaggtag

SEQ ID NO: 40655 - DNA, 20 bp, Artificial Sequence
  Description of Artificial Sequence: Synthetic oligonucleotide
  Target: ATXN2; (+) strand; PAM type: NRG; PAM sequence: TGG
gggaggctgaggtaggagaa

SEQ ID NO: 40656 - DNA, 20 bp, Artificial Sequence
  Description of Artificial Sequence: Synthetic oligonucleotide
  Target: ATXN2; (+) strand; PAM type: NRG; PAM sequence: TGG
gtaggagaatggtgtgaacc

SEQ ID NO: 40657 - DNA, 20 bp, Artificial Sequence
  Description of Artificial Sequence: Synthetic oligonucleotide
  Target: ATXN2; (+) strand; PAM type: NRG; PAM sequence: GGG
taggagaatggtgtgaacct

SEQ ID NO: 40658 - DNA, 20 bp, Artificial Sequence
  Description of Artificial Sequence: Synthetic oligonucleotide
  Target: ATXN2; (+) strand; PAM type: NRG; PAM sequence: AAG
gagaatggtgtgaacctggg

SEQ ID NO: 40659 - DNA, 20 bp, Artificial Sequence
  Description of Artificial Sequence: Synthetic oligonucleotide
  Target: ATXN2; (+) strand; PAM type: NRG; PAM sequence: TGG
aatggtgtgaacctgggaag

SEQ ID NO: 40660 - DNA, 20 bp, Artificial Sequence
  Description of Artificial Sequence: Synthetic oligonucleotide
  Target: ATXN2; (+) strand; PAM type: NRG; PAM sequence: GAG
tggtgtgaacctgggaagtg

SEQ ID NO: 40661 - DNA, 20 bp, Artificial Sequence
  Description of Artificial Sequence: Synthetic oligonucleotide
  Target: ATXN2; (+) strand; PAM type: NRG; PAM sequence: CAG
gaacctgggaagtggagctg

SEQ ID NO: 40662 - DNA, 20 bp, Artificial Sequence
  Description of Artificial Sequence: Synthetic oligonucleotide
  Target: ATXN2; (+) strand; PAM type: NRG; PAM sequence: GAG
ctgggaagtggagctgcagt

SEQ ID NO: 40663 - DNA, 20 bp, Artificial Sequence
  Description of Artificial Sequence: Synthetic oligonucleotide
  Target: ATXN2; (+) strand; PAM type: NRG; PAM sequence: AAG
aagtggagctgcagtgagcc

SEQ ID NO: 40664 - DNA, 20 bp, Artificial Sequence
  Description of Artificial Sequence: Synthetic oligonucleotide
  Target: ATXN2; (+) strand; PAM type: NRG; PAM sequence: CAG
aagatcacgccactgcactc

SEQ ID NO: 40665 - DNA, 20 bp, Artificial Sequence
  Description of Artificial Sequence: Synthetic oligonucleotide
  Target: ATXN2; (+) strand; PAM type: NRG; PAM sequence: TGG
cacgccactgcactccagcc

SEQ ID NO: 40666 - DNA, 20 bp, Artificial Sequence
  Description of Artificial Sequence: Synthetic oligonucleotide
  Target: ATXN2; (+) strand; PAM type: NRG; PAM sequence: GGG
acgccactgcactccagcct

SEQ ID NO: 40667 - DNA, 20 bp, Artificial Sequence
  Description of Artificial Sequence: Synthetic oligonucleotide
  Target: ATXN2; (+) strand; PAM type: NRG; PAM sequence: CAG
ctgcactccagcctgggtga

SEQ ID NO: 40668 - DNA, 20 bp, Artificial Sequence
  Description of Artificial Sequence: Synthetic oligonucleotide
  Target: ATXN2; (+) strand; PAM type: NRG; PAM sequence: GAG
gcactccagcctgggtgaca

SEQ ID NO: 40669 - DNA, 20 bp, Artificial Sequence
  Description of Artificial Sequence: Synthetic oligonucleotide
  Target: ATXN2; (+) strand; PAM type: NRG; PAM sequence: GAG
tccagcctgggtgacagagc

SEQ ID NO: 40670 - DNA, 20 bp, Artificial Sequence
  Description of Artificial Sequence: Synthetic oligonucleotide
  Target: ATXN2; (+) strand; PAM type: NRG; PAM sequence: AAG
ccgtctcaaaaaaaaaaaaa

SEQ ID NO: 40671 - DNA, 20 bp, Artificial Sequence
  Description of Artificial Sequence: Synthetic oligonucleotide
  Target: ATXN2; (+) strand; PAM type: NRG; PAM sequence: TAG
ctcaaaaaaaaaaaaaaaga

SEQ ID NO: 40672 - DNA, 20 bp, Artificial Sequence
  Description of Artificial Sequence: Synthetic oligonucleotide
  Target: ATXN2; (+) strand; PAM type: NRG; PAM sequence: GAG
aaaaaaaagatagcaccaat

SEQ ID NO: 40673 - DNA, 20 bp, Artificial Sequence
  Description of Artificial Sequence: Synthetic oligonucleotide
  Target: ATXN2; (+) strand; PAM type: NRG; PAM sequence: TGG
aaaagatagcaccaatgagc

SEQ ID NO: 40674 - DNA, 20 bp, Artificial Sequence
  Description of Artificial Sequence: Synthetic oligonucleotide
  Target: ATXN2; (+) strand; PAM type: NRG; PAM sequence: GGG
aaagatagcaccaatgagct

SEQ ID NO: 40675 - DNA, 20 bp, Artificial Sequence
  Description of Artificial Sequence: Synthetic oligonucleotide
  Target: ATXN2; (+) strand; PAM type: NRG; PAM sequence: CAG
tagcaccaatgagctgggca

SEQ ID NO: 40676 - DNA, 20 bp, Artificial Sequence
  Description of Artificial Sequence: Synthetic oligonucleotide
  Target: ATXN2; (+) strand; PAM type: NRG; PAM sequence: TAG
caccaatgagctgggcacag

SEQ ID NO: 40677 - DNA, 20 bp, Artificial Sequence
  Description of Artificial Sequence: Synthetic oligonucleotide
  Target: ATXN2; (+) strand; PAM type: NRG; PAM sequence: CAG
gtagctcatcactgtaattc

SEQ ID NO: 40678 - DNA, 20 bp, Artificial Sequence
  Description of Artificial Sequence: Synthetic oligonucleotide
  Target: ATXN2; (+) strand; PAM type: NRG; PAM sequence: TGG
tcactgtaattccagccctt

SEQ ID NO: 40679 - DNA, 20 bp, Artificial Sequence
  Description of Artificial Sequence: Synthetic oligonucleotide
  Target: ATXN2; (+) strand; PAM type: NRG; PAM sequence: GGG
cactgtaattccagcccttt

SEQ ID NO: 40680 - DNA, 20 bp, Artificial Sequence
  Description of Artificial Sequence: Synthetic oligonucleotide
  Target: ATXN2; (+) strand; PAM type: NRG; PAM sequence: GAG
ctgtaattccagccctttgg

SEQ ID NO: 40681 - DNA, 20 bp, Artificial Sequence
  Description of Artificial Sequence: Synthetic oligonucleotide
  Target: ATXN2; (+) strand; PAM type: NRG; PAM sequence: AGG
tgtaattccagccctttggg

SEQ ID NO: 40682 - DNA, 20 bp, Artificial Sequence
  Description of Artificial Sequence: Synthetic oligonucleotide
  Target: ATXN2; (+) strand; PAM type: NRG; PAM sequence: GAG
ttccagccctttgggaggct

SEQ ID NO: 40683 - DNA, 20 bp, Artificial Sequence
  Description of Artificial Sequence: Synthetic oligonucleotide
  Target: ATXN2; (+) strand; PAM type: NRG; PAM sequence: AAG
gccctttgggaggctgagac

SEQ ID NO: 40684 - DNA, 20 bp, Artificial Sequence
  Description of Artificial Sequence: Synthetic oligonucleotide
  Target: ATXN2; (+) strand; PAM type: NRG; PAM sequence: CAG
ctttgggaggctgagacaag

SEQ ID NO: 40685 - DNA, 20 bp, Artificial Sequence
  Description of Artificial Sequence: Synthetic oligonucleotide
  Target: ATXN2; (+) strand; PAM type: NRG; PAM sequence: AAG
ctgagacaagcagactgctt

SEQ ID NO: 40686 - DNA, 20 bp, Artificial Sequence
  Description of Artificial Sequence: Synthetic oligonucleotide
  Target: ATXN2; (+) strand; PAM type: NRG; PAM sequence: CAG
acaagcagactgcttaagct

SEQ ID NO: 40687 - DNA, 20 bp, Artificial Sequence
  Description of Artificial Sequence: Synthetic oligonucleotide
  Target: ATXN2; (+) strand; PAM type: NRG; PAM sequence: AGG
caagcagactgcttaagctc

SEQ ID NO: 40688 - DNA, 20 bp, Artificial Sequence
  Description of Artificial Sequence: Synthetic oligonucleotide
  Target: ATXN2; (+) strand; PAM type: NRG; PAM sequence: GAG
agcagactgcttaagctcag

SEQ ID NO: 40689 - DNA, 20 bp, Artificial Sequence
  Description of Artificial Sequence: Synthetic oligonucleotide
  Target: ATXN2; (+) strand; PAM type: NRG; PAM sequence: AAG
ctgcttaagctcaggagttc

SEQ ID NO: 40690 - DNA, 20 bp, Artificial Sequence
  Description of Artificial Sequence: Synthetic oligonucleotide
  Target: ATXN2; (+) strand; PAM type: NRG; PAM sequence: CAG
taagctcaggagttcaagac

SEQ ID NO: 40691 - DNA, 20 bp, Artificial Sequence
  Description of Artificial Sequence: Synthetic oligonucleotide
  Target: ATXN2; (+) strand; PAM type: NRG; PAM sequence: TGG
tcaggagttcaagaccagcc

SEQ ID NO: 40692 - DNA, 20 bp, Artificial Sequence
  Description of Artificial Sequence: Synthetic oligonucleotide
  Target: ATXN2; (+) strand; PAM type: NRG; PAM sequence: GGG
caggagttcaagaccagcct

SEQ ID NO: 40693 - DNA, 20 bp, Artificial Sequence
  Description of Artificial Sequence: Synthetic oligonucleotide
  Target: ATXN2; (+) strand; PAM type: NRG; PAM sequence: TAG
caagaccagcctgggcaaca

SEQ ID NO: 40694 - DNA, 20 bp, Artificial Sequence
  Description of Artificial Sequence: Synthetic oligonucleotide
  Target: ATXN2; (+) strand; PAM type: NRG; PAM sequence: AAG
aaaataaaataacaaaaata

SEQ ID NO: 40695 - DNA, 20 bp, Artificial Sequence
  Description of Artificial Sequence: Synthetic oligonucleotide
  Target: ATXN2; (+) strand; PAM type: NRG; PAM sequence: AAG
ataaaataacaaaaataaag

SEQ ID NO: 40696 - DNA, 20 bp, Artificial Sequence
  Description of Artificial Sequence: Synthetic oligonucleotide
  Target: ATXN2; (+) strand; PAM type: NRG; PAM sequence: AAG
ataacaaaaataaagaagta

SEQ ID NO: 40697 - DNA, 20 bp, Artificial Sequence
  Description of Artificial Sequence: Synthetic oligonucleotide
  Target: ATXN2; (+) strand; PAM type: NRG; PAM sequence: AAG
aaaaataaagaagtaaagaa

SEQ ID NO: 40698 - DNA, 20 bp, Artificial Sequence
  Description of Artificial Sequence: Synthetic oligonucleotide
  Target: ATXN2; (+) strand; PAM type: NRG; PAM sequence: TGG
gaagtaaagaaaagcaccaa

SEQ ID NO: 40699 - DNA, 20 bp, Artificial Sequence
  Description of Artificial Sequence: Synthetic oligonucleotide
  Target: ATXN2; (+) strand; PAM type: NRG; PAM sequence: TGG
taaagaaaagcaccaatggc

SEQ ID NO: 40700 - DNA, 20 bp, Artificial Sequence
  Description of Artificial Sequence: Synthetic oligonucleotide
  Target: ATXN2; (+) strand; PAM type: NRG; PAM sequence: AAG
aaagcaccaatggctggacc

SEQ ID NO: 40701 - DNA, 20 bp, Artificial Sequence
  Description of Artificial Sequence: Synthetic oligonucleotide
  Target: ATXN2; (+) strand; PAM type: NRG; PAM sequence: AGG
aagcaccaatggctggacca

SEQ ID NO: 40702 - DNA, 20 bp, Artificial Sequence
  Description of Artificial Sequence: Synthetic oligonucleotide
  Target: ATXN2; (+) strand; PAM type: NRG; PAM sequence: GGG
agcaccaatggctggaccaa

SEQ ID NO: 40703 - DNA, 20 bp, Artificial Sequence
  Description of Artificial Sequence: Synthetic oligonucleotide
  Target: ATXN2; (+) strand; PAM type: NRG; PAM sequence: GAG
ccaatggctggaccaagggt

SEQ ID NO: 40704 - DNA, 20 bp, Artificial Sequence
  Description of Artificial Sequence: Synthetic oligonucleotide
  Target: ATXN2; (+) strand; PAM type: NRG; PAM sequence: AAG
agggtgagacacacatgtac

SEQ ID NO: 40705 - DNA, 20 bp, Artificial Sequence
  Description of Artificial Sequence: Synthetic oligonucleotide
  Target: ATXN2; (+) strand; PAM type: NRG; PAM sequence: GAG
tgagacacacatgtacaagt

SEQ ID NO: 40706 - DNA, 20 bp, Artificial Sequence
  Description of Artificial Sequence: Synthetic oligonucleotide
  Target: ATXN2; (+) strand; PAM type: NRG; PAM sequence: CAG
acacacatgtacaagtgagt

SEQ ID NO: 40707 - DNA, 20 bp, Artificial Sequence
  Description of Artificial Sequence: Synthetic oligonucleotide
  Target: ATXN2; (+) strand; PAM type: NRG; PAM sequence: TAG
acaagtgagtcagaaaatga

SEQ ID NO: 40708 - DNA, 20 bp, Artificial Sequence
  Description of Artificial Sequence: Synthetic oligonucleotide
  Target: ATXN2; (+) strand; PAM type: NRG; PAM sequence: AAG
gaaaatgatagactcgtcaa

SEQ ID NO: 40709 - DNA, 20 bp, Artificial Sequence
  Description of Artificial Sequence: Synthetic oligonucleotide
  Target: ATXN2; (+) strand; PAM type: NRG; PAM sequence: AGG
aaaatgatagactcgtcaaa

SEQ ID NO: 40710 - DNA, 20 bp, Artificial Sequence
  Description of Artificial Sequence: Synthetic oligonucleotide
  Target: ATXN2; (+) strand; PAM type: NRG; PAM sequence: AAG
tcaaaaggaatatgacaata

SEQ ID NO: 40711 - DNA, 20 bp, Artificial Sequence
  Description of Artificial Sequence: Synthetic oligonucleotide
  Target: ATXN2; (+) strand; PAM type: NRG; PAM sequence: AGG
caaaaggaatatgacaataa

SEQ ID NO: 40712 - DNA, 20 bp, Artificial Sequence
  Description of Artificial Sequence: Synthetic oligonucleotide
  Target: ATXN2; (+) strand; PAM type: NRG; PAM sequence: AAG
atgacaataaaggaacttaa

SEQ ID NO: 40713 - DNA, 20 bp, Artificial Sequence
  Description of Artificial Sequence: Synthetic oligonucleotide
  Target: ATXN2; (+) strand; PAM type: NRG; PAM sequence: CAG
aggaacttaaaagctatgtt

SEQ ID NO: 40714 - DNA, 20 bp, Artificial Sequence
  Description of Artificial Sequence: Synthetic oligonucleotide
  Target: ATXN2; (+) strand; PAM type: NRG; PAM sequence: AGG
ggaacttaaaagctatgttc

SEQ ID NO: 40715 - DNA, 20 bp, Artificial Sequence
  Description of Artificial Sequence: Synthetic oligonucleotide
  Target: ATXN2; (+) strand; PAM type: NRG; PAM sequence: GGG
gaacttaaaagctatgttca

SEQ ID NO: 40716 - DNA, 20 bp, Artificial Sequence
  Description of Artificial Sequence: Synthetic oligonucleotide
  Target: ATXN2; (+) strand; PAM type: NRG; PAM sequence: CAG
gctatgttcagggctgcgtg

SEQ ID NO: 40717 - DNA, 20 bp, Artificial Sequence
  Description of Artificial Sequence: Synthetic oligonucleotide
  Target: ATXN2; (+) strand; PAM type: NRG; PAM sequence: TGG
atgttcagggctgcgtgcag

SEQ ID NO: 40718 - DNA, 20 bp, Artificial Sequence
  Description of Artificial Sequence: Synthetic oligonucleotide
  Target: ATXN2; (+) strand; PAM type: NRG; PAM sequence: TAG
gtggctaacacctatcatcc

SEQ ID NO: 40719 - DNA, 20 bp, Artificial Sequence
  Description of Artificial Sequence: Synthetic oligonucleotide
  Target: ATXN2; (+) strand; PAM type: NRG; PAM sequence: TGG
cacctatcatcctagcactt

SEQ ID NO: 40720 - DNA, 20 bp, Artificial Sequence
  Description of Artificial Sequence: Synthetic oligonucleotide
  Target: ATXN2; (+) strand; PAM type: NRG; PAM sequence: GGG
acctatcatcctagcacttt

SEQ ID NO: 40721 - DNA, 20 bp, Artificial Sequence
  Description of Artificial Sequence: Synthetic oligonucleotide
  Target: ATXN2; (+) strand; PAM type: NRG; PAM sequence: AAG
tatcatcctagcactttggg

SEQ ID NO: 40722 - DNA, 20 bp, Artificial Sequence
  Description of Artificial Sequence: Synthetic oligonucleotide
  Target: ATXN2; (+) strand; PAM type: NRG; PAM sequence: AAG
tcctagcactttgggaagcc

SEQ ID NO: 40723 - DNA, 20 bp, Artificial Sequence
  Description of Artificial Sequence: Synthetic oligonucleotide
  Target: ATXN2; (+) strand; PAM type: NRG; PAM sequence: AGG
cctagcactttgggaagcca

SEQ ID NO: 40724 - DNA, 20 bp, Artificial Sequence
  Description of Artificial Sequence: Synthetic oligonucleotide
  Target: ATXN2; (+) strand; PAM type: NRG; PAM sequence: CAG
agcactttgggaagccaagg

SEQ ID NO: 40725 - DNA, 20 bp, Artificial Sequence
  Description of Artificial Sequence: Synthetic oligonucleotide
  Target: ATXN2; (+) strand; PAM type: NRG; PAM sequence: AGG
gcactttgggaagccaaggc

SEQ ID NO: 40726 - DNA, 20 bp, Artificial Sequence
  Description of Artificial Sequence: Synthetic oligonucleotide
  Target: ATXN2; (+) strand; PAM type: NRG; PAM sequence: TGG
ctttgggaagccaaggcagg

SEQ ID NO: 40727 - DNA, 20 bp, Artificial Sequence
  Description of Artificial Sequence: Synthetic oligonucleotide
  Target: ATXN2; (+) strand; PAM type: NRG; PAM sequence: GAG
ccaaggcaggtggatcactt

SEQ ID NO: 40728 - DNA, 20 bp, Artificial Sequence
  Description of Artificial Sequence: Synthetic oligonucleotide
  Target: ATXN2; (+) strand; PAM type: NRG; PAM sequence: AGG
caaggcaggtggatcacttg

SEQ ID NO: 40729 - DNA, 20 bp, Artificial Sequence
  Description of Artificial Sequence: Synthetic oligonucleotide
  Target: ATXN2; (+) strand; PAM type: NRG; PAM sequence: CAG
gcaggtggatcacttgaggt

SEQ ID NO: 40730 - DNA, 20 bp, Artificial Sequence
  Description of Artificial Sequence: Synthetic oligonucleotide
  Target: ATXN2; (+) strand; PAM type: NRG; PAM sequence: AGG
caggtggatcacttgaggtc

SEQ ID NO: 40731 - DNA, 20 bp, Artificial Sequence
  Description of Artificial Sequence: Synthetic oligonucleotide
  Target: ATXN2; (+) strand; PAM type: NRG; PAM sequence: GAG
ggtggatcacttgaggtcag

SEQ ID NO: 40732 - DNA, 20 bp, Artificial Sequence
  Description of Artificial Sequence: Synthetic oligonucleotide
  Target: ATXN2; (+) strand; PAM type: NRG; PAM sequence: AAG
tcacttgaggtcaggagttt

SEQ ID NO: 40733 - DNA, 20 bp, Artificial Sequence
  Description of Artificial Sequence: Synthetic oligonucleotide
  Target: ATXN2; (+) strand; PAM type: NRG; PAM sequence: CAG
tgaggtcaggagtttaagac

SEQ ID NO: 40734 - DNA, 20 bp, Artificial Sequence
  Description of Artificial Sequence: Synthetic oligonucleotide
  Target: ATXN2; (+) strand; PAM type: NRG; PAM sequence: TGG
tcaggagtttaagaccagac

SEQ ID NO: 40735 - DNA, 20 bp, Artificial Sequence
  Description of Artificial Sequence: Synthetic oligonucleotide
  Target: ATXN2; (+) strand; PAM type: NRG; PAM sequence: TGG
taagaccagactggccaaca

SEQ ID NO: 40736 - DNA, 20 bp, Artificial Sequence
  Description of Artificial Sequence: Synthetic oligonucleotide
  Target: ATXN2; (+) strand; PAM type: NRG; PAM sequence: AAG
gtgaaactccgtctctacta

SEQ ID NO: 40737 - DNA, 20 bp, Artificial Sequence
  Description of Artificial Sequence: Synthetic oligonucleotide
  Target: ATXN2; (+) strand; PAM type: NRG; PAM sequence: TAG
taaagataaaaaaaaaaaat

SEQ ID NO: 40738 - DNA, 20 bp, Artificial Sequence
  Description of Artificial Sequence: Synthetic oligonucleotide
  Target: ATXN2; (+) strand; PAM type: NRG; PAM sequence: CAG
gataaaaaaaaaaaattagc

SEQ ID NO: 40739 - DNA, 20 bp, Artificial Sequence
  Description of Artificial Sequence: Synthetic oligonucleotide
  Target: ATXN2; (+) strand; PAM type: NRG; PAM sequence: AGG
ataaaaaaaaaaaattagcc

SEQ ID NO: 40740 - DNA, 20 bp, Artificial Sequence
  Description of Artificial Sequence: Synthetic oligonucleotide
  Target: ATXN2; (+) strand; PAM type: NRG; PAM sequence: TGG
aaaaaattagccaggcgtga

SEQ ID NO: 40741 - DNA, 20 bp, Artificial Sequence
  Description of Artificial Sequence: Synthetic oligonucleotide
  Target: ATXN2; (+) strand; PAM type: NRG; PAM sequence: CAG
gatggcacacgtgtaaatcc

SEQ ID NO: 40742 - DNA, 20 bp, Artificial Sequence
  Description of Artificial Sequence: Synthetic oligonucleotide
  Target: ATXN2; (+) strand; PAM type: NRG; PAM sequence: TGG
acgtgtaaatcccagctact

SEQ ID NO: 40743 - DNA, 20 bp, Artificial Sequence
  Description of Artificial Sequence: Synthetic oligonucleotide
  Target: ATXN2; (+) strand; PAM type: NRG; PAM sequence: GGG
cgtgtaaatcccagctactt

SEQ ID NO: 40744 - DNA, 20 bp, Artificial Sequence
  Description of Artificial Sequence: Synthetic oligonucleotide
  Target: ATXN2; (+) strand; PAM type: NRG; PAM sequence: GAG
tgtaaatcccagctacttgg

SEQ ID NO: 40745 - DNA, 20 bp, Artificial Sequence
  Description of Artificial Sequence: Synthetic oligonucleotide
  Target: ATXN2; (+) strand; PAM type: NRG; PAM sequence: AGG
gtaaatcccagctacttggg

SEQ ID NO: 40746 - DNA, 20 bp, Artificial Sequence
  Description of Artificial Sequence: Synthetic oligonucleotide
  Target: ATXN2; (+) strand; PAM type: NRG; PAM sequence: GAG
tacttgggaggctgacatat

SEQ ID NO: 40747 - DNA, 20 bp, Artificial Sequence
  Description of Artificial Sequence: Synthetic oligonucleotide
  Target: ATXN2; (+) strand; PAM type: NRG; PAM sequence: CAG
atatgagaattgcttgaacc

SEQ ID NO: 40748 - DNA, 20 bp, Artificial Sequence
  Description of Artificial Sequence: Synthetic oligonucleotide
  Target: ATXN2; (+) strand; PAM type: NRG; PAM sequence: AGG
tatgagaattgcttgaaccc

SEQ ID NO: 40749 - DNA, 20 bp, Artificial Sequence
  Description of Artificial Sequence: Synthetic oligonucleotide
  Target: ATXN2; (+) strand; PAM type: NRG; PAM sequence: GAG
tgagaattgcttgaacccag

SEQ ID NO: 40750 - DNA, 20 bp, Artificial Sequence
  Description of Artificial Sequence: Synthetic oligonucleotide
  Target: ATXN2; (+) strand; PAM type: NRG; PAM sequence: AGG
gagaattgcttgaacccagg

SEQ ID NO: 40751 - DNA, 20 bp, Artificial Sequence
  Description of Artificial Sequence: Synthetic oligonucleotide
  Target: ATXN2; (+) strand; PAM type: NRG; PAM sequence: CGG
aattgcttgaacccaggagg

SEQ ID NO: 40752 - DNA, 20 bp, Artificial Sequence
  Description of Artificial Sequence: Synthetic oligonucleotide
  Target: ATXN2; (+) strand; PAM type: NRG; PAM sequence: GAG
ttgcttgaacccaggaggcg

SEQ ID NO: 40753 - DNA, 20 bp, Artificial Sequence
  Description of Artificial Sequence: Synthetic oligonucleotide
  Target: ATXN2; (+) strand; PAM type: NRG; PAM sequence: AGG
tgcttgaacccaggaggcgg

SEQ ID NO: 40754 - DNA, 20 bp, Artificial Sequence
  Description of Artificial Sequence: Synthetic oligonucleotide
  Target: ATXN2; (+) strand; PAM type: NRG; PAM sequence: CAG
aacccaggaggcggaggttg

SEQ ID NO: 40755 - DNA, 20 bp, Artificial Sequence
  Description of Artificial Sequence: Synthetic oligonucleotide
  Target: ATXN2; (+) strand; PAM type: NRG; PAM sequence: GAG
caggaggcggaggttgcagt

SEQ ID NO: 40756 - DNA, 20 bp, Artificial Sequence
  Description of Artificial Sequence: Synthetic oligonucleotide
  Target: ATXN2; (+) strand; PAM type: NRG; PAM sequence: AAG
ggcggaggttgcagtgagcc

SEQ ID NO: 40757 - DNA, 20 bp, Artificial Sequence
  Description of Artificial Sequence: Synthetic oligonucleotide
  Target: ATXN2; (+) strand; PAM type: NRG; PAM sequence: CAG
aagatcacaccactgcactc

SEQ ID NO: 40758 - DNA, 20 bp, Artificial Sequence
  Description of Artificial Sequence: Synthetic oligonucleotide
  Target: ATXN2; (+) strand; PAM type: NRG; PAM sequence: TGG
cacaccactgcactccagcc

SEQ ID NO: 40759 - DNA, 20 bp, Artificial Sequence
  Description of Artificial Sequence: Synthetic oligonucleotide
  Target: ATXN2; (+) strand; PAM type: NRG; PAM sequence: GGG
acaccactgcactccagcct

SEQ ID NO: 40760 - DNA, 20 bp, Artificial Sequence
  Description of Artificial Sequence: Synthetic oligonucleotide
  Target: ATXN2; (+) strand; PAM type: NRG; PAM sequence: CAG
ctgcactccagcctgggtga

SEQ ID NO: 40761 - DNA, 20 bp, Artificial Sequence
  Description of Artificial Sequence: Synthetic oligonucleotide
  Target: ATXN2; (+) strand; PAM type: NRG; PAM sequence: GAG
gcactccagcctgggtgaca

SEQ ID NO: 40762 - DNA, 20 bp, Artificial Sequence
  Description of Artificial Sequence: Synthetic oligonucleotide
  Target: ATXN2; (+) strand; PAM type: NRG; PAM sequence: AAG
tccagcctgggtgacagagc

SEQ ID NO: 40763 - DNA, 20 bp, Artificial Sequence
  Description of Artificial Sequence: Synthetic oligonucleotide
  Target: ATXN2; (+) strand; PAM type: NRG; PAM sequence: AAG
aattaaaaaaaaaaaaaaaa

SEQ ID NO: 40764 - DNA, 20 bp, Artificial Sequence
  Description of Artificial Sequence: Synthetic oligonucleotide
  Target: ATXN2; (+) strand; PAM type: NRG; PAM sequence: AAG
aaaaaaaaaaaagttttaaa

SEQ ID NO: 40765 - DNA, 20 bp, Artificial Sequence
  Description of Artificial Sequence: Synthetic oligonucleotide
  Target: ATXN2; (+) strand; PAM type: NRG; PAM sequence: TAG
aagttttaaaaagctacgtt

SEQ ID NO: 40766 - DNA, 20 bp, Artificial Sequence
  Description of Artificial Sequence: Synthetic oligonucleotide
  Target: ATXN2; (+) strand; PAM type: NRG; PAM sequence: AGG
agttttaaaaagctacgttt

SEQ ID NO: 40767 - DNA, 20 bp, Artificial Sequence
  Description of Artificial Sequence: Synthetic oligonucleotide
  Target: ATXN2; (+) strand; PAM type: NRG; PAM sequence: TGG
aaaagctacgtttaggactt

SEQ ID NO: 40768 - DNA, 20 bp, Artificial Sequence
  Description of Artificial Sequence: Synthetic oligonucleotide
  Target: ATXN2; (+) strand; PAM type: NRG; PAM sequence: CAG
ggactttggcttttaattct

SEQ ID NO: 40769 - DNA, 20 bp, Artificial Sequence
  Description of Artificial Sequence: Synthetic oligonucleotide
  Target: ATXN2; (+) strand; PAM type: NRG; PAM sequence: AGG
gactttggcttttaattctc

SEQ ID NO: 40770 - DNA, 20 bp, Artificial Sequence
  Description of Artificial Sequence: Synthetic oligonucleotide
  Target: ATXN2; (+) strand; PAM type: NRG; PAM sequence: GGG
actttggcttttaattctca

SEQ ID NO: 40771 - DNA, 20 bp, Artificial Sequence
  Description of Artificial Sequence: Synthetic oligonucleotide
  Target: ATXN2; (+) strand; PAM type: NRG; PAM sequence: TGG
cttttaattctcagggcaaa

SEQ ID NO: 40772 - DNA, 20 bp, Artificial Sequence
  Description of Artificial Sequence: Synthetic oligonucleotide
  Target: ATXN2; (+) strand; PAM type: NRG; PAM sequence: GGG
ttttaattctcagggcaaat

SEQ ID NO: 40773 - DNA, 20 bp, Artificial Sequence
  Description of Artificial Sequence: Synthetic oligonucleotide
  Target: ATXN2; (+) strand; PAM type: NRG; PAM sequence: CAG
taattctcagggcaaatggg

SEQ ID NO: 40774 - DNA, 20 bp, Artificial Sequence
  Description of Artificial Sequence: Synthetic oligonucleotide
  Target: ATXN2; (+) strand; PAM type: NRG; PAM sequence: CGG
gggcaaatgggcagtctata

SEQ ID NO: 40775 - DNA, 20 bp, Artificial Sequence
  Description of Artificial Sequence: Synthetic oligonucleotide
  Target: ATXN2; (+) strand; PAM type: NRG; PAM sequence: AAG
ggcagtctatacggaatttt

SEQ ID NO: 40776 - DNA, 20 bp, Artificial Sequence
  Description of Artificial Sequence: Synthetic oligonucleotide
  Target: ATXN2; (+) strand; PAM type: NRG; PAM sequence: TAG
agtctatacggaattttaag

SEQ ID NO: 40777 - DNA, 20 bp, Artificial Sequence
  Description of Artificial Sequence: Synthetic oligonucleotide
  Target: ATXN2; (+) strand; PAM type: NRG; PAM sequence: AGG
gtctatacggaattttaagt

SEQ ID NO: 40778 - DNA, 20 bp, Artificial Sequence
  Description of Artificial Sequence: Synthetic oligonucleotide
  Target: ATXN2; (+) strand; PAM type: NRG; PAM sequence: GGG
tctatacggaattttaagta

SEQ ID NO: 40779 - DNA, 20 bp, Artificial Sequence
  Description of Artificial Sequence: Synthetic oligonucleotide
  Target: ATXN2; (+) strand; PAM type: NRG; PAM sequence: TAG
atacggaattttaagtaggg

SEQ ID NO: 40780 - DNA, 20 bp, Artificial Sequence
  Description of Artificial Sequence: Synthetic oligonucleotide
  Target: ATXN2; (+) strand; PAM type: NRG; PAM sequence: GAG
acggaattttaagtagggta

SEQ ID NO: 40781 - DNA, 20 bp, Artificial Sequence
  Description of Artificial Sequence: Synthetic oligonucleotide
  Target: ATXN2; (+) strand; PAM type: NRG; PAM sequence: TGG
ttttaagtagggtagagtac

SEQ ID NO: 40782 - DNA, 20 bp, Artificial Sequence
  Description of Artificial Sequence: Synthetic oligonucleotide
  Target: ATXN2; (+) strand; PAM type: NRG; PAM sequence: GGG
tttaagtagggtagagtact

SEQ ID NO: 40783 - DNA, 20 bp, Artificial Sequence
  Description of Artificial Sequence: Synthetic oligonucleotide
  Target: ATXN2; (+) strand; PAM type: NRG; PAM sequence: CAG
aagtagggtagagtactggg

SEQ ID NO: 40784 - DNA, 20 bp, Artificial Sequence
  Description of Artificial Sequence: Synthetic oligonucleotide
  Target: ATXN2; (+) strand; PAM type: NRG; PAM sequence: TAG
tagagtactgggcagattta

SEQ ID NO: 40785 - DNA, 20 bp, Artificial Sequence
  Description of Artificial Sequence: Synthetic oligonucleotide
  Target: ATXN2; (+) strand; PAM type: NRG; PAM sequence: CAG
tactgggcagatttatagtt

SEQ ID NO: 40786 - DNA, 20 bp, Artificial Sequence
  Description of Artificial Sequence: Synthetic oligonucleotide
  Target: ATXN2; (+) strand; PAM type: NRG; PAM sequence: AAG
gggcagatttatagttcaga

SEQ ID NO: 40787 - DNA, 20 bp, Artificial Sequence
  Description of Artificial Sequence: Synthetic oligonucleotide
  Target: ATXN2; (+) strand; PAM type: NRG; PAM sequence: AGG
ggcagatttatagttcagaa

SEQ ID NO: 40788 - DNA, 20 bp, Artificial Sequence
  Description of Artificial Sequence: Synthetic oligonucleotide
  Target: ATXN2; (+) strand; PAM type: NRG; PAM sequence: CAG
atagttcagaaaggtgaaca

SEQ ID NO: 40789 - DNA, 20 bp, Artificial Sequence
  Description of Artificial Sequence: Synthetic oligonucleotide
  Target: ATXN2; (+) strand; PAM type: NRG; PAM sequence: CAG
gttcagaaaggtgaacacag

SEQ ID NO: 40790 - DNA, 20 bp, Artificial Sequence
  Description of Artificial Sequence: Synthetic oligonucleotide
  Target: ATXN2; (+) strand; PAM type: NRG; PAM sequence: TGG
cagctttgtgtgaaatgaac

SEQ ID NO: 40791 - DNA, 20 bp, Artificial Sequence
  Description of Artificial Sequence: Synthetic oligonucleotide
  Target: ATXN2; (+) strand; PAM type: NRG; PAM sequence: GAG
gctttgtgtgaaatgaactg

SEQ ID NO: 40792 - DNA, 20 bp, Artificial Sequence
  Description of Artificial Sequence: Synthetic oligonucleotide
  Target: ATXN2; (+) strand; PAM type: NRG; PAM sequence: AGG
ctttgtgtgaaatgaactgg

SEQ ID NO: 40793 - DNA, 20 bp, Artificial Sequence
  Description of Artificial Sequence: Synthetic oligonucleotide
  Target: ATXN2; (+) strand; PAM type: NRG; PAM sequence: GGG
tttgtgtgaaatgaactgga

SEQ ID NO: 40794 - DNA, 20 bp, Artificial Sequence
  Description of Artificial Sequence: Synthetic oligonucleotide
  Target: ATXN2; (+) strand; PAM type: NRG; PAM sequence: GAG
tgtgtgaaatgaactggagg

SEQ ID NO: 40795 - DNA, 20 bp, Artificial Sequence
  Description of Artificial Sequence: Synthetic oligonucleotide
  Target: ATXN2; (+) strand; PAM type: NRG; PAM sequence: AGG
gtgtgaaatgaactggaggg

SEQ ID NO: 40796 - DNA, 20 bp, Artificial Sequence
  Description of Artificial Sequence: Synthetic oligonucleotide
  Target: ATXN2; (+) strand; PAM type: NRG; PAM sequence: TAG
tgaactggagggaggctaat

SEQ ID NO: 40797 - DNA, 20 bp, Artificial Sequence
  Description of Artificial Sequence: Synthetic oligonucleotide
  Target: ATXN2; (+) strand; PAM type: NRG; PAM sequence: AGG
gaactggagggaggctaatt

SEQ ID NO: 40798 - DNA, 20 bp, Artificial Sequence
  Description of Artificial Sequence: Synthetic oligonucleotide
  Target: ATXN2; (+) strand; PAM type: NRG; PAM sequence: TGG
gagggaggctaattaggatg

SEQ ID NO: 40799 - DNA, 20 bp, Artificial Sequence
  Description of Artificial Sequence: Synthetic oligonucleotide
  Target: ATXN2; (+) strand; PAM type: NRG; PAM sequence: GAG
gggaggctaattaggatgtg

SEQ ID NO: 40800 - DNA, 20 bp, Artificial Sequence
  Description of Artificial Sequence: Synthetic oligonucleotide
  Target: ATXN2; (+) strand; PAM type: NRG; PAM sequence: AGG
ggaggctaattaggatgtgg

SEQ ID NO: 40801 - DNA, 20 bp, Artificial Sequence
  Description of Artificial Sequence: Synthetic oligonucleotide
  Target: ATXN2; (+) strand; PAM type: NRG; PAM sequence: GGG
gaggctaattaggatgtgga

SEQ ID NO: 40802 - DNA, 20 bp, Artificial Sequence
  Description of Artificial Sequence: Synthetic oligonucleotide
  Target: ATXN2; (+) strand; PAM type: NRG; PAM sequence: TGG
aggatgtggagggaccgtca

SEQ ID NO: 40803 - DNA, 20 bp, Artificial Sequence
  Description of Artificial Sequence: Synthetic oligonucleotide
  Target: ATXN2; (+) strand; PAM type: NRG; PAM sequence: GAG
gatgtggagggaccgtcatg

SEQ ID NO: 40804 - DNA, 20 bp, Artificial Sequence
  Description of Artificial Sequence: Synthetic oligonucleotide
  Target: ATXN2; (+) strand; PAM type: NRG; PAM sequence: AGG
atgtggagggaccgtcatgg

SEQ ID NO: 40805 - DNA, 20 bp, Artificial Sequence
  Description of Artificial Sequence: Synthetic oligonucleotide
  Target: ATXN2; (+) strand; PAM type: NRG; PAM sequence: TGG
ggagggaccgtcatggaggc

SEQ ID NO: 40806 - DNA, 20 bp, Artificial Sequence
  Description of Artificial Sequence: Synthetic oligonucleotide
  Target: ATXN2; (+) strand; PAM type: NRG; PAM sequence: AAG
accgtcatggaggctggact

SEQ ID NO: 40807 - DNA, 20 bp, Artificial Sequence
  Description of Artificial Sequence: Synthetic oligonucleotide
  Target: ATXN2; (+) strand; PAM type: NRG; PAM sequence: TGG
atggaggctggactaagcgc

SEQ ID NO: 40808 - DNA, 20 bp, Artificial Sequence
  Description of Artificial Sequence: Synthetic oligonucleotide
  Target: ATXN2; (+) strand; PAM type: NRG; PAM sequence: GGG
tggaggctggactaagcgct

SEQ ID NO: 40809 - DNA, 20 bp, Artificial Sequence
  Description of Artificial Sequence: Synthetic oligonucleotide
  Target: ATXN2; (+) strand; PAM type: NRG; PAM sequence: TAG
gctggactaagcgctgggcc

SEQ ID NO: 40810 - DNA, 20 bp, Artificial Sequence
  Description of Artificial Sequence: Synthetic oligonucleotide
  Target: ATXN2; (+) strand; PAM type: NRG; PAM sequence: CAG
gactaagcgctgggcctagt

SEQ ID NO: 40811 - DNA, 20 bp, Artificial Sequence
  Description of Artificial Sequence: Synthetic oligonucleotide
  Target: ATXN2; (+) strand; PAM type: NRG; PAM sequence: TGG
agcgctgggcctagtcagct

SEQ ID NO: 40812 - DNA, 20 bp, Artificial Sequence
  Description of Artificial Sequence: Synthetic oligonucleotide
  Target: ATXN2; (+) strand; PAM type: NRG; PAM sequence: AAG
gctgggcctagtcagcttgg

SEQ ID NO: 40813 - DNA, 20 bp, Artificial Sequence
  Description of Artificial Sequence: Synthetic oligonucleotide
  Target: ATXN2; (+) strand; PAM type: NRG; PAM sequence: AGG
ctgggcctagtcagcttgga

SEQ ID NO: 40814 - DNA, 20 bp, Artificial Sequence
  Description of Artificial Sequence: Synthetic oligonucleotide
  Target: ATXN2; (+) strand; PAM type: NRG; PAM sequence: AAG
agtcagcttggaaggtcatt

SEQ ID NO: 40815 - DNA, 20 bp, Artificial Sequence
  Description of Artificial Sequence: Synthetic oligonucleotide
  Target: ATXN2; (+) strand; PAM type: NRG; PAM sequence: TAG
cagcttggaaggtcattaag

SEQ ID NO: 40816 - DNA, 20 bp, Artificial Sequence
  Description of Artificial Sequence: Synthetic oligonucleotide
  Target: ATXN2; (+) strand; PAM type: NRG; PAM sequence: AGG
agcttggaaggtcattaagt

SEQ ID NO: 40817 - DNA, 20 bp, Artificial Sequence
  Description of Artificial Sequence: Synthetic oligonucleotide
  Target: ATXN2; (+) strand; PAM type: NRG; PAM sequence: CAG
ggtcattaagtaggtgaatt

SEQ ID NO: 40818 - DNA, 20 bp, Artificial Sequence
  Description of Artificial Sequence: Synthetic oligonucleotide
  Target: ATXN2; (+) strand; PAM type: NRG; PAM sequence: GAG
taagtaggtgaattcagaat

SEQ ID NO: 40819 - DNA, 20 bp, Artificial Sequence
  Description of Artificial Sequence: Synthetic oligonucleotide
  Target: ATXN2; (+) strand; PAM type: NRG; PAM sequence: TGG
tgagacctgactgtacatat

SEQ ID NO: 40820 - DNA, 20 bp, Artificial Sequence
  Description of Artificial Sequence: Synthetic oligonucleotide
  Target: ATXN2; (+) strand; PAM type: NRG; PAM sequence: CAG
acctgactgtacatattggt

SEQ ID NO: 40821 - DNA, 20 bp, Artificial Sequence
  Description of Artificial Sequence: Synthetic oligonucleotide
  Target: ATXN2; (+) strand; PAM type: NRG; PAM sequence: TAG
gactgtacatattggtcagt

SEQ ID NO: 40822 - DNA, 20 bp, Artificial Sequence
  Description of Artificial Sequence: Synthetic oligonucleotide
  Target: ATXN2; (+) strand; PAM type: NRG; PAM sequence: AAG
gttagacattctaaacccct

SEQ ID NO: 40823 - DNA, 20 bp, Artificial Sequence
  Description of Artificial Sequence: Synthetic oligonucleotide
  Target: ATXN2; (+) strand; PAM type: NRG; PAM sequence: AAG
tctaaacccctaagtaaaaa

SEQ ID NO: 40824 - DNA, 20 bp, Artificial Sequence
  Description of Artificial Sequence: Synthetic oligonucleotide
  Target: ATXN2; (+) strand; PAM type: NRG; PAM sequence: AGG
ctaaacccctaagtaaaaaa

SEQ ID NO: 40825 - DNA, 20 bp, Artificial Sequence
  Description of Artificial Sequence: Synthetic oligonucleotide
  Target: ATXN2; (+) strand; PAM type: NRG; PAM sequence: GAG
aaacccctaagtaaaaaaag

SEQ ID NO: 40826 - DNA, 20 bp, Artificial Sequence
  Description of Artificial Sequence: Synthetic oligonucleotide
  Target: ATXN2; (+) strand; PAM type: NRG; PAM sequence: TGG
ccctaagtaaaaaaaggaga

SEQ ID NO: 40827 - DNA, 20 bp, Artificial Sequence
  Description of Artificial Sequence: Synthetic oligonucleotide
  Target: ATXN2; (+) strand; PAM type: NRG; PAM sequence: CAG
taagtaaaaaaaggagatgg

SEQ ID NO: 40828 - DNA, 20 bp, Artificial Sequence
  Description of Artificial Sequence: Synthetic oligonucleotide
  Target: ATXN2; (+) strand; PAM type: NRG; PAM sequence: AGG
aagtaaaaaaaggagatggc

SEQ ID NO: 40829 - DNA, 20 bp, Artificial Sequence
  Description of Artificial Sequence: Synthetic oligonucleotide
  Target: ATXN2; (+) strand; PAM type: NRG; PAM sequence: GGG
agtaaaaaaaggagatggca

SEQ ID NO: 40830 - DNA, 20 bp, Artificial Sequence
  Description of Artificial Sequence: Synthetic oligonucleotide
  Target: ATXN2; (+) strand; PAM type: NRG; PAM sequence: GGG
gtaaaaaaaggagatggcag

SEQ ID NO: 40831 - DNA, 20 bp, Artificial Sequence
  Description of Artificial Sequence: Synthetic oligonucleotide
  Target: ATXN2; (+) strand; PAM type: NRG; PAM sequence: GAG
aaaaaaaggagatggcaggg

SEQ ID NO: 40832 - DNA, 20 bp, Artificial Sequence
  Description of Artificial Sequence: Synthetic oligonucleotide
  Target: ATXN2; (+) strand; PAM type: NRG; PAM sequence: AAG
aaaaggagatggcaggggag

SEQ ID NO: 40833 - DNA, 20 bp, Artificial Sequence
  Description of Artificial Sequence: Synthetic oligonucleotide
  Target: ATXN2; (+) strand; PAM type: NRG; PAM sequence: GAG
aaggagatggcaggggagaa

SEQ ID NO: 40834 - DNA, 20 bp, Artificial Sequence
  Description of Artificial Sequence: Synthetic oligonucleotide
  Target: ATXN2; (+) strand; PAM type: NRG; PAM sequence: CAG
agatggcaggggagaagaga

SEQ ID NO: 40835 - DNA, 20 bp, Artificial Sequence
  Description of Artificial Sequence: Synthetic oligonucleotide
  Target: ATXN2; (+) strand; PAM type: NRG; PAM sequence: GAG
atggcaggggagaagagaca

SEQ ID NO: 40836 - DNA, 20 bp, Artificial Sequence
  Description of Artificial Sequence: Synthetic oligonucleotide
  Target: ATXN2; (+) strand; PAM type: NRG; PAM sequence: TGG
aggggagaagagacagagca

SEQ ID NO: 40837 - DNA, 20 bp, Artificial Sequence
  Description of Artificial Sequence: Synthetic oligonucleotide
  Target: ATXN2; (+) strand; PAM type: NRG; PAM sequence: TGG
ggagaagagacagagcatgg

SEQ ID NO: 40838 - DNA, 20 bp, Artificial Sequence
  Description of Artificial Sequence: Synthetic oligonucleotide
  Target: ATXN2; (+) strand; PAM type: NRG; PAM sequence: CAG
gacagagcatggtggccaaa

SEQ ID NO: 40839 - DNA, 20 bp, Artificial Sequence
  Description of Artificial Sequence: Synthetic oligonucleotide
  Target: ATXN2; (+) strand; PAM type: NRG; PAM sequence: CAG
ggtggccaaacagaaccttc

SEQ ID NO: 40840 - DNA, 20 bp, Artificial Sequence
  Description of Artificial Sequence: Synthetic oligonucleotide
  Target: ATXN2; (+) strand; PAM type: NRG; PAM sequence: AAG
ttccagtgatcatccccaac

SEQ ID NO: 40841 - DNA, 20 bp, Artificial Sequence
  Description of Artificial Sequence: Synthetic oligonucleotide
  Target: ATXN2; (+) strand; PAM type: NRG; PAM sequence: AGG
tccagtgatcatccccaaca

SEQ ID NO: 40842 - DNA, 20 bp, Artificial Sequence
  Description of Artificial Sequence: Synthetic oligonucleotide
  Target: ATXN2; (+) strand; PAM type: NRG; PAM sequence: GAG
cagtgatcatccccaacaag

SEQ ID NO: 40843 - DNA, 20 bp, Artificial Sequence
  Description of Artificial Sequence: Synthetic oligonucleotide
  Target: ATXN2; (+) strand; PAM type: NRG; PAM sequence: AAG
aattgaacaactatccacac

SEQ ID NO: 40844 - DNA, 20 bp, Artificial Sequence
  Description of Artificial Sequence: Synthetic oligonucleotide
  Target: ATXN2; (+) strand; PAM type: NRG; PAM sequence: AAG
gaacaactatccacacaaga

SEQ ID NO: 40845 - DNA, 20 bp, Artificial Sequence
  Description of Artificial Sequence: Synthetic oligonucleotide
  Target: ATXN2; (+) strand; PAM type: NRG; PAM sequence: AAG
acacaagaaagcaccttcat

SEQ ID NO: 40846 - DNA, 20 bp, Artificial Sequence
  Description of Artificial Sequence: Synthetic oligonucleotide
  Target: ATXN2; (+) strand; PAM type: NRG; PAM sequence: TAG
ccttcataagaaccaaaaat

SEQ ID NO: 40847 - DNA, 20 bp, Artificial Sequence
  Description of Artificial Sequence: Synthetic oligonucleotide
  Target: ATXN2; (+) strand; PAM type: NRG; PAM sequence: AGG
cttcataagaaccaaaaatt

SEQ ID NO: 40848 - DNA, 20 bp, Artificial Sequence
  Description of Artificial Sequence: Synthetic oligonucleotide
  Target: ATXN2; (+) strand; PAM type: NRG; PAM sequence: AAG
ataagaaccaaaaattaggt

SEQ ID NO: 40849 - DNA, 20 bp, Artificial Sequence
  Description of Artificial Sequence: Synthetic oligonucleotide
  Target: ATXN2; (+) strand; PAM type: NRG; PAM sequence: CAG
aaaaattaggtaagcgatca

SEQ ID NO: 40850 - DNA, 20 bp, Artificial Sequence
  Description of Artificial Sequence: Synthetic oligonucleotide
  Target: ATXN2; (+) strand; PAM type: NRG; PAM sequence: CAG
aggtaagcgatcacagtacc

SEQ ID NO: 40851 - DNA, 20 bp, Artificial Sequence
  Description of Artificial Sequence: Synthetic oligonucleotide
  Target: ATXN2; (+) strand; PAM type: NRG; PAM sequence: AAG
cccagttttgacatcctatc

SEQ ID NO: 40852 - DNA, 20 bp, Artificial Sequence
  Description of Artificial Sequence: Synthetic oligonucleotide
  Target: ATXN2; (+) strand; PAM type: NRG; PAM sequence: AGG
ccagttttgacatcctatca

SEQ ID NO: 40853 - DNA, 20 bp, Artificial Sequence
  Description of Artificial Sequence: Synthetic oligonucleotide
  Target: ATXN2; (+) strand; PAM type: NRG; PAM sequence: AAG
ttgacatcctatcaaggaaa

SEQ ID NO: 40854 - DNA, 20 bp, Artificial Sequence
  Description of Artificial Sequence: Synthetic oligonucleotide
  Target: ATXN2; (+) strand; PAM type: NRG; PAM sequence: AAG
caaggaaaaagacaccaaaa

SEQ ID NO: 40855 - DNA, 20 bp, Artificial Sequence
  Description of Artificial Sequence: Synthetic oligonucleotide
  Target: ATXN2; (+) strand; PAM type: NRG; PAM sequence: AAG
aaaaagacaccaaaaaagat

SEQ ID NO: 40856 - DNA, 20 bp, Artificial Sequence
  Description of Artificial Sequence: Synthetic oligonucleotide
  Target: ATXN2; (+) strand; PAM type: NRG; PAM sequence: AGG
aaaagacaccaaaaaagata

SEQ ID NO: 40857 - DNA, 20 bp, Artificial Sequence
  Description of Artificial Sequence: Synthetic oligonucleotide
  Target: ATXN2; (+) strand; PAM type: NRG; PAM sequence: AAG
agacaccaaaaaagataagg

SEQ ID NO: 40858 - DNA, 20 bp, Artificial Sequence
  Description of Artificial Sequence: Synthetic oligonucleotide
  Target: ATXN2; (+) strand; PAM type: NRG; PAM sequence: TAG
accaaaaaagataaggaaga

SEQ ID NO: 40859 - DNA, 20 bp, Artificial Sequence
  Description of Artificial Sequence: Synthetic oligonucleotide
  Target: ATXN2; (+) strand; PAM type: NRG; PAM sequence: CAG
cctgacattcccccacaatg

SEQ ID NO: 40860 - DNA, 20 bp, Artificial Sequence
  Description of Artificial Sequence: Synthetic oligonucleotide
  Target: ATXN2; (+) strand; PAM type: NRG; PAM sequence: TGG
cattcccccacaatgcagtg

SEQ ID NO: 40861 - DNA, 20 bp, Artificial Sequence
  Description of Artificial Sequence: Synthetic oligonucleotide
  Target: ATXN2; (+) strand; PAM type: NRG; PAM sequence: GGG
attcccccacaatgcagtgt

SEQ ID NO: 40862 - DNA, 20 bp, Artificial Sequence
  Description of Artificial Sequence: Synthetic oligonucleotide
  Target: ATXN2; (+) strand; PAM type: NRG; PAM sequence: GGG
ttcccccacaatgcagtgtg

SEQ ID NO: 40863 - DNA, 20 bp, Artificial Sequence
  Description of Artificial Sequence: Synthetic oligonucleotide
  Target: ATXN2; (+) strand; PAM type: NRG; PAM sequence: TGG
ccccacaatgcagtgtgggg

SEQ ID NO: 40864 - DNA, 20 bp, Artificial Sequence
  Description of Artificial Sequence: Synthetic oligonucleotide
  Target: ATXN2; (+) strand; PAM type: NRG; PAM sequence: GAG
ccacaatgcagtgtggggtg

SEQ ID NO: 40865 - DNA, 20 bp, Artificial Sequence
  Description of Artificial Sequence: Synthetic oligonucleotide
  Target: ATXN2; (+) strand; PAM type: NRG; PAM sequence: AAG
aatgcagtgtggggtggaga

SEQ ID NO: 40866 - DNA, 20 bp, Artificial Sequence
  Description of Artificial Sequence: Synthetic oligonucleotide
  Target: ATXN2; (+) strand; PAM type: NRG; PAM sequence: CGG
ggagaaagaatctgtgtgct

SEQ ID NO: 40867 - DNA, 20 bp, Artificial Sequence
  Description of Artificial Sequence: Synthetic oligonucleotide
  Target: ATXN2; (+) strand; PAM type: NRG; PAM sequence: GGG
gagaaagaatctgtgtgctc

SEQ ID NO: 40868 - DNA, 20 bp, Artificial Sequence
  Description of Artificial Sequence: Synthetic oligonucleotide
  Target: ATXN2; (+) strand; PAM type: NRG; PAM sequence: GGG
agaaagaatctgtgtgctcg

SEQ ID NO: 40869 - DNA, 20 bp, Artificial Sequence
  Description of Artificial Sequence: Synthetic oligonucleotide
  Target: ATXN2; (+) strand; PAM type: NRG; PAM sequence: GGG
gaaagaatctgtgtgctcgg

SEQ ID NO: 40870 - DNA, 20 bp, Artificial Sequence
  Description of Artificial Sequence: Synthetic oligonucleotide
  Target: ATXN2; (+) strand; PAM type: NRG; PAM sequence: GAG
aagaatctgtgtgctcgggg

SEQ ID NO: 40871 - DNA, 20 bp, Artificial Sequence
  Description of Artificial Sequence: Synthetic oligonucleotide
  Target: ATXN2; (+) strand; PAM type: NRG; PAM sequence: GAG
gaatctgtgtgctcggggga

SEQ ID NO: 40872 - DNA, 20 bp, Artificial Sequence
  Description of Artificial Sequence: Synthetic oligonucleotide
  Target: ATXN2; (+) strand; PAM type: NRG; PAM sequence: GAG
atctgtgtgctcgggggaga

SEQ ID NO: 40873 - DNA, 20 bp, Artificial Sequence
  Description of Artificial Sequence: Synthetic oligonucleotide
  Target: ATXN2; (+) strand; PAM type: NRG; PAM sequence: GAG
ctgtgtgctcgggggagaga

SEQ ID NO: 40874 - DNA, 20 bp, Artificial Sequence
  Description of Artificial Sequence: Synthetic oligonucleotide
  Target: ATXN2; (+) strand; PAM type: NRG; PAM sequence: GAG
gtgtgctcgggggagagaga

SEQ ID NO: 40875 - DNA, 20 bp, Artificial Sequence
  Description of Artificial Sequence: Synthetic oligonucleotide
  Target: ATXN2; (+) strand; PAM type: NRG; PAM sequence: TGG
gagagagagagaaatgactg

SEQ ID NO: 40876 - DNA, 20 bp, Artificial Sequence
  Description of Artificial Sequence: Synthetic oligonucleotide
  Target: ATXN2; (+) strand; PAM type: NRG; PAM sequence: GGG
agagagagagaaatgactgt

SEQ ID NO: 40877 - DNA, 20 bp, Artificial Sequence
  Description of Artificial Sequence: Synthetic oligonucleotide
  Target: ATXN2; (+) strand; PAM type: NRG; PAM sequence: CAG
tgggattttgcattgaaact

SEQ ID NO: 40878 - DNA, 20 bp, Artificial Sequence
  Description of Artificial Sequence: Synthetic oligonucleotide
  Target: ATXN2; (+) strand; PAM type: NRG; PAM sequence: CAG
aactcagtgctgccctgtca

SEQ ID NO: 40879 - DNA, 20 bp, Artificial Sequence
  Description of Artificial Sequence: Synthetic oligonucleotide
  Target: ATXN2; (+) strand; PAM type: NRG; PAM sequence: TGG
tcagtgctgccctgtcacag

SEQ ID NO: 40880 - DNA, 20 bp, Artificial Sequence
  Description of Artificial Sequence: Synthetic oligonucleotide
  Target: ATXN2; (+) strand; PAM type: NRG; PAM sequence: AAG
tgctgccctgtcacagtgga

SEQ ID NO: 40881 - DNA, 20 bp, Artificial Sequence
  Description of Artificial Sequence: Synthetic oligonucleotide
  Target: ATXN2; (+) strand; PAM type: NRG; PAM sequence: CAG
tgccctgtcacagtggaaag

SEQ ID NO: 40882 - DNA, 20 bp, Artificial Sequence
  Description of Artificial Sequence: Synthetic oligonucleotide
  Target: ATXN2; (+) strand; PAM type: NRG; PAM sequence: TAG
tgtcacagtggaaagcagca

SEQ ID NO: 40883 - DNA, 20 bp, Artificial Sequence
  Description of Artificial Sequence: Synthetic oligonucleotide
  Target: ATXN2; (+) strand; PAM type: NRG; PAM sequence: AGG
gtcacagtggaaagcagcat

SEQ ID NO: 40884 - DNA, 20 bp, Artificial Sequence
  Description of Artificial Sequence: Synthetic oligonucleotide
  Target: ATXN2; (+) strand; PAM type: NRG; PAM sequence: CAG
cagtggaaagcagcatagga

SEQ ID NO: 40885 - DNA, 20 bp, Artificial Sequence
  Description of Artificial Sequence: Synthetic oligonucleotide
  Target: ATXN2; (+) strand; PAM type: NRG; PAM sequence: CAG
aagcagcataggacagaatt

SEQ ID NO: 40886 - DNA, 20 bp, Artificial Sequence
  Description of Artificial Sequence: Synthetic oligonucleotide
  Target: ATXN2; (+) strand; PAM type: NRG; PAM sequence: CAG
agcataggacagaattcagc

SEQ ID NO: 40887 - DNA, 20 bp, Artificial Sequence
  Description of Artificial Sequence: Synthetic oligonucleotide
  Target: ATXN2; (+) strand; PAM type: NRG; PAM sequence: CAG
cagaattcagccagcaccca

SEQ ID NO: 40888 - DNA, 20 bp, Artificial Sequence
  Description of Artificial Sequence: Synthetic oligonucleotide
  Target: ATXN2; (+) strand; PAM type: NRG; PAM sequence: GAG
gaattcagccagcacccaca

SEQ ID NO: 40889 - DNA, 20 bp, Artificial Sequence
  Description of Artificial Sequence: Synthetic oligonucleotide
  Target: ATXN2; (+) strand; PAM type: NRG; PAM sequence: AGG
aattcagccagcacccacag

SEQ ID NO: 40890 - DNA, 20 bp, Artificial Sequence
  Description of Artificial Sequence: Synthetic oligonucleotide
  Target: ATXN2; (+) strand; PAM type: NRG; PAM sequence: GGG
attcagccagcacccacaga

SEQ ID NO: 40891 - DNA, 20 bp, Artificial Sequence
  Description of Artificial Sequence: Synthetic oligonucleotide
  Target: ATXN2; (+) strand; PAM type: NRG; PAM sequence: GAG
tcagccagcacccacagagg

SEQ ID NO: 40892 - DNA, 20 bp, Artificial Sequence
  Description of Artificial Sequence: Synthetic oligonucleotide
  Target: ATXN2; (+) strand; PAM type: NRG; PAM sequence: TAG
gcacccacagagggagtatt

SEQ ID NO: 40893 - DNA, 20 bp, Artificial Sequence
  Description of Artificial Sequence: Synthetic oligonucleotide
  Target: ATXN2; (+) strand; PAM type: NRG; PAM sequence: TAG
cacagagggagtatttagac

SEQ ID NO: 40894 - DNA, 20 bp, Artificial Sequence
  Description of Artificial Sequence: Synthetic oligonucleotide
  Target: ATXN2; (+) strand; PAM type: NRG; PAM sequence: TAG
gggagtatttagactagccc

SEQ ID NO: 40895 - DNA, 20 bp, Artificial Sequence
  Description of Artificial Sequence: Synthetic oligonucleotide
  Target: ATXN2; (+) strand; PAM type: NRG; PAM sequence: CAG
gtatttagactagccctagt

SEQ ID NO: 40896 - DNA, 20 bp, Artificial Sequence
  Description of Artificial Sequence: Synthetic oligonucleotide
  Target: ATXN2; (+) strand; PAM type: NRG; PAM sequence: GAG
atttagactagccctagtca

SEQ ID NO: 40897 - DNA, 20 bp, Artificial Sequence
  Description of Artificial Sequence: Synthetic oligonucleotide
  Target: ATXN2; (+) strand; PAM type: NRG; PAM sequence: AGG
tttagactagccctagtcag

SEQ ID NO: 40898 - DNA, 20 bp, Artificial Sequence
  Description of Artificial Sequence: Synthetic oligonucleotide
  Target: ATXN2; (+) strand; PAM type: NRG; PAM sequence: GGG
ttagactagccctagtcaga

SEQ ID NO: 40899 - DNA, 20 bp, Artificial Sequence
  Description of Artificial Sequence: Synthetic oligonucleotide
  Target: ATXN2; (+) strand; PAM type: NRG; PAM sequence: GGG
tagactagccctagtcagag

SEQ ID NO: 40900 - DNA, 20 bp, Artificial Sequence
  Description of Artificial Sequence: Synthetic oligonucleotide
  Target: ATXN2; (+) strand; PAM type: NRG; PAM sequence: CAG
cagaggggaattgtccatcc

SEQ ID NO: 40901 - DNA, 20 bp, Artificial Sequence
  Description of Artificial Sequence: Synthetic oligonucleotide
  Target: ATXN2; (+) strand; PAM type: NRG; PAM sequence: TAG
gaattgtccatcccagtgat

SEQ ID NO: 40902 - DNA, 20 bp, Artificial Sequence
  Description of Artificial Sequence: Synthetic oligonucleotide
  Target: ATXN2; (+) strand; PAM type: NRG; PAM sequence: CGG
agtgattagaatctgaattt

SEQ ID NO: 40903 - DNA, 20 bp, Artificial Sequence
  Description of Artificial Sequence: Synthetic oligonucleotide
  Target: ATXN2; (+) strand; PAM type: NRG; PAM sequence: GGG
gtgattagaatctgaatttc

SEQ ID NO: 40904 - DNA, 20 bp, Artificial Sequence
  Description of Artificial Sequence: Synthetic oligonucleotide
  Target: ATXN2; (+) strand; PAM type: NRG; PAM sequence: TGG
ttagaatctgaatttcgggc

SEQ ID NO: 40905 - DNA, 20 bp, Artificial Sequence
  Description of Artificial Sequence: Synthetic oligonucleotide
  Target: ATXN2; (+) strand; PAM type: NRG; PAM sequence: GGG
tagaatctgaatttcgggct

SEQ ID NO: 40906 - DNA, 20 bp, Artificial Sequence
  Description of Artificial Sequence: Synthetic oligonucleotide
  Target: ATXN2; (+) strand; PAM type: NRG; PAM sequence: TGG
gaatttcgggctgggcacta

SEQ ID NO: 40907 - DNA, 20 bp, Artificial Sequence
  Description of Artificial Sequence: Synthetic oligonucleotide
  Target: ATXN2; (+) strand; PAM type: NRG; PAM sequence: CAG
ggcactatggtctgtaatcc

SEQ ID NO: 40908 - DNA, 20 bp, Artificial Sequence
  Description of Artificial Sequence: Synthetic oligonucleotide
  Target: ATXN2; (+) strand; PAM type: NRG; PAM sequence: TGG
ggtctgtaatcccagcactt

SEQ ID NO: 40909 - DNA, 20 bp, Artificial Sequence
  Description of Artificial Sequence: Synthetic oligonucleotide
  Target: ATXN2; (+) strand; PAM type: NRG; PAM sequence: GGG
gtctgtaatcccagcacttt

SEQ ID NO: 40910 - DNA, 20 bp, Artificial Sequence
  Description of Artificial Sequence: Synthetic oligonucleotide
  Target: ATXN2; (+) strand; PAM type: NRG; PAM sequence: GAG
ctgtaatcccagcactttgg

SEQ ID NO: 40911 - DNA, 20 bp, Artificial Sequence
  Description of Artificial Sequence: Synthetic oligonucleotide
  Target: ATXN2; (+) strand; PAM type: NRG; PAM sequence: AGG
tgtaatcccagcactttggg

SEQ ID NO: 40912 - DNA, 20 bp, Artificial Sequence
  Description of Artificial Sequence: Synthetic oligonucleotide
  Target: ATXN2; (+) strand; PAM type: NRG; PAM sequence: GAG
tcccagcactttgggaggcc

SEQ ID NO: 40913 - DNA, 20 bp, Artificial Sequence
  Description of Artificial Sequence: Synthetic oligonucleotide
  Target: ATXN2; (+) strand; PAM type: NRG; PAM sequence: AGG
cccagcactttgggaggccg

SEQ ID NO: 40914 - DNA, 20 bp, Artificial Sequence
  Description of Artificial Sequence: Synthetic oligonucleotide
  Target: ATXN2; (+) strand; PAM type: NRG; PAM sequence: CGG
agcactttgggaggccgagg

SEQ ID NO: 40915 - DNA, 20 bp, Artificial Sequence
  Description of Artificial Sequence: Synthetic oligonucleotide
  Target: ATXN2; (+) strand; PAM type: NRG; PAM sequence: CGG
ctttgggaggccgaggcgga

SEQ ID NO: 40916 - DNA, 20 bp, Artificial Sequence
  Description of Artificial Sequence: Synthetic oligonucleotide
  Target: ATXN2; (+) strand; PAM type: NRG; PAM sequence: GAG
ccgaggcggacggataacct

SEQ ID NO: 40917 - DNA, 20 bp, Artificial Sequence
  Description of Artificial Sequence: Synthetic oligonucleotide
  Target: ATXN2; (+) strand; PAM type: NRG; PAM sequence: AGG
cgaggcggacggataacctg

SEQ ID NO: 40918 - DNA, 20 bp, Artificial Sequence
  Description of Artificial Sequence: Synthetic oligonucleotide
  Target: ATXN2; (+) strand; PAM type: NRG; PAM sequence: CGG
gcggacggataacctgaggt

SEQ ID NO: 40919 - DNA, 20 bp, Artificial Sequence
  Description of Artificial Sequence: Synthetic oligonucleotide
  Target: ATXN2; (+) strand; PAM type: NRG; PAM sequence: GGG
cggacggataacctgaggtc

SEQ ID NO: 40920 - DNA, 20 bp, Artificial Sequence
  Description of Artificial Sequence: Synthetic oligonucleotide
  Target: ATXN2; (+) strand; PAM type: NRG; PAM sequence: GAG
gacggataacctgaggtcgg

SEQ ID NO: 40921 - DNA, 20 bp, Artificial Sequence
  Description of Artificial Sequence: Synthetic oligonucleotide
  Target: ATXN2; (+) strand; PAM type: NRG; PAM sequence: AAG
taacctgaggtcgggagttc

SEQ ID NO: 40922 - DNA, 20 bp, Artificial Sequence
  Description of Artificial Sequence: Synthetic oligonucleotide
  Target: ATXN2; (+) strand; PAM type: NRG; PAM sequence: CAG
tgaggtcgggagttcaagac

SEQ ID NO: 40923 - DNA, 20 bp, Artificial Sequence
  Description of Artificial Sequence: Synthetic oligonucleotide
  Target: ATXN2; (+) strand; PAM type: NRG; PAM sequence: TGG
caagaccagcctgaccaaca

SEQ ID NO: 40924 - DNA, 20 bp, Artificial Sequence
  Description of Artificial Sequence: Synthetic oligonucleotide
  Target: ATXN2; (+) strand; PAM type: NRG; PAM sequence: GAG
agaccagcctgaccaacatg

SEQ ID NO: 40925 - DNA, 20 bp, Artificial Sequence
  Description of Artificial Sequence: Synthetic oligonucleotide
  Target: ATXN2; (+) strand; PAM type: NRG; PAM sequence: TAG
ctactaaaaaacaaaaaaat

SEQ ID NO: 40926 - DNA, 20 bp, Artificial Sequence
  Description of Artificial Sequence: Synthetic oligonucleotide
  Target: ATXN2; (+) strand; PAM type: NRG; PAM sequence: CAG
taaaaaacaaaaaaattagc

SEQ ID NO: 40927 - DNA, 20 bp, Artificial Sequence
  Description of Artificial Sequence: Synthetic oligonucleotide
  Target: ATXN2; (+) strand; PAM type: NRG; PAM sequence: GAG
aaaaacaaaaaaattagcca

SEQ ID NO: 40928 - DNA, 20 bp, Artificial Sequence
  Description of Artificial Sequence: Synthetic oligonucleotide
  Target: ATXN2; (+) strand; PAM type: NRG; PAM sequence: AGG
aaaacaaaaaaattagccag

SEQ ID NO: 40929 - DNA, 20 bp, Artificial Sequence
  Description of Artificial Sequence: Synthetic oligonucleotide
  Target: ATXN2; (+) strand; PAM type: NRG; PAM sequence: TGG
acaaaaaaattagccagagg

SEQ ID NO: 40930 - DNA, 20 bp, Artificial Sequence
  Description of Artificial Sequence: Synthetic oligonucleotide
  Target: ATXN2; (+) strand; PAM type: NRG; PAM sequence: TAG
aaaaaattagccagaggtgg

SEQ ID NO: 40931 - DNA, 20 bp, Artificial Sequence
  Description of Artificial Sequence: Synthetic oligonucleotide
  Target: ATXN2; (+) strand; PAM type: NRG; PAM sequence: CGG
ccagaggtggtagcgcatgc

SEQ ID NO: 40932 - DNA, 20 bp, Artificial Sequence
  Description of Artificial Sequence: Synthetic oligonucleotide
  Target: ATXN2; (+) strand; PAM type: NRG; PAM sequence: CAG
gtagcgcatgccggtaatcc

SEQ ID NO: 40933 - DNA, 20 bp, Artificial Sequence
  Description of Artificial Sequence: Synthetic oligonucleotide
  Target: ATXN2; (+) strand; PAM type: NRG; PAM sequence: CAG
tgccggtaatcccagctact

SEQ ID NO: 40934 - DNA, 20 bp, Artificial Sequence
  Description of Artificial Sequence: Synthetic oligonucleotide
  Target: ATXN2; (+) strand; PAM type: NRG; PAM sequence: AGG
gccggtaatcccagctactc

SEQ ID NO: 40935 - DNA, 20 bp, Artificial Sequence
  Description of Artificial Sequence: Synthetic oligonucleotide
  Target: ATXN2; (+) strand; PAM type: NRG; PAM sequence: GAG
cggtaatcccagctactcag

SEQ ID NO: 40936 - DNA, 20 bp, Artificial Sequence
  Description of Artificial Sequence: Synthetic oligonucleotide
  Target: ATXN2; (+) strand; PAM type: NRG; PAM sequence: AGG
ggtaatcccagctactcagg

SEQ ID NO: 40937 - DNA, 20 bp, Artificial Sequence
  Description of Artificial Sequence: Synthetic oligonucleotide
  Target: ATXN2; (+) strand; PAM type: NRG; PAM sequence: GAG
tcccagctactcaggaggct

SEQ ID NO: 40938 - DNA, 20 bp, Artificial Sequence
  Description of Artificial Sequence: Synthetic oligonucleotide
  Target: ATXN2; (+) strand; PAM type: NRG; PAM sequence: AGG
cccagctactcaggaggctg

SEQ ID NO: 40939 - DNA, 20 bp, Artificial Sequence
  Description of Artificial Sequence: Synthetic oligonucleotide
  Target: ATXN2; (+) strand; PAM type: NRG; PAM sequence: TAG
agctactcaggaggctgagg

SEQ ID NO: 40940 - DNA, 20 bp, Artificial Sequence
  Description of Artificial Sequence: Synthetic oligonucleotide
  Target: ATXN2; (+) strand; PAM type: NRG; PAM sequence: AGG
gctactcaggaggctgaggt

SEQ ID NO: 40941 - DNA, 20 bp, Artificial Sequence
  Description of Artificial Sequence: Synthetic oligonucleotide
  Target: ATXN2; (+) strand; PAM type: NRG; PAM sequence: GAG
tactcaggaggctgaggtag

SEQ ID NO: 40942 - DNA, 20 bp, Artificial Sequence
  Description of Artificial Sequence: Synthetic oligonucleotide
  Target: ATXN2; (+) strand; PAM type: NRG; PAM sequence: CGG
gtaggagaattatttgaacc

SEQ ID NO: 40943 - DNA, 20 bp, Artificial Sequence
  Description of Artificial Sequence: Synthetic oligonucleotide
  Target: ATXN2; (+) strand; PAM type: NRG; PAM sequence: GGG
taggagaattatttgaaccc

SEQ ID NO: 40944 - DNA, 20 bp, Artificial Sequence
  Description of Artificial Sequence: Synthetic oligonucleotide
  Target: ATXN2; (+) strand; PAM type: NRG; PAM sequence: GAG
ggagaattatttgaacccgg

SEQ ID NO: 40945 - DNA, 20 bp, Artificial Sequence
  Description of Artificial Sequence: Synthetic oligonucleotide
  Target: ATXN2; (+) strand; PAM type: NRG; PAM sequence: AGG
gagaattatttgaacccggg

SEQ ID NO: 40946 - DNA, 20 bp, Artificial Sequence
  Description of Artificial Sequence: Synthetic oligonucleotide
  Target: ATXN2; (+) strand; PAM type: NRG; PAM sequence: CGG
aattatttgaacccgggagg

SEQ ID NO: 40947 - DNA, 20 bp, Artificial Sequence
  Description of Artificial Sequence: Synthetic oligonucleotide
  Target: ATXN2; (+) strand; PAM type: NRG; PAM sequence: GAG
ttatttgaacccgggaggcg

SEQ ID NO: 40948 - DNA, 20 bp, Artificial Sequence
  Description of Artificial Sequence: Synthetic oligonucleotide
  Target: ATXN2; (+) strand; PAM type: NRG; PAM sequence: AGG
tatttgaacccgggaggcgg

SEQ ID NO: 40949 - DNA, 20 bp, Artificial Sequence
  Description of Artificial Sequence: Synthetic oligonucleotide
  Target: ATXN2; (+) strand; PAM type: NRG; PAM sequence: TGG
aacccgggaggcggaggttg

SEQ ID NO: 40950 - DNA, 20 bp, Artificial Sequence
  Description of Artificial Sequence: Synthetic oligonucleotide
  Target: ATXN2; (+) strand; PAM type: NRG; PAM sequence: GAG
cgggaggcggaggttgtggt

SEQ ID NO: 40951 - DNA, 20 bp, Artificial Sequence
  Description of Artificial Sequence: Synthetic oligonucleotide
  Target: ATXN2; (+) strand; PAM type: NRG; PAM sequence: GAG
ggcggaggttgtggtgagct

SEQ ID NO: 40952 - DNA, 20 bp, Artificial Sequence
  Description of Artificial Sequence: Synthetic oligonucleotide
  Target: ATXN2; (+) strand; PAM type: NRG; PAM sequence: CAG
gagattgcgtcactatactc

SEQ ID NO: 40953 - DNA, 20 bp, Artificial Sequence
  Description of Artificial Sequence: Synthetic oligonucleotide
  Target: ATXN2; (+) strand; PAM type: NRG; PAM sequence: TGG
tgcgtcactatactccagcc

SEQ ID NO: 40954 - DNA, 20 bp, Artificial Sequence
  Description of Artificial Sequence: Synthetic oligonucleotide
  Target: ATXN2; (+) strand; PAM type: NRG; PAM sequence: GGG
gcgtcactatactccagcct

SEQ ID NO: 40955 - DNA, 20 bp, Artificial Sequence
  Description of Artificial Sequence: Synthetic oligonucleotide
  Target: ATXN2; (+) strand; PAM type: NRG; PAM sequence: AAG
tatactccagcctgggcaat

SEQ ID NO: 40956 - DNA, 20 bp, Artificial Sequence
  Description of Artificial Sequence: Synthetic oligonucleotide
  Target: ATXN2; (+) strand; PAM type: NRG; PAM sequence: GAG
tactccagcctgggcaataa

SEQ ID NO: 40957 - DNA, 20 bp, Artificial Sequence
  Description of Artificial Sequence: Synthetic oligonucleotide
  Target: ATXN2; (+) strand; PAM type: NRG; PAM sequence: AAG
actctgccaaaaaaaaccaa

SEQ ID NO: 40958 - DNA, 20 bp, Artificial Sequence
  Description of Artificial Sequence: Synthetic oligonucleotide
  Target: ATXN2; (+) strand; PAM type: NRG; PAM sequence: TGG
aaccaaaagaatcttaattt

SEQ ID NO: 40959 - DNA, 20 bp, Artificial Sequence
  Description of Artificial Sequence: Synthetic oligonucleotide
  Target: ATXN2; (+) strand; PAM type: NRG; PAM sequence: AAG
aaaagaatcttaattttggt

SEQ ID NO: 40960 - DNA, 20 bp, Artificial Sequence
  Description of Artificial Sequence: Synthetic oligonucleotide
  Target: ATXN2; (+) strand; PAM type: NRG; PAM sequence: TGG
tttggtaagccccaccaccg

SEQ ID NO: 40961 - DNA, 20 bp, Artificial Sequence
  Description of Artificial Sequence: Synthetic oligonucleotide
  Target: ATXN2; (+) strand; PAM type: NRG; PAM sequence: GGG
ttggtaagccccaccaccgt

SEQ ID NO: 40962 - DNA, 20 bp, Artificial Sequence
  Description of Artificial Sequence: Synthetic oligonucleotide
  Target: ATXN2; (+) strand; PAM type: NRG; PAM sequence: AAG
aagccccaccaccgtgggta

SEQ ID NO: 40963 - DNA, 20 bp, Artificial Sequence
  Description of Artificial Sequence: Synthetic oligonucleotide
  Target: ATXN2; (+) strand; PAM type: NRG; PAM sequence: TGG
ccaccgtgggtaaagtcctc

SEQ ID NO: 40964 - DNA, 20 bp, Artificial Sequence
  Description of Artificial Sequence: Synthetic oligonucleotide
  Target: ATXN2; (+) strand; PAM type: NRG; PAM sequence: GGG
caccgtgggtaaagtcctct

SEQ ID NO: 40965 - DNA, 20 bp, Artificial Sequence
  Description of Artificial Sequence: Synthetic oligonucleotide
  Target: ATXN2; (+) strand; PAM type: NRG; PAM sequence: GGG
accgtgggtaaagtcctctg

SEQ ID NO: 40966 - DNA, 20 bp, Artificial Sequence
  Description of Artificial Sequence: Synthetic oligonucleotide
  Target: ATXN2; (+) strand; PAM type: NRG; PAM sequence: AAG
ggggtcctaaataaacttga

SEQ ID NO: 40967 - DNA, 20 bp, Artificial Sequence
  Description of Artificial Sequence: Synthetic oligonucleotide
  Target: ATXN2; (+) strand; PAM type: NRG; PAM sequence: AGG
gggtcctaaataaacttgaa

SEQ ID NO: 40968 - DNA, 20 bp, Artificial Sequence
  Description of Artificial Sequence: Synthetic oligonucleotide
  Target: ATXN2; (+) strand; PAM type: NRG; PAM sequence: CAG
tcctaaataaacttgaaagg

SEQ ID NO: 40969 - DNA, 20 bp, Artificial Sequence
  Description of Artificial Sequence: Synthetic oligonucleotide
  Target: ATXN2; (+) strand; PAM type: NRG; PAM sequence: TAG
aataaacttgaaaggcagtc

SEQ ID NO: 40970 - DNA, 20 bp, Artificial Sequence
  Description of Artificial Sequence: Synthetic oligonucleotide
  Target: ATXN2; (+) strand; PAM type: NRG; PAM sequence: CAG
acttgaaaggcagtctagac

SEQ ID NO: 40971 - DNA, 20 bp, Artificial Sequence
  Description of Artificial Sequence: Synthetic oligonucleotide
  Target: ATXN2; (+) strand; PAM type: NRG; PAM sequence: AAG
tgaaaggcagtctagaccag

SEQ ID NO: 40972 - DNA, 20 bp, Artificial Sequence
  Description of Artificial Sequence: Synthetic oligonucleotide
  Target: ATXN2; (+) strand; PAM type: NRG; PAM sequence: AGG
gaaaggcagtctagaccaga

SEQ ID NO: 40973 - DNA, 20 bp, Artificial Sequence
  Description of Artificial Sequence: Synthetic oligonucleotide
  Target: ATXN2; (+) strand; PAM type: NRG; PAM sequence: TGG
accagaaggactgcaattcc

SEQ ID NO: 40974 - DNA, 20 bp, Artificial Sequence
  Description of Artificial Sequence: Synthetic oligonucleotide
  Target: ATXN2; (+) strand; PAM type: NRG; PAM sequence: AAG
aaggactgcaattcctggac

SEQ ID NO: 40975 - DNA, 20 bp, Artificial Sequence
  Description of Artificial Sequence: Synthetic oligonucleotide
  Target: ATXN2; (+) strand; PAM type: NRG; PAM sequence: TGG
tgcaattcctggacaagtca

SEQ ID NO: 40976 - DNA, 20 bp, Artificial Sequence
  Description of Artificial Sequence: Synthetic oligonucleotide
  Target: ATXN2; (+) strand; PAM type: NRG; PAM sequence: TGG
gacaagtcatggtactgtgc

SEQ ID NO: 40977 - DNA, 20 bp, Artificial Sequence
  Description of Artificial Sequence: Synthetic oligonucleotide
  Target: ATXN2; (+) strand; PAM type: NRG; PAM sequence: GGG
acaagtcatggtactgtgct

SEQ ID NO: 40978 - DNA, 20 bp, Artificial Sequence
  Description of Artificial Sequence: Synthetic oligonucleotide
  Target: ATXN2; (+) strand; PAM type: NRG; PAM sequence: TAG
atggtactgtgctgggctca

SEQ ID NO: 40979 - DNA, 20 bp, Artificial Sequence
  Description of Artificial Sequence: Synthetic oligonucleotide
  Target: ATXN2; (+) strand; PAM type: NRG; PAM sequence: CAG
tactgtgctgggctcatagt

SEQ ID NO: 40980 - DNA, 20 bp, Artificial Sequence
  Description of Artificial Sequence: Synthetic oligonucleotide
  Target: ATXN2; (+) strand; PAM type: NRG; PAM sequence: TGG
tgtgctgggctcatagtcag

SEQ ID NO: 40981 - DNA, 20 bp, Artificial Sequence
  Description of Artificial Sequence: Synthetic oligonucleotide
  Target: ATXN2; (+) strand; PAM type: NRG; PAM sequence: TGG
gggctcatagtcagtggact

SEQ ID NO: 40982 - DNA, 20 bp, Artificial Sequence
  Description of Artificial Sequence: Synthetic oligonucleotide
  Target: ATXN2; (+) strand; PAM type: NRG; PAM sequence: GGG
ggctcatagtcagtggactt

SEQ ID NO: 40983 - DNA, 20 bp, Artificial Sequence
  Description of Artificial Sequence: Synthetic oligonucleotide
  Target: ATXN2; (+) strand; PAM type: NRG; PAM sequence: GGG
gctcatagtcagtggacttg

SEQ ID NO: 40984 - DNA, 20 bp, Artificial Sequence
  Description of Artificial Sequence: Synthetic oligonucleotide
  Target: ATXN2; (+) strand; PAM type: NRG; PAM sequence: GAG
tggggtacatgtgacccact

SEQ ID NO: 40985 - DNA, 20 bp, Artificial Sequence
  Description of Artificial Sequence: Synthetic oligonucleotide
  Target: ATXN2; (+) strand; PAM type: NRG; PAM sequence: CAG
catgtgacccactgagacac

SEQ ID NO: 40986 - DNA, 20 bp, Artificial Sequence
  Description of Artificial Sequence: Synthetic oligonucleotide
  Target: ATXN2; (+) strand; PAM type: NRG; PAM sequence: TAG
tgacccactgagacaccagc

SEQ ID NO: 40987 - DNA, 20 bp, Artificial Sequence
  Description of Artificial Sequence: Synthetic oligonucleotide
  Target: ATXN2; (+) strand; PAM type: NRG; PAM sequence: AGG
gacccactgagacaccagct

SEQ ID NO: 40988 - DNA, 20 bp, Artificial Sequence
  Description of Artificial Sequence: Synthetic oligonucleotide
  Target: ATXN2; (+) strand; PAM type: NRG; PAM sequence: GGG
acccactgagacaccagcta

SEQ ID NO: 40989 - DNA, 20 bp, Artificial Sequence
  Description of Artificial Sequence: Synthetic oligonucleotide
  Target: ATXN2; (+) strand; PAM type: NRG; PAM sequence: TGG
cactgagacaccagctaggg

SEQ ID NO: 40990 - DNA, 20 bp, Artificial Sequence
  Description of Artificial Sequence: Synthetic oligonucleotide
  Target: ATXN2; (+) strand; PAM type: NRG; PAM sequence: AAG
agacaccagctagggtggcc

SEQ ID NO: 40991 - DNA, 20 bp, Artificial Sequence
  Description of Artificial Sequence: Synthetic oligonucleotide
  Target: ATXN2; (+) strand; PAM type: NRG; PAM sequence: AGG
gacaccagctagggtggcca

SEQ ID NO: 40992 - DNA, 20 bp, Artificial Sequence
  Description of Artificial Sequence: Synthetic oligonucleotide
  Target: ATXN2; (+) strand; PAM type: NRG; PAM sequence: GGG
acaccagctagggtggccaa

SEQ ID NO: 40993 - DNA, 20 bp, Artificial Sequence
  Description of Artificial Sequence: Synthetic oligonucleotide
  Target: ATXN2; (+) strand; PAM type: NRG; PAM sequence: GAG
accagctagggtggccaagg

SEQ ID NO: 40994 - DNA, 20 bp, Artificial Sequence
  Description of Artificial Sequence: Synthetic oligonucleotide
  Target: ATXN2; (+) strand; PAM type: NRG; PAM sequence: CAG
ggccaagggagtgcttgtgc

SEQ ID NO: 40995 - DNA, 20 bp, Artificial Sequence
  Description of Artificial Sequence: Synthetic oligonucleotide
  Target: ATXN2; (+) strand; PAM type: NRG; PAM sequence: CAG
tgccagccttcccccaactc

SEQ ID NO: 40996 - DNA, 20 bp, Artificial Sequence
  Description of Artificial Sequence: Synthetic oligonucleotide
  Target: ATXN2; (+) strand; PAM type: NRG; PAM sequence: AGG
gccagccttcccccaactcc

SEQ ID NO: 40997 - DNA, 20 bp, Artificial Sequence
  Description of Artificial Sequence: Synthetic oligonucleotide
  Target: ATXN2; (+) strand; PAM type: NRG; PAM sequence: CAG
tcccccaactccaggtacca

SEQ ID NO: 40998 - DNA, 20 bp, Artificial Sequence
  Description of Artificial Sequence: Synthetic oligonucleotide
  Target: ATXN2; (+) strand; PAM type: NRG; PAM sequence: CAG
actccaggtaccacagctca

SEQ ID NO: 40999 - DNA, 20 bp, Artificial Sequence
  Description of Artificial Sequence: Synthetic oligonucleotide
  Target: ATXN2; (+) strand; PAM type: NRG; PAM sequence: TGG
ggtaccacagctcacagctc

SEQ ID NO: 41000 - DNA, 20 bp, Artificial Sequence
  Description of Artificial Sequence: Synthetic oligonucleotide
  Target: ATXN2; (+) strand; PAM type: NRG; PAM sequence: GGG
gtaccacagctcacagctct

SEQ ID NO: 41001 - DNA, 20 bp, Artificial Sequence
  Description of Artificial Sequence: Synthetic oligonucleotide
  Target: ATXN2; (+) strand; PAM type: NRG; PAM sequence: GAG
accacagctcacagctctgg

SEQ ID NO: 41002 - DNA, 20 bp, Artificial Sequence
  Description of Artificial Sequence: Synthetic oligonucleotide
  Target: ATXN2; (+) strand; PAM type: NRG; PAM sequence: AGG
ccacagctcacagctctggg

SEQ ID NO: 41003 - DNA, 20 bp, Artificial Sequence
  Description of Artificial Sequence: Synthetic oligonucleotide
  Target: ATXN2; (+) strand; PAM type: NRG; PAM sequence: GAG
acagctcacagctctgggag

SEQ ID NO: 41004 - DNA, 20 bp, Artificial Sequence
  Description of Artificial Sequence: Synthetic oligonucleotide
  Target: ATXN2; (+) strand; PAM type: NRG; PAM sequence: GAG
agctcacagctctgggagga

SEQ ID NO: 41005 - DNA, 20 bp, Artificial Sequence
  Description of Artificial Sequence: Synthetic oligonucleotide
  Target: ATXN2; (+) strand; PAM type: NRG; PAM sequence: AGG
gctcacagctctgggaggag

SEQ ID NO: 41006 - DNA, 20 bp, Artificial Sequence
  Description of Artificial Sequence: Synthetic oligonucleotide
  Target: ATXN2; (+) strand; PAM type: NRG; PAM sequence: GGG
ctcacagctctgggaggaga

SEQ ID NO: 41007 - DNA, 20 bp, Artificial Sequence
  Description of Artificial Sequence: Synthetic oligonucleotide
  Target: ATXN2; (+) strand; PAM type: NRG; PAM sequence: AAG
acagctctgggaggagaggg

SEQ ID NO: 41008 - DNA, 20 bp, Artificial Sequence
  Description of Artificial Sequence: Synthetic oligonucleotide
  Target: ATXN2; (+) strand; PAM type: NRG; PAM sequence: GAG
agctctgggaggagagggaa

SEQ ID NO: 41009 - DNA, 20 bp, Artificial Sequence
  Description of Artificial Sequence: Synthetic oligonucleotide
  Target: ATXN2; (+) strand; PAM type: NRG; PAM sequence: TAG
tctgggaggagagggaagag

SEQ ID NO: 41010 - DNA, 20 bp, Artificial Sequence
  Description of Artificial Sequence: Synthetic oligonucleotide
  Target: ATXN2; (+) strand; PAM type: NRG; PAM sequence: AGG
ctgggaggagagggaagagt

SEQ ID NO: 41011 - DNA, 20 bp, Artificial Sequence
  Description of Artificial Sequence: Synthetic oligonucleotide
  Target: ATXN2; (+) strand; PAM type: NRG; PAM sequence: GGG
tgggaggagagggaagagta

SEQ ID NO: 41012 - DNA, 20 bp, Artificial Sequence
  Description of Artificial Sequence: Synthetic oligonucleotide
  Target: ATXN2; (+) strand; PAM type: NRG; PAM sequence: GAG
ggaggagagggaagagtagg

SEQ ID NO: 41013 - DNA, 20 bp, Artificial Sequence
  Description of Artificial Sequence: Synthetic oligonucleotide
  Target: ATXN2; (+) strand; PAM type: NRG; PAM sequence: AGG
gaggagagggaagagtaggg

SEQ ID NO: 41014 - DNA, 20 bp, Artificial Sequence
  Description of Artificial Sequence: Synthetic oligonucleotide
  Target: ATXN2; (+) strand; PAM type: NRG; PAM sequence: TGG
gaggactttgtcttgcaatg

SEQ ID NO: 41015 - DNA, 20 bp, Artificial Sequence
  Description of Artificial Sequence: Synthetic oligonucleotide
  Target: ATXN2; (+) strand; PAM type: NRG; PAM sequence: TAG
ttgtcttgcaatgtggatac

SEQ ID NO: 41016 - DNA, 20 bp, Artificial Sequence
  Description of Artificial Sequence: Synthetic oligonucleotide
  Target: ATXN2; (+) strand; PAM type: NRG; PAM sequence: CAG
ttgcaatgtggatactagtt

SEQ ID NO: 41017 - DNA, 20 bp, Artificial Sequence
  Description of Artificial Sequence: Synthetic oligonucleotide
  Target: ATXN2; (+) strand; PAM type: NRG; PAM sequence: CAG
tgtggatactagttcagcca

SEQ ID NO: 41018 - DNA, 20 bp, Artificial Sequence
  Description of Artificial Sequence: Synthetic oligonucleotide
  Target: ATXN2; (+) strand; PAM type: NRG; PAM sequence: AAG
agttcagccacagtaaaata

SEQ ID NO: 41019 - DNA, 20 bp, Artificial Sequence
  Description of Artificial Sequence: Synthetic oligonucleotide
  Target: ATXN2; (+) strand; PAM type: NRG; PAM sequence: AAG
ccacagtaaaataaagcacc

SEQ ID NO: 41020 - DNA, 20 bp, Artificial Sequence
  Description of Artificial Sequence: Synthetic oligonucleotide
  Target: ATXN2; (+) strand; PAM type: NRG; PAM sequence: TAG
gtaaaataaagcaccaagca

SEQ ID NO: 41021 - DNA, 20 bp, Artificial Sequence
  Description of Artificial Sequence: Synthetic oligonucleotide
  Target: ATXN2; (+) strand; PAM type: NRG; PAM sequence: AAG
aagcaccaagcatagttctg

SEQ ID NO: 41022 - DNA, 20 bp, Artificial Sequence
  Description of Artificial Sequence: Synthetic oligonucleotide
  Target: ATXN2; (+) strand; PAM type: NRG; PAM sequence: TAG
tagttctgaagcctcaattc

SEQ ID NO: 41023 - DNA, 20 bp, Artificial Sequence
  Description of Artificial Sequence: Synthetic oligonucleotide
  Target: ATXN2; (+) strand; PAM type: NRG; PAM sequence: AGG
agttctgaagcctcaattct

SEQ ID NO: 41024 - DNA, 20 bp, Artificial Sequence
  Description of Artificial Sequence: Synthetic oligonucleotide
  Target: ATXN2; (+) strand; PAM type: NRG; PAM sequence: TAG
gaagcctcaattctaggcca

SEQ ID NO: 41025 - DNA, 20 bp, Artificial Sequence
  Description of Artificial Sequence: Synthetic oligonucleotide
  Target: ATXN2; (+) strand; PAM type: NRG; PAM sequence: CAG
caattctaggccatagctcc

SEQ ID NO: 41026 - DNA, 20 bp, Artificial Sequence
  Description of Artificial Sequence: Synthetic oligonucleotide
  Target: ATXN2; (+) strand; PAM type: NRG; PAM sequence: TAG
tagctcccagatgacatttc

SEQ ID NO: 41027 - DNA, 20 bp, Artificial Sequence
  Description of Artificial Sequence: Synthetic oligonucleotide
  Target: ATXN2; (+) strand; PAM type: NRG; PAM sequence: TGG
tgacatttctagacatattc

SEQ ID NO: 41028 - DNA, 20 bp, Artificial Sequence
  Description of Artificial Sequence: Synthetic oligonucleotide
  Target: ATXN2; (+) strand; PAM type: NRG; PAM sequence: CAG
tttctagacatattctggac

SEQ ID NO: 41029 - DNA, 20 bp, Artificial Sequence
  Description of Artificial Sequence: Synthetic oligonucleotide
  Target: ATXN2; (+) strand; PAM type: NRG; PAM sequence: AAG
ctagacatattctggaccag

SEQ ID NO: 41030 - DNA, 20 bp, Artificial Sequence
  Description of Artificial Sequence: Synthetic oligonucleotide
  Target: ATXN2; (+) strand; PAM type: NRG; PAM sequence: AGG
tagacatattctggaccaga

SEQ ID NO: 41031 - DNA, 20 bp, Artificial Sequence
  Description of Artificial Sequence: Synthetic oligonucleotide
  Target: ATXN2; (+) strand; PAM type: NRG; PAM sequence: GGG
agacatattctggaccagaa

SEQ ID NO: 41032 - DNA, 20 bp, Artificial Sequence
  Description of Artificial Sequence: Synthetic oligonucleotide
  Target: ATXN2; (+) strand; PAM type: NRG; PAM sequence: AAG
gaagggaacccattgccttg

SEQ ID NO: 41033 - DNA, 20 bp, Artificial Sequence
  Description of Artificial Sequence: Synthetic oligonucleotide
  Target: ATXN2; (+) strand; PAM type: NRG; PAM sequence: AGG
aagggaacccattgccttga

SEQ ID NO: 41034 - DNA, 20 bp, Artificial Sequence
  Description of Artificial Sequence: Synthetic oligonucleotide
  Target: ATXN2; (+) strand; PAM type: NRG; PAM sequence: GGG
agggaacccattgccttgaa

SEQ ID NO: 41035 - DNA, 20 bp, Artificial Sequence
  Description of Artificial Sequence: Synthetic oligonucleotide
  Target: ATXN2; (+) strand; PAM type: NRG; PAM sequence: TAG
ttgccttgaagggaaatacc

SEQ ID NO: 41036 - DNA, 20 bp, Artificial Sequence
  Description of Artificial Sequence: Synthetic oligonucleotide
  Target: ATXN2; (+) strand; PAM type: NRG; PAM sequence: TAG
tgaagggaaatacctagtcc

SEQ ID NO: 41037 - DNA, 20 bp, Artificial Sequence
  Description of Artificial Sequence: Synthetic oligonucleotide
  Target: ATXN2; (+) strand; PAM type: NRG; PAM sequence: TAG
agggaaatacctagtcctag

SEQ ID NO: 41038 - DNA, 20 bp, Artificial Sequence
  Description of Artificial Sequence: Synthetic oligonucleotide
  Target: ATXN2; (+) strand; PAM type: NRG; PAM sequence: AGG
gggaaatacctagtcctagt

SEQ ID NO: 41039 - DNA, 20 bp, Artificial Sequence
  Description of Artificial Sequence: Synthetic oligonucleotide
  Target: ATXN2; (+) strand; PAM type: NRG; PAM sequence: CAG
gtcctagtaggattcaccac

SEQ ID NO: 41040 - DNA, 20 bp, Artificial Sequence
  Description of Artificial Sequence: Synthetic oligonucleotide
  Target: ATXN2; (+) strand; PAM type: NRG; PAM sequence: AAG
gattcaccaccagctgacta

SEQ ID NO: 41041 - DNA, 20 bp, Artificial Sequence
  Description of Artificial Sequence: Synthetic oligonucleotide
  Target: ATXN2; (+) strand; PAM type: NRG; PAM sequence: GAG
ttcaccaccagctgactaaa

SEQ ID NO: 41042 - DNA, 20 bp, Artificial Sequence
  Description of Artificial Sequence: Synthetic oligonucleotide
  Target: ATXN2; (+) strand; PAM type: NRG; PAM sequence: AAG
ttgtgccttgaataaaaaac

SEQ ID NO: 41043 - DNA, 20 bp, Artificial Sequence
  Description of Artificial Sequence: Synthetic oligonucleotide
  Target: ATXN2; (+) strand; PAM type: NRG; PAM sequence: AGG
tgtgccttgaataaaaaaca

SEQ ID NO: 41044 - DNA, 20 bp, Artificial Sequence
  Description of Artificial Sequence: Synthetic oligonucleotide
  Target: ATXN2; (+) strand; PAM type: NRG; PAM sequence: CAG
ggtgccatgtcgtattgtgc

SEQ ID NO: 41045 - DNA, 20 bp, Artificial Sequence
  Description of Artificial Sequence: Synthetic oligonucleotide
  Target: ATXN2; (+) strand; PAM type: NRG; PAM sequence: CAG
atgtcgtattgtgccagctt

SEQ ID NO: 41046 - DNA, 20 bp, Artificial Sequence
  Description of Artificial Sequence: Synthetic oligonucleotide
  Target: ATXN2; (+) strand; PAM type: NRG; PAM sequence: CAG
gatatgaccccgcacattca

SEQ ID NO: 41047 - DNA, 20 bp, Artificial Sequence
  Description of Artificial Sequence: Synthetic oligonucleotide
  Target: ATXN2; (+) strand; PAM type: NRG; PAM sequence: TGG
accccgcacattcacagctg

SEQ ID NO: 41048 - DNA, 20 bp, Artificial Sequence
  Description of Artificial Sequence: Synthetic oligonucleotide
  Target: ATXN2; (+) strand; PAM type: NRG; PAM sequence: TGG
attcacagctgtggtgtcca

SEQ ID NO: 41049 - DNA, 20 bp, Artificial Sequence
  Description of Artificial Sequence: Synthetic oligonucleotide
  Target: ATXN2; (+) strand; PAM type: NRG; PAM sequence: GGG
ttcacagctgtggtgtccat

SEQ ID NO: 41050 - DNA, 20 bp, Artificial Sequence
  Description of Artificial Sequence: Synthetic oligonucleotide
  Target: ATXN2; (+) strand; PAM type: NRG; PAM sequence: GGG
tcacagctgtggtgtccatg

SEQ ID NO: 41051 - DNA, 20 bp, Artificial Sequence
  Description of Artificial Sequence: Synthetic oligonucleotide
  Target: ATXN2; (+) strand; PAM type: NRG; PAM sequence: GAG
acagctgtggtgtccatggg

SEQ ID NO: 41052 - DNA, 20 bp, Artificial Sequence
  Description of Artificial Sequence: Synthetic oligonucleotide
  Target: ATXN2; (+) strand; PAM type: NRG; PAM sequence: GAG
atggggagacccacctgctt

SEQ ID NO: 41053 - DNA, 20 bp, Artificial Sequence
  Description of Artificial Sequence: Synthetic oligonucleotide
  Target: ATXN2; (+) strand; PAM type: NRG; PAM sequence: AGG
tggggagacccacctgcttg

SEQ ID NO: 41054 - DNA, 20 bp, Artificial Sequence
  Description of Artificial Sequence: Synthetic oligonucleotide
  Target: ATXN2; (+) strand; PAM type: NRG; PAM sequence: GAG
gagacccacctgcttgaggt

SEQ ID NO: 41055 - DNA, 20 bp, Artificial Sequence
  Description of Artificial Sequence: Synthetic oligonucleotide
  Target: ATXN2; (+) strand; PAM type: NRG; PAM sequence: GAG
gacccacctgcttgaggtga

SEQ ID NO: 41056 - DNA, 20 bp, Artificial Sequence
  Description of Artificial Sequence: Synthetic oligonucleotide
  Target: ATXN2; (+) strand; PAM type: NRG; PAM sequence: AAG
ccacctgcttgaggtgagag

SEQ ID NO: 41057 - DNA, 20 bp, Artificial Sequence
  Description of Artificial Sequence: Synthetic oligonucleotide
  Target: ATXN2; (+) strand; PAM type: NRG; PAM sequence: GAG
acctgcttgaggtgagagaa

SEQ ID NO: 41058 - DNA, 20 bp, Artificial Sequence
  Description of Artificial Sequence: Synthetic oligonucleotide
  Target: ATXN2; (+) strand; PAM type: NRG; PAM sequence: AAG
tgaggtgagagaagagtaaa

SEQ ID NO: 41059 - DNA, 20 bp, Artificial Sequence
  Description of Artificial Sequence: Synthetic oligonucleotide
  Target: ATXN2; (+) strand; PAM type: NRG; PAM sequence: AGG
gaggtgagagaagagtaaaa

SEQ ID NO: 41060 - DNA, 20 bp, Artificial Sequence
  Description of Artificial Sequence: Synthetic oligonucleotide
  Target: ATXN2; (+) strand; PAM type: NRG; PAM sequence: AAG
taaaaaggactttatcttgc

SEQ ID NO: 41061 - DNA, 20 bp, Artificial Sequence
  Description of Artificial Sequence: Synthetic oligonucleotide
  Target: ATXN2; (+) strand; PAM type: NRG; PAM sequence: TGG
aaaggactttatcttgcaag

SEQ ID NO: 41062 - DNA, 20 bp, Artificial Sequence
  Description of Artificial Sequence: Synthetic oligonucleotide
  Target: ATXN2; (+) strand; PAM type: NRG; PAM sequence: GGG
aaggactttatcttgcaagt

SEQ ID NO: 41063 - DNA, 20 bp, Artificial Sequence
  Description of Artificial Sequence: Synthetic oligonucleotide
  Target: ATXN2; (+) strand; PAM type: NRG; PAM sequence: CAG
tttatcttgcaagtgggtgc

SEQ ID NO: 41064 - DNA, 20 bp, Artificial Sequence
  Description of Artificial Sequence: Synthetic oligonucleotide
  Target: ATXN2; (+) strand; PAM type: NRG; PAM sequence: CAG
cttgcaagtgggtgccagct

SEQ ID NO: 41065 - DNA, 20 bp, Artificial Sequence
  Description of Artificial Sequence: Synthetic oligonucleotide
  Target: ATXN2; (+) strand; PAM type: NRG; PAM sequence: CAG
agtgggtgccagctcagccc

SEQ ID NO: 41066 - DNA, 20 bp, Artificial Sequence
  Description of Artificial Sequence: Synthetic oligonucleotide
  Target: ATXN2; (+) strand; PAM type: NRG; PAM sequence: AAG
agctcagccccagtacaata

SEQ ID NO: 41067 - DNA, 20 bp, Artificial Sequence
  Description of Artificial Sequence: Synthetic oligonucleotide
  Target: ATXN2; (+) strand; PAM type: NRG; PAM sequence: CAG
tcagccccagtacaataaag

SEQ ID NO: 41068 - DNA, 20 bp, Artificial Sequence
  Description of Artificial Sequence: Synthetic oligonucleotide
  Target: ATXN2; (+) strand; PAM type: NRG; PAM sequence: AAG
tacaataaagcagattccta

SEQ ID NO: 41069 - DNA, 20 bp, Artificial Sequence
  Description of Artificial Sequence: Synthetic oligonucleotide
  Target: ATXN2; (+) strand; PAM type: NRG; PAM sequence: CAG
attcctaaagctcccgatcc

SEQ ID NO: 41070 - DNA, 20 bp, Artificial Sequence
  Description of Artificial Sequence: Synthetic oligonucleotide
  Target: ATXN2; (+) strand; PAM type: NRG; PAM sequence: AGG
ttcctaaagctcccgatccc

SEQ ID NO: 41071 - DNA, 20 bp, Artificial Sequence
  Description of Artificial Sequence: Synthetic oligonucleotide
  Target: ATXN2; (+) strand; PAM type: NRG; PAM sequence: TGG
aagctcccgatcccaggccc

SEQ ID NO: 41072 - DNA, 20 bp, Artificial Sequence
  Description of Artificial Sequence: Synthetic oligonucleotide
  Target: ATXN2; (+) strand; PAM type: NRG; PAM sequence: TGG
cgatcccaggccctggctcc

SEQ ID NO: 41073 - DNA, 20 bp, Artificial Sequence
  Description of Artificial Sequence: Synthetic oligonucleotide
  Target: ATXN2; (+) strand; PAM type: NRG; PAM sequence: GGG
gatcccaggccctggctcct

SEQ ID NO: 41074 - DNA, 20 bp, Artificial Sequence
  Description of Artificial Sequence: Synthetic oligonucleotide
  Target: ATXN2; (+) strand; PAM type: NRG; PAM sequence: CAG
cccaggccctggctcctggg

SEQ ID NO: 41075 - DNA, 20 bp, Artificial Sequence
  Description of Artificial Sequence: Synthetic oligonucleotide
  Target: ATXN2; (+) strand; PAM type: NRG; PAM sequence: TAG
tggctcctgggcagcatttc

SEQ ID NO: 41076 - DNA, 20 bp, Artificial Sequence
  Description of Artificial Sequence: Synthetic oligonucleotide
  Target: ATXN2; (+) strand; PAM type: NRG; PAM sequence: TGG
cagcatttctagacacaccc

SEQ ID NO: 41077 - DNA, 20 bp, Artificial Sequence
  Description of Artificial Sequence: Synthetic oligonucleotide
  Target: ATXN2; (+) strand; PAM type: NRG; PAM sequence: GGG
agcatttctagacacaccct

SEQ ID NO: 41078 - DNA, 20 bp, Artificial Sequence
  Description of Artificial Sequence: Synthetic oligonucleotide
  Target: ATXN2; (+) strand; PAM type: NRG; PAM sequence: CAG
tttctagacacaccctgggc

SEQ ID NO: 41079 - DNA, 20 bp, Artificial Sequence
  Description of Artificial Sequence: Synthetic oligonucleotide
  Target: ATXN2; (+) strand; PAM type: NRG; PAM sequence: AAG
ctagacacaccctgggccag

SEQ ID NO: 41080 - DNA, 20 bp, Artificial Sequence
  Description of Artificial Sequence: Synthetic oligonucleotide
  Target: ATXN2; (+) strand; PAM type: NRG; PAM sequence: AGG
tagacacaccctgggccaga

SEQ ID NO: 41081 - DNA, 20 bp, Artificial Sequence
  Description of Artificial Sequence: Synthetic oligonucleotide
  Target: ATXN2; (+) strand; PAM type: NRG; PAM sequence: GGG
agacacaccctgggccagaa

SEQ ID NO: 41082 - DNA, 20 bp, Artificial Sequence
  Description of Artificial Sequence: Synthetic oligonucleotide
  Target: ATXN2; (+) strand; PAM type: NRG; PAM sequence: AAG
aagggaacctgctgcactga

SEQ ID NO: 41083 - DNA, 20 bp, Artificial Sequence
  Description of Artificial Sequence: Synthetic oligonucleotide
  Target: ATXN2; (+) strand; PAM type: NRG; PAM sequence: AAG
aacctgctgcactgaaagta

SEQ ID NO: 41084 - DNA, 20 bp, Artificial Sequence
  Description of Artificial Sequence: Synthetic oligonucleotide
  Target: ATXN2; (+) strand; PAM type: NRG; PAM sequence: CAG
ctgcactgaaagtaaagacc

SEQ ID NO: 41085 - DNA, 20 bp, Artificial Sequence
  Description of Artificial Sequence: Synthetic oligonucleotide
  Target: ATXN2; (+) strand; PAM type: NRG; PAM sequence: CAG
aagtaaagacccagttcttg

SEQ ID NO: 41086 - DNA, 20 bp, Artificial Sequence
  Description of Artificial Sequence: Synthetic oligonucleotide
  Target: ATXN2; (+) strand; PAM type: NRG; PAM sequence: AGG
agtaaagacccagttcttgc

SEQ ID NO: 41087 - DNA, 20 bp, Artificial Sequence
  Description of Artificial Sequence: Synthetic oligonucleotide
  Target: ATXN2; (+) strand; PAM type: NRG; PAM sequence: AAG
gattcttcacctactgacta

SEQ ID NO: 41088 - DNA, 20 bp, Artificial Sequence
  Description of Artificial Sequence: Synthetic oligonucleotide
  Target: ATXN2; (+) strand; PAM type: NRG; PAM sequence: TGG
cctactgactaaagcaccct

SEQ ID NO: 41089 - DNA, 20 bp, Artificial Sequence
  Description of Artificial Sequence: Synthetic oligonucleotide
  Target: ATXN2; (+) strand; PAM type: NRG; PAM sequence: GGG
ctactgactaaagcaccctt

SEQ ID NO: 41090 - DNA, 20 bp, Artificial Sequence
  Description of Artificial Sequence: Synthetic oligonucleotide
  Target: ATXN2; (+) strand; PAM type: NRG; PAM sequence: CAG
cttgggccttaaattaacat

SEQ ID NO: 41091 - DNA, 20 bp, Artificial Sequence
  Description of Artificial Sequence: Synthetic oligonucleotide
  Target: ATXN2; (+) strand; PAM type: NRG; PAM sequence: TGG
gggccttaaattaacatcag

SEQ ID NO: 41092 - DNA, 20 bp, Artificial Sequence
  Description of Artificial Sequence: Synthetic oligonucleotide
  Target: ATXN2; (+) strand; PAM type: NRG; PAM sequence: TGG
ccttaaattaacatcagtgg

SEQ ID NO: 41093 - DNA, 20 bp, Artificial Sequence
  Description of Artificial Sequence: Synthetic oligonucleotide
  Target: ATXN2; (+) strand; PAM type: NRG; PAM sequence: CAG
aaattaacatcagtggtggc

SEQ ID NO: 41094 - DNA, 20 bp, Artificial Sequence
  Description of Artificial Sequence: Synthetic oligonucleotide
  Target: ATXN2; (+) strand; PAM type: NRG; PAM sequence: TAG
catcagtggtggccagaaaa

SEQ ID NO: 41095 - DNA, 20 bp, Artificial Sequence
  Description of Artificial Sequence: Synthetic oligonucleotide
  Target: ATXN2; (+) strand; PAM type: NRG; PAM sequence: CAG
tggccagaaaatagctgcca

SEQ ID NO: 41096 - DNA, 20 bp, Artificial Sequence
  Description of Artificial Sequence: Synthetic oligonucleotide
  Target: ATXN2; (+) strand; PAM type: NRG; PAM sequence: AGG
ggccagaaaatagctgccac

SEQ ID NO: 41097 - DNA, 20 bp, Artificial Sequence
  Description of Artificial Sequence: Synthetic oligonucleotide
  Target: ATXN2; (+) strand; PAM type: NRG; PAM sequence: TGG
aaaatagctgccacaggcct

SEQ ID NO: 41098 - DNA, 20 bp, Artificial Sequence
  Description of Artificial Sequence: Synthetic oligonucleotide
  Target: ATXN2; (+) strand; PAM type: NRG; PAM sequence: GGG
aaatagctgccacaggcctt

SEQ ID NO: 41099 - DNA, 20 bp, Artificial Sequence
  Description of Artificial Sequence: Synthetic oligonucleotide
  Target: ATXN2; (+) strand; PAM type: NRG; PAM sequence: GAG
agctgccacaggccttgggt

SEQ ID NO: 41100 - DNA, 20 bp, Artificial Sequence
  Description of Artificial Sequence: Synthetic oligonucleotide
  Target: ATXN2; (+) strand; PAM type: NRG; PAM sequence: AAG
cacaggccttgggtgagacc

SEQ ID NO: 41101 - DNA, 20 bp, Artificial Sequence
  Description of Artificial Sequence: Synthetic oligonucleotide
  Target: ATXN2; (+) strand; PAM type: NRG; PAM sequence: CAG
gccttgggtgagaccaagta

SEQ ID NO: 41102 - DNA, 20 bp, Artificial Sequence
  Description of Artificial Sequence: Synthetic oligonucleotide
  Target: ATXN2; (+) strand; PAM type: NRG; PAM sequence: CAG
ggtgagaccaagtacagttc

SEQ ID NO: 41103 - DNA, 20 bp, Artificial Sequence
  Description of Artificial Sequence: Synthetic oligonucleotide
  Target: ATXN2; (+) strand; PAM type: NRG; PAM sequence: CGG
accaagtacagttccagtga

SEQ ID NO: 41104 - DNA, 20 bp, Artificial Sequence
  Description of Artificial Sequence: Synthetic oligonucleotide
  Target: ATXN2; (+) strand; PAM type: NRG; PAM sequence: TGG
aagtacagttccagtgacgg

SEQ ID NO: 41105 - DNA, 20 bp, Artificial Sequence
  Description of Artificial Sequence: Synthetic oligonucleotide
  Target: ATXN2; (+) strand; PAM type: NRG; PAM sequence: TGG
agttccagtgacggtggcca

SEQ ID NO: 41106 - DNA, 20 bp, Artificial Sequence
  Description of Artificial Sequence: Synthetic oligonucleotide
  Target: ATXN2; (+) strand; PAM type: NRG; PAM sequence: CAG
tccagtgacggtggccatgg

SEQ ID NO: 41107 - DNA, 20 bp, Artificial Sequence
  Description of Artificial Sequence: Synthetic oligonucleotide
  Target: ATXN2; (+) strand; PAM type: NRG; PAM sequence: AAG
gtcacccttccccaaactcc

SEQ ID NO: 41108 - DNA, 20 bp, Artificial Sequence
  Description of Artificial Sequence: Synthetic oligonucleotide
  Target: ATXN2; (+) strand; PAM type: NRG; PAM sequence: CAG
acccttccccaaactccaag

SEQ ID NO: 41109 - DNA, 20 bp, Artificial Sequence
  Description of Artificial Sequence: Synthetic oligonucleotide
  Target: ATXN2; (+) strand; PAM type: NRG; PAM sequence: CAG
tccccaaactccaagcagct

SEQ ID NO: 41110 - DNA, 20 bp, Artificial Sequence
  Description of Artificial Sequence: Synthetic oligonucleotide
  Target: ATXN2; (+) strand; PAM type: NRG; PAM sequence: AAG
actccaagcagctcagcaca

SEQ ID NO: 41111 - DNA, 20 bp, Artificial Sequence
  Description of Artificial Sequence: Synthetic oligonucleotide
  Target: ATXN2; (+) strand; PAM type: NRG; PAM sequence: GAG
tccaagcagctcagcacaaa

SEQ ID NO: 41112 - DNA, 20 bp, Artificial Sequence
  Description of Artificial Sequence: Synthetic oligonucleotide
  Target: ATXN2; (+) strand; PAM type: NRG; PAM sequence: GAG
caagcagctcagcacaaaga

SEQ ID NO: 41113 - DNA, 20 bp, Artificial Sequence
  Description of Artificial Sequence: Synthetic oligonucleotide
  Target: ATXN2; (+) strand; PAM type: NRG; PAM sequence: TGG
aaagagagactccatttgtt

SEQ ID NO: 41114 - DNA, 20 bp, Artificial Sequence
  Description of Artificial Sequence: Synthetic oligonucleotide
  Target: ATXN2; (+) strand; PAM type: NRG; PAM sequence: GAG
agagagactccatttgtttg

SEQ ID NO: 41115 - DNA, 20 bp, Artificial Sequence
  Description of Artificial Sequence: Synthetic oligonucleotide
  Target: ATXN2; (+) strand; PAM type: NRG; PAM sequence: AAG
ccatttgtttggagaaatgt

SEQ ID NO: 41116 - DNA, 20 bp, Artificial Sequence
  Description of Artificial Sequence: Synthetic oligonucleotide
  Target: ATXN2; (+) strand; PAM type: NRG; PAM sequence: GAG
atttgtttggagaaatgtaa

SEQ ID NO: 41117 - DNA, 20 bp, Artificial Sequence
  Description of Artificial Sequence: Synthetic oligonucleotide
  Target: ATXN2; (+) strand; PAM type: NRG; PAM sequence: AGG
tttgtttggagaaatgtaag

SEQ ID NO: 41118 - DNA, 20 bp, Artificial Sequence
  Description of Artificial Sequence: Synthetic oligonucleotide
  Target: ATXN2; (+) strand; PAM type: NRG; PAM sequence: AAG
ttggagaaatgtaagaggac

SEQ ID NO: 41119 - DNA, 20 bp, Artificial Sequence
  Description of Artificial Sequence: Synthetic oligonucleotide
  Target: ATXN2; (+) strand; PAM type: NRG; PAM sequence: GAG
ggagaaatgtaagaggacaa

SEQ ID NO: 41120 - DNA, 20 bp, Artificial Sequence
  Description of Artificial Sequence: Synthetic oligonucleotide
  Target: ATXN2; (+) strand; PAM type: NRG; PAM sequence: TGG
taagaggacaagagactgcc

SEQ ID NO: 41121 - DNA, 20 bp, Artificial Sequence
  Description of Artificial Sequence: Synthetic oligonucleotide
  Target: ATXN2; (+) strand; PAM type: NRG; PAM sequence: CAG
caagagactgcctggtaata

SEQ ID NO: 41122 - DNA, 20 bp, Artificial Sequence
  Description of Artificial Sequence: Synthetic oligonucleotide
  Target: ATXN2; (+) strand; PAM type: NRG; PAM sequence: AGG
aagagactgcctggtaatac

SEQ ID NO: 41123 - DNA, 20 bp, Artificial Sequence
  Description of Artificial Sequence: Synthetic oligonucleotide
  Target: ATXN2; (+) strand; PAM type: NRG; PAM sequence: GGG
agagactgcctggtaataca

SEQ ID NO: 41124 - DNA, 20 bp, Artificial Sequence
  Description of Artificial Sequence: Synthetic oligonucleotide
  Target: ATXN2; (+) strand; PAM type: NRG; PAM sequence: CAG
ggtaatacagggaattctcc

SEQ ID NO: 41125 - DNA, 20 bp, Artificial Sequence
  Description of Artificial Sequence: Synthetic oligonucleotide
  Target: ATXN2; (+) strand; PAM type: NRG; PAM sequence: AAG
aattctcccagatcttcccc

SEQ ID NO: 41126 - DNA, 20 bp, Artificial Sequence
  Description of Artificial Sequence: Synthetic oligonucleotide
  Target: ATXN2; (+) strand; PAM type: NRG; PAM sequence: AAG
agatcttccccaagactacc

SEQ ID NO: 41127 - DNA, 20 bp, Artificial Sequence
  Description of Artificial Sequence: Synthetic oligonucleotide
  Target: ATXN2; (+) strand; PAM type: NRG; PAM sequence: AGG
gatcttccccaagactacca

SEQ ID NO: 41128 - DNA, 20 bp, Artificial Sequence
  Description of Artificial Sequence: Synthetic oligonucleotide
  Target: ATXN2; (+) strand; PAM type: NRG; PAM sequence: CAG
ctaccaaggtgatacctcta

SEQ ID NO: 41129 - DNA, 20 bp, Artificial Sequence
  Description of Artificial Sequence: Synthetic oligonucleotide
  Target: ATXN2; (+) strand; PAM type: NRG; PAM sequence: GAG
accaaggtgatacctctaca

SEQ ID NO: 41130 - DNA, 20 bp, Artificial Sequence
  Description of Artificial Sequence: Synthetic oligonucleotide
  Target: ATXN2; (+) strand; PAM type: NRG; PAM sequence: TAG
ctacagagtcacaacattac

SEQ ID NO: 41131 - DNA, 20 bp, Artificial Sequence
  Description of Artificial Sequence: Synthetic oligonucleotide
  Target: ATXN2; (+) strand; PAM type: NRG; PAM sequence: TGG
agtcacaacattactagtct

SEQ ID NO: 41132 - DNA, 20 bp, Artificial Sequence
  Description of Artificial Sequence: Synthetic oligonucleotide
  Target: ATXN2; (+) strand; PAM type: NRG; PAM sequence: GGG
gtcacaacattactagtctt

SEQ ID NO: 41133 - DNA, 20 bp, Artificial Sequence
  Description of Artificial Sequence: Synthetic oligonucleotide
  Target: ATXN2; (+) strand; PAM type: NRG; PAM sequence: GGG
tcacaacattactagtcttg

SEQ ID NO: 41134 - DNA, 20 bp, Artificial Sequence
  Description of Artificial Sequence: Synthetic oligonucleotide
  Target: ATXN2; (+) strand; PAM type: NRG; PAM sequence: TGG
ggtgccctctaatgcatgta

SEQ ID NO: 41135 - DNA, 20 bp, Artificial Sequence
  Description of Artificial Sequence: Synthetic oligonucleotide
  Target: ATXN2; (+) strand; PAM type: NRG; PAM sequence: CAG
ctctaatgcatgtatggctg

SEQ ID NO: 41136 - DNA, 20 bp, Artificial Sequence
  Description of Artificial Sequence: Synthetic oligonucleotide
  Target: ATXN2; (+) strand; PAM type: NRG; PAM sequence: GAG
aatgcatgtatggctgcagt

SEQ ID NO: 41137 - DNA, 20 bp, Artificial Sequence
  Description of Artificial Sequence: Synthetic oligonucleotide
  Target: ATXN2; (+) strand; PAM type: NRG; PAM sequence: AAG
atgtatggctgcagtgagcg

SEQ ID NO: 41138 - DNA, 20 bp, Artificial Sequence
  Description of Artificial Sequence: Synthetic oligonucleotide
  Target: ATXN2; (+) strand; PAM type: NRG; PAM sequence: TAG
ggctgcagtgagcgaagact

SEQ ID NO: 41139 - DNA, 20 bp, Artificial Sequence
  Description of Artificial Sequence: Synthetic oligonucleotide
  Target: ATXN2; (+) strand; PAM type: NRG; PAM sequence: AAG
aatacttgaaaaaccttctc

SEQ ID NO: 41140 - DNA, 20 bp, Artificial Sequence
  Description of Artificial Sequence: Synthetic oligonucleotide
  Target: ATXN2; (+) strand; PAM type: NRG; PAM sequence: AAG
acttgaaaaaccttctcaag

SEQ ID NO: 41141 - DNA, 20 bp, Artificial Sequence
  Description of Artificial Sequence: Synthetic oligonucleotide
  Target: ATXN2; (+) strand; PAM type: NRG; PAM sequence: TGG
aaaaaccttctcaagaagaa

SEQ ID NO: 41142 - DNA, 20 bp, Artificial Sequence
  Description of Artificial Sequence: Synthetic oligonucleotide
  Target: ATXN2; (+) strand; PAM type: NRG; PAM sequence: GGG
aaaaccttctcaagaagaat

SEQ ID NO: 41143 - DNA, 20 bp, Artificial Sequence
  Description of Artificial Sequence: Synthetic oligonucleotide
  Target: ATXN2; (+) strand; PAM type: NRG; PAM sequence: GAG
aaccttctcaagaagaatgg

SEQ ID NO: 41144 - DNA, 20 bp, Artificial Sequence
  Description of Artificial Sequence: Synthetic oligonucleotide
  Target: ATXN2; (+) strand; PAM type: NRG; PAM sequence: CGG
ttctcaagaagaatgggagc

SEQ ID NO: 41145 - DNA, 20 bp, Artificial Sequence
  Description of Artificial Sequence: Synthetic oligonucleotide
  Target: ATXN2; (+) strand; PAM type: NRG; PAM sequence: CAG
agaagaatgggagccggatg

SEQ ID NO: 41146 - DNA, 20 bp, Artificial Sequence
  Description of Artificial Sequence: Synthetic oligonucleotide
  Target: ATXN2; (+) strand; PAM type: NRG; PAM sequence: TGG
agaatgggagccggatgcag

SEQ ID NO: 41147 - DNA, 20 bp, Artificial Sequence
  Description of Artificial Sequence: Synthetic oligonucleotide
  Target: ATXN2; (+) strand; PAM type: NRG; PAM sequence: GAG
gcctgtaatcccaacactct

SEQ ID NO: 41148 - DNA, 20 bp, Artificial Sequence
  Description of Artificial Sequence: Synthetic oligonucleotide
  Target: ATXN2; (+) strand; PAM type: NRG; PAM sequence: GAG
ctgtaatcccaacactctga

SEQ ID NO: 41149 - DNA, 20 bp, Artificial Sequence
  Description of Artificial Sequence: Synthetic oligonucleotide
  Target: ATXN2; (+) strand; PAM type: NRG; PAM sequence: AGG
tgtaatcccaacactctgag

SEQ ID NO: 41150 - DNA, 20 bp, Artificial Sequence
  Description of Artificial Sequence: Synthetic oligonucleotide
  Target: ATXN2; (+) strand; PAM type: NRG; PAM sequence: AAG
tcccaacactctgagaggcc

SEQ ID NO: 41151 - DNA, 20 bp, Artificial Sequence
  Description of Artificial Sequence: Synthetic oligonucleotide
  Target: ATXN2; (+) strand; PAM type: NRG; PAM sequence: AGG
cccaacactctgagaggcca

SEQ ID NO: 41152 - DNA, 20 bp, Artificial Sequence
  Description of Artificial Sequence: Synthetic oligonucleotide
  Target: ATXN2; (+) strand; PAM type: NRG; PAM sequence: CGG
aacactctgagaggccaagg

SEQ ID NO: 41153 - DNA, 20 bp, Artificial Sequence
  Description of Artificial Sequence: Synthetic oligonucleotide
  Target: ATXN2; (+) strand; PAM type: NRG; PAM sequence: CAG
ctctgagaggccaaggcgga

SEQ ID NO: 41154 - DNA, 20 bp, Artificial Sequence
  Description of Artificial Sequence: Synthetic oligonucleotide
  Target: ATXN2; (+) strand; PAM type: NRG; PAM sequence: GAG
ggccaaggcggacagatcac

SEQ ID NO: 41155 - DNA, 20 bp, Artificial Sequence
  Description of Artificial Sequence: Synthetic oligonucleotide
  Target: ATXN2; (+) strand; PAM type: NRG; PAM sequence: AGG
gccaaggcggacagatcacg

SEQ ID NO: 41156 - DNA, 20 bp, Artificial Sequence
  Description of Artificial Sequence: Synthetic oligonucleotide
  Target: ATXN2; (+) strand; PAM type: NRG; PAM sequence: TAG
aggcggacagatcacgaggt

SEQ ID NO: 41157 - DNA, 20 bp, Artificial Sequence
  Description of Artificial Sequence: Synthetic oligonucleotide
  Target: ATXN2; (+) strand; PAM type: NRG; PAM sequence: AGG
ggcggacagatcacgaggtt

SEQ ID NO: 41158 - DNA, 20 bp, Artificial Sequence
  Description of Artificial Sequence: Synthetic oligonucleotide
  Target: ATXN2; (+) strand; PAM type: NRG; PAM sequence: GAG
cggacagatcacgaggttag

SEQ ID NO: 41159 - DNA, 20 bp, Artificial Sequence
  Description of Artificial Sequence: Synthetic oligonucleotide
  Target: ATXN2; (+) strand; PAM type: NRG; PAM sequence: GAG
gatcacgaggttaggagttc

SEQ ID NO: 41160 - DNA, 20 bp, Artificial Sequence
  Description of Artificial Sequence: Synthetic oligonucleotide
  Target: ATXN2; (+) strand; PAM type: NRG; PAM sequence: CAG
cgaggttaggagttcgagac

SEQ ID NO: 41161 - DNA, 20 bp, Artificial Sequence
  Description of Artificial Sequence: Synthetic oligonucleotide
  Target: ATXN2; (+) strand; PAM type: NRG; PAM sequence: TGG
cgagaccagcctgaccaaca

SEQ ID NO: 41162 - DNA, 20 bp, Artificial Sequence
  Description of Artificial Sequence: Synthetic oligonucleotide
  Target: ATXN2; (+) strand; PAM type: NRG; PAM sequence: TAG
tttactaaaaatacaaaaat

SEQ ID NO: 41163 - DNA, 20 bp, Artificial Sequence
  Description of Artificial Sequence: Synthetic oligonucleotide
  Target: ATXN2; (+) strand; PAM type: NRG; PAM sequence: CAG
ctaaaaatacaaaaattagc

SEQ ID NO: 41164 - DNA, 20 bp, Artificial Sequence
  Description of Artificial Sequence: Synthetic oligonucleotide
  Target: ATXN2; (+) strand; PAM type: NRG; PAM sequence: AGG
taaaaatacaaaaattagcc

SEQ ID NO: 41165 - DNA, 20 bp, Artificial Sequence
  Description of Artificial Sequence: Synthetic oligonucleotide
  Target: ATXN2; (+) strand; PAM type: NRG; PAM sequence: TGG
atacaaaaattagccaggcg

SEQ ID NO: 41166 - DNA, 20 bp, Artificial Sequence
  Description of Artificial Sequence: Synthetic oligonucleotide
  Target: ATXN2; (+) strand; PAM type: NRG; PAM sequence: TGG
caaaaattagccaggcgtgg

SEQ ID NO: 41167 - DNA, 20 bp, Artificial Sequence
  Description of Artificial Sequence: Synthetic oligonucleotide
  Target: ATXN2; (+) strand; PAM type: NRG; PAM sequence: CAG
gtggcacgcacctgtaatcc

SEQ ID NO: 41168 - DNA, 20 bp, Artificial Sequence
  Description of Artificial Sequence: Synthetic oligonucleotide
  Target: ATXN2; (+) strand; PAM type: NRG; PAM sequence: CAG
cacctgtaatcccagctact

SEQ ID NO: 41169 - DNA, 20 bp, Artificial Sequence
  Description of Artificial Sequence: Synthetic oligonucleotide
  Target: ATXN2; (+) strand; PAM type: NRG; PAM sequence: AGG
acctgtaatcccagctactc

SEQ ID NO: 41170 - DNA, 20 bp, Artificial Sequence
  Description of Artificial Sequence: Synthetic oligonucleotide
  Target: ATXN2; (+) strand; PAM type: NRG; PAM sequence: GAG
ctgtaatcccagctactcag

SEQ ID NO: 41171 - DNA, 20 bp, Artificial Sequence
  Description of Artificial Sequence: Synthetic oligonucleotide
  Target: ATXN2; (+) strand; PAM type: NRG; PAM sequence: AGG
tgtaatcccagctactcagg

SEQ ID NO: 41172 - DNA, 20 bp, Artificial Sequence
  Description of Artificial Sequence: Synthetic oligonucleotide
  Target: ATXN2; (+) strand; PAM type: NRG; PAM sequence: GAG
tcccagctactcaggaggct

SEQ ID NO: 41173 - DNA, 20 bp, Artificial Sequence
  Description of Artificial Sequence: Synthetic oligonucleotide
  Target: ATXN2; (+) strand; PAM type: NRG; PAM sequence: AGG
cccagctactcaggaggctg

SEQ ID NO: 41174 - DNA, 20 bp, Artificial Sequence
  Description of Artificial Sequence: Synthetic oligonucleotide
  Target: ATXN2; (+) strand; PAM type: NRG; PAM sequence: CAG
agctactcaggaggctgagg

SEQ ID NO: 41175 - DNA, 20 bp, Artificial Sequence
  Description of Artificial Sequence: Synthetic oligonucleotide
  Target: ATXN2; (+) strand; PAM type: NRG; PAM sequence: AGG
gctactcaggaggctgaggc

SEQ ID NO: 41176 - DNA, 20 bp, Artificial Sequence
  Description of Artificial Sequence: Synthetic oligonucleotide
  Target: ATXN2; (+) strand; PAM type: NRG; PAM sequence: GAG
tactcaggaggctgaggcag

SEQ ID NO: 41177 - DNA, 20 bp, Artificial Sequence
  Description of Artificial Sequence: Synthetic oligonucleotide
  Target: ATXN2; (+) strand; PAM type: NRG; PAM sequence: CGG
gcaggagaattgcttgaatc

SEQ ID NO: 41178 - DNA, 20 bp, Artificial Sequence
  Description of Artificial Sequence: Synthetic oligonucleotide
  Target: ATXN2; (+) strand; PAM type: NRG; PAM sequence: GGG
caggagaattgcttgaatcc

SEQ ID NO: 41179 - DNA, 20 bp, Artificial Sequence
  Description of Artificial Sequence: Synthetic oligonucleotide
  Target: ATXN2; (+) strand; PAM type: NRG; PAM sequence: GAG
ggagaattgcttgaatccgg

SEQ ID NO: 41180 - DNA, 20 bp, Artificial Sequence
  Description of Artificial Sequence: Synthetic oligonucleotide
  Target: ATXN2; (+) strand; PAM type: NRG; PAM sequence: CGG
aattgcttgaatccgggaga

SEQ ID NO: 41181 - DNA, 20 bp, Artificial Sequence
  Description of Artificial Sequence: Synthetic oligonucleotide
  Target: ATXN2; (+) strand; PAM type: NRG; PAM sequence: GAG
ttgcttgaatccgggagacg

SEQ ID NO: 41182 - DNA, 20 bp, Artificial Sequence
  Description of Artificial Sequence: Synthetic oligonucleotide
  Target: ATXN2; (+) strand; PAM type: NRG; PAM sequence: AGG
tgcttgaatccgggagacgg

SEQ ID NO: 41183 - DNA, 20 bp, Artificial Sequence
  Description of Artificial Sequence: Synthetic oligonucleotide
  Target: ATXN2; (+) strand; PAM type: NRG; PAM sequence: CGG
aatccgggagacggaggttg

SEQ ID NO: 41184 - DNA, 20 bp, Artificial Sequence
  Description of Artificial Sequence: Synthetic oligonucleotide
  Target: ATXN2; (+) strand; PAM type: NRG; PAM sequence: GAG
cgggagacggaggttgcggt

SEQ ID NO: 41185 - DNA, 20 bp, Artificial Sequence
  Description of Artificial Sequence: Synthetic oligonucleotide
  Target: ATXN2; (+) strand; PAM type: NRG; PAM sequence: AAG
gacggaggttgcggtgagca

SEQ ID NO: 41186 - DNA, 20 bp, Artificial Sequence
  Description of Artificial Sequence: Synthetic oligonucleotide
  Target: ATXN2; (+) strand; PAM type: NRG; PAM sequence: CAG
aagactgtgccactgcactc

SEQ ID NO: 41187 - DNA, 20 bp, Artificial Sequence
  Description of Artificial Sequence: Synthetic oligonucleotide
  Target: ATXN2; (+) strand; PAM type: NRG; PAM sequence: TGG
tgtgccactgcactccagcc

SEQ ID NO: 41188 - DNA, 20 bp, Artificial Sequence
  Description of Artificial Sequence: Synthetic oligonucleotide
  Target: ATXN2; (+) strand; PAM type: NRG; PAM sequence: GGG
gtgccactgcactccagcct

SEQ ID NO: 41189 - DNA, 20 bp, Artificial Sequence
  Description of Artificial Sequence: Synthetic oligonucleotide
  Target: ATXN2; (+) strand; PAM type: NRG; PAM sequence: CAG
ctgcactccagcctgggcga

SEQ ID NO: 41190 - DNA, 20 bp, Artificial Sequence
  Description of Artificial Sequence: Synthetic oligonucleotide
  Target: ATXN2; (+) strand; PAM type: NRG; PAM sequence: GAG
gcactccagcctgggcgaca

SEQ ID NO: 41191 - DNA, 20 bp, Artificial Sequence
  Description of Artificial Sequence: Synthetic oligonucleotide
  Target: ATXN2; (+) strand; PAM type: NRG; PAM sequence: GAG
tccagcctgggcgacagagc

SEQ ID NO: 41192 - DNA, 20 bp, Artificial Sequence
  Description of Artificial Sequence: Synthetic oligonucleotide
  Target: ATXN2; (+) strand; PAM type: NRG; PAM sequence: CAG
gcgagactctgtctcaaaaa

SEQ ID NO: 41193 - DNA, 20 bp, Artificial Sequence
  Description of Artificial Sequence: Synthetic oligonucleotide
  Target: ATXN2; (+) strand; PAM type: NRG; PAM sequence: AAG
aaaaacagaaaaaaaaaaaa

SEQ ID NO: 41194 - DNA, 20 bp, Artificial Sequence
  Description of Artificial Sequence: Synthetic oligonucleotide
  Target: ATXN2; (+) strand; PAM type: NRG; PAM sequence: CAG
agaatgcgtacaaacaaaac

SEQ ID NO: 41195 - DNA, 20 bp, Artificial Sequence
  Description of Artificial Sequence: Synthetic oligonucleotide
  Target: ATXN2; (+) strand; PAM type: NRG; PAM sequence: AAG
acaaacaaaaccagactaca

SEQ ID NO: 41196 - DNA, 20 bp, Artificial Sequence
  Description of Artificial Sequence: Synthetic oligonucleotide
  Target: ATXN2; (+) strand; PAM type: NRG; PAM sequence: CAG
caaaaccagactacaaagaa

SEQ ID NO: 41197 - DNA, 20 bp, Artificial Sequence
  Description of Artificial Sequence: Synthetic oligonucleotide
  Target: ATXN2; (+) strand; PAM type: NRG; PAM sequence: CAG
atacccaactcttcaatgcc

SEQ ID NO: 41198 - DNA, 20 bp, Artificial Sequence
  Description of Artificial Sequence: Synthetic oligonucleotide
  Target: ATXN2; (+) strand; PAM type: NRG; PAM sequence: AAG
agacactgatgaacatccac

SEQ ID NO: 41199 - DNA, 20 bp, Artificial Sequence
  Description of Artificial Sequence: Synthetic oligonucleotide
  Target: ATXN2; (+) strand; PAM type: NRG; PAM sequence: AAG
gatgaacatccacaagcatc

SEQ ID NO: 41200 - DNA, 20 bp, Artificial Sequence
  Description of Artificial Sequence: Synthetic oligonucleotide
  Target: ATXN2; (+) strand; PAM type: NRG; PAM sequence: AGG
atgaacatccacaagcatca

SEQ ID NO: 41201 - DNA, 20 bp, Artificial Sequence
  Description of Artificial Sequence: Synthetic oligonucleotide
  Target: ATXN2; (+) strand; PAM type: NRG; PAM sequence: GAG
cacaagcatcaaggccatct

SEQ ID NO: 41202 - DNA, 20 bp, Artificial Sequence
  Description of Artificial Sequence: Synthetic oligonucleotide
  Target: ATXN2; (+) strand; PAM type: NRG; PAM sequence: AAG
caccaaatgaactaaaaata

SEQ ID NO: 41203 - DNA, 20 bp, Artificial Sequence
  Description of Artificial Sequence: Synthetic oligonucleotide
  Target: ATXN2; (+) strand; PAM type: NRG; PAM sequence: AGG
accaaatgaactaaaaataa

SEQ ID NO: 41204 - DNA, 20 bp, Artificial Sequence
  Description of Artificial Sequence: Synthetic oligonucleotide
  Target: ATXN2; (+) strand; PAM type: NRG; PAM sequence: CAG
gaactaaaaataaaggacac

SEQ ID NO: 41205 - DNA, 20 bp, Artificial Sequence
  Description of Artificial Sequence: Synthetic oligonucleotide
  Target: ATXN2; (+) strand; PAM type: NRG; PAM sequence: AAG
gacaccagtgaccaattccc

SEQ ID NO: 41206 - DNA, 20 bp, Artificial Sequence
  Description of Artificial Sequence: Synthetic oligonucleotide
  Target: ATXN2; (+) strand; PAM type: NRG; PAM sequence: AAG
gtgaccaattcccaagtgat

SEQ ID NO: 41207 - DNA, 20 bp, Artificial Sequence
  Description of Artificial Sequence: Synthetic oligonucleotide
  Target: ATXN2; (+) strand; PAM type: NRG; PAM sequence: GAG
gaccaattcccaagtgataa

SEQ ID NO: 41208 - DNA, 20 bp, Artificial Sequence
  Description of Artificial Sequence: Synthetic oligonucleotide
  Target: ATXN2; (+) strand; PAM type: NRG; PAM sequence: CAG
ataagagatatgtgaacttt

SEQ ID NO: 41209 - DNA, 20 bp, Artificial Sequence
  Description of Artificial Sequence: Synthetic oligonucleotide
  Target: ATXN2; (+) strand; PAM type: NRG; PAM sequence: CAG
gagatatgtgaactttcaga

SEQ ID NO: 41210 - DNA, 20 bp, Artificial Sequence
  Description of Artificial Sequence: Synthetic oligonucleotide
  Target: ATXN2; (+) strand; PAM type: NRG; PAM sequence: AAG
tgaactttcagacagaattc

SEQ ID NO: 41211 - DNA, 20 bp, Artificial Sequence
  Description of Artificial Sequence: Synthetic oligonucleotide
  Target: ATXN2; (+) strand; PAM type: NRG; PAM sequence: GAG
gaattcaagctgaatgcttt

SEQ ID NO: 41212 - DNA, 20 bp, Artificial Sequence
  Description of Artificial Sequence: Synthetic oligonucleotide
  Target: ATXN2; (+) strand; PAM type: NRG; PAM sequence: AAG
tcaagctgaatgctttgaga

SEQ ID NO: 41213 - DNA, 20 bp, Artificial Sequence
  Description of Artificial Sequence: Synthetic oligonucleotide
  Target: ATXN2; (+) strand; PAM type: NRG; PAM sequence: AAG
gagaaagttcaacgaaatcc

SEQ ID NO: 41214 - DNA, 20 bp, Artificial Sequence
  Description of Artificial Sequence: Synthetic oligonucleotide
  Target: ATXN2; (+) strand; PAM type: NRG; PAM sequence: CAG
caacgaaatccaagataata

SEQ ID NO: 41215 - DNA, 20 bp, Artificial Sequence
  Description of Artificial Sequence: Synthetic oligonucleotide
  Target: ATXN2; (+) strand; PAM type: NRG; PAM sequence: GAG
acgaaatccaagataataca

SEQ ID NO: 41216 - DNA, 20 bp, Artificial Sequence
  Description of Artificial Sequence: Synthetic oligonucleotide
  Target: ATXN2; (+) strand; PAM type: NRG; PAM sequence: CAG
gataatacagagaacaaatt

SEQ ID NO: 41217 - DNA, 20 bp, Artificial Sequence
  Description of Artificial Sequence: Synthetic oligonucleotide
  Target: ATXN2; (+) strand; PAM type: NRG; PAM sequence: AAG
agaatcctataaatttaaaa

SEQ ID NO: 41218 - DNA, 20 bp, Artificial Sequence
  Description of Artificial Sequence: Synthetic oligonucleotide
  Target: ATXN2; (+) strand; PAM type: NRG; PAM sequence: GAG
aatcctataaatttaaaaaa

SEQ ID NO: 41219 - DNA, 20 bp, Artificial Sequence
  Description of Artificial Sequence: Synthetic oligonucleotide
  Target: ATXN2; (+) strand; PAM type: NRG; PAM sequence: TAG
aaagagactgcaataattat

SEQ ID NO: 41220 - DNA, 20 bp, Artificial Sequence
  Description of Artificial Sequence: Synthetic oligonucleotide
  Target: ATXN2; (+) strand; PAM type: NRG; PAM sequence: AAG
ctgcaataattattagtaaa

SEQ ID NO: 41221 - DNA, 20 bp, Artificial Sequence
  Description of Artificial Sequence: Synthetic oligonucleotide
  Target: ATXN2; (+) strand; PAM type: NRG; PAM sequence: AAG
aattattagtaaaaagaatc

SEQ ID NO: 41222 - DNA, 20 bp, Artificial Sequence
  Description of Artificial Sequence: Synthetic oligonucleotide
  Target: ATXN2; (+) strand; PAM type: NRG; PAM sequence: CAG
tattagtaaaaagaatcaag

SEQ ID NO: 41223 - DNA, 20 bp, Artificial Sequence
  Description of Artificial Sequence: Synthetic oligonucleotide
  Target: ATXN2; (+) strand; PAM type: NRG; PAM sequence: AAG
agaatcaagcagaaatccca

SEQ ID NO: 41224 - DNA, 20 bp, Artificial Sequence
  Description of Artificial Sequence: Synthetic oligonucleotide
  Target: ATXN2; (+) strand; PAM type: NRG; PAM sequence: TGG
atcaagcagaaatcccaaag

SEQ ID NO: 41225 - DNA, 20 bp, Artificial Sequence
  Description of Artificial Sequence: Synthetic oligonucleotide
  Target: ATXN2; (+) strand; PAM type: NRG; PAM sequence: CAG
tgacaaactgaaaaatgcat

SEQ ID NO: 41226 - DNA, 20 bp, Artificial Sequence
  Description of Artificial Sequence: Synthetic oligonucleotide
  Target: ATXN2; (+) strand; PAM type: NRG; PAM sequence: TAG
aaaatgcatcagtctctcaa

SEQ ID NO: 41227 - DNA, 20 bp, Artificial Sequence
  Description of Artificial Sequence: Synthetic oligonucleotide
  Target: ATXN2; (+) strand; PAM type: NRG; PAM sequence: CAG
atgcatcagtctctcaatag

SEQ ID NO: 41228 - DNA, 20 bp, Artificial Sequence
  Description of Artificial Sequence: Synthetic oligonucleotide
  Target: ATXN2; (+) strand; PAM type: NRG; PAM sequence: AAG
ctcaatagcagaaatgtatc

SEQ ID NO: 41229 - DNA, 20 bp, Artificial Sequence
  Description of Artificial Sequence: Synthetic oligonucleotide
  Target: ATXN2; (+) strand; PAM type: NRG; PAM sequence: CAG
aatagcagaaatgtatcaag

SEQ ID NO: 41230 - DNA, 20 bp, Artificial Sequence
  Description of Artificial Sequence: Synthetic oligonucleotide
  Target: ATXN2; (+) strand; PAM type: NRG; PAM sequence: CAG
agcagaaatgtatcaagcag

SEQ ID NO: 41231 - DNA, 20 bp, Artificial Sequence
  Description of Artificial Sequence: Synthetic oligonucleotide
  Target: ATXN2; (+) strand; PAM type: NRG; PAM sequence: TAG
tatcaagcagcagaaaacat

SEQ ID NO: 41232 - DNA, 20 bp, Artificial Sequence
  Description of Artificial Sequence: Synthetic oligonucleotide
  Target: ATXN2; (+) strand; PAM type: NRG; PAM sequence: GAG
aagcagcagaaaacattagt

SEQ ID NO: 41233 - DNA, 20 bp, Artificial Sequence
  Description of Artificial Sequence: Synthetic oligonucleotide
  Target: ATXN2; (+) strand; PAM type: NRG; PAM sequence: CAG
aacattagtgagcttgaatt

SEQ ID NO: 41234 - DNA, 20 bp, Artificial Sequence
  Description of Artificial Sequence: Synthetic oligonucleotide
  Target: ATXN2; (+) strand; PAM type: NRG; PAM sequence: AGG
acattagtgagcttgaattc

SEQ ID NO: 41235 - DNA, 20 bp, Artificial Sequence
  Description of Artificial Sequence: Synthetic oligonucleotide
  Target: ATXN2; (+) strand; PAM type: NRG; PAM sequence: AAG
ctatttgaaaataaacaacc

SEQ ID NO: 41236 - DNA, 20 bp, Artificial Sequence
  Description of Artificial Sequence: Synthetic oligonucleotide
  Target: ATXN2; (+) strand; PAM type: NRG; PAM sequence: TGG
ttgaaaataaacaaccaagt

SEQ ID NO: 41237 - DNA, 20 bp, Artificial Sequence
  Description of Artificial Sequence: Synthetic oligonucleotide
  Target: ATXN2; (+) strand; PAM type: NRG; PAM sequence: GGG
tgaaaataaacaaccaagtt

SEQ ID NO: 41238 - DNA, 20 bp, Artificial Sequence
  Description of Artificial Sequence: Synthetic oligonucleotide
  Target: ATXN2; (+) strand; PAM type: NRG; PAM sequence: TAG
atgactcacgcttataatcc

SEQ ID NO: 41239 - DNA, 20 bp, Artificial Sequence
  Description of Artificial Sequence: Synthetic oligonucleotide
  Target: ATXN2; (+) strand; PAM type: NRG; PAM sequence: TAG
cgcttataatcctagcactt

SEQ ID NO: 41240 - DNA, 20 bp, Artificial Sequence
  Description of Artificial Sequence: Synthetic oligonucleotide
  Target: ATXN2; (+) strand; PAM type: NRG; PAM sequence: AGG
gcttataatcctagcacttt

SEQ ID NO: 41241 - DNA, 20 bp, Artificial Sequence
  Description of Artificial Sequence: Synthetic oligonucleotide
  Target: ATXN2; (+) strand; PAM type: NRG; PAM sequence: AAG
tcctagcactttaggatgcc

SEQ ID NO: 41242 - DNA, 20 bp, Artificial Sequence
  Description of Artificial Sequence: Synthetic oligonucleotide
  Target: ATXN2; (+) strand; PAM type: NRG; PAM sequence: AGG
cctagcactttaggatgcca

SEQ ID NO: 41243 - DNA, 20 bp, Artificial Sequence
  Description of Artificial Sequence: Synthetic oligonucleotide
  Target: ATXN2; (+) strand; PAM type: NRG; PAM sequence: CGG
agcactttaggatgccaagg

SEQ ID NO: 41244 - DNA, 20 bp, Artificial Sequence
  Description of Artificial Sequence: Synthetic oligonucleotide
  Target: ATXN2; (+) strand; PAM type: NRG; PAM sequence: GGG
gcactttaggatgccaaggc

SEQ ID NO: 41245 - DNA, 20 bp, Artificial Sequence
  Description of Artificial Sequence: Synthetic oligonucleotide
  Target: ATXN2; (+) strand; PAM type: NRG; PAM sequence: CGG
ctttaggatgccaaggcggg

SEQ ID NO: 41246 - DNA, 20 bp, Artificial Sequence
  Description of Artificial Sequence: Synthetic oligonucleotide
  Target: ATXN2; (+) strand; PAM type: NRG; PAM sequence: GAG
caaggcgggcggatcaccct

SEQ ID NO: 41247 - DNA, 20 bp, Artificial Sequence
  Description of Artificial Sequence: Synthetic oligonucleotide
  Target: ATXN2; (+) strand; PAM type: NRG; PAM sequence: AGG
aaggcgggcggatcaccctg

SEQ ID NO: 41248 - DNA, 20 bp, Artificial Sequence
  Description of Artificial Sequence: Synthetic oligonucleotide
  Target: ATXN2; (+) strand; PAM type: NRG; PAM sequence: CAG
cgggcggatcaccctgaggt

SEQ ID NO: 41249 - DNA, 20 bp, Artificial Sequence
  Description of Artificial Sequence: Synthetic oligonucleotide
  Target: ATXN2; (+) strand; PAM type: NRG; PAM sequence: AGG
gggcggatcaccctgaggtc

SEQ ID NO: 41250 - DNA, 20 bp, Artificial Sequence
  Description of Artificial Sequence: Synthetic oligonucleotide
  Target: ATXN2; (+) strand; PAM type: NRG; PAM sequence: GAG
gcggatcaccctgaggtcag

SEQ ID NO: 41251 - DNA, 20 bp, Artificial Sequence
  Description of Artificial Sequence: Synthetic oligonucleotide
  Target: ATXN2; (+) strand; PAM type: NRG; PAM sequence: AAG
caccctgaggtcaggagctc

SEQ ID NO: 41252 - DNA, 20 bp, Artificial Sequence
  Description of Artificial Sequence: Synthetic oligonucleotide
  Target: ATXN2; (+) strand; PAM type: NRG; PAM sequence: CAG
tgaggtcaggagctcaagac

SEQ ID NO: 41253 - DNA, 20 bp, Artificial Sequence
  Description of Artificial Sequence: Synthetic oligonucleotide
  Target: ATXN2; (+) strand; PAM type: NRG; PAM sequence: TGG
tcaggagctcaagaccagcc

SEQ ID NO: 41254 - DNA, 20 bp, Artificial Sequence
  Description of Artificial Sequence: Synthetic oligonucleotide
  Target: ATXN2; (+) strand; PAM type: NRG; PAM sequence: TGG
caagaccagcctggcaaata

SEQ ID NO: 41255 - DNA, 20 bp, Artificial Sequence
  Description of Artificial Sequence: Synthetic oligonucleotide
  Target: ATXN2; (+) strand; PAM type: NRG; PAM sequence: AAG
gtctttactaaaaatacaaa

SEQ ID NO: 41256 - DNA, 20 bp, Artificial Sequence
  Description of Artificial Sequence: Synthetic oligonucleotide
  Target: ATXN2; (+) strand; PAM type: NRG; PAM sequence: TAG
tttactaaaaatacaaaaag

SEQ ID NO: 41257 - DNA, 20 bp, Artificial Sequence
  Description of Artificial Sequence: Synthetic oligonucleotide
  Target: ATXN2; (+) strand; PAM type: NRG; PAM sequence: TGG
ctaaaaatacaaaaagtagc

SEQ ID NO: 41258 - DNA, 20 bp, Artificial Sequence
  Description of Artificial Sequence: Synthetic oligonucleotide
  Target: ATXN2; (+) strand; PAM type: NRG; PAM sequence: GGG
taaaaatacaaaaagtagct

SEQ ID NO: 41259 - DNA, 20 bp, Artificial Sequence
  Description of Artificial Sequence: Synthetic oligonucleotide
  Target: ATXN2; (+) strand; PAM type: NRG; PAM sequence: TGG
atacaaaaagtagctgggcg

SEQ ID NO: 41260 - DNA, 20 bp, Artificial Sequence
  Description of Artificial Sequence: Synthetic oligonucleotide
  Target: ATXN2; (+) strand; PAM type: NRG; PAM sequence: TGG
caaaaagtagctgggcgtgg

SEQ ID NO: 41261 - DNA, 20 bp, Artificial Sequence
  Description of Artificial Sequence: Synthetic oligonucleotide
  Target: ATXN2; (+) strand; PAM type: NRG; PAM sequence: CAG
gtggcacatgcttgtaatcc

SEQ ID NO: 41262 - DNA, 20 bp, Artificial Sequence
  Description of Artificial Sequence: Synthetic oligonucleotide
  Target: ATXN2; (+) strand; PAM type: NRG; PAM sequence: TGG
tgcttgtaatcccagctact

SEQ ID NO: 41263 - DNA, 20 bp, Artificial Sequence
  Description of Artificial Sequence: Synthetic oligonucleotide
  Target: ATXN2; (+) strand; PAM type: NRG; PAM sequence: GGG
gcttgtaatcccagctactt

SEQ ID NO: 41264 - DNA, 20 bp, Artificial Sequence
  Description of Artificial Sequence: Synthetic oligonucleotide
  Target: ATXN2; (+) strand; PAM type: NRG; PAM sequence: GAG
ttgtaatcccagctacttgg

SEQ ID NO: 41265 - DNA, 20 bp, Artificial Sequence
  Description of Artificial Sequence: Synthetic oligonucleotide
  Target: ATXN2; (+) strand; PAM type: NRG; PAM sequence: AGG
tgtaatcccagctacttggg

SEQ ID NO: 41266 - DNA, 20 bp, Artificial Sequence
  Description of Artificial Sequence: Synthetic oligonucleotide
  Target: ATXN2; (+) strand; PAM type: NRG; PAM sequence: GAG
tcccagctacttgggaggct

SEQ ID NO: 41267 - DNA, 20 bp, Artificial Sequence
  Description of Artificial Sequence: Synthetic oligonucleotide
  Target: ATXN2; (+) strand; PAM type: NRG; PAM sequence: AGG
cccagctacttgggaggctg

SEQ ID NO: 41268 - DNA, 20 bp, Artificial Sequence
  Description of Artificial Sequence: Synthetic oligonucleotide
  Target: ATXN2; (+) strand; PAM type: NRG; PAM sequence: CAG
agctacttgggaggctgagg

SEQ ID NO: 41269 - DNA, 20 bp, Artificial Sequence
  Description of Artificial Sequence: Synthetic oligonucleotide
  Target: ATXN2; (+) strand; PAM type: NRG; PAM sequence: AAG
tacttgggaggctgaggcag

SEQ ID NO: 41270 - DNA, 20 bp, Artificial Sequence
  Description of Artificial Sequence: Synthetic oligonucleotide
  Target: ATXN2; (+) strand; PAM type: NRG; PAM sequence: TGG
gcagaagaatcgcttgaacc

SEQ ID NO: 41271 - DNA, 20 bp, Artificial Sequence
  Description of Artificial Sequence: Synthetic oligonucleotide
  Target: ATXN2; (+) strand; PAM type: NRG; PAM sequence: GGG
cagaagaatcgcttgaacct

SEQ ID NO: 41272 - DNA, 20 bp, Artificial Sequence
  Description of Artificial Sequence: Synthetic oligonucleotide
  Target: ATXN2; (+) strand; PAM type: NRG; PAM sequence: GAG
gaagaatcgcttgaacctgg

SEQ ID NO: 41273 - DNA, 20 bp, Artificial Sequence
  Description of Artificial Sequence: Synthetic oligonucleotide
  Target: ATXN2; (+) strand; PAM type: NRG; PAM sequence: TGG
aatcgcttgaacctgggagt

SEQ ID NO: 41274 - DNA, 20 bp, Artificial Sequence
  Description of Artificial Sequence: Synthetic oligonucleotide
  Target: ATXN2; (+) strand; PAM type: NRG; PAM sequence: GAG
tcgcttgaacctgggagttg

SEQ ID NO: 41275 - DNA, 20 bp, Artificial Sequence
  Description of Artificial Sequence: Synthetic oligonucleotide
  Target: ATXN2; (+) strand; PAM type: NRG; PAM sequence: AGG
cgcttgaacctgggagttgg

SEQ ID NO: 41276 - DNA, 20 bp, Artificial Sequence
  Description of Artificial Sequence: Synthetic oligonucleotide
  Target: ATXN2; (+) strand; PAM type: NRG; PAM sequence: TAG
aacctgggagttggaggttg

SEQ ID NO: 41277 - DNA, 20 bp, Artificial Sequence
  Description of Artificial Sequence: Synthetic oligonucleotide
  Target: ATXN2; (+) strand; PAM type: NRG; PAM sequence: GAG
tgggagttggaggttgtagt

SEQ ID NO: 41278 - DNA, 20 bp, Artificial Sequence
  Description of Artificial Sequence: Synthetic oligonucleotide
  Target: ATXN2; (+) strand; PAM type: NRG; PAM sequence: AAG
gttggaggttgtagtgagcc

SEQ ID NO: 41279 - DNA, 20 bp, Artificial Sequence
  Description of Artificial Sequence: Synthetic oligonucleotide
  Target: ATXN2; (+) strand; PAM type: NRG; PAM sequence: TGG
gaggttgtagtgagccaaga

SEQ ID NO: 41280 - DNA, 20 bp, Artificial Sequence
  Description of Artificial Sequence: Synthetic oligonucleotide
  Target: ATXN2; (+) strand; PAM type: NRG; PAM sequence: CAG
aagatggcaccactgcactc

SEQ ID NO: 41281 - DNA, 20 bp, Artificial Sequence
  Description of Artificial Sequence: Synthetic oligonucleotide
  Target: ATXN2; (+) strand; PAM type: NRG; PAM sequence: AGG
agatggcaccactgcactcc

SEQ ID NO: 41282 - DNA, 20 bp, Artificial Sequence
  Description of Artificial Sequence: Synthetic oligonucleotide
  Target: ATXN2; (+) strand; PAM type: NRG; PAM sequence: TGG
ggcaccactgcactccaggc

SEQ ID NO: 41283 - DNA, 20 bp, Artificial Sequence
  Description of Artificial Sequence: Synthetic oligonucleotide
  Target: ATXN2; (+) strand; PAM type: NRG; PAM sequence: CAG
actgcactccaggctggtaa

SEQ ID NO: 41284 - DNA, 20 bp, Artificial Sequence
  Description of Artificial Sequence: Synthetic oligonucleotide
  Target: ATXN2; (+) strand; PAM type: NRG; PAM sequence: GAG
tgcactccaggctggtaaca

SEQ ID NO: 41285 - DNA, 20 bp, Artificial Sequence
  Description of Artificial Sequence: Synthetic oligonucleotide
  Target: ATXN2; (+) strand; PAM type: NRG; PAM sequence: AAG
aaaaaaaaaaaaaaaaaaaa

SEQ ID NO: 41286 - DNA, 20 bp, Artificial Sequence
  Description of Artificial Sequence: Synthetic oligonucleotide
  Target: ATXN2; (+) strand; PAM type: NRG; PAM sequence: AAG
aaaaaagttcttcaatctgc

SEQ ID NO: 41287 - DNA, 20 bp, Artificial Sequence
  Description of Artificial Sequence: Synthetic oligonucleotide
  Target: ATXN2; (+) strand; PAM type: NRG; PAM sequence: AAG
agttcttcaatctgcaagaa

SEQ ID NO: 41288 - DNA, 20 bp, Artificial Sequence
  Description of Artificial Sequence: Synthetic oligonucleotide
  Target: ATXN2; (+) strand; PAM type: NRG; PAM sequence: AGG
gttcttcaatctgcaagaaa

SEQ ID NO: 41289 - DNA, 20 bp, Artificial Sequence
  Description of Artificial Sequence: Synthetic oligonucleotide
  Target: ATXN2; (+) strand; PAM type: NRG; PAM sequence: AAG
aaacaataataaatcacctg

SEQ ID NO: 41290 - DNA, 20 bp, Artificial Sequence
  Description of Artificial Sequence: Synthetic oligonucleotide
  Target: ATXN2; (+) strand; PAM type: NRG; PAM sequence: AGG
aacaataataaatcacctga

SEQ ID NO: 41291 - DNA, 20 bp, Artificial Sequence
  Description of Artificial Sequence: Synthetic oligonucleotide
  Target: ATXN2; (+) strand; PAM type: NRG; PAM sequence: TGG
ctgaaggtgcaaaaactcac

SEQ ID NO: 41292 - DNA, 20 bp, Artificial Sequence
  Description of Artificial Sequence: Synthetic oligonucleotide
  Target: ATXN2; (+) strand; PAM type: NRG; PAM sequence: AAG
tgcaaaaactcactggtaac

SEQ ID NO: 41293 - DNA, 20 bp, Artificial Sequence
  Description of Artificial Sequence: Synthetic oligonucleotide
  Target: ATXN2; (+) strand; PAM type: NRG; PAM sequence: CAG
actcactggtaacaagtaca

SEQ ID NO: 41294 - DNA, 20 bp, Artificial Sequence
  Description of Artificial Sequence: Synthetic oligonucleotide
  Target: ATXN2; (+) strand; PAM type: NRG; PAM sequence: CAG
aacaagtacacagaaaaata

SEQ ID NO: 41295 - DNA, 20 bp, Artificial Sequence
  Description of Artificial Sequence: Synthetic oligonucleotide
  Target: ATXN2; (+) strand; PAM type: NRG; PAM sequence: TGG
atattgtaacactgtaattg

SEQ ID NO: 41296 - DNA, 20 bp, Artificial Sequence
  Description of Artificial Sequence: Synthetic oligonucleotide
  Target: ATXN2; (+) strand; PAM type: NRG; PAM sequence: GAG
taaactactactcatatttt

SEQ ID NO: 41297 - DNA, 20 bp, Artificial Sequence
  Description of Artificial Sequence: Synthetic oligonucleotide
  Target: ATXN2; (+) strand; PAM type: NRG; PAM sequence: CAG
actactactcatattttgag

SEQ ID NO: 41298 - DNA, 20 bp, Artificial Sequence
  Description of Artificial Sequence: Synthetic oligonucleotide
  Target: ATXN2; (+) strand; PAM type: NRG; PAM sequence: AGG
ctactactcatattttgagc

SEQ ID NO: 41299 - DNA, 20 bp, Artificial Sequence
  Description of Artificial Sequence: Synthetic oligonucleotide
  Target: ATXN2; (+) strand; PAM type: NRG; PAM sequence: AAG
ctactcatattttgagcagg

SEQ ID NO: 41300 - DNA, 20 bp, Artificial Sequence
  Description of Artificial Sequence: Synthetic oligonucleotide
  Target: ATXN2; (+) strand; PAM type: NRG; PAM sequence: AAG
aaaatgaacctttcaaaaat

SEQ ID NO: 41301 - DNA, 20 bp, Artificial Sequence
  Description of Artificial Sequence: Synthetic oligonucleotide
  Target: ATXN2; (+) strand; PAM type: NRG; PAM sequence: GAG
acaattttttttttttttgt

SEQ ID NO: 41302 - DNA, 20 bp, Artificial Sequence
  Description of Artificial Sequence: Synthetic oligonucleotide
  Target: ATXN2; (+) strand; PAM type: NRG; PAM sequence: CAG
ttttttttttttttgtgaga

SEQ ID NO: 41303 - DNA, 20 bp, Artificial Sequence
  Description of Artificial Sequence: Synthetic oligonucleotide
  Target: ATXN2; (+) strand; PAM type: NRG; PAM sequence: GAG
ttttttttttttgtgagaca

SEQ ID NO: 41304 - DNA, 20 bp, Artificial Sequence
  Description of Artificial Sequence: Synthetic oligonucleotide
  Target: ATXN2; (+) strand; PAM type: NRG; PAM sequence: CAG
cagagtcttgctctgctgcc

SEQ ID NO: 41305 - DNA, 20 bp, Artificial Sequence
  Description of Artificial Sequence: Synthetic oligonucleotide
  Target: ATXN2; (+) strand; PAM type: NRG; PAM sequence: AGG
agagtcttgctctgctgccc

SEQ ID NO: 41306 - DNA, 20 bp, Artificial Sequence
  Description of Artificial Sequence: Synthetic oligonucleotide
  Target: ATXN2; (+) strand; PAM type: NRG; PAM sequence: TGG
tcttgctctgctgcccaggc

SEQ ID NO: 41307 - DNA, 20 bp, Artificial Sequence
  Description of Artificial Sequence: Synthetic oligonucleotide
  Target: ATXN2; (+) strand; PAM type: NRG; PAM sequence: CGG
gctctgctgcccaggctgga

SEQ ID NO: 41308 - DNA, 20 bp, Artificial Sequence
  Description of Artificial Sequence: Synthetic oligonucleotide
  Target: ATXN2; (+) strand; PAM type: NRG; PAM sequence: CAG
ctgctgcccaggctggacgg

SEQ ID NO: 41309 - DNA, 20 bp, Artificial Sequence
  Description of Artificial Sequence: Synthetic oligonucleotide
  Target: ATXN2; (+) strand; PAM type: NRG; PAM sequence: TGG
ctgcccaggctggacggcag

SEQ ID NO: 41310 - DNA, 20 bp, Artificial Sequence
  Description of Artificial Sequence: Synthetic oligonucleotide
  Target: ATXN2; (+) strand; PAM type: NRG; PAM sequence: CGG
ggacggcagtggcgcgatct

SEQ ID NO: 41311 - DNA, 20 bp, Artificial Sequence
  Description of Artificial Sequence: Synthetic oligonucleotide
  Target: ATXN2; (+) strand; PAM type: NRG; PAM sequence: CAG
taactgcaacctccgcctcc

SEQ ID NO: 41312 - DNA, 20 bp, Artificial Sequence
  Description of Artificial Sequence: Synthetic oligonucleotide
  Target: ATXN2; (+) strand; PAM type: NRG; PAM sequence: AGG
aactgcaacctccgcctccc

SEQ ID NO: 41313 - DNA, 20 bp, Artificial Sequence
  Description of Artificial Sequence: Synthetic oligonucleotide
  Target: ATXN2; (+) strand; PAM type: NRG; PAM sequence: AAG
aacctccgcctcccaggttc

SEQ ID NO: 41314 - DNA, 20 bp, Artificial Sequence
  Description of Artificial Sequence: Synthetic oligonucleotide
  Target: ATXN2; (+) strand; PAM type: NRG; PAM sequence: CAG
ttcaagcgattctcctgcct

SEQ ID NO: 41315 - DNA, 20 bp, Artificial Sequence
  Description of Artificial Sequence: Synthetic oligonucleotide
  Target: ATXN2; (+) strand; PAM type: NRG; PAM sequence: GAG
ttctcctgcctcagcctcct

SEQ ID NO: 41316 - DNA, 20 bp, Artificial Sequence
  Description of Artificial Sequence: Synthetic oligonucleotide
  Target: ATXN2; (+) strand; PAM type: NRG; PAM sequence: TAG
tcctgcctcagcctcctgag

SEQ ID NO: 41317 - DNA, 20 bp, Artificial Sequence
  Description of Artificial Sequence: Synthetic oligonucleotide
  Target: ATXN2; (+) strand; PAM type: NRG; PAM sequence: TAG
gcctcagcctcctgagtagc

SEQ ID NO: 41318 - DNA, 20 bp, Artificial Sequence
  Description of Artificial Sequence: Synthetic oligonucleotide
  Target: ATXN2; (+) strand; PAM type: NRG; PAM sequence: AGG
cctcagcctcctgagtagct

SEQ ID NO: 41319 - DNA, 20 bp, Artificial Sequence
  Description of Artificial Sequence: Synthetic oligonucleotide
  Target: ATXN2; (+) strand; PAM type: NRG; PAM sequence: CAG
ctcctgagtagctaggatta

SEQ ID NO: 41320 - DNA, 20 bp, Artificial Sequence
  Description of Artificial Sequence: Synthetic oligonucleotide
  Target: ATXN2; (+) strand; PAM type: NRG; PAM sequence: AGG
tcctgagtagctaggattac

SEQ ID NO: 41321 - DNA, 20 bp, Artificial Sequence
  Description of Artificial Sequence: Synthetic oligonucleotide
  Target: ATXN2; (+) strand; PAM type: NRG; PAM sequence: TGG
caggtgcgtgccaccacgcc

SEQ ID NO: 41322 - DNA, 20 bp, Artificial Sequence
  Description of Artificial Sequence: Synthetic oligonucleotide
  Target: ATXN2; (+) strand; PAM type: NRG; PAM sequence: TAG
ctggctaatttttgtatttt

SEQ ID NO: 41323 - DNA, 20 bp, Artificial Sequence
  Description of Artificial Sequence: Synthetic oligonucleotide
  Target: ATXN2; (+) strand; PAM type: NRG; PAM sequence: TAG
gctaatttttgtatttttag

SEQ ID NO: 41324 - DNA, 20 bp, Artificial Sequence
  Description of Artificial Sequence: Synthetic oligonucleotide
  Target: ATXN2; (+) strand; PAM type: NRG; PAM sequence: GAG
taatttttgtatttttagta

SEQ ID NO: 41325 - DNA, 20 bp, Artificial Sequence
  Description of Artificial Sequence: Synthetic oligonucleotide
  Target: ATXN2; (+) strand; PAM type: NRG; PAM sequence: CAG
ttttgtatttttagtagaga

SEQ ID NO: 41326 - DNA, 20 bp, Artificial Sequence
  Description of Artificial Sequence: Synthetic oligonucleotide
  Target: ATXN2; (+) strand; PAM type: NRG; PAM sequence: GAG
ttgtatttttagtagagaca

SEQ ID NO: 41327 - DNA, 20 bp, Artificial Sequence
  Description of Artificial Sequence: Synthetic oligonucleotide
  Target: ATXN2; (+) strand; PAM type: NRG; PAM sequence: TGG
gagacagagtttcaccacgt

SEQ ID NO: 41328 - DNA, 20 bp, Artificial Sequence
  Description of Artificial Sequence: Synthetic oligonucleotide
  Target: ATXN2; (+) strand; PAM type: NRG; PAM sequence: CAG
cagagtttcaccacgttggt

SEQ ID NO: 41329 - DNA, 20 bp, Artificial Sequence
  Description of Artificial Sequence: Synthetic oligonucleotide
  Target: ATXN2; (+) strand; PAM type: NRG; PAM sequence: AGG
agagtttcaccacgttggtc

SEQ ID NO: 41330 - DNA, 20 bp, Artificial Sequence
  Description of Artificial Sequence: Synthetic oligonucleotide
  Target: ATXN2; (+) strand; PAM type: NRG; PAM sequence: TGG
tttcaccacgttggtcaggc

SEQ ID NO: 41331 - DNA, 20 bp, Artificial Sequence
  Description of Artificial Sequence: Synthetic oligonucleotide
  Target: ATXN2; (+) strand; PAM type: NRG; PAM sequence: AAG
cgccccacctttgccttcca

SEQ ID NO: 41332 - DNA, 20 bp, Artificial Sequence
  Description of Artificial Sequence: Synthetic oligonucleotide
  Target: ATXN2; (+) strand; PAM type: NRG; PAM sequence: TGG
acctttgccttccaaagtgc

SEQ ID NO: 41333 - DNA, 20 bp, Artificial Sequence
  Description of Artificial Sequence: Synthetic oligonucleotide
  Target: ATXN2; (+) strand; PAM type: NRG; PAM sequence: GGG
cctttgccttccaaagtgct

SEQ ID NO: 41334 - DNA, 20 bp, Artificial Sequence
  Description of Artificial Sequence: Synthetic oligonucleotide
  Target: ATXN2; (+) strand; PAM type: NRG; PAM sequence: TAG
gccttccaaagtgctgggat

SEQ ID NO: 41335 - DNA, 20 bp, Artificial Sequence
  Description of Artificial Sequence: Synthetic oligonucleotide
  Target: ATXN2; (+) strand; PAM type: NRG; PAM sequence: AGG
ccttccaaagtgctgggatt

SEQ ID NO: 41336 - DNA, 20 bp, Artificial Sequence
  Description of Artificial Sequence: Synthetic oligonucleotide
  Target: ATXN2; (+) strand; PAM type: NRG; PAM sequence: GAG
aaagtgctgggattaggcgt

SEQ ID NO: 41337 - DNA, 20 bp, Artificial Sequence
  Description of Artificial Sequence: Synthetic oligonucleotide
  Target: ATXN2; (+) strand; PAM type: NRG; PAM sequence: TAG
tgggattaggcgtgagccac

SEQ ID NO: 41338 - DNA, 20 bp, Artificial Sequence
  Description of Artificial Sequence: Synthetic oligonucleotide
  Target: ATXN2; (+) strand; PAM type: NRG; PAM sequence: AGG
gggattaggcgtgagccact

SEQ ID NO: 41339 - DNA, 20 bp, Artificial Sequence
  Description of Artificial Sequence: Synthetic oligonucleotide
  Target: ATXN2; (+) strand; PAM type: NRG; PAM sequence: CAG
ttaggcgtgagccactaggc

SEQ ID NO: 41340 - DNA, 20 bp, Artificial Sequence
  Description of Artificial Sequence: Synthetic oligonucleotide
  Target: ATXN2; (+) strand; PAM type: NRG; PAM sequence: AGG
taggcgtgagccactaggcc

SEQ ID NO: 41341 - DNA, 20 bp, Artificial Sequence
  Description of Artificial Sequence: Synthetic oligonucleotide
  Target: ATXN2; (+) strand; PAM type: NRG; PAM sequence: GGG
aggcgtgagccactaggcca

SEQ ID NO: 41342 - DNA, 20 bp, Artificial Sequence
  Description of Artificial Sequence: Synthetic oligonucleotide
  Target: ATXN2; (+) strand; PAM type: NRG; PAM sequence: GAG
tttgttttgtattgtttttt

SEQ ID NO: 41343 - DNA, 20 bp, Artificial Sequence
  Description of Artificial Sequence: Synthetic oligonucleotide
  Target: ATXN2; (+) strand; PAM type: NRG; PAM sequence: CAG
ttttgtattgttttttgaga

SEQ ID NO: 41344 - DNA, 20 bp, Artificial Sequence
  Description of Artificial Sequence: Synthetic oligonucleotide
  Target: ATXN2; (+) strand; PAM type: NRG; PAM sequence: CAG
gacagtcttactctgttgcc

SEQ ID NO: 41345 - DNA, 20 bp, Artificial Sequence
  Description of Artificial Sequence: Synthetic oligonucleotide
  Target: ATXN2; (+) strand; PAM type: NRG; PAM sequence: TGG
tcttactctgttgcccagac

SEQ ID NO: 41346 - DNA, 20 bp, Artificial Sequence
  Description of Artificial Sequence: Synthetic oligonucleotide
  Target: ATXN2; (+) strand; PAM type: NRG; PAM sequence: GAG
ttactctgttgcccagactg

SEQ ID NO: 41347 - DNA, 20 bp, Artificial Sequence
  Description of Artificial Sequence: Synthetic oligonucleotide
  Target: ATXN2; (+) strand; PAM type: NRG; PAM sequence: CAG
ctgttgcccagactggagtg

SEQ ID NO: 41348 - DNA, 20 bp, Artificial Sequence
  Description of Artificial Sequence: Synthetic oligonucleotide
  Target: ATXN2; (+) strand; PAM type: NRG; PAM sequence: TGG
ttgcccagactggagtgcag

SEQ ID NO: 41349 - DNA, 20 bp, Artificial Sequence
  Description of Artificial Sequence: Synthetic oligonucleotide
  Target: ATXN2; (+) strand; PAM type: NRG; PAM sequence: CGG
ggagtgcagtggcgcactct

SEQ ID NO: 41350 - DNA, 20 bp, Artificial Sequence
  Description of Artificial Sequence: Synthetic oligonucleotide
  Target: ATXN2; (+) strand; PAM type: NRG; PAM sequence: TGG
actctcggctcactgcaacc

SEQ ID NO: 41351 - DNA, 20 bp, Artificial Sequence
  Description of Artificial Sequence: Synthetic oligonucleotide
  Target: ATXN2; (+) strand; PAM type: NRG; PAM sequence: GGG
ctctcggctcactgcaacct

SEQ ID NO: 41352 - DNA, 20 bp, Artificial Sequence
  Description of Artificial Sequence: Synthetic oligonucleotide
  Target: ATXN2; (+) strand; PAM type: NRG; PAM sequence: TGG
tcactgcaacctgggcctcc

SEQ ID NO: 41353 - DNA, 20 bp, Artificial Sequence
  Description of Artificial Sequence: Synthetic oligonucleotide
  Target: ATXN2; (+) strand; PAM type: NRG; PAM sequence: GGG
cactgcaacctgggcctcct

SEQ ID NO: 41354 - DNA, 20 bp, Artificial Sequence
  Description of Artificial Sequence: Synthetic oligonucleotide
  Target: ATXN2; (+) strand; PAM type: NRG; PAM sequence: AAG
aacctgggcctcctgggttc

SEQ ID NO: 41355 - DNA, 20 bp, Artificial Sequence
  Description of Artificial Sequence: Synthetic oligonucleotide
  Target: ATXN2; (+) strand; PAM type: NRG; PAM sequence: CAG
ttcaagtgattctcctgcct

SEQ ID NO: 41356 - DNA, 20 bp, Artificial Sequence
  Description of Artificial Sequence: Synthetic oligonucleotide
  Target: ATXN2; (+) strand; PAM type: NRG; PAM sequence: GAG
attctcctgcctcagcctcc

SEQ ID NO: 41357 - DNA, 20 bp, Artificial Sequence
  Description of Artificial Sequence: Synthetic oligonucleotide
  Target: ATXN2; (+) strand; PAM type: NRG; PAM sequence: TAG
ctcctgcctcagcctccgag

SEQ ID NO: 41358 - DNA, 20 bp, Artificial Sequence
  Description of Artificial Sequence: Synthetic oligonucleotide
  Target: ATXN2; (+) strand; PAM type: NRG; PAM sequence: TGG
tgcctcagcctccgagtagc

SEQ ID NO: 41359 - DNA, 20 bp, Artificial Sequence
  Description of Artificial Sequence: Synthetic oligonucleotide
  Target: ATXN2; (+) strand; PAM type: NRG; PAM sequence: GGG
gcctcagcctccgagtagct

SEQ ID NO: 41360 - DNA, 20 bp, Artificial Sequence
  Description of Artificial Sequence: Synthetic oligonucleotide
  Target: ATXN2; (+) strand; PAM type: NRG; PAM sequence: CAG
cctccgagtagctgggatta

SEQ ID NO: 41361 - DNA, 20 bp, Artificial Sequence
  Description of Artificial Sequence: Synthetic oligonucleotide
  Target: ATXN2; (+) strand; PAM type: NRG; PAM sequence: AGG
ctccgagtagctgggattac

SEQ ID NO: 41362 - DNA, 20 bp, Artificial Sequence
  Description of Artificial Sequence: Synthetic oligonucleotide
  Target: ATXN2; (+) strand; PAM type: NRG; PAM sequence: CGG
caggcacccgccaccatgtc

SEQ ID NO: 41363 - DNA, 20 bp, Artificial Sequence
  Description of Artificial Sequence: Synthetic oligonucleotide
  Target: ATXN2; (+) strand; PAM type: NRG; PAM sequence: TAG
ccggctaatttttctatttt

SEQ ID NO: 41364 - DNA, 20 bp, Artificial Sequence
  Description of Artificial Sequence: Synthetic oligonucleotide
  Target: ATXN2; (+) strand; PAM type: NRG; PAM sequence: TAG
gctaatttttctatttttag

SEQ ID NO: 41365 - DNA, 20 bp, Artificial Sequence
  Description of Artificial Sequence: Synthetic oligonucleotide
  Target: ATXN2; (+) strand; PAM type: NRG; PAM sequence: GAG
taatttttctatttttagta

SEQ ID NO: 41366 - DNA, 20 bp, Artificial Sequence
  Description of Artificial Sequence: Synthetic oligonucleotide
  Target: ATXN2; (+) strand; PAM type: NRG; PAM sequence: GAG
atttttctatttttagtaga

SEQ ID NO: 41367 - DNA, 20 bp, Artificial Sequence
  Description of Artificial Sequence: Synthetic oligonucleotide
  Target: ATXN2; (+) strand; PAM type: NRG; PAM sequence: AGG
tttttctatttttagtagag

SEQ ID NO: 41368 - DNA, 20 bp, Artificial Sequence
  Description of Artificial Sequence: Synthetic oligonucleotide
  Target: ATXN2; (+) strand; PAM type: NRG; PAM sequence: GGG
ttttctatttttagtagaga

SEQ ID NO: 41369 - DNA, 20 bp, Artificial Sequence
  Description of Artificial Sequence: Synthetic oligonucleotide
  Target: ATXN2; (+) strand; PAM type: NRG; PAM sequence: GGG
tttctatttttagtagagag

SEQ ID NO: 41370 - DNA, 20 bp, Artificial Sequence
  Description of Artificial Sequence: Synthetic oligonucleotide
  Target: ATXN2; (+) strand; PAM type: NRG; PAM sequence: GGG
ttctatttttagtagagagg

SEQ ID NO: 41371 - DNA, 20 bp, Artificial Sequence
  Description of Artificial Sequence: Synthetic oligonucleotide
  Target: ATXN2; (+) strand; PAM type: NRG; PAM sequence: TGG
gagagggggttttgccatat

SEQ ID NO: 41372 - DNA, 20 bp, Artificial Sequence
  Description of Artificial Sequence: Synthetic oligonucleotide
  Target: ATXN2; (+) strand; PAM type: NRG; PAM sequence: TAG
gggggttttgccatattggc

SEQ ID NO: 41373 - DNA, 20 bp, Artificial Sequence
  Description of Artificial Sequence: Synthetic oligonucleotide
  Target: ATXN2; (+) strand; PAM type: NRG; PAM sequence: AGG
ggggttttgccatattggct

SEQ ID NO: 41374 - DNA, 20 bp, Artificial Sequence
  Description of Artificial Sequence: Synthetic oligonucleotide
  Target: ATXN2; (+) strand; PAM type: NRG; PAM sequence: TGG
ttttgccatattggctaggc

SEQ ID NO: 41375 - DNA, 20 bp, Artificial Sequence
  Description of Artificial Sequence: Synthetic oligonucleotide
  Target: ATXN2; (+) strand; PAM type: NRG; PAM sequence: TAG
tggtctcgaactcctgacct

SEQ ID NO: 41376 - DNA, 20 bp, Artificial Sequence
  Description of Artificial Sequence: Synthetic oligonucleotide
  Target: ATXN2; (+) strand; PAM type: NRG; PAM sequence: AGG
ggtctcgaactcctgacctt

SEQ ID NO: 41377 - DNA, 20 bp, Artificial Sequence
  Description of Artificial Sequence: Synthetic oligonucleotide
  Target: ATXN2; (+) strand; PAM type: NRG; PAM sequence: CAG
cttaggtgatccgcccacct

SEQ ID NO: 41378 - DNA, 20 bp, Artificial Sequence
  Description of Artificial Sequence: Synthetic oligonucleotide
  Target: ATXN2; (+) strand; PAM type: NRG; PAM sequence: AAG
ccgcccacctcagcctccca

SEQ ID NO: 41379 - DNA, 20 bp, Artificial Sequence
  Description of Artificial Sequence: Synthetic oligonucleotide
  Target: ATXN2; (+) strand; PAM type: NRG; PAM sequence: TGG
acctcagcctcccaaagtgc

SEQ ID NO: 41380 - DNA, 20 bp, Artificial Sequence
  Description of Artificial Sequence: Synthetic oligonucleotide
  Target: ATXN2; (+) strand; PAM type: NRG; PAM sequence: GGG
cctcagcctcccaaagtgct

SEQ ID NO: 41381 - DNA, 20 bp, Artificial Sequence
  Description of Artificial Sequence: Synthetic oligonucleotide
  Target: ATXN2; (+) strand; PAM type: NRG; PAM sequence: TGG
cacacgtgaaccactgcgcc

SEQ ID NO: 41382 - DNA, 20 bp, Artificial Sequence
  Description of Artificial Sequence: Synthetic oligonucleotide
  Target: ATXN2; (+) strand; PAM type: NRG; PAM sequence: CAG
ctgcgcctggcttataacta

SEQ ID NO: 41383 - DNA, 20 bp, Artificial Sequence
  Description of Artificial Sequence: Synthetic oligonucleotide
  Target: ATXN2; (+) strand; PAM type: NRG; PAM sequence: AAG
gcttataactacagtttttt

SEQ ID NO: 41384 - DNA, 20 bp, Artificial Sequence
  Description of Artificial Sequence: Synthetic oligonucleotide
  Target: ATXN2; (+) strand; PAM type: NRG; PAM sequence: TAG
aactacagttttttaagaca

SEQ ID NO: 41385 - DNA, 20 bp, Artificial Sequence
  Description of Artificial Sequence: Synthetic oligonucleotide
  Target: ATXN2; (+) strand; PAM type: NRG; PAM sequence: AAG
ttttaagacatagtataata

SEQ ID NO: 41386 - DNA, 20 bp, Artificial Sequence
  Description of Artificial Sequence: Synthetic oligonucleotide
  Target: ATXN2; (+) strand; PAM type: NRG; PAM sequence: AAG
gatataaataaaaacaacaa

SEQ ID NO: 41387 - DNA, 20 bp, Artificial Sequence
  Description of Artificial Sequence: Synthetic oligonucleotide
  Target: ATXN2; (+) strand; PAM type: NRG; PAM sequence: AAG
taaaaacaacaaaagttaaa

SEQ ID NO: 41388 - DNA, 20 bp, Artificial Sequence
  Description of Artificial Sequence: Synthetic oligonucleotide
  Target: ATXN2; (+) strand; PAM type: NRG; PAM sequence: CGG
aaacaacaaaagttaaaaag

SEQ ID NO: 41389 - DNA, 20 bp, Artificial Sequence
  Description of Artificial Sequence: Synthetic oligonucleotide
  Target: ATXN2; (+) strand; PAM type: NRG; PAM sequence: GGG
aacaacaaaagttaaaaagc

SEQ ID NO: 41390 - DNA, 20 bp, Artificial Sequence
  Description of Artificial Sequence: Synthetic oligonucleotide
  Target: ATXN2; (+) strand; PAM type: NRG; PAM sequence: CAG
aacaaaagttaaaaagcggg

SEQ ID NO: 41391 - DNA, 20 bp, Artificial Sequence
  Description of Artificial Sequence: Synthetic oligonucleotide
  Target: ATXN2; (+) strand; PAM type: NRG; PAM sequence: AAG
agttaaaaagcgggcagatg

SEQ ID NO: 41392 - DNA, 20 bp, Artificial Sequence
  Description of Artificial Sequence: Synthetic oligonucleotide
  Target: ATXN2; (+) strand; PAM type: NRG; PAM sequence: TAG
aaaagcgggcagatgaagtg

SEQ ID NO: 41393 - DNA, 20 bp, Artificial Sequence
  Description of Artificial Sequence: Synthetic oligonucleotide
  Target: ATXN2; (+) strand; PAM type: NRG; PAM sequence: GAG
aagcgggcagatgaagtgta

SEQ ID NO: 41394 - DNA, 20 bp, Artificial Sequence
  Description of Artificial Sequence: Synthetic oligonucleotide
  Target: ATXN2; (+) strand; PAM type: NRG; PAM sequence: TAG
atgaagtgtagagtttttat

SEQ ID NO: 41395 - DNA, 20 bp, Artificial Sequence
  Description of Artificial Sequence: Synthetic oligonucleotide
  Target: ATXN2; (+) strand; PAM type: NRG; PAM sequence: AAG
cttgcttgtttttgcaatca

SEQ ID NO: 41396 - DNA, 20 bp, Artificial Sequence
  Description of Artificial Sequence: Synthetic oligonucleotide
  Target: ATXN2; (+) strand; PAM type: NRG; PAM sequence: AAG
gtttttgcaatcaaagtttc

SEQ ID NO: 41397 - DNA, 20 bp, Artificial Sequence
  Description of Artificial Sequence: Synthetic oligonucleotide
  Target: ATXN2; (+) strand; PAM type: NRG; PAM sequence: TGG
tcaaagtttcaagttgtcat

SEQ ID NO: 41398 - DNA, 20 bp, Artificial Sequence
  Description of Artificial Sequence: Synthetic oligonucleotide
  Target: ATXN2; (+) strand; PAM type: NRG; PAM sequence: TGG
ttgtcattggtttaaaataa

SEQ ID NO: 41399 - DNA, 20 bp, Artificial Sequence
  Description of Artificial Sequence: Synthetic oligonucleotide
  Target: ATXN2; (+) strand; PAM type: NRG; PAM sequence: GGG
tgtcattggtttaaaataat

SEQ ID NO: 41400 - DNA, 20 bp, Artificial Sequence
  Description of Artificial Sequence: Synthetic oligonucleotide
  Target: ATXN2; (+) strand; PAM type: NRG; PAM sequence: GAG
tctttttttttttttttttt

SEQ ID NO: 41401 - DNA, 20 bp, Artificial Sequence
  Description of Artificial Sequence: Synthetic oligonucleotide
  Target: ATXN2; (+) strand; PAM type: NRG; PAM sequence: CGG
ttttttttttttttttgaga

SEQ ID NO: 41402 - DNA, 20 bp, Artificial Sequence
  Description of Artificial Sequence: Synthetic oligonucleotide
  Target: ATXN2; (+) strand; PAM type: NRG; PAM sequence: GAG
ttttttttttttttgagacg

SEQ ID NO: 41403 - DNA, 20 bp, Artificial Sequence
  Description of Artificial Sequence: Synthetic oligonucleotide
  Target: ATXN2; (+) strand; PAM type: NRG; PAM sequence: CAG
cggagtctcactctgtcgcc

SEQ ID NO: 41404 - DNA, 20 bp, Artificial Sequence
  Description of Artificial Sequence: Synthetic oligonucleotide
  Target: ATXN2; (+) strand; PAM type: NRG; PAM sequence: AGG
ggagtctcactctgtcgccc

SEQ ID NO: 41405 - DNA, 20 bp, Artificial Sequence
  Description of Artificial Sequence: Synthetic oligonucleotide
  Target: ATXN2; (+) strand; PAM type: NRG; PAM sequence: TGG
tctcactctgtcgcccaggc

SEQ ID NO: 41406 - DNA, 20 bp, Artificial Sequence
  Description of Artificial Sequence: Synthetic oligonucleotide
  Target: ATXN2; (+) strand; PAM type: NRG; PAM sequence: GGG
ctcactctgtcgcccaggct

SEQ ID NO: 41407 - DNA, 20 bp, Artificial Sequence
  Description of Artificial Sequence: Synthetic oligonucleotide
  Target: ATXN2; (+) strand; PAM type: NRG; PAM sequence: GGG
tcactctgtcgcccaggctg

SEQ ID NO: 41408 - DNA, 20 bp, Artificial Sequence
  Description of Artificial Sequence: Synthetic oligonucleotide
  Target: ATXN2; (+) strand; PAM type: NRG; PAM sequence: CAG
ctgtcgcccaggctggggtg

SEQ ID NO: 41409 - DNA, 20 bp, Artificial Sequence
  Description of Artificial Sequence: Synthetic oligonucleotide
  Target: ATXN2; (+) strand; PAM type: NRG; PAM sequence: TGG
tcgcccaggctggggtgcag

SEQ ID NO: 41410 - DNA, 20 bp, Artificial Sequence
  Description of Artificial Sequence: Synthetic oligonucleotide
  Target: ATXN2; (+) strand; PAM type: NRG; PAM sequence: TGG
tcactgcaacctctgcctcc

SEQ ID NO: 41411 - DNA, 20 bp, Artificial Sequence
  Description of Artificial Sequence: Synthetic oligonucleotide
  Target: ATXN2; (+) strand; PAM type: NRG; PAM sequence: GGG
cactgcaacctctgcctcct

SEQ ID NO: 41412 - DNA, 20 bp, Artificial Sequence
  Description of Artificial Sequence: Synthetic oligonucleotide
  Target: ATXN2; (+) strand; PAM type: NRG; PAM sequence: AAG
aacctctgcctcctgggttc

SEQ ID NO: 41413 - DNA, 20 bp, Artificial Sequence
  Description of Artificial Sequence: Synthetic oligonucleotide
  Target: ATXN2; (+) strand; PAM type: NRG; PAM sequence: CAG
ttcaagcaattctcctgcct

SEQ ID NO: 41414 - DNA, 20 bp, Artificial Sequence
  Description of Artificial Sequence: Synthetic oligonucleotide
  Target: ATXN2; (+) strand; PAM type: NRG; PAM sequence: GAG
ttctcctgcctcagcctcct

SEQ ID NO: 41415 - DNA, 20 bp, Artificial Sequence
  Description of Artificial Sequence: Synthetic oligonucleotide
  Target: ATXN2; (+) strand; PAM type: NRG; PAM sequence: GAG
cctcagcctcctgagtatct

SEQ ID NO: 41416 - DNA, 20 bp, Artificial Sequence
  Description of Artificial Sequence: Synthetic oligonucleotide
  Target: ATXN2; (+) strand; PAM type: NRG; PAM sequence: CAG
ctcctgagtatctgagatta

SEQ ID NO: 41417 - DNA, 20 bp, Artificial Sequence
  Description of Artificial Sequence: Synthetic oligonucleotide
  Target: ATXN2; (+) strand; PAM type: NRG; PAM sequence: AGG
tcctgagtatctgagattac

SEQ ID NO: 41418 - DNA, 20 bp, Artificial Sequence
  Description of Artificial Sequence: Synthetic oligonucleotide
  Target: ATXN2; (+) strand; PAM type: NRG; PAM sequence: TGG
caggcacgtgcctccacgcc

SEQ ID NO: 41419 - DNA, 20 bp, Artificial Sequence
  Description of Artificial Sequence: Synthetic oligonucleotide
  Target: ATXN2; (+) strand; PAM type: NRG; PAM sequence: AAG
acgtgcctccacgcctggct

SEQ ID NO: 41420 - DNA, 20 bp, Artificial Sequence
  Description of Artificial Sequence: Synthetic oligonucleotide
  Target: ATXN2; (+) strand; PAM type: NRG; PAM sequence: TAG
ctggctaagttttgtatttt

SEQ ID NO: 41421 - DNA, 20 bp, Artificial Sequence
  Description of Artificial Sequence: Synthetic oligonucleotide
  Target: ATXN2; (+) strand; PAM type: NRG; PAM sequence: TAG
gctaagttttgtatttttag

SEQ ID NO: 41422 - DNA, 20 bp, Artificial Sequence
  Description of Artificial Sequence: Synthetic oligonucleotide
  Target: ATXN2; (+) strand; PAM type: NRG; PAM sequence: GAG
taagttttgtatttttagta

SEQ ID NO: 41423 - DNA, 20 bp, Artificial Sequence
  Description of Artificial Sequence: Synthetic oligonucleotide
  Target: ATXN2; (+) strand; PAM type: NRG; PAM sequence: TGG
ttttgtatttttagtagaga

SEQ ID NO: 41424 - DNA, 20 bp, Artificial Sequence
  Description of Artificial Sequence: Synthetic oligonucleotide
  Target: ATXN2; (+) strand; PAM type: NRG; PAM sequence: GGG
tttgtatttttagtagagat

SEQ ID NO: 41425 - DNA, 20 bp, Artificial Sequence
  Description of Artificial Sequence: Synthetic oligonucleotide
  Target: ATXN2; (+) strand; PAM type: NRG; PAM sequence: GGG
ttgtatttttagtagagatg

SEQ ID NO: 41426 - DNA, 20 bp, Artificial Sequence
  Description of Artificial Sequence: Synthetic oligonucleotide
  Target: ATXN2; (+) strand; PAM type: NRG; PAM sequence: TAG
gagatggggtttcaccatgt

SEQ ID NO: 41427 - DNA, 20 bp, Artificial Sequence
  Description of Artificial Sequence: Synthetic oligonucleotide
  Target: ATXN2; (+) strand; PAM type: NRG; PAM sequence: CAG
tggggtttcaccatgttagc

SEQ ID NO: 41428 - DNA, 20 bp, Artificial Sequence
  Description of Artificial Sequence: Synthetic oligonucleotide
  Target: ATXN2; (+) strand; PAM type: NRG; PAM sequence: AGG
ggggtttcaccatgttagcc

SEQ ID NO: 41429 - DNA, 20 bp, Artificial Sequence
  Description of Artificial Sequence: Synthetic oligonucleotide
  Target: ATXN2; (+) strand; PAM type: NRG; PAM sequence: TGG
tttcaccatgttagccaggc

SEQ ID NO: 41430 - DNA, 20 bp, Artificial Sequence
  Description of Artificial Sequence: Synthetic oligonucleotide
  Target: ATXN2; (+) strand; PAM type: NRG; PAM sequence: CGG
acctcttgatccacccacct

SEQ ID NO: 41431 - DNA, 20 bp, Artificial Sequence
  Description of Artificial Sequence: Synthetic oligonucleotide
  Target: ATXN2; (+) strand; PAM type: NRG; PAM sequence: AAG
ccacccacctcggcctccca

SEQ ID NO: 41432 - DNA, 20 bp, Artificial Sequence
  Description of Artificial Sequence: Synthetic oligonucleotide
  Target: ATXN2; (+) strand; PAM type: NRG; PAM sequence: TGG
acctcggcctcccaaagtgc

SEQ ID NO: 41433 - DNA, 20 bp, Artificial Sequence
  Description of Artificial Sequence: Synthetic oligonucleotide
  Target: ATXN2; (+) strand; PAM type: NRG; PAM sequence: GGG
cctcggcctcccaaagtgct

SEQ ID NO: 41434 - DNA, 20 bp, Artificial Sequence
  Description of Artificial Sequence: Synthetic oligonucleotide
  Target: ATXN2; (+) strand; PAM type: NRG; PAM sequence: CAG
ctcccaaagtgctgggatta

SEQ ID NO: 41435 - DNA, 20 bp, Artificial Sequence
  Description of Artificial Sequence: Synthetic oligonucleotide
  Target: ATXN2; (+) strand; PAM type: NRG; PAM sequence: AGG
tcccaaagtgctgggattac

SEQ ID NO: 41436 - DNA, 20 bp, Artificial Sequence
  Description of Artificial Sequence: Synthetic oligonucleotide
  Target: ATXN2; (+) strand; PAM type: NRG; PAM sequence: CAG
caggtgtgaaccactgcacc

SEQ ID NO: 41437 - DNA, 20 bp, Artificial Sequence
  Description of Artificial Sequence: Synthetic oligonucleotide
  Target: ATXN2; (+) strand; PAM type: NRG; PAM sequence: TGG
accactgcacccagctgtca

SEQ ID NO: 41438 - DNA, 20 bp, Artificial Sequence
  Description of Artificial Sequence: Synthetic oligonucleotide
  Target: ATXN2; (+) strand; PAM type: NRG; PAM sequence: CAG
taaatcaaaaacacctacaa

SEQ ID NO: 41439 - DNA, 20 bp, Artificial Sequence
  Description of Artificial Sequence: Synthetic oligonucleotide
  Target: ATXN2; (+) strand; PAM type: NRG; PAM sequence: AAG
acagatacacaaaaaatata

SEQ ID NO: 41440 - DNA, 20 bp, Artificial Sequence
  Description of Artificial Sequence: Synthetic oligonucleotide
  Target: ATXN2; (+) strand; PAM type: NRG; PAM sequence: CAG
gatacacaaaaaatataaag

SEQ ID NO: 41441 - DNA, 20 bp, Artificial Sequence
  Description of Artificial Sequence: Synthetic oligonucleotide
  Target: ATXN2; (+) strand; PAM type: NRG; PAM sequence: AGG
atacacaaaaaatataaagc

SEQ ID NO: 41442 - DNA, 20 bp, Artificial Sequence
  Description of Artificial Sequence: Synthetic oligonucleotide
  Target: ATXN2; (+) strand; PAM type: NRG; PAM sequence: CAG
aggaaattaaaacataccac

SEQ ID NO: 41443 - DNA, 20 bp, Artificial Sequence
  Description of Artificial Sequence: Synthetic oligonucleotide
  Target: ATXN2; (+) strand; PAM type: NRG; PAM sequence: GAG
gaaattaaaacataccacca

SEQ ID NO: 41444 - DNA, 20 bp, Artificial Sequence
  Description of Artificial Sequence: Synthetic oligonucleotide
  Target: ATXN2; (+) strand; PAM type: NRG; PAM sequence: AAG
gagaaaatcactttcaaaac

SEQ ID NO: 41445 - DNA, 20 bp, Artificial Sequence
  Description of Artificial Sequence: Synthetic oligonucleotide
  Target: ATXN2; (+) strand; PAM type: NRG; PAM sequence: AGG
agaaaatcactttcaaaaca

SEQ ID NO: 41446 - DNA, 20 bp, Artificial Sequence
  Description of Artificial Sequence: Synthetic oligonucleotide
  Target: ATXN2; (+) strand; PAM type: NRG; PAM sequence: AAG
aaatcactttcaaaacaagg

SEQ ID NO: 41447 - DNA, 20 bp, Artificial Sequence
  Description of Artificial Sequence: Synthetic oligonucleotide
  Target: ATXN2; (+) strand; PAM type: NRG; PAM sequence: AGG
aatcactttcaaaacaagga

SEQ ID NO: 41448 - DNA, 20 bp, Artificial Sequence
  Description of Artificial Sequence: Synthetic oligonucleotide
  Target: ATXN2; (+) strand; PAM type: NRG; PAM sequence: GGG
atcactttcaaaacaaggaa

SEQ ID NO: 41449 - DNA, 20 bp, Artificial Sequence
  Description of Artificial Sequence: Synthetic oligonucleotide
  Target: ATXN2; (+) strand; PAM type: NRG; PAM sequence: GAG
cactttcaaaacaaggaagg

SEQ ID NO: 41450 - DNA, 20 bp, Artificial Sequence
  Description of Artificial Sequence: Synthetic oligonucleotide
  Target: ATXN2; (+) strand; PAM type: NRG; PAM sequence: AGG
actttcaaaacaaggaaggg

SEQ ID NO: 41451 - DNA, 20 bp, Artificial Sequence
  Description of Artificial Sequence: Synthetic oligonucleotide
  Target: ATXN2; (+) strand; PAM type: NRG; PAM sequence: GGG
ctttcaaaacaaggaaggga

SEQ ID NO: 41452 - DNA, 20 bp, Artificial Sequence
  Description of Artificial Sequence: Synthetic oligonucleotide
  Target: ATXN2; (+) strand; PAM type: NRG; PAM sequence: GAG
ttcaaaacaaggaagggagg

SEQ ID NO: 41453 - DNA, 20 bp, Artificial Sequence
  Description of Artificial Sequence: Synthetic oligonucleotide
  Target: ATXN2; (+) strand; PAM type: NRG; PAM sequence: AGG
tcaaaacaaggaagggaggg

SEQ ID NO: 41454 - DNA, 20 bp, Artificial Sequence
  Description of Artificial Sequence: Synthetic oligonucleotide
  Target: ATXN2; (+) strand; PAM type: NRG; PAM sequence: GGG
caaaacaaggaagggaggga

SEQ ID NO: 41455 - DNA, 20 bp, Artificial Sequence
  Description of Artificial Sequence: Synthetic oligonucleotide
  Target: ATXN2; (+) strand; PAM type: NRG; PAM sequence: AAG
aggaagggagggagggaaaa

SEQ ID NO: 41456 - DNA, 20 bp, Artificial Sequence
  Description of Artificial Sequence: Synthetic oligonucleotide
  Target: ATXN2; (+) strand; PAM type: NRG; PAM sequence: AGG
ggaagggagggagggaaaaa

SEQ ID NO: 41457 - DNA, 20 bp, Artificial Sequence
  Description of Artificial Sequence: Synthetic oligonucleotide
  Target: ATXN2; (+) strand; PAM type: NRG; PAM sequence: GAG
aagggagggagggaaaaaag

SEQ ID NO: 41458 - DNA, 20 bp, Artificial Sequence
  Description of Artificial Sequence: Synthetic oligonucleotide
  Target: ATXN2; (+) strand; PAM type: NRG; PAM sequence: AAG
agggagggaaaaaaggagcg

SEQ ID NO: 41459 - DNA, 20 bp, Artificial Sequence
  Description of Artificial Sequence: Synthetic oligonucleotide
  Target: ATXN2; (+) strand; PAM type: NRG; PAM sequence: GAG
ggagggaaaaaaggagcgaa

SEQ ID NO: 41460 - DNA, 20 bp, Artificial Sequence
  Description of Artificial Sequence: Synthetic oligonucleotide
  Target: ATXN2; (+) strand; PAM type: NRG; PAM sequence: AGG
gagggaaaaaaggagcgaag

SEQ ID NO: 41461 - DNA, 20 bp, Artificial Sequence
  Description of Artificial Sequence: Synthetic oligonucleotide
  Target: ATXN2; (+) strand; PAM type: NRG; PAM sequence: AAG
ggaaaaaaggagcgaagagg

SEQ ID NO: 41462 - DNA, 20 bp, Artificial Sequence
  Description of Artificial Sequence: Synthetic oligonucleotide
  Target: ATXN2; (+) strand; PAM type: NRG; PAM sequence: AAG
ggagcgaagaggaagtaaaa

SEQ ID NO: 41463 - DNA, 20 bp, Artificial Sequence
  Description of Artificial Sequence: Synthetic oligonucleotide
  Target: ATXN2; (+) strand; PAM type: NRG; PAM sequence: AAG
gcgaagaggaagtaaaaaag

SEQ ID NO: 41464 - DNA, 20 bp, Artificial Sequence
  Description of Artificial Sequence: Synthetic oligonucleotide
  Target: ATXN2; (+) strand; PAM type: NRG; PAM sequence: AGG
cgaagaggaagtaaaaaaga

SEQ ID NO: 41465 - DNA, 20 bp, Artificial Sequence
  Description of Artificial Sequence: Synthetic oligonucleotide
  Target: ATXN2; (+) strand; PAM type: NRG; PAM sequence: GGG
gaagaggaagtaaaaaagaa

SEQ ID NO: 41466 - DNA, 20 bp, Artificial Sequence
  Description of Artificial Sequence: Synthetic oligonucleotide
  Target: ATXN2; (+) strand; PAM type: NRG; PAM sequence: GGG
aagaggaagtaaaaaagaag

SEQ ID NO: 41467 - DNA, 20 bp, Artificial Sequence
  Description of Artificial Sequence: Synthetic oligonucleotide
  Target: ATXN2; (+) strand; PAM type: NRG; PAM sequence: GGG
agaggaagtaaaaaagaagg

SEQ ID NO: 41468 - DNA, 20 bp, Artificial Sequence
  Description of Artificial Sequence: Synthetic oligonucleotide
  Target: ATXN2; (+) strand; PAM type: NRG; PAM sequence: AAG
ggaagtaaaaaagaaggggg

SEQ ID NO: 41469 - DNA, 20 bp, Artificial Sequence
  Description of Artificial Sequence: Synthetic oligonucleotide
  Target: ATXN2; (+) strand; PAM type: NRG; PAM sequence: AGG
gaagtaaaaaagaaggggga

SEQ ID NO: 41470 - DNA, 20 bp, Artificial Sequence
  Description of Artificial Sequence: Synthetic oligonucleotide
  Target: ATXN2; (+) strand; PAM type: NRG; PAM sequence: GGG
aagtaaaaaagaagggggaa

SEQ ID NO: 41471 - DNA, 20 bp, Artificial Sequence
  Description of Artificial Sequence: Synthetic oligonucleotide
  Target: ATXN2; (+) strand; PAM type: NRG; PAM sequence: GAG
gtaaaaaagaagggggaagg

SEQ ID NO: 41472 - DNA, 20 bp, Artificial Sequence
  Description of Artificial Sequence: Synthetic oligonucleotide
  Target: ATXN2; (+) strand; PAM type: NRG; PAM sequence: AGG
taaaaaagaagggggaaggg

SEQ ID NO: 41473 - DNA, 20 bp, Artificial Sequence
  Description of Artificial Sequence: Synthetic oligonucleotide
  Target: ATXN2; (+) strand; PAM type: NRG; PAM sequence: GGG
aaaaaagaagggggaaggga

SEQ ID NO: 41474 - DNA, 20 bp, Artificial Sequence
  Description of Artificial Sequence: Synthetic oligonucleotide
  Target: ATXN2; (+) strand; PAM type: NRG; PAM sequence: GAG
aaaagaagggggaagggagg

SEQ ID NO: 41475 - DNA, 20 bp, Artificial Sequence
  Description of Artificial Sequence: Synthetic oligonucleotide
  Target: ATXN2; (+) strand; PAM type: NRG; PAM sequence: TAG
agaagggggaagggagggag

SEQ ID NO: 41476 - DNA, 20 bp, Artificial Sequence
  Description of Artificial Sequence: Synthetic oligonucleotide
  Target: ATXN2; (+) strand; PAM type: NRG; PAM sequence: AGG
gaagggggaagggagggagt

SEQ ID NO: 41477 - DNA, 20 bp, Artificial Sequence
  Description of Artificial Sequence: Synthetic oligonucleotide
  Target: ATXN2; (+) strand; PAM type: NRG; PAM sequence: CAG
gagtaggactacaaaacaac

SEQ ID NO: 41478 - DNA, 20 bp, Artificial Sequence
  Description of Artificial Sequence: Synthetic oligonucleotide
  Target: ATXN2; (+) strand; PAM type: NRG; PAM sequence: AAG
ctacaaaacaaccagataat

SEQ ID NO: 41479 - DNA, 20 bp, Artificial Sequence
  Description of Artificial Sequence: Synthetic oligonucleotide
  Target: ATXN2; (+) strand; PAM type: NRG; PAM sequence: TGG
ccagataataagtaacaaaa

SEQ ID NO: 41480 - DNA, 20 bp, Artificial Sequence
  Description of Artificial Sequence: Synthetic oligonucleotide
  Target: ATXN2; (+) strand; PAM type: NRG; PAM sequence: TAG
gataataagtaacaaaatgg

SEQ ID NO: 41481 - DNA, 20 bp, Artificial Sequence
  Description of Artificial Sequence: Synthetic oligonucleotide
  Target: ATXN2; (+) strand; PAM type: NRG; PAM sequence: TAG
aataagtaacaaaatggtag

SEQ ID NO: 41482 - DNA, 20 bp, Artificial Sequence
  Description of Artificial Sequence: Synthetic oligonucleotide
  Target: ATXN2; (+) strand; PAM type: NRG; PAM sequence: AAG
gtaacaaaatggtagtagtt

SEQ ID NO: 41483 - DNA, 20 bp, Artificial Sequence
  Description of Artificial Sequence: Synthetic oligonucleotide
  Target: ATXN2; (+) strand; PAM type: NRG; PAM sequence: CAG
gtagttaagtcctcactaat

SEQ ID NO: 41484 - DNA, 20 bp, Artificial Sequence
  Description of Artificial Sequence: Synthetic oligonucleotide
  Target: ATXN2; (+) strand; PAM type: NRG; PAM sequence: AAG
cgactaaactctccaatcaa

SEQ ID NO: 41485 - DNA, 20 bp, Artificial Sequence
  Description of Artificial Sequence: Synthetic oligonucleotide
  Target: ATXN2; (+) strand; PAM type: NRG; PAM sequence: CAG
aactctccaatcaaaagata

SEQ ID NO: 41486 - DNA, 20 bp, Artificial Sequence
  Description of Artificial Sequence: Synthetic oligonucleotide
  Target: ATXN2; (+) strand; PAM type: NRG; PAM sequence: GAG
ctctccaatcaaaagataca

SEQ ID NO: 41487 - DNA, 20 bp, Artificial Sequence
  Description of Artificial Sequence: Synthetic oligonucleotide
  Target: ATXN2; (+) strand; PAM type: NRG; PAM sequence: TGG
tccaatcaaaagatacagag

SEQ ID NO: 41488 - DNA, 20 bp, Artificial Sequence
  Description of Artificial Sequence: Synthetic oligonucleotide
  Target: ATXN2; (+) strand; PAM type: NRG; PAM sequence: TGG
aaagatacagagtggctaaa

SEQ ID NO: 41489 - DNA, 20 bp, Artificial Sequence
  Description of Artificial Sequence: Synthetic oligonucleotide
  Target: ATXN2; (+) strand; PAM type: NRG; PAM sequence: AAG
ggctaaatggatttaaaaaa

SEQ ID NO: 41490 - DNA, 20 bp, Artificial Sequence
  Description of Artificial Sequence: Synthetic oligonucleotide
  Target: ATXN2; (+) strand; PAM type: NRG; PAM sequence: AGG
gctaaatggatttaaaaaaa

SEQ ID NO: 41491 - DNA, 20 bp, Artificial Sequence
  Description of Artificial Sequence: Synthetic oligonucleotide
  Target: ATXN2; (+) strand; PAM type: NRG; PAM sequence: TGG
aatggatttaaaaaaaaggc

SEQ ID NO: 41492 - DNA, 20 bp, Artificial Sequence
  Description of Artificial Sequence: Synthetic oligonucleotide
  Target: ATXN2; (+) strand; PAM type: NRG; PAM sequence: GGG
atggatttaaaaaaaaggct

SEQ ID NO: 41493 - DNA, 20 bp, Artificial Sequence
  Description of Artificial Sequence: Synthetic oligonucleotide
  Target: ATXN2; (+) strand; PAM type: NRG; PAM sequence: CGG
tttaaaaaaaaggctgggtg

SEQ ID NO: 41494 - DNA, 20 bp, Artificial Sequence
  Description of Artificial Sequence: Synthetic oligonucleotide
  Target: ATXN2; (+) strand; PAM type: NRG; PAM sequence: TGG
aaaaaaaaggctgggtgcgg

SEQ ID NO: 41495 - DNA, 20 bp, Artificial Sequence
  Description of Artificial Sequence: Synthetic oligonucleotide
  Target: ATXN2; (+) strand; PAM type: NRG; PAM sequence: CAG
gtggctcacgcctgtaatcc

SEQ ID NO: 41496 - DNA, 20 bp, Artificial Sequence
  Description of Artificial Sequence: Synthetic oligonucleotide
  Target: ATXN2; (+) strand; PAM type: NRG; PAM sequence: AGG
tggctcacgcctgtaatccc

SEQ ID NO: 41497 - DNA, 20 bp, Artificial Sequence
  Description of Artificial Sequence: Synthetic oligonucleotide
  Target: ATXN2; (+) strand; PAM type: NRG; PAM sequence: TGG
cgcctgtaatcccaggactt

SEQ ID NO: 41498 - DNA, 20 bp, Artificial Sequence
  Description of Artificial Sequence: Synthetic oligonucleotide
  Target: ATXN2; (+) strand; PAM type: NRG; PAM sequence: GGG
gcctgtaatcccaggacttt

SEQ ID NO: 41499 - DNA, 20 bp, Artificial Sequence
  Description of Artificial Sequence: Synthetic oligonucleotide
  Target: ATXN2; (+) strand; PAM type: NRG; PAM sequence: GAG
ctgtaatcccaggactttgg

SEQ ID NO: 41500 - DNA, 20 bp, Artificial Sequence
  Description of Artificial Sequence: Synthetic oligonucleotide
  Target: ATXN2; (+) strand; PAM type: NRG; PAM sequence: AGG
tgtaatcccaggactttggg

SEQ ID NO: 41501 - DNA, 20 bp, Artificial Sequence
  Description of Artificial Sequence: Synthetic oligonucleotide
  Target: ATXN2; (+) strand; PAM type: NRG; PAM sequence: AAG
tcccaggactttgggaggcc

SEQ ID NO: 41502 - DNA, 20 bp, Artificial Sequence
  Description of Artificial Sequence: Synthetic oligonucleotide
  Target: ATXN2; (+) strand; PAM type: NRG; PAM sequence: AGG
cccaggactttgggaggcca

SEQ ID NO: 41503 - DNA, 20 bp, Artificial Sequence
  Description of Artificial Sequence: Synthetic oligonucleotide
  Target: ATXN2; (+) strand; PAM type: NRG; PAM sequence: CAG
aggactttgggaggccaagg

SEQ ID NO: 41504 - DNA, 20 bp, Artificial Sequence
  Description of Artificial Sequence: Synthetic oligonucleotide
  Target: ATXN2; (+) strand; PAM type: NRG; PAM sequence: AGG
ggactttgggaggccaaggc

SEQ ID NO: 41505 - DNA, 20 bp, Artificial Sequence
  Description of Artificial Sequence: Synthetic oligonucleotide
  Target: ATXN2; (+) strand; PAM type: NRG; PAM sequence: GAG
ccaaggcaggcaaatcacct

SEQ ID NO: 41506 - DNA, 20 bp, Artificial Sequence
  Description of Artificial Sequence: Synthetic oligonucleotide
  Target: ATXN2; (+) strand; PAM type: NRG; PAM sequence: AGG
caaggcaggcaaatcacctg

SEQ ID NO: 41507 - DNA, 20 bp, Artificial Sequence
  Description of Artificial Sequence: Synthetic oligonucleotide
  Target: ATXN2; (+) strand; PAM type: NRG; PAM sequence: TAG
gcaggcaaatcacctgaggt

SEQ ID NO: 41508 - DNA, 20 bp, Artificial Sequence
  Description of Artificial Sequence: Synthetic oligonucleotide
  Target: ATXN2; (+) strand; PAM type: NRG; PAM sequence: AGG
caggcaaatcacctgaggtt

SEQ ID NO: 41509 - DNA, 20 bp, Artificial Sequence
  Description of Artificial Sequence: Synthetic oligonucleotide
  Target: ATXN2; (+) strand; PAM type: NRG; PAM sequence: GAG
ggcaaatcacctgaggttag

SEQ ID NO: 41510 - DNA, 20 bp, Artificial Sequence
  Description of Artificial Sequence: Synthetic oligonucleotide
  Target: ATXN2; (+) strand; PAM type: NRG; PAM sequence: AAG
tcacctgaggttaggagttc

SEQ ID NO: 41511 - DNA, 20 bp, Artificial Sequence
  Description of Artificial Sequence: Synthetic oligonucleotide
  Target: ATXN2; (+) strand; PAM type: NRG; PAM sequence: CAG
tgaggttaggagttcaagaa

SEQ ID NO: 41512 - DNA, 20 bp, Artificial Sequence
  Description of Artificial Sequence: Synthetic oligonucleotide
  Target: ATXN2; (+) strand; PAM type: NRG; PAM sequence: TAG
tactgaaaatacaaaaaatt

SEQ ID NO: 41513 - DNA, 20 bp, Artificial Sequence
  Description of Artificial Sequence: Synthetic oligonucleotide
  Target: ATXN2; (+) strand; PAM type: NRG; PAM sequence: TGG
gaaaatacaaaaaatttagc

SEQ ID NO: 41514 - DNA, 20 bp, Artificial Sequence
  Description of Artificial Sequence: Synthetic oligonucleotide
  Target: ATXN2; (+) strand; PAM type: NRG; PAM sequence: GGG
aaaatacaaaaaatttagct

SEQ ID NO: 41515 - DNA, 20 bp, Artificial Sequence
  Description of Artificial Sequence: Synthetic oligonucleotide
  Target: ATXN2; (+) strand; PAM type: NRG; PAM sequence: TGG
acaaaaaatttagctgggct

SEQ ID NO: 41516 - DNA, 20 bp, Artificial Sequence
  Description of Artificial Sequence: Synthetic oligonucleotide
  Target: ATXN2; (+) strand; PAM type: NRG; PAM sequence: TGG
aaaaatttagctgggcttgg

SEQ ID NO: 41517 - DNA, 20 bp, Artificial Sequence
  Description of Artificial Sequence: Synthetic oligonucleotide
  Target: ATXN2; (+) strand; PAM type: NRG; PAM sequence: CAG
aatttagctgggcttggtgg

SEQ ID NO: 41518 - DNA, 20 bp, Artificial Sequence
  Description of Artificial Sequence: Synthetic oligonucleotide
  Target: ATXN2; (+) strand; PAM type: NRG; PAM sequence: AGG
atttagctgggcttggtggc

SEQ ID NO: 41519 - DNA, 20 bp, Artificial Sequence
  Description of Artificial Sequence: Synthetic oligonucleotide
  Target: ATXN2; (+) strand; PAM type: NRG; PAM sequence: CAG
gtggcaggcgcctgtaatcc

SEQ ID NO: 41520 - DNA, 20 bp, Artificial Sequence
  Description of Artificial Sequence: Synthetic oligonucleotide
  Target: ATXN2; (+) strand; PAM type: NRG; PAM sequence: TGG
cgcctgtaatcccagctact

SEQ ID NO: 41521 - DNA, 20 bp, Artificial Sequence
  Description of Artificial Sequence: Synthetic oligonucleotide
  Target: ATXN2; (+) strand; PAM type: NRG; PAM sequence: GGG
gcctgtaatcccagctactt

SEQ ID NO: 41522 - DNA, 20 bp, Artificial Sequence
  Description of Artificial Sequence: Synthetic oligonucleotide
  Target: ATXN2; (+) strand; PAM type: NRG; PAM sequence: GAG
ctgtaatcccagctacttgg

SEQ ID NO: 41523 - DNA, 20 bp, Artificial Sequence
  Description of Artificial Sequence: Synthetic oligonucleotide
  Target: ATXN2; (+) strand; PAM type: NRG; PAM sequence: AGG
tgtaatcccagctacttggg

SEQ ID NO: 41524 - DNA, 20 bp, Artificial Sequence
  Description of Artificial Sequence: Synthetic oligonucleotide
  Target: ATXN2; (+) strand; PAM type: NRG; PAM sequence: GAG
tcccagctacttgggaggct

SEQ ID NO: 41525 - DNA, 20 bp, Artificial Sequence
  Description of Artificial Sequence: Synthetic oligonucleotide
  Target: ATXN2; (+) strand; PAM type: NRG; PAM sequence: AGG
cccagctacttgggaggctg

SEQ ID NO: 41526 - DNA, 20 bp, Artificial Sequence
  Description of Artificial Sequence: Synthetic oligonucleotide
  Target: ATXN2; (+) strand; PAM type: NRG; PAM sequence: CAG
agctacttgggaggctgagg

SEQ ID NO: 41527 - DNA, 20 bp, Artificial Sequence
  Description of Artificial Sequence: Synthetic oligonucleotide
  Target: ATXN2; (+) strand; PAM type: NRG; PAM sequence: AGG
gctacttgggaggctgaggc

SEQ ID NO: 41528 - DNA, 20 bp, Artificial Sequence
  Description of Artificial Sequence: Synthetic oligonucleotide
  Target: ATXN2; (+) strand; PAM type: NRG; PAM sequence: GAG
tacttgggaggctgaggcag

SEQ ID NO: 41529 - DNA, 20 bp, Artificial Sequence
  Description of Artificial Sequence: Synthetic oligonucleotide
  Target: ATXN2; (+) strand; PAM type: NRG; PAM sequence: CAG
gcaggagaatcgcttgaact

SEQ ID NO: 41530 - DNA, 20 bp, Artificial Sequence
  Description of Artificial Sequence: Synthetic oligonucleotide
  Target: ATXN2; (+) strand; PAM type: NRG; PAM sequence: AGG
caggagaatcgcttgaactc

SEQ ID NO: 41531 - DNA, 20 bp, Artificial Sequence
  Description of Artificial Sequence: Synthetic oligonucleotide
  Target: ATXN2; (+) strand; PAM type: NRG; PAM sequence: GAG
ggagaatcgcttgaactcag

SEQ ID NO: 41532 - DNA, 20 bp, Artificial Sequence
  Description of Artificial Sequence: Synthetic oligonucleotide
  Target: ATXN2; (+) strand; PAM type: NRG; PAM sequence: AGG
gagaatcgcttgaactcagg

SEQ ID NO: 41533 - DNA, 20 bp, Artificial Sequence
  Description of Artificial Sequence: Synthetic oligonucleotide
  Target: ATXN2; (+) strand; PAM type: NRG; PAM sequence: CGG
aatcgcttgaactcaggagg

SEQ ID NO: 41534 - DNA, 20 bp, Artificial Sequence
  Description of Artificial Sequence: Synthetic oligonucleotide
  Target: ATXN2; (+) strand; PAM type: NRG; PAM sequence: GAG
tcgcttgaactcaggaggcg

SEQ ID NO: 41535 - DNA, 20 bp, Artificial Sequence
  Description of Artificial Sequence: Synthetic oligonucleotide
  Target: ATXN2; (+) strand; PAM type: NRG; PAM sequence: AGG
cgcttgaactcaggaggcgg

SEQ ID NO: 41536 - DNA, 20 bp, Artificial Sequence
  Description of Artificial Sequence: Synthetic oligonucleotide
  Target: ATXN2; (+) strand; PAM type: NRG; PAM sequence: CAG
aactcaggaggcggaggttg

SEQ ID NO: 41537 - DNA, 20 bp, Artificial Sequence
  Description of Artificial Sequence: Synthetic oligonucleotide
  Target: ATXN2; (+) strand; PAM type: NRG; PAM sequence: GAG
caggaggcggaggttgcagt

SEQ ID NO: 41538 - DNA, 20 bp, Artificial Sequence
  Description of Artificial Sequence: Synthetic oligonucleotide
  Target: ATXN2; (+) strand; PAM type: NRG; PAM sequence: GAG
ggcggaggttgcagtgagct

SEQ ID NO: 41539 - DNA, 20 bp, Artificial Sequence
  Description of Artificial Sequence: Synthetic oligonucleotide
  Target: ATXN2; (+) strand; PAM type: NRG; PAM sequence: TAG
gaggttgcagtgagctgaga

SEQ ID NO: 41540 - DNA, 20 bp, Artificial Sequence
  Description of Artificial Sequence: Synthetic oligonucleotide
  Target: ATXN2; (+) strand; PAM type: NRG; PAM sequence: CAG
gagatagcgccattgccctc

SEQ ID NO: 41541 - DNA, 20 bp, Artificial Sequence
  Description of Artificial Sequence: Synthetic oligonucleotide
  Target: ATXN2; (+) strand; PAM type: NRG; PAM sequence: TGG
agcgccattgccctccagcc

SEQ ID NO: 41542 - DNA, 20 bp, Artificial Sequence
  Description of Artificial Sequence: Synthetic oligonucleotide
  Target: ATXN2; (+) strand; PAM type: NRG; PAM sequence: GGG
gcgccattgccctccagcct

SEQ ID NO: 41543 - DNA, 20 bp, Artificial Sequence
  Description of Artificial Sequence: Synthetic oligonucleotide
  Target: ATXN2; (+) strand; PAM type: NRG; PAM sequence: TAG
ccctccagcctgggcaacaa

SEQ ID NO: 41544 - DNA, 20 bp, Artificial Sequence
  Description of Artificial Sequence: Synthetic oligonucleotide
  Target: ATXN2; (+) strand; PAM type: NRG; PAM sequence: AAG
aaaaaaaaaaaaaaaaacca

SEQ ID NO: 41545 - DNA, 20 bp, Artificial Sequence
  Description of Artificial Sequence: Synthetic oligonucleotide
  Target: ATXN2; (+) strand; PAM type: NRG; PAM sequence: AAG
accaaagatccattgcctac

SEQ ID NO: 41546 - DNA, 20 bp, Artificial Sequence
  Description of Artificial Sequence: Synthetic oligonucleotide
  Target: ATXN2; (+) strand; PAM type: NRG; PAM sequence: TAG
tttacctataaaatcacaca

SEQ ID NO: 41547 - DNA, 20 bp, Artificial Sequence
  Description of Artificial Sequence: Synthetic oligonucleotide
  Target: ATXN2; (+) strand; PAM type: NRG; PAM sequence: AAG
tcacacatagactaaaattg

SEQ ID NO: 41548 - DNA, 20 bp, Artificial Sequence
  Description of Artificial Sequence: Synthetic oligonucleotide
  Target: ATXN2; (+) strand; PAM type: NRG; PAM sequence: GAG
acacatagactaaaattgaa

SEQ ID NO: 41549 - DNA, 20 bp, Artificial Sequence
  Description of Artificial Sequence: Synthetic oligonucleotide
  Target: ATXN2; (+) strand; PAM type: NRG; PAM sequence: TGG
atagactaaaattgaagagc

SEQ ID NO: 41550 - DNA, 20 bp, Artificial Sequence
  Description of Artificial Sequence: Synthetic oligonucleotide
  Target: ATXN2; (+) strand; PAM type: NRG; PAM sequence: TGG
aaaacaatattccatgcaaa

SEQ ID NO: 41551 - DNA, 20 bp, Artificial Sequence
  Description of Artificial Sequence: Synthetic oligonucleotide
  Target: ATXN2; (+) strand; PAM type: NRG; PAM sequence: CAG
tattccatgcaaatggaaac

SEQ ID NO: 41552 - DNA, 20 bp, Artificial Sequence
  Description of Artificial Sequence: Synthetic oligonucleotide
  Target: ATXN2; (+) strand; PAM type: NRG; PAM sequence: AAG
catgcaaatggaaaccagaa

SEQ ID NO: 41553 - DNA, 20 bp, Artificial Sequence
  Description of Artificial Sequence: Synthetic oligonucleotide
  Target: ATXN2; (+) strand; PAM type: NRG; PAM sequence: CAG
aaatggaaaccagaaaagaa

SEQ ID NO: 41554 - DNA, 20 bp, Artificial Sequence
  Description of Artificial Sequence: Synthetic oligonucleotide
  Target: ATXN2; (+) strand; PAM type: NRG; PAM sequence: AGG
aatggaaaccagaaaagaac

SEQ ID NO: 41555 - DNA, 20 bp, Artificial Sequence
  Description of Artificial Sequence: Synthetic oligonucleotide
  Target: ATXN2; (+) strand; PAM type: NRG; PAM sequence: GAG
tggaaaccagaaaagaacag

SEQ ID NO: 41556 - DNA, 20 bp, Artificial Sequence
  Description of Artificial Sequence: Synthetic oligonucleotide
  Target: ATXN2; (+) strand; PAM type: NRG; PAM sequence: TAG
aaaccagaaaagaacaggag

SEQ ID NO: 41557 - DNA, 20 bp, Artificial Sequence
  Description of Artificial Sequence: Synthetic oligonucleotide
  Target: ATXN2; (+) strand; PAM type: NRG; PAM sequence: TAG
agaacaggagtagctatgct

SEQ ID NO: 41558 - DNA, 20 bp, Artificial Sequence
  Description of Artificial Sequence: Synthetic oligonucleotide
  Target: ATXN2; (+) strand; PAM type: NRG; PAM sequence: TAG
gtagctatgcttagataaaa

SEQ ID NO: 41559 - DNA, 20 bp, Artificial Sequence
  Description of Artificial Sequence: Synthetic oligonucleotide
  Target: ATXN2; (+) strand; PAM type: NRG; PAM sequence: GAG
gcttagataaaatagatttt

SEQ ID NO: 41560 - DNA, 20 bp, Artificial Sequence
  Description of Artificial Sequence: Synthetic oligonucleotide
  Target: ATXN2; (+) strand; PAM type: NRG; PAM sequence: AAG
ataaaatagattttgagaca

SEQ ID NO: 41561 - DNA, 20 bp, Artificial Sequence
  Description of Artificial Sequence: Synthetic oligonucleotide
  Target: ATXN2; (+) strand; PAM type: NRG; PAM sequence: CAG
tgagacaaagtctataaaaa

SEQ ID NO: 41562 - DNA, 20 bp, Artificial Sequence
  Description of Artificial Sequence: Synthetic oligonucleotide
  Target: ATXN2; (+) strand; PAM type: NRG; PAM sequence: AAG
aaagtctataaaaacagaca

SEQ ID NO: 41563 - DNA, 20 bp, Artificial Sequence
  Description of Artificial Sequence: Synthetic oligonucleotide
  Target: ATXN2; (+) strand; PAM type: NRG; PAM sequence: AAG
gtctataaaaacagacaaag

SEQ ID NO: 41564 - DNA, 20 bp, Artificial Sequence
  Description of Artificial Sequence: Synthetic oligonucleotide
  Target: ATXN2; (+) strand; PAM type: NRG; PAM sequence: AAG
aagattattgtataatgata

SEQ ID NO: 41565 - DNA, 20 bp, Artificial Sequence
  Description of Artificial Sequence: Synthetic oligonucleotide
  Target: ATXN2; (+) strand; PAM type: NRG; PAM sequence: AGG
agattattgtataatgataa

SEQ ID NO: 41566 - DNA, 20 bp, Artificial Sequence
  Description of Artificial Sequence: Synthetic oligonucleotide
  Target: ATXN2; (+) strand; PAM type: NRG; PAM sequence: GGG
gattattgtataatgataaa

SEQ ID NO: 41567 - DNA, 20 bp, Artificial Sequence
  Description of Artificial Sequence: Synthetic oligonucleotide
  Target: ATXN2; (+) strand; PAM type: NRG; PAM sequence: CGG
taatgataaagggatcaatt

SEQ ID NO: 41568 - DNA, 20 bp, Artificial Sequence
  Description of Artificial Sequence: Synthetic oligonucleotide
  Target: ATXN2; (+) strand; PAM type: NRG; PAM sequence: AAG
gataaagggatcaattcggc

SEQ ID NO: 41569 - DNA, 20 bp, Artificial Sequence
  Description of Artificial Sequence: Synthetic oligonucleotide
  Target: ATXN2; (+) strand; PAM type: NRG; PAM sequence: GAG
taaagggatcaattcggcaa

SEQ ID NO: 41570 - DNA, 20 bp, Artificial Sequence
  Description of Artificial Sequence: Synthetic oligonucleotide
  Target: ATXN2; (+) strand; PAM type: NRG; PAM sequence: AGG
aaagggatcaattcggcaag

SEQ ID NO: 41571 - DNA, 20 bp, Artificial Sequence
  Description of Artificial Sequence: Synthetic oligonucleotide
  Target: ATXN2; (+) strand; PAM type: NRG; PAM sequence: AAG
attcggcaagaggttataac

SEQ ID NO: 41572 - DNA, 20 bp, Artificial Sequence
  Description of Artificial Sequence: Synthetic oligonucleotide
  Target: ATXN2; (+) strand; PAM type: NRG; PAM sequence: TGG
aatacatatgcaaccaatac

SEQ ID NO: 41573 - DNA, 20 bp, Artificial Sequence
  Description of Artificial Sequence: Synthetic oligonucleotide
  Target: ATXN2; (+) strand; PAM type: NRG; PAM sequence: GAG
tacatatgcaaccaatactg

SEQ ID NO: 41574 - DNA, 20 bp, Artificial Sequence
  Description of Artificial Sequence: Synthetic oligonucleotide
  Target: ATXN2; (+) strand; PAM type: NRG; PAM sequence: CAG
gcaaccaatactggagcatc

SEQ ID NO: 41575 - DNA, 20 bp, Artificial Sequence
  Description of Artificial Sequence: Synthetic oligonucleotide
  Target: ATXN2; (+) strand; PAM type: NRG; PAM sequence: AAG
ctggagcatccagatatata

SEQ ID NO: 41576 - DNA, 20 bp, Artificial Sequence
  Description of Artificial Sequence: Synthetic oligonucleotide
  Target: ATXN2; (+) strand; PAM type: NRG; PAM sequence: TAG
atatataaagcaaacattat

SEQ ID NO: 41577 - DNA, 20 bp, Artificial Sequence
  Description of Artificial Sequence: Synthetic oligonucleotide
  Target: ATXN2; (+) strand; PAM type: NRG; PAM sequence: GAG
atataaagcaaacattatta

SEQ ID NO: 41578 - DNA, 20 bp, Artificial Sequence
  Description of Artificial Sequence: Synthetic oligonucleotide
  Target: ATXN2; (+) strand; PAM type: NRG; PAM sequence: AAG
caaacattattagagcaaaa

SEQ ID NO: 41579 - DNA, 20 bp, Artificial Sequence
  Description of Artificial Sequence: Synthetic oligonucleotide
  Target: ATXN2; (+) strand; PAM type: NRG; PAM sequence: GAG
aacattattagagcaaaaaa

SEQ ID NO: 41580 - DNA, 20 bp, Artificial Sequence
  Description of Artificial Sequence: Synthetic oligonucleotide
  Target: ATXN2; (+) strand; PAM type: NRG; PAM sequence: CAG
attagagcaaaaaagagaaa

SEQ ID NO: 41581 - DNA, 20 bp, Artificial Sequence
  Description of Artificial Sequence: Synthetic oligonucleotide
  Target: ATXN2; (+) strand; PAM type: NRG; PAM sequence: CAG
caaaaaagagaaacagacct

SEQ ID NO: 41582 - DNA, 20 bp, Artificial Sequence
  Description of Artificial Sequence: Synthetic oligonucleotide
  Target: ATXN2; (+) strand; PAM type: NRG; PAM sequence: CAG
agagaaacagacctcagtaa

SEQ ID NO: 41583 - DNA, 20 bp, Artificial Sequence
  Description of Artificial Sequence: Synthetic oligonucleotide
  Target: ATXN2; (+) strand; PAM type: NRG; PAM sequence: CGG
aaacagacctcagtaacagt

SEQ ID NO: 41584 - DNA, 20 bp, Artificial Sequence
  Description of Artificial Sequence: Synthetic oligonucleotide
  Target: ATXN2; (+) strand; PAM type: NRG; PAM sequence: CAG
aaacttcaacaccccactct

SEQ ID NO: 41585 - DNA, 20 bp, Artificial Sequence
  Description of Artificial Sequence: Synthetic oligonucleotide
  Target: ATXN2; (+) strand; PAM type: NRG; PAM sequence: TGG
caacaccccactctcagcaa

SEQ ID NO: 41586 - DNA, 20 bp, Artificial Sequence
  Description of Artificial Sequence: Synthetic oligonucleotide
  Target: ATXN2; (+) strand; PAM type: NRG; PAM sequence: CAG
accccactctcagcaatgga

SEQ ID NO: 41587 - DNA, 20 bp, Artificial Sequence
  Description of Artificial Sequence: Synthetic oligonucleotide
  Target: ATXN2; (+) strand; PAM type: NRG; PAM sequence: CAG
tcagcaatggacagatcatt

SEQ ID NO: 41588 - DNA, 20 bp, Artificial Sequence
  Description of Artificial Sequence: Synthetic oligonucleotide
  Target: ATXN2; (+) strand; PAM type: NRG; PAM sequence: CAG
caatggacagatcattcaga

SEQ ID NO: 41589 - DNA, 20 bp, Artificial Sequence
  Description of Artificial Sequence: Synthetic oligonucleotide
  Target: ATXN2; (+) strand; PAM type: NRG; PAM sequence: AAG
attcagacagaaaatcaaca

SEQ ID NO: 41590 - DNA, 20 bp, Artificial Sequence
  Description of Artificial Sequence: Synthetic oligonucleotide
  Target: ATXN2; (+) strand; PAM type: NRG; PAM sequence: TAG
gaaaatcaacaaagaaacat

SEQ ID NO: 41591 - DNA, 20 bp, Artificial Sequence
  Description of Artificial Sequence: Synthetic oligonucleotide
  Target: ATXN2; (+) strand; PAM type: NRG; PAM sequence: TAG
attagacctaatttgctcta

SEQ ID NO: 41592 - DNA, 20 bp, Artificial Sequence
  Description of Artificial Sequence: Synthetic oligonucleotide
  Target: ATXN2; (+) strand; PAM type: NRG; PAM sequence: TAG
aatttgctctatagaccaaa

SEQ ID NO: 41593 - DNA, 20 bp, Artificial Sequence
  Description of Artificial Sequence: Synthetic oligonucleotide
  Target: ATXN2; (+) strand; PAM type: NRG; PAM sequence: AGG
atttgctctatagaccaaat

SEQ ID NO: 41594 - DNA, 20 bp, Artificial Sequence
  Description of Artificial Sequence: Synthetic oligonucleotide
  Target: ATXN2; (+) strand; PAM type: NRG; PAM sequence: CAG
ataggcccaatacatattta

SEQ ID NO: 41595 - DNA, 20 bp, Artificial Sequence
  Description of Artificial Sequence: Synthetic oligonucleotide
  Target: ATXN2; (+) strand; PAM type: NRG; PAM sequence: CAG
ttacagaacattgtgtccaa

SEQ ID NO: 41596 - DNA, 20 bp, Artificial Sequence
  Description of Artificial Sequence: Synthetic oligonucleotide
  Target: ATXN2; (+) strand; PAM type: NRG; PAM sequence: TAG
aacattgtgtccaacagcta

SEQ ID NO: 41597 - DNA, 20 bp, Artificial Sequence
  Description of Artificial Sequence: Synthetic oligonucleotide
  Target: ATXN2; (+) strand; PAM type: NRG; PAM sequence: TGG
acattcttctcctcaacata

SEQ ID NO: 41598 - DNA, 20 bp, Artificial Sequence
  Description of Artificial Sequence: Synthetic oligonucleotide
  Target: ATXN2; (+) strand; PAM type: NRG; PAM sequence: AAG
caacatatggattgctctca

SEQ ID NO: 41599 - DNA, 20 bp, Artificial Sequence
  Description of Artificial Sequence: Synthetic oligonucleotide
  Target: ATXN2; (+) strand; PAM type: NRG; PAM sequence: TAG
atatggattgctctcaaaga

SEQ ID NO: 41600 - DNA, 20 bp, Artificial Sequence
  Description of Artificial Sequence: Synthetic oligonucleotide
  Target: ATXN2; (+) strand; PAM type: NRG; PAM sequence: AAG
tcaaagatagaccctatgtt

SEQ ID NO: 41601 - DNA, 20 bp, Artificial Sequence
  Description of Artificial Sequence: Synthetic oligonucleotide
  Target: ATXN2; (+) strand; PAM type: NRG; PAM sequence: AAG
cctatgttaagccacaaaac

SEQ ID NO: 41602 - DNA, 20 bp, Artificial Sequence
  Description of Artificial Sequence: Synthetic oligonucleotide
  Target: ATXN2; (+) strand; PAM type: NRG; PAM sequence: AAG
taagccacaaaacaagtcta

SEQ ID NO: 41603 - DNA, 20 bp, Artificial Sequence
  Description of Artificial Sequence: Synthetic oligonucleotide
  Target: ATXN2; (+) strand; PAM type: NRG; PAM sequence: TGG
acaagtctaaagatttgacg

SEQ ID NO: 41604 - DNA, 20 bp, Artificial Sequence
  Description of Artificial Sequence: Synthetic oligonucleotide
  Target: ATXN2; (+) strand; PAM type: NRG; PAM sequence: CAG
tctaaagatttgacgtggca

SEQ ID NO: 41605 - DNA, 20 bp, Artificial Sequence
  Description of Artificial Sequence: Synthetic oligonucleotide
  Target: ATXN2; (+) strand; PAM type: NRG; PAM sequence: TGG
aaagatttgacgtggcacag

SEQ ID NO: 41606 - DNA, 20 bp, Artificial Sequence
  Description of Artificial Sequence: Synthetic oligonucleotide
  Target: ATXN2; (+) strand; PAM type: NRG; PAM sequence: CAG
gtggctcatgtctgtaatcc

SEQ ID NO: 41607 - DNA, 20 bp, Artificial Sequence
  Description of Artificial Sequence: Synthetic oligonucleotide
  Target: ATXN2; (+) strand; PAM type: NRG; PAM sequence: TGG
tgtctgtaatcccagcacct

SEQ ID NO: 41608 - DNA, 20 bp, Artificial Sequence
  Description of Artificial Sequence: Synthetic oligonucleotide
  Target: ATXN2; (+) strand; PAM type: NRG; PAM sequence: GGG
gtctgtaatcccagcacctt

SEQ ID NO: 41609 - DNA, 20 bp, Artificial Sequence
  Description of Artificial Sequence: Synthetic oligonucleotide
  Target: ATXN2; (+) strand; PAM type: NRG; PAM sequence: GAG
ctgtaatcccagcaccttgg

SEQ ID NO: 41610 - DNA, 20 bp, Artificial Sequence
  Description of Artificial Sequence: Synthetic oligonucleotide
  Target: ATXN2; (+) strand; PAM type: NRG; PAM sequence: AGG
tgtaatcccagcaccttggg

SEQ ID NO: 41611 - DNA, 20 bp, Artificial Sequence
  Description of Artificial Sequence: Synthetic oligonucleotide
  Target: ATXN2; (+) strand; PAM type: NRG; PAM sequence: TAG
agcaccttgggaggccgaaa

SEQ ID NO: 41612 - DNA, 20 bp, Artificial Sequence
  Description of Artificial Sequence: Synthetic oligonucleotide
  Target: ATXN2; (+) strand; PAM type: NRG; PAM sequence: AGG
gcaccttgggaggccgaaat

SEQ ID NO: 41613 - DNA, 20 bp, Artificial Sequence
  Description of Artificial Sequence: Synthetic oligonucleotide
  Target: ATXN2; (+) strand; PAM type: NRG; PAM sequence: TGG
ccttgggaggccgaaatagg

SEQ ID NO: 41614 - DNA, 20 bp, Artificial Sequence
  Description of Artificial Sequence: Synthetic oligonucleotide
  Target: ATXN2; (+) strand; PAM type: NRG; PAM sequence: GAG
ccgaaataggtggattgctt

SEQ ID NO: 41615 - DNA, 20 bp, Artificial Sequence
  Description of Artificial Sequence: Synthetic oligonucleotide
  Target: ATXN2; (+) strand; PAM type: NRG; PAM sequence: CAG
ataggtggattgcttgagct

SEQ ID NO: 41616 - DNA, 20 bp, Artificial Sequence
  Description of Artificial Sequence: Synthetic oligonucleotide
  Target: ATXN2; (+) strand; PAM type: NRG; PAM sequence: AGG
taggtggattgcttgagctc

SEQ ID NO: 41617 - DNA, 20 bp, Artificial Sequence
  Description of Artificial Sequence: Synthetic oligonucleotide
  Target: ATXN2; (+) strand; PAM type: NRG; PAM sequence: GAG
ggtggattgcttgagctcag

SEQ ID NO: 41618 - DNA, 20 bp, Artificial Sequence
  Description of Artificial Sequence: Synthetic oligonucleotide
  Target: ATXN2; (+) strand; PAM type: NRG; PAM sequence: TGG
tcaggagttcgaaacaaccc

SEQ ID NO: 41619 - DNA, 20 bp, Artificial Sequence
  Description of Artificial Sequence: Synthetic oligonucleotide
  Target: ATXN2; (+) strand; PAM type: NRG; PAM sequence: GGG
caggagttcgaaacaaccct

SEQ ID NO: 41620 - DNA, 20 bp, Artificial Sequence
  Description of Artificial Sequence: Synthetic oligonucleotide
  Target: ATXN2; (+) strand; PAM type: NRG; PAM sequence: AAG
caaccctgggacacatcgca

SEQ ID NO: 41621 - DNA, 20 bp, Artificial Sequence
  Description of Artificial Sequence: Synthetic oligonucleotide
  Target: ATXN2; (+) strand; PAM type: NRG; PAM sequence: CAG
aaaaaaaaatccaaaaatat

SEQ ID NO: 41622 - DNA, 20 bp, Artificial Sequence
  Description of Artificial Sequence: Synthetic oligonucleotide
  Target: ATXN2; (+) strand; PAM type: NRG; PAM sequence: CGG
aaaatatcagccatatgtga

SEQ ID NO: 41623 - DNA, 20 bp, Artificial Sequence
  Description of Artificial Sequence: Synthetic oligonucleotide
  Target: ATXN2; (+) strand; PAM type: NRG; PAM sequence: TAG
tatgtgacggcatgtgcctg

SEQ ID NO: 41624 - DNA, 20 bp, Artificial Sequence
  Description of Artificial Sequence: Synthetic oligonucleotide
  Target: ATXN2; (+) strand; PAM type: NRG; PAM sequence: CAG
acggcatgtgcctgtagtcc

SEQ ID NO: 41625 - DNA, 20 bp, Artificial Sequence
  Description of Artificial Sequence: Synthetic oligonucleotide
  Target: ATXN2; (+) strand; PAM type: NRG; PAM sequence: TGG
tgcctgtagtcccagctact

SEQ ID NO: 41626 - DNA, 20 bp, Artificial Sequence
  Description of Artificial Sequence: Synthetic oligonucleotide
  Target: ATXN2; (+) strand; PAM type: NRG; PAM sequence: AAG
ctgtagtcccagctacttgg

SEQ ID NO: 41627 - DNA, 20 bp, Artificial Sequence
  Description of Artificial Sequence: Synthetic oligonucleotide
  Target: ATXN2; (+) strand; PAM type: NRG; PAM sequence: AGG
tgtagtcccagctacttgga

SEQ ID NO: 41628 - DNA, 20 bp, Artificial Sequence
  Description of Artificial Sequence: Synthetic oligonucleotide
  Target: ATXN2; (+) strand; PAM type: NRG; PAM sequence: AAG
tcccagctacttggaaggct

SEQ ID NO: 41629 - DNA, 20 bp, Artificial Sequence
  Description of Artificial Sequence: Synthetic oligonucleotide
  Target: ATXN2; (+) strand; PAM type: NRG; PAM sequence: AGG
cccagctacttggaaggcta

SEQ ID NO: 41630 - DNA, 20 bp, Artificial Sequence
  Description of Artificial Sequence: Synthetic oligonucleotide
  Target: ATXN2; (+) strand; PAM type: NRG; PAM sequence: TGG
agctacttggaaggctaagg

SEQ ID NO: 41631 - DNA, 20 bp, Artificial Sequence
  Description of Artificial Sequence: Synthetic oligonucleotide
  Target: ATXN2; (+) strand; PAM type: NRG; PAM sequence: GGG
gctacttggaaggctaaggt

SEQ ID NO: 41632 - DNA, 20 bp, Artificial Sequence
  Description of Artificial Sequence: Synthetic oligonucleotide
  Target: ATXN2; (+) strand; PAM type: NRG; PAM sequence: GAG
tacttggaaggctaaggtgg

SEQ ID NO: 41633 - DNA, 20 bp, Artificial Sequence
  Description of Artificial Sequence: Synthetic oligonucleotide
  Target: ATXN2; (+) strand; PAM type: NRG; PAM sequence: AGG
acttggaaggctaaggtggg

SEQ ID NO: 41634 - DNA, 20 bp, Artificial Sequence
  Description of Artificial Sequence: Synthetic oligonucleotide
  Target: ATXN2; (+) strand; PAM type: NRG; PAM sequence: GAG
ctaaggtgggaggattgctt

SEQ ID NO: 41635 - DNA, 20 bp, Artificial Sequence
  Description of Artificial Sequence: Synthetic oligonucleotide
  Target: ATXN2; (+) strand; PAM type: NRG; PAM sequence: CAG
ggtgggaggattgcttgagc

SEQ ID NO: 41636 - DNA, 20 bp, Artificial Sequence
  Description of Artificial Sequence: Synthetic oligonucleotide
  Target: ATXN2; (+) strand; PAM type: NRG; PAM sequence: AGG
gtgggaggattgcttgagcc

SEQ ID NO: 41637 - DNA, 20 bp, Artificial Sequence
  Description of Artificial Sequence: Synthetic oligonucleotide
  Target: ATXN2; (+) strand; PAM type: NRG; PAM sequence: AAG
ggaggattgcttgagccagg

SEQ ID NO: 41638 - DNA, 20 bp, Artificial Sequence
  Description of Artificial Sequence: Synthetic oligonucleotide
  Target: ATXN2; (+) strand; PAM type: NRG; PAM sequence: AGG
gaggattgcttgagccagga

SEQ ID NO: 41639 - DNA, 20 bp, Artificial Sequence
  Description of Artificial Sequence: Synthetic oligonucleotide
  Target: ATXN2; (+) strand; PAM type: NRG; PAM sequence: CGG
gattgcttgagccaggaagg

SEQ ID NO: 41640 - DNA, 20 bp, Artificial Sequence
  Description of Artificial Sequence: Synthetic oligonucleotide
  Target: ATXN2; (+) strand; PAM type: NRG; PAM sequence: GAG
ttgcttgagccaggaaggcg

SEQ ID NO: 41641 - DNA, 20 bp, Artificial Sequence
  Description of Artificial Sequence: Synthetic oligonucleotide
  Target: ATXN2; (+) strand; PAM type: NRG; PAM sequence: AGG
tgcttgagccaggaaggcgg

SEQ ID NO: 41642 - DNA, 20 bp, Artificial Sequence
  Description of Artificial Sequence: Synthetic oligonucleotide
  Target: ATXN2; (+) strand; PAM type: NRG; PAM sequence: CAG
agccaggaaggcggaggttg

SEQ ID NO: 41643 - DNA, 20 bp, Artificial Sequence
  Description of Artificial Sequence: Synthetic oligonucleotide
  Target: ATXN2; (+) strand; PAM type: NRG; PAM sequence: AGG
gccaggaaggcggaggttgc

SEQ ID NO: 41644 - DNA, 20 bp, Artificial Sequence
  Description of Artificial Sequence: Synthetic oligonucleotide
  Target: ATXN2; (+) strand; PAM type: NRG; PAM sequence: GAG
ggaaggcggaggttgcaggt

SEQ ID NO: 41645 - DNA, 20 bp, Artificial Sequence
  Description of Artificial Sequence: Synthetic oligonucleotide
  Target: ATXN2; (+) strand; PAM type: NRG; PAM sequence: AAG
gcggaggttgcaggtgagcc

SEQ ID NO: 41646 - DNA, 20 bp, Artificial Sequence
  Description of Artificial Sequence: Synthetic oligonucleotide
  Target: ATXN2; (+) strand; PAM type: NRG; PAM sequence: CAG
caagatcatgacatgtactc

SEQ ID NO: 41647 - DNA, 20 bp, Artificial Sequence
  Description of Artificial Sequence: Synthetic oligonucleotide
  Target: ATXN2; (+) strand; PAM type: NRG; PAM sequence: TGG
tcatgacatgtactccagcc

SEQ ID NO: 41648 - DNA, 20 bp, Artificial Sequence
  Description of Artificial Sequence: Synthetic oligonucleotide
  Target: ATXN2; (+) strand; PAM type: NRG; PAM sequence: GGG
catgacatgtactccagcct

SEQ ID NO: 41649 - DNA, 20 bp, Artificial Sequence
  Description of Artificial Sequence: Synthetic oligonucleotide
  Target: ATXN2; (+) strand; PAM type: NRG; PAM sequence: CAG
atgtactccagcctgggtaa

SEQ ID NO: 41650 - DNA, 20 bp, Artificial Sequence
  Description of Artificial Sequence: Synthetic oligonucleotide
  Target: ATXN2; (+) strand; PAM type: NRG; PAM sequence: GAG
gtactccagcctgggtaaca

SEQ ID NO: 41651 - DNA, 20 bp, Artificial Sequence
  Description of Artificial Sequence: Synthetic oligonucleotide
  Target: ATXN2; (+) strand; PAM type: NRG; PAM sequence: GAG
tccagcctgggtaacagagt

SEQ ID NO: 41652 - DNA, 20 bp, Artificial Sequence
  Description of Artificial Sequence: Synthetic oligonucleotide
  Target: ATXN2; (+) strand; PAM type: NRG; PAM sequence: AAG
aaataaataaaaattcaaaa

SEQ ID NO: 41653 - DNA, 20 bp, Artificial Sequence
  Description of Artificial Sequence: Synthetic oligonucleotide
  Target: ATXN2; (+) strand; PAM type: NRG; PAM sequence: AAG
ctatcttctctgatcacaat

SEQ ID NO: 41654 - DNA, 20 bp, Artificial Sequence
  Description of Artificial Sequence: Synthetic oligonucleotide
  Target: ATXN2; (+) strand; PAM type: NRG; PAM sequence: TAG
tgatcacaataagataacac

SEQ ID NO: 41655 - DNA, 20 bp, Artificial Sequence
  Description of Artificial Sequence: Synthetic oligonucleotide
  Target: ATXN2; (+) strand; PAM type: NRG; PAM sequence: GAG
atcacaataagataacacta

SEQ ID NO: 41656 - DNA, 20 bp, Artificial Sequence
  Description of Artificial Sequence: Synthetic oligonucleotide
  Target: ATXN2; (+) strand; PAM type: NRG; PAM sequence: AGG
tcacaataagataacactag

SEQ ID NO: 41657 - DNA, 20 bp, Artificial Sequence
  Description of Artificial Sequence: Synthetic oligonucleotide
  Target: ATXN2; (+) strand; PAM type: NRG; PAM sequence: CGG
aataagataacactagaggc

SEQ ID NO: 41658 - DNA, 20 bp, Artificial Sequence
  Description of Artificial Sequence: Synthetic oligonucleotide
  Target: ATXN2; (+) strand; PAM type: NRG; PAM sequence: GGG
ataagataacactagaggcc

SEQ ID NO: 41659 - DNA, 20 bp, Artificial Sequence
  Description of Artificial Sequence: Synthetic oligonucleotide
  Target: ATXN2; (+) strand; PAM type: NRG; PAM sequence: CGG
ataacactagaggccgggca

SEQ ID NO: 41660 - DNA, 20 bp, Artificial Sequence
  Description of Artificial Sequence: Synthetic oligonucleotide
  Target: ATXN2; (+) strand; PAM type: NRG; PAM sequence: TGG
acactagaggccgggcacgg

SEQ ID NO: 41661 - DNA, 20 bp, Artificial Sequence
  Description of Artificial Sequence: Synthetic oligonucleotide
  Target: ATXN2; (+) strand; PAM type: NRG; PAM sequence: CAG
gtggctcatgcctgtaattc

SEQ ID NO: 41662 - DNA, 20 bp, Artificial Sequence
  Description of Artificial Sequence: Synthetic oligonucleotide
  Target: ATXN2; (+) strand; PAM type: NRG; PAM sequence: TAG
tgcctgtaattccagcactt

SEQ ID NO: 41663 - DNA, 20 bp, Artificial Sequence
  Description of Artificial Sequence: Synthetic oligonucleotide
  Target: ATXN2; (+) strand; PAM type: NRG; PAM sequence: AGG
gcctgtaattccagcacttt

SEQ ID NO: 41664 - DNA, 20 bp, Artificial Sequence
  Description of Artificial Sequence: Synthetic oligonucleotide
  Target: ATXN2; (+) strand; PAM type: NRG; PAM sequence: GAG
ctgtaattccagcactttag

SEQ ID NO: 41665 - DNA, 20 bp, Artificial Sequence
  Description of Artificial Sequence: Synthetic oligonucleotide
  Target: ATXN2; (+) strand; PAM type: NRG; PAM sequence: AGG
tgtaattccagcactttagg

SEQ ID NO: 41666 - DNA, 20 bp, Artificial Sequence
  Description of Artificial Sequence: Synthetic oligonucleotide
  Target: ATXN2; (+) strand; PAM type: NRG; PAM sequence: AAG
ttccagcactttaggaggcc

SEQ ID NO: 41667 - DNA, 20 bp, Artificial Sequence
  Description of Artificial Sequence: Synthetic oligonucleotide
  Target: ATXN2; (+) strand; PAM type: NRG; PAM sequence: AGG
tccagcactttaggaggcca

SEQ ID NO: 41668 - DNA, 20 bp, Artificial Sequence
  Description of Artificial Sequence: Synthetic oligonucleotide
  Target: ATXN2; (+) strand; PAM type: NRG; PAM sequence: TGG
agcactttaggaggccaagg

SEQ ID NO: 41669 - DNA, 20 bp, Artificial Sequence
  Description of Artificial Sequence: Synthetic oligonucleotide
  Target: ATXN2; (+) strand; PAM type: NRG; PAM sequence: GGG
gcactttaggaggccaaggt

SEQ ID NO: 41670 - DNA, 20 bp, Artificial Sequence
  Description of Artificial Sequence: Synthetic oligonucleotide
  Target: ATXN2; (+) strand; PAM type: NRG; PAM sequence: TGG
ctttaggaggccaaggtggg

SEQ ID NO: 41671 - DNA, 20 bp, Artificial Sequence
  Description of Artificial Sequence: Synthetic oligonucleotide
  Target: ATXN2; (+) strand; PAM type: NRG; PAM sequence: GAG
ccaaggtgggtggatcatct

SEQ ID NO: 41672 - DNA, 20 bp, Artificial Sequence
  Description of Artificial Sequence: Synthetic oligonucleotide
  Target: ATXN2; (+) strand; PAM type: NRG; PAM sequence: AGG
caaggtgggtggatcatctg

SEQ ID NO: 41673 - DNA, 20 bp, Artificial Sequence
  Description of Artificial Sequence: Synthetic oligonucleotide
  Target: ATXN2; (+) strand; PAM type: NRG; PAM sequence: CAG
gtgggtggatcatctgaggt

SEQ ID NO: 41674 - DNA, 20 bp, Artificial Sequence
  Description of Artificial Sequence: Synthetic oligonucleotide
  Target: ATXN2; (+) strand; PAM type: NRG; PAM sequence: AGG
tgggtggatcatctgaggtc

SEQ ID NO: 41675 - DNA, 20 bp, Artificial Sequence
  Description of Artificial Sequence: Synthetic oligonucleotide
  Target: ATXN2; (+) strand; PAM type: NRG; PAM sequence: GAG
ggtggatcatctgaggtcag

SEQ ID NO: 41676 - DNA, 20 bp, Artificial Sequence
  Description of Artificial Sequence: Synthetic oligonucleotide
  Target: ATXN2; (+) strand; PAM type: NRG; PAM sequence: GAG
tcatctgaggtcaggagttc

SEQ ID NO: 41677 - DNA, 20 bp, Artificial Sequence
  Description of Artificial Sequence: Synthetic oligonucleotide
  Target: ATXN2; (+) strand; PAM type: NRG; PAM sequence: CAG
tgaggtcaggagttcgagat

SEQ ID NO: 41678 - DNA, 20 bp, Artificial Sequence
  Description of Artificial Sequence: Synthetic oligonucleotide
  Target: ATXN2; (+) strand; PAM type: NRG; PAM sequence: TGG
cgagatcagcttgaccaaca

SEQ ID NO: 41679 - DNA, 20 bp, Artificial Sequence
  Description of Artificial Sequence: Synthetic oligonucleotide
  Target: ATXN2; (+) strand; PAM type: NRG; PAM sequence: TAG
ctaaaaatacaaaaaaaaat

SEQ ID NO: 41680 - DNA, 20 bp, Artificial Sequence
  Description of Artificial Sequence: Synthetic oligonucleotide
  Target: ATXN2; (+) strand; PAM type: NRG; PAM sequence: CAG
aaatacaaaaaaaaattagc

SEQ ID NO: 41681 - DNA, 20 bp, Artificial Sequence
  Description of Artificial Sequence: Synthetic oligonucleotide
  Target: ATXN2; (+) strand; PAM type: NRG; PAM sequence: AGG
aatacaaaaaaaaattagcc

SEQ ID NO: 41682 - DNA, 20 bp, Artificial Sequence
  Description of Artificial Sequence: Synthetic oligonucleotide
  Target: ATXN2; (+) strand; PAM type: NRG; PAM sequence: GAG
tacaaaaaaaaattagccag

SEQ ID NO: 41683 - DNA, 20 bp, Artificial Sequence
  Description of Artificial Sequence: Synthetic oligonucleotide
  Target: ATXN2; (+) strand; PAM type: NRG; PAM sequence: TGG
aaaaaaaaattagccaggag

SEQ ID NO: 41684 - DNA, 20 bp, Artificial Sequence
  Description of Artificial Sequence: Synthetic oligonucleotide
  Target: ATXN2; (+) strand; PAM type: NRG; PAM sequence: TGG
aaaaaattagccaggagtgg

SEQ ID NO: 41685 - DNA, 20 bp, Artificial Sequence
  Description of Artificial Sequence: Synthetic oligonucleotide
  Target: ATXN2; (+) strand; PAM type: NRG; PAM sequence: CAG
gtggtacatgcctgtaatcc

SEQ ID NO: 41686 - DNA, 20 bp, Artificial Sequence
  Description of Artificial Sequence: Synthetic oligonucleotide
  Target: ATXN2; (+) strand; PAM type: NRG; PAM sequence: CAG
tgcctgtaatcccagctact

SEQ ID NO: 41687 - DNA, 20 bp, Artificial Sequence
  Description of Artificial Sequence: Synthetic oligonucleotide
  Target: ATXN2; (+) strand; PAM type: NRG; PAM sequence: AGG
gcctgtaatcccagctactc

SEQ ID NO: 41688 - DNA, 20 bp, Artificial Sequence
  Description of Artificial Sequence: Synthetic oligonucleotide
  Target: ATXN2; (+) strand; PAM type: NRG; PAM sequence: GAG
ctgtaatcccagctactcag

SEQ ID NO: 41689 - DNA, 20 bp, Artificial Sequence
  Description of Artificial Sequence: Synthetic oligonucleotide
  Target: ATXN2; (+) strand; PAM type: NRG; PAM sequence: AGG
tgtaatcccagctactcagg

SEQ ID NO: 41690 - DNA, 20 bp, Artificial Sequence
  Description of Artificial Sequence: Synthetic oligonucleotide
  Target: ATXN2; (+) strand; PAM type: NRG; PAM sequence: GAG
tcccagctactcaggaggct

SEQ ID NO: 41691 - DNA, 20 bp, Artificial Sequence
  Description of Artificial Sequence: Synthetic oligonucleotide
  Target: ATXN2; (+) strand; PAM type: NRG; PAM sequence: AGG
cccagctactcaggaggctg

SEQ ID NO: 41692 - DNA, 20 bp, Artificial Sequence
  Description of Artificial Sequence: Synthetic oligonucleotide
  Target: ATXN2; (+) strand; PAM type: NRG; PAM sequence: CAG
agctactcaggaggctgagg

SEQ ID NO: 41693 - DNA, 20 bp, Artificial Sequence
  Description of Artificial Sequence: Synthetic oligonucleotide
  Target: ATXN2; (+) strand; PAM type: NRG; PAM sequence: AAG
tactcaggaggctgaggcag

SEQ ID NO: 41694 - DNA, 20 bp, Artificial Sequence
  Description of Artificial Sequence: Synthetic oligonucleotide
  Target: ATXN2; (+) strand; PAM type: NRG; PAM sequence: TGG
ggcagaagaatcacttgaac

SEQ ID NO: 41695 - DNA, 20 bp, Artificial Sequence
  Description of Artificial Sequence: Synthetic oligonucleotide
  Target: ATXN2; (+) strand; PAM type: NRG; PAM sequence: GGG
gcagaagaatcacttgaact

SEQ ID NO: 41696 - DNA, 20 bp, Artificial Sequence
  Description of Artificial Sequence: Synthetic oligonucleotide
  Target: ATXN2; (+) strand; PAM type: NRG; PAM sequence: GGG
cagaagaatcacttgaactg

SEQ ID NO: 41697 - DNA, 20 bp, Artificial Sequence
  Description of Artificial Sequence: Synthetic oligonucleotide
  Target: ATXN2; (+) strand; PAM type: NRG; PAM sequence: GAG
gaagaatcacttgaactggg

SEQ ID NO: 41698 - DNA, 20 bp, Artificial Sequence
  Description of Artificial Sequence: Synthetic oligonucleotide
  Target: ATXN2; (+) strand; PAM type: NRG; PAM sequence: AGG
aagaatcacttgaactgggg

SEQ ID NO: 41699 - DNA, 20 bp, Artificial Sequence
  Description of Artificial Sequence: Synthetic oligonucleotide
  Target: ATXN2; (+) strand; PAM type: NRG; PAM sequence: CAG
aatcacttgaactggggagg

SEQ ID NO: 41700 - DNA, 20 bp, Artificial Sequence
  Description of Artificial Sequence: Synthetic oligonucleotide
  Target: ATXN2; (+) strand; PAM type: NRG; PAM sequence: GAG
tcacttgaactggggaggca

SEQ ID NO: 41701 - DNA, 20 bp, Artificial Sequence
  Description of Artificial Sequence: Synthetic oligonucleotide
  Target: ATXN2; (+) strand; PAM type: NRG; PAM sequence: AGG
cacttgaactggggaggcag

SEQ ID NO: 41702 - DNA, 20 bp, Artificial Sequence
  Description of Artificial Sequence: Synthetic oligonucleotide
  Target: ATXN2; (+) strand; PAM type: NRG; PAM sequence: CAG
aactggggaggcagaggttg

SEQ ID NO: 41703 - DNA, 20 bp, Artificial Sequence
  Description of Artificial Sequence: Synthetic oligonucleotide
  Target: ATXN2; (+) strand; PAM type: NRG; PAM sequence: AAG
ggggaggcagaggttgcagt

SEQ ID NO: 41704 - DNA, 20 bp, Artificial Sequence
  Description of Artificial Sequence: Synthetic oligonucleotide
  Target: ATXN2; (+) strand; PAM type: NRG; PAM sequence: GAG
ggcagaggttgcagtaagcc

SEQ ID NO: 41705 - DNA, 20 bp, Artificial Sequence
  Description of Artificial Sequence: Synthetic oligonucleotide
  Target: ATXN2; (+) strand; PAM type: NRG; PAM sequence: CAG
gagatcgcgccactacactc

SEQ ID NO: 41706 - DNA, 20 bp, Artificial Sequence
  Description of Artificial Sequence: Synthetic oligonucleotide
  Target: ATXN2; (+) strand; PAM type: NRG; PAM sequence: TGG
cgcgccactacactccagca

SEQ ID NO: 41707 - DNA, 20 bp, Artificial Sequence
  Description of Artificial Sequence: Synthetic oligonucleotide
  Target: ATXN2; (+) strand; PAM type: NRG; PAM sequence: GGG
gcgccactacactccagcat

SEQ ID NO: 41708 - DNA, 20 bp, Artificial Sequence
  Description of Artificial Sequence: Synthetic oligonucleotide
  Target: ATXN2; (+) strand; PAM type: NRG; PAM sequence: CAG
ctacactccagcatgggtga

SEQ ID NO: 41709 - DNA, 20 bp, Artificial Sequence
  Description of Artificial Sequence: Synthetic oligonucleotide
  Target: ATXN2; (+) strand; PAM type: NRG; PAM sequence: GAG
acactccagcatgggtgaca

SEQ ID NO: 41710 - DNA, 20 bp, Artificial Sequence
  Description of Artificial Sequence: Synthetic oligonucleotide
  Target: ATXN2; (+) strand; PAM type: NRG; PAM sequence: GAG
tccagcatgggtgacagagc

SEQ ID NO: 41711 - DNA, 20 bp, Artificial Sequence
  Description of Artificial Sequence: Synthetic oligonucleotide
  Target: ATXN2; (+) strand; PAM type: NRG; PAM sequence: TAG
aaaataaaataaaataacac

SEQ ID NO: 41712 - DNA, 20 bp, Artificial Sequence
  Description of Artificial Sequence: Synthetic oligonucleotide
  Target: ATXN2; (+) strand; PAM type: NRG; PAM sequence: AAG
ataaaataacactagataac

SEQ ID NO: 41713 - DNA, 20 bp, Artificial Sequence
  Description of Artificial Sequence: Synthetic oligonucleotide
  Target: ATXN2; (+) strand; PAM type: NRG; PAM sequence: GAG
aaaataacactagataacaa

SEQ ID NO: 41714 - DNA, 20 bp, Artificial Sequence
  Description of Artificial Sequence: Synthetic oligonucleotide
  Target: ATXN2; (+) strand; PAM type: NRG; PAM sequence: AGG
aaataacactagataacaag

SEQ ID NO: 41715 - DNA, 20 bp, Artificial Sequence
  Description of Artificial Sequence: Synthetic oligonucleotide
  Target: ATXN2; (+) strand; PAM type: NRG; PAM sequence: TGG
ctagataacaagaggaactt

SEQ ID NO: 41716 - DNA, 20 bp, Artificial Sequence
  Description of Artificial Sequence: Synthetic oligonucleotide
  Target: ATXN2; (+) strand; PAM type: NRG; PAM sequence: AAG
ataacaagaggaactttgga

SEQ ID NO: 41717 - DNA, 20 bp, Artificial Sequence
  Description of Artificial Sequence: Synthetic oligonucleotide
  Target: ATXN2; (+) strand; PAM type: NRG; PAM sequence: AAG
tatacaaatacatgaaaatt

SEQ ID NO: 41718 - DNA, 20 bp, Artificial Sequence
  Description of Artificial Sequence: Synthetic oligonucleotide
  Target: ATXN2; (+) strand; PAM type: NRG; PAM sequence: CAG
gcaatatgctcctgaatgac

SEQ ID NO: 41719 - DNA, 20 bp, Artificial Sequence
  Description of Artificial Sequence: Synthetic oligonucleotide
  Target: ATXN2; (+) strand; PAM type: NRG; PAM sequence: TGG
atatgctcctgaatgaccag

SEQ ID NO: 41720 - DNA, 20 bp, Artificial Sequence
  Description of Artificial Sequence: Synthetic oligonucleotide
  Target: ATXN2; (+) strand; PAM type: NRG; PAM sequence: GGG
tatgctcctgaatgaccagt

SEQ ID NO: 41721 - DNA, 20 bp, Artificial Sequence
  Description of Artificial Sequence: Synthetic oligonucleotide
  Target: ATXN2; (+) strand; PAM type: NRG; PAM sequence: AAG
gaatgaccagtgggtccatg

SEQ ID NO: 41722 - DNA, 20 bp, Artificial Sequence
  Description of Artificial Sequence: Synthetic oligonucleotide
  Target: ATXN2; (+) strand; PAM type: NRG; PAM sequence: AAG
agtgggtccatgaagaaatt

SEQ ID NO: 41723 - DNA, 20 bp, Artificial Sequence
  Description of Artificial Sequence: Synthetic oligonucleotide
  Target: ATXN2; (+) strand; PAM type: NRG; PAM sequence: AAG
gggtccatgaagaaattaag

SEQ ID NO: 41724 - DNA, 20 bp, Artificial Sequence
  Description of Artificial Sequence: Synthetic oligonucleotide
  Target: ATXN2; (+) strand; PAM type: NRG; PAM sequence: TGG
gaagaaattaagaagaaaac

SEQ ID NO: 41725 - DNA, 20 bp, Artificial Sequence
  Description of Artificial Sequence: Synthetic oligonucleotide
  Target: ATXN2; (+) strand; PAM type: NRG; PAM sequence: TGG
ttccttgaaacaaatgaaaa

SEQ ID NO: 41726 - DNA, 20 bp, Artificial Sequence
  Description of Artificial Sequence: Synthetic oligonucleotide
  Target: ATXN2; (+) strand; PAM type: NRG; PAM sequence: CAG
aacaaatgaaaatggaaaca

SEQ ID NO: 41727 - DNA, 20 bp, Artificial Sequence
  Description of Artificial Sequence: Synthetic oligonucleotide
  Target: ATXN2; (+) strand; PAM type: NRG; PAM sequence: TAG
acacagcttatcaaaaccta

SEQ ID NO: 41728 - DNA, 20 bp, Artificial Sequence
  Description of Artificial Sequence: Synthetic oligonucleotide
  Target: ATXN2; (+) strand; PAM type: NRG; PAM sequence: AGG
cacagcttatcaaaacctat

SEQ ID NO: 41729 - DNA, 20 bp, Artificial Sequence
  Description of Artificial Sequence: Synthetic oligonucleotide
  Target: ATXN2; (+) strand; PAM type: NRG; PAM sequence: CAG
ttatcaaaacctataggata

SEQ ID NO: 41730 - DNA, 20 bp, Artificial Sequence
  Description of Artificial Sequence: Synthetic oligonucleotide
  Target: ATXN2; (+) strand; PAM type: NRG; PAM sequence: AAG
aaacctataggatacagtaa

SEQ ID NO: 41731 - DNA, 20 bp, Artificial Sequence
  Description of Artificial Sequence: Synthetic oligonucleotide
  Target: ATXN2; (+) strand; PAM type: NRG; PAM sequence: AAG
gatacagtaaaagcaacaat

SEQ ID NO: 41732 - DNA, 20 bp, Artificial Sequence
  Description of Artificial Sequence: Synthetic oligonucleotide
  Target: ATXN2; (+) strand; PAM type: NRG; PAM sequence: GAG
tacagtaaaagcaacaataa

SEQ ID NO: 41733 - DNA, 20 bp, Artificial Sequence
  Description of Artificial Sequence: Synthetic oligonucleotide
  Target: ATXN2; (+) strand; PAM type: NRG; PAM sequence: AGG
acagtaaaagcaacaataag

SEQ ID NO: 41734 - DNA, 20 bp, Artificial Sequence
  Description of Artificial Sequence: Synthetic oligonucleotide
  Target: ATXN2; (+) strand; PAM type: NRG; PAM sequence: CAG
aacaataagaggaatgttta

SEQ ID NO: 41735 - DNA, 20 bp, Artificial Sequence
  Description of Artificial Sequence: Synthetic oligonucleotide
  Target: ATXN2; (+) strand; PAM type: NRG; PAM sequence: CAG
aataagaggaatgtttacag

SEQ ID NO: 41736 - DNA, 20 bp, Artificial Sequence
  Description of Artificial Sequence: Synthetic oligonucleotide
  Target: ATXN2; (+) strand; PAM type: NRG; PAM sequence: AAG
agaggaatgtttacagcagt

SEQ ID NO: 41737 - DNA, 20 bp, Artificial Sequence
  Description of Artificial Sequence: Synthetic oligonucleotide
  Target: ATXN2; (+) strand; PAM type: NRG; PAM sequence: AAG
agtaagtgcctacatcaaaa

SEQ ID NO: 41738 - DNA, 20 bp, Artificial Sequence
  Description of Artificial Sequence: Synthetic oligonucleotide
  Target: ATXN2; (+) strand; PAM type: NRG; PAM sequence: TGG
aagtgcctacatcaaaaaag

SEQ ID NO: 41739 - DNA, 20 bp, Artificial Sequence
  Description of Artificial Sequence: Synthetic oligonucleotide
  Target: ATXN2; (+) strand; PAM type: NRG; PAM sequence: AAG
tcatctgccaatacatccta

SEQ ID NO: 41740 - DNA, 20 bp, Artificial Sequence
  Description of Artificial Sequence: Synthetic oligonucleotide
  Target: ATXN2; (+) strand; PAM type: NRG; PAM sequence: TAG
gccaatacatcctaaagaac

SEQ ID NO: 41741 - DNA, 20 bp, Artificial Sequence
  Description of Artificial Sequence: Synthetic oligonucleotide
  Target: ATXN2; (+) strand; PAM type: NRG; PAM sequence: AAG
tacatcctaaagaactagaa

SEQ ID NO: 41742 - DNA, 20 bp, Artificial Sequence
  Description of Artificial Sequence: Synthetic oligonucleotide
  Target: ATXN2; (+) strand; PAM type: NRG; PAM sequence: AAG
tcctaaagaactagaaaagc

SEQ ID NO: 41743 - DNA, 20 bp, Artificial Sequence
  Description of Artificial Sequence: Synthetic oligonucleotide
  Target: ATXN2; (+) strand; PAM type: NRG; PAM sequence: AGG
cctaaagaactagaaaagca

SEQ ID NO: 41744 - DNA, 20 bp, Artificial Sequence
  Description of Artificial Sequence: Synthetic oligonucleotide
  Target: ATXN2; (+) strand; PAM type: NRG; PAM sequence: CAG
gcaaggacaaaacctaaaat

SEQ ID NO: 41745 - DNA, 20 bp, Artificial Sequence
  Description of Artificial Sequence: Synthetic oligonucleotide
  Target: ATXN2; (+) strand; PAM type: NRG; PAM sequence: TAG
aggacaaaacctaaaatcag

SEQ ID NO: 41746 - DNA, 20 bp, Artificial Sequence
  Description of Artificial Sequence: Synthetic oligonucleotide
  Target: ATXN2; (+) strand; PAM type: NRG; PAM sequence: AAG
acaaaacctaaaatcagtag

SEQ ID NO: 41747 - DNA, 20 bp, Artificial Sequence
  Description of Artificial Sequence: Synthetic oligonucleotide
  Target: ATXN2; (+) strand; PAM type: NRG; PAM sequence: AAG
agaagaaataaaaaaaatca

SEQ ID NO: 41748 - DNA, 20 bp, Artificial Sequence
  Description of Artificial Sequence: Synthetic oligonucleotide
  Target: ATXN2; (+) strand; PAM type: NRG; PAM sequence: CAG
agaaataaaaaaaatcaaag

SEQ ID NO: 41749 - DNA, 20 bp, Artificial Sequence
  Description of Artificial Sequence: Synthetic oligonucleotide
  Target: ATXN2; (+) strand; PAM type: NRG; PAM sequence: AAG
aaataaataaaattgaaatg

SEQ ID NO: 41750 - DNA, 20 bp, Artificial Sequence
  Description of Artificial Sequence: Synthetic oligonucleotide
  Target: ATXN2; (+) strand; PAM type: NRG; PAM sequence: AAG
ttgaaatgaagaaaatacaa

SEQ ID NO: 41751 - DNA, 20 bp, Artificial Sequence
  Description of Artificial Sequence: Synthetic oligonucleotide
  Target: ATXN2; (+) strand; PAM type: NRG; PAM sequence: CAG
aatacaaaagatcaataaaa

SEQ ID NO: 41752 - DNA, 20 bp, Artificial Sequence
  Description of Artificial Sequence: Synthetic oligonucleotide
  Target: ATXN2; (+) strand; PAM type: NRG; PAM sequence: AAG
taaaacagtaaattgttttg

SEQ ID NO: 41753 - DNA, 20 bp, Artificial Sequence
  Description of Artificial Sequence: Synthetic oligonucleotide
  Target: ATXN2; (+) strand; PAM type: NRG; PAM sequence: GAG
aaacagtaaattgttttgaa

SEQ ID NO: 41754 - DNA, 20 bp, Artificial Sequence
  Description of Artificial Sequence: Synthetic oligonucleotide
  Target: ATXN2; (+) strand; PAM type: NRG; PAM sequence: TAG
aaacaaaactgacaaacctt

SEQ ID NO: 41755 - DNA, 20 bp, Artificial Sequence
  Description of Artificial Sequence: Synthetic oligonucleotide
  Target: ATXN2; (+) strand; PAM type: NRG; PAM sequence: CAG
aaaactgacaaacctttagc

SEQ ID NO: 41756 - DNA, 20 bp, Artificial Sequence
  Description of Artificial Sequence: Synthetic oligonucleotide
  Target: ATXN2; (+) strand; PAM type: NRG; PAM sequence: CAG
gacaaacctttagccagact

SEQ ID NO: 41757 - DNA, 20 bp, Artificial Sequence
  Description of Artificial Sequence: Synthetic oligonucleotide
  Target: ATXN2; (+) strand; PAM type: NRG; PAM sequence: AAG
ttagccagactcagaaaaaa

SEQ ID NO: 41758 - DNA, 20 bp, Artificial Sequence
  Description of Artificial Sequence: Synthetic oligonucleotide
  Target: ATXN2; (+) strand; PAM type: NRG; PAM sequence: GAG
agccagactcagaaaaaaaa

SEQ ID NO: 41759 - DNA, 20 bp, Artificial Sequence
  Description of Artificial Sequence: Synthetic oligonucleotide
  Target: ATXN2; (+) strand; PAM type: NRG; PAM sequence: GAG
gaaaacccaaataataaaat

SEQ ID NO: 41760 - DNA, 20 bp, Artificial Sequence
  Description of Artificial Sequence: Synthetic oligonucleotide
  Target: ATXN2; (+) strand; PAM type: NRG; PAM sequence: GAG
aaacccaaataataaaatga

SEQ ID NO: 41761 - DNA, 20 bp, Artificial Sequence
  Description of Artificial Sequence: Synthetic oligonucleotide
  Target: ATXN2; (+) strand; PAM type: NRG; PAM sequence: AAG
taataaaatgagagatgaaa

SEQ ID NO: 41762 - DNA, 20 bp, Artificial Sequence
  Description of Artificial Sequence: Synthetic oligonucleotide
  Target: ATXN2; (+) strand; PAM type: NRG; PAM sequence: AGG
aataaaatgagagatgaaaa

SEQ ID NO: 41763 - DNA, 20 bp, Artificial Sequence
  Description of Artificial Sequence: Synthetic oligonucleotide
  Target: ATXN2; (+) strand; PAM type: NRG; PAM sequence: GAG
taaaatgagagatgaaaaag

SEQ ID NO: 41764 - DNA, 20 bp, Artificial Sequence
  Description of Artificial Sequence: Synthetic oligonucleotide
  Target: ATXN2; (+) strand; PAM type: NRG; PAM sequence: AAG
attgttaccaccgaaattca

SEQ ID NO: 41765 - DNA, 20 bp, Artificial Sequence
  Description of Artificial Sequence: Synthetic oligonucleotide
  Target: ATXN2; (+) strand; PAM type: NRG; PAM sequence: AGG
ttgttaccaccgaaattcaa

SEQ ID NO: 41766 - DNA, 20 bp, Artificial Sequence
  Description of Artificial Sequence: Synthetic oligonucleotide
  Target: ATXN2; (+) strand; PAM type: NRG; PAM sequence: TAG
accgaaattcaaaggatcat

SEQ ID NO: 41767 - DNA, 20 bp, Artificial Sequence
  Description of Artificial Sequence: Synthetic oligonucleotide
  Target: ATXN2; (+) strand; PAM type: NRG; PAM sequence: GAG
cgaaattcaaaggatcatta

SEQ ID NO: 41768 - DNA, 20 bp, Artificial Sequence
  Description of Artificial Sequence: Synthetic oligonucleotide
  Target: ATXN2; (+) strand; PAM type: NRG; PAM sequence: GAG
ggatcattagagactactat

SEQ ID NO: 41769 - DNA, 20 bp, Artificial Sequence
  Description of Artificial Sequence: Synthetic oligonucleotide
  Target: ATXN2; (+) strand; PAM type: NRG; PAM sequence: TGG
gcatctatatgctgatacat

SEQ ID NO: 41770 - DNA, 20 bp, Artificial Sequence
  Description of Artificial Sequence: Synthetic oligonucleotide
  Target: ATXN2; (+) strand; PAM type: NRG; PAM sequence: AAG
tgatacattggaaaaccttg

SEQ ID NO: 41771 - DNA, 20 bp, Artificial Sequence
  Description of Artificial Sequence: Synthetic oligonucleotide
  Target: ATXN2; (+) strand; PAM type: NRG; PAM sequence: TGG
attggaaaaccttgaagaaa

SEQ ID NO: 41772 - DNA, 20 bp, Artificial Sequence
  Description of Artificial Sequence: Synthetic oligonucleotide
  Target: ATXN2; (+) strand; PAM type: NRG; PAM sequence: TAG
tgaagaaatggataaattcc

SEQ ID NO: 41773 - DNA, 20 bp, Artificial Sequence
  Description of Artificial Sequence: Synthetic oligonucleotide
  Target: ATXN2; (+) strand; PAM type: NRG; PAM sequence: AAG
ctagacacatacaacctacc

SEQ ID NO: 41774 - DNA, 20 bp, Artificial Sequence
  Description of Artificial Sequence: Synthetic oligonucleotide
  Target: ATXN2; (+) strand; PAM type: NRG; PAM sequence: AAG
cctaccaagactgaaccaca

SEQ ID NO: 41775 - DNA, 20 bp, Artificial Sequence
  Description of Artificial Sequence: Synthetic oligonucleotide
  Target: ATXN2; (+) strand; PAM type: NRG; PAM sequence: AAG
caaaacccaaatacaataac

SEQ ID NO: 41776 - DNA, 20 bp, Artificial Sequence
  Description of Artificial Sequence: Synthetic oligonucleotide
  Target: ATXN2; (+) strand; PAM type: NRG; PAM sequence: GAG
caaatacaataacaagtaac

SEQ ID NO: 41777 - DNA, 20 bp, Artificial Sequence
  Description of Artificial Sequence: Synthetic oligonucleotide
  Target: ATXN2; (+) strand; PAM type: NRG; PAM sequence: AAG
caagtaacgagaccaataac

SEQ ID NO: 41778 - DNA, 20 bp, Artificial Sequence
  Description of Artificial Sequence: Synthetic oligonucleotide
  Target: ATXN2; (+) strand; PAM type: NRG; PAM sequence: GAG
cgagaccaataacaagtaac

SEQ ID NO: 41779 - DNA, 20 bp, Artificial Sequence
  Description of Artificial Sequence: Synthetic oligonucleotide
  Target: ATXN2; (+) strand; PAM type: NRG; PAM sequence: AAG
aataacaagtaacgagatca

SEQ ID NO: 41780 - DNA, 20 bp, Artificial Sequence
  Description of Artificial Sequence: Synthetic oligonucleotide
  Target: ATXN2; (+) strand; PAM type: NRG; PAM sequence: AAG
agtaacgagatcaaagctat

SEQ ID NO: 41781 - DNA, 20 bp, Artificial Sequence
  Description of Artificial Sequence: Synthetic oligonucleotide
  Target: ATXN2; (+) strand; PAM type: NRG; PAM sequence: TAG
gagatcaaagctataagaaa

SEQ ID NO: 41782 - DNA, 20 bp, Artificial Sequence
  Description of Artificial Sequence: Synthetic oligonucleotide
  Target: ATXN2; (+) strand; PAM type: NRG; PAM sequence: CAG
agctataagaaatagtctcc

SEQ ID NO: 41783 - DNA, 20 bp, Artificial Sequence
  Description of Artificial Sequence: Synthetic oligonucleotide
  Target: ATXN2; (+) strand; PAM type: NRG; PAM sequence: AAG
taagaaatagtctcccagca

SEQ ID NO: 41784 - DNA, 20 bp, Artificial Sequence
  Description of Artificial Sequence: Synthetic oligonucleotide
  Target: ATXN2; (+) strand; PAM type: NRG; PAM sequence: AAG
aatagtctcccagcaaagaa

SEQ ID NO: 41785 - DNA, 20 bp, Artificial Sequence
  Description of Artificial Sequence: Synthetic oligonucleotide
  Target: ATXN2; (+) strand; PAM type: NRG; PAM sequence: TGG
ctcccagcaaagaaaagcca

SEQ ID NO: 41786 - DNA, 20 bp, Artificial Sequence
  Description of Artificial Sequence: Synthetic oligonucleotide
  Target: ATXN2; (+) strand; PAM type: NRG; PAM sequence: TGG
aagaaaagccatggacctga

SEQ ID NO: 41787 - DNA, 20 bp, Artificial Sequence
  Description of Artificial Sequence: Synthetic oligonucleotide
  Target: ATXN2; (+) strand; PAM type: NRG; PAM sequence: AAG
tgaattctactaaaccttta

SEQ ID NO: 41788 - DNA, 20 bp, Artificial Sequence
  Description of Artificial Sequence: Synthetic oligonucleotide
  Target: ATXN2; (+) strand; PAM type: NRG; PAM sequence: AAG
attctactaaacctttaaag

SEQ ID NO: 41789 - DNA, 20 bp, Artificial Sequence
  Description of Artificial Sequence: Synthetic oligonucleotide
  Target: ATXN2; (+) strand; PAM type: NRG; PAM sequence: CAG
caaactattccaacacaata

SEQ ID NO: 41790 - DNA, 20 bp, Artificial Sequence
  Description of Artificial Sequence: Synthetic oligonucleotide
  Target: ATXN2; (+) strand; PAM type: NRG; PAM sequence: AGG
aaactattccaacacaatac

SEQ ID NO: 41791 - DNA, 20 bp, Artificial Sequence
  Description of Artificial Sequence: Synthetic oligonucleotide
  Target: ATXN2; (+) strand; PAM type: NRG; PAM sequence: AAG
ctattccaacacaatacagg

SEQ ID NO: 41792 - DNA, 20 bp, Artificial Sequence
  Description of Artificial Sequence: Synthetic oligonucleotide
  Target: ATXN2; (+) strand; PAM type: NRG; PAM sequence: GAG
attccaacacaatacaggaa

SEQ ID NO: 41793 - DNA, 20 bp, Artificial Sequence
  Description of Artificial Sequence: Synthetic oligonucleotide
  Target: ATXN2; (+) strand; PAM type: NRG; PAM sequence: AGG
ttccaacacaatacaggaag

SEQ ID NO: 41794 - DNA, 20 bp, Artificial Sequence
  Description of Artificial Sequence: Synthetic oligonucleotide
  Target: ATXN2; (+) strand; PAM type: NRG; PAM sequence: GGG
tccaacacaatacaggaaga

SEQ ID NO: 41795 - DNA, 20 bp, Artificial Sequence
  Description of Artificial Sequence: Synthetic oligonucleotide
  Target: ATXN2; (+) strand; PAM type: NRG; PAM sequence: AAG
tacttctaaactcattctac

SEQ ID NO: 41796 - DNA, 20 bp, Artificial Sequence
  Description of Artificial Sequence: Synthetic oligonucleotide
  Target: ATXN2; (+) strand; PAM type: NRG; PAM sequence: AGG
acttctaaactcattctaca

SEQ ID NO: 41797 - DNA, 20 bp, Artificial Sequence
  Description of Artificial Sequence: Synthetic oligonucleotide
  Target: ATXN2; (+) strand; PAM type: NRG; PAM sequence: AAG
tattaccctatacaaaacca

SEQ ID NO: 41798 - DNA, 20 bp, Artificial Sequence
  Description of Artificial Sequence: Synthetic oligonucleotide
  Target: ATXN2; (+) strand; PAM type: NRG; PAM sequence: AGG
attaccctatacaaaaccaa

SEQ ID NO: 41799 - DNA, 20 bp, Artificial Sequence
  Description of Artificial Sequence: Synthetic oligonucleotide
  Target: ATXN2; (+) strand; PAM type: NRG; PAM sequence: AAG
aaaccaaaggacacatcaaa

SEQ ID NO: 41800 - DNA, 20 bp, Artificial Sequence
  Description of Artificial Sequence: Synthetic oligonucleotide
  Target: ATXN2; (+) strand; PAM type: NRG; PAM sequence: AGG
aaccaaaggacacatcaaaa

SEQ ID NO: 41801 - DNA, 20 bp, Artificial Sequence
  Description of Artificial Sequence: Synthetic oligonucleotide
  Target: ATXN2; (+) strand; PAM type: NRG; PAM sequence: GGG
accaaaggacacatcaaaaa

SEQ ID NO: 41802 - DNA, 20 bp, Artificial Sequence
  Description of Artificial Sequence: Synthetic oligonucleotide
  Target: ATXN2; (+) strand; PAM type: NRG; PAM sequence: TAG
acacatcaaaaagggaaaac

SEQ ID NO: 41803 - DNA, 20 bp, Artificial Sequence
  Description of Artificial Sequence: Synthetic oligonucleotide
  Target: ATXN2; (+) strand; PAM type: NRG; PAM sequence: AAG
catcaaaaagggaaaactag

SEQ ID NO: 41804 - DNA, 20 bp, Artificial Sequence
  Description of Artificial Sequence: Synthetic oligonucleotide
  Target: ATXN2; (+) strand; PAM type: NRG; PAM sequence: CAG
aaaaagggaaaactagaagc

SEQ ID NO: 41805 - DNA, 20 bp, Artificial Sequence
  Description of Artificial Sequence: Synthetic oligonucleotide
  Target: ATXN2; (+) strand; PAM type: NRG; PAM sequence: AAG
actagaagccagtgtctctg

SEQ ID NO: 41806 - DNA, 20 bp, Artificial Sequence
  Description of Artificial Sequence: Synthetic oligonucleotide
  Target: ATXN2; (+) strand; PAM type: NRG; PAM sequence: TAG
aaaaatcctcaatataatac

SEQ ID NO: 41807 - DNA, 20 bp, Artificial Sequence
  Description of Artificial Sequence: Synthetic oligonucleotide
  Target: ATXN2; (+) strand; PAM type: NRG; PAM sequence: CAG
taatactagcaaaccgaatt

SEQ ID NO: 41808 - DNA, 20 bp, Artificial Sequence
  Description of Artificial Sequence: Synthetic oligonucleotide
  Target: ATXN2; (+) strand; PAM type: NRG; PAM sequence: AAG
gaattcagtaacacattaaa

SEQ ID NO: 41809 - DNA, 20 bp, Artificial Sequence
  Description of Artificial Sequence: Synthetic oligonucleotide
  Target: ATXN2; (+) strand; PAM type: NRG; PAM sequence: AAG
aaagatcattcatcatgact

SEQ ID NO: 41810 - DNA, 20 bp, Artificial Sequence
  Description of Artificial Sequence: Synthetic oligonucleotide
  Target: ATXN2; (+) strand; PAM type: NRG; PAM sequence: TGG
gatcattcatcatgactaag

SEQ ID NO: 41811 - DNA, 20 bp, Artificial Sequence
  Description of Artificial Sequence: Synthetic oligonucleotide
  Target: ATXN2; (+) strand; PAM type: NRG; PAM sequence: GGG
atcattcatcatgactaagt

SEQ ID NO: 41812 - DNA, 20 bp, Artificial Sequence
  Description of Artificial Sequence: Synthetic oligonucleotide
  Target: ATXN2; (+) strand; PAM type: NRG; PAM sequence: CAG
tgactaagtgggattcatcc

SEQ ID NO: 41813 - DNA, 20 bp, Artificial Sequence
  Description of Artificial Sequence: Synthetic oligonucleotide
  Target: ATXN2; (+) strand; PAM type: NRG; PAM sequence: AGG
gactaagtgggattcatccc

SEQ ID NO: 41814 - DNA, 20 bp, Artificial Sequence
  Description of Artificial Sequence: Synthetic oligonucleotide
  Target: ATXN2; (+) strand; PAM type: NRG; PAM sequence: GGG
actaagtgggattcatccca

SEQ ID NO: 41815 - DNA, 20 bp, Artificial Sequence
  Description of Artificial Sequence: Synthetic oligonucleotide
  Target: ATXN2; (+) strand; PAM type: NRG; PAM sequence: AAG
gggattcatcccagggatgc

SEQ ID NO: 41816 - DNA, 20 bp, Artificial Sequence
  Description of Artificial Sequence: Synthetic oligonucleotide
  Target: ATXN2; (+) strand; PAM type: NRG; PAM sequence: AGG
ggattcatcccagggatgca

SEQ ID NO: 41817 - DNA, 20 bp, Artificial Sequence
  Description of Artificial Sequence: Synthetic oligonucleotide
  Target: ATXN2; (+) strand; PAM type: NRG; PAM sequence: TGG
tcatcccagggatgcaagga

SEQ ID NO: 41818 - DNA, 20 bp, Artificial Sequence
  Description of Artificial Sequence: Synthetic oligonucleotide
  Target: ATXN2; (+) strand; PAM type: NRG; PAM sequence: TGG
catacgcaaatcaataaaca

SEQ ID NO: 41819 - DNA, 20 bp, Artificial Sequence
  Description of Artificial Sequence: Synthetic oligonucleotide
  Target: ATXN2; (+) strand; PAM type: NRG; PAM sequence: CAG
ataaacatggtacatcttaa

SEQ ID NO: 41820 - DNA, 20 bp, Artificial Sequence
  Description of Artificial Sequence: Synthetic oligonucleotide
  Target: ATXN2; (+) strand; PAM type: NRG; PAM sequence: AAG
ggtacatcttaacagaataa

SEQ ID NO: 41821 - DNA, 20 bp, Artificial Sequence
  Description of Artificial Sequence: Synthetic oligonucleotide
  Target: ATXN2; (+) strand; PAM type: NRG; PAM sequence: AAG
tcttaacagaataaaagaca

SEQ ID NO: 41822 - DNA, 20 bp, Artificial Sequence
  Description of Artificial Sequence: Synthetic oligonucleotide
  Target: ATXN2; (+) strand; PAM type: NRG; PAM sequence: TGG
ccccttatgattaaaaccct

SEQ ID NO: 41823 - DNA, 20 bp, Artificial Sequence
  Description of Artificial Sequence: Synthetic oligonucleotide
  Target: ATXN2; (+) strand; PAM type: NRG; PAM sequence: CGG
ttatgattaaaacccttggc

SEQ ID NO: 41824 - DNA, 20 bp, Artificial Sequence
  Description of Artificial Sequence: Synthetic oligonucleotide
  Target: ATXN2; (+) strand; PAM type: NRG; PAM sequence: GGG
tatgattaaaacccttggcc

SEQ ID NO: 41825 - DNA, 20 bp, Artificial Sequence
  Description of Artificial Sequence: Synthetic oligonucleotide
  Target: ATXN2; (+) strand; PAM type: NRG; PAM sequence: TGG
ttaaaacccttggccgggcg

SEQ ID NO: 41826 - DNA, 20 bp, Artificial Sequence
  Description of Artificial Sequence: Synthetic oligonucleotide
  Target: ATXN2; (+) strand; PAM type: NRG; PAM sequence: TGG
aaacccttggccgggcgtgg

SEQ ID NO: 41827 - DNA, 20 bp, Artificial Sequence
  Description of Artificial Sequence: Synthetic oligonucleotide
  Target: ATXN2; (+) strand; PAM type: NRG; PAM sequence: CAG
gtggctcacgcctgtaatcc

SEQ ID NO: 41828 - DNA, 20 bp, Artificial Sequence
  Description of Artificial Sequence: Synthetic oligonucleotide
  Target: ATXN2; (+) strand; PAM type: NRG; PAM sequence: TGG
cgcctgtaatcccagcactt

SEQ ID NO: 41829 - DNA, 20 bp, Artificial Sequence
  Description of Artificial Sequence: Synthetic oligonucleotide
  Target: ATXN2; (+) strand; PAM type: NRG; PAM sequence: GGG
gcctgtaatcccagcacttt

SEQ ID NO: 41830 - DNA, 20 bp, Artificial Sequence
  Description of Artificial Sequence: Synthetic oligonucleotide
  Target: ATXN2; (+) strand; PAM type: NRG; PAM sequence: GAG
ctgtaatcccagcactttgg

SEQ ID NO: 41831 - DNA, 20 bp, Artificial Sequence
  Description of Artificial Sequence: Synthetic oligonucleotide
  Target: ATXN2; (+) strand; PAM type: NRG; PAM sequence: AGG
tgtaatcccagcactttggg

SEQ ID NO: 41832 - DNA, 20 bp, Artificial Sequence
  Description of Artificial Sequence: Synthetic oligonucleotide
  Target: ATXN2; (+) strand; PAM type: NRG; PAM sequence: GAG
tcccagcactttgggaggct

SEQ ID NO: 41833 - DNA, 20 bp, Artificial Sequence
  Description of Artificial Sequence: Synthetic oligonucleotide
  Target: ATXN2; (+) strand; PAM type: NRG; PAM sequence: CGG
agcactttgggaggctgaga

SEQ ID NO: 41834 - DNA, 20 bp, Artificial Sequence
  Description of Artificial Sequence: Synthetic oligonucleotide
  Target: ATXN2; (+) strand; PAM type: NRG; PAM sequence: GGG
gcactttgggaggctgagac

SEQ ID NO: 41835 - DNA, 20 bp, Artificial Sequence
  Description of Artificial Sequence: Synthetic oligonucleotide
  Target: ATXN2; (+) strand; PAM type: NRG; PAM sequence: CAG
ctttgggaggctgagacggg

SEQ ID NO: 41836 - DNA, 20 bp, Artificial Sequence
  Description of Artificial Sequence: Synthetic oligonucleotide
  Target: ATXN2; (+) strand; PAM type: NRG; PAM sequence: GAG
ggctgagacgggcagatcat

SEQ ID NO: 41837 - DNA, 20 bp, Artificial Sequence
  Description of Artificial Sequence: Synthetic oligonucleotide
  Target: ATXN2; (+) strand; PAM type: NRG; PAM sequence: AGG
gctgagacgggcagatcatg

SEQ ID NO: 41838 - DNA, 20 bp, Artificial Sequence
  Description of Artificial Sequence: Synthetic oligonucleotide
  Target: ATXN2; (+) strand; PAM type: NRG; PAM sequence: CAG
agacgggcagatcatgaggt

SEQ ID NO: 41839 - DNA, 20 bp, Artificial Sequence
  Description of Artificial Sequence: Synthetic oligonucleotide
  Target: ATXN2; (+) strand; PAM type: NRG; PAM sequence: AGG
gacgggcagatcatgaggtc

SEQ ID NO: 41840 - DNA, 20 bp, Artificial Sequence
  Description of Artificial Sequence: Synthetic oligonucleotide
  Target: ATXN2; (+) strand; PAM type: NRG; PAM sequence: GAG
cgggcagatcatgaggtcag

SEQ ID NO: 41841 - DNA, 20 bp, Artificial Sequence
  Description of Artificial Sequence: Synthetic oligonucleotide
  Target: ATXN2; (+) strand; PAM type: NRG; PAM sequence: GAG
gatcatgaggtcaggagttc

SEQ ID NO: 41842 - DNA, 20 bp, Artificial Sequence
  Description of Artificial Sequence: Synthetic oligonucleotide
  Target: ATXN2; (+) strand; PAM type: NRG; PAM sequence: TGG
tcaggagttcgagaccatcc

SEQ ID NO: 41843 - DNA, 20 bp, Artificial Sequence
  Description of Artificial Sequence: Synthetic oligonucleotide
  Target: ATXN2; (+) strand; PAM type: NRG; PAM sequence: CGG
cgagaccatcctggctaaca

SEQ ID NO: 41844 - DNA, 20 bp, Artificial Sequence
  Description of Artificial Sequence: Synthetic oligonucleotide
  Target: ATXN2; (+) strand; PAM type: NRG; PAM sequence: TAG
ctactaaaaatacaaaaaat

SEQ ID NO: 41845 - DNA, 20 bp, Artificial Sequence
  Description of Artificial Sequence: Synthetic oligonucleotide
  Target: ATXN2; (+) strand; PAM type: NRG; PAM sequence: CGG
taaaaatacaaaaaattagc

SEQ ID NO: 41846 - DNA, 20 bp, Artificial Sequence
  Description of Artificial Sequence: Synthetic oligonucleotide
  Target: ATXN2; (+) strand; PAM type: NRG; PAM sequence: GGG
aaaaatacaaaaaattagcc

SEQ ID NO: 41847 - DNA, 20 bp, Artificial Sequence
  Description of Artificial Sequence: Synthetic oligonucleotide
  Target: ATXN2; (+) strand; PAM type: NRG; PAM sequence: TAG
aaaaaattagccgggcgtgt

SEQ ID NO: 41848 - DNA, 20 bp, Artificial Sequence
  Description of Artificial Sequence: Synthetic oligonucleotide
  Target: ATXN2; (+) strand; PAM type: NRG; PAM sequence: CGG
aaattagccgggcgtgttag

SEQ ID NO: 41849 - DNA, 20 bp, Artificial Sequence
  Description of Artificial Sequence: Synthetic oligonucleotide
  Target: ATXN2; (+) strand; PAM type: NRG; PAM sequence: TAG
ggcgtgttagcggacacctg

SEQ ID NO: 41850 - DNA, 20 bp, Artificial Sequence
  Description of Artificial Sequence: Synthetic oligonucleotide
  Target: ATXN2; (+) strand; PAM type: NRG; PAM sequence: CAG
ttagcggacacctgtagtcc

SEQ ID NO: 41851 - DNA, 20 bp, Artificial Sequence
  Description of Artificial Sequence: Synthetic oligonucleotide
  Target: ATXN2; (+) strand; PAM type: NRG; PAM sequence: CGG
cacctgtagtcccagctact

SEQ ID NO: 41852 - DNA, 20 bp, Artificial Sequence
  Description of Artificial Sequence: Synthetic oligonucleotide
  Target: ATXN2; (+) strand; PAM type: NRG; PAM sequence: GGG
acctgtagtcccagctactc

SEQ ID NO: 41853 - DNA, 20 bp, Artificial Sequence
  Description of Artificial Sequence: Synthetic oligonucleotide
  Target: ATXN2; (+) strand; PAM type: NRG; PAM sequence: GAG
ctgtagtcccagctactcgg

SEQ ID NO: 41854 - DNA, 20 bp, Artificial Sequence
  Description of Artificial Sequence: Synthetic oligonucleotide
  Target: ATXN2; (+) strand; PAM type: NRG; PAM sequence: AGG
tgtagtcccagctactcggg

SEQ ID NO: 41855 - DNA, 20 bp, Artificial Sequence
  Description of Artificial Sequence: Synthetic oligonucleotide
  Target: ATXN2; (+) strand; PAM type: NRG; PAM sequence: GAG
tcccagctactcgggaggct

SEQ ID NO: 41856 - DNA, 20 bp, Artificial Sequence
  Description of Artificial Sequence: Synthetic oligonucleotide
  Target: ATXN2; (+) strand; PAM type: NRG; PAM sequence: AGG
cccagctactcgggaggctg

SEQ ID NO: 41857 - DNA, 20 bp, Artificial Sequence
  Description of Artificial Sequence: Synthetic oligonucleotide
  Target: ATXN2; (+) strand; PAM type: NRG; PAM sequence: CAG
agctactcgggaggctgagg

SEQ ID NO: 41858 - DNA, 20 bp, Artificial Sequence
  Description of Artificial Sequence: Synthetic oligonucleotide
  Target: ATXN2; (+) strand; PAM type: NRG; PAM sequence: AGG
gctactcgggaggctgaggc

SEQ ID NO: 41859 - DNA, 20 bp, Artificial Sequence
  Description of Artificial Sequence: Synthetic oligonucleotide
  Target: ATXN2; (+) strand; PAM type: NRG; PAM sequence: GAG
tactcgggaggctgaggcag

SEQ ID NO: 41860 - DNA, 20 bp, Artificial Sequence
  Description of Artificial Sequence: Synthetic oligonucleotide
  Target: ATXN2; (+) strand; PAM type: NRG; PAM sequence: CGG
gggaggctgaggcaggagaa

SEQ ID NO: 41861 - DNA, 20 bp, Artificial Sequence
  Description of Artificial Sequence: Synthetic oligonucleotide
  Target: ATXN2; (+) strand; PAM type: NRG; PAM sequence: CAG
gcaggagaacggcatgaacc

SEQ ID NO: 41862 - DNA, 20 bp, Artificial Sequence
  Description of Artificial Sequence: Synthetic oligonucleotide
  Target: ATXN2; (+) strand; PAM type: NRG; PAM sequence: AGG
caggagaacggcatgaaccc

SEQ ID NO: 41863 - DNA, 20 bp, Artificial Sequence
  Description of Artificial Sequence: Synthetic oligonucleotide
  Target: ATXN2; (+) strand; PAM type: NRG; PAM sequence: GAG
ggagaacggcatgaacccag

SEQ ID NO: 41864 - DNA, 20 bp, Artificial Sequence
  Description of Artificial Sequence: Synthetic oligonucleotide
  Target: ATXN2; (+) strand; PAM type: NRG; PAM sequence: AGG
gagaacggcatgaacccagg

SEQ ID NO: 41865 - DNA, 20 bp, Artificial Sequence
  Description of Artificial Sequence: Synthetic oligonucleotide
  Target: ATXN2; (+) strand; PAM type: NRG; PAM sequence: TGG
aacggcatgaacccaggagg

SEQ ID NO: 41866 - DNA, 20 bp, Artificial Sequence
  Description of Artificial Sequence: Synthetic oligonucleotide
  Target: ATXN2; (+) strand; PAM type: NRG; PAM sequence: GAG
cggcatgaacccaggaggtg

SEQ ID NO: 41867 - DNA, 20 bp, Artificial Sequence
  Description of Artificial Sequence: Synthetic oligonucleotide
  Target: ATXN2; (+) strand; PAM type: NRG; PAM sequence: CAG
aacccaggaggtggagcttg

SEQ ID NO: 41868 - DNA, 20 bp, Artificial Sequence
  Description of Artificial Sequence: Synthetic oligonucleotide
  Target: ATXN2; (+) strand; PAM type: NRG; PAM sequence: GAG
caggaggtggagcttgcagt

SEQ ID NO: 41869 - DNA, 20 bp, Artificial Sequence
  Description of Artificial Sequence: Synthetic oligonucleotide
  Target: ATXN2; (+) strand; PAM type: NRG; PAM sequence: CAG
aacattgcgccactgcactc

SEQ ID NO: 41870 - DNA, 20 bp, Artificial Sequence
  Description of Artificial Sequence: Synthetic oligonucleotide
  Target: ATXN2; (+) strand; PAM type: NRG; PAM sequence: TGG
tgcgccactgcactccagcc

SEQ ID NO: 41871 - DNA, 20 bp, Artificial Sequence
  Description of Artificial Sequence: Synthetic oligonucleotide
  Target: ATXN2; (+) strand; PAM type: NRG; PAM sequence: GGG
gcgccactgcactccagcct

SEQ ID NO: 41872 - DNA, 20 bp, Artificial Sequence
  Description of Artificial Sequence: Synthetic oligonucleotide
  Target: ATXN2; (+) strand; PAM type: NRG; PAM sequence: CAG
ctgcactccagcctgggtga

SEQ ID NO: 41873 - DNA, 20 bp, Artificial Sequence
  Description of Artificial Sequence: Synthetic oligonucleotide
  Target: ATXN2; (+) strand; PAM type: NRG; PAM sequence: GAG
gcactccagcctgggtgaca

SEQ ID NO: 41874 - DNA, 20 bp, Artificial Sequence
  Description of Artificial Sequence: Synthetic oligonucleotide
  Target: ATXN2; (+) strand; PAM type: NRG; PAM sequence: GAG
tccagcctgggtgacagagt

SEQ ID NO: 41875 - DNA, 20 bp, Artificial Sequence
  Description of Artificial Sequence: Synthetic oligonucleotide
  Target: ATXN2; (+) strand; PAM type: NRG; PAM sequence: AAG
aaacaaacaaaaaaacccca

SEQ ID NO: 41876 - DNA, 20 bp, Artificial Sequence
  Description of Artificial Sequence: Synthetic oligonucleotide
  Target: ATXN2; (+) strand; PAM type: NRG; PAM sequence: TGG
acaaaaaaaccccaaagaac

SEQ ID NO: 41877 - DNA, 20 bp, Artificial Sequence
  Description of Artificial Sequence: Synthetic oligonucleotide
  Target: ATXN2; (+) strand; PAM type: NRG; PAM sequence: GGG
caaaaaaaccccaaagaact

SEQ ID NO: 41878 - DNA, 20 bp, Artificial Sequence
  Description of Artificial Sequence: Synthetic oligonucleotide
  Target: ATXN2; (+) strand; PAM type: NRG; PAM sequence: TAG
aaaccccaaagaactgggta

SEQ ID NO: 41879 - DNA, 20 bp, Artificial Sequence
  Description of Artificial Sequence: Synthetic oligonucleotide
  Target: ATXN2; (+) strand; PAM type: NRG; PAM sequence: AAG
ccccaaagaactgggtatag

SEQ ID NO: 41880 - DNA, 20 bp, Artificial Sequence
  Description of Artificial Sequence: Synthetic oligonucleotide
  Target: ATXN2; (+) strand; PAM type: NRG; PAM sequence: AGG
cccaaagaactgggtataga

SEQ ID NO: 41881 - DNA, 20 bp, Artificial Sequence
  Description of Artificial Sequence: Synthetic oligonucleotide
  Target: ATXN2; (+) strand; PAM type: NRG; PAM sequence: CAG
aggaatatacctcaacaaaa

SEQ ID NO: 41882 - DNA, 20 bp, Artificial Sequence
  Description of Artificial Sequence: Synthetic oligonucleotide
  Target: ATXN2; (+) strand; PAM type: NRG; PAM sequence: AAG
aatatacctcaacaaaacag

SEQ ID NO: 41883 - DNA, 20 bp, Artificial Sequence
  Description of Artificial Sequence: Synthetic oligonucleotide
  Target: ATXN2; (+) strand; PAM type: NRG; PAM sequence: CAG
aaaacagaagccatatatga

SEQ ID NO: 41884 - DNA, 20 bp, Artificial Sequence
  Description of Artificial Sequence: Synthetic oligonucleotide
  Target: ATXN2; (+) strand; PAM type: NRG; PAM sequence: TAG
atatatgacagacccataac

SEQ ID NO: 41885 - DNA, 20 bp, Artificial Sequence
  Description of Artificial Sequence: Synthetic oligonucleotide
  Target: ATXN2; (+) strand; PAM type: NRG; PAM sequence: AAG
ataactagtaccatactgaa

SEQ ID NO: 41886 - DNA, 20 bp, Artificial Sequence
  Description of Artificial Sequence: Synthetic oligonucleotide
  Target: ATXN2; (+) strand; PAM type: NRG; PAM sequence: AGG
taactagtaccatactgaaa

SEQ ID NO: 41887 - DNA, 20 bp, Artificial Sequence
  Description of Artificial Sequence: Synthetic oligonucleotide
  Target: ATXN2; (+) strand; PAM type: NRG; PAM sequence: GGG
aactagtaccatactgaaaa

SEQ ID NO: 41888 - DNA, 20 bp, Artificial Sequence
  Description of Artificial Sequence: Synthetic oligonucleotide
  Target: ATXN2; (+) strand; PAM type: NRG; PAM sequence: AAG
actgaaaagggaaaaactga

SEQ ID NO: 41889 - DNA, 20 bp, Artificial Sequence
  Description of Artificial Sequence: Synthetic oligonucleotide
  Target: ATXN2; (+) strand; PAM type: NRG; PAM sequence: AGG
ctgaaaagggaaaaactgaa

SEQ ID NO: 41890 - DNA, 20 bp, Artificial Sequence
  Description of Artificial Sequence: Synthetic oligonucleotide
  Target: ATXN2; (+) strand; PAM type: NRG; PAM sequence: AAG
aaactgaaaggctttcctct

SEQ ID NO: 41891 - DNA, 20 bp, Artificial Sequence
  Description of Artificial Sequence: Synthetic oligonucleotide
  Target: ATXN2; (+) strand; PAM type: NRG; PAM sequence: TGG
aaaggctttcctctaagatc

SEQ ID NO: 41892 - DNA, 20 bp, Artificial Sequence
  Description of Artificial Sequence: Synthetic oligonucleotide
  Target: ATXN2; (+) strand; PAM type: NRG; PAM sequence: AAG
tttcctctaagatctggaac

SEQ ID NO: 41893 - DNA, 20 bp, Artificial Sequence
  Description of Artificial Sequence: Synthetic oligonucleotide
  Target: ATXN2; (+) strand; PAM type: NRG; PAM sequence: AAG
tctaagatctggaacaagac

SEQ ID NO: 41894 - DNA, 20 bp, Artificial Sequence
  Description of Artificial Sequence: Synthetic oligonucleotide
  Target: ATXN2; (+) strand; PAM type: NRG; PAM sequence: AGG
ctaagatctggaacaagaca

SEQ ID NO: 41895 - DNA, 20 bp, Artificial Sequence
  Description of Artificial Sequence: Synthetic oligonucleotide
  Target: ATXN2; (+) strand; PAM type: NRG; PAM sequence: CGG
ttgttattcaacataatact

SEQ ID NO: 41896 - DNA, 20 bp, Artificial Sequence
  Description of Artificial Sequence: Synthetic oligonucleotide
  Target: ATXN2; (+) strand; PAM type: NRG; PAM sequence: AAG
ttattcaacataatactcgg

SEQ ID NO: 41897 - DNA, 20 bp, Artificial Sequence
  Description of Artificial Sequence: Synthetic oligonucleotide
  Target: ATXN2; (+) strand; PAM type: NRG; PAM sequence: TGG
taatactcggaagtcctaat

SEQ ID NO: 41898 - DNA, 20 bp, Artificial Sequence
  Description of Artificial Sequence: Synthetic oligonucleotide
  Target: ATXN2; (+) strand; PAM type: NRG; PAM sequence: GAG
atactcggaagtcctaattg

SEQ ID NO: 41899 - DNA, 20 bp, Artificial Sequence
  Description of Artificial Sequence: Synthetic oligonucleotide
  Target: ATXN2; (+) strand; PAM type: NRG; PAM sequence: CAG
gaagtcctaattggagcaat

SEQ ID NO: 41900 - DNA, 20 bp, Artificial Sequence
  Description of Artificial Sequence: Synthetic oligonucleotide
  Target: ATXN2; (+) strand; PAM type: NRG; PAM sequence: CAG
taattggagcaatcagacaa

SEQ ID NO: 41901 - DNA, 20 bp, Artificial Sequence
  Description of Artificial Sequence: Synthetic oligonucleotide
  Target: ATXN2; (+) strand; PAM type: NRG; PAM sequence: AAG
tggagcaatcagacaacaga

SEQ ID NO: 41902 - DNA, 20 bp, Artificial Sequence
  Description of Artificial Sequence: Synthetic oligonucleotide
  Target: ATXN2; (+) strand; PAM type: NRG; PAM sequence: AAG
agacaacagaaagaaataaa

SEQ ID NO: 41903 - DNA, 20 bp, Artificial Sequence
  Description of Artificial Sequence: Synthetic oligonucleotide
  Target: ATXN2; (+) strand; PAM type: NRG; PAM sequence: TGG
gaaataaaaagcatccacac

SEQ ID NO: 41904 - DNA, 20 bp, Artificial Sequence
  Description of Artificial Sequence: Synthetic oligonucleotide
  Target: ATXN2; (+) strand; PAM type: NRG; PAM sequence: TGG
aaaaagcatccacactggaa

SEQ ID NO: 41905 - DNA, 20 bp, Artificial Sequence
  Description of Artificial Sequence: Synthetic oligonucleotide
  Target: ATXN2; (+) strand; PAM type: NRG; PAM sequence: AAG
aagcatccacactggaatgg

SEQ ID NO: 41906 - DNA, 20 bp, Artificial Sequence
  Description of Artificial Sequence: Synthetic oligonucleotide
  Target: ATXN2; (+) strand; PAM type: NRG; PAM sequence: AAG
catccacactggaatggaag

SEQ ID NO: 41907 - DNA, 20 bp, Artificial Sequence
  Description of Artificial Sequence: Synthetic oligonucleotide
  Target: ATXN2; (+) strand; PAM type: NRG; PAM sequence: CAG
agtcaaattatccttgtttg

SEQ ID NO: 41908 - DNA, 20 bp, Artificial Sequence
  Description of Artificial Sequence: Synthetic oligonucleotide
  Target: ATXN2; (+) strand; PAM type: NRG; PAM sequence: TGG
agataatatgatcttacatt

SEQ ID NO: 41909 - DNA, 20 bp, Artificial Sequence
  Description of Artificial Sequence: Synthetic oligonucleotide
  Target: ATXN2; (+) strand; PAM type: NRG; PAM sequence: TAG
atcttacatttggaaaaacc

SEQ ID NO: 41910 - DNA, 20 bp, Artificial Sequence
  Description of Artificial Sequence: Synthetic oligonucleotide
  Target: ATXN2; (+) strand; PAM type: NRG; PAM sequence: AAG
gaaaaacctagactccaaaa

SEQ ID NO: 41911 - DNA, 20 bp, Artificial Sequence
  Description of Artificial Sequence: Synthetic oligonucleotide
  Target: ATXN2; (+) strand; PAM type: NRG; PAM sequence: TAG
tccaaaaaagaaaaacctat

SEQ ID NO: 41912 - DNA, 20 bp, Artificial Sequence
  Description of Artificial Sequence: Synthetic oligonucleotide
  Target: ATXN2; (+) strand; PAM type: NRG; PAM sequence: CAG
ttagaactgacaaacaaatt

SEQ ID NO: 41913 - DNA, 20 bp, Artificial Sequence
  Description of Artificial Sequence: Synthetic oligonucleotide
  Target: ATXN2; (+) strand; PAM type: NRG; PAM sequence: CAG
aaacaaattcagtaaaattg

SEQ ID NO: 41914 - DNA, 20 bp, Artificial Sequence
  Description of Artificial Sequence: Synthetic oligonucleotide
  Target: ATXN2; (+) strand; PAM type: NRG; PAM sequence: AGG
aacaaattcagtaaaattgc

SEQ ID NO: 41915 - DNA, 20 bp, Artificial Sequence
  Description of Artificial Sequence: Synthetic oligonucleotide
  Target: ATXN2; (+) strand; PAM type: NRG; PAM sequence: CAG
aaaaatcaacacacaaaaat

SEQ ID NO: 41916 - DNA, 20 bp, Artificial Sequence
  Description of Artificial Sequence: Synthetic oligonucleotide
  Target: ATXN2; (+) strand; PAM type: NRG; PAM sequence: AGG
aaaatcaacacacaaaaatc

SEQ ID NO: 41917 - DNA, 20 bp, Artificial Sequence
  Description of Artificial Sequence: Synthetic oligonucleotide
  Target: ATXN2; (+) strand; PAM type: NRG; PAM sequence: GAG
aatcaacacacaaaaatcag

SEQ ID NO: 41918 - DNA, 20 bp, Artificial Sequence
  Description of Artificial Sequence: Synthetic oligonucleotide
  Target: ATXN2; (+) strand; PAM type: NRG; PAM sequence: CAG
aggagcatttttatatttaa

SEQ ID NO: 41919 - DNA, 20 bp, Artificial Sequence
  Description of Artificial Sequence: Synthetic oligonucleotide
  Target: ATXN2; (+) strand; PAM type: NRG; PAM sequence: TAG
aaacgcaatcccatttacaa

SEQ ID NO: 41920 - DNA, 20 bp, Artificial Sequence
  Description of Artificial Sequence: Synthetic oligonucleotide
  Target: ATXN2; (+) strand; PAM type: NRG; PAM sequence: TAG
tacaaatataataaaatact

SEQ ID NO: 41921 - DNA, 20 bp, Artificial Sequence
  Description of Artificial Sequence: Synthetic oligonucleotide
  Target: ATXN2; (+) strand; PAM type: NRG; PAM sequence: AGG
acaaatataataaaatactt

SEQ ID NO: 41922 - DNA, 20 bp, Artificial Sequence
  Description of Artificial Sequence: Synthetic oligonucleotide
  Target: ATXN2; (+) strand; PAM type: NRG; PAM sequence: GAG
aggaataaacttaaccaaat

SEQ ID NO: 41923 - DNA, 20 bp, Artificial Sequence
  Description of Artificial Sequence: Synthetic oligonucleotide
  Target: ATXN2; (+) strand; PAM type: NRG; PAM sequence: AAG
aaacttaaccaaatgagtaa

SEQ ID NO: 41924 - DNA, 20 bp, Artificial Sequence
  Description of Artificial Sequence: Synthetic oligonucleotide
  Target: ATXN2; (+) strand; PAM type: NRG; PAM sequence: CAG
aaacactgaaattgatgaca

SEQ ID NO: 41925 - DNA, 20 bp, Artificial Sequence
  Description of Artificial Sequence: Synthetic oligonucleotide
  Target: ATXN2; (+) strand; PAM type: NRG; PAM sequence: AAG
tgacacagaaaaaacatgaa

SEQ ID NO: 41926 - DNA, 20 bp, Artificial Sequence
  Description of Artificial Sequence: Synthetic oligonucleotide
  Target: ATXN2; (+) strand; PAM type: NRG; PAM sequence: GAG
acacagaaaaaacatgaaaa

SEQ ID NO: 41927 - DNA, 20 bp, Artificial Sequence
  Description of Artificial Sequence: Synthetic oligonucleotide
  Target: ATXN2; (+) strand; PAM type: NRG; PAM sequence: TGG
gaaaagagattccatgttta

SEQ ID NO: 41928 - DNA, 20 bp, Artificial Sequence
  Description of Artificial Sequence: Synthetic oligonucleotide
  Target: ATXN2; (+) strand; PAM type: NRG; PAM sequence: TAG
gagattccatgtttatggat

SEQ ID NO: 41929 - DNA, 20 bp, Artificial Sequence
  Description of Artificial Sequence: Synthetic oligonucleotide
  Target: ATXN2; (+) strand; PAM type: NRG; PAM sequence: AAG
attccatgtttatggattag

SEQ ID NO: 41930 - DNA, 20 bp, Artificial Sequence
  Description of Artificial Sequence: Synthetic oligonucleotide
  Target: ATXN2; (+) strand; PAM type: NRG; PAM sequence: AAG
taaaatgttgataatactca

SEQ ID NO: 41931 - DNA, 20 bp, Artificial Sequence
  Description of Artificial Sequence: Synthetic oligonucleotide
  Target: ATXN2; (+) strand; PAM type: NRG; PAM sequence: CAG
ataatactcaaagcaatcta

SEQ ID NO: 41932 - DNA, 20 bp, Artificial Sequence
  Description of Artificial Sequence: Synthetic oligonucleotide
  Target: ATXN2; (+) strand; PAM type: NRG; PAM sequence: CAG
ctcaaagcaatctacagatt

SEQ ID NO: 41933 - DNA, 20 bp, Artificial Sequence
  Description of Artificial Sequence: Synthetic oligonucleotide
  Target: ATXN2; (+) strand; PAM type: NRG; PAM sequence: CAG
aataccaatgacattcctca

SEQ ID NO: 41934 - DNA, 20 bp, Artificial Sequence
  Description of Artificial Sequence: Synthetic oligonucleotide
  Target: ATXN2; (+) strand; PAM type: NRG; PAM sequence: AAG
accaatgacattcctcacag

SEQ ID NO: 41935 - DNA, 20 bp, Artificial Sequence
  Description of Artificial Sequence: Synthetic oligonucleotide
  Target: ATXN2; (+) strand; PAM type: NRG; PAM sequence: TAG
aatgacattcctcacagaag

SEQ ID NO: 41936 - DNA, 20 bp, Artificial Sequence
  Description of Artificial Sequence: Synthetic oligonucleotide
  Target: ATXN2; (+) strand; PAM type: NRG; PAM sequence: TAG
aaaaataattctaaaatttg

SEQ ID NO: 41937 - DNA, 20 bp, Artificial Sequence
  Description of Artificial Sequence: Synthetic oligonucleotide
  Target: ATXN2; (+) strand; PAM type: NRG; PAM sequence: AGG
aaaataattctaaaatttgt

SEQ ID NO: 41938 - DNA, 20 bp, Artificial Sequence
  Description of Artificial Sequence: Synthetic oligonucleotide
  Target: ATXN2; (+) strand; PAM type: NRG; PAM sequence: GGG
aaataattctaaaatttgta

SEQ ID NO: 41939 - DNA, 20 bp, Artificial Sequence
  Description of Artificial Sequence: Synthetic oligonucleotide
  Target: ATXN2; (+) strand; PAM type: NRG; PAM sequence: AAG
aaatttgtagggaaccacaa

SEQ ID NO: 41940 - DNA, 20 bp, Artificial Sequence
  Description of Artificial Sequence: Synthetic oligonucleotide
  Target: ATXN2; (+) strand; PAM type: NRG; PAM sequence: AGG
aatttgtagggaaccacaaa

SEQ ID NO: 41941 - DNA, 20 bp, Artificial Sequence
  Description of Artificial Sequence: Synthetic oligonucleotide
  Target: ATXN2; (+) strand; PAM type: NRG; PAM sequence: AAG
gggaaccacaaaaggcccaa

SEQ ID NO: 41942 - DNA, 20 bp, Artificial Sequence
  Description of Artificial Sequence: Synthetic oligonucleotide
  Target: ATXN2; (+) strand; PAM type: NRG; PAM sequence: GAG
gaaccacaaaaggcccaaaa

SEQ ID NO: 41943 - DNA, 20 bp, Artificial Sequence
  Description of Artificial Sequence: Synthetic oligonucleotide
  Target: ATXN2; (+) strand; PAM type: NRG; PAM sequence: AAG
caaaaggcccaaaagagcaa

SEQ ID NO: 41944 - DNA, 20 bp, Artificial Sequence
  Description of Artificial Sequence: Synthetic oligonucleotide
  Target: ATXN2; (+) strand; PAM type: NRG; PAM sequence: GAG
aaaagagcaaaagccatact

SEQ ID NO: 41945 - DNA, 20 bp, Artificial Sequence
  Description of Artificial Sequence: Synthetic oligonucleotide
  Target: ATXN2; (+) strand; PAM type: NRG; PAM sequence: CGG
actgagcaaaatgaacaaaa

SEQ ID NO: 41946 - DNA, 20 bp, Artificial Sequence
  Description of Artificial Sequence: Synthetic oligonucleotide
  Target: ATXN2; (+) strand; PAM type: NRG; PAM sequence: GGG
ctgagcaaaatgaacaaaac

SEQ ID NO: 41947 - DNA, 20 bp, Artificial Sequence
  Description of Artificial Sequence: Synthetic oligonucleotide
  Target: ATXN2; (+) strand; PAM type: NRG; PAM sequence: GAG
gagcaaaatgaacaaaacgg

SEQ ID NO: 41948 - DNA, 20 bp, Artificial Sequence
  Description of Artificial Sequence: Synthetic oligonucleotide
  Target: ATXN2; (+) strand; PAM type: NRG; PAM sequence: AGG
agcaaaatgaacaaaacggg

SEQ ID NO: 41949 - DNA, 20 bp, Artificial Sequence
  Description of Artificial Sequence: Synthetic oligonucleotide
  Target: ATXN2; (+) strand; PAM type: NRG; PAM sequence: TGG
tcaaattattgtaaccaaaa

SEQ ID NO: 41950 - DNA, 20 bp, Artificial Sequence
  Description of Artificial Sequence: Synthetic oligonucleotide
  Target: ATXN2; (+) strand; PAM type: NRG; PAM sequence: TGG
ttattgtaaccaaaatggca

SEQ ID NO: 41951 - DNA, 20 bp, Artificial Sequence
  Description of Artificial Sequence: Synthetic oligonucleotide
  Target: ATXN2; (+) strand; PAM type: NRG; PAM sequence: TGG
taaccaaaatggcatggtac

SEQ ID NO: 41952 - DNA, 20 bp, Artificial Sequence
  Description of Artificial Sequence: Synthetic oligonucleotide
  Target: ATXN2; (+) strand; PAM type: NRG; PAM sequence: AAG
gcatggtactggcataaaaa

SEQ ID NO: 41953 - DNA, 20 bp, Artificial Sequence
  Description of Artificial Sequence: Synthetic oligonucleotide
  Target: ATXN2; (+) strand; PAM type: NRG; PAM sequence: TAG
tactggcataaaaaaagata

SEQ ID NO: 41954 - DNA, 20 bp, Artificial Sequence
  Description of Artificial Sequence: Synthetic oligonucleotide
  Target: ATXN2; (+) strand; PAM type: NRG; PAM sequence: CAG
aaagatatagatcaatgaaa

SEQ ID NO: 41955 - DNA, 20 bp, Artificial Sequence
  Description of Artificial Sequence: Synthetic oligonucleotide
  Target: ATXN2; (+) strand; PAM type: NRG; PAM sequence: CAG
tatagatcaatgaaacagaa

SEQ ID NO: 41956 - DNA, 20 bp, Artificial Sequence
  Description of Artificial Sequence: Synthetic oligonucleotide
  Target: ATXN2; (+) strand; PAM type: NRG; PAM sequence: GAG
tagatcaatgaaacagaaca

SEQ ID NO: 41957 - DNA, 20 bp, Artificial Sequence
  Description of Artificial Sequence: Synthetic oligonucleotide
  Target: ATXN2; (+) strand; PAM type: NRG; PAM sequence: CAG
atgaaacagaacagagaact

SEQ ID NO: 41958 - DNA, 20 bp, Artificial Sequence
  Description of Artificial Sequence: Synthetic oligonucleotide
  Target: ATXN2; (+) strand; PAM type: NRG; PAM sequence: AAG
agaaatgaatccatacgtct

SEQ ID NO: 41959 - DNA, 20 bp, Artificial Sequence
  Description of Artificial Sequence: Synthetic oligonucleotide
  Target: ATXN2; (+) strand; PAM type: NRG; PAM sequence: AAG
aagtgaactcattttccaca

SEQ ID NO: 41960 - DNA, 20 bp, Artificial Sequence
  Description of Artificial Sequence: Synthetic oligonucleotide
  Target: ATXN2; (+) strand; PAM type: NRG; PAM sequence: AAG
tgaactcattttccacaaag

SEQ ID NO: 41961 - DNA, 20 bp, Artificial Sequence
  Description of Artificial Sequence: Synthetic oligonucleotide
  Target: ATXN2; (+) strand; PAM type: NRG; PAM sequence: TGG
aagaagccatgaacatacac

SEQ ID NO: 41962 - DNA, 20 bp, Artificial Sequence
  Description of Artificial Sequence: Synthetic oligonucleotide
  Target: ATXN2; (+) strand; PAM type: NRG; PAM sequence: GGG
agaagccatgaacatacact

SEQ ID NO: 41963 - DNA, 20 bp, Artificial Sequence
  Description of Artificial Sequence: Synthetic oligonucleotide
  Target: ATXN2; (+) strand; PAM type: NRG; PAM sequence: GGG
gaagccatgaacatacactg

SEQ ID NO: 41964 - DNA, 20 bp, Artificial Sequence
  Description of Artificial Sequence: Synthetic oligonucleotide
  Target: ATXN2; (+) strand; PAM type: NRG; PAM sequence: AAG
ccatgaacatacactgggga

SEQ ID NO: 41965 - DNA, 20 bp, Artificial Sequence
  Description of Artificial Sequence: Synthetic oligonucleotide
  Target: ATXN2; (+) strand; PAM type: NRG; PAM sequence: AGG
catgaacatacactggggaa

SEQ ID NO: 41966 - DNA, 20 bp, Artificial Sequence
  Description of Artificial Sequence: Synthetic oligonucleotide
  Target: ATXN2; (+) strand; PAM type: NRG; PAM sequence: CAG
aacatacactggggaaagga

SEQ ID NO: 41967 - DNA, 20 bp, Artificial Sequence
  Description of Artificial Sequence: Synthetic oligonucleotide
  Target: ATXN2; (+) strand; PAM type: NRG; PAM sequence: TGG
aggacagtctcttcaataaa

SEQ ID NO: 41968 - DNA, 20 bp, Artificial Sequence
  Description of Artificial Sequence: Synthetic oligonucleotide
  Target: ATXN2; (+) strand; PAM type: NRG; PAM sequence: TGG
gtctcttcaataaatggtgc

SEQ ID NO: 41969 - DNA, 20 bp, Artificial Sequence
  Description of Artificial Sequence: Synthetic oligonucleotide
  Target: ATXN2; (+) strand; PAM type: NRG; PAM sequence: GGG
tctcttcaataaatggtgct

SEQ ID NO: 41970 - DNA, 20 bp, Artificial Sequence
  Description of Artificial Sequence: Synthetic oligonucleotide
  Target: ATXN2; (+) strand; PAM type: NRG; PAM sequence: TGG
ataaatggtgctgggaaaac

SEQ ID NO: 41971 - DNA, 20 bp, Artificial Sequence
  Description of Artificial Sequence: Synthetic oligonucleotide
  Target: ATXN2; (+) strand; PAM type: NRG; PAM sequence: CAG
gaaaactggatatccatatg

SEQ ID NO: 41972 - DNA, 20 bp, Artificial Sequence
  Description of Artificial Sequence: Synthetic oligonucleotide
  Target: ATXN2; (+) strand; PAM type: NRG; PAM sequence: AAG
aactggatatccatatgcag

SEQ ID NO: 41973 - DNA, 20 bp, Artificial Sequence
  Description of Artificial Sequence: Synthetic oligonucleotide
  Target: ATXN2; (+) strand; PAM type: NRG; PAM sequence: CAG
catatgcagaagaatgaaac

SEQ ID NO: 41974 - DNA, 20 bp, Artificial Sequence
  Description of Artificial Sequence: Synthetic oligonucleotide
  Target: ATXN2; (+) strand; PAM type: NRG; PAM sequence: TGG
aaaaaaaaatcaaatcaaaa

SEQ ID NO: 41975 - DNA, 20 bp, Artificial Sequence
  Description of Artificial Sequence: Synthetic oligonucleotide
  Target: ATXN2; (+) strand; PAM type: NRG; PAM sequence: AAG
aatcaaatcaaaatggacta

SEQ ID NO: 41976 - DNA, 20 bp, Artificial Sequence
  Description of Artificial Sequence: Synthetic oligonucleotide
  Target: ATXN2; (+) strand; PAM type: NRG; PAM sequence: AAG
tggactaaagatttaaatct

SEQ ID NO: 41977 - DNA, 20 bp, Artificial Sequence
  Description of Artificial Sequence: Synthetic oligonucleotide
  Target: ATXN2; (+) strand; PAM type: NRG; PAM sequence: AAG
tcaaactatgaaactactaa

SEQ ID NO: 41978 - DNA, 20 bp, Artificial Sequence
  Description of Artificial Sequence: Synthetic oligonucleotide
  Target: ATXN2; (+) strand; PAM type: NRG; PAM sequence: CAG
aaaagaaaacattaaactcc

SEQ ID NO: 41979 - DNA, 20 bp, Artificial Sequence
  Description of Artificial Sequence: Synthetic oligonucleotide
  Target: ATXN2; (+) strand; PAM type: NRG; PAM sequence: AGG
aaagaaaacattaaactccc

SEQ ID NO: 41980 - DNA, 20 bp, Artificial Sequence
  Description of Artificial Sequence: Synthetic oligonucleotide
  Target: ATXN2; (+) strand; PAM type: NRG; PAM sequence: GGG
aagaaaacattaaactccca

SEQ ID NO: 41981 - DNA, 20 bp, Artificial Sequence
  Description of Artificial Sequence: Synthetic oligonucleotide
  Target: ATXN2; (+) strand; PAM type: NRG; PAM sequence: TGG
aactcccagggacattactc

SEQ ID NO: 41982 - DNA, 20 bp, Artificial Sequence
  Description of Artificial Sequence: Synthetic oligonucleotide
  Target: ATXN2; (+) strand; PAM type: NRG; PAM sequence: GGG
actcccagggacattactct

SEQ ID NO: 41983 - DNA, 20 bp, Artificial Sequence
  Description of Artificial Sequence: Synthetic oligonucleotide
  Target: ATXN2; (+) strand; PAM type: NRG; PAM sequence: AAG
cagggacattactctgggca

SEQ ID NO: 41984 - DNA, 20 bp, Artificial Sequence
  Description of Artificial Sequence: Synthetic oligonucleotide
  Target: ATXN2; (+) strand; PAM type: NRG; PAM sequence: GAG
actctgggcaaagatttctt

SEQ ID NO: 41985 - DNA, 20 bp, Artificial Sequence
  Description of Artificial Sequence: Synthetic oligonucleotide
  Target: ATXN2; (+) strand; PAM type: NRG; PAM sequence: AAG
tttcttgagtaataccccaa

SEQ ID NO: 41986 - DNA, 20 bp, Artificial Sequence
  Description of Artificial Sequence: Synthetic oligonucleotide
  Target: ATXN2; (+) strand; PAM type: NRG; PAM sequence: CAG
tgagtaataccccaaaagta

SEQ ID NO: 41987 - DNA, 20 bp, Artificial Sequence
  Description of Artificial Sequence: Synthetic oligonucleotide
  Target: ATXN2; (+) strand; PAM type: NRG; PAM sequence: AGG
gagtaataccccaaaagtac

SEQ ID NO: 41988 - DNA, 20 bp, Artificial Sequence
  Description of Artificial Sequence: Synthetic oligonucleotide
  Target: ATXN2; (+) strand; PAM type: NRG; PAM sequence: AAG
cccaaaagtacaggcaacca

SEQ ID NO: 41989 - DNA, 20 bp, Artificial Sequence
  Description of Artificial Sequence: Synthetic oligonucleotide
  Target: ATXN2; (+) strand; PAM type: NRG; PAM sequence: AAG
aagtacaggcaaccaaagca

SEQ ID NO: 41990 - DNA, 20 bp, Artificial Sequence
  Description of Artificial Sequence: Synthetic oligonucleotide
  Target: ATXN2; (+) strand; PAM type: NRG; PAM sequence: TGG
acaggcaaccaaagcaaaga

SEQ ID NO: 41991 - DNA, 20 bp, Artificial Sequence
  Description of Artificial Sequence: Synthetic oligonucleotide
  Target: ATXN2; (+) strand; PAM type: NRG; PAM sequence: TGG
ccaaagcaaagatggacaaa

SEQ ID NO: 41992 - DNA, 20 bp, Artificial Sequence
  Description of Artificial Sequence: Synthetic oligonucleotide
  Target: ATXN2; (+) strand; PAM type: NRG; PAM sequence: GGG
caaagcaaagatggacaaat

SEQ ID NO: 41993 - DNA, 20 bp, Artificial Sequence
  Description of Artificial Sequence: Synthetic oligonucleotide
  Target: ATXN2; (+) strand; PAM type: NRG; PAM sequence: AAG
tggacaaatgggatcacatc

SEQ ID NO: 41994 - DNA, 20 bp, Artificial Sequence
  Description of Artificial Sequence: Synthetic oligonucleotide
  Target: ATXN2; (+) strand; PAM type: NRG; PAM sequence: AAG
tgggatcacatcaagttaaa

SEQ ID NO: 41995 - DNA, 20 bp, Artificial Sequence
  Description of Artificial Sequence: Synthetic oligonucleotide
  Target: ATXN2; (+) strand; PAM type: NRG; PAM sequence: CAG
caagttaaaaagcttctgca

SEQ ID NO: 41996 - DNA, 20 bp, Artificial Sequence
  Description of Artificial Sequence: Synthetic oligonucleotide
  Target: ATXN2; (+) strand; PAM type: NRG; PAM sequence: AAG
taaaaagcttctgcacagca

SEQ ID NO: 41997 - DNA, 20 bp, Artificial Sequence
  Description of Artificial Sequence: Synthetic oligonucleotide
  Target: ATXN2; (+) strand; PAM type: NRG; PAM sequence: AGG
aaaaagcttctgcacagcaa

SEQ ID NO: 41998 - DNA, 20 bp, Artificial Sequence
  Description of Artificial Sequence: Synthetic oligonucleotide
  Target: ATXN2; (+) strand; PAM type: NRG; PAM sequence: AAG
agcaaaggaaaccatcaaca

SEQ ID NO: 41999 - DNA, 20 bp, Artificial Sequence
  Description of Artificial Sequence: Synthetic oligonucleotide
  Target: ATXN2; (+) strand; PAM type: NRG; PAM sequence: AAG
aggaaaccatcaacaaagtg

SEQ ID NO: 42000 - DNA, 20 bp, Artificial Sequence
  Description of Artificial Sequence: Synthetic oligonucleotide
  Target: ATXN2; (+) strand; PAM type: NRG; PAM sequence: GAG
gaaaccatcaacaaagtgaa

SEQ ID NO: 42001 - DNA, 20 bp, Artificial Sequence
  Description of Artificial Sequence: Synthetic oligonucleotide
  Target: ATXN2; (+) strand; PAM type: NRG; PAM sequence: CAG
ccatcaacaaagtgaagaga

SEQ ID NO: 42002 - DNA, 20 bp, Artificial Sequence
  Description of Artificial Sequence: Synthetic oligonucleotide
  Target: ATXN2; (+) strand; PAM type: NRG; PAM sequence: CAG
caaagtgaagagacagccca

SEQ ID NO: 42003 - DNA, 20 bp, Artificial Sequence
  Description of Artificial Sequence: Synthetic oligonucleotide
  Target: ATXN2; (+) strand; PAM type: NRG; PAM sequence: TGG
tgaagagacagcccacagaa

SEQ ID NO: 42004 - DNA, 20 bp, Artificial Sequence
  Description of Artificial Sequence: Synthetic oligonucleotide
  Target: ATXN2; (+) strand; PAM type: NRG; PAM sequence: GGG
gaagagacagcccacagaat

SEQ ID NO: 42005 - DNA, 20 bp, Artificial Sequence
  Description of Artificial Sequence: Synthetic oligonucleotide
  Target: ATXN2; (+) strand; PAM type: NRG; PAM sequence: GAG
agagacagcccacagaatgg

SEQ ID NO: 42006 - DNA, 20 bp, Artificial Sequence
  Description of Artificial Sequence: Synthetic oligonucleotide
  Target: ATXN2; (+) strand; PAM type: NRG; PAM sequence: AAG
ttgcaaactactcatctgac

SEQ ID NO: 42007 - DNA, 20 bp, Artificial Sequence
  Description of Artificial Sequence: Synthetic oligonucleotide
  Target: ATXN2; (+) strand; PAM type: NRG; PAM sequence: AGG
tgcaaactactcatctgaca

SEQ ID NO: 42008 - DNA, 20 bp, Artificial Sequence
  Description of Artificial Sequence: Synthetic oligonucleotide
  Target: ATXN2; (+) strand; PAM type: NRG; PAM sequence: GGG
gcaaactactcatctgacaa

SEQ ID NO: 42009 - DNA, 20 bp, Artificial Sequence
  Description of Artificial Sequence: Synthetic oligonucleotide
  Target: ATXN2; (+) strand; PAM type: NRG; PAM sequence: CAG
tctgacaagggatcaataac

SEQ ID NO: 42010 - DNA, 20 bp, Artificial Sequence
  Description of Artificial Sequence: Synthetic oligonucleotide
  Target: ATXN2; (+) strand; PAM type: NRG; PAM sequence: AAG
gatcaataaccagaatataa

SEQ ID NO: 42011 - DNA, 20 bp, Artificial Sequence
  Description of Artificial Sequence: Synthetic oligonucleotide
  Target: ATXN2; (+) strand; PAM type: NRG; PAM sequence: AGG
atcaataaccagaatataaa

SEQ ID NO: 42012 - DNA, 20 bp, Artificial Sequence
  Description of Artificial Sequence: Synthetic oligonucleotide
  Target: ATXN2; (+) strand; PAM type: NRG; PAM sequence: AAG
ccagaatataaaaggcactc

SEQ ID NO: 42013 - DNA, 20 bp, Artificial Sequence
  Description of Artificial Sequence: Synthetic oligonucleotide
  Target: ATXN2; (+) strand; PAM type: NRG; PAM sequence: TAG
aaggcactcaagcaactcca

SEQ ID NO: 42014 - DNA, 20 bp, Artificial Sequence
  Description of Artificial Sequence: Synthetic oligonucleotide
  Target: ATXN2; (+) strand; PAM type: NRG; PAM sequence: AGG
aggcactcaagcaactccat

SEQ ID NO: 42015 - DNA, 20 bp, Artificial Sequence
  Description of Artificial Sequence: Synthetic oligonucleotide
  Target: ATXN2; (+) strand; PAM type: NRG; PAM sequence: GGG
ggcactcaagcaactccata

SEQ ID NO: 42016 - DNA, 20 bp, Artificial Sequence
  Description of Artificial Sequence: Synthetic oligonucleotide
  Target: ATXN2; (+) strand; PAM type: NRG; PAM sequence: TAG
caactccatagggaaaattt

SEQ ID NO: 42017 - DNA, 20 bp, Artificial Sequence
  Description of Artificial Sequence: Synthetic oligonucleotide
  Target: ATXN2; (+) strand; PAM type: NRG; PAM sequence: TGG
tttagtaactcaattaaaaa

SEQ ID NO: 42018 - DNA, 20 bp, Artificial Sequence
  Description of Artificial Sequence: Synthetic oligonucleotide
  Target: ATXN2; (+) strand; PAM type: NRG; PAM sequence: GGG
ttagtaactcaattaaaaat

SEQ ID NO: 42019 - DNA, 20 bp, Artificial Sequence
  Description of Artificial Sequence: Synthetic oligonucleotide
  Target: ATXN2; (+) strand; PAM type: NRG; PAM sequence: AAG
actcaattaaaaatgggcaa

SEQ ID NO: 42020 - DNA, 20 bp, Artificial Sequence
  Description of Artificial Sequence: Synthetic oligonucleotide
  Target: ATXN2; (+) strand; PAM type: NRG; PAM sequence: TAG
aaatgggcaaaagatctgaa

SEQ ID NO: 42021 - DNA, 20 bp, Artificial Sequence
  Description of Artificial Sequence: Synthetic oligonucleotide
  Target: ATXN2; (+) strand; PAM type: NRG; PAM sequence: AAG
tctgaatagacatttctcaa

SEQ ID NO: 42022 - DNA, 20 bp, Artificial Sequence
  Description of Artificial Sequence: Synthetic oligonucleotide
  Target: ATXN2; (+) strand; PAM type: NRG; PAM sequence: CAG
atttctcaaaagacgacata

SEQ ID NO: 42023 - DNA, 20 bp, Artificial Sequence
  Description of Artificial Sequence: Synthetic oligonucleotide
  Target: ATXN2; (+) strand; PAM type: NRG; PAM sequence: AGG
tttctcaaaagacgacatac

SEQ ID NO: 42024 - DNA, 20 bp, Artificial Sequence
  Description of Artificial Sequence: Synthetic oligonucleotide
  Target: ATXN2; (+) strand; PAM type: NRG; PAM sequence: TGG
tcaaaagacgacatacaggc

SEQ ID NO: 42025 - DNA, 20 bp, Artificial Sequence
  Description of Artificial Sequence: Synthetic oligonucleotide
  Target: ATXN2; (+) strand; PAM type: NRG; PAM sequence: GGG
caaaagacgacatacaggct

SEQ ID NO: 42026 - DNA, 20 bp, Artificial Sequence
  Description of Artificial Sequence: Synthetic oligonucleotide
  Target: ATXN2; (+) strand; PAM type: NRG; PAM sequence: CAG
gacgacatacaggctgggcg

SEQ ID NO: 42027 - DNA, 20 bp, Artificial Sequence
  Description of Artificial Sequence: Synthetic oligonucleotide
  Target: ATXN2; (+) strand; PAM type: NRG; PAM sequence: CAG
gacatacaggctgggcgcag

SEQ ID NO: 42028 - DNA, 20 bp, Artificial Sequence
  Description of Artificial Sequence: Synthetic oligonucleotide
  Target: ATXN2; (+) strand; PAM type: NRG; PAM sequence: TAG
gcagctcacgcctgtaatcc

SEQ ID NO: 42029 - DNA, 20 bp, Artificial Sequence
  Description of Artificial Sequence: Synthetic oligonucleotide
  Target: ATXN2; (+) strand; PAM type: NRG; PAM sequence: TGG
cgcctgtaatcctagcactt

SEQ ID NO: 42030 - DNA, 20 bp, Artificial Sequence
  Description of Artificial Sequence: Synthetic oligonucleotide
  Target: ATXN2; (+) strand; PAM type: NRG; PAM sequence: GGG
gcctgtaatcctagcacttt

SEQ ID NO: 42031 - DNA, 20 bp, Artificial Sequence
  Description of Artificial Sequence: Synthetic oligonucleotide
  Target: ATXN2; (+) strand; PAM type: NRG; PAM sequence: GAG
ctgtaatcctagcactttgg

SEQ ID NO: 42032 - DNA, 20 bp, Artificial Sequence
  Description of Artificial Sequence: Synthetic oligonucleotide
  Target: ATXN2; (+) strand; PAM type: NRG; PAM sequence: AGG
tgtaatcctagcactttggg

SEQ ID NO: 42033 - DNA, 20 bp, Artificial Sequence
  Description of Artificial Sequence: Synthetic oligonucleotide
  Target: ATXN2; (+) strand; PAM type: NRG; PAM sequence: GAG
tcctagcactttgggaggct

SEQ ID NO: 42034 - DNA, 20 bp, Artificial Sequence
  Description of Artificial Sequence: Synthetic oligonucleotide
  Target: ATXN2; (+) strand; PAM type: NRG; PAM sequence: AGG
cctagcactttgggaggctg

SEQ ID NO: 42035 - DNA, 20 bp, Artificial Sequence
  Description of Artificial Sequence: Synthetic oligonucleotide
  Target: ATXN2; (+) strand; PAM type: NRG; PAM sequence: CAG
agcactttgggaggctgagg

SEQ ID NO: 42036 - DNA, 20 bp, Artificial Sequence
  Description of Artificial Sequence: Synthetic oligonucleotide
  Target: ATXN2; (+) strand; PAM type: NRG; PAM sequence: AGG
gcactttgggaggctgaggc

SEQ ID NO: 42037 - DNA, 20 bp, Artificial Sequence
  Description of Artificial Sequence: Synthetic oligonucleotide
  Target: ATXN2; (+) strand; PAM type: NRG; PAM sequence: GAG
ctgaggcaggtaaatcacct

SEQ ID NO: 42038 - DNA, 20 bp, Artificial Sequence
  Description of Artificial Sequence: Synthetic oligonucleotide
  Target: ATXN2; (+) strand; PAM type: NRG; PAM sequence: AGG
tgaggcaggtaaatcacctg

SEQ ID NO: 42039 - DNA, 20 bp, Artificial Sequence
  Description of Artificial Sequence: Synthetic oligonucleotide
  Target: ATXN2; (+) strand; PAM type: NRG; PAM sequence: TAG
gcaggtaaatcacctgaggt

SEQ ID NO: 42040 - DNA, 20 bp, Artificial Sequence
  Description of Artificial Sequence: Synthetic oligonucleotide
  Target: ATXN2; (+) strand; PAM type: NRG; PAM sequence: AGG
caggtaaatcacctgaggtt

SEQ ID NO: 42041 - DNA, 20 bp, Artificial Sequence
  Description of Artificial Sequence: Synthetic oligonucleotide
  Target: ATXN2; (+) strand; PAM type: NRG; PAM sequence: GAG
ggtaaatcacctgaggttag

SEQ ID NO: 42042 - DNA, 20 bp, Artificial Sequence
  Description of Artificial Sequence: Synthetic oligonucleotide
  Target: ATXN2; (+) strand; PAM type: NRG; PAM sequence: AAG
tcacctgaggttaggagttc

SEQ ID NO: 42043 - DNA, 20 bp, Artificial Sequence
  Description of Artificial Sequence: Synthetic oligonucleotide
  Target: ATXN2; (+) strand; PAM type: NRG; PAM sequence: CAG
tgaggttaggagttcaagac

SEQ ID NO: 42044 - DNA, 20 bp, Artificial Sequence
  Description of Artificial Sequence: Synthetic oligonucleotide
  Target: ATXN2; (+) strand; PAM type: NRG; PAM sequence: TGG
ttaggagttcaagaccagcc

SEQ ID NO: 42045 - DNA, 20 bp, Artificial Sequence
  Description of Artificial Sequence: Synthetic oligonucleotide
  Target: ATXN2; (+) strand; PAM type: NRG; PAM sequence: GGG
taggagttcaagaccagcct

SEQ ID NO: 42046 - DNA, 20 bp, Artificial Sequence
  Description of Artificial Sequence: Synthetic oligonucleotide
  Target: ATXN2; (+) strand; PAM type: NRG; PAM sequence: AAG
tcaagaccagcctgggcaac

SEQ ID NO: 42047 - DNA, 20 bp, Artificial Sequence
  Description of Artificial Sequence: Synthetic oligonucleotide
  Target: ATXN2; (+) strand; PAM type: NRG; PAM sequence: AGG
caagaccagcctgggcaaca

SEQ ID NO: 42048 - DNA, 20 bp, Artificial Sequence
  Description of Artificial Sequence: Synthetic oligonucleotide
  Target: ATXN2; (+) strand; PAM type: NRG; PAM sequence: GAG
agaccagcctgggcaacaag

SEQ ID NO: 42049 - DNA, 20 bp, Artificial Sequence
  Description of Artificial Sequence: Synthetic oligonucleotide
  Target: ATXN2; (+) strand; PAM type: NRG; PAM sequence: TAG
tctactaaaaatacaaaaat

SEQ ID NO: 42050 - DNA, 20 bp, Artificial Sequence
  Description of Artificial Sequence: Synthetic oligonucleotide
  Target: ATXN2; (+) strand; PAM type: NRG; PAM sequence: AGG
ctactaaaaatacaaaaatt

SEQ ID NO: 42051 - DNA, 20 bp, Artificial Sequence
  Description of Artificial Sequence: Synthetic oligonucleotide
  Target: ATXN2; (+) strand; PAM type: NRG; PAM sequence: CAG
ctaaaaatacaaaaattagg

SEQ ID NO: 42052 - DNA, 20 bp, Artificial Sequence
  Description of Artificial Sequence: Synthetic oligonucleotide
  Target: ATXN2; (+) strand; PAM type: NRG; PAM sequence: TGG
atacaaaaattaggcagaca

SEQ ID NO: 42053 - DNA, 20 bp, Artificial Sequence
  Description of Artificial Sequence: Synthetic oligonucleotide
  Target: ATXN2; (+) strand; PAM type: NRG; PAM sequence: TGG
caaaaattaggcagacatgg

SEQ ID NO: 42054 - DNA, 20 bp, Artificial Sequence
  Description of Artificial Sequence: Synthetic oligonucleotide
  Target: ATXN2; (+) strand; PAM type: NRG; PAM sequence: CAG
aaattaggcagacatggtgg

SEQ ID NO: 42055 - DNA, 20 bp, Artificial Sequence
  Description of Artificial Sequence: Synthetic oligonucleotide
  Target: ATXN2; (+) strand; PAM type: NRG; PAM sequence: AGG
aattaggcagacatggtggc

SEQ ID NO: 42056 - DNA, 20 bp, Artificial Sequence
  Description of Artificial Sequence: Synthetic oligonucleotide
  Target: ATXN2; (+) strand; PAM type: NRG; PAM sequence: GAG
ttaggcagacatggtggcag

SEQ ID NO: 42057 - DNA, 20 bp, Artificial Sequence
  Description of Artificial Sequence: Synthetic oligonucleotide
  Target: ATXN2; (+) strand; PAM type: NRG; PAM sequence: AGG
taggcagacatggtggcagg

SEQ ID NO: 42058 - DNA, 20 bp, Artificial Sequence
  Description of Artificial Sequence: Synthetic oligonucleotide
  Target: ATXN2; (+) strand; PAM type: NRG; PAM sequence: CAG
gcagacatggtggcaggagg

SEQ ID NO: 42059 - DNA, 20 bp, Artificial Sequence
  Description of Artificial Sequence: Synthetic oligonucleotide
  Target: ATXN2; (+) strand; PAM type: NRG; PAM sequence: AGG
cagacatggtggcaggaggc

SEQ ID NO: 42060 - DNA, 20 bp, Artificial Sequence
  Description of Artificial Sequence: Synthetic oligonucleotide
  Target: ATXN2; (+) strand; PAM type: NRG; PAM sequence: GAG
gacatggtggcaggaggcag

SEQ ID NO: 42061 - DNA, 20 bp, Artificial Sequence
  Description of Artificial Sequence: Synthetic oligonucleotide
  Target: ATXN2; (+) strand; PAM type: NRG; PAM sequence: CGG
gcaggagaattgcttgaatc

SEQ ID NO: 42062 - DNA, 20 bp, Artificial Sequence
  Description of Artificial Sequence: Synthetic oligonucleotide
  Target: ATXN2; (+) strand; PAM type: NRG; PAM sequence: GGG
caggagaattgcttgaatcc

SEQ ID NO: 42063 - DNA, 20 bp, Artificial Sequence
  Description of Artificial Sequence: Synthetic oligonucleotide
  Target: ATXN2; (+) strand; PAM type: NRG; PAM sequence: GAG
ggagaattgcttgaatccgg

SEQ ID NO: 42064 - DNA, 20 bp, Artificial Sequence
  Description of Artificial Sequence: Synthetic oligonucleotide
  Target: ATXN2; (+) strand; PAM type: NRG; PAM sequence: AGG
gagaattgcttgaatccggg

SEQ ID NO: 42065 - DNA, 20 bp, Artificial Sequence
  Description of Artificial Sequence: Synthetic oligonucleotide
  Target: ATXN2; (+) strand; PAM type: NRG; PAM sequence: TAG
ttgcttgaatccgggaggtg

SEQ ID NO: 42066 - DNA, 20 bp, Artificial Sequence
  Description of Artificial Sequence: Synthetic oligonucleotide
  Target: ATXN2; (+) strand; PAM type: NRG; PAM sequence: AGG
tgcttgaatccgggaggtgt

SEQ ID NO: 42067 - DNA, 20 bp, Artificial Sequence
  Description of Artificial Sequence: Synthetic oligonucleotide
  Target: ATXN2; (+) strand; PAM type: NRG; PAM sequence: GGG
gcttgaatccgggaggtgta

SEQ ID NO: 42068 - DNA, 20 bp, Artificial Sequence
  Description of Artificial Sequence: Synthetic oligonucleotide
  Target: ATXN2; (+) strand; PAM type: NRG; PAM sequence: CAG
aatccgggaggtgtagggcg

SEQ ID NO: 42069 - DNA, 20 bp, Artificial Sequence
  Description of Artificial Sequence: Synthetic oligonucleotide
  Target: ATXN2; (+) strand; PAM type: NRG; PAM sequence: GAG
cgggaggtgtagggcgcagt

SEQ ID NO: 42070 - DNA, 20 bp, Artificial Sequence
  Description of Artificial Sequence: Synthetic oligonucleotide
  Target: ATXN2; (+) strand; PAM type: NRG; PAM sequence: AAG
ggtgtagggcgcagtgagcc

SEQ ID NO: 42071 - DNA, 20 bp, Artificial Sequence
  Description of Artificial Sequence: Synthetic oligonucleotide
  Target: ATXN2; (+) strand; PAM type: NRG; PAM sequence: CAG
aagatcacaccactacgctc

SEQ ID NO: 42072 - DNA, 20 bp, Artificial Sequence
  Description of Artificial Sequence: Synthetic oligonucleotide
  Target: ATXN2; (+) strand; PAM type: NRG; PAM sequence: TGG
cacaccactacgctccagcc

SEQ ID NO: 42073 - DNA, 20 bp, Artificial Sequence
  Description of Artificial Sequence: Synthetic oligonucleotide
  Target: ATXN2; (+) strand; PAM type: NRG; PAM sequence: GGG
acaccactacgctccagcct

SEQ ID NO: 42074 - DNA, 20 bp, Artificial Sequence
  Description of Artificial Sequence: Synthetic oligonucleotide
  Target: ATXN2; (+) strand; PAM type: NRG; PAM sequence: AAG
acgctccagcctgggcaaca

SEQ ID NO: 42075 - DNA, 20 bp, Artificial Sequence
  Description of Artificial Sequence: Synthetic oligonucleotide
  Target: ATXN2; (+) strand; PAM type: NRG; PAM sequence: GAG
tccagcctgggcaacaaagt

SEQ ID NO: 42076 - DNA, 20 bp, Artificial Sequence
  Description of Artificial Sequence: Synthetic oligonucleotide
  Target: ATXN2; (+) strand; PAM type: NRG; PAM sequence: AAG
acaaaacaaaacaaaaaaaa

SEQ ID NO: 42077 - DNA, 20 bp, Artificial Sequence
  Description of Artificial Sequence: Synthetic oligonucleotide
  Target: ATXN2; (+) strand; PAM type: NRG; PAM sequence: AGG
caaaacaaaacaaaaaaaaa

SEQ ID NO: 42078 - DNA, 20 bp, Artificial Sequence
  Description of Artificial Sequence: Synthetic oligonucleotide
  Target: ATXN2; (+) strand; PAM type: NRG; PAM sequence: AAG
aacaaaacaaaaaaaaaagg

SEQ ID NO: 42079 - DNA, 20 bp, Artificial Sequence
  Description of Artificial Sequence: Synthetic oligonucleotide
  Target: ATXN2; (+) strand; PAM type: NRG; PAM sequence: AAG
aaaaaaaaaggaagacatac

SEQ ID NO: 42080 - DNA, 20 bp, Artificial Sequence
  Description of Artificial Sequence: Synthetic oligonucleotide
  Target: ATXN2; (+) strand; PAM type: NRG; PAM sequence: AGG
aaaaaaaaggaagacataca

SEQ ID NO: 42081 - DNA, 20 bp, Artificial Sequence
  Description of Artificial Sequence: Synthetic oligonucleotide
  Target: ATXN2; (+) strand; PAM type: NRG; PAM sequence: CAG
aaaaggaagacatacaaggc

SEQ ID NO: 42082 - DNA, 20 bp, Artificial Sequence
  Description of Artificial Sequence: Synthetic oligonucleotide
  Target: ATXN2; (+) strand; PAM type: NRG; PAM sequence: AGG
aaaggaagacatacaaggcc

SEQ ID NO: 42083 - DNA, 20 bp, Artificial Sequence
  Description of Artificial Sequence: Synthetic oligonucleotide
  Target: ATXN2; (+) strand; PAM type: NRG; PAM sequence: CAG
aagacatacaaggccaggtg

SEQ ID NO: 42084 - DNA, 20 bp, Artificial Sequence
  Description of Artificial Sequence: Synthetic oligonucleotide
  Target: ATXN2; (+) strand; PAM type: NRG; PAM sequence: TGG
acatacaaggccaggtgcag

SEQ ID NO: 42085 - DNA, 20 bp, Artificial Sequence
  Description of Artificial Sequence: Synthetic oligonucleotide
  Target: ATXN2; (+) strand; PAM type: NRG; PAM sequence: CAG
gtggctcacaactataattt

SEQ ID NO: 42086 - DNA, 20 bp, Artificial Sequence
  Description of Artificial Sequence: Synthetic oligonucleotide
  Target: ATXN2; (+) strand; PAM type: NRG; PAM sequence: TGG
caactataatttcagcattt

SEQ ID NO: 42087 - DNA, 20 bp, Artificial Sequence
  Description of Artificial Sequence: Synthetic oligonucleotide
  Target: ATXN2; (+) strand; PAM type: NRG; PAM sequence: GGG
aactataatttcagcatttt

SEQ ID NO: 42088 - DNA, 20 bp, Artificial Sequence
  Description of Artificial Sequence: Synthetic oligonucleotide
  Target: ATXN2; (+) strand; PAM type: NRG; PAM sequence: AAG
tataatttcagcattttggg

SEQ ID NO: 42089 - DNA, 20 bp, Artificial Sequence
  Description of Artificial Sequence: Synthetic oligonucleotide
  Target: ATXN2; (+) strand; PAM type: NRG; PAM sequence: AAG
tttcagcattttgggaagcc

SEQ ID NO: 42090 - DNA, 20 bp, Artificial Sequence
  Description of Artificial Sequence: Synthetic oligonucleotide
  Target: ATXN2; (+) strand; PAM type: NRG; PAM sequence: AGG
ttcagcattttgggaagcca

SEQ ID NO: 42091 - DNA, 20 bp, Artificial Sequence
  Description of Artificial Sequence: Synthetic oligonucleotide
  Target: ATXN2; (+) strand; PAM type: NRG; PAM sequence: TGG
agcattttgggaagccaagg

SEQ ID NO: 42092 - DNA, 20 bp, Artificial Sequence
  Description of Artificial Sequence: Synthetic oligonucleotide
  Target: ATXN2; (+) strand; PAM type: NRG; PAM sequence: GGG
gcattttgggaagccaaggt

SEQ ID NO: 42093 - DNA, 20 bp, Artificial Sequence
  Description of Artificial Sequence: Synthetic oligonucleotide
  Target: ATXN2; (+) strand; PAM type: NRG; PAM sequence: GAG
attttgggaagccaaggtgg

SEQ ID NO: 42094 - DNA, 20 bp, Artificial Sequence
  Description of Artificial Sequence: Synthetic oligonucleotide
  Target: ATXN2; (+) strand; PAM type: NRG; PAM sequence: AGG
ttttgggaagccaaggtggg

SEQ ID NO: 42095 - DNA, 20 bp, Artificial Sequence
  Description of Artificial Sequence: Synthetic oligonucleotide
  Target: ATXN2; (+) strand; PAM type: NRG; PAM sequence: GAG
ccaaggtgggaggattgctt

SEQ ID NO: 42096 - DNA, 20 bp, Artificial Sequence
  Description of Artificial Sequence: Synthetic oligonucleotide
  Target: ATXN2; (+) strand; PAM type: NRG; PAM sequence: CAG
gtgggaggattgcttgagcc

SEQ ID NO: 42097 - DNA, 20 bp, Artificial Sequence
  Description of Artificial Sequence: Synthetic oligonucleotide
  Target: ATXN2; (+) strand; PAM type: NRG; PAM sequence: AGG
tgggaggattgcttgagccc

SEQ ID NO: 42098 - DNA, 20 bp, Artificial Sequence
  Description of Artificial Sequence: Synthetic oligonucleotide
  Target: ATXN2; (+) strand; PAM type: NRG; PAM sequence: GAG
ggaggattgcttgagcccag

SEQ ID NO: 42099 - DNA, 20 bp, Artificial Sequence
  Description of Artificial Sequence: Synthetic oligonucleotide
  Target: ATXN2; (+) strand; PAM type: NRG; PAM sequence: GAG
ttgcttgagcccaggagttc

SEQ ID NO: 42100 - DNA, 20 bp, Artificial Sequence
  Description of Artificial Sequence: Synthetic oligonucleotide
  Target: ATXN2; (+) strand; PAM type: NRG; PAM sequence: CAG
tgagcccaggagttcgagac

SEQ ID NO: 42101 - DNA, 20 bp, Artificial Sequence
  Description of Artificial Sequence: Synthetic oligonucleotide
  Target: ATXN2; (+) strand; PAM type: NRG; PAM sequence: TGG
ccaggagttcgagaccagcc

SEQ ID NO: 42102 - DNA, 20 bp, Artificial Sequence
  Description of Artificial Sequence: Synthetic oligonucleotide
  Target: ATXN2; (+) strand; PAM type: NRG; PAM sequence: GGG
caggagttcgagaccagcct

SEQ ID NO: 42103 - DNA, 20 bp, Artificial Sequence
  Description of Artificial Sequence: Synthetic oligonucleotide
  Target: ATXN2; (+) strand; PAM type: NRG; PAM sequence: CAG
cgagaccagcctgggccaaa

SEQ ID NO: 42104 - DNA, 20 bp, Artificial Sequence
  Description of Artificial Sequence: Synthetic oligonucleotide
  Target: ATXN2; (+) strand; PAM type: NRG; PAM sequence: AAG
accagcctgggccaaacagc

SEQ ID NO: 42105 - DNA, 20 bp, Artificial Sequence
  Description of Artificial Sequence: Synthetic oligonucleotide
  Target: ATXN2; (+) strand; PAM type: NRG; PAM sequence: TGG
acctcatcgttatttatgaa

SEQ ID NO: 42106 - DNA, 20 bp, Artificial Sequence
  Description of Artificial Sequence: Synthetic oligonucleotide
  Target: ATXN2; (+) strand; PAM type: NRG; PAM sequence: CAG
cgttatttatgaatggcaaa

SEQ ID NO: 42107 - DNA, 20 bp, Artificial Sequence
  Description of Artificial Sequence: Synthetic oligonucleotide
  Target: ATXN2; (+) strand; PAM type: NRG; PAM sequence: AGG
gttatttatgaatggcaaac

SEQ ID NO: 42108 - DNA, 20 bp, Artificial Sequence
  Description of Artificial Sequence: Synthetic oligonucleotide
  Target: ATXN2; (+) strand; PAM type: NRG; PAM sequence: AAG
aatggcaaacaggtatatga

SEQ ID NO: 42109 - DNA, 20 bp, Artificial Sequence
  Description of Artificial Sequence: Synthetic oligonucleotide
  Target: ATXN2; (+) strand; PAM type: NRG; PAM sequence: AGG
atggcaaacaggtatatgaa

SEQ ID NO: 42110 - DNA, 20 bp, Artificial Sequence
  Description of Artificial Sequence: Synthetic oligonucleotide
  Target: ATXN2; (+) strand; PAM type: NRG; PAM sequence: CAG
tattcaatactactgatcac

SEQ ID NO: 42111 - DNA, 20 bp, Artificial Sequence
  Description of Artificial Sequence: Synthetic oligonucleotide
  Target: ATXN2; (+) strand; PAM type: NRG; PAM sequence: TGG
actactgatcaccagaaaaa

SEQ ID NO: 42112 - DNA, 20 bp, Artificial Sequence
  Description of Artificial Sequence: Synthetic oligonucleotide
  Target: ATXN2; (+) strand; PAM type: NRG; PAM sequence: AAG
atggaaattaaaactacaac

SEQ ID NO: 42113 - DNA, 20 bp, Artificial Sequence
  Description of Artificial Sequence: Synthetic oligonucleotide
  Target: ATXN2; (+) strand; PAM type: NRG; PAM sequence: CAG
aacaagatatcatctcaccc

SEQ ID NO: 42114 - DNA, 20 bp, Artificial Sequence
  Description of Artificial Sequence: Synthetic oligonucleotide
  Target: ATXN2; (+) strand; PAM type: NRG; PAM sequence: TGG
tcatctcaccccagttaaaa

SEQ ID NO: 42115 - DNA, 20 bp, Artificial Sequence
  Description of Artificial Sequence: Synthetic oligonucleotide
  Target: ATXN2; (+) strand; PAM type: NRG; PAM sequence: AAG
ttaaaatggcttttatccaa

SEQ ID NO: 42116 - DNA, 20 bp, Artificial Sequence
  Description of Artificial Sequence: Synthetic oligonucleotide
  Target: ATXN2; (+) strand; PAM type: NRG; PAM sequence: CAG
aatggcttttatccaaaaga

SEQ ID NO: 42117 - DNA, 20 bp, Artificial Sequence
  Description of Artificial Sequence: Synthetic oligonucleotide
  Target: ATXN2; (+) strand; PAM type: NRG; PAM sequence: AGG
atggcttttatccaaaagac

SEQ ID NO: 42118 - DNA, 20 bp, Artificial Sequence
  Description of Artificial Sequence: Synthetic oligonucleotide
  Target: ATXN2; (+) strand; PAM type: NRG; PAM sequence: TGG
agacaggcaataacaaatgc

SEQ ID NO: 42119 - DNA, 20 bp, Artificial Sequence
  Description of Artificial Sequence: Synthetic oligonucleotide
  Target: ATXN2; (+) strand; PAM type: NRG; PAM sequence: TGG
aacaaatgctggtaacgatg

SEQ ID NO: 42120 - DNA, 20 bp, Artificial Sequence
  Description of Artificial Sequence: Synthetic oligonucleotide
  Target: ATXN2; (+) strand; PAM type: NRG; PAM sequence: AAG
tgctggtaacgatgtggata

SEQ ID NO: 42121 - DNA, 20 bp, Artificial Sequence
  Description of Artificial Sequence: Synthetic oligonucleotide
  Target: ATXN2; (+) strand; PAM type: NRG; PAM sequence: AGG
gctggtaacgatgtggataa

SEQ ID NO: 42122 - DNA, 20 bp, Artificial Sequence
  Description of Artificial Sequence: Synthetic oligonucleotide
  Target: ATXN2; (+) strand; PAM type: NRG; PAM sequence: GGG
ctggtaacgatgtggataaa

SEQ ID NO: 42123 - DNA, 20 bp, Artificial Sequence
  Description of Artificial Sequence: Synthetic oligonucleotide
  Target: ATXN2; (+) strand; PAM type: NRG; PAM sequence: GGG
tggtaacgatgtggataaag

SEQ ID NO: 42124 - DNA, 20 bp, Artificial Sequence
  Description of Artificial Sequence: Synthetic oligonucleotide
  Target: ATXN2; (+) strand; PAM type: NRG; PAM sequence: TGG
ggggaaccttcacacactgt

SEQ ID NO: 42125 - DNA, 20 bp, Artificial Sequence
  Description of Artificial Sequence: Synthetic oligonucleotide
  Target: ATXN2; (+) strand; PAM type: NRG; PAM sequence: TGG
gaaccttcacacactgttgg

SEQ ID NO: 42126 - DNA, 20 bp, Artificial Sequence
  Description of Artificial Sequence: Synthetic oligonucleotide
  Target: ATXN2; (+) strand; PAM type: NRG; PAM sequence: TGG
ctgttggtggacatgtaaat

SEQ ID NO: 42127 - DNA, 20 bp, Artificial Sequence
  Description of Artificial Sequence: Synthetic oligonucleotide
  Target: ATXN2; (+) strand; PAM type: NRG; PAM sequence: TGG
gtaaattggtaaaaccacta

SEQ ID NO: 42128 - DNA, 20 bp, Artificial Sequence
  Description of Artificial Sequence: Synthetic oligonucleotide
  Target: ATXN2; (+) strand; PAM type: NRG; PAM sequence: GAG
aaattggtaaaaccactatg

SEQ ID NO: 42129 - DNA, 20 bp, Artificial Sequence
  Description of Artificial Sequence: Synthetic oligonucleotide
  Target: ATXN2; (+) strand; PAM type: NRG; PAM sequence: CAG
ggtaaaaccactatggagaa

SEQ ID NO: 42130 - DNA, 20 bp, Artificial Sequence
  Description of Artificial Sequence: Synthetic oligonucleotide
  Target: ATXN2; (+) strand; PAM type: NRG; PAM sequence: TGG
aaccactatggagaacagta

SEQ ID NO: 42131 - DNA, 20 bp, Artificial Sequence
  Description of Artificial Sequence: Synthetic oligonucleotide
  Target: ATXN2; (+) strand; PAM type: NRG; PAM sequence: TAG
attcctcaaaaaactaaaaa

SEQ ID NO: 42132 - DNA, 20 bp, Artificial Sequence
  Description of Artificial Sequence: Synthetic oligonucleotide
  Target: ATXN2; (+) strand; PAM type: NRG; PAM sequence: GAG
tcctcaaaaaactaaaaata

SEQ ID NO: 42133 - DNA, 20 bp, Artificial Sequence
  Description of Artificial Sequence: Synthetic oligonucleotide
  Target: ATXN2; (+) strand; PAM type: NRG; PAM sequence: CAG
aatagagctaccatatgatc

SEQ ID NO: 42134 - DNA, 20 bp, Artificial Sequence
  Description of Artificial Sequence: Synthetic oligonucleotide
  Target: ATXN2; (+) strand; PAM type: NRG; PAM sequence: TAG
tgatccagcaattgcactgc

SEQ ID NO: 42135 - DNA, 20 bp, Artificial Sequence
  Description of Artificial Sequence: Synthetic oligonucleotide
  Target: ATXN2; (+) strand; PAM type: NRG; PAM sequence: AGG
gatccagcaattgcactgct

SEQ ID NO: 42136 - DNA, 20 bp, Artificial Sequence
  Description of Artificial Sequence: Synthetic oligonucleotide
  Target: ATXN2; (+) strand; PAM type: NRG; PAM sequence: CAG
tgcactgctaggtatatact

SEQ ID NO: 42137 - DNA, 20 bp, Artificial Sequence
  Description of Artificial Sequence: Synthetic oligonucleotide
  Target: ATXN2; (+) strand; PAM type: NRG; PAM sequence: AAG
ctgctaggtatatactcaga

SEQ ID NO: 42138 - DNA, 20 bp, Artificial Sequence
  Description of Artificial Sequence: Synthetic oligonucleotide
  Target: ATXN2; (+) strand; PAM type: NRG; PAM sequence: AGG
tgctaggtatatactcagaa

SEQ ID NO: 42139 - DNA, 20 bp, Artificial Sequence
  Description of Artificial Sequence: Synthetic oligonucleotide
  Target: ATXN2; (+) strand; PAM type: NRG; PAM sequence: CAG
tatatactcagaaaggaaat

SEQ ID NO: 42140 - DNA, 20 bp, Artificial Sequence
  Description of Artificial Sequence: Synthetic oligonucleotide
  Target: ATXN2; (+) strand; PAM type: NRG; PAM sequence: AAG
gaaaggaaatcagtttattg

SEQ ID NO: 42141 - DNA, 20 bp, Artificial Sequence
  Description of Artificial Sequence: Synthetic oligonucleotide
  Target: ATXN2; (+) strand; PAM type: NRG; PAM sequence: AGG
aaaggaaatcagtttattga

SEQ ID NO: 42142 - DNA, 20 bp, Artificial Sequence
  Description of Artificial Sequence: Synthetic oligonucleotide
  Target: ATXN2; (+) strand; PAM type: NRG; PAM sequence: CGG
ctgcactcccatgtttacta

SEQ ID NO: 42143 - DNA, 20 bp, Artificial Sequence
  Description of Artificial Sequence: Synthetic oligonucleotide
  Target: ATXN2; (+) strand; PAM type: NRG; PAM sequence: CAG
ctacggcactatatacacaa

SEQ ID NO: 42144 - DNA, 20 bp, Artificial Sequence
  Description of Artificial Sequence: Synthetic oligonucleotide
  Target: ATXN2; (+) strand; PAM type: NRG; PAM sequence: AAG
gcactatatacacaacagcc

SEQ ID NO: 42145 - DNA, 20 bp, Artificial Sequence
  Description of Artificial Sequence: Synthetic oligonucleotide
  Target: ATXN2; (+) strand; PAM type: NRG; PAM sequence: TGG
tatacacaacagccaagatt

SEQ ID NO: 42146 - DNA, 20 bp, Artificial Sequence
  Description of Artificial Sequence: Synthetic oligonucleotide
  Target: ATXN2; (+) strand; PAM type: NRG; PAM sequence: CAG
tcaacctacgtgtccactga

SEQ ID NO: 42147 - DNA, 20 bp, Artificial Sequence
  Description of Artificial Sequence: Synthetic oligonucleotide
  Target: ATXN2; (+) strand; PAM type: NRG; PAM sequence: TGG
cgtgtccactgacagacaaa

SEQ ID NO: 42148 - DNA, 20 bp, Artificial Sequence
  Description of Artificial Sequence: Synthetic oligonucleotide
  Target: ATXN2; (+) strand; PAM type: NRG; PAM sequence: GAG
tgtccactgacagacaaatg

SEQ ID NO: 42149 - DNA, 20 bp, Artificial Sequence
  Description of Artificial Sequence: Synthetic oligonucleotide
  Target: ATXN2; (+) strand; PAM type: NRG; PAM sequence: AAG
cactgacagacaaatggaga

SEQ ID NO: 42150 - DNA, 20 bp, Artificial Sequence
  Description of Artificial Sequence: Synthetic oligonucleotide
  Target: ATXN2; (+) strand; PAM type: NRG; PAM sequence: TGG
acaaatggagaaagaaaatg

SEQ ID NO: 42151 - DNA, 20 bp, Artificial Sequence
  Description of Artificial Sequence: Synthetic oligonucleotide
  Target: ATXN2; (+) strand; PAM type: NRG; PAM sequence: TAG
aatgtggtatatatacacaa

SEQ ID NO: 42152 - DNA, 20 bp, Artificial Sequence
  Description of Artificial Sequence: Synthetic oligonucleotide
  Target: ATXN2; (+) strand; PAM type: NRG; PAM sequence: CAG
atacacaatagattaccatt

SEQ ID NO: 42153 - DNA, 20 bp, Artificial Sequence
  Description of Artificial Sequence: Synthetic oligonucleotide
  Target: ATXN2; (+) strand; PAM type: NRG; PAM sequence: AAG
attaccattcagccataaaa

SEQ ID NO: 42154 - DNA, 20 bp, Artificial Sequence
  Description of Artificial Sequence: Synthetic oligonucleotide
  Target: ATXN2; (+) strand; PAM type: NRG; PAM sequence: GAG
attcagccataaaaaagaat

SEQ ID NO: 42155 - DNA, 20 bp, Artificial Sequence
  Description of Artificial Sequence: Synthetic oligonucleotide
  Target: ATXN2; (+) strand; PAM type: NRG; PAM sequence: CAG
gaatgagatcctgtcatttg

SEQ ID NO: 42156 - DNA, 20 bp, Artificial Sequence
  Description of Artificial Sequence: Synthetic oligonucleotide
  Target: ATXN2; (+) strand; PAM type: NRG; PAM sequence: TAG
tcctgtcatttgcagcaatg

SEQ ID NO: 42157 - DNA, 20 bp, Artificial Sequence
  Description of Artificial Sequence: Synthetic oligonucleotide
  Target: ATXN2; (+) strand; PAM type: NRG; PAM sequence: TGG
gtcatttgcagcaatgtaga

SEQ ID NO: 42158 - DNA, 20 bp, Artificial Sequence
  Description of Artificial Sequence: Synthetic oligonucleotide
  Target: ATXN2; (+) strand; PAM type: NRG; PAM sequence: TGG
tgcagcaatgtagatggcac

SEQ ID NO: 42159 - DNA, 20 bp, Artificial Sequence
  Description of Artificial Sequence: Synthetic oligonucleotide
  Target: ATXN2; (+) strand; PAM type: NRG; PAM sequence: GAG
cagcaatgtagatggcactg

SEQ ID NO: 42160 - DNA, 20 bp, Artificial Sequence
  Description of Artificial Sequence: Synthetic oligonucleotide
  Target: ATXN2; (+) strand; PAM type: NRG; PAM sequence: AGG
agcaatgtagatggcactgg

SEQ ID NO: 42161 - DNA, 20 bp, Artificial Sequence
  Description of Artificial Sequence: Synthetic oligonucleotide
  Target: ATXN2; (+) strand; PAM type: NRG; PAM sequence: AAG
gcactggaggacattatgtt

SEQ ID NO: 42162 - DNA, 20 bp, Artificial Sequence
  Description of Artificial Sequence: Synthetic oligonucleotide
  Target: ATXN2; (+) strand; PAM type: NRG; PAM sequence: AAG
gacattatgttaagtaaaat

SEQ ID NO: 42163 - DNA, 20 bp, Artificial Sequence
  Description of Artificial Sequence: Synthetic oligonucleotide
  Target: ATXN2; (+) strand; PAM type: NRG; PAM sequence: CAG
ttatgttaagtaaaataagc

SEQ ID NO: 42164 - DNA, 20 bp, Artificial Sequence
  Description of Artificial Sequence: Synthetic oligonucleotide
  Target: ATXN2; (+) strand; PAM type: NRG; PAM sequence: AGG
tatgttaagtaaaataagcc

SEQ ID NO: 42165 - DNA, 20 bp, Artificial Sequence
  Description of Artificial Sequence: Synthetic oligonucleotide
  Target: ATXN2; (+) strand; PAM type: NRG; PAM sequence: GGG
atgttaagtaaaataagcca

SEQ ID NO: 42166 - DNA, 20 bp, Artificial Sequence
  Description of Artificial Sequence: Synthetic oligonucleotide
  Target: ATXN2; (+) strand; PAM type: NRG; PAM sequence: CAG
taagtaaaataagccaggga

SEQ ID NO: 42167 - DNA, 20 bp, Artificial Sequence
  Description of Artificial Sequence: Synthetic oligonucleotide
  Target: ATXN2; (+) strand; PAM type: NRG; PAM sequence: AAG
taaaataagccagggacaga

SEQ ID NO: 42168 - DNA, 20 bp, Artificial Sequence
  Description of Artificial Sequence: Synthetic oligonucleotide
  Target: ATXN2; (+) strand; PAM type: NRG; PAM sequence: CAG
tgcatattcttactcgtttg

SEQ ID NO: 42169 - DNA, 20 bp, Artificial Sequence
  Description of Artificial Sequence: Synthetic oligonucleotide
  Target: ATXN2; (+) strand; PAM type: NRG; PAM sequence: AGG
gcatattcttactcgtttgc

SEQ ID NO: 42170 - DNA, 20 bp, Artificial Sequence
  Description of Artificial Sequence: Synthetic oligonucleotide
  Target: ATXN2; (+) strand; PAM type: NRG; PAM sequence: TGG
aataaaaacaattgaacaca

SEQ ID NO: 42171 - DNA, 20 bp, Artificial Sequence
  Description of Artificial Sequence: Synthetic oligonucleotide
  Target: ATXN2; (+) strand; PAM type: NRG; PAM sequence: GAG
taaaaacaattgaacacatg

SEQ ID NO: 42172 - DNA, 20 bp, Artificial Sequence
  Description of Artificial Sequence: Synthetic oligonucleotide
  Target: ATXN2; (+) strand; PAM type: NRG; PAM sequence: TAG
aacaattgaacacatggaga

SEQ ID NO: 42173 - DNA, 20 bp, Artificial Sequence
  Description of Artificial Sequence: Synthetic oligonucleotide
  Target: ATXN2; (+) strand; PAM type: NRG; PAM sequence: CAG
aattgaacacatggagatag

SEQ ID NO: 42174 - DNA, 20 bp, Artificial Sequence
  Description of Artificial Sequence: Synthetic oligonucleotide
  Target: ATXN2; (+) strand; PAM type: NRG; PAM sequence: TGG
aacacatggagatagcagaa

SEQ ID NO: 42175 - DNA, 20 bp, Artificial Sequence
  Description of Artificial Sequence: Synthetic oligonucleotide
  Target: ATXN2; (+) strand; PAM type: NRG; PAM sequence: CAG
ggagatagcagaatggttac

SEQ ID NO: 42176 - DNA, 20 bp, Artificial Sequence
  Description of Artificial Sequence: Synthetic oligonucleotide
  Target: ATXN2; (+) strand; PAM type: NRG; PAM sequence: AAG
gatagcagaatggttaccag

SEQ ID NO: 42177 - DNA, 20 bp, Artificial Sequence
  Description of Artificial Sequence: Synthetic oligonucleotide
  Target: ATXN2; (+) strand; PAM type: NRG; PAM sequence: TGG
gcagaatggttaccagaagt

SEQ ID NO: 42178 - DNA, 20 bp, Artificial Sequence
  Description of Artificial Sequence: Synthetic oligonucleotide
  Target: ATXN2; (+) strand; PAM type: NRG; PAM sequence: GGG
cagaatggttaccagaagtt

SEQ ID NO: 42179 - DNA, 20 bp, Artificial Sequence
  Description of Artificial Sequence: Synthetic oligonucleotide
  Target: ATXN2; (+) strand; PAM type: NRG; PAM sequence: AAG
aatggttaccagaagttggg

SEQ ID NO: 42180 - DNA, 20 bp, Artificial Sequence
  Description of Artificial Sequence: Synthetic oligonucleotide
  Target: ATXN2; (+) strand; PAM type: NRG; PAM sequence: AGG
atggttaccagaagttggga

SEQ ID NO: 42181 - DNA, 20 bp, Artificial Sequence
  Description of Artificial Sequence: Synthetic oligonucleotide
  Target: ATXN2; (+) strand; PAM type: NRG; PAM sequence: GGG
tggttaccagaagttgggaa

SEQ ID NO: 42182 - DNA, 20 bp, Artificial Sequence
  Description of Artificial Sequence: Synthetic oligonucleotide
  Target: ATXN2; (+) strand; PAM type: NRG; PAM sequence: TGG
ccagaagttgggaagggtaa

SEQ ID NO: 42183 - DNA, 20 bp, Artificial Sequence
  Description of Artificial Sequence: Synthetic oligonucleotide
  Target: ATXN2; (+) strand; PAM type: NRG; PAM sequence: GGG
cagaagttgggaagggtaat

SEQ ID NO: 42184 - DNA, 20 bp, Artificial Sequence
  Description of Artificial Sequence: Synthetic oligonucleotide
  Target: ATXN2; (+) strand; PAM type: NRG; PAM sequence: GGG
agaagttgggaagggtaatg

SEQ ID NO: 42185 - DNA, 20 bp, Artificial Sequence
  Description of Artificial Sequence: Synthetic oligonucleotide
  Target: ATXN2; (+) strand; PAM type: NRG; PAM sequence: GAG
aagttgggaagggtaatggg

SEQ ID NO: 42186 - DNA, 20 bp, Artificial Sequence
  Description of Artificial Sequence: Synthetic oligonucleotide
  Target: ATXN2; (+) strand; PAM type: NRG; PAM sequence: AAG
ttgggaagggtaatggggag

SEQ ID NO: 42187 - DNA, 20 bp, Artificial Sequence
  Description of Artificial Sequence: Synthetic oligonucleotide
  Target: ATXN2; (+) strand; PAM type: NRG; PAM sequence: AAG
ggaagggtaatggggagaag

SEQ ID NO: 42188 - DNA, 20 bp, Artificial Sequence
  Description of Artificial Sequence: Synthetic oligonucleotide
  Target: ATXN2; (+) strand; PAM type: NRG; PAM sequence: AGG
gaagggtaatggggagaaga

SEQ ID NO: 42189 - DNA, 20 bp, Artificial Sequence
  Description of Artificial Sequence: Synthetic oligonucleotide
  Target: ATXN2; (+) strand; PAM type: NRG; PAM sequence: GGG
aagggtaatggggagaagaa

SEQ ID NO: 42190 - DNA, 20 bp, Artificial Sequence
  Description of Artificial Sequence: Synthetic oligonucleotide
  Target: ATXN2; (+) strand; PAM type: NRG; PAM sequence: GAG
atggggagaagaagggaaat

SEQ ID NO: 42191 - DNA, 20 bp, Artificial Sequence
  Description of Artificial Sequence: Synthetic oligonucleotide
  Target: ATXN2; (+) strand; PAM type: NRG; PAM sequence: AGG
tggggagaagaagggaaatg

SEQ ID NO: 42192 - DNA, 20 bp, Artificial Sequence
  Description of Artificial Sequence: Synthetic oligonucleotide
  Target: ATXN2; (+) strand; PAM type: NRG; PAM sequence: TAG
aagaagggaaatgaggtgat

SEQ ID NO: 42193 - DNA, 20 bp, Artificial Sequence
  Description of Artificial Sequence: Synthetic oligonucleotide
  Target: ATXN2; (+) strand; PAM type: NRG; PAM sequence: TGG
aagggaaatgaggtgattag

SEQ ID NO: 42194 - DNA, 20 bp, Artificial Sequence
  Description of Artificial Sequence: Synthetic oligonucleotide
  Target: ATXN2; (+) strand; PAM type: NRG; PAM sequence: GGG
agggaaatgaggtgattagt

SEQ ID NO: 42195 - DNA, 20 bp, Artificial Sequence
  Description of Artificial Sequence: Synthetic oligonucleotide
  Target: ATXN2; (+) strand; PAM type: NRG; PAM sequence: AAG
tgaggtgattagtgggtgca

SEQ ID NO: 42196 - DNA, 20 bp, Artificial Sequence
  Description of Artificial Sequence: Synthetic oligonucleotide
  Target: ATXN2; (+) strand; PAM type: NRG; PAM sequence: TAG
tagtgggtgcaaagaaaatt

SEQ ID NO: 42197 - DNA, 20 bp, Artificial Sequence
  Description of Artificial Sequence: Synthetic oligonucleotide
  Target: ATXN2; (+) strand; PAM type: NRG; PAM sequence: AAG
gggtgcaaagaaaatttaga

SEQ ID NO: 42198 - DNA, 20 bp, Artificial Sequence
  Description of Artificial Sequence: Synthetic oligonucleotide
  Target: ATXN2; (+) strand; PAM type: NRG; PAM sequence: AAG
aaaatttagaaagaacgaat

SEQ ID NO: 42199 - DNA, 20 bp, Artificial Sequence
  Description of Artificial Sequence: Synthetic oligonucleotide
  Target: ATXN2; (+) strand; PAM type: NRG; PAM sequence: CAG
aagaacgaataagaactctg

SEQ ID NO: 42200 - DNA, 20 bp, Artificial Sequence
  Description of Artificial Sequence: Synthetic oligonucleotide
  Target: ATXN2; (+) strand; PAM type: NRG; PAM sequence: AGG
agaacgaataagaactctgc

SEQ ID NO: 42201 - DNA, 20 bp, Artificial Sequence
  Description of Artificial Sequence: Synthetic oligonucleotide
  Target: ATXN2; (+) strand; PAM type: NRG; PAM sequence: CGG
gaataagaactctgcaggac

SEQ ID NO: 42202 - DNA, 20 bp, Artificial Sequence
  Description of Artificial Sequence: Synthetic oligonucleotide
  Target: ATXN2; (+) strand; PAM type: NRG; PAM sequence: GAG
ataagaactctgcaggaccg

SEQ ID NO: 42203 - DNA, 20 bp, Artificial Sequence
  Description of Artificial Sequence: Synthetic oligonucleotide
  Target: ATXN2; (+) strand; PAM type: NRG; PAM sequence: AGG
taagaactctgcaggaccgg

SEQ ID NO: 42204 - DNA, 20 bp, Artificial Sequence
  Description of Artificial Sequence: Synthetic oligonucleotide
  Target: ATXN2; (+) strand; PAM type: NRG; PAM sequence: CAG
gaactctgcaggaccggagg

SEQ ID NO: 42205 - DNA, 20 bp, Artificial Sequence
  Description of Artificial Sequence: Synthetic oligonucleotide
  Target: ATXN2; (+) strand; PAM type: NRG; PAM sequence: AAG
gaccggaggcagaaatgaaa

SEQ ID NO: 42206 - DNA, 20 bp, Artificial Sequence
  Description of Artificial Sequence: Synthetic oligonucleotide
  Target: ATXN2; (+) strand; PAM type: NRG; PAM sequence: AAG
aatgatttaaaataatttta

SEQ ID NO: 42207 - DNA, 20 bp, Artificial Sequence
  Description of Artificial Sequence: Synthetic oligonucleotide
  Target: ATXN2; (+) strand; PAM type: NRG; PAM sequence: AGG
atgatttaaaataattttaa

SEQ ID NO: 42208 - DNA, 20 bp, Artificial Sequence
  Description of Artificial Sequence: Synthetic oligonucleotide
  Target: ATXN2; (+) strand; PAM type: NRG; PAM sequence: CGG
tttaaaataattttaaaggc

SEQ ID NO: 42209 - DNA, 20 bp, Artificial Sequence
  Description of Artificial Sequence: Synthetic oligonucleotide
  Target: ATXN2; (+) strand; PAM type: NRG; PAM sequence: GGG
ttaaaataattttaaaggcc

SEQ ID NO: 42210 - DNA, 20 bp, Artificial Sequence
  Description of Artificial Sequence: Synthetic oligonucleotide
  Target: ATXN2; (+) strand; PAM type: NRG; PAM sequence: CGG
ataattttaaaggccgggca

SEQ ID NO: 42211 - DNA, 20 bp, Artificial Sequence
  Description of Artificial Sequence: Synthetic oligonucleotide
  Target: ATXN2; (+) strand; PAM type: NRG; PAM sequence: TGG
attttaaaggccgggcacgg

SEQ ID NO: 42212 - DNA, 20 bp, Artificial Sequence
  Description of Artificial Sequence: Synthetic oligonucleotide
  Target: ATXN2; (+) strand; PAM type: NRG; PAM sequence: CAG
gtggctcacgcctgcaaccc

SEQ ID NO: 42213 - DNA, 20 bp, Artificial Sequence
  Description of Artificial Sequence: Synthetic oligonucleotide
  Target: ATXN2; (+) strand; PAM type: NRG; PAM sequence: TGG
cgcctgcaaccccagcactt

SEQ ID NO: 42214 - DNA, 20 bp, Artificial Sequence
  Description of Artificial Sequence: Synthetic oligonucleotide
  Target: ATXN2; (+) strand; PAM type: NRG; PAM sequence: GGG
gcctgcaaccccagcacttt

SEQ ID NO: 42215 - DNA, 20 bp, Artificial Sequence
  Description of Artificial Sequence: Synthetic oligonucleotide
  Target: ATXN2; (+) strand; PAM type: NRG; PAM sequence: GAG
ctgcaaccccagcactttgg

SEQ ID NO: 42216 - DNA, 20 bp, Artificial Sequence
  Description of Artificial Sequence: Synthetic oligonucleotide
  Target: ATXN2; (+) strand; PAM type: NRG; PAM sequence: AGG
tgcaaccccagcactttggg

SEQ ID NO: 42217 - DNA, 20 bp, Artificial Sequence
  Description of Artificial Sequence: Synthetic oligonucleotide
  Target: ATXN2; (+) strand; PAM type: NRG; PAM sequence: TGG
cccagcactttgggaggctg

SEQ ID NO: 42218 - DNA, 20 bp, Artificial Sequence
  Description of Artificial Sequence: Synthetic oligonucleotide
  Target: ATXN2; (+) strand; PAM type: NRG; PAM sequence: CAG
agcactttgggaggctgtgg

SEQ ID NO: 42219 - DNA, 20 bp, Artificial Sequence
  Description of Artificial Sequence: Synthetic oligonucleotide
  Target: ATXN2; (+) strand; PAM type: NRG; PAM sequence: CGG
ctttgggaggctgtggcagc

SEQ ID NO: 42220 - DNA, 20 bp, Artificial Sequence
  Description of Artificial Sequence: Synthetic oligonucleotide
  Target: ATXN2; (+) strand; PAM type: NRG; PAM sequence: AAG
ggctgtggcagccggatcac

SEQ ID NO: 42221 - DNA, 20 bp, Artificial Sequence
  Description of Artificial Sequence: Synthetic oligonucleotide
  Target: ATXN2; (+) strand; PAM type: NRG; PAM sequence: AGG
gctgtggcagccggatcaca

SEQ ID NO: 42222 - DNA, 20 bp, Artificial Sequence
  Description of Artificial Sequence: Synthetic oligonucleotide
  Target: ATXN2; (+) strand; PAM type: NRG; PAM sequence: AAG
ggcagccggatcacaaggtc

SEQ ID NO: 42223 - DNA, 20 bp, Artificial Sequence
  Description of Artificial Sequence: Synthetic oligonucleotide
  Target: ATXN2; (+) strand; PAM type: NRG; PAM sequence: GAG
cagccggatcacaaggtcaa

SEQ ID NO: 42224 - DNA, 20 bp, Artificial Sequence
  Description of Artificial Sequence: Synthetic oligonucleotide
  Target: ATXN2; (+) strand; PAM type: NRG; PAM sequence: AAG
gatcacaaggtcaagagatc

SEQ ID NO: 42225 - DNA, 20 bp, Artificial Sequence
  Description of Artificial Sequence: Synthetic oligonucleotide
  Target: ATXN2; (+) strand; PAM type: NRG; PAM sequence: CAG
tcaagagatcaagaccatcc

SEQ ID NO: 42226 - DNA, 20 bp, Artificial Sequence
  Description of Artificial Sequence: Synthetic oligonucleotide
  Target: ATXN2; (+) strand; PAM type: NRG; PAM sequence: TAG
caagaccatcccagccaaca

SEQ ID NO: 42227 - DNA, 20 bp, Artificial Sequence
  Description of Artificial Sequence: Synthetic oligonucleotide
  Target: ATXN2; (+) strand; PAM type: NRG; PAM sequence: TAG
tctactaaaaatacaaaaat

SEQ ID NO: 42228 - DNA, 20 bp, Artificial Sequence
  Description of Artificial Sequence: Synthetic oligonucleotide
  Target: ATXN2; (+) strand; PAM type: NRG; PAM sequence: TGG
ctaaaaatacaaaaattagc

SEQ ID NO: 42229 - DNA, 20 bp, Artificial Sequence
  Description of Artificial Sequence: Synthetic oligonucleotide
  Target: ATXN2; (+) strand; PAM type: NRG; PAM sequence: GGG
taaaaatacaaaaattagct

SEQ ID NO: 42230 - DNA, 20 bp, Artificial Sequence
  Description of Artificial Sequence: Synthetic oligonucleotide
  Target: ATXN2; (+) strand; PAM type: NRG; PAM sequence: TGG
atacaaaaattagctgggcg

SEQ ID NO: 42231 - DNA, 20 bp, Artificial Sequence
  Description of Artificial Sequence: Synthetic oligonucleotide
  Target: ATXN2; (+) strand; PAM type: NRG; PAM sequence: TGG
caaaaattagctgggcgtgg

SEQ ID NO: 42232 - DNA, 20 bp, Artificial Sequence
  Description of Artificial Sequence: Synthetic oligonucleotide
  Target: ATXN2; (+) strand; PAM type: NRG; PAM sequence: TAG
ggcgtggtggcacgtgcctg

SEQ ID NO: 42233 - DNA, 20 bp, Artificial Sequence
  Description of Artificial Sequence: Synthetic oligonucleotide
  Target: ATXN2; (+) strand; PAM type: NRG; PAM sequence: CAG
gtggcacgtgcctgtagttc

SEQ ID NO: 42234 - DNA, 20 bp, Artificial Sequence
  Description of Artificial Sequence: Synthetic oligonucleotide
  Target: ATXN2; (+) strand; PAM type: NRG; PAM sequence: TAG
cacgtgcctgtagttccagc

SEQ ID NO: 42235 - DNA, 20 bp, Artificial Sequence
  Description of Artificial Sequence: Synthetic oligonucleotide
  Target: ATXN2; (+) strand; PAM type: NRG; PAM sequence: CAG
tgcctgtagttccagctagt

SEQ ID NO: 42236 - DNA, 20 bp, Artificial Sequence
  Description of Artificial Sequence: Synthetic oligonucleotide
  Target: ATXN2; (+) strand; PAM type: NRG; PAM sequence: AGG
gcctgtagttccagctagtc

SEQ ID NO: 42237 - DNA, 20 bp, Artificial Sequence
  Description of Artificial Sequence: Synthetic oligonucleotide
  Target: ATXN2; (+) strand; PAM type: NRG; PAM sequence: GAG
ctgtagttccagctagtcag

SEQ ID NO: 42238 - DNA, 20 bp, Artificial Sequence
  Description of Artificial Sequence: Synthetic oligonucleotide
  Target: ATXN2; (+) strand; PAM type: NRG; PAM sequence: AGG
tgtagttccagctagtcagg

SEQ ID NO: 42239 - DNA, 20 bp, Artificial Sequence
  Description of Artificial Sequence: Synthetic oligonucleotide
  Target: ATXN2; (+) strand; PAM type: NRG; PAM sequence: GAG
ttccagctagtcaggaggct

SEQ ID NO: 42240 - DNA, 20 bp, Artificial Sequence
  Description of Artificial Sequence: Synthetic oligonucleotide
  Target: ATXN2; (+) strand; PAM type: NRG; PAM sequence: AGG
tccagctagtcaggaggctg

SEQ ID NO: 42241 - DNA, 20 bp, Artificial Sequence
  Description of Artificial Sequence: Synthetic oligonucleotide
  Target: ATXN2; (+) strand; PAM type: NRG; PAM sequence: CAG
agctagtcaggaggctgagg

SEQ ID NO: 42242 - DNA, 20 bp, Artificial Sequence
  Description of Artificial Sequence: Synthetic oligonucleotide
  Target: ATXN2; (+) strand; PAM type: NRG; PAM sequence: AGG
gctagtcaggaggctgaggc

SEQ ID NO: 42243 - DNA, 20 bp, Artificial Sequence
  Description of Artificial Sequence: Synthetic oligonucleotide
  Target: ATXN2; (+) strand; PAM type: NRG; PAM sequence: GAG
tagtcaggaggctgaggcag

SEQ ID NO: 42244 - DNA, 20 bp, Artificial Sequence
  Description of Artificial Sequence: Synthetic oligonucleotide
  Target: ATXN2; (+) strand; PAM type: NRG; PAM sequence: TGG
caggagaatcacttgaaccc

SEQ ID NO: 42245 - DNA, 20 bp, Artificial Sequence
  Description of Artificial Sequence: Synthetic oligonucleotide
  Target: ATXN2; (+) strand; PAM type: NRG; PAM sequence: GAG
ggagaatcacttgaaccctg

SEQ ID NO: 42246 - DNA, 20 bp, Artificial Sequence
  Description of Artificial Sequence: Synthetic oligonucleotide
  Target: ATXN2; (+) strand; PAM type: NRG; PAM sequence: AGG
gagaatcacttgaaccctgg

SEQ ID NO: 42247 - DNA, 20 bp, Artificial Sequence
  Description of Artificial Sequence: Synthetic oligonucleotide
  Target: ATXN2; (+) strand; PAM type: NRG; PAM sequence: CGG
aatcacttgaaccctggagg

SEQ ID NO: 42248 - DNA, 20 bp, Artificial Sequence
  Description of Artificial Sequence: Synthetic oligonucleotide
  Target: ATXN2; (+) strand; PAM type: NRG; PAM sequence: GAG
tcacttgaaccctggaggcg

SEQ ID NO: 42249 - DNA, 20 bp, Artificial Sequence
  Description of Artificial Sequence: Synthetic oligonucleotide
  Target: ATXN2; (+) strand; PAM type: NRG; PAM sequence: AGG
cacttgaaccctggaggcgg

SEQ ID NO: 42250 - DNA, 20 bp, Artificial Sequence
  Description of Artificial Sequence: Synthetic oligonucleotide
  Target: ATXN2; (+) strand; PAM type: NRG; PAM sequence: CAG
aaccctggaggcggaggttg

SEQ ID NO: 42251 - DNA, 20 bp, Artificial Sequence
  Description of Artificial Sequence: Synthetic oligonucleotide
  Target: ATXN2; (+) strand; PAM type: NRG; PAM sequence: GAG
ctggaggcggaggttgcagt

SEQ ID NO: 42252 - DNA, 20 bp, Artificial Sequence
  Description of Artificial Sequence: Synthetic oligonucleotide
  Target: ATXN2; (+) strand; PAM type: NRG; PAM sequence: GAG
ggcggaggttgcagtgagtt

SEQ ID NO: 42253 - DNA, 20 bp, Artificial Sequence
  Description of Artificial Sequence: Synthetic oligonucleotide
  Target: ATXN2; (+) strand; PAM type: NRG; PAM sequence: CAG
gagactgcgccaccgcactc

SEQ ID NO: 42254 - DNA, 20 bp, Artificial Sequence
  Description of Artificial Sequence: Synthetic oligonucleotide
  Target: ATXN2; (+) strand; PAM type: NRG; PAM sequence: TGG
tgcgccaccgcactccagcc

SEQ ID NO: 42255 - DNA, 20 bp, Artificial Sequence
  Description of Artificial Sequence: Synthetic oligonucleotide
  Target: ATXN2; (+) strand; PAM type: NRG; PAM sequence: CAG
accgcactccagcctggcga

SEQ ID NO: 42256 - DNA, 20 bp, Artificial Sequence
  Description of Artificial Sequence: Synthetic oligonucleotide
  Target: ATXN2; (+) strand; PAM type: NRG; PAM sequence: GAG
cgcactccagcctggcgaca

SEQ ID NO: 42257 - DNA, 20 bp, Artificial Sequence
  Description of Artificial Sequence: Synthetic oligonucleotide
  Target: ATXN2; (+) strand; PAM type: NRG; PAM sequence: GAG
ctccagcctggcgacagagt

SEQ ID NO: 42258 - DNA, 20 bp, Artificial Sequence
  Description of Artificial Sequence: Synthetic oligonucleotide
  Target: ATXN2; (+) strand; PAM type: NRG; PAM sequence: AAG
taaaaataaataaataaaat

SEQ ID NO: 42259 - DNA, 20 bp, Artificial Sequence
  Description of Artificial Sequence: Synthetic oligonucleotide
  Target: ATXN2; (+) strand; PAM type: NRG; PAM sequence: AAG
aaataagtttaaaatttaaa

SEQ ID NO: 42260 - DNA, 20 bp, Artificial Sequence
  Description of Artificial Sequence: Synthetic oligonucleotide
  Target: ATXN2; (+) strand; PAM type: NRG; PAM sequence: AAG
aaaatttaaaaagttaaata

SEQ ID NO: 42261 - DNA, 20 bp, Artificial Sequence
  Description of Artificial Sequence: Synthetic oligonucleotide
  Target: ATXN2; (+) strand; PAM type: NRG; PAM sequence: AAG
aagttaaataaagaatgaat

SEQ ID NO: 42262 - DNA, 20 bp, Artificial Sequence
  Description of Artificial Sequence: Synthetic oligonucleotide
  Target: ATXN2; (+) strand; PAM type: NRG; PAM sequence: TAG
aataaagaatgaataagatc

SEQ ID NO: 42263 - DNA, 20 bp, Artificial Sequence
  Description of Artificial Sequence: Synthetic oligonucleotide
  Target: ATXN2; (+) strand; PAM type: NRG; PAM sequence: AAG
agatctagtatttgacaaca

SEQ ID NO: 42264 - DNA, 20 bp, Artificial Sequence
  Description of Artificial Sequence: Synthetic oligonucleotide
  Target: ATXN2; (+) strand; PAM type: NRG; PAM sequence: CAG
tctagtatttgacaacaaag

SEQ ID NO: 42265 - DNA, 20 bp, Artificial Sequence
  Description of Artificial Sequence: Synthetic oligonucleotide
  Target: ATXN2; (+) strand; PAM type: NRG; PAM sequence: AGG
ctagtatttgacaacaaagc

SEQ ID NO: 42266 - DNA, 20 bp, Artificial Sequence
  Description of Artificial Sequence: Synthetic oligonucleotide
  Target: ATXN2; (+) strand; PAM type: NRG; PAM sequence: GGG
tagtatttgacaacaaagca

SEQ ID NO: 42267 - DNA, 20 bp, Artificial Sequence
  Description of Artificial Sequence: Synthetic oligonucleotide
  Target: ATXN2; (+) strand; PAM type: NRG; PAM sequence: CAG
acaacaaagcagggtgacta

SEQ ID NO: 42268 - DNA, 20 bp, Artificial Sequence
  Description of Artificial Sequence: Synthetic oligonucleotide
  Target: ATXN2; (+) strand; PAM type: NRG; PAM sequence: CAG
caaagcagggtgactacagt

SEQ ID NO: 42269 - DNA, 20 bp, Artificial Sequence
  Description of Artificial Sequence: Synthetic oligonucleotide
  Target: ATXN2; (+) strand; PAM type: NRG; PAM sequence: TAG
cattaatttgttgtactttt

SEQ ID NO: 42270 - DNA, 20 bp, Artificial Sequence
  Description of Artificial Sequence: Synthetic oligonucleotide
  Target: ATXN2; (+) strand; PAM type: NRG; PAM sequence: GAG
ttgtactttttagaataact

SEQ ID NO: 42271 - DNA, 20 bp, Artificial Sequence
  Description of Artificial Sequence: Synthetic oligonucleotide
  Target: ATXN2; (+) strand; PAM type: NRG; PAM sequence: AGG
tgtactttttagaataactg

SEQ ID NO: 42272 - DNA, 20 bp, Artificial Sequence
  Description of Artificial Sequence: Synthetic oligonucleotide
  Target: ATXN2; (+) strand; PAM type: NRG; PAM sequence: GGG
gtactttttagaataactga

SEQ ID NO: 42273 - DNA, 20 bp, Artificial Sequence
  Description of Artificial Sequence: Synthetic oligonucleotide
  Target: ATXN2; (+) strand; PAM type: NRG; PAM sequence: GAG
actttttagaataactgagg

SEQ ID NO: 42274 - DNA, 20 bp, Artificial Sequence
  Description of Artificial Sequence: Synthetic oligonucleotide
  Target: ATXN2; (+) strand; PAM type: NRG; PAM sequence: AAG
attgcaacgttcattacaca

SEQ ID NO: 42275 - DNA, 20 bp, Artificial Sequence
  Description of Artificial Sequence: Synthetic oligonucleotide
  Target: ATXN2; (+) strand; PAM type: NRG; PAM sequence: TGG
aaagaaatgatgaatgatga

SEQ ID NO: 42276 - DNA, 20 bp, Artificial Sequence
  Description of Artificial Sequence: Synthetic oligonucleotide
  Target: ATXN2; (+) strand; PAM type: NRG; PAM sequence: TGG
atgatgaatgatgatggtga

SEQ ID NO: 42277 - DNA, 20 bp, Artificial Sequence
  Description of Artificial Sequence: Synthetic oligonucleotide
  Target: ATXN2; (+) strand; PAM type: NRG; PAM sequence: CAG
gcctttatctaaatatctca

SEQ ID NO: 42278 - DNA, 20 bp, Artificial Sequence
  Description of Artificial Sequence: Synthetic oligonucleotide
  Target: ATXN2; (+) strand; PAM type: NRG; PAM sequence: AAG
taaaaaaataaaaaccttta

SEQ ID NO: 42279 - DNA, 20 bp, Artificial Sequence
  Description of Artificial Sequence: Synthetic oligonucleotide
  Target: ATXN2; (+) strand; PAM type: NRG; PAM sequence: TAG
aaaaataaaaacctttaaag

SEQ ID NO: 42280 - DNA, 20 bp, Artificial Sequence
  Description of Artificial Sequence: Synthetic oligonucleotide
  Target: ATXN2; (+) strand; PAM type: NRG; PAM sequence: AAG
ttaaagtagactgcaaaacc

SEQ ID NO: 42281 - DNA, 20 bp, Artificial Sequence
  Description of Artificial Sequence: Synthetic oligonucleotide
  Target: ATXN2; (+) strand; PAM type: NRG; PAM sequence: AGG
taaagtagactgcaaaacca

SEQ ID NO: 42282 - DNA, 20 bp, Artificial Sequence
  Description of Artificial Sequence: Synthetic oligonucleotide
  Target: ATXN2; (+) strand; PAM type: NRG; PAM sequence: AAG
caaaaccaaggaccatcaaa

SEQ ID NO: 42283 - DNA, 20 bp, Artificial Sequence
  Description of Artificial Sequence: Synthetic oligonucleotide
  Target: ATXN2; (+) strand; PAM type: NRG; PAM sequence: CAG
ccaaggaccatcaaaaagaa

SEQ ID NO: 42284 - DNA, 20 bp, Artificial Sequence
  Description of Artificial Sequence: Synthetic oligonucleotide
  Target: ATXN2; (+) strand; PAM type: NRG; PAM sequence: AAG
aggaccatcaaaaagaacag

SEQ ID NO: 42285 - DNA, 20 bp, Artificial Sequence
  Description of Artificial Sequence: Synthetic oligonucleotide
  Target: ATXN2; (+) strand; PAM type: NRG; PAM sequence: AAG
atcaaaaagaacagaagaca

SEQ ID NO: 42286 - DNA, 20 bp, Artificial Sequence
  Description of Artificial Sequence: Synthetic oligonucleotide
  Target: ATXN2; (+) strand; PAM type: NRG; PAM sequence: TAG
agaacagaagacaaagatat

SEQ ID NO: 42287 - DNA, 20 bp, Artificial Sequence
  Description of Artificial Sequence: Synthetic oligonucleotide
  Target: ATXN2; (+) strand; PAM type: NRG; PAM sequence: AAG
gacaaagatattagcaaaat

SEQ ID NO: 42288 - DNA, 20 bp, Artificial Sequence
  Description of Artificial Sequence: Synthetic oligonucleotide
  Target: ATXN2; (+) strand; PAM type: NRG; PAM sequence: GAG
atattagcaaaataagtgat

SEQ ID NO: 42289 - DNA, 20 bp, Artificial Sequence
  Description of Artificial Sequence: Synthetic oligonucleotide
  Target: ATXN2; (+) strand; PAM type: NRG; PAM sequence: AGG
tattagcaaaataagtgatg

SEQ ID NO: 42290 - DNA, 20 bp, Artificial Sequence
  Description of Artificial Sequence: Synthetic oligonucleotide
  Target: ATXN2; (+) strand; PAM type: NRG; PAM sequence: AAG
aaataagtgatgaggttttt

SEQ ID NO: 42291 - DNA, 20 bp, Artificial Sequence
  Description of Artificial Sequence: Synthetic oligonucleotide
  Target: ATXN2; (+) strand; PAM type: NRG; PAM sequence: CAG
tgatgaggtttttaagtttg

SEQ ID NO: 42292 - DNA, 20 bp, Artificial Sequence
  Description of Artificial Sequence: Synthetic oligonucleotide
  Target: ATXN2; (+) strand; PAM type: NRG; PAM sequence: CAG
aggtttttaagtttgcagac

SEQ ID NO: 42293 - DNA, 20 bp, Artificial Sequence
  Description of Artificial Sequence: Synthetic oligonucleotide
  Target: ATXN2; (+) strand; PAM type: NRG; PAM sequence: TGG
aaaaaataaaatgctaccac

SEQ ID NO: 42294 - DNA, 20 bp, Artificial Sequence
  Description of Artificial Sequence: Synthetic oligonucleotide
  Target: ATXN2; (+) strand; PAM type: NRG; PAM sequence: AAG
taaaatgctaccactggctg

SEQ ID NO: 42295 - DNA, 20 bp, Artificial Sequence
  Description of Artificial Sequence: Synthetic oligonucleotide
  Target: ATXN2; (+) strand; PAM type: NRG; PAM sequence: AAG
ccactggctgaagatgattt

SEQ ID NO: 42296 - DNA, 20 bp, Artificial Sequence
  Description of Artificial Sequence: Synthetic oligonucleotide
  Target: ATXN2; (+) strand; PAM type: NRG; PAM sequence: TGG
tggctgaagatgatttaaga

SEQ ID NO: 42297 - DNA, 20 bp, Artificial Sequence
  Description of Artificial Sequence: Synthetic oligonucleotide
  Target: ATXN2; (+) strand; PAM type: NRG; PAM sequence: AAG
taagatggcatcctctacaa

SEQ ID NO: 42298 - DNA, 20 bp, Artificial Sequence
  Description of Artificial Sequence: Synthetic oligonucleotide
  Target: ATXN2; (+) strand; PAM type: NRG; PAM sequence: AAG
atggcatcctctacaaaaga

SEQ ID NO: 42299 - DNA, 20 bp, Artificial Sequence
  Description of Artificial Sequence: Synthetic oligonucleotide
  Target: ATXN2; (+) strand; PAM type: NRG; PAM sequence: CAG
cctctacaaaagaaagaaaa

SEQ ID NO: 42300 - DNA, 20 bp, Artificial Sequence
  Description of Artificial Sequence: Synthetic oligonucleotide
  Target: ATXN2; (+) strand; PAM type: NRG; PAM sequence: AGG
ctctacaaaagaaagaaaac

SEQ ID NO: 42301 - DNA, 20 bp, Artificial Sequence
  Description of Artificial Sequence: Synthetic oligonucleotide
  Target: ATXN2; (+) strand; PAM type: NRG; PAM sequence: TGG
caaaagaaagaaaacaggaa

SEQ ID NO: 42302 - DNA, 20 bp, Artificial Sequence
  Description of Artificial Sequence: Synthetic oligonucleotide
  Target: ATXN2; (+) strand; PAM type: NRG; PAM sequence: AAG
aaaacaggaatggctgaaaa

SEQ ID NO: 42303 - DNA, 20 bp, Artificial Sequence
  Description of Artificial Sequence: Synthetic oligonucleotide
  Target: ATXN2; (+) strand; PAM type: NRG; PAM sequence: AGG
aaacaggaatggctgaaaaa

SEQ ID NO: 42304 - DNA, 20 bp, Artificial Sequence
  Description of Artificial Sequence: Synthetic oligonucleotide
  Target: ATXN2; (+) strand; PAM type: NRG; PAM sequence: GGG
aacaggaatggctgaaaaaa

SEQ ID NO: 42305 - DNA, 20 bp, Artificial Sequence
  Description of Artificial Sequence: Synthetic oligonucleotide
  Target: ATXN2; (+) strand; PAM type: NRG; PAM sequence: GGG
acaggaatggctgaaaaaag

SEQ ID NO: 42306 - DNA, 20 bp, Artificial Sequence
  Description of Artificial Sequence: Synthetic oligonucleotide
  Target: ATXN2; (+) strand; PAM type: NRG; PAM sequence: GGG
caggaatggctgaaaaaagg

SEQ ID NO: 42307 - DNA, 20 bp, Artificial Sequence
  Description of Artificial Sequence: Synthetic oligonucleotide
  Target: ATXN2; (+) strand; PAM type: NRG; PAM sequence: GAG
ggaatggctgaaaaaagggg

SEQ ID NO: 42308 - DNA, 20 bp, Artificial Sequence
  Description of Artificial Sequence: Synthetic oligonucleotide
  Target: ATXN2; (+) strand; PAM type: NRG; PAM sequence: AAG
tggctgaaaaaagggggagc

SEQ ID NO: 42309 - DNA, 20 bp, Artificial Sequence
  Description of Artificial Sequence: Synthetic oligonucleotide
  Target: ATXN2; (+) strand; PAM type: NRG; PAM sequence: AAG
aaaaaagggggagcaagtac

SEQ ID NO: 42310 - DNA, 20 bp, Artificial Sequence
  Description of Artificial Sequence: Synthetic oligonucleotide
  Target: ATXN2; (+) strand; PAM type: NRG; PAM sequence: CAG
gcaagtacaagcaacaaaaa

SEQ ID NO: 42311 - DNA, 20 bp, Artificial Sequence
  Description of Artificial Sequence: Synthetic oligonucleotide
  Target: ATXN2; (+) strand; PAM type: NRG; PAM sequence: AAG
aagcaacaaaaacagaacct

SEQ ID NO: 42312 - DNA, 20 bp, Artificial Sequence
  Description of Artificial Sequence: Synthetic oligonucleotide
  Target: ATXN2; (+) strand; PAM type: NRG; PAM sequence: CAG
caaaaacagaacctaagcca

SEQ ID NO: 42313 - DNA, 20 bp, Artificial Sequence
  Description of Artificial Sequence: Synthetic oligonucleotide
  Target: ATXN2; (+) strand; PAM type: NRG; PAM sequence: AGG
aaaaacagaacctaagccac

SEQ ID NO: 42314 - DNA, 20 bp, Artificial Sequence
  Description of Artificial Sequence: Synthetic oligonucleotide
  Target: ATXN2; (+) strand; PAM type: NRG; PAM sequence: TAG
acagaacctaagccacaggt

SEQ ID NO: 42315 - DNA, 20 bp, Artificial Sequence
  Description of Artificial Sequence: Synthetic oligonucleotide
  Target: ATXN2; (+) strand; PAM type: NRG; PAM sequence: AGG
cagaacctaagccacaggtt

SEQ ID NO: 42316 - DNA, 20 bp, Artificial Sequence
  Description of Artificial Sequence: Synthetic oligonucleotide
  Target: ATXN2; (+) strand; PAM type: NRG; PAM sequence: CGG
taagccacaggttaggacaa

SEQ ID NO: 42317 - DNA, 20 bp, Artificial Sequence
  Description of Artificial Sequence: Synthetic oligonucleotide
  Target: ATXN2; (+) strand; PAM type: NRG; PAM sequence: AAG
caggttaggacaacggacct

SEQ ID NO: 42318 - DNA, 20 bp, Artificial Sequence
  Description of Artificial Sequence: Synthetic oligonucleotide
  Target: ATXN2; (+) strand; PAM type: NRG; PAM sequence: CAG
aggacaacggacctaagcca

SEQ ID NO: 42319 - DNA, 20 bp, Artificial Sequence
  Description of Artificial Sequence: Synthetic oligonucleotide
  Target: ATXN2; (+) strand; PAM type: NRG; PAM sequence: CAG
acggacctaagccacagccc

SEQ ID NO: 42320 - DNA, 20 bp, Artificial Sequence
  Description of Artificial Sequence: Synthetic oligonucleotide
  Target: ATXN2; (+) strand; PAM type: NRG; PAM sequence: AGG
cggacctaagccacagcccc

SEQ ID NO: 42321 - DNA, 20 bp, Artificial Sequence
  Description of Artificial Sequence: Synthetic oligonucleotide
  Target: ATXN2; (+) strand; PAM type: NRG; PAM sequence: TGG
acctaagccacagccccagg

SEQ ID NO: 42322 - DNA, 20 bp, Artificial Sequence
  Description of Artificial Sequence: Synthetic oligonucleotide
  Target: ATXN2; (+) strand; PAM type: NRG; PAM sequence: GAG
aagccacagccccaggtggt

SEQ ID NO: 42323 - DNA, 20 bp, Artificial Sequence
  Description of Artificial Sequence: Synthetic oligonucleotide
  Target: ATXN2; (+) strand; PAM type: NRG; PAM sequence: AAG
agccccaggtggtgagaaac

SEQ ID NO: 42324 - DNA, 20 bp, Artificial Sequence
  Description of Artificial Sequence: Synthetic oligonucleotide
  Target: ATXN2; (+) strand; PAM type: NRG; PAM sequence: AAG
aggtggtgagaaacaagcta

SEQ ID NO: 42325 - DNA, 20 bp, Artificial Sequence
  Description of Artificial Sequence: Synthetic oligonucleotide
  Target: ATXN2; (+) strand; PAM type: NRG; PAM sequence: GAG
gtggtgagaaacaagctaaa

SEQ ID NO: 42326 - DNA, 20 bp, Artificial Sequence
  Description of Artificial Sequence: Synthetic oligonucleotide
  Target: ATXN2; (+) strand; PAM type: NRG; PAM sequence: CAG
aagctaaagagaaacctaca

SEQ ID NO: 42327 - DNA, 20 bp, Artificial Sequence
  Description of Artificial Sequence: Synthetic oligonucleotide
  Target: ATXN2; (+) strand; PAM type: NRG; PAM sequence: AAG
gagaaacctacacagccaaa

SEQ ID NO: 42328 - DNA, 20 bp, Artificial Sequence
  Description of Artificial Sequence: Synthetic oligonucleotide
  Target: ATXN2; (+) strand; PAM type: NRG; PAM sequence: AGG
agaaacctacacagccaaaa

SEQ ID NO: 42329 - DNA, 20 bp, Artificial Sequence
  Description of Artificial Sequence: Synthetic oligonucleotide
  Target: ATXN2; (+) strand; PAM type: NRG; PAM sequence: TAG
caaaaaggttgccttaaaat

SEQ ID NO: 42330 - DNA, 20 bp, Artificial Sequence
  Description of Artificial Sequence: Synthetic oligonucleotide
  Target: ATXN2; (+) strand; PAM type: NRG; PAM sequence: GAG
aaaaggttgccttaaaatta

SEQ ID NO: 42331 - DNA, 20 bp, Artificial Sequence
  Description of Artificial Sequence: Synthetic oligonucleotide
  Target: ATXN2; (+) strand; PAM type: NRG; PAM sequence: GAG
aaggttgccttaaaattaga

SEQ ID NO: 42332 - DNA, 20 bp, Artificial Sequence
  Description of Artificial Sequence: Synthetic oligonucleotide
  Target: ATXN2; (+) strand; PAM type: NRG; PAM sequence: AAG
tgccttaaaattagagagcc

SEQ ID NO: 42333 - DNA, 20 bp, Artificial Sequence
  Description of Artificial Sequence: Synthetic oligonucleotide
  Target: ATXN2; (+) strand; PAM type: NRG; PAM sequence: CAG
agagagccaagatacctctt

SEQ ID NO: 42334 - DNA, 20 bp, Artificial Sequence
  Description of Artificial Sequence: Synthetic oligonucleotide
  Target: ATXN2; (+) strand; PAM type: NRG; PAM sequence: CAG
ccaagatacctcttcagcct

SEQ ID NO: 42335 - DNA, 20 bp, Artificial Sequence
  Description of Artificial Sequence: Synthetic oligonucleotide
  Target: ATXN2; (+) strand; PAM type: NRG; PAM sequence: TAG
atacctcttcagcctcagta

SEQ ID NO: 42336 - DNA, 20 bp, Artificial Sequence
  Description of Artificial Sequence: Synthetic oligonucleotide
  Target: ATXN2; (+) strand; PAM type: NRG; PAM sequence: AGG
tacctcttcagcctcagtat

SEQ ID NO: 42337 - DNA, 20 bp, Artificial Sequence
  Description of Artificial Sequence: Synthetic oligonucleotide
  Target: ATXN2; (+) strand; PAM type: NRG; PAM sequence: TGG
tataggcaaaccaatttcaa

SEQ ID NO: 42338 - DNA, 20 bp, Artificial Sequence
  Description of Artificial Sequence: Synthetic oligonucleotide
  Target: ATXN2; (+) strand; PAM type: NRG; PAM sequence: AAG
atttcaatggtttcattacc

SEQ ID NO: 42339 - DNA, 20 bp, Artificial Sequence
  Description of Artificial Sequence: Synthetic oligonucleotide
  Target: ATXN2; (+) strand; PAM type: NRG; PAM sequence: AGG
tttcaatggtttcattacca

SEQ ID NO: 42340 - DNA, 20 bp, Artificial Sequence
  Description of Artificial Sequence: Synthetic oligonucleotide
  Target: ATXN2; (+) strand; PAM type: NRG; PAM sequence: TGG
ggtttcattaccaaggctct

SEQ ID NO: 42341 - DNA, 20 bp, Artificial Sequence
  Description of Artificial Sequence: Synthetic oligonucleotide
  Target: ATXN2; (+) strand; PAM type: NRG; PAM sequence: TGG
taccaaggctcttggtgtca

SEQ ID NO: 42342 - DNA, 20 bp, Artificial Sequence
  Description of Artificial Sequence: Synthetic oligonucleotide
  Target: ATXN2; (+) strand; PAM type: NRG; PAM sequence: CAG
gctcttggtgtcatggcaaa

SEQ ID NO: 42343 - DNA, 20 bp, Artificial Sequence
  Description of Artificial Sequence: Synthetic oligonucleotide
  Target: ATXN2; (+) strand; PAM type: NRG; PAM sequence: TGG
caaacagcattatgcaactc

SEQ ID NO: 42344 - DNA, 20 bp, Artificial Sequence
  Description of Artificial Sequence: Synthetic oligonucleotide
  Target: ATXN2; (+) strand; PAM type: NRG; PAM sequence: AAG
atgcaactctggcgcatcgc

SEQ ID NO: 42345 - DNA, 20 bp, Artificial Sequence
  Description of Artificial Sequence: Synthetic oligonucleotide
  Target: ATXN2; (+) strand; PAM type: NRG; PAM sequence: TAG
gctttactgcattaccaata

SEQ ID NO: 42346 - DNA, 20 bp, Artificial Sequence
  Description of Artificial Sequence: Synthetic oligonucleotide
  Target: ATXN2; (+) strand; PAM type: NRG; PAM sequence: AAG
ctgcattaccaatatagcta

SEQ ID NO: 42347 - DNA, 20 bp, Artificial Sequence
  Description of Artificial Sequence: Synthetic oligonucleotide
  Target: ATXN2; (+) strand; PAM type: NRG; PAM sequence: GAG
gcattaccaatatagctaaa

SEQ ID NO: 42348 - DNA, 20 bp, Artificial Sequence
  Description of Artificial Sequence: Synthetic oligonucleotide
  Target: ATXN2; (+) strand; PAM type: NRG; PAM sequence: AAG
accaatatagctaaagagtc

SEQ ID NO: 42349 - DNA, 20 bp, Artificial Sequence
  Description of Artificial Sequence: Synthetic oligonucleotide
  Target: ATXN2; (+) strand; PAM type: NRG; PAM sequence: TGG
aatatagctaaagagtcaag

SEQ ID NO: 42350 - DNA, 20 bp, Artificial Sequence
  Description of Artificial Sequence: Synthetic oligonucleotide
  Target: ATXN2; (+) strand; PAM type: NRG; PAM sequence: AAG
agctaaagagtcaagtggct

SEQ ID NO: 42351 - DNA, 20 bp, Artificial Sequence
  Description of Artificial Sequence: Synthetic oligonucleotide
  Target: ATXN2; (+) strand; PAM type: NRG; PAM sequence: AGG
gctaaagagtcaagtggcta

SEQ ID NO: 42352 - DNA, 20 bp, Artificial Sequence
  Description of Artificial Sequence: Synthetic oligonucleotide
  Target: ATXN2; (+) strand; PAM type: NRG; PAM sequence: GGG
ctaaagagtcaagtggctaa

SEQ ID NO: 42353 - DNA, 20 bp, Artificial Sequence
  Description of Artificial Sequence: Synthetic oligonucleotide
  Target: ATXN2; (+) strand; PAM type: NRG; PAM sequence: CAG
tggctaagggcaaatgttga

SEQ ID NO: 42354 - DNA, 20 bp, Artificial Sequence
  Description of Artificial Sequence: Synthetic oligonucleotide
  Target: ATXN2; (+) strand; PAM type: NRG; PAM sequence: AGG
ggctaagggcaaatgttgac

SEQ ID NO: 42355 - DNA, 20 bp, Artificial Sequence
  Description of Artificial Sequence: Synthetic oligonucleotide
  Target: ATXN2; (+) strand; PAM type: NRG; PAM sequence: GGG
gctaagggcaaatgttgaca

SEQ ID NO: 42356 - DNA, 20 bp, Artificial Sequence
  Description of Artificial Sequence: Synthetic oligonucleotide
  Target: ATXN2; (+) strand; PAM type: NRG; PAM sequence: TGG
atgttgacagggtatttatg

SEQ ID NO: 42357 - DNA, 20 bp, Artificial Sequence
  Description of Artificial Sequence: Synthetic oligonucleotide
  Target: ATXN2; (+) strand; PAM type: NRG; PAM sequence: GGG
tgttgacagggtatttatgt

SEQ ID NO: 42358 - DNA, 20 bp, Artificial Sequence
  Description of Artificial Sequence: Synthetic oligonucleotide
  Target: ATXN2; (+) strand; PAM type: NRG; PAM sequence: TGG
gggtatttatgtgggcacac

SEQ ID NO: 42359 - DNA, 20 bp, Artificial Sequence
  Description of Artificial Sequence: Synthetic oligonucleotide
  Target: ATXN2; (+) strand; PAM type: NRG; PAM sequence: AAG
tgtgggcacactggcaattt

SEQ ID NO: 42360 - DNA, 20 bp, Artificial Sequence
  Description of Artificial Sequence: Synthetic oligonucleotide
  Target: ATXN2; (+) strand; PAM type: NRG; PAM sequence: TAG
tggcaatttaagtcacgatg

SEQ ID NO: 42361 - DNA, 20 bp, Artificial Sequence
  Description of Artificial Sequence: Synthetic oligonucleotide
  Target: ATXN2; (+) strand; PAM type: NRG; PAM sequence: AGG
ggcaatttaagtcacgatgt

SEQ ID NO: 42362 - DNA, 20 bp, Artificial Sequence
  Description of Artificial Sequence: Synthetic oligonucleotide
  Target: ATXN2; (+) strand; PAM type: NRG; PAM sequence: TAG
catttgttcacaaaaatctt

SEQ ID NO: 42363 - DNA, 20 bp, Artificial Sequence
  Description of Artificial Sequence: Synthetic oligonucleotide
  Target: ATXN2; (+) strand; PAM type: NRG; PAM sequence: TAG
ttgttcacaaaaatctttag

SEQ ID NO: 42364 - DNA, 20 bp, Artificial Sequence
  Description of Artificial Sequence: Synthetic oligonucleotide
  Target: ATXN2; (+) strand; PAM type: NRG; PAM sequence: GAG
gttcacaaaaatctttagta

SEQ ID NO: 42365 - DNA, 20 bp, Artificial Sequence
  Description of Artificial Sequence: Synthetic oligonucleotide
  Target: ATXN2; (+) strand; PAM type: NRG; PAM sequence: AGG
ttcacaaaaatctttagtag

SEQ ID NO: 42366 - DNA, 20 bp, Artificial Sequence
  Description of Artificial Sequence: Synthetic oligonucleotide
  Target: ATXN2; (+) strand; PAM type: NRG; PAM sequence: CAG
agtagaggcgatccacataa

SEQ ID NO: 42367 - DNA, 20 bp, Artificial Sequence
  Description of Artificial Sequence: Synthetic oligonucleotide
  Target: ATXN2; (+) strand; PAM type: NRG; PAM sequence: AAG
gaccaactatatatattgcc

SEQ ID NO: 42368 - DNA, 20 bp, Artificial Sequence
  Description of Artificial Sequence: Synthetic oligonucleotide
  Target: ATXN2; (+) strand; PAM type: NRG; PAM sequence: AGG
accaactatatatattgcca

SEQ ID NO: 42369 - DNA, 20 bp, Artificial Sequence
  Description of Artificial Sequence: Synthetic oligonucleotide
  Target: ATXN2; (+) strand; PAM type: NRG; PAM sequence: CGG
atatatattgccaaggactt

SEQ ID NO: 42370 - DNA, 20 bp, Artificial Sequence
  Description of Artificial Sequence: Synthetic oligonucleotide
  Target: ATXN2; (+) strand; PAM type: NRG; PAM sequence: GAG
atatattgccaaggacttcg

SEQ ID NO: 42371 - DNA, 20 bp, Artificial Sequence
  Description of Artificial Sequence: Synthetic oligonucleotide
  Target: ATXN2; (+) strand; PAM type: NRG; PAM sequence: AAG
cttcggagtttaattatcat

SEQ ID NO: 42372 - DNA, 20 bp, Artificial Sequence
  Description of Artificial Sequence: Synthetic oligonucleotide
  Target: ATXN2; (+) strand; PAM type: NRG; PAM sequence: GAG
tcggagtttaattatcataa

SEQ ID NO: 42373 - DNA, 20 bp, Artificial Sequence
  Description of Artificial Sequence: Synthetic oligonucleotide
  Target: ATXN2; (+) strand; PAM type: NRG; PAM sequence: GAG
taattatcataagagttctt

SEQ ID NO: 42374 - DNA, 20 bp, Artificial Sequence
  Description of Artificial Sequence: Synthetic oligonucleotide
  Target: ATXN2; (+) strand; PAM type: NRG; PAM sequence: AAG
atcataagagttcttgagtg

SEQ ID NO: 42375 - DNA, 20 bp, Artificial Sequence
  Description of Artificial Sequence: Synthetic oligonucleotide
  Target: ATXN2; (+) strand; PAM type: NRG; PAM sequence: AGG
tcataagagttcttgagtga

SEQ ID NO: 42376 - DNA, 20 bp, Artificial Sequence
  Description of Artificial Sequence: Synthetic oligonucleotide
  Target: ATXN2; (+) strand; PAM type: NRG; PAM sequence: CAG
tcttgagtgaaggcaaaaat

SEQ ID NO: 42377 - DNA, 20 bp, Artificial Sequence
  Description of Artificial Sequence: Synthetic oligonucleotide
  Target: ATXN2; (+) strand; PAM type: NRG; PAM sequence: TGG
gaaggcaaaaatcagacttt

SEQ ID NO: 42378 - DNA, 20 bp, Artificial Sequence
  Description of Artificial Sequence: Synthetic oligonucleotide
  Target: ATXN2; (+) strand; PAM type: NRG; PAM sequence: TGG
cacatctgcatttcttacta

SEQ ID NO: 42379 - DNA, 20 bp, Artificial Sequence
  Description of Artificial Sequence: Synthetic oligonucleotide
  Target: ATXN2; (+) strand; PAM type: NRG; PAM sequence: GGG
acatctgcatttcttactat

SEQ ID NO: 42380 - DNA, 20 bp, Artificial Sequence
  Description of Artificial Sequence: Synthetic oligonucleotide
  Target: ATXN2; (+) strand; PAM type: NRG; PAM sequence: TGG
ctgcatttcttactatgggt

SEQ ID NO: 42381 - DNA, 20 bp, Artificial Sequence
  Description of Artificial Sequence: Synthetic oligonucleotide
  Target: ATXN2; (+) strand; PAM type: NRG; PAM sequence: CAG
cttttttttttttttccaaa

SEQ ID NO: 42382 - DNA, 20 bp, Artificial Sequence
  Description of Artificial Sequence: Synthetic oligonucleotide
  Target: ATXN2; (+) strand; PAM type: NRG; PAM sequence: AGG
ttttttttttttttccaaac

SEQ ID NO: 42383 - DNA, 20 bp, Artificial Sequence
  Description of Artificial Sequence: Synthetic oligonucleotide
  Target: ATXN2; (+) strand; PAM type: NRG; PAM sequence: GGG
tttttttttttttccaaaca

SEQ ID NO: 42384 - DNA, 20 bp, Artificial Sequence
  Description of Artificial Sequence: Synthetic oligonucleotide
  Target: ATXN2; (+) strand; PAM type: NRG; PAM sequence: CAG
cagggtctgactccgttgcc

SEQ ID NO: 42385 - DNA, 20 bp, Artificial Sequence
  Description of Artificial Sequence: Synthetic oligonucleotide
  Target: ATXN2; (+) strand; PAM type: NRG; PAM sequence: TGG
tctgactccgttgcccagac

SEQ ID NO: 42386 - DNA, 20 bp, Artificial Sequence
  Description of Artificial Sequence: Synthetic oligonucleotide
  Target: ATXN2; (+) strand; PAM type: NRG; PAM sequence: GAG
tgactccgttgcccagactg

SEQ ID NO: 42387 - DNA, 20 bp, Artificial Sequence
  Description of Artificial Sequence: Synthetic oligonucleotide
  Target: ATXN2; (+) strand; PAM type: NRG; PAM sequence: CAG
ccgttgcccagactggagcg

SEQ ID NO: 42388 - DNA, 20 bp, Artificial Sequence
  Description of Artificial Sequence: Synthetic oligonucleotide
  Target: ATXN2; (+) strand; PAM type: NRG; PAM sequence: TGG
ttgcccagactggagcgcag

SEQ ID NO: 42389 - DNA, 20 bp, Artificial Sequence
  Description of Artificial Sequence: Synthetic oligonucleotide
  Target: ATXN2; (+) strand; PAM type: NRG; PAM sequence: AAG
agactggagcgcagtggtgc

SEQ ID NO: 42390 - DNA, 20 bp, Artificial Sequence
  Description of Artificial Sequence: Synthetic oligonucleotide
  Target: ATXN2; (+) strand; PAM type: NRG; PAM sequence: CAG
tcactgcaacctccatctcc

SEQ ID NO: 42391 - DNA, 20 bp, Artificial Sequence
  Description of Artificial Sequence: Synthetic oligonucleotide
  Target: ATXN2; (+) strand; PAM type: NRG; PAM sequence: AGG
cactgcaacctccatctccc

SEQ ID NO: 42392 - DNA, 20 bp, Artificial Sequence
  Description of Artificial Sequence: Synthetic oligonucleotide
  Target: ATXN2; (+) strand; PAM type: NRG; PAM sequence: AAG
aacctccatctcccaggctc

SEQ ID NO: 42393 - DNA, 20 bp, Artificial Sequence
  Description of Artificial Sequence: Synthetic oligonucleotide
  Target: ATXN2; (+) strand; PAM type: NRG; PAM sequence: CAG
ctcaagtgattctcccacct

SEQ ID NO: 42394 - DNA, 20 bp, Artificial Sequence
  Description of Artificial Sequence: Synthetic oligonucleotide
  Target: ATXN2; (+) strand; PAM type: NRG; PAM sequence: GAG
ttctcccacctcagcctcct

SEQ ID NO: 42395 - DNA, 20 bp, Artificial Sequence
  Description of Artificial Sequence: Synthetic oligonucleotide
  Target: ATXN2; (+) strand; PAM type: NRG; PAM sequence: TAG
tcccacctcagcctcctgag

SEQ ID NO: 42396 - DNA, 20 bp, Artificial Sequence
  Description of Artificial Sequence: Synthetic oligonucleotide
  Target: ATXN2; (+) strand; PAM type: NRG; PAM sequence: TGG
acctcagcctcctgagtagc

SEQ ID NO: 42397 - DNA, 20 bp, Artificial Sequence
  Description of Artificial Sequence: Synthetic oligonucleotide
  Target: ATXN2; (+) strand; PAM type: NRG; PAM sequence: TAG
tcctgagtagctggtactat

SEQ ID NO: 42398 - DNA, 20 bp, Artificial Sequence
  Description of Artificial Sequence: Synthetic oligonucleotide
  Target: ATXN2; (+) strand; PAM type: NRG; PAM sequence: TGG
ttagcatgtgccaccacacc

SEQ ID NO: 42399 - DNA, 20 bp, Artificial Sequence
  Description of Artificial Sequence: Synthetic oligonucleotide
  Target: ATXN2; (+) strand; PAM type: NRG; PAM sequence: TAG
ctaatgtgtgtatttttttg

SEQ ID NO: 42400 - DNA, 20 bp, Artificial Sequence
  Description of Artificial Sequence: Synthetic oligonucleotide
  Target: ATXN2; (+) strand; PAM type: NRG; PAM sequence: CAG
tgtgtatttttttgtagaaa

SEQ ID NO: 42401 - DNA, 20 bp, Artificial Sequence
  Description of Artificial Sequence: Synthetic oligonucleotide
  Target: ATXN2; (+) strand; PAM type: NRG; PAM sequence: AGG
gtgtatttttttgtagaaac

SEQ ID NO: 42402 - DNA, 20 bp, Artificial Sequence
  Description of Artificial Sequence: Synthetic oligonucleotide
  Target: ATXN2; (+) strand; PAM type: NRG; PAM sequence: GGG
tgtatttttttgtagaaaca

SEQ ID NO: 42403 - DNA, 20 bp, Artificial Sequence
  Description of Artificial Sequence: Synthetic oligonucleotide
  Target: ATXN2; (+) strand; PAM type: NRG; PAM sequence: CAG
cagggttttaccatgttacc

SEQ ID NO: 42404 - DNA, 20 bp, Artificial Sequence
  Description of Artificial Sequence: Synthetic oligonucleotide
  Target: ATXN2; (+) strand; PAM type: NRG; PAM sequence: AGG
agggttttaccatgttaccc

SEQ ID NO: 42405 - DNA, 20 bp, Artificial Sequence
  Description of Artificial Sequence: Synthetic oligonucleotide
  Target: ATXN2; (+) strand; PAM type: NRG; PAM sequence: TGG
ttttaccatgttacccaggt

SEQ ID NO: 42406 - DNA, 20 bp, Artificial Sequence
  Description of Artificial Sequence: Synthetic oligonucleotide
  Target: ATXN2; (+) strand; PAM type: NRG; PAM sequence: GAG
caggttggtctttaatgcct

SEQ ID NO: 42407 - DNA, 20 bp, Artificial Sequence
  Description of Artificial Sequence: Synthetic oligonucleotide
  Target: ATXN2; (+) strand; PAM type: NRG; PAM sequence: AAG
ggtctttaatgcctgagctc

SEQ ID NO: 42408 - DNA, 20 bp, Artificial Sequence
  Description of Artificial Sequence: Synthetic oligonucleotide
  Target: ATXN2; (+) strand; PAM type: NRG; PAM sequence: CAG
ctcaagctatccacctgtct

SEQ ID NO: 42409 - DNA, 20 bp, Artificial Sequence
  Description of Artificial Sequence: Synthetic oligonucleotide
  Target: ATXN2; (+) strand; PAM type: NRG; PAM sequence: AAG
ccacctgtctcagcctccca

SEQ ID NO: 42410 - DNA, 20 bp, Artificial Sequence
  Description of Artificial Sequence: Synthetic oligonucleotide
  Target: ATXN2; (+) strand; PAM type: NRG; PAM sequence: AAG
tctcagcctcccaaagtgct

SEQ ID NO: 42411 - DNA, 20 bp, Artificial Sequence
  Description of Artificial Sequence: Synthetic oligonucleotide
  Target: ATXN2; (+) strand; PAM type: NRG; PAM sequence: CAG
cctcccaaagtgctaagatt

SEQ ID NO: 42412 - DNA, 20 bp, Artificial Sequence
  Description of Artificial Sequence: Synthetic oligonucleotide
  Target: ATXN2; (+) strand; PAM type: NRG; PAM sequence: AGG
ctcccaaagtgctaagattc

SEQ ID NO: 42413 - DNA, 20 bp, Artificial Sequence
  Description of Artificial Sequence: Synthetic oligonucleotide
  Target: ATXN2; (+) strand; PAM type: NRG; PAM sequence: GAG
aagtgctaagattcaggcat

SEQ ID NO: 42414 - DNA, 20 bp, Artificial Sequence
  Description of Artificial Sequence: Synthetic oligonucleotide
  Target: ATXN2; (+) strand; PAM type: NRG; PAM sequence: CAG
catgagccactgtacctgtc

SEQ ID NO: 42415 - DNA, 20 bp, Artificial Sequence
  Description of Artificial Sequence: Synthetic oligonucleotide
  Target: ATXN2; (+) strand; PAM type: NRG; PAM sequence: TAG
acactgttctaaactattta

SEQ ID NO: 42416 - DNA, 20 bp, Artificial Sequence
  Description of Artificial Sequence: Synthetic oligonucleotide
  Target: ATXN2; (+) strand; PAM type: NRG; PAM sequence: TAG
tatttatagacttattcatt

SEQ ID NO: 42417 - DNA, 20 bp, Artificial Sequence
  Description of Artificial Sequence: Synthetic oligonucleotide
  Target: ATXN2; (+) strand; PAM type: NRG; PAM sequence: CAG
tattcatttagtcttcacaa

SEQ ID NO: 42418 - DNA, 20 bp, Artificial Sequence
  Description of Artificial Sequence: Synthetic oligonucleotide
  Target: ATXN2; (+) strand; PAM type: NRG; PAM sequence: TAG
cacaacagccctatttgatg

SEQ ID NO: 42419 - DNA, 20 bp, Artificial Sequence
  Description of Artificial Sequence: Synthetic oligonucleotide
  Target: ATXN2; (+) strand; PAM type: NRG; PAM sequence: TAG
tattattgccatcttacaaa

SEQ ID NO: 42420 - DNA, 20 bp, Artificial Sequence
  Description of Artificial Sequence: Synthetic oligonucleotide
  Target: ATXN2; (+) strand; PAM type: NRG; PAM sequence: AAG
attgccatcttacaaatagc

SEQ ID NO: 42421 - DNA, 20 bp, Artificial Sequence
  Description of Artificial Sequence: Synthetic oligonucleotide
  Target: ATXN2; (+) strand; PAM type: NRG; PAM sequence: TAG
cttacaaatagcaagtccac

SEQ ID NO: 42422 - DNA, 20 bp, Artificial Sequence
  Description of Artificial Sequence: Synthetic oligonucleotide
  Target: ATXN2; (+) strand; PAM type: NRG; PAM sequence: TGG
caaatagcaagtccactagt

SEQ ID NO: 42423 - DNA, 20 bp, Artificial Sequence
  Description of Artificial Sequence: Synthetic oligonucleotide
  Target: ATXN2; (+) strand; PAM type: NRG; PAM sequence: TAG
cactagttggtatctgaata

SEQ ID NO: 42424 - DNA, 20 bp, Artificial Sequence
  Description of Artificial Sequence: Synthetic oligonucleotide
  Target: ATXN2; (+) strand; PAM type: NRG; PAM sequence: TGG
aatatagcactctgctgtat

SEQ ID NO: 42425 - DNA, 20 bp, Artificial Sequence
  Description of Artificial Sequence: Synthetic oligonucleotide
  Target: ATXN2; (+) strand; PAM type: NRG; PAM sequence: TGG
taatgctatattgctatata

SEQ ID NO: 42426 - DNA, 20 bp, Artificial Sequence
  Description of Artificial Sequence: Synthetic oligonucleotide
  Target: ATXN2; (+) strand; PAM type: NRG; PAM sequence: TAG
atattgctatatatggaata

SEQ ID NO: 42427 - DNA, 20 bp, Artificial Sequence
  Description of Artificial Sequence: Synthetic oligonucleotide
  Target: ATXN2; (+) strand; PAM type: NRG; PAM sequence: TGG
ctgcactatactaaatctaa

SEQ ID NO: 42428 - DNA, 20 bp, Artificial Sequence
  Description of Artificial Sequence: Synthetic oligonucleotide
  Target: ATXN2; (+) strand; PAM type: NRG; PAM sequence: AAG
ctaaatctaatggaaaactt

SEQ ID NO: 42429 - DNA, 20 bp, Artificial Sequence
  Description of Artificial Sequence: Synthetic oligonucleotide
  Target: ATXN2; (+) strand; PAM type: NRG; PAM sequence: TGG
ttctttttttttcttttttt

SEQ ID NO: 42430 - DNA, 20 bp, Artificial Sequence
  Description of Artificial Sequence: Synthetic oligonucleotide
  Target: ATXN2; (+) strand; PAM type: NRG; PAM sequence: GAG
ctttttttttcttttttttg

SEQ ID NO: 42431 - DNA, 20 bp, Artificial Sequence
  Description of Artificial Sequence: Synthetic oligonucleotide
  Target: ATXN2; (+) strand; PAM type: NRG; PAM sequence: CGG
ttttttcttttttttggaga

SEQ ID NO: 42432 - DNA, 20 bp, Artificial Sequence
  Description of Artificial Sequence: Synthetic oligonucleotide
  Target: ATXN2; (+) strand; PAM type: NRG; PAM sequence: GAG
ttttcttttttttggagacg

SEQ ID NO: 42433 - DNA, 20 bp, Artificial Sequence
  Description of Artificial Sequence: Synthetic oligonucleotide
  Target: ATXN2; (+) strand; PAM type: NRG; PAM sequence: CAG
ggagtttcgctcttattgcc

SEQ ID NO: 42434 - DNA, 20 bp, Artificial Sequence
  Description of Artificial Sequence: Synthetic oligonucleotide
  Target: ATXN2; (+) strand; PAM type: NRG; PAM sequence: AGG
gagtttcgctcttattgccc

SEQ ID NO: 42435 - DNA, 20 bp, Artificial Sequence
  Description of Artificial Sequence: Synthetic oligonucleotide
  Target: ATXN2; (+) strand; PAM type: NRG; PAM sequence: TGG
ttcgctcttattgcccaggc

SEQ ID NO: 42436 - DNA, 20 bp, Artificial Sequence
  Description of Artificial Sequence: Synthetic oligonucleotide
  Target: ATXN2; (+) strand; PAM type: NRG; PAM sequence: GAG
cgctcttattgcccaggctg

SEQ ID NO: 42437 - DNA, 20 bp, Artificial Sequence
  Description of Artificial Sequence: Synthetic oligonucleotide
  Target: ATXN2; (+) strand; PAM type: NRG; PAM sequence: CAG
ttattgcccaggctggagtg

SEQ ID NO: 42438 - DNA, 20 bp, Artificial Sequence
  Description of Artificial Sequence: Synthetic oligonucleotide
  Target: ATXN2; (+) strand; PAM type: NRG; PAM sequence: CGG
ttgcccaggctggagtgcag

SEQ ID NO: 42439 - DNA, 20 bp, Artificial Sequence
  Description of Artificial Sequence: Synthetic oligonucleotide
  Target: ATXN2; (+) strand; PAM type: NRG; PAM sequence: TGG
agcggcacgatcttaactca

SEQ ID NO: 42440 - DNA, 20 bp, Artificial Sequence
  Description of Artificial Sequence: Synthetic oligonucleotide
  Target: ATXN2; (+) strand; PAM type: NRG; PAM sequence: CGG
tcatggcaaccaccgcctcc

SEQ ID NO: 42441 - DNA, 20 bp, Artificial Sequence
  Description of Artificial Sequence: Synthetic oligonucleotide
  Target: ATXN2; (+) strand; PAM type: NRG; PAM sequence: GGG
catggcaaccaccgcctccc

SEQ ID NO: 42442 - DNA, 20 bp, Artificial Sequence
  Description of Artificial Sequence: Synthetic oligonucleotide
  Target: ATXN2; (+) strand; PAM type: NRG; PAM sequence: AAG
aaccaccgcctcccgggttc

SEQ ID NO: 42443 - DNA, 20 bp, Artificial Sequence
  Description of Artificial Sequence: Synthetic oligonucleotide
  Target: ATXN2; (+) strand; PAM type: NRG; PAM sequence: CAG
ttcaagcatttctcctgcct

SEQ ID NO: 42444 - DNA, 20 bp, Artificial Sequence
  Description of Artificial Sequence: Synthetic oligonucleotide
  Target: ATXN2; (+) strand; PAM type: NRG; PAM sequence: GAG
ttctcctgcctcagtcttgc

SEQ ID NO: 42445 - DNA, 20 bp, Artificial Sequence
  Description of Artificial Sequence: Synthetic oligonucleotide
  Target: ATXN2; (+) strand; PAM type: NRG; PAM sequence: TAG
tcctgcctcagtcttgcgag

SEQ ID NO: 42446 - DNA, 20 bp, Artificial Sequence
  Description of Artificial Sequence: Synthetic oligonucleotide
  Target: ATXN2; (+) strand; PAM type: NRG; PAM sequence: TGG
gcctcagtcttgcgagtagc

SEQ ID NO: 42447 - DNA, 20 bp, Artificial Sequence
  Description of Artificial Sequence: Synthetic oligonucleotide
  Target: ATXN2; (+) strand; PAM type: NRG; PAM sequence: GGG
cctcagtcttgcgagtagct

SEQ ID NO: 42448 - DNA, 20 bp, Artificial Sequence
  Description of Artificial Sequence: Synthetic oligonucleotide
  Target: ATXN2; (+) strand; PAM type: NRG; PAM sequence: CAG
cttgcgagtagctgggatta

SEQ ID NO: 42449 - DNA, 20 bp, Artificial Sequence
  Description of Artificial Sequence: Synthetic oligonucleotide
  Target: ATXN2; (+) strand; PAM type: NRG; PAM sequence: AGG
ttgcgagtagctgggattac

SEQ ID NO: 42450 - DNA, 20 bp, Artificial Sequence
  Description of Artificial Sequence: Synthetic oligonucleotide
  Target: ATXN2; (+) strand; PAM type: NRG; PAM sequence: TGG
caggcacctgccaccacgcc

SEQ ID NO: 42451 - DNA, 20 bp, Artificial Sequence
  Description of Artificial Sequence: Synthetic oligonucleotide
  Target: ATXN2; (+) strand; PAM type: NRG; PAM sequence: TAG
tggctaattttttgtatttt

SEQ ID NO: 42452 - DNA, 20 bp, Artificial Sequence
  Description of Artificial Sequence: Synthetic oligonucleotide
  Target: ATXN2; (+) strand; PAM type: NRG; PAM sequence: TAG
ctaattttttgtatttttag

SEQ ID NO: 42453 - DNA, 20 bp, Artificial Sequence
  Description of Artificial Sequence: Synthetic oligonucleotide
  Target: ATXN2; (+) strand; PAM type: NRG; PAM sequence: GAG
aattttttgtatttttagta

SEQ ID NO: 42454 - DNA, 20 bp, Artificial Sequence
  Description of Artificial Sequence: Synthetic oligonucleotide
  Target: ATXN2; (+) strand; PAM type: NRG; PAM sequence: TGG
ttttgtatttttagtagaga

SEQ ID NO: 42455 - DNA, 20 bp, Artificial Sequence
  Description of Artificial Sequence: Synthetic oligonucleotide
  Target: ATXN2; (+) strand; PAM type: NRG; PAM sequence: GGG
tttgtatttttagtagagat

SEQ ID NO: 42456 - DNA, 20 bp, Artificial Sequence
  Description of Artificial Sequence: Synthetic oligonucleotide
  Target: ATXN2; (+) strand; PAM type: NRG; PAM sequence: GGG
ttgtatttttagtagagatg

SEQ ID NO: 42457 - DNA, 20 bp, Artificial Sequence
  Description of Artificial Sequence: Synthetic oligonucleotide
  Target: ATXN2; (+) strand; PAM type: NRG; PAM sequence: CGG
gagatggggtttcatcatgt

SEQ ID NO: 42458 - DNA, 20 bp, Artificial Sequence
  Description of Artificial Sequence: Synthetic oligonucleotide
  Target: ATXN2; (+) strand; PAM type: NRG; PAM sequence: CAG
tggggtttcatcatgtcggc

SEQ ID NO: 42459 - DNA, 20 bp, Artificial Sequence
  Description of Artificial Sequence: Synthetic oligonucleotide
  Target: ATXN2; (+) strand; PAM type: NRG; PAM sequence: AGG
ggggtttcatcatgtcggcc

SEQ ID NO: 42460 - DNA, 20 bp, Artificial Sequence
  Description of Artificial Sequence: Synthetic oligonucleotide
  Target: ATXN2; (+) strand; PAM type: NRG; PAM sequence: TGG
tttcatcatgtcggccaggc

SEQ ID NO: 42461 - DNA, 20 bp, Artificial Sequence
  Description of Artificial Sequence: Synthetic oligonucleotide
  Target: ATXN2; (+) strand; PAM type: NRG; PAM sequence: TGG
tcatgtcggccaggctggtc

SEQ ID NO: 42462 - DNA, 20 bp, Artificial Sequence
  Description of Artificial Sequence: Synthetic oligonucleotide
  Target: ATXN2; (+) strand; PAM type: NRG; PAM sequence: CAG
tggtctggaactcctgacct

SEQ ID NO: 42463 - DNA, 20 bp, Artificial Sequence
  Description of Artificial Sequence: Synthetic oligonucleotide
  Target: ATXN2; (+) strand; PAM type: NRG; PAM sequence: CAG
ctcagctgatccatccacct

SEQ ID NO: 42464 - DNA, 20 bp, Artificial Sequence
  Description of Artificial Sequence: Synthetic oligonucleotide
  Target: ATXN2; (+) strand; PAM type: NRG; PAM sequence: AAG
ccatccacctcagcctccca

SEQ ID NO: 42465 - DNA, 20 bp, Artificial Sequence
  Description of Artificial Sequence: Synthetic oligonucleotide
  Target: ATXN2; (+) strand; PAM type: NRG; PAM sequence: TGG
acctcagcctcccaaagtgc

SEQ ID NO: 42466 - DNA, 20 bp, Artificial Sequence
  Description of Artificial Sequence: Synthetic oligonucleotide
  Target: ATXN2; (+) strand; PAM type: NRG; PAM sequence: GGG
cctcagcctcccaaagtgct

SEQ ID NO: 42467 - DNA, 20 bp, Artificial Sequence
  Description of Artificial Sequence: Synthetic oligonucleotide
  Target: ATXN2; (+) strand; PAM type: NRG; PAM sequence: CAG
ctcccaaagtgctgggatta

SEQ ID NO: 42468 - DNA, 20 bp, Artificial Sequence
  Description of Artificial Sequence: Synthetic oligonucleotide
  Target: ATXN2; (+) strand; PAM type: NRG; PAM sequence: AGG
tcccaaagtgctgggattac

SEQ ID NO: 42469 - DNA, 20 bp, Artificial Sequence
  Description of Artificial Sequence: Synthetic oligonucleotide
  Target: ATXN2; (+) strand; PAM type: NRG; PAM sequence: GAG
ccaaagtgctgggattacag

SEQ ID NO: 42470 - DNA, 20 bp, Artificial Sequence
  Description of Artificial Sequence: Synthetic oligonucleotide
  Target: ATXN2; (+) strand; PAM type: NRG; PAM sequence: GAG
agtgctgggattacaggagt

SEQ ID NO: 42471 - DNA, 20 bp, Artificial Sequence
  Description of Artificial Sequence: Synthetic oligonucleotide
  Target: ATXN2; (+) strand; PAM type: NRG; PAM sequence: CAG
caggagtgagccatcatgcc

SEQ ID NO: 42472 - DNA, 20 bp, Artificial Sequence
  Description of Artificial Sequence: Synthetic oligonucleotide
  Target: ATXN2; (+) strand; PAM type: NRG; PAM sequence: CAG
gagtgagccatcatgcccag

SEQ ID NO: 42473 - DNA, 20 bp, Artificial Sequence
  Description of Artificial Sequence: Synthetic oligonucleotide
  Target: ATXN2; (+) strand; PAM type: NRG; PAM sequence: TGG
ttatgtgactccacatgaaa

SEQ ID NO: 42474 - DNA, 20 bp, Artificial Sequence
  Description of Artificial Sequence: Synthetic oligonucleotide
  Target: ATXN2; (+) strand; PAM type: NRG; PAM sequence: TGG
gtacatactctgtacaatac

SEQ ID NO: 42475 - DNA, 20 bp, Artificial Sequence
  Description of Artificial Sequence: Synthetic oligonucleotide
  Target: ATXN2; (+) strand; PAM type: NRG; PAM sequence: GGG
tacatactctgtacaatact

SEQ ID NO: 42476 - DNA, 20 bp, Artificial Sequence
  Description of Artificial Sequence: Synthetic oligonucleotide
  Target: ATXN2; (+) strand; PAM type: NRG; PAM sequence: TAG
ctgggtcatctatattttgc

SEQ ID NO: 42477 - DNA, 20 bp, Artificial Sequence
  Description of Artificial Sequence: Synthetic oligonucleotide
  Target: ATXN2; (+) strand; PAM type: NRG; PAM sequence: AAG
gtcatctatattttgctagt

SEQ ID NO: 42478 - DNA, 20 bp, Artificial Sequence
  Description of Artificial Sequence: Synthetic oligonucleotide
  Target: ATXN2; (+) strand; PAM type: NRG; PAM sequence: TAG
attgaatacataccatgtgc

SEQ ID NO: 42479 - DNA, 20 bp, Artificial Sequence
  Description of Artificial Sequence: Synthetic oligonucleotide
  Target: ATXN2; (+) strand; PAM type: NRG; PAM sequence: AGG
ttgaatacataccatgtgct

SEQ ID NO: 42480 - DNA, 20 bp, Artificial Sequence
  Description of Artificial Sequence: Synthetic oligonucleotide
  Target: ATXN2; (+) strand; PAM type: NRG; PAM sequence: TAG
gcactatgctaaacacttta

SEQ ID NO: 42481 - DNA, 20 bp, Artificial Sequence
  Description of Artificial Sequence: Synthetic oligonucleotide
  Target: ATXN2; (+) strand; PAM type: NRG; PAM sequence: AGG
cactatgctaaacactttat

SEQ ID NO: 42482 - DNA, 20 bp, Artificial Sequence
  Description of Artificial Sequence: Synthetic oligonucleotide
  Target: ATXN2; (+) strand; PAM type: NRG; PAM sequence: GAG
tttataggcaatatctcatc

SEQ ID NO: 42483 - DNA, 20 bp, Artificial Sequence
  Description of Artificial Sequence: Synthetic oligonucleotide
  Target: ATXN2; (+) strand; PAM type: NRG; PAM sequence: CAG
aatatctcatcgagctctca

SEQ ID NO: 42484 - DNA, 20 bp, Artificial Sequence
  Description of Artificial Sequence: Synthetic oligonucleotide
  Target: ATXN2; (+) strand; PAM type: NRG; PAM sequence: AGG
atatctcatcgagctctcac

SEQ ID NO: 42485 - DNA, 20 bp, Artificial Sequence
  Description of Artificial Sequence: Synthetic oligonucleotide
  Target: ATXN2; (+) strand; PAM type: NRG; PAM sequence: AAG
gctctcacaggaacactatg

SEQ ID NO: 42486 - DNA, 20 bp, Artificial Sequence
  Description of Artificial Sequence: Synthetic oligonucleotide
  Target: ATXN2; (+) strand; PAM type: NRG; PAM sequence: CAG
ctcacaggaacactatgaag

SEQ ID NO: 42487 - DNA, 20 bp, Artificial Sequence
  Description of Artificial Sequence: Synthetic oligonucleotide
  Target: ATXN2; (+) strand; PAM type: NRG; PAM sequence: AGG
tcacaggaacactatgaagc

SEQ ID NO: 42488 - DNA, 20 bp, Artificial Sequence
  Description of Artificial Sequence: Synthetic oligonucleotide
  Target: ATXN2; (+) strand; PAM type: NRG; PAM sequence: TGG
gttctaaaattaacccattt

SEQ ID NO: 42489 - DNA, 20 bp, Artificial Sequence
  Description of Artificial Sequence: Synthetic oligonucleotide
  Target: ATXN2; (+) strand; PAM type: NRG; PAM sequence: TGG
aaaattaacccattttggct

SEQ ID NO: 42490 - DNA, 20 bp, Artificial Sequence
  Description of Artificial Sequence: Synthetic oligonucleotide
  Target: ATXN2; (+) strand; PAM type: NRG; PAM sequence: GGG
aaattaacccattttggctt

SEQ ID NO: 42491 - DNA, 20 bp, Artificial Sequence
  Description of Artificial Sequence: Synthetic oligonucleotide
  Target: ATXN2; (+) strand; PAM type: NRG; PAM sequence: GGG
aattaacccattttggcttg

SEQ ID NO: 42492 - DNA, 20 bp, Artificial Sequence
  Description of Artificial Sequence: Synthetic oligonucleotide
  Target: ATXN2; (+) strand; PAM type: NRG; PAM sequence: GGG
attaacccattttggcttgg

SEQ ID NO: 42493 - DNA, 20 bp, Artificial Sequence
  Description of Artificial Sequence: Synthetic oligonucleotide
  Target: ATXN2; (+) strand; PAM type: NRG; PAM sequence: AAG
aacccattttggcttggggg

SEQ ID NO: 42494 - DNA, 20 bp, Artificial Sequence
  Description of Artificial Sequence: Synthetic oligonucleotide
  Target: ATXN2; (+) strand; PAM type: NRG; PAM sequence: TAG
ccattttggcttgggggaag

SEQ ID NO: 42495 - DNA, 20 bp, Artificial Sequence
  Description of Artificial Sequence: Synthetic oligonucleotide
  Target: ATXN2; (+) strand; PAM type: NRG; PAM sequence: TAG
tttggcttgggggaagtaga

SEQ ID NO: 42496 - DNA, 20 bp, Artificial Sequence
  Description of Artificial Sequence: Synthetic oligonucleotide
  Target: ATXN2; (+) strand; PAM type: NRG; PAM sequence: TAG
aatgttacgcacatgatgta

SEQ ID NO: 42497 - DNA, 20 bp, Artificial Sequence
  Description of Artificial Sequence: Synthetic oligonucleotide
  Target: ATXN2; (+) strand; PAM type: NRG; PAM sequence: GAG
tgttacgcacatgatgtata

SEQ ID NO: 42498 - DNA, 20 bp, Artificial Sequence
  Description of Artificial Sequence: Synthetic oligonucleotide
  Target: ATXN2; (+) strand; PAM type: NRG; PAM sequence: AGG
gttacgcacatgatgtatag

SEQ ID NO: 42499 - DNA, 20 bp, Artificial Sequence
  Description of Artificial Sequence: Synthetic oligonucleotide
  Target: ATXN2; (+) strand; PAM type: NRG; PAM sequence: TAG
tagaggccaacattcaaacc

SEQ ID NO: 42500 - DNA, 20 bp, Artificial Sequence
  Description of Artificial Sequence: Synthetic oligonucleotide
  Target: ATXN2; (+) strand; PAM type: NRG; PAM sequence: AGG
agaggccaacattcaaacct

SEQ ID NO: 42501 - DNA, 20 bp, Artificial Sequence
  Description of Artificial Sequence: Synthetic oligonucleotide
  Target: ATXN2; (+) strand; PAM type: NRG; PAM sequence: CAG
cccacattattaacccaaaa

SEQ ID NO: 42502 - DNA, 20 bp, Artificial Sequence
  Description of Artificial Sequence: Synthetic oligonucleotide
  Target: ATXN2; (+) strand; PAM type: NRG; PAM sequence: TAG
cccaaaacagatcaaattac

SEQ ID NO: 42503 - DNA, 20 bp, Artificial Sequence
  Description of Artificial Sequence: Synthetic oligonucleotide
  Target: ATXN2; (+) strand; PAM type: NRG; PAM sequence: AAG
tagcaattcttacacaaata

SEQ ID NO: 42504 - DNA, 20 bp, Artificial Sequence
  Description of Artificial Sequence: Synthetic oligonucleotide
  Target: ATXN2; (+) strand; PAM type: NRG; PAM sequence: CAG
tcttacacaaataaagctat

SEQ ID NO: 42505 - DNA, 20 bp, Artificial Sequence
  Description of Artificial Sequence: Synthetic oligonucleotide
  Target: ATXN2; (+) strand; PAM type: NRG; PAM sequence: TGG
agctatcagcactctgcata

SEQ ID NO: 42506 - DNA, 20 bp, Artificial Sequence
  Description of Artificial Sequence: Synthetic oligonucleotide
  Target: ATXN2; (+) strand; PAM type: NRG; PAM sequence: AAG
gcactctgcatatggctcaa

SEQ ID NO: 42507 - DNA, 20 bp, Artificial Sequence
  Description of Artificial Sequence: Synthetic oligonucleotide
  Target: ATXN2; (+) strand; PAM type: NRG; PAM sequence: AGG
cactctgcatatggctcaaa

SEQ ID NO: 42508 - DNA, 20 bp, Artificial Sequence
  Description of Artificial Sequence: Synthetic oligonucleotide
  Target: ATXN2; (+) strand; PAM type: NRG; PAM sequence: GGG
actctgcatatggctcaaaa

SEQ ID NO: 42509 - DNA, 20 bp, Artificial Sequence
  Description of Artificial Sequence: Synthetic oligonucleotide
  Target: ATXN2; (+) strand; PAM type: NRG; PAM sequence: AAG
ctgcatatggctcaaaaggg

SEQ ID NO: 42510 - DNA, 20 bp, Artificial Sequence
  Description of Artificial Sequence: Synthetic oligonucleotide
  Target: ATXN2; (+) strand; PAM type: NRG; PAM sequence: AGG
tgcatatggctcaaaaggga

SEQ ID NO: 42511 - DNA, 20 bp, Artificial Sequence
  Description of Artificial Sequence: Synthetic oligonucleotide
  Target: ATXN2; (+) strand; PAM type: NRG; PAM sequence: AAG
ggaaggaacaacaaacacac

SEQ ID NO: 42512 - DNA, 20 bp, Artificial Sequence
  Description of Artificial Sequence: Synthetic oligonucleotide
  Target: ATXN2; (+) strand; PAM type: NRG; PAM sequence: AGG
gaaggaacaacaaacacaca

SEQ ID NO: 42513 - DNA, 20 bp, Artificial Sequence
  Description of Artificial Sequence: Synthetic oligonucleotide
  Target: ATXN2; (+) strand; PAM type: NRG; PAM sequence: AAG
tttctatttctgcctaaatg

SEQ ID NO: 42514 - DNA, 20 bp, Artificial Sequence
  Description of Artificial Sequence: Synthetic oligonucleotide
  Target: ATXN2; (+) strand; PAM type: NRG; PAM sequence: AGG
ttctatttctgcctaaatga

SEQ ID NO: 42515 - DNA, 20 bp, Artificial Sequence
  Description of Artificial Sequence: Synthetic oligonucleotide
  Target: ATXN2; (+) strand; PAM type: NRG; PAM sequence: CAG
tctgcctaaatgaaggacta

SEQ ID NO: 42516 - DNA, 20 bp, Artificial Sequence
  Description of Artificial Sequence: Synthetic oligonucleotide
  Target: ATXN2; (+) strand; PAM type: NRG; PAM sequence: CAG
cagatatttgtgaacaaatg

SEQ ID NO: 42517 - DNA, 20 bp, Artificial Sequence
  Description of Artificial Sequence: Synthetic oligonucleotide
  Target: ATXN2; (+) strand; PAM type: NRG; PAM sequence: TGG
atttgtgaacaaatgcagtt

SEQ ID NO: 42518 - DNA, 20 bp, Artificial Sequence
  Description of Artificial Sequence: Synthetic oligonucleotide
  Target: ATXN2; (+) strand; PAM type: NRG; PAM sequence: GGG
tttgtgaacaaatgcagttt

SEQ ID NO: 42519 - DNA, 20 bp, Artificial Sequence
  Description of Artificial Sequence: Synthetic oligonucleotide
  Target: ATXN2; (+) strand; PAM type: NRG; PAM sequence: GGG
ttgtgaacaaatgcagtttg

SEQ ID NO: 42520 - DNA, 20 bp, Artificial Sequence
  Description of Artificial Sequence: Synthetic oligonucleotide
  Target: ATXN2; (+) strand; PAM type: NRG; PAM sequence: GAG
caaatgcagtttggggctat

SEQ ID NO: 42521 - DNA, 20 bp, Artificial Sequence
  Description of Artificial Sequence: Synthetic oligonucleotide
  Target: ATXN2; (+) strand; PAM type: NRG; PAM sequence: AAG
ggggctatgagcatgtcatg

SEQ ID NO: 42522 - DNA, 20 bp, Artificial Sequence
  Description of Artificial Sequence: Synthetic oligonucleotide
  Target: ATXN2; (+) strand; PAM type: NRG; PAM sequence: TAG
ctatgagcatgtcatgaagt

SEQ ID NO: 42523 - DNA, 20 bp, Artificial Sequence
  Description of Artificial Sequence: Synthetic oligonucleotide
  Target: ATXN2; (+) strand; PAM type: NRG; PAM sequence: CAG
tctaatgaatcactgactga

SEQ ID NO: 42524 - DNA, 20 bp, Artificial Sequence
  Description of Artificial Sequence: Synthetic oligonucleotide
  Target: ATXN2; (+) strand; PAM type: NRG; PAM sequence: CAG
tgaatcactgactgacagtg

SEQ ID NO: 42525 - DNA, 20 bp, Artificial Sequence
  Description of Artificial Sequence: Synthetic oligonucleotide
  Target: ATXN2; (+) strand; PAM type: NRG; PAM sequence: TAG
gtgcagcatgcactatgcat

SEQ ID NO: 42526 - DNA, 20 bp, Artificial Sequence
  Description of Artificial Sequence: Synthetic oligonucleotide
  Target: ATXN2; (+) strand; PAM type: NRG; PAM sequence: AAG
tatgcattagttactattca

SEQ ID NO: 42527 - DNA, 20 bp, Artificial Sequence
  Description of Artificial Sequence: Synthetic oligonucleotide
  Target: ATXN2; (+) strand; PAM type: NRG; PAM sequence: TAG
gttactattcaaagcactgc

SEQ ID NO: 42528 - DNA, 20 bp, Artificial Sequence
  Description of Artificial Sequence: Synthetic oligonucleotide
  Target: ATXN2; (+) strand; PAM type: NRG; PAM sequence: AAG
actattcaaagcactgctag

SEQ ID NO: 42529 - DNA, 20 bp, Artificial Sequence
  Description of Artificial Sequence: Synthetic oligonucleotide
  Target: ATXN2; (+) strand; PAM type: NRG; PAM sequence: CAG
actgctagaagcttaaacac

SEQ ID NO: 42530 - DNA, 20 bp, Artificial Sequence
  Description of Artificial Sequence: Synthetic oligonucleotide
  Target: ATXN2; (+) strand; PAM type: NRG; PAM sequence: TGG
ctagaagcttaaacaccaga

SEQ ID NO: 42531 - DNA, 20 bp, Artificial Sequence
  Description of Artificial Sequence: Synthetic oligonucleotide
  Target: ATXN2; (+) strand; PAM type: NRG; PAM sequence: CAG
aagcttaaacaccagatggt

SEQ ID NO: 42532 - DNA, 20 bp, Artificial Sequence
  Description of Artificial Sequence: Synthetic oligonucleotide
  Target: ATXN2; (+) strand; PAM type: NRG; PAM sequence: TAG
tggtcagccctcttacttac

SEQ ID NO: 42533 - DNA, 20 bp, Artificial Sequence
  Description of Artificial Sequence: Synthetic oligonucleotide
  Target: ATXN2; (+) strand; PAM type: NRG; PAM sequence: GAG
ctcttacttactagccatgt

SEQ ID NO: 42534 - DNA, 20 bp, Artificial Sequence
  Description of Artificial Sequence: Synthetic oligonucleotide
  Target: ATXN2; (+) strand; PAM type: NRG; PAM sequence: TGG
acttactagccatgtgagtt

SEQ ID NO: 42535 - DNA, 20 bp, Artificial Sequence
  Description of Artificial Sequence: Synthetic oligonucleotide
  Target: ATXN2; (+) strand; PAM type: NRG; PAM sequence: GGG
cttactagccatgtgagttt

SEQ ID NO: 42536 - DNA, 20 bp, Artificial Sequence
  Description of Artificial Sequence: Synthetic oligonucleotide
  Target: ATXN2; (+) strand; PAM type: NRG; PAM sequence: CAG
actagccatgtgagtttggg

SEQ ID NO: 42537 - DNA, 20 bp, Artificial Sequence
  Description of Artificial Sequence: Synthetic oligonucleotide
  Target: ATXN2; (+) strand; PAM type: NRG; PAM sequence: AAG
tacttaacttctctttgccc

SEQ ID NO: 42538 - DNA, 20 bp, Artificial Sequence
  Description of Artificial Sequence: Synthetic oligonucleotide
  Target: ATXN2; (+) strand; PAM type: NRG; PAM sequence: CAG
cccaagctgcctaatataca

SEQ ID NO: 42539 - DNA, 20 bp, Artificial Sequence
  Description of Artificial Sequence: Synthetic oligonucleotide
  Target: ATXN2; (+) strand; PAM type: NRG; PAM sequence: CAG
gctgcctaatatacacagtg

SEQ ID NO: 42540 - DNA, 20 bp, Artificial Sequence
  Description of Artificial Sequence: Synthetic oligonucleotide
  Target: ATXN2; (+) strand; PAM type: NRG; PAM sequence: CAG
atacacagtgcagatacaaa

SEQ ID NO: 42541 - DNA, 20 bp, Artificial Sequence
  Description of Artificial Sequence: Synthetic oligonucleotide
  Target: ATXN2; (+) strand; PAM type: NRG; PAM sequence: CAG
tacaaacagaacttgcttga

SEQ ID NO: 42542 - DNA, 20 bp, Artificial Sequence
  Description of Artificial Sequence: Synthetic oligonucleotide
  Target: ATXN2; (+) strand; PAM type: NRG; PAM sequence: GAG
caaacagaacttgcttgaca

SEQ ID NO: 42543 - DNA, 20 bp, Artificial Sequence
  Description of Artificial Sequence: Synthetic oligonucleotide
  Target: ATXN2; (+) strand; PAM type: NRG; PAM sequence: TAG
aacttgcttgacagagatgt

SEQ ID NO: 42544 - DNA, 20 bp, Artificial Sequence
  Description of Artificial Sequence: Synthetic oligonucleotide
  Target: ATXN2; (+) strand; PAM type: NRG; PAM sequence: AAG
gcttgacagagatgttagac

SEQ ID NO: 42545 - DNA, 20 bp, Artificial Sequence
  Description of Artificial Sequence: Synthetic oligonucleotide
  Target: ATXN2; (+) strand; PAM type: NRG; PAM sequence: AAG
ttagacaagatttaacatac

SEQ ID NO: 42546 - DNA, 20 bp, Artificial Sequence
  Description of Artificial Sequence: Synthetic oligonucleotide
  Target: ATXN2; (+) strand; PAM type: NRG; PAM sequence: AAG
agatttaacatacaagcatg

SEQ ID NO: 42547 - DNA, 20 bp, Artificial Sequence
  Description of Artificial Sequence: Synthetic oligonucleotide
  Target: ATXN2; (+) strand; PAM type: NRG; PAM sequence: CAG
taacatacaagcatgaagaa

SEQ ID NO: 42548 - DNA, 20 bp, Artificial Sequence
  Description of Artificial Sequence: Synthetic oligonucleotide
  Target: ATXN2; (+) strand; PAM type: NRG; PAM sequence: TGG
caagcatgaagaacagcatc

SEQ ID NO: 42549 - DNA, 20 bp, Artificial Sequence
  Description of Artificial Sequence: Synthetic oligonucleotide
  Target: ATXN2; (+) strand; PAM type: NRG; PAM sequence: CAG
gaagaacagcatctggtaca

SEQ ID NO: 42550 - DNA, 20 bp, Artificial Sequence
  Description of Artificial Sequence: Synthetic oligonucleotide
  Target: ATXN2; (+) strand; PAM type: NRG; PAM sequence: AGG
aagaacagcatctggtacac

SEQ ID NO: 42551 - DNA, 20 bp, Artificial Sequence
  Description of Artificial Sequence: Synthetic oligonucleotide
  Target: ATXN2; (+) strand; PAM type: NRG; PAM sequence: AAG
ggaaatacgcaataaaacat

SEQ ID NO: 42552 - DNA, 20 bp, Artificial Sequence
  Description of Artificial Sequence: Synthetic oligonucleotide
  Target: ATXN2; (+) strand; PAM type: NRG; PAM sequence: GAG
aaatacgcaataaaacataa

SEQ ID NO: 42553 - DNA, 20 bp, Artificial Sequence
  Description of Artificial Sequence: Synthetic oligonucleotide
  Target: ATXN2; (+) strand; PAM type: NRG; PAM sequence: AAG
gaataacattatattatctg

SEQ ID NO: 42554 - DNA, 20 bp, Artificial Sequence
  Description of Artificial Sequence: Synthetic oligonucleotide
  Target: ATXN2; (+) strand; PAM type: NRG; PAM sequence: GAG
ataacattatattatctgaa

SEQ ID NO: 42555 - DNA, 20 bp, Artificial Sequence
  Description of Artificial Sequence: Synthetic oligonucleotide
  Target: ATXN2; (+) strand; PAM type: NRG; PAM sequence: TAG
tattatctgaagagaacaat

SEQ ID NO: 42556 - DNA, 20 bp, Artificial Sequence
  Description of Artificial Sequence: Synthetic oligonucleotide
  Target: ATXN2; (+) strand; PAM type: NRG; PAM sequence: AAG
atctgaagagaacaattaga

SEQ ID NO: 42557 - DNA, 20 bp, Artificial Sequence
  Description of Artificial Sequence: Synthetic oligonucleotide
  Target: ATXN2; (+) strand; PAM type: NRG; PAM sequence: AAG
tttttttttaattaaaattt

SEQ ID NO: 42558 - DNA, 20 bp, Artificial Sequence
  Description of Artificial Sequence: Synthetic oligonucleotide
  Target: ATXN2; (+) strand; PAM type: NRG; PAM sequence: TGG
tttaattaaaatttaagttc

SEQ ID NO: 42559 - DNA, 20 bp, Artificial Sequence
  Description of Artificial Sequence: Synthetic oligonucleotide
  Target: ATXN2; (+) strand; PAM type: NRG; PAM sequence: GGG
ttaattaaaatttaagttct

SEQ ID NO: 42560 - DNA, 20 bp, Artificial Sequence
  Description of Artificial Sequence: Synthetic oligonucleotide
  Target: ATXN2; (+) strand; PAM type: NRG; PAM sequence: GAG
cactctctttttttttcttt

SEQ ID NO: 42561 - DNA, 20 bp, Artificial Sequence
  Description of Artificial Sequence: Synthetic oligonucleotide
  Target: ATXN2; (+) strand; PAM type: NRG; PAM sequence: CAG
ctctttttttttctttgaga

SEQ ID NO: 42562 - DNA, 20 bp, Artificial Sequence
  Description of Artificial Sequence: Synthetic oligonucleotide
  Target: ATXN2; (+) strand; PAM type: NRG; PAM sequence: CGG
gtcgcccactgatgcaatct

SEQ ID NO: 42563 - DNA, 20 bp, Artificial Sequence
  Description of Artificial Sequence: Synthetic oligonucleotide
  Target: ATXN2; (+) strand; PAM type: NRG; PAM sequence: TGG
tcactgcaacctccacctcc

SEQ ID NO: 42564 - DNA, 20 bp, Artificial Sequence
  Description of Artificial Sequence: Synthetic oligonucleotide
  Target: ATXN2; (+) strand; PAM type: NRG; PAM sequence: AAG
aacctccacctcctggattc

SEQ ID NO: 42565 - DNA, 20 bp, Artificial Sequence
  Description of Artificial Sequence: Synthetic oligonucleotide
  Target: ATXN2; (+) strand; PAM type: NRG; PAM sequence: CAG
ttcaagtgattctcctgcct

SEQ ID NO: 42566 - DNA, 20 bp, Artificial Sequence
  Description of Artificial Sequence: Synthetic oligonucleotide
  Target: ATXN2; (+) strand; PAM type: NRG; PAM sequence: GAG
ttctcctgcctcagcctcct

SEQ ID NO: 42567 - DNA, 20 bp, Artificial Sequence
  Description of Artificial Sequence: Synthetic oligonucleotide
  Target: ATXN2; (+) strand; PAM type: NRG; PAM sequence: TAG
tcctgcctcagcctcctgag

SEQ ID NO: 42568 - DNA, 20 bp, Artificial Sequence
  Description of Artificial Sequence: Synthetic oligonucleotide
  Target: ATXN2; (+) strand; PAM type: NRG; PAM sequence: TGG
gcctcagcctcctgagtagc

SEQ ID NO: 42569 - DNA, 20 bp, Artificial Sequence
  Description of Artificial Sequence: Synthetic oligonucleotide
  Target: ATXN2; (+) strand; PAM type: NRG; PAM sequence: GGG
cctcagcctcctgagtagct

SEQ ID NO: 42570 - DNA, 20 bp, Artificial Sequence
  Description of Artificial Sequence: Synthetic oligonucleotide
  Target: ATXN2; (+) strand; PAM type: NRG; PAM sequence: CAG
ctcctgagtagctgggatta

SEQ ID NO: 42571 - DNA, 20 bp, Artificial Sequence
  Description of Artificial Sequence: Synthetic oligonucleotide
  Target: ATXN2; (+) strand; PAM type: NRG; PAM sequence: AGG
tcctgagtagctgggattac

SEQ ID NO: 42572 - DNA, 20 bp, Artificial Sequence
  Description of Artificial Sequence: Synthetic oligonucleotide
  Target: ATXN2; (+) strand; PAM type: NRG; PAM sequence: CGG
caggcatgtgccaccatgcc

SEQ ID NO: 42573 - DNA, 20 bp, Artificial Sequence
  Description of Artificial Sequence: Synthetic oligonucleotide
  Target: ATXN2; (+) strand; PAM type: NRG; PAM sequence: AAG
taatttatatatttttaata

SEQ ID NO: 42574 - DNA, 20 bp, Artificial Sequence
  Description of Artificial Sequence: Synthetic oligonucleotide
  Target: ATXN2; (+) strand; PAM type: NRG; PAM sequence: TAG
ttatatatttttaataaaga

SEQ ID NO: 42575 - DNA, 20 bp, Artificial Sequence
  Description of Artificial Sequence: Synthetic oligonucleotide
  Target: ATXN2; (+) strand; PAM type: NRG; PAM sequence: AGG
tatatatttttaataaagat

SEQ ID NO: 42576 - DNA, 20 bp, Artificial Sequence
  Description of Artificial Sequence: Synthetic oligonucleotide
  Target: ATXN2; (+) strand; PAM type: NRG; PAM sequence: GGG
atatatttttaataaagata

SEQ ID NO: 42577 - DNA, 20 bp, Artificial Sequence
  Description of Artificial Sequence: Synthetic oligonucleotide
  Target: ATXN2; (+) strand; PAM type: NRG; PAM sequence: CAG
tagggtttcgccatgttatc

SEQ ID NO: 42578 - DNA, 20 bp, Artificial Sequence
  Description of Artificial Sequence: Synthetic oligonucleotide
  Target: ATXN2; (+) strand; PAM type: NRG; PAM sequence: AGG
agggtttcgccatgttatcc

SEQ ID NO: 42579 - DNA, 20 bp, Artificial Sequence
  Description of Artificial Sequence: Synthetic oligonucleotide
  Target: ATXN2; (+) strand; PAM type: NRG; PAM sequence: TGG
tttcgccatgttatccaggc

SEQ ID NO: 42580 - DNA, 20 bp, Artificial Sequence
  Description of Artificial Sequence: Synthetic oligonucleotide
  Target: ATXN2; (+) strand; PAM type: NRG; PAM sequence: AAG
ggtctcaaactcctgacctc

SEQ ID NO: 42581 - DNA, 20 bp, Artificial Sequence
  Description of Artificial Sequence: Synthetic oligonucleotide
  Target: ATXN2; (+) strand; PAM type: NRG; PAM sequence: CAG
ctcaagtgatccacccgcct

SEQ ID NO: 42582 - DNA, 20 bp, Artificial Sequence
  Description of Artificial Sequence: Synthetic oligonucleotide
  Target: ATXN2; (+) strand; PAM type: NRG; PAM sequence: AAG
ccacccgcctcagcctccca

SEQ ID NO: 42583 - DNA, 20 bp, Artificial Sequence
  Description of Artificial Sequence: Synthetic oligonucleotide
  Target: ATXN2; (+) strand; PAM type: NRG; PAM sequence: TAG
gcctcagcctcccaaagtgt

SEQ ID NO: 42584 - DNA, 20 bp, Artificial Sequence
  Description of Artificial Sequence: Synthetic oligonucleotide
  Target: ATXN2; (+) strand; PAM type: NRG; PAM sequence: AGG
cctcagcctcccaaagtgtt

SEQ ID NO: 42585 - DNA, 20 bp, Artificial Sequence
  Description of Artificial Sequence: Synthetic oligonucleotide
  Target: ATXN2; (+) strand; PAM type: NRG; PAM sequence: TAG
ctcccaaagtgttaggatta

SEQ ID NO: 42586 - DNA, 20 bp, Artificial Sequence
  Description of Artificial Sequence: Synthetic oligonucleotide
  Target: ATXN2; (+) strand; PAM type: NRG; PAM sequence: AGG
tcccaaagtgttaggattat

SEQ ID NO: 42587 - DNA, 20 bp, Artificial Sequence
  Description of Artificial Sequence: Synthetic oligonucleotide
  Target: ATXN2; (+) strand; PAM type: NRG; PAM sequence: CAG
agtgttaggattataggtat

SEQ ID NO: 42588 - DNA, 20 bp, Artificial Sequence
  Description of Artificial Sequence: Synthetic oligonucleotide
  Target: ATXN2; (+) strand; PAM type: NRG; PAM sequence: CGG
taggtatcagccaccgtgcc

SEQ ID NO: 42589 - DNA, 20 bp, Artificial Sequence
  Description of Artificial Sequence: Synthetic oligonucleotide
  Target: ATXN2; (+) strand; PAM type: NRG; PAM sequence: TGG
aaaaccacttcttttcttcc

SEQ ID NO: 42590 - DNA, 20 bp, Artificial Sequence
  Description of Artificial Sequence: Synthetic oligonucleotide
  Target: ATXN2; (+) strand; PAM type: NRG; PAM sequence: TGG
ttcttcctggtatgccccta

SEQ ID NO: 42591 - DNA, 20 bp, Artificial Sequence
  Description of Artificial Sequence: Synthetic oligonucleotide
  Target: ATXN2; (+) strand; PAM type: NRG; PAM sequence: AAG
ctggtatgcccctatggatc

SEQ ID NO: 42592 - DNA, 20 bp, Artificial Sequence
  Description of Artificial Sequence: Synthetic oligonucleotide
  Target: ATXN2; (+) strand; PAM type: NRG; PAM sequence: AGG
tggtatgcccctatggatca

SEQ ID NO: 42593 - DNA, 20 bp, Artificial Sequence
  Description of Artificial Sequence: Synthetic oligonucleotide
  Target: ATXN2; (+) strand; PAM type: NRG; PAM sequence: GAG
gtatgcccctatggatcaag

SEQ ID NO: 42594 - DNA, 20 bp, Artificial Sequence
  Description of Artificial Sequence: Synthetic oligonucleotide
  Target: ATXN2; (+) strand; PAM type: NRG; PAM sequence: TAG
cctatggatcaaggagttat

SEQ ID NO: 42595 - DNA, 20 bp, Artificial Sequence
  Description of Artificial Sequence: Synthetic oligonucleotide
  Target: ATXN2; (+) strand; PAM type: NRG; PAM sequence: AAG
tggatcaaggagttattagt

SEQ ID NO: 42596 - DNA, 20 bp, Artificial Sequence
  Description of Artificial Sequence: Synthetic oligonucleotide
  Target: ATXN2; (+) strand; PAM type: NRG; PAM sequence: GAG
gatcaaggagttattagtaa

SEQ ID NO: 42597 - DNA, 20 bp, Artificial Sequence
  Description of Artificial Sequence: Synthetic oligonucleotide
  Target: ATXN2; (+) strand; PAM type: NRG; PAM sequence: AGG
atcaaggagttattagtaag

SEQ ID NO: 42598 - DNA, 20 bp, Artificial Sequence
  Description of Artificial Sequence: Synthetic oligonucleotide
  Target: ATXN2; (+) strand; PAM type: NRG; PAM sequence: TGG
aagaggctaaataatacatt

SEQ ID NO: 42599 - DNA, 20 bp, Artificial Sequence
  Description of Artificial Sequence: Synthetic oligonucleotide
  Target: ATXN2; (+) strand; PAM type: NRG; PAM sequence: CAG
aaataatacatttggttatt

SEQ ID NO: 42600 - DNA, 20 bp, Artificial Sequence
  Description of Artificial Sequence: Synthetic oligonucleotide
  Target: ATXN2; (+) strand; PAM type: NRG; PAM sequence: AGG
aataatacatttggttattc

SEQ ID NO: 42601 - DNA, 20 bp, Artificial Sequence
  Description of Artificial Sequence: Synthetic oligonucleotide
  Target: ATXN2; (+) strand; PAM type: NRG; PAM sequence: AAG
ttggttattcaggcacctaa

SEQ ID NO: 42602 - DNA, 20 bp, Artificial Sequence
  Description of Artificial Sequence: Synthetic oligonucleotide
  Target: ATXN2; (+) strand; PAM type: NRG; PAM sequence: TAG
gttattcaggcacctaaaag

SEQ ID NO: 42603 - DNA, 20 bp, Artificial Sequence
  Description of Artificial Sequence: Synthetic oligonucleotide
  Target: ATXN2; (+) strand; PAM type: NRG; PAM sequence: AAG
ttcaggcacctaaaagtagt

SEQ ID NO: 42604 - DNA, 20 bp, Artificial Sequence
  Description of Artificial Sequence: Synthetic oligonucleotide
  Target: ATXN2; (+) strand; PAM type: NRG; PAM sequence: AAG
tagtaagactaaaactccta

SEQ ID NO: 42605 - DNA, 20 bp, Artificial Sequence
  Description of Artificial Sequence: Synthetic oligonucleotide
  Target: ATXN2; (+) strand; PAM type: NRG; PAM sequence: GAG
gtaagactaaaactcctaaa

SEQ ID NO: 42606 - DNA, 20 bp, Artificial Sequence
  Description of Artificial Sequence: Synthetic oligonucleotide
  Target: ATXN2; (+) strand; PAM type: NRG; PAM sequence: AAG
actaaaactcctaaagagat

SEQ ID NO: 42607 - DNA, 20 bp, Artificial Sequence
  Description of Artificial Sequence: Synthetic oligonucleotide
  Target: ATXN2; (+) strand; PAM type: NRG; PAM sequence: TGG
ctttttatgttgctccttct

SEQ ID NO: 42608 - DNA, 20 bp, Artificial Sequence
  Description of Artificial Sequence: Synthetic oligonucleotide
  Target: ATXN2; (+) strand; PAM type: NRG; PAM sequence: AAG
gttgctccttcttggaattt

SEQ ID NO: 42609 - DNA, 20 bp, Artificial Sequence
  Description of Artificial Sequence: Synthetic oligonucleotide
  Target: ATXN2; (+) strand; PAM type: NRG; PAM sequence: AAG
tccttcttggaatttaagtc

SEQ ID NO: 42610 - DNA, 20 bp, Artificial Sequence
  Description of Artificial Sequence: Synthetic oligonucleotide
  Target: ATXN2; (+) strand; PAM type: NRG; PAM sequence: AAG
atttaagtcaagcattaatg

SEQ ID NO: 42611 - DNA, 20 bp, Artificial Sequence
  Description of Artificial Sequence: Synthetic oligonucleotide
  Target: ATXN2; (+) strand; PAM type: NRG; PAM sequence: AGG
tttaagtcaagcattaatga

SEQ ID NO: 42612 - DNA, 20 bp, Artificial Sequence
  Description of Artificial Sequence: Synthetic oligonucleotide
  Target: ATXN2; (+) strand; PAM type: NRG; PAM sequence: CAG
caagcattaatgaaggttta

SEQ ID NO: 42613 - DNA, 20 bp, Artificial Sequence
  Description of Artificial Sequence: Synthetic oligonucleotide
  Target: ATXN2; (+) strand; PAM type: NRG; PAM sequence: AAG
cattaatgaaggtttacaga

SEQ ID NO: 42614 - DNA, 20 bp, Artificial Sequence
  Description of Artificial Sequence: Synthetic oligonucleotide
  Target: ATXN2; (+) strand; PAM type: NRG; PAM sequence: TAG
tttacagaaagttgtgctga

SEQ ID NO: 42615 - DNA, 20 bp, Artificial Sequence
  Description of Artificial Sequence: Synthetic oligonucleotide
  Target: ATXN2; (+) strand; PAM type: NRG; PAM sequence: AAG
atgttttctgctaactgaaa

SEQ ID NO: 42616 - DNA, 20 bp, Artificial Sequence
  Description of Artificial Sequence: Synthetic oligonucleotide
  Target: ATXN2; (+) strand; PAM type: NRG; PAM sequence: CAG
ttctgctaactgaaaaagta

SEQ ID NO: 42617 - DNA, 20 bp, Artificial Sequence
  Description of Artificial Sequence: Synthetic oligonucleotide
  Target: ATXN2; (+) strand; PAM type: NRG; PAM sequence: CAG
aagtacagccttttaaaata

SEQ ID NO: 42618 - DNA, 20 bp, Artificial Sequence
  Description of Artificial Sequence: Synthetic oligonucleotide
  Target: ATXN2; (+) strand; PAM type: NRG; PAM sequence: AAG
aaaatacagtaactctaatc

SEQ ID NO: 42619 - DNA, 20 bp, Artificial Sequence
  Description of Artificial Sequence: Synthetic oligonucleotide
  Target: ATXN2; (+) strand; PAM type: NRG; PAM sequence: CAG
tacagtaactctaatcaaga

SEQ ID NO: 42620 - DNA, 20 bp, Artificial Sequence
  Description of Artificial Sequence: Synthetic oligonucleotide
  Target: ATXN2; (+) strand; PAM type: NRG; PAM sequence: TGG
taactctaatcaagacagta

SEQ ID NO: 42621 - DNA, 20 bp, Artificial Sequence
  Description of Artificial Sequence: Synthetic oligonucleotide
  Target: ATXN2; (+) strand; PAM type: NRG; PAM sequence: AAG
agacagtatggtactgccat

SEQ ID NO: 42622 - DNA, 20 bp, Artificial Sequence
  Description of Artificial Sequence: Synthetic oligonucleotide
  Target: ATXN2; (+) strand; PAM type: NRG; PAM sequence: AGG
gacagtatggtactgccata

SEQ ID NO: 42623 - DNA, 20 bp, Artificial Sequence
  Description of Artificial Sequence: Synthetic oligonucleotide
  Target: ATXN2; (+) strand; PAM type: NRG; PAM sequence: AAG
tatggtactgccataaggat

SEQ ID NO: 42624 - DNA, 20 bp, Artificial Sequence
  Description of Artificial Sequence: Synthetic oligonucleotide
  Target: ATXN2; (+) strand; PAM type: NRG; PAM sequence: TAG
actgccataaggataagaca

SEQ ID NO: 42625 - DNA, 20 bp, Artificial Sequence
  Description of Artificial Sequence: Synthetic oligonucleotide
  Target: ATXN2; (+) strand; PAM type: NRG; PAM sequence: GAG
tgccataaggataagacata

SEQ ID NO: 42626 - DNA, 20 bp, Artificial Sequence
  Description of Artificial Sequence: Synthetic oligonucleotide
  Target: ATXN2; (+) strand; PAM type: NRG; PAM sequence: CAG
aaggataagacatagagatt

SEQ ID NO: 42627 - DNA, 20 bp, Artificial Sequence
  Description of Artificial Sequence: Synthetic oligonucleotide
  Target: ATXN2; (+) strand; PAM type: NRG; PAM sequence: TGG
gataagacatagagattcag

SEQ ID NO: 42628 - DNA, 20 bp, Artificial Sequence
  Description of Artificial Sequence: Synthetic oligonucleotide
  Target: ATXN2; (+) strand; PAM type: NRG; PAM sequence: GAG
taagacatagagattcagtg

SEQ ID NO: 42629 - DNA, 20 bp, Artificial Sequence
  Description of Artificial Sequence: Synthetic oligonucleotide
  Target: ATXN2; (+) strand; PAM type: NRG; PAM sequence: AGG
aagacatagagattcagtgg

SEQ ID NO: 42630 - DNA, 20 bp, Artificial Sequence
  Description of Artificial Sequence: Synthetic oligonucleotide
  Target: ATXN2; (+) strand; PAM type: NRG; PAM sequence: CAG
agattcagtggaggacaatt

SEQ ID NO: 42631 - DNA, 20 bp, Artificial Sequence
  Description of Artificial Sequence: Synthetic oligonucleotide
  Target: ATXN2; (+) strand; PAM type: NRG; PAM sequence: GAG
attcagtggaggacaattca

SEQ ID NO: 42632 - DNA, 20 bp, Artificial Sequence
  Description of Artificial Sequence: Synthetic oligonucleotide
  Target: ATXN2; (+) strand; PAM type: NRG; PAM sequence: CAG
gtggaggacaattcagagtc

SEQ ID NO: 42633 - DNA, 20 bp, Artificial Sequence
  Description of Artificial Sequence: Synthetic oligonucleotide
  Target: ATXN2; (+) strand; PAM type: NRG; PAM sequence: TAG
gtaataaactttcacatttg

SEQ ID NO: 42634 - DNA, 20 bp, Artificial Sequence
  Description of Artificial Sequence: Synthetic oligonucleotide
  Target: ATXN2; (+) strand; PAM type: NRG; PAM sequence: CAG
actttcacatttgtagtcaa

SEQ ID NO: 42635 - DNA, 20 bp, Artificial Sequence
  Description of Artificial Sequence: Synthetic oligonucleotide
  Target: ATXN2; (+) strand; PAM type: NRG; PAM sequence: AAG
gtagtcaacagacttccaac

SEQ ID NO: 42636 - DNA, 20 bp, Artificial Sequence
  Description of Artificial Sequence: Synthetic oligonucleotide
  Target: ATXN2; (+) strand; PAM type: NRG; PAM sequence: AAG
agacttccaacaagcatgtg

SEQ ID NO: 42637 - DNA, 20 bp, Artificial Sequence
  Description of Artificial Sequence: Synthetic oligonucleotide
  Target: ATXN2; (+) strand; PAM type: NRG; PAM sequence: TGG
agcatgtgaagataattcaa

SEQ ID NO: 42638 - DNA, 20 bp, Artificial Sequence
  Description of Artificial Sequence: Synthetic oligonucleotide
  Target: ATXN2; (+) strand; PAM type: NRG; PAM sequence: GAG
catgtgaagataattcaatg

SEQ ID NO: 42639 - DNA, 20 bp, Artificial Sequence
  Description of Artificial Sequence: Synthetic oligonucleotide
  Target: ATXN2; (+) strand; PAM type: NRG; PAM sequence: AGG
atgtgaagataattcaatgg

SEQ ID NO: 42640 - DNA, 20 bp, Artificial Sequence
  Description of Artificial Sequence: Synthetic oligonucleotide
  Target: ATXN2; (+) strand; PAM type: NRG; PAM sequence: AAG
gaagataattcaatggagga

SEQ ID NO: 42641 - DNA, 20 bp, Artificial Sequence
  Description of Artificial Sequence: Synthetic oligonucleotide
  Target: ATXN2; (+) strand; PAM type: NRG; PAM sequence: TAG
taattcaatggaggaaagaa

SEQ ID NO: 42642 - DNA, 20 bp, Artificial Sequence
  Description of Artificial Sequence: Synthetic oligonucleotide
  Target: ATXN2; (+) strand; PAM type: NRG; PAM sequence: GAG
gaaagaatagtctttttttt

SEQ ID NO: 42643 - DNA, 20 bp, Artificial Sequence
  Description of Artificial Sequence: Synthetic oligonucleotide
  Target: ATXN2; (+) strand; PAM type: NRG; PAM sequence: TGG
gaatagtcttttttttgaga

SEQ ID NO: 42644 - DNA, 20 bp, Artificial Sequence
  Description of Artificial Sequence: Synthetic oligonucleotide
  Target: ATXN2; (+) strand; PAM type: NRG; PAM sequence: GAG
atagtcttttttttgagatg

SEQ ID NO: 42645 - DNA, 20 bp, Artificial Sequence
  Description of Artificial Sequence: Synthetic oligonucleotide
  Target: ATXN2; (+) strand; PAM type: NRG; PAM sequence: TGG
tctcactctgtcgcccacac

SEQ ID NO: 42646 - DNA, 20 bp, Artificial Sequence
  Description of Artificial Sequence: Synthetic oligonucleotide
  Target: ATXN2; (+) strand; PAM type: NRG; PAM sequence: GAG
tcactctgtcgcccacactg

SEQ ID NO: 42647 - DNA, 20 bp, Artificial Sequence
  Description of Artificial Sequence: Synthetic oligonucleotide
  Target: ATXN2; (+) strand; PAM type: NRG; PAM sequence: CAG
cacactggagtgcatgatct

SEQ ID NO: 42648 - DNA, 20 bp, Artificial Sequence
  Description of Artificial Sequence: Synthetic oligonucleotide
  Target: ATXN2; (+) strand; PAM type: NRG; PAM sequence: TGG
tcactgcaacctctacctcc

SEQ ID NO: 42649 - DNA, 20 bp, Artificial Sequence
  Description of Artificial Sequence: Synthetic oligonucleotide
  Target: ATXN2; (+) strand; PAM type: NRG; PAM sequence: GGG
cactgcaacctctacctcct

SEQ ID NO: 42650 - DNA, 20 bp, Artificial Sequence
  Description of Artificial Sequence: Synthetic oligonucleotide
  Target: ATXN2; (+) strand; PAM type: NRG; PAM sequence: AAG
aacctctacctcctgggttc

SEQ ID NO: 42651 - DNA, 20 bp, Artificial Sequence
  Description of Artificial Sequence: Synthetic oligonucleotide
  Target: ATXN2; (+) strand; PAM type: NRG; PAM sequence: CAG
ttcaagcgaatctcctgcct

SEQ ID NO: 42652 - DNA, 20 bp, Artificial Sequence
  Description of Artificial Sequence: Synthetic oligonucleotide
  Target: ATXN2; (+) strand; PAM type: NRG; PAM sequence: CAG
atctcctgcctcagccacta

SEQ ID NO: 42653 - DNA, 20 bp, Artificial Sequence
  Description of Artificial Sequence: Synthetic oligonucleotide
  Target: ATXN2; (+) strand; PAM type: NRG; PAM sequence: TAG
tcctgcctcagccactacag

SEQ ID NO: 42654 - DNA, 20 bp, Artificial Sequence
  Description of Artificial Sequence: Synthetic oligonucleotide
  Target: ATXN2; (+) strand; PAM type: NRG; PAM sequence: TGG
tgcctcagccactacagtag

SEQ ID NO: 42655 - DNA, 20 bp, Artificial Sequence
  Description of Artificial Sequence: Synthetic oligonucleotide
  Target: ATXN2; (+) strand; PAM type: NRG; PAM sequence: GGG
gcctcagccactacagtagt

SEQ ID NO: 42656 - DNA, 20 bp, Artificial Sequence
  Description of Artificial Sequence: Synthetic oligonucleotide
  Target: ATXN2; (+) strand; PAM type: NRG; PAM sequence: TAG
agccactacagtagtgggac

SEQ ID NO: 42657 - DNA, 20 bp, Artificial Sequence
  Description of Artificial Sequence: Synthetic oligonucleotide
  Target: ATXN2; (+) strand; PAM type: NRG; PAM sequence: CAG
acagtagtgggactagacta

SEQ ID NO: 42658 - DNA, 20 bp, Artificial Sequence
  Description of Artificial Sequence: Synthetic oligonucleotide
  Target: ATXN2; (+) strand; PAM type: NRG; PAM sequence: AGG
cagtagtgggactagactac

SEQ ID NO: 42659 - DNA, 20 bp, Artificial Sequence
  Description of Artificial Sequence: Synthetic oligonucleotide
  Target: ATXN2; (+) strand; PAM type: NRG; PAM sequence: CAG
caggtgtgcgccaccacacc

SEQ ID NO: 42660 - DNA, 20 bp, Artificial Sequence
  Description of Artificial Sequence: Synthetic oligonucleotide
  Target: ATXN2; (+) strand; PAM type: NRG; PAM sequence: AGG
aggtgtgcgccaccacaccc

SEQ ID NO: 42661 - DNA, 20 bp, Artificial Sequence
  Description of Artificial Sequence: Synthetic oligonucleotide
  Target: ATXN2; (+) strand; PAM type: NRG; PAM sequence: TAG
ccaggtaatttttgtatttt

SEQ ID NO: 42662 - DNA, 20 bp, Artificial Sequence
  Description of Artificial Sequence: Synthetic oligonucleotide
  Target: ATXN2; (+) strand; PAM type: NRG; PAM sequence: TAG
ggtaatttttgtatttttag

SEQ ID NO: 42663 - DNA, 20 bp, Artificial Sequence
  Description of Artificial Sequence: Synthetic oligonucleotide
  Target: ATXN2; (+) strand; PAM type: NRG; PAM sequence: CGG
ttgtatttttagtagacatg

SEQ ID NO: 42664 - DNA, 20 bp, Artificial Sequence
  Description of Artificial Sequence: Synthetic oligonucleotide
  Target: ATXN2; (+) strand; PAM type: NRG; PAM sequence: TGG
agacatgcggtttcaccatt

SEQ ID NO: 42665 - DNA, 20 bp, Artificial Sequence
  Description of Artificial Sequence: Synthetic oligonucleotide
  Target: ATXN2; (+) strand; PAM type: NRG; PAM sequence: CAG
atgcggtttcaccatttggt

SEQ ID NO: 42666 - DNA, 20 bp, Artificial Sequence
  Description of Artificial Sequence: Synthetic oligonucleotide
  Target: ATXN2; (+) strand; PAM type: NRG; PAM sequence: TGG
gtttcaccatttggtcagac

SEQ ID NO: 42667 - DNA, 20 bp, Artificial Sequence
  Description of Artificial Sequence: Synthetic oligonucleotide
  Target: ATXN2; (+) strand; PAM type: NRG; PAM sequence: TGG
cctcatgtgatctgcctgct

SEQ ID NO: 42668 - DNA, 20 bp, Artificial Sequence
  Description of Artificial Sequence: Synthetic oligonucleotide
  Target: ATXN2; (+) strand; PAM type: NRG; PAM sequence: GGG
ctcatgtgatctgcctgctt

SEQ ID NO: 42669 - DNA, 20 bp, Artificial Sequence
  Description of Artificial Sequence: Synthetic oligonucleotide
  Target: ATXN2; (+) strand; PAM type: NRG; PAM sequence: AAG
ctgcctgcttgggactccca

SEQ ID NO: 42670 - DNA, 20 bp, Artificial Sequence
  Description of Artificial Sequence: Synthetic oligonucleotide
  Target: ATXN2; (+) strand; PAM type: NRG; PAM sequence: TGG
gcttgggactcccaaagtgc

SEQ ID NO: 42671 - DNA, 20 bp, Artificial Sequence
  Description of Artificial Sequence: Synthetic oligonucleotide
  Target: ATXN2; (+) strand; PAM type: NRG; PAM sequence: GGG
cttgggactcccaaagtgct

SEQ ID NO: 42672 - DNA, 20 bp, Artificial Sequence
  Description of Artificial Sequence: Synthetic oligonucleotide
  Target: ATXN2; (+) strand; PAM type: NRG; PAM sequence: CAG
ctcccaaagtgctgggatta

SEQ ID NO: 42673 - DNA, 20 bp, Artificial Sequence
  Description of Artificial Sequence: Synthetic oligonucleotide
  Target: ATXN2; (+) strand; PAM type: NRG; PAM sequence: AGG
tcccaaagtgctgggattac

SEQ ID NO: 42674 - DNA, 20 bp, Artificial Sequence
  Description of Artificial Sequence: Synthetic oligonucleotide
  Target: ATXN2; (+) strand; PAM type: NRG; PAM sequence: GAG
gtgctgggattacaggcgtt

SEQ ID NO: 42675 - DNA, 20 bp, Artificial Sequence
  Description of Artificial Sequence: Synthetic oligonucleotide
  Target: ATXN2; (+) strand; PAM type: NRG; PAM sequence: GAG
gctgggattacaggcgttga

SEQ ID NO: 42676 - DNA, 20 bp, Artificial Sequence
  Description of Artificial Sequence: Synthetic oligonucleotide
  Target: ATXN2; (+) strand; PAM type: NRG; PAM sequence: TGG
gcgttgagagccactgtgcc

SEQ ID NO: 42677 - DNA, 20 bp, Artificial Sequence
  Description of Artificial Sequence: Synthetic oligonucleotide
  Target: ATXN2; (+) strand; PAM type: NRG; PAM sequence: AAG
gagagccactgtgcctggcc

SEQ ID NO: 42678 - DNA, 20 bp, Artificial Sequence
  Description of Artificial Sequence: Synthetic oligonucleotide
  Target: ATXN2; (+) strand; PAM type: NRG; PAM sequence: TAG
ccactgtgcctggccaagaa

SEQ ID NO: 42679 - DNA, 20 bp, Artificial Sequence
  Description of Artificial Sequence: Synthetic oligonucleotide
  Target: ATXN2; (+) strand; PAM type: NRG; PAM sequence: CAG
gccaagaatagtctttttaa

SEQ ID NO: 42680 - DNA, 20 bp, Artificial Sequence
  Description of Artificial Sequence: Synthetic oligonucleotide
  Target: ATXN2; (+) strand; PAM type: NRG; PAM sequence: TGG
agaatagtctttttaacaga

SEQ ID NO: 42681 - DNA, 20 bp, Artificial Sequence
  Description of Artificial Sequence: Synthetic oligonucleotide
  Target: ATXN2; (+) strand; PAM type: NRG; PAM sequence: TGG
gtctttttaacagatggtgc

SEQ ID NO: 42682 - DNA, 20 bp, Artificial Sequence
  Description of Artificial Sequence: Synthetic oligonucleotide
  Target: ATXN2; (+) strand; PAM type: NRG; PAM sequence: GGG
tctttttaacagatggtgct

SEQ ID NO: 42683 - DNA, 20 bp, Artificial Sequence
  Description of Artificial Sequence: Synthetic oligonucleotide
  Target: ATXN2; (+) strand; PAM type: NRG; PAM sequence: CGG
ggacaactaatacctacata

SEQ ID NO: 42684 - DNA, 20 bp, Artificial Sequence
  Description of Artificial Sequence: Synthetic oligonucleotide
  Target: ATXN2; (+) strand; PAM type: NRG; PAM sequence: AAG
caactaatacctacatacgg

SEQ ID NO: 42685 - DNA, 20 bp, Artificial Sequence
  Description of Artificial Sequence: Synthetic oligonucleotide
  Target: ATXN2; (+) strand; PAM type: NRG; PAM sequence: CAG
agaatgaatctgaacttaca

SEQ ID NO: 42686 - DNA, 20 bp, Artificial Sequence
  Description of Artificial Sequence: Synthetic oligonucleotide
  Target: ATXN2; (+) strand; PAM type: NRG; PAM sequence: TGG
ctgaacttacacagtaaaaa

SEQ ID NO: 42687 - DNA, 20 bp, Artificial Sequence
  Description of Artificial Sequence: Synthetic oligonucleotide
  Target: ATXN2; (+) strand; PAM type: NRG; PAM sequence: AAG
tacacagtaaaaatggttat

SEQ ID NO: 42688 - DNA, 20 bp, Artificial Sequence
  Description of Artificial Sequence: Synthetic oligonucleotide
  Target: ATXN2; (+) strand; PAM type: NRG; PAM sequence: TGG
taaaaatggttataagtgta

SEQ ID NO: 42689 - DNA, 20 bp, Artificial Sequence
  Description of Artificial Sequence: Synthetic oligonucleotide
  Target: ATXN2; (+) strand; PAM type: NRG; PAM sequence: TAG
gtgtatggttatgtgtcaat

SEQ ID NO: 42690 - DNA, 20 bp, Artificial Sequence
  Description of Artificial Sequence: Synthetic oligonucleotide
  Target: ATXN2; (+) strand; PAM type: NRG; PAM sequence: AAG
agaaataaaaaattaatata

SEQ ID NO: 42691 - DNA, 20 bp, Artificial Sequence
  Description of Artificial Sequence: Synthetic oligonucleotide
  Target: ATXN2; (+) strand; PAM type: NRG; PAM sequence: TGG
tattaaataactgctcaaaa

SEQ ID NO: 42692 - DNA, 20 bp, Artificial Sequence
  Description of Artificial Sequence: Synthetic oligonucleotide
  Target: ATXN2; (+) strand; PAM type: NRG; PAM sequence: GGG
attaaataactgctcaaaat

SEQ ID NO: 42693 - DNA, 20 bp, Artificial Sequence
  Description of Artificial Sequence: Synthetic oligonucleotide
  Target: ATXN2; (+) strand; PAM type: NRG; PAM sequence: GAG
ataactgctcaaaatgggct

SEQ ID NO: 42694 - DNA, 20 bp, Artificial Sequence
  Description of Artificial Sequence: Synthetic oligonucleotide
  Target: ATXN2; (+) strand; PAM type: NRG; PAM sequence: AAG
ctcaaaatgggctgagcacc

SEQ ID NO: 42695 - DNA, 20 bp, Artificial Sequence
  Description of Artificial Sequence: Synthetic oligonucleotide
  Target: ATXN2; (+) strand; PAM type: NRG; PAM sequence: TAG
ttattctcataatattgtta

SEQ ID NO: 42696 - DNA, 20 bp, Artificial Sequence
  Description of Artificial Sequence: Synthetic oligonucleotide
  Target: ATXN2; (+) strand; PAM type: NRG; PAM sequence: AGG
tattctcataatattgttat

SEQ ID NO: 42697 - DNA, 20 bp, Artificial Sequence
  Description of Artificial Sequence: Synthetic oligonucleotide
  Target: ATXN2; (+) strand; PAM type: NRG; PAM sequence: AAG
ctcataatattgttatagga

SEQ ID NO: 42698 - DNA, 20 bp, Artificial Sequence
  Description of Artificial Sequence: Synthetic oligonucleotide
  Target: ATXN2; (+) strand; PAM type: NRG; PAM sequence: AGG
tcataatattgttataggaa

SEQ ID NO: 42699 - DNA, 20 bp, Artificial Sequence
  Description of Artificial Sequence: Synthetic oligonucleotide
  Target: ATXN2; (+) strand; PAM type: NRG; PAM sequence: GGG
cataatattgttataggaaa

SEQ ID NO: 42700 - DNA, 20 bp, Artificial Sequence
  Description of Artificial Sequence: Synthetic oligonucleotide
  Target: ATXN2; (+) strand; PAM type: NRG; PAM sequence: GGG
ataatattgttataggaaag

SEQ ID NO: 42701 - DNA, 20 bp, Artificial Sequence
  Description of Artificial Sequence: Synthetic oligonucleotide
  Target: ATXN2; (+) strand; PAM type: NRG; PAM sequence: CAG
ataggaaaggggtcccgatc

SEQ ID NO: 42702 - DNA, 20 bp, Artificial Sequence
  Description of Artificial Sequence: Synthetic oligonucleotide
  Target: ATXN2; (+) strand; PAM type: NRG; PAM sequence: CAG
ggggtcccgatccagacccc

SEQ ID NO: 42703 - DNA, 20 bp, Artificial Sequence
  Description of Artificial Sequence: Synthetic oligonucleotide
  Target: ATXN2; (+) strand; PAM type: NRG; PAM sequence: GAG
ggtcccgatccagaccccca

SEQ ID NO: 42704 - DNA, 20 bp, Artificial Sequence
  Description of Artificial Sequence: Synthetic oligonucleotide
  Target: ATXN2; (+) strand; PAM type: NRG; PAM sequence: GAG
tcccgatccagacccccaga

SEQ ID NO: 42705 - DNA, 20 bp, Artificial Sequence
  Description of Artificial Sequence: Synthetic oligonucleotide
  Target: ATXN2; (+) strand; PAM type: NRG; PAM sequence: AGG
cccgatccagacccccagag

SEQ ID NO: 42706 - DNA, 20 bp, Artificial Sequence
  Description of Artificial Sequence: Synthetic oligonucleotide
  Target: ATXN2; (+) strand; PAM type: NRG; PAM sequence: GGG
ccgatccagacccccagaga

SEQ ID NO: 42707 - DNA, 20 bp, Artificial Sequence
  Description of Artificial Sequence: Synthetic oligonucleotide
  Target: ATXN2; (+) strand; PAM type: NRG; PAM sequence: TGG
agacccccagagagggctct

SEQ ID NO: 42708 - DNA, 20 bp, Artificial Sequence
  Description of Artificial Sequence: Synthetic oligonucleotide
  Target: ATXN2; (+) strand; PAM type: NRG; PAM sequence: AAG
agggctcttggatcttgcac

SEQ ID NO: 42709 - DNA, 20 bp, Artificial Sequence
  Description of Artificial Sequence: Synthetic oligonucleotide
  Target: ATXN2; (+) strand; PAM type: NRG; PAM sequence: AAG
ctcttggatcttgcacaaga

SEQ ID NO: 42710 - DNA, 20 bp, Artificial Sequence
  Description of Artificial Sequence: Synthetic oligonucleotide
  Target: ATXN2; (+) strand; PAM type: NRG; PAM sequence: CAG
atcttgcacaagaaagaatt

SEQ ID NO: 42711 - DNA, 20 bp, Artificial Sequence
  Description of Artificial Sequence: Synthetic oligonucleotide
  Target: ATXN2; (+) strand; PAM type: NRG; PAM sequence: AGG
tcttgcacaagaaagaattc

SEQ ID NO: 42712 - DNA, 20 bp, Artificial Sequence
  Description of Artificial Sequence: Synthetic oligonucleotide
  Target: ATXN2; (+) strand; PAM type: NRG; PAM sequence: GGG
cttgcacaagaaagaattca

SEQ ID NO: 42713 - DNA, 20 bp, Artificial Sequence
  Description of Artificial Sequence: Synthetic oligonucleotide
  Target: ATXN2; (+) strand; PAM type: NRG; PAM sequence: GAG
cacaagaaagaattcagggc

SEQ ID NO: 42714 - DNA, 20 bp, Artificial Sequence
  Description of Artificial Sequence: Synthetic oligonucleotide
  Target: ATXN2; (+) strand; PAM type: NRG; PAM sequence: CAG
aagaattcagggcgagtccg

SEQ ID NO: 42715 - DNA, 20 bp, Artificial Sequence
  Description of Artificial Sequence: Synthetic oligonucleotide
  Target: ATXN2; (+) strand; PAM type: NRG; PAM sequence: AAG
tcagggcgagtccgcagtgc

SEQ ID NO: 42716 - DNA, 20 bp, Artificial Sequence
  Description of Artificial Sequence: Synthetic oligonucleotide
  Target: ATXN2; (+) strand; PAM type: NRG; PAM sequence: AGG
cagggcgagtccgcagtgca

SEQ ID NO: 42717 - DNA, 20 bp, Artificial Sequence
  Description of Artificial Sequence: Synthetic oligonucleotide
  Target: ATXN2; (+) strand; PAM type: NRG; PAM sequence: AAG
gagtccgcagtgcaaggtga

SEQ ID NO: 42718 - DNA, 20 bp, Artificial Sequence
  Description of Artificial Sequence: Synthetic oligonucleotide
  Target: ATXN2; (+) strand; PAM type: NRG; PAM sequence: TGG
gtgaaagcaatttttcactt

SEQ ID NO: 42719 - DNA, 20 bp, Artificial Sequence
  Description of Artificial Sequence: Synthetic oligonucleotide
  Target: ATXN2; (+) strand; PAM type: NRG; PAM sequence: GGG
tgaaagcaatttttcacttt

SEQ ID NO: 42720 - DNA, 20 bp, Artificial Sequence
  Description of Artificial Sequence: Synthetic oligonucleotide
  Target: ATXN2; (+) strand; PAM type: NRG; PAM sequence: GAG
aaagcaatttttcactttgg

SEQ ID NO: 42721 - DNA, 20 bp, Artificial Sequence
  Description of Artificial Sequence: Synthetic oligonucleotide
  Target: ATXN2; (+) strand; PAM type: NRG; PAM sequence: AGG
aagcaatttttcactttggg

SEQ ID NO: 42722 - DNA, 20 bp, Artificial Sequence
  Description of Artificial Sequence: Synthetic oligonucleotide
  Target: ATXN2; (+) strand; PAM type: NRG; PAM sequence: GAG
atttttcactttgggaggct

SEQ ID NO: 42723 - DNA, 20 bp, Artificial Sequence
  Description of Artificial Sequence: Synthetic oligonucleotide
  Target: ATXN2; (+) strand; PAM type: NRG; PAM sequence: AGG
tttttcactttgggaggctg

SEQ ID NO: 42724 - DNA, 20 bp, Artificial Sequence
  Description of Artificial Sequence: Synthetic oligonucleotide
  Target: ATXN2; (+) strand; PAM type: NRG; PAM sequence: TGG
ttcactttgggaggctgagg

SEQ ID NO: 42725 - DNA, 20 bp, Artificial Sequence
  Description of Artificial Sequence: Synthetic oligonucleotide
  Target: ATXN2; (+) strand; PAM type: NRG; PAM sequence: GGG
tcactttgggaggctgaggt

SEQ ID NO: 42726 - DNA, 20 bp, Artificial Sequence
  Description of Artificial Sequence: Synthetic oligonucleotide
  Target: ATXN2; (+) strand; PAM type: NRG; PAM sequence: GAG
ctgaggtgggcgtgtcactt

SEQ ID NO: 42727 - DNA, 20 bp, Artificial Sequence
  Description of Artificial Sequence: Synthetic oligonucleotide
  Target: ATXN2; (+) strand; PAM type: NRG; PAM sequence: AAG
tgggcgtgtcacttgagtcc

SEQ ID NO: 42728 - DNA, 20 bp, Artificial Sequence
  Description of Artificial Sequence: Synthetic oligonucleotide
  Target: ATXN2; (+) strand; PAM type: NRG; PAM sequence: GAG
tcacttgagtccaagtgttt

SEQ ID NO: 42729 - DNA, 20 bp, Artificial Sequence
  Description of Artificial Sequence: Synthetic oligonucleotide
  Target: ATXN2; (+) strand; PAM type: NRG; PAM sequence: CAG
tgagtccaagtgtttgagac

SEQ ID NO: 42730 - DNA, 20 bp, Artificial Sequence
  Description of Artificial Sequence: Synthetic oligonucleotide
  Target: ATXN2; (+) strand; PAM type: NRG; PAM sequence: TGG
ccaagtgtttgagaccagcc

SEQ ID NO: 42731 - DNA, 20 bp, Artificial Sequence
  Description of Artificial Sequence: Synthetic oligonucleotide
  Target: ATXN2; (+) strand; PAM type: NRG; PAM sequence: GGG
caagtgtttgagaccagcct

SEQ ID NO: 42732 - DNA, 20 bp, Artificial Sequence
  Description of Artificial Sequence: Synthetic oligonucleotide
  Target: ATXN2; (+) strand; PAM type: NRG; PAM sequence: TGG
tgagaccagcctgggcaaca

SEQ ID NO: 42733 - DNA, 20 bp, Artificial Sequence
  Description of Artificial Sequence: Synthetic oligonucleotide
  Target: ATXN2; (+) strand; PAM type: NRG; PAM sequence: AAG
gtctctacaaaaaaatacaa

SEQ ID NO: 42734 - DNA, 20 bp, Artificial Sequence
  Description of Artificial Sequence: Synthetic oligonucleotide
  Target: ATXN2; (+) strand; PAM type: NRG; PAM sequence: TAG
aaaaatacaaaagttattaa

SEQ ID NO: 42735 - DNA, 20 bp, Artificial Sequence
  Description of Artificial Sequence: Synthetic oligonucleotide
  Target: ATXN2; (+) strand; PAM type: NRG; PAM sequence: AAG
atacaaaagttattaatagc

SEQ ID NO: 42736 - DNA, 20 bp, Artificial Sequence
  Description of Artificial Sequence: Synthetic oligonucleotide
  Target: ATXN2; (+) strand; PAM type: NRG; PAM sequence: AGG
tacaaaagttattaatagca

SEQ ID NO: 42737 - DNA, 20 bp, Artificial Sequence
  Description of Artificial Sequence: Synthetic oligonucleotide
  Target: ATXN2; (+) strand; PAM type: NRG; PAM sequence: TGG
aagttattaatagcaaggtg

SEQ ID NO: 42738 - DNA, 20 bp, Artificial Sequence
  Description of Artificial Sequence: Synthetic oligonucleotide
  Target: ATXN2; (+) strand; PAM type: NRG; PAM sequence: TGG
ttattaatagcaaggtgtgg

SEQ ID NO: 42739 - DNA, 20 bp, Artificial Sequence
  Description of Artificial Sequence: Synthetic oligonucleotide
  Target: ATXN2; (+) strand; PAM type: NRG; PAM sequence: TAG
ggtgtggtggtgcacacctg

SEQ ID NO: 42740 - DNA, 20 bp, Artificial Sequence
  Description of Artificial Sequence: Synthetic oligonucleotide
  Target: ATXN2; (+) strand; PAM type: NRG; PAM sequence: CAG
gtggtgcacacctgtagtac

SEQ ID NO: 42741 - DNA, 20 bp, Artificial Sequence
  Description of Artificial Sequence: Synthetic oligonucleotide
  Target: ATXN2; (+) strand; PAM type: NRG; PAM sequence: GAG
gtagtaccagctactcattt

SEQ ID NO: 42742 - DNA, 20 bp, Artificial Sequence
  Description of Artificial Sequence: Synthetic oligonucleotide
  Target: ATXN2; (+) strand; PAM type: NRG; PAM sequence: CAG
accagctactcatttgagcc

SEQ ID NO: 42743 - DNA, 20 bp, Artificial Sequence
  Description of Artificial Sequence: Synthetic oligonucleotide
  Target: ATXN2; (+) strand; PAM type: NRG; PAM sequence: AGG
ccagctactcatttgagccc

SEQ ID NO: 42744 - DNA, 20 bp, Artificial Sequence
  Description of Artificial Sequence: Synthetic oligonucleotide
  Target: ATXN2; (+) strand; PAM type: NRG; PAM sequence: GAG
agctactcatttgagcccag

SEQ ID NO: 42745 - DNA, 20 bp, Artificial Sequence
  Description of Artificial Sequence: Synthetic oligonucleotide
  Target: ATXN2; (+) strand; PAM type: NRG; PAM sequence: AGG
gctactcatttgagcccagg

SEQ ID NO: 42746 - DNA, 20 bp, Artificial Sequence
  Description of Artificial Sequence: Synthetic oligonucleotide
  Target: ATXN2; (+) strand; PAM type: NRG; PAM sequence: GAG
tcatttgagcccaggaggct

SEQ ID NO: 42747 - DNA, 20 bp, Artificial Sequence
  Description of Artificial Sequence: Synthetic oligonucleotide
  Target: ATXN2; (+) strand; PAM type: NRG; PAM sequence: AGG
catttgagcccaggaggctg

SEQ ID NO: 42748 - DNA, 20 bp, Artificial Sequence
  Description of Artificial Sequence: Synthetic oligonucleotide
  Target: ATXN2; (+) strand; PAM type: NRG; PAM sequence: GAG
caggaggctgaggctgctgt

SEQ ID NO: 42749 - DNA, 20 bp, Artificial Sequence
  Description of Artificial Sequence: Synthetic oligonucleotide
  Target: ATXN2; (+) strand; PAM type: NRG; PAM sequence: AAG
ggctgaggctgctgtgagcc

SEQ ID NO: 42750 - DNA, 20 bp, Artificial Sequence
  Description of Artificial Sequence: Synthetic oligonucleotide
  Target: ATXN2; (+) strand; PAM type: NRG; PAM sequence: CAG
aagattgcaccactgccctc

SEQ ID NO: 42751 - DNA, 20 bp, Artificial Sequence
  Description of Artificial Sequence: Synthetic oligonucleotide
  Target: ATXN2; (+) strand; PAM type: NRG; PAM sequence: AAG
gcaccactgccctccagcct

SEQ ID NO: 42752 - DNA, 20 bp, Artificial Sequence
  Description of Artificial Sequence: Synthetic oligonucleotide
  Target: ATXN2; (+) strand; PAM type: NRG; PAM sequence: AAG
ctgccctccagcctaagcaa

SEQ ID NO: 42753 - DNA, 20 bp, Artificial Sequence
  Description of Artificial Sequence: Synthetic oligonucleotide
  Target: ATXN2; (+) strand; PAM type: NRG; PAM sequence: GAG
gccctccagcctaagcaaaa

SEQ ID NO: 42754 - DNA, 20 bp, Artificial Sequence
  Description of Artificial Sequence: Synthetic oligonucleotide
  Target: ATXN2; (+) strand; PAM type: NRG; PAM sequence: GAG
tccagcctaagcaaaagagc

SEQ ID NO: 42755 - DNA, 20 bp, Artificial Sequence
  Description of Artificial Sequence: Synthetic oligonucleotide
  Target: ATXN2; (+) strand; PAM type: NRG; PAM sequence: AAG
agagcgagattctgtgtcaa

SEQ ID NO: 42756 - DNA, 20 bp, Artificial Sequence
  Description of Artificial Sequence: Synthetic oligonucleotide
  Target: ATXN2; (+) strand; PAM type: NRG; PAM sequence: AAG
tctgtgtcaaaagaaaaaaa

SEQ ID NO: 42757 - DNA, 20 bp, Artificial Sequence
  Description of Artificial Sequence: Synthetic oligonucleotide
  Target: ATXN2; (+) strand; PAM type: NRG; PAM sequence: TGG
aaaaaaaaagttgctccaaa

SEQ ID NO: 42758 - DNA, 20 bp, Artificial Sequence
  Description of Artificial Sequence: Synthetic oligonucleotide
  Target: ATXN2; (+) strand; PAM type: NRG; PAM sequence: CAG
atgtaattcttaaaaaaacc

SEQ ID NO: 42759 - DNA, 20 bp, Artificial Sequence
  Description of Artificial Sequence: Synthetic oligonucleotide
  Target: ATXN2; (+) strand; PAM type: NRG; PAM sequence: AAG
taattcttaaaaaaacccag

SEQ ID NO: 42760 - DNA, 20 bp, Artificial Sequence
  Description of Artificial Sequence: Synthetic oligonucleotide
  Target: ATXN2; (+) strand; PAM type: NRG; PAM sequence: GAG
attcttaaaaaaacccagaa

SEQ ID NO: 42761 - DNA, 20 bp, Artificial Sequence
  Description of Artificial Sequence: Synthetic oligonucleotide
  Target: ATXN2; (+) strand; PAM type: NRG; PAM sequence: CAG
aaccttaatgattgatgaaa

SEQ ID NO: 42762 - DNA, 20 bp, Artificial Sequence
  Description of Artificial Sequence: Synthetic oligonucleotide
  Target: ATXN2; (+) strand; PAM type: NRG; PAM sequence: TAG
ttgatgaaacagtattttct

SEQ ID NO: 42763 - DNA, 20 bp, Artificial Sequence
  Description of Artificial Sequence: Synthetic oligonucleotide
  Target: ATXN2; (+) strand; PAM type: NRG; PAM sequence: AAG
tttcttagatacgacaccaa

SEQ ID NO: 42764 - DNA, 20 bp, Artificial Sequence
  Description of Artificial Sequence: Synthetic oligonucleotide
  Target: ATXN2; (+) strand; PAM type: NRG; PAM sequence: CAG
ccaaaagcttacttcaaaat

SEQ ID NO: 42765 - DNA, 20 bp, Artificial Sequence
  Description of Artificial Sequence: Synthetic oligonucleotide
  Target: ATXN2; (+) strand; PAM type: NRG; PAM sequence: TGG
tacttcaaaatcagataaat

SEQ ID NO: 42766 - DNA, 20 bp, Artificial Sequence
  Description of Artificial Sequence: Synthetic oligonucleotide
  Target: ATXN2; (+) strand; PAM type: NRG; PAM sequence: AAG
attaaaaatttttgtgcttc

SEQ ID NO: 42767 - DNA, 20 bp, Artificial Sequence
  Description of Artificial Sequence: Synthetic oligonucleotide
  Target: ATXN2; (+) strand; PAM type: NRG; PAM sequence: AGG
ttaaaaatttttgtgcttca

SEQ ID NO: 42768 - DNA, 20 bp, Artificial Sequence
  Description of Artificial Sequence: Synthetic oligonucleotide
  Target: ATXN2; (+) strand; PAM type: NRG; PAM sequence: GGG
taaaaatttttgtgcttcaa

SEQ ID NO: 42769 - DNA, 20 bp, Artificial Sequence
  Description of Artificial Sequence: Synthetic oligonucleotide
  Target: ATXN2; (+) strand; PAM type: NRG; PAM sequence: AAG
ttgtgcttcaagggatgaaa

SEQ ID NO: 42770 - DNA, 20 bp, Artificial Sequence
  Description of Artificial Sequence: Synthetic oligonucleotide
  Target: ATXN2; (+) strand; PAM type: NRG; PAM sequence: AAG
tcaagggatgaaaaagtaaa

SEQ ID NO: 42771 - DNA, 20 bp, Artificial Sequence
  Description of Artificial Sequence: Synthetic oligonucleotide
  Target: ATXN2; (+) strand; PAM type: NRG; PAM sequence: CAG
aaaagtaaaaagacaaccaa

SEQ ID NO: 42772 - DNA, 20 bp, Artificial Sequence
  Description of Artificial Sequence: Synthetic oligonucleotide
  Target: ATXN2; (+) strand; PAM type: NRG; PAM sequence: CAG
taaaaagacaaccaacagaa

SEQ ID NO: 42773 - DNA, 20 bp, Artificial Sequence
  Description of Artificial Sequence: Synthetic oligonucleotide
  Target: ATXN2; (+) strand; PAM type: NRG; PAM sequence: AGG
aaaaagacaaccaacagaac

SEQ ID NO: 42774 - DNA, 20 bp, Artificial Sequence
  Description of Artificial Sequence: Synthetic oligonucleotide
  Target: ATXN2; (+) strand; PAM type: NRG; PAM sequence: GAG
aaagacaaccaacagaacag

SEQ ID NO: 42775 - DNA, 20 bp, Artificial Sequence
  Description of Artificial Sequence: Synthetic oligonucleotide
  Target: ATXN2; (+) strand; PAM type: NRG; PAM sequence: CAG
tttgcaaaccatgtatctaa

SEQ ID NO: 42776 - DNA, 20 bp, Artificial Sequence
  Description of Artificial Sequence: Synthetic oligonucleotide
  Target: ATXN2; (+) strand; PAM type: NRG; PAM sequence: AGG
ttgcaaaccatgtatctaac

SEQ ID NO: 42777 - DNA, 20 bp, Artificial Sequence
  Description of Artificial Sequence: Synthetic oligonucleotide
  Target: ATXN2; (+) strand; PAM type: NRG; PAM sequence: GGG
tgcaaaccatgtatctaaca

SEQ ID NO: 42778 - DNA, 20 bp, Artificial Sequence
  Description of Artificial Sequence: Synthetic oligonucleotide
  Target: ATXN2; (+) strand; PAM type: NRG; PAM sequence: AAG
acttgtacacacaatatata

SEQ ID NO: 42779 - DNA, 20 bp, Artificial Sequence
  Description of Artificial Sequence: Synthetic oligonucleotide
  Target: ATXN2; (+) strand; PAM type: NRG; PAM sequence: AAG
tcccacaacccaataataaa

SEQ ID NO: 42780 - DNA, 20 bp, Artificial Sequence
  Description of Artificial Sequence: Synthetic oligonucleotide
  Target: ATXN2; (+) strand; PAM type: NRG; PAM sequence: TGG
agacaactcaatttttaaaa

SEQ ID NO: 42781 - DNA, 20 bp, Artificial Sequence
  Description of Artificial Sequence: Synthetic oligonucleotide
  Target: ATXN2; (+) strand; PAM type: NRG; PAM sequence: GGG
gacaactcaatttttaaaat

SEQ ID NO: 42782 - DNA, 20 bp, Artificial Sequence
  Description of Artificial Sequence: Synthetic oligonucleotide
  Target: ATXN2; (+) strand; PAM type: NRG; PAM sequence: AAG
ctcaatttttaaaatgggta

SEQ ID NO: 42783 - DNA, 20 bp, Artificial Sequence
  Description of Artificial Sequence: Synthetic oligonucleotide
  Target: ATXN2; (+) strand; PAM type: NRG; PAM sequence: CAG
aaaatgggtaaagatttgaa

SEQ ID NO: 42784 - DNA, 20 bp, Artificial Sequence
  Description of Artificial Sequence: Synthetic oligonucleotide
  Target: ATXN2; (+) strand; PAM type: NRG; PAM sequence: AAG
tttgaacagacatcaatcca

SEQ ID NO: 42785 - DNA, 20 bp, Artificial Sequence
  Description of Artificial Sequence: Synthetic oligonucleotide
  Target: ATXN2; (+) strand; PAM type: NRG; PAM sequence: AAG
gaacagacatcaatccaaag

SEQ ID NO: 42786 - DNA, 20 bp, Artificial Sequence
  Description of Artificial Sequence: Synthetic oligonucleotide
  Target: ATXN2; (+) strand; PAM type: NRG; PAM sequence: TGG
atccaaagaagatatataaa

SEQ ID NO: 42787 - DNA, 20 bp, Artificial Sequence
  Description of Artificial Sequence: Synthetic oligonucleotide
  Target: ATXN2; (+) strand; PAM type: NRG; PAM sequence: AAG
taaatggccaataaacacaa

SEQ ID NO: 42788 - DNA, 20 bp, Artificial Sequence
  Description of Artificial Sequence: Synthetic oligonucleotide
  Target: ATXN2; (+) strand; PAM type: NRG; PAM sequence: TAG
caaaagatgttcaacatcat

SEQ ID NO: 42789 - DNA, 20 bp, Artificial Sequence
  Description of Artificial Sequence: Synthetic oligonucleotide
  Target: ATXN2; (+) strand; PAM type: NRG; PAM sequence: AAG
ttcaacatcattagccatga

SEQ ID NO: 42790 - DNA, 20 bp, Artificial Sequence
  Description of Artificial Sequence: Synthetic oligonucleotide
  Target: ATXN2; (+) strand; PAM type: NRG; PAM sequence: AAG
catgaaagaactgcacatta

SEQ ID NO: 42791 - DNA, 20 bp, Artificial Sequence
  Description of Artificial Sequence: Synthetic oligonucleotide
  Target: ATXN2; (+) strand; PAM type: NRG; PAM sequence: GAG
ctgcacattaaagccacaat

SEQ ID NO: 42792 - DNA, 20 bp, Artificial Sequence
  Description of Artificial Sequence: Synthetic oligonucleotide
  Target: ATXN2; (+) strand; PAM type: NRG; PAM sequence: AGG
tgcacattaaagccacaatg

SEQ ID NO: 42793 - DNA, 20 bp, Artificial Sequence
  Description of Artificial Sequence: Synthetic oligonucleotide
  Target: ATXN2; (+) strand; PAM type: NRG; PAM sequence: AAG
ggttaacacttcacacccac

SEQ ID NO: 42794 - DNA, 20 bp, Artificial Sequence
  Description of Artificial Sequence: Synthetic oligonucleotide
  Target: ATXN2; (+) strand; PAM type: NRG; PAM sequence: AGG
gttaacacttcacacccaca

SEQ ID NO: 42795 - DNA, 20 bp, Artificial Sequence
  Description of Artificial Sequence: Synthetic oligonucleotide
  Target: ATXN2; (+) strand; PAM type: NRG; PAM sequence: AAG
aaggatgactataatcaaaa

SEQ ID NO: 42796 - DNA, 20 bp, Artificial Sequence
  Description of Artificial Sequence: Synthetic oligonucleotide
  Target: ATXN2; (+) strand; PAM type: NRG; PAM sequence: AAG
tgactataatcaaaaaagac

SEQ ID NO: 42797 - DNA, 20 bp, Artificial Sequence
  Description of Artificial Sequence: Synthetic oligonucleotide
  Target: ATXN2; (+) strand; PAM type: NRG; PAM sequence: AAG
atcaaaaaagacaagacaat

SEQ ID NO: 42798 - DNA, 20 bp, Artificial Sequence
  Description of Artificial Sequence: Synthetic oligonucleotide
  Target: ATXN2; (+) strand; PAM type: NRG; PAM sequence: TAG
aaagacaagacaataagtgt

SEQ ID NO: 42799 - DNA, 20 bp, Artificial Sequence
  Description of Artificial Sequence: Synthetic oligonucleotide
  Target: ATXN2; (+) strand; PAM type: NRG; PAM sequence: AAG
acaagacaataagtgttagc

SEQ ID NO: 42800 - DNA, 20 bp, Artificial Sequence
  Description of Artificial Sequence: Synthetic oligonucleotide
  Target: ATXN2; (+) strand; PAM type: NRG; PAM sequence: AGG
caagacaataagtgttagca

SEQ ID NO: 42801 - DNA, 20 bp, Artificial Sequence
  Description of Artificial Sequence: Synthetic oligonucleotide
  Target: ATXN2; (+) strand; PAM type: NRG; PAM sequence: TGG
aataagtgttagcaaggatg

SEQ ID NO: 42802 - DNA, 20 bp, Artificial Sequence
  Description of Artificial Sequence: Synthetic oligonucleotide
  Target: ATXN2; (+) strand; PAM type: NRG; PAM sequence: GAG
taagtgttagcaaggatgtg

SEQ ID NO: 42803 - DNA, 20 bp, Artificial Sequence
  Description of Artificial Sequence: Synthetic oligonucleotide
  Target: ATXN2; (+) strand; PAM type: NRG; PAM sequence: CAG
ttagcaaggatgtggagaaa

SEQ ID NO: 42804 - DNA, 20 bp, Artificial Sequence
  Description of Artificial Sequence: Synthetic oligonucleotide
  Target: ATXN2; (+) strand; PAM type: NRG; PAM sequence: TGG
cagaaaccctcataccctgc

SEQ ID NO: 42805 - DNA, 20 bp, Artificial Sequence
  Description of Artificial Sequence: Synthetic oligonucleotide
  Target: ATXN2; (+) strand; PAM type: NRG; PAM sequence: TGG
aaaccctcataccctgctgg

SEQ ID NO: 42806 - DNA, 20 bp, Artificial Sequence
  Description of Artificial Sequence: Synthetic oligonucleotide
  Target: ATXN2; (+) strand; PAM type: NRG; PAM sequence: GGG
aaccctcataccctgctggt

SEQ ID NO: 42807 - DNA, 20 bp, Artificial Sequence
  Description of Artificial Sequence: Synthetic oligonucleotide
  Target: ATXN2; (+) strand; PAM type: NRG; PAM sequence: TAG
ctgctggtgggaatgtaaaa

SEQ ID NO: 42808 - DNA, 20 bp, Artificial Sequence
  Description of Artificial Sequence: Synthetic oligonucleotide
  Target: ATXN2; (+) strand; PAM type: NRG; PAM sequence: TAG
ggtgggaatgtaaaatagtg

SEQ ID NO: 42809 - DNA, 20 bp, Artificial Sequence
  Description of Artificial Sequence: Synthetic oligonucleotide
  Target: ATXN2; (+) strand; PAM type: NRG; PAM sequence: TGG
gtaaaatagtgtagatatct

SEQ ID NO: 42810 - DNA, 20 bp, Artificial Sequence
  Description of Artificial Sequence: Synthetic oligonucleotide
  Target: ATXN2; (+) strand; PAM type: NRG; PAM sequence: TAG
agtgtagatatcttggcaaa

SEQ ID NO: 42811 - DNA, 20 bp, Artificial Sequence
  Description of Artificial Sequence: Synthetic oligonucleotide
  Target: ATXN2; (+) strand; PAM type: NRG; PAM sequence: TGG
agatatcttggcaaatagct

SEQ ID NO: 42812 - DNA, 20 bp, Artificial Sequence
  Description of Artificial Sequence: Synthetic oligonucleotide
  Target: ATXN2; (+) strand; PAM type: NRG; PAM sequence: TAG
tatcttggcaaatagcttgg

SEQ ID NO: 42813 - DNA, 20 bp, Artificial Sequence
  Description of Artificial Sequence: Synthetic oligonucleotide
  Target: ATXN2; (+) strand; PAM type: NRG; PAM sequence: AAG
atagcttggtagttcctcaa

SEQ ID NO: 42814 - DNA, 20 bp, Artificial Sequence
  Description of Artificial Sequence: Synthetic oligonucleotide
  Target: ATXN2; (+) strand; PAM type: NRG; PAM sequence: AGG
tagcttggtagttcctcaaa

SEQ ID NO: 42815 - DNA, 20 bp, Artificial Sequence
  Description of Artificial Sequence: Synthetic oligonucleotide
  Target: ATXN2; (+) strand; PAM type: NRG; PAM sequence: CAG
gttcctcaaaaggttaaaca

SEQ ID NO: 42816 - DNA, 20 bp, Artificial Sequence
  Description of Artificial Sequence: Synthetic oligonucleotide
  Target: ATXN2; (+) strand; PAM type: NRG; PAM sequence: CAG
aacacagttgccatatgacc

SEQ ID NO: 42817 - DNA, 20 bp, Artificial Sequence
  Description of Artificial Sequence: Synthetic oligonucleotide
  Target: ATXN2; (+) strand; PAM type: NRG; PAM sequence: TAG
tgacccagcaattcaactcc

SEQ ID NO: 42818 - DNA, 20 bp, Artificial Sequence
  Description of Artificial Sequence: Synthetic oligonucleotide
  Target: ATXN2; (+) strand; PAM type: NRG; PAM sequence: AGG
gacccagcaattcaactcct

SEQ ID NO: 42819 - DNA, 20 bp, Artificial Sequence
  Description of Artificial Sequence: Synthetic oligonucleotide
  Target: ATXN2; (+) strand; PAM type: NRG; PAM sequence: TAG
ccagcaattcaactcctagg

SEQ ID NO: 42820 - DNA, 20 bp, Artificial Sequence
  Description of Artificial Sequence: Synthetic oligonucleotide
  Target: ATXN2; (+) strand; PAM type: NRG; PAM sequence: AGG
cagcaattcaactcctaggt

SEQ ID NO: 42821 - DNA, 20 bp, Artificial Sequence
  Description of Artificial Sequence: Synthetic oligonucleotide
  Target: ATXN2; (+) strand; PAM type: NRG; PAM sequence: AAG
actcctaggtaggtacacaa

SEQ ID NO: 42822 - DNA, 20 bp, Artificial Sequence
  Description of Artificial Sequence: Synthetic oligonucleotide
  Target: ATXN2; (+) strand; PAM type: NRG; PAM sequence: AAG
aggtacacaaaagaaatgaa

SEQ ID NO: 42823 - DNA, 20 bp, Artificial Sequence
  Description of Artificial Sequence: Synthetic oligonucleotide
  Target: ATXN2; (+) strand; PAM type: NRG; PAM sequence: TAG
acacaaaagaaatgaaaaga

SEQ ID NO: 42824 - DNA, 20 bp, Artificial Sequence
  Description of Artificial Sequence: Synthetic oligonucleotide
  Target: ATXN2; (+) strand; PAM type: NRG; PAM sequence: AGG
cacaaaagaaatgaaaagat

SEQ ID NO: 42825 - DNA, 20 bp, Artificial Sequence
  Description of Artificial Sequence: Synthetic oligonucleotide
  Target: ATXN2; (+) strand; PAM type: NRG; PAM sequence: GAG
aagaaatgaaaagataggac

SEQ ID NO: 42826 - DNA, 20 bp, Artificial Sequence
  Description of Artificial Sequence: Synthetic oligonucleotide
  Target: ATXN2; (+) strand; PAM type: NRG; PAM sequence: TGG
aaactgcacactcatgtttg

SEQ ID NO: 42827 - DNA, 20 bp, Artificial Sequence
  Description of Artificial Sequence: Synthetic oligonucleotide
  Target: ATXN2; (+) strand; PAM type: NRG; PAM sequence: CAG
ctgcacactcatgtttgtgg

SEQ ID NO: 42828 - DNA, 20 bp, Artificial Sequence
  Description of Artificial Sequence: Synthetic oligonucleotide
  Target: ATXN2; (+) strand; PAM type: NRG; PAM sequence: CAG
atgtttgtggcagtgttatt

SEQ ID NO: 42829 - DNA, 20 bp, Artificial Sequence
  Description of Artificial Sequence: Synthetic oligonucleotide
  Target: ATXN2; (+) strand; PAM type: NRG; PAM sequence: TAG
tgtggcagtgttattcagaa

SEQ ID NO: 42830 - DNA, 20 bp, Artificial Sequence
  Description of Artificial Sequence: Synthetic oligonucleotide
  Target: ATXN2; (+) strand; PAM type: NRG; PAM sequence: CAG
tgttattcagaatagtcaaa

SEQ ID NO: 42831 - DNA, 20 bp, Artificial Sequence
  Description of Artificial Sequence: Synthetic oligonucleotide
  Target: ATXN2; (+) strand; PAM type: NRG; PAM sequence: GAG
attcagaatagtcaaacagt

SEQ ID NO: 42832 - DNA, 20 bp, Artificial Sequence
  Description of Artificial Sequence: Synthetic oligonucleotide
  Target: ATXN2; (+) strand; PAM type: NRG; PAM sequence: TAG
aacagtgagaacaccacaaa

SEQ ID NO: 42833 - DNA, 20 bp, Artificial Sequence
  Description of Artificial Sequence: Synthetic oligonucleotide
  Target: ATXN2; (+) strand; PAM type: NRG; PAM sequence: TGG
aatagctacaaactgattaa

SEQ ID NO: 42834 - DNA, 20 bp, Artificial Sequence
  Description of Artificial Sequence: Synthetic oligonucleotide
  Target: ATXN2; (+) strand; PAM type: NRG; PAM sequence: TGG
attaatggataaacaaaatg

SEQ ID NO: 42835 - DNA, 20 bp, Artificial Sequence
  Description of Artificial Sequence: Synthetic oligonucleotide
  Target: ATXN2; (+) strand; PAM type: NRG; PAM sequence: AAG
aatgtggtattatccacatc

SEQ ID NO: 42836 - DNA, 20 bp, Artificial Sequence
  Description of Artificial Sequence: Synthetic oligonucleotide
  Target: ATXN2; (+) strand; PAM type: NRG; PAM sequence: AGG
atgtggtattatccacatca

SEQ ID NO: 42837 - DNA, 20 bp, Artificial Sequence
  Description of Artificial Sequence: Synthetic oligonucleotide
  Target: ATXN2; (+) strand; PAM type: NRG; PAM sequence: TAG
ttatccacatcaaggaatat

SEQ ID NO: 42838 - DNA, 20 bp, Artificial Sequence
  Description of Artificial Sequence: Synthetic oligonucleotide
  Target: ATXN2; (+) strand; PAM type: NRG; PAM sequence: CAG
ccacatcaaggaatattagt

SEQ ID NO: 42839 - DNA, 20 bp, Artificial Sequence
  Description of Artificial Sequence: Synthetic oligonucleotide
  Target: ATXN2; (+) strand; PAM type: NRG; PAM sequence: AAG
gaatattagtcagtcacaaa

SEQ ID NO: 42840 - DNA, 20 bp, Artificial Sequence
  Description of Artificial Sequence: Synthetic oligonucleotide
  Target: ATXN2; (+) strand; PAM type: NRG; PAM sequence: AAG
gtcagtcacaaaaagaaatg

SEQ ID NO: 42841 - DNA, 20 bp, Artificial Sequence
  Description of Artificial Sequence: Synthetic oligonucleotide
  Target: ATXN2; (+) strand; PAM type: NRG; PAM sequence: TGG
tactgaaacatgctccaaca

SEQ ID NO: 42842 - DNA, 20 bp, Artificial Sequence
  Description of Artificial Sequence: Synthetic oligonucleotide
  Target: ATXN2; (+) strand; PAM type: NRG; PAM sequence: GAG
aacttttataacactactct

SEQ ID NO: 42843 - DNA, 20 bp, Artificial Sequence
  Description of Artificial Sequence: Synthetic oligonucleotide
  Target: ATXN2; (+) strand; PAM type: NRG; PAM sequence: AAG
tataacactactctgagtga

SEQ ID NO: 42844 - DNA, 20 bp, Artificial Sequence
  Description of Artificial Sequence: Synthetic oligonucleotide
  Target: ATXN2; (+) strand; PAM type: NRG; PAM sequence: AAG
aacactactctgagtgaaag

SEQ ID NO: 42845 - DNA, 20 bp, Artificial Sequence
  Description of Artificial Sequence: Synthetic oligonucleotide
  Target: ATXN2; (+) strand; PAM type: NRG; PAM sequence: CAG
ctactctgagtgaaagaagc

SEQ ID NO: 42846 - DNA, 20 bp, Artificial Sequence
  Description of Artificial Sequence: Synthetic oligonucleotide
  Target: ATXN2; (+) strand; PAM type: NRG; PAM sequence: AAG
gtgaaagaagccagtcataa

SEQ ID NO: 42847 - DNA, 20 bp, Artificial Sequence
  Description of Artificial Sequence: Synthetic oligonucleotide
  Target: ATXN2; (+) strand; PAM type: NRG; PAM sequence: TGG
attattccatttgtatgaaa

SEQ ID NO: 42848 - DNA, 20 bp, Artificial Sequence
  Description of Artificial Sequence: Synthetic oligonucleotide
  Target: ATXN2; (+) strand; PAM type: NRG; PAM sequence: AAG
aaatggaatttgccccaaat

SEQ ID NO: 42849 - DNA, 20 bp, Artificial Sequence
  Description of Artificial Sequence: Synthetic oligonucleotide
  Target: ATXN2; (+) strand; PAM type: NRG; PAM sequence: TAG
gccccaaataagcccatcca

SEQ ID NO: 42850 - DNA, 20 bp, Artificial Sequence
  Description of Artificial Sequence: Synthetic oligonucleotide
  Target: ATXN2; (+) strand; PAM type: NRG; PAM sequence: GAG
cccaaataagcccatccata

SEQ ID NO: 42851 - DNA, 20 bp, Artificial Sequence
  Description of Artificial Sequence: Synthetic oligonucleotide
  Target: ATXN2; (+) strand; PAM type: NRG; PAM sequence: CAG
aataagcccatccatagaga

SEQ ID NO: 42852 - DNA, 20 bp, Artificial Sequence
  Description of Artificial Sequence: Synthetic oligonucleotide
  Target: ATXN2; (+) strand; PAM type: NRG; PAM sequence: AAG
agcccatccatagagacaga

SEQ ID NO: 42853 - DNA, 20 bp, Artificial Sequence
  Description of Artificial Sequence: Synthetic oligonucleotide
  Target: ATXN2; (+) strand; PAM type: NRG; PAM sequence: TAG
ccatccatagagacagaaag

SEQ ID NO: 42854 - DNA, 20 bp, Artificial Sequence
  Description of Artificial Sequence: Synthetic oligonucleotide
  Target: ATXN2; (+) strand; PAM type: NRG; PAM sequence: CGG
agagacagaaagtagattaa

SEQ ID NO: 42855 - DNA, 20 bp, Artificial Sequence
  Description of Artificial Sequence: Synthetic oligonucleotide
  Target: ATXN2; (+) strand; PAM type: NRG; PAM sequence: TAG
aaagtagattaacggttgct

SEQ ID NO: 42856 - DNA, 20 bp, Artificial Sequence
  Description of Artificial Sequence: Synthetic oligonucleotide
  Target: ATXN2; (+) strand; PAM type: NRG; PAM sequence: AGG
aagtagattaacggttgctt

SEQ ID NO: 42857 - DNA, 20 bp, Artificial Sequence
  Description of Artificial Sequence: Synthetic oligonucleotide
  Target: ATXN2; (+) strand; PAM type: NRG; PAM sequence: GGG
agtagattaacggttgctta

SEQ ID NO: 42858 - DNA, 20 bp, Artificial Sequence
  Description of Artificial Sequence: Synthetic oligonucleotide
  Target: ATXN2; (+) strand; PAM type: NRG; PAM sequence: TGG
gattaacggttgcttagggt

SEQ ID NO: 42859 - DNA, 20 bp, Artificial Sequence
  Description of Artificial Sequence: Synthetic oligonucleotide
  Target: ATXN2; (+) strand; PAM type: NRG; PAM sequence: GGG
attaacggttgcttagggtt

SEQ ID NO: 42860 - DNA, 20 bp, Artificial Sequence
  Description of Artificial Sequence: Synthetic oligonucleotide
  Target: ATXN2; (+) strand; PAM type: NRG; PAM sequence: GAG
taacggttgcttagggttgg

SEQ ID NO: 42861 - DNA, 20 bp, Artificial Sequence
  Description of Artificial Sequence: Synthetic oligonucleotide
  Target: ATXN2; (+) strand; PAM type: NRG; PAM sequence: TAG
cggttgcttagggttgggag

SEQ ID NO: 42862 - DNA, 20 bp, Artificial Sequence
  Description of Artificial Sequence: Synthetic oligonucleotide
  Target: ATXN2; (+) strand; PAM type: NRG; PAM sequence: AGG
ggttgcttagggttgggagt

SEQ ID NO: 42863 - DNA, 20 bp, Artificial Sequence
  Description of Artificial Sequence: Synthetic oligonucleotide
  Target: ATXN2; (+) strand; PAM type: NRG; PAM sequence: GGG
gttgcttagggttgggagta

SEQ ID NO: 42864 - DNA, 20 bp, Artificial Sequence
  Description of Artificial Sequence: Synthetic oligonucleotide
  Target: ATXN2; (+) strand; PAM type: NRG; PAM sequence: GGG
ttgcttagggttgggagtag

SEQ ID NO: 42865 - DNA, 20 bp, Artificial Sequence
  Description of Artificial Sequence: Synthetic oligonucleotide
  Target: ATXN2; (+) strand; PAM type: NRG; PAM sequence: AAG
ttagggttgggagtagggga

SEQ ID NO: 42866 - DNA, 20 bp, Artificial Sequence
  Description of Artificial Sequence: Synthetic oligonucleotide
  Target: ATXN2; (+) strand; PAM type: NRG; PAM sequence: GAG
agggttgggagtaggggaaa

SEQ ID NO: 42867 - DNA, 20 bp, Artificial Sequence
  Description of Artificial Sequence: Synthetic oligonucleotide
  Target: ATXN2; (+) strand; PAM type: NRG; PAM sequence: AAG
gttgggagtaggggaaagag

SEQ ID NO: 42868 - DNA, 20 bp, Artificial Sequence
  Description of Artificial Sequence: Synthetic oligonucleotide
  Target: ATXN2; (+) strand; PAM type: NRG; PAM sequence: AGG
ttgggagtaggggaaagaga

SEQ ID NO: 42869 - DNA, 20 bp, Artificial Sequence
  Description of Artificial Sequence: Synthetic oligonucleotide
  Target: ATXN2; (+) strand; PAM type: NRG; PAM sequence: GGG
tgggagtaggggaaagagaa

SEQ ID NO: 42870 - DNA, 20 bp, Artificial Sequence
  Description of Artificial Sequence: Synthetic oligonucleotide
  Target: ATXN2; (+) strand; PAM type: NRG; PAM sequence: TGG
agtaggggaaagagaagggc

SEQ ID NO: 42871 - DNA, 20 bp, Artificial Sequence
  Description of Artificial Sequence: Synthetic oligonucleotide
  Target: ATXN2; (+) strand; PAM type: NRG; PAM sequence: GAG
taggggaaagagaagggctg

SEQ ID NO: 42872 - DNA, 20 bp, Artificial Sequence
  Description of Artificial Sequence: Synthetic oligonucleotide
  Target: ATXN2; (+) strand; PAM type: NRG; PAM sequence: AGG
aggggaaagagaagggctgg

SEQ ID NO: 42873 - DNA, 20 bp, Artificial Sequence
  Description of Artificial Sequence: Synthetic oligonucleotide
  Target: ATXN2; (+) strand; PAM type: NRG; PAM sequence: TGG
agaagggctggaggcaaatg

SEQ ID NO: 42874 - DNA, 20 bp, Artificial Sequence
  Description of Artificial Sequence: Synthetic oligonucleotide
  Target: ATXN2; (+) strand; PAM type: NRG; PAM sequence: TGG
atgtggaacgactgctaaac

SEQ ID NO: 42875 - DNA, 20 bp, Artificial Sequence
  Description of Artificial Sequence: Synthetic oligonucleotide
  Target: ATXN2; (+) strand; PAM type: NRG; PAM sequence: GGG
tgtggaacgactgctaaact

SEQ ID NO: 42876 - DNA, 20 bp, Artificial Sequence
  Description of Artificial Sequence: Synthetic oligonucleotide
  Target: ATXN2; (+) strand; PAM type: NRG; PAM sequence: CGG
aacgactgctaaactgggca

SEQ ID NO: 42877 - DNA, 20 bp, Artificial Sequence
  Description of Artificial Sequence: Synthetic oligonucleotide
  Target: ATXN2; (+) strand; PAM type: NRG; PAM sequence: GGG
acgactgctaaactgggcac

SEQ ID NO: 42878 - DNA, 20 bp, Artificial Sequence
  Description of Artificial Sequence: Synthetic oligonucleotide
  Target: ATXN2; (+) strand; PAM type: NRG; PAM sequence: GGG
cgactgctaaactgggcacg

SEQ ID NO: 42879 - DNA, 20 bp, Artificial Sequence
  Description of Artificial Sequence: Synthetic oligonucleotide
  Target: ATXN2; (+) strand; PAM type: NRG; PAM sequence: TGG
actgggcacggggtttcttt

SEQ ID NO: 42880 - DNA, 20 bp, Artificial Sequence
  Description of Artificial Sequence: Synthetic oligonucleotide
  Target: ATXN2; (+) strand; PAM type: NRG; PAM sequence: GGG
ctgggcacggggtttctttt

SEQ ID NO: 42881 - DNA, 20 bp, Artificial Sequence
  Description of Artificial Sequence: Synthetic oligonucleotide
  Target: ATXN2; (+) strand; PAM type: NRG; PAM sequence: GGG
tgggcacggggtttcttttg

SEQ ID NO: 42882 - DNA, 20 bp, Artificial Sequence
  Description of Artificial Sequence: Synthetic oligonucleotide
  Target: ATXN2; (+) strand; PAM type: NRG; PAM sequence: GGG
gggcacggggtttcttttgg

SEQ ID NO: 42883 - DNA, 20 bp, Artificial Sequence
  Description of Artificial Sequence: Synthetic oligonucleotide
  Target: ATXN2; (+) strand; PAM type: NRG; PAM sequence: AAG
cggggtttcttttgggggtg

SEQ ID NO: 42884 - DNA, 20 bp, Artificial Sequence
  Description of Artificial Sequence: Synthetic oligonucleotide
  Target: ATXN2; (+) strand; PAM type: NRG; PAM sequence: GAG
gggtttcttttgggggtgaa

SEQ ID NO: 42885 - DNA, 20 bp, Artificial Sequence
  Description of Artificial Sequence: Synthetic oligonucleotide
  Target: ATXN2; (+) strand; PAM type: NRG; PAM sequence: GAG
agtatgttttaaaatcaact

SEQ ID NO: 42886 - DNA, 20 bp, Artificial Sequence
  Description of Artificial Sequence: Synthetic oligonucleotide
  Target: ATXN2; (+) strand; PAM type: NRG; PAM sequence: AAG
atgttttaaaatcaactgag

SEQ ID NO: 42887 - DNA, 20 bp, Artificial Sequence
  Description of Artificial Sequence: Synthetic oligonucleotide
  Target: ATXN2; (+) strand; PAM type: NRG; PAM sequence: CGG
tttaaaatcaactgagaaga

SEQ ID NO: 42888 - DNA, 20 bp, Artificial Sequence
  Description of Artificial Sequence: Synthetic oligonucleotide
  Target: ATXN2; (+) strand; PAM type: NRG; PAM sequence: TGG
actgatttatacactttaaa

SEQ ID NO: 42889 - DNA, 20 bp, Artificial Sequence
  Description of Artificial Sequence: Synthetic oligonucleotide
  Target: ATXN2; (+) strand; PAM type: NRG; PAM sequence: CGG
actgatttatacactttaaa

SEQ ID NO: 42890 - DNA, 20 bp, Artificial Sequence
  Description of Artificial Sequence: Synthetic oligonucleotide
  Target: ATXN2; (+) strand; PAM type: NRG; PAM sequence: AAG
atgtaaattatatctcaata

SEQ ID NO: 42891 - DNA, 20 bp, Artificial Sequence
  Description of Artificial Sequence: Synthetic oligonucleotide
  Target: ATXN2; (+) strand; PAM type: NRG; PAM sequence: AAG
atgctaattcacatgcttca

SEQ ID NO: 42892 - DNA, 20 bp, Artificial Sequence
  Description of Artificial Sequence: Synthetic oligonucleotide
  Target: ATXN2; (+) strand; PAM type: NRG; PAM sequence: TAG
ctaattcacatgcttcaaag

SEQ ID NO: 42893 - DNA, 20 bp, Artificial Sequence
  Description of Artificial Sequence: Synthetic oligonucleotide
  Target: ATXN2; (+) strand; PAM type: NRG; PAM sequence: GAG
tagaaatgttttttcttcat

SEQ ID NO: 42894 - DNA, 20 bp, Artificial Sequence
  Description of Artificial Sequence: Synthetic oligonucleotide
  Target: ATXN2; (+) strand; PAM type: NRG; PAM sequence: AAG
tgagatattaaattcaatcc

SEQ ID NO: 42895 - DNA, 20 bp, Artificial Sequence
  Description of Artificial Sequence: Synthetic oligonucleotide
  Target: ATXN2; (+) strand; PAM type: NRG; PAM sequence: TAG
tattaaattcaatccaagtg

SEQ ID NO: 42896 - DNA, 20 bp, Artificial Sequence
  Description of Artificial Sequence: Synthetic oligonucleotide
  Target: ATXN2; (+) strand; PAM type: NRG; PAM sequence: AAG
attcaatccaagtgtagtat

SEQ ID NO: 42897 - DNA, 20 bp, Artificial Sequence
  Description of Artificial Sequence: Synthetic oligonucleotide
  Target: ATXN2; (+) strand; PAM type: NRG; PAM sequence: GAG
tcaatccaagtgtagtataa

SEQ ID NO: 42898 - DNA, 20 bp, Artificial Sequence
  Description of Artificial Sequence: Synthetic oligonucleotide
  Target: ATXN2; (+) strand; PAM type: NRG; PAM sequence: AGG
caatccaagtgtagtataag

SEQ ID NO: 42899 - DNA, 20 bp, Artificial Sequence
  Description of Artificial Sequence: Synthetic oligonucleotide
  Target: ATXN2; (+) strand; PAM type: NRG; PAM sequence: GAG
atccaagtgtagtataagag

SEQ ID NO: 42900 - DNA, 20 bp, Artificial Sequence
  Description of Artificial Sequence: Synthetic oligonucleotide
  Target: ATXN2; (+) strand; PAM type: NRG; PAM sequence: GAG
atgttaaaaaaaataatgct

SEQ ID NO: 42901 - DNA, 20 bp, Artificial Sequence
  Description of Artificial Sequence: Synthetic oligonucleotide
  Target: ATXN2; (+) strand; PAM type: NRG; PAM sequence: AGG
tgttaaaaaaaataatgctg

SEQ ID NO: 42902 - DNA, 20 bp, Artificial Sequence
  Description of Artificial Sequence: Synthetic oligonucleotide
  Target: ATXN2; (+) strand; PAM type: NRG; PAM sequence: TGG
tgctgaggaaaaaattcaaa

SEQ ID NO: 42903 - DNA, 20 bp, Artificial Sequence
  Description of Artificial Sequence: Synthetic oligonucleotide
  Target: ATXN2; (+) strand; PAM type: NRG; PAM sequence: GGG
gctgaggaaaaaattcaaat

SEQ ID NO: 42904 - DNA, 20 bp, Artificial Sequence
  Description of Artificial Sequence: Synthetic oligonucleotide
  Target: ATXN2; (+) strand; PAM type: NRG; PAM sequence: GGG
ctgaggaaaaaattcaaatg

SEQ ID NO: 42905 - DNA, 20 bp, Artificial Sequence
  Description of Artificial Sequence: Synthetic oligonucleotide
  Target: ATXN2; (+) strand; PAM type: NRG; PAM sequence: AAG
aggaaaaaattcaaatgggg

SEQ ID NO: 42906 - DNA, 20 bp, Artificial Sequence
  Description of Artificial Sequence: Synthetic oligonucleotide
  Target: ATXN2; (+) strand; PAM type: NRG; PAM sequence: CAG
caaatggggaagaataccta

SEQ ID NO: 42907 - DNA, 20 bp, Artificial Sequence
  Description of Artificial Sequence: Synthetic oligonucleotide
  Target: ATXN2; (+) strand; PAM type: NRG; PAM sequence: AAG
tggggaagaatacctacagc

SEQ ID NO: 42908 - DNA, 20 bp, Artificial Sequence
  Description of Artificial Sequence: Synthetic oligonucleotide
  Target: ATXN2; (+) strand; PAM type: NRG; PAM sequence: CGG
cctccttctccttctcccca

SEQ ID NO: 42909 - DNA, 20 bp, Artificial Sequence
  Description of Artificial Sequence: Synthetic oligonucleotide
  Target: ATXN2; (+) strand; PAM type: NRG; PAM sequence: CGG
tccctctccctctctttcca

SEQ ID NO: 42910 - DNA, 20 bp, Artificial Sequence
  Description of Artificial Sequence: Synthetic oligonucleotide
  Target: ATXN2; (+) strand; PAM type: NRG; PAM sequence: GAG
cacggtctccctctgatgcc

SEQ ID NO: 42911 - DNA, 20 bp, Artificial Sequence
  Description of Artificial Sequence: Synthetic oligonucleotide
  Target: ATXN2; (+) strand; PAM type: NRG; PAM sequence: AAG
ctccctctgatgccgagccg

SEQ ID NO: 42912 - DNA, 20 bp, Artificial Sequence
  Description of Artificial Sequence: Synthetic oligonucleotide
  Target: ATXN2; (+) strand; PAM type: NRG; PAM sequence: TAG
ctctgatgccgagccgaagc

SEQ ID NO: 42913 - DNA, 20 bp, Artificial Sequence
  Description of Artificial Sequence: Synthetic oligonucleotide
  Target: ATXN2; (+) strand; PAM type: NRG; PAM sequence: CGG
agactgtactgctgccatct

SEQ ID NO: 42914 - DNA, 20 bp, Artificial Sequence
  Description of Artificial Sequence: Synthetic oligonucleotide
  Target: ATXN2; (+) strand; PAM type: NRG; PAM sequence: CAG
cctgcctgattctcctgcct

SEQ ID NO: 42915 - DNA, 20 bp, Artificial Sequence
  Description of Artificial Sequence: Synthetic oligonucleotide
  Target: ATXN2; (+) strand; PAM type: NRG; PAM sequence: TAG
ttctcctgcctcagcctgcc

SEQ ID NO: 42916 - DNA, 20 bp, Artificial Sequence
  Description of Artificial Sequence: Synthetic oligonucleotide
  Target: ATXN2; (+) strand; PAM type: NRG; PAM sequence: CAG
ctgcctagtgcctgtgattg

SEQ ID NO: 42917 - DNA, 20 bp, Artificial Sequence
  Description of Artificial Sequence: Synthetic oligonucleotide
  Target: ATXN2; (+) strand; PAM type: NRG; PAM sequence: AGG
tgcctagtgcctgtgattgc

SEQ ID NO: 42918 - DNA, 20 bp, Artificial Sequence
  Description of Artificial Sequence: Synthetic oligonucleotide
  Target: ATXN2; (+) strand; PAM type: NRG; PAM sequence: TGG
cccgcgccgccacgcctgac

SEQ ID NO: 42919 - DNA, 20 bp, Artificial Sequence
  Description of Artificial Sequence: Synthetic oligonucleotide
  Target: ATXN2; (+) strand; PAM type: NRG; PAM sequence: TGG
gactggttttcgtatttttt

SEQ ID NO: 42920 - DNA, 20 bp, Artificial Sequence
  Description of Artificial Sequence: Synthetic oligonucleotide
  Target: ATXN2; (+) strand; PAM type: NRG; PAM sequence: TGG
tggttttcgtatttttttgg

SEQ ID NO: 42921 - DNA, 20 bp, Artificial Sequence
  Description of Artificial Sequence: Synthetic oligonucleotide
  Target: ATXN2; (+) strand; PAM type: NRG; PAM sequence: GAG
gttttcgtatttttttggtg

SEQ ID NO: 42922 - DNA, 20 bp, Artificial Sequence
  Description of Artificial Sequence: Synthetic oligonucleotide
  Target: ATXN2; (+) strand; PAM type: NRG; PAM sequence: CGG
tcgtatttttttggtggaga

SEQ ID NO: 42923 - DNA, 20 bp, Artificial Sequence
  Description of Artificial Sequence: Synthetic oligonucleotide
  Target: ATXN2; (+) strand; PAM type: NRG; PAM sequence: GGG
cgtatttttttggtggagac

SEQ ID NO: 42924 - DNA, 20 bp, Artificial Sequence
  Description of Artificial Sequence: Synthetic oligonucleotide
  Target: ATXN2; (+) strand; PAM type: NRG; PAM sequence: GGG
gtatttttttggtggagacg

SEQ ID NO: 42925 - DNA, 20 bp, Artificial Sequence
  Description of Artificial Sequence: Synthetic oligonucleotide
  Target: ATXN2; (+) strand; PAM type: NRG; PAM sequence: TGG
gagacggggtttcgctgtgt

SEQ ID NO: 42926 - DNA, 20 bp, Artificial Sequence
  Description of Artificial Sequence: Synthetic oligonucleotide
  Target: ATXN2; (+) strand; PAM type: NRG; PAM sequence: CGG
cggggtttcgctgtgttggc

SEQ ID NO: 42927 - DNA, 20 bp, Artificial Sequence
  Description of Artificial Sequence: Synthetic oligonucleotide
  Target: ATXN2; (+) strand; PAM type: NRG; PAM sequence: GGG
ggggtttcgctgtgttggcc

SEQ ID NO: 42928 - DNA, 20 bp, Artificial Sequence
  Description of Artificial Sequence: Synthetic oligonucleotide
  Target: ATXN2; (+) strand; PAM type: NRG; PAM sequence: TGG
tttcgctgtgttggccgggc

SEQ ID NO: 42929 - DNA, 20 bp, Artificial Sequence
  Description of Artificial Sequence: Synthetic oligonucleotide
  Target: ATXN2; (+) strand; PAM type: NRG; PAM sequence: CAG
gtgttggccgggctggtctc

SEQ ID NO: 42930 - DNA, 20 bp, Artificial Sequence
  Description of Artificial Sequence: Synthetic oligonucleotide
  Target: ATXN2; (+) strand; PAM type: NRG; PAM sequence: GAG
ggtctccagctcctaaccgc

SEQ ID NO: 42931 - DNA, 20 bp, Artificial Sequence
  Description of Artificial Sequence: Synthetic oligonucleotide
  Target: ATXN2; (+) strand; PAM type: NRG; PAM sequence: CAG
cctaaccgcgagtgatctgc

SEQ ID NO: 42932 - DNA, 20 bp, Artificial Sequence
  Description of Artificial Sequence: Synthetic oligonucleotide
  Target: ATXN2; (+) strand; PAM type: NRG; PAM sequence: CGG
cgcgagtgatctgccagcct

SEQ ID NO: 42933 - DNA, 20 bp, Artificial Sequence
  Description of Artificial Sequence: Synthetic oligonucleotide
  Target: ATXN2; (+) strand; PAM type: NRG; PAM sequence: GAG
tctgccagcctcggcctccc

SEQ ID NO: 42934 - DNA, 20 bp, Artificial Sequence
  Description of Artificial Sequence: Synthetic oligonucleotide
  Target: ATXN2; (+) strand; PAM type: NRG; PAM sequence: AGG
ctgccagcctcggcctcccg

SEQ ID NO: 42935 - DNA, 20 bp, Artificial Sequence
  Description of Artificial Sequence: Synthetic oligonucleotide
  Target: ATXN2; (+) strand; PAM type: NRG; PAM sequence: CGG
gcctcggcctcccgaggtgc

SEQ ID NO: 42936 - DNA, 20 bp, Artificial Sequence
  Description of Artificial Sequence: Synthetic oligonucleotide
  Target: ATXN2; (+) strand; PAM type: NRG; PAM sequence: GGG
cctcggcctcccgaggtgcc

SEQ ID NO: 42937 - DNA, 20 bp, Artificial Sequence
  Description of Artificial Sequence: Synthetic oligonucleotide
  Target: ATXN2; (+) strand; PAM type: NRG; PAM sequence: CAG
ctcccgaggtgccgggattg

SEQ ID NO: 42938 - DNA, 20 bp, Artificial Sequence
  Description of Artificial Sequence: Synthetic oligonucleotide
  Target: ATXN2; (+) strand; PAM type: NRG; PAM sequence: CGG
cgaggtgccgggattgcaga

SEQ ID NO: 42939 - DNA, 20 bp, Artificial Sequence
  Description of Artificial Sequence: Synthetic oligonucleotide
  Target: ATXN2; (+) strand; PAM type: NRG; PAM sequence: GAG
aggtgccgggattgcagacg

SEQ ID NO: 42940 - DNA, 20 bp, Artificial Sequence
  Description of Artificial Sequence: Synthetic oligonucleotide
  Target: ATXN2; (+) strand; PAM type: NRG; PAM sequence: CAG
cagacggagtctcgttcact

SEQ ID NO: 42941 - DNA, 20 bp, Artificial Sequence
  Description of Artificial Sequence: Synthetic oligonucleotide
  Target: ATXN2; (+) strand; PAM type: NRG; PAM sequence: TGG
ctcgttcactcagtgctcaa

SEQ ID NO: 42942 - DNA, 20 bp, Artificial Sequence
  Description of Artificial Sequence: Synthetic oligonucleotide
  Target: ATXN2; (+) strand; PAM type: NRG; PAM sequence: CAG
actcagtgctcaatggtgcc

SEQ ID NO: 42943 - DNA, 20 bp, Artificial Sequence
  Description of Artificial Sequence: Synthetic oligonucleotide
  Target: ATXN2; (+) strand; PAM type: NRG; PAM sequence: AGG
ctcagtgctcaatggtgccc

SEQ ID NO: 42944 - DNA, 20 bp, Artificial Sequence
  Description of Artificial Sequence: Synthetic oligonucleotide
  Target: ATXN2; (+) strand; PAM type: NRG; PAM sequence: TGG
gtgctcaatggtgcccaggc

SEQ ID NO: 42945 - DNA, 20 bp, Artificial Sequence
  Description of Artificial Sequence: Synthetic oligonucleotide
  Target: ATXN2; (+) strand; PAM type: NRG; PAM sequence: GAG
gctcaatggtgcccaggctg

SEQ ID NO: 42946 - DNA, 20 bp, Artificial Sequence
  Description of Artificial Sequence: Synthetic oligonucleotide
  Target: ATXN2; (+) strand; PAM type: NRG; PAM sequence: CAG
atggtgcccaggctggagtg

SEQ ID NO: 42947 - DNA, 20 bp, Artificial Sequence
  Description of Artificial Sequence: Synthetic oligonucleotide
  Target: ATXN2; (+) strand; PAM type: NRG; PAM sequence: TGG
gtgcccaggctggagtgcag

SEQ ID NO: 42948 - DNA, 20 bp, Artificial Sequence
  Description of Artificial Sequence: Synthetic oligonucleotide
  Target: ATXN2; (+) strand; PAM type: NRG; PAM sequence: CGG
ggagtgcagtggcgtgatct

SEQ ID NO: 42949 - DNA, 20 bp, Artificial Sequence
  Description of Artificial Sequence: Synthetic oligonucleotide
  Target: ATXN2; (+) strand; PAM type: NRG; PAM sequence: CAG
tcgctacaacctccacctcc

SEQ ID NO: 42950 - DNA, 20 bp, Artificial Sequence
  Description of Artificial Sequence: Synthetic oligonucleotide
  Target: ATXN2; (+) strand; PAM type: NRG; PAM sequence: TGG
cacctcccagccacctgcct

SEQ ID NO: 42951 - DNA, 20 bp, Artificial Sequence
  Description of Artificial Sequence: Synthetic oligonucleotide
  Target: ATXN2; (+) strand; PAM type: NRG; PAM sequence: AAG
ccacctgccttggcctccca

SEQ ID NO: 42952 - DNA, 20 bp, Artificial Sequence
  Description of Artificial Sequence: Synthetic oligonucleotide
  Target: ATXN2; (+) strand; PAM type: NRG; PAM sequence: GAG
ccttggcctcccaaagtgcc

SEQ ID NO: 42953 - DNA, 20 bp, Artificial Sequence
  Description of Artificial Sequence: Synthetic oligonucleotide
  Target: ATXN2; (+) strand; PAM type: NRG; PAM sequence: CAG
ctcccaaagtgccgagattg

SEQ ID NO: 42954 - DNA, 20 bp, Artificial Sequence
  Description of Artificial Sequence: Synthetic oligonucleotide
  Target: ATXN2; (+) strand; PAM type: NRG; PAM sequence: CGG
ccgagattgcagcctctgcc

SEQ ID NO: 42955 - DNA, 20 bp, Artificial Sequence
  Description of Artificial Sequence: Synthetic oligonucleotide
  Target: ATXN2; (+) strand; PAM type: NRG; PAM sequence: TGG
tgcccggccgccaccccgtc

SEQ ID NO: 42956 - DNA, 20 bp, Artificial Sequence
  Description of Artificial Sequence: Synthetic oligonucleotide
  Target: ATXN2; (+) strand; PAM type: NRG; PAM sequence: GGG
gcccggccgccaccccgtct

SEQ ID NO: 42957 - DNA, 20 bp, Artificial Sequence
  Description of Artificial Sequence: Synthetic oligonucleotide
  Target: ATXN2; (+) strand; PAM type: NRG; PAM sequence: AAG
cggccgccaccccgtctggg

SEQ ID NO: 42958 - DNA, 20 bp, Artificial Sequence
  Description of Artificial Sequence: Synthetic oligonucleotide
  Target: ATXN2; (+) strand; PAM type: NRG; PAM sequence: GAG
cgccaccccgtctgggaagt

SEQ ID NO: 42959 - DNA, 20 bp, Artificial Sequence
  Description of Artificial Sequence: Synthetic oligonucleotide
  Target: ATXN2; (+) strand; PAM type: NRG; PAM sequence: AGG
gccaccccgtctgggaagtg

SEQ ID NO: 42960 - DNA, 20 bp, Artificial Sequence
  Description of Artificial Sequence: Synthetic oligonucleotide
  Target: ATXN2; (+) strand; PAM type: NRG; PAM sequence: GAG
caccccgtctgggaagtgag

SEQ ID NO: 42961 - DNA, 20 bp, Artificial Sequence
  Description of Artificial Sequence: Synthetic oligonucleotide
  Target: ATXN2; (+) strand; PAM type: NRG; PAM sequence: TGG
aagtgaggagcgtctctgcc

SEQ ID NO: 42962 - DNA, 20 bp, Artificial Sequence
  Description of Artificial Sequence: Synthetic oligonucleotide
  Target: ATXN2; (+) strand; PAM type: NRG; PAM sequence: TGG
ctgcctggccacccatcgtc

SEQ ID NO: 42963 - DNA, 20 bp, Artificial Sequence
  Description of Artificial Sequence: Synthetic oligonucleotide
  Target: ATXN2; (+) strand; PAM type: NRG; PAM sequence: GGG
tgcctggccacccatcgtct

SEQ ID NO: 42964 - DNA, 20 bp, Artificial Sequence
  Description of Artificial Sequence: Synthetic oligonucleotide
  Target: ATXN2; (+) strand; PAM type: NRG; PAM sequence: GAG
ccacccatcgtctgggatgt

SEQ ID NO: 42965 - DNA, 20 bp, Artificial Sequence
  Description of Artificial Sequence: Synthetic oligonucleotide
  Target: ATXN2; (+) strand; PAM type: NRG; PAM sequence: AGG
cacccatcgtctgggatgtg

SEQ ID NO: 42966 - DNA, 20 bp, Artificial Sequence
  Description of Artificial Sequence: Synthetic oligonucleotide
  Target: ATXN2; (+) strand; PAM type: NRG; PAM sequence: GAG
cccatcgtctgggatgtgag

SEQ ID NO: 42967 - DNA, 20 bp, Artificial Sequence
  Description of Artificial Sequence: Synthetic oligonucleotide
  Target: ATXN2; (+) strand; PAM type: NRG; PAM sequence: CGG
atgtgaggagcccctctgcc

SEQ ID NO: 42968 - DNA, 20 bp, Artificial Sequence
  Description of Artificial Sequence: Synthetic oligonucleotide
  Target: ATXN2; (+) strand; PAM type: NRG; PAM sequence: CAG
agcccctctgcccggctgcc

SEQ ID NO: 42969 - DNA, 20 bp, Artificial Sequence
  Description of Artificial Sequence: Synthetic oligonucleotide
  Target: ATXN2; (+) strand; PAM type: NRG; PAM sequence: TGG
ctctgcccggctgcccagtc

SEQ ID NO: 42970 - DNA, 20 bp, Artificial Sequence
  Description of Artificial Sequence: Synthetic oligonucleotide
  Target: ATXN2; (+) strand; PAM type: NRG; PAM sequence: GGG
tctgcccggctgcccagtct

SEQ ID NO: 42971 - DNA, 20 bp, Artificial Sequence
  Description of Artificial Sequence: Synthetic oligonucleotide
  Target: ATXN2; (+) strand; PAM type: NRG; PAM sequence: AAG
gcccggctgcccagtctggg

SEQ ID NO: 42972 - DNA, 20 bp, Artificial Sequence
  Description of Artificial Sequence: Synthetic oligonucleotide
  Target: ATXN2; (+) strand; PAM type: NRG; PAM sequence: GAG
ggctgcccagtctgggaagt

SEQ ID NO: 42973 - DNA, 20 bp, Artificial Sequence
  Description of Artificial Sequence: Synthetic oligonucleotide
  Target: ATXN2; (+) strand; PAM type: NRG; PAM sequence: AGG
gctgcccagtctgggaagtg

SEQ ID NO: 42974 - DNA, 20 bp, Artificial Sequence
  Description of Artificial Sequence: Synthetic oligonucleotide
  Target: ATXN2; (+) strand; PAM type: NRG; PAM sequence: GAG
tgcccagtctgggaagtgag

SEQ ID NO: 42975 - DNA, 20 bp, Artificial Sequence
  Description of Artificial Sequence: Synthetic oligonucleotide
  Target: ATXN2; (+) strand; PAM type: NRG; PAM sequence: CGG
aagtgaggagcacctcttcc

SEQ ID NO: 42976 - DNA, 20 bp, Artificial Sequence
  Description of Artificial Sequence: Synthetic oligonucleotide
  Target: ATXN2; (+) strand; PAM type: NRG; PAM sequence: TAG
ttcccggccgccatcccgtc

SEQ ID NO: 42977 - DNA, 20 bp, Artificial Sequence
  Description of Artificial Sequence: Synthetic oligonucleotide
  Target: ATXN2; (+) strand; PAM type: NRG; PAM sequence: AGG
tcccggccgccatcccgtct

SEQ ID NO: 42978 - DNA, 20 bp, Artificial Sequence
  Description of Artificial Sequence: Synthetic oligonucleotide
  Target: ATXN2; (+) strand; PAM type: NRG; PAM sequence: AAG
cggccgccatcccgtctagg

SEQ ID NO: 42979 - DNA, 20 bp, Artificial Sequence
  Description of Artificial Sequence: Synthetic oligonucleotide
  Target: ATXN2; (+) strand; PAM type: NRG; PAM sequence: GAG
cgccatcccgtctaggaagt

SEQ ID NO: 42980 - DNA, 20 bp, Artificial Sequence
  Description of Artificial Sequence: Synthetic oligonucleotide
  Target: ATXN2; (+) strand; PAM type: NRG; PAM sequence: AGG
gccatcccgtctaggaagtg

SEQ ID NO: 42981 - DNA, 20 bp, Artificial Sequence
  Description of Artificial Sequence: Synthetic oligonucleotide
  Target: ATXN2; (+) strand; PAM type: NRG; PAM sequence: GAG
catcccgtctaggaagtgag

SEQ ID NO: 42982 - DNA, 20 bp, Artificial Sequence
  Description of Artificial Sequence: Synthetic oligonucleotide
  Target: ATXN2; (+) strand; PAM type: NRG; PAM sequence: CGG
aagtgaggagcgtctctgcc

SEQ ID NO: 42983 - DNA, 20 bp, Artificial Sequence
  Description of Artificial Sequence: Synthetic oligonucleotide
  Target: ATXN2; (+) strand; PAM type: NRG; PAM sequence: GAG
tgcccggccacccgtcgtct

SEQ ID NO: 42984 - DNA, 20 bp, Artificial Sequence
  Description of Artificial Sequence: Synthetic oligonucleotide
  Target: ATXN2; (+) strand; PAM type: NRG; PAM sequence: TGG
gccacccgtcgtctgagatg

SEQ ID NO: 42985 - DNA, 20 bp, Artificial Sequence
  Description of Artificial Sequence: Synthetic oligonucleotide
  Target: ATXN2; (+) strand; PAM type: NRG; PAM sequence: GGG
ccacccgtcgtctgagatgt

SEQ ID NO: 42986 - DNA, 20 bp, Artificial Sequence
  Description of Artificial Sequence: Synthetic oligonucleotide
  Target: ATXN2; (+) strand; PAM type: NRG; PAM sequence: GGG
cacccgtcgtctgagatgtg

SEQ ID NO: 42987 - DNA, 20 bp, Artificial Sequence
  Description of Artificial Sequence: Synthetic oligonucleotide
  Target: ATXN2; (+) strand; PAM type: NRG; PAM sequence: GAG
cccgtcgtctgagatgtggg

SEQ ID NO: 42988 - DNA, 20 bp, Artificial Sequence
  Description of Artificial Sequence: Synthetic oligonucleotide
  Target: ATXN2; (+) strand; PAM type: NRG; PAM sequence: TGG
ctctgccccgctgccccgtc

SEQ ID NO: 42989 - DNA, 20 bp, Artificial Sequence
  Description of Artificial Sequence: Synthetic oligonucleotide
  Target: ATXN2; (+) strand; PAM type: NRG; PAM sequence: GGG
tctgccccgctgccccgtct

SEQ ID NO: 42990 - DNA, 20 bp, Artificial Sequence
  Description of Artificial Sequence: Synthetic oligonucleotide
  Target: ATXN2; (+) strand; PAM type: NRG; PAM sequence: GAG
cgctgccccgtctgggatgt

SEQ ID NO: 42991 - DNA, 20 bp, Artificial Sequence
  Description of Artificial Sequence: Synthetic oligonucleotide
  Target: ATXN2; (+) strand; PAM type: NRG; PAM sequence: AGG
gctgccccgtctgggatgtg

SEQ ID NO: 42992 - DNA, 20 bp, Artificial Sequence
  Description of Artificial Sequence: Synthetic oligonucleotide
  Target: ATXN2; (+) strand; PAM type: NRG; PAM sequence: GAG
tgccccgtctgggatgtgag

SEQ ID NO: 42993 - DNA, 20 bp, Artificial Sequence
  Description of Artificial Sequence: Synthetic oligonucleotide
  Target: ATXN2; (+) strand; PAM type: NRG; PAM sequence: CGG
atgtgaggagcgcctctgcc

SEQ ID NO: 42994 - DNA, 20 bp, Artificial Sequence
  Description of Artificial Sequence: Synthetic oligonucleotide
  Target: ATXN2; (+) strand; PAM type: NRG; PAM sequence: TGG
tgcccggccgcgaccccgtc

SEQ ID NO: 42995 - DNA, 20 bp, Artificial Sequence
  Description of Artificial Sequence: Synthetic oligonucleotide
  Target: ATXN2; (+) strand; PAM type: NRG; PAM sequence: GGG
gcccggccgcgaccccgtct

SEQ ID NO: 42996 - DNA, 20 bp, Artificial Sequence
  Description of Artificial Sequence: Synthetic oligonucleotide
  Target: ATXN2; (+) strand; PAM type: NRG; PAM sequence: GAG
ccggccgcgaccccgtctgg

SEQ ID NO: 42997 - DNA, 20 bp, Artificial Sequence
  Description of Artificial Sequence: Synthetic oligonucleotide
  Target: ATXN2; (+) strand; PAM type: NRG; PAM sequence: AGG
cggccgcgaccccgtctggg

SEQ ID NO: 42998 - DNA, 20 bp, Artificial Sequence
  Description of Artificial Sequence: Synthetic oligonucleotide
  Target: ATXN2; (+) strand; PAM type: NRG; PAM sequence: GAG
cgcgaccccgtctgggaggt

SEQ ID NO: 42999 - DNA, 20 bp, Artificial Sequence
  Description of Artificial Sequence: Synthetic oligonucleotide
  Target: ATXN2; (+) strand; PAM type: NRG; PAM sequence: AGG
gcgaccccgtctgggaggtg

SEQ ID NO: 43000 - DNA, 20 bp, Artificial Sequence
  Description of Artificial Sequence: Synthetic oligonucleotide
  Target: ATXN2; (+) strand; PAM type: NRG; PAM sequence: GAG
gaccccgtctgggaggtgag

SEQ ID NO: 43001 - DNA, 20 bp, Artificial Sequence
  Description of Artificial Sequence: Synthetic oligonucleotide
  Target: ATXN2; (+) strand; PAM type: NRG; PAM sequence: TGG
aggtgaggagcgtctctgcc

SEQ ID NO: 43002 - DNA, 20 bp, Artificial Sequence
  Description of Artificial Sequence: Synthetic oligonucleotide
  Target: ATXN2; (+) strand; PAM type: NRG; PAM sequence: GAG
tctgcctggccgccccgtct

SEQ ID NO: 43003 - DNA, 20 bp, Artificial Sequence
  Description of Artificial Sequence: Synthetic oligonucleotide
  Target: ATXN2; (+) strand; PAM type: NRG; PAM sequence: AAG
gcctggccgccccgtctgag

SEQ ID NO: 43004 - DNA, 20 bp, Artificial Sequence
  Description of Artificial Sequence: Synthetic oligonucleotide
  Target: ATXN2; (+) strand; PAM type: NRG; PAM sequence: GAG
ggccgccccgtctgagaagt

SEQ ID NO: 43005 - DNA, 20 bp, Artificial Sequence
  Description of Artificial Sequence: Synthetic oligonucleotide
  Target: ATXN2; (+) strand; PAM type: NRG; PAM sequence: AGG
gccgccccgtctgagaagtg

SEQ ID NO: 43006 - DNA, 20 bp, Artificial Sequence
  Description of Artificial Sequence: Synthetic oligonucleotide
  Target: ATXN2; (+) strand; PAM type: NRG; PAM sequence: GAG
cgccccgtctgagaagtgag

SEQ ID NO: 43007 - DNA, 20 bp, Artificial Sequence
  Description of Artificial Sequence: Synthetic oligonucleotide
  Target: ATXN2; (+) strand; PAM type: NRG; PAM sequence: CGG
aagtgaggagcccctctgcc

SEQ ID NO: 43008 - DNA, 20 bp, Artificial Sequence
  Description of Artificial Sequence: Synthetic oligonucleotide
  Target: ATXN2; (+) strand; PAM type: NRG; PAM sequence: CAG
tgaggagcccctctgcccgg

SEQ ID NO: 43009 - DNA, 20 bp, Artificial Sequence
  Description of Artificial Sequence: Synthetic oligonucleotide
  Target: ATXN2; (+) strand; PAM type: NRG; PAM sequence: GAG
gcccggcagccgccccgtct

SEQ ID NO: 43010 - DNA, 20 bp, Artificial Sequence
  Description of Artificial Sequence: Synthetic oligonucleotide
  Target: ATXN2; (+) strand; PAM type: NRG; PAM sequence: AAG
cggcagccgccccgtctgag

SEQ ID NO: 43011 - DNA, 20 bp, Artificial Sequence
  Description of Artificial Sequence: Synthetic oligonucleotide
  Target: ATXN2; (+) strand; PAM type: NRG; PAM sequence: GAG
agccgccccgtctgagaagt

SEQ ID NO: 43012 - DNA, 20 bp, Artificial Sequence
  Description of Artificial Sequence: Synthetic oligonucleotide
  Target: ATXN2; (+) strand; PAM type: NRG; PAM sequence: AAG
cgccccgtctgagaagtgag

SEQ ID NO: 43013 - DNA, 20 bp, Artificial Sequence
  Description of Artificial Sequence: Synthetic oligonucleotide
  Target: ATXN2; (+) strand; PAM type: NRG; PAM sequence: TGG
aagtgagaagcccctccgcc

SEQ ID NO: 43014 - DNA, 20 bp, Artificial Sequence
  Description of Artificial Sequence: Synthetic oligonucleotide
  Target: ATXN2; (+) strand; PAM type: NRG; PAM sequence: CAG
tgagaagcccctccgcctgg

SEQ ID NO: 43015 - DNA, 20 bp, Artificial Sequence
  Description of Artificial Sequence: Synthetic oligonucleotide
  Target: ATXN2; (+) strand; PAM type: NRG; PAM sequence: TGG
cgcctggcagccaccccgtc

SEQ ID NO: 43016 - DNA, 20 bp, Artificial Sequence
  Description of Artificial Sequence: Synthetic oligonucleotide
  Target: ATXN2; (+) strand; PAM type: NRG; PAM sequence: GGG
gcctggcagccaccccgtct

SEQ ID NO: 43017 - DNA, 20 bp, Artificial Sequence
  Description of Artificial Sequence: Synthetic oligonucleotide
  Target: ATXN2; (+) strand; PAM type: NRG; PAM sequence: AAG
tggcagccaccccgtctggg

SEQ ID NO: 43018 - DNA, 20 bp, Artificial Sequence
  Description of Artificial Sequence: Synthetic oligonucleotide
  Target: ATXN2; (+) strand; PAM type: NRG; PAM sequence: GAG
agccaccccgtctgggaagt

SEQ ID NO: 43019 - DNA, 20 bp, Artificial Sequence
  Description of Artificial Sequence: Synthetic oligonucleotide
  Target: ATXN2; (+) strand; PAM type: NRG; PAM sequence: AGG
gccaccccgtctgggaagtg

SEQ ID NO: 43020 - DNA, 20 bp, Artificial Sequence
  Description of Artificial Sequence: Synthetic oligonucleotide
  Target: ATXN2; (+) strand; PAM type: NRG; PAM sequence: GAG
caccccgtctgggaagtgag

SEQ ID NO: 43021 - DNA, 20 bp, Artificial Sequence
  Description of Artificial Sequence: Synthetic oligonucleotide
  Target: ATXN2; (+) strand; PAM type: NRG; PAM sequence: CGG
aagtgaggagcatctccacc

SEQ ID NO: 43022 - DNA, 20 bp, Artificial Sequence
  Description of Artificial Sequence: Synthetic oligonucleotide
  Target: ATXN2; (+) strand; PAM type: NRG; PAM sequence: CAG
tgaggagcatctccacccgg

SEQ ID NO: 43023 - DNA, 20 bp, Artificial Sequence
  Description of Artificial Sequence: Synthetic oligonucleotide
  Target: ATXN2; (+) strand; PAM type: NRG; PAM sequence: CGG
cacccggcagccaacccgtc

SEQ ID NO: 43024 - DNA, 20 bp, Artificial Sequence
  Description of Artificial Sequence: Synthetic oligonucleotide
  Target: ATXN2; (+) strand; PAM type: NRG; PAM sequence: GGG
acccggcagccaacccgtcc

SEQ ID NO: 43025 - DNA, 20 bp, Artificial Sequence
  Description of Artificial Sequence: Synthetic oligonucleotide
  Target: ATXN2; (+) strand; PAM type: NRG; PAM sequence: GAG
ccggcagccaacccgtccgg

SEQ ID NO: 43026 - DNA, 20 bp, Artificial Sequence
  Description of Artificial Sequence: Synthetic oligonucleotide
  Target: ATXN2; (+) strand; PAM type: NRG; PAM sequence: AGG
cggcagccaacccgtccggg

SEQ ID NO: 43027 - DNA, 20 bp, Artificial Sequence
  Description of Artificial Sequence: Synthetic oligonucleotide
  Target: ATXN2; (+) strand; PAM type: NRG; PAM sequence: GGG
ggcagccaacccgtccggga

SEQ ID NO: 43028 - DNA, 20 bp, Artificial Sequence
  Description of Artificial Sequence: Synthetic oligonucleotide
  Target: ATXN2; (+) strand; PAM type: NRG; PAM sequence: GAG
cagccaacccgtccgggagg

SEQ ID NO: 43029 - DNA, 20 bp, Artificial Sequence
  Description of Artificial Sequence: Synthetic oligonucleotide
  Target: ATXN2; (+) strand; PAM type: NRG; PAM sequence: AGG
agccaacccgtccgggaggg

SEQ ID NO: 43030 - DNA, 20 bp, Artificial Sequence
  Description of Artificial Sequence: Synthetic oligonucleotide
  Target: ATXN2; (+) strand; PAM type: NRG; PAM sequence: TGG
caacccgtccgggagggagg

SEQ ID NO: 43031 - DNA, 20 bp, Artificial Sequence
  Description of Artificial Sequence: Synthetic oligonucleotide
  Target: ATXN2; (+) strand; PAM type: NRG; PAM sequence: GGG
aacccgtccgggagggaggt

SEQ ID NO: 43032 - DNA, 20 bp, Artificial Sequence
  Description of Artificial Sequence: Synthetic oligonucleotide
  Target: ATXN2; (+) strand; PAM type: NRG; PAM sequence: GGG
acccgtccgggagggaggtg

SEQ ID NO: 43033 - DNA, 20 bp, Artificial Sequence
  Description of Artificial Sequence: Synthetic oligonucleotide
  Target: ATXN2; (+) strand; PAM type: NRG; PAM sequence: GGG
cccgtccgggagggaggtgg

SEQ ID NO: 43034 - DNA, 20 bp, Artificial Sequence
  Description of Artificial Sequence: Synthetic oligonucleotide
  Target: ATXN2; (+) strand; PAM type: NRG; PAM sequence: CAG
tccgggagggaggtgggggt

SEQ ID NO: 43035 - DNA, 20 bp, Artificial Sequence
  Description of Artificial Sequence: Synthetic oligonucleotide
  Target: ATXN2; (+) strand; PAM type: NRG; PAM sequence: CGG
ggtgggggtcagcccccgcc

SEQ ID NO: 43036 - DNA, 20 bp, Artificial Sequence
  Description of Artificial Sequence: Synthetic oligonucleotide
  Target: ATXN2; (+) strand; PAM type: NRG; PAM sequence: CAG
ggggtcagcccccgcccggc

SEQ ID NO: 43037 - DNA, 20 bp, Artificial Sequence
  Description of Artificial Sequence: Synthetic oligonucleotide
  Target: ATXN2; (+) strand; PAM type: NRG; PAM sequence: CGG
gcccggccagccgccccatc

SEQ ID NO: 43038 - DNA, 20 bp, Artificial Sequence
  Description of Artificial Sequence: Synthetic oligonucleotide
  Target: ATXN2; (+) strand; PAM type: NRG; PAM sequence: GGG
cccggccagccgccccatcc

SEQ ID NO: 43039 - DNA, 20 bp, Artificial Sequence
  Description of Artificial Sequence: Synthetic oligonucleotide
  Target: ATXN2; (+) strand; PAM type: NRG; PAM sequence: GAG
cggccagccgccccatccgg

SEQ ID NO: 43040 - DNA, 20 bp, Artificial Sequence
  Description of Artificial Sequence: Synthetic oligonucleotide
  Target: ATXN2; (+) strand; PAM type: NRG; PAM sequence: AGG
ggccagccgccccatccggg

SEQ ID NO: 43041 - DNA, 20 bp, Artificial Sequence
  Description of Artificial Sequence: Synthetic oligonucleotide
  Target: ATXN2; (+) strand; PAM type: NRG; PAM sequence: GGG
gccagccgccccatccggga

SEQ ID NO: 43042 - DNA, 20 bp, Artificial Sequence
  Description of Artificial Sequence: Synthetic oligonucleotide
  Target: ATXN2; (+) strand; PAM type: NRG; PAM sequence: GAG
cagccgccccatccgggagg

SEQ ID NO: 43043 - DNA, 20 bp, Artificial Sequence
  Description of Artificial Sequence: Synthetic oligonucleotide
  Target: ATXN2; (+) strand; PAM type: NRG; PAM sequence: AGG
agccgccccatccgggaggg

SEQ ID NO: 43044 - DNA, 20 bp, Artificial Sequence
  Description of Artificial Sequence: Synthetic oligonucleotide
  Target: ATXN2; (+) strand; PAM type: NRG; PAM sequence: TGG
cgccccatccgggagggagg

SEQ ID NO: 43045 - DNA, 20 bp, Artificial Sequence
  Description of Artificial Sequence: Synthetic oligonucleotide
  Target: ATXN2; (+) strand; PAM type: NRG; PAM sequence: GGG
gccccatccgggagggaggt

SEQ ID NO: 43046 - DNA, 20 bp, Artificial Sequence
  Description of Artificial Sequence: Synthetic oligonucleotide
  Target: ATXN2; (+) strand; PAM type: NRG; PAM sequence: GGG
ccccatccgggagggaggtg

SEQ ID NO: 43047 - DNA, 20 bp, Artificial Sequence
  Description of Artificial Sequence: Synthetic oligonucleotide
  Target: ATXN2; (+) strand; PAM type: NRG; PAM sequence: GGG
cccatccgggagggaggtgg

SEQ ID NO: 43048 - DNA, 20 bp, Artificial Sequence
  Description of Artificial Sequence: Synthetic oligonucleotide
  Target: ATXN2; (+) strand; PAM type: NRG; PAM sequence: GGG
ccatccgggagggaggtggg

SEQ ID NO: 43049 - DNA, 20 bp, Artificial Sequence
  Description of Artificial Sequence: Synthetic oligonucleotide
  Target: ATXN2; (+) strand; PAM type: NRG; PAM sequence: CAG
ccgggagggaggtggggggt

SEQ ID NO: 43050 - DNA, 20 bp, Artificial Sequence
  Description of Artificial Sequence: Synthetic oligonucleotide
  Target: ATXN2; (+) strand; PAM type: NRG; PAM sequence: CAG
gtggggggtcagcccccgcc

SEQ ID NO: 43051 - DNA, 20 bp, Artificial Sequence
  Description of Artificial Sequence: Synthetic oligonucleotide
  Target: ATXN2; (+) strand; PAM type: NRG; PAM sequence: CAG
ggggtcagcccccgcccagc

SEQ ID NO: 43052 - DNA, 20 bp, Artificial Sequence
  Description of Artificial Sequence: Synthetic oligonucleotide
  Target: ATXN2; (+) strand; PAM type: NRG; PAM sequence: CGG
gcccagccagccgccccgtc

SEQ ID NO: 43053 - DNA, 20 bp, Artificial Sequence
  Description of Artificial Sequence: Synthetic oligonucleotide
  Target: ATXN2; (+) strand; PAM type: NRG; PAM sequence: GGG
cccagccagccgccccgtcc

SEQ ID NO: 43054 - DNA, 20 bp, Artificial Sequence
  Description of Artificial Sequence: Synthetic oligonucleotide
  Target: ATXN2; (+) strand; PAM type: NRG; PAM sequence: GAG
cagccagccgccccgtccgg

SEQ ID NO: 43055 - DNA, 20 bp, Artificial Sequence
  Description of Artificial Sequence: Synthetic oligonucleotide
  Target: ATXN2; (+) strand; PAM type: NRG; PAM sequence: AGG
agccagccgccccgtccggg

SEQ ID NO: 43056 - DNA, 20 bp, Artificial Sequence
  Description of Artificial Sequence: Synthetic oligonucleotide
  Target: ATXN2; (+) strand; PAM type: NRG; PAM sequence: TGG
cagccgccccgtccgggagg

SEQ ID NO: 43057 - DNA, 20 bp, Artificial Sequence
  Description of Artificial Sequence: Synthetic oligonucleotide
  Target: ATXN2; (+) strand; PAM type: NRG; PAM sequence: GGG
agccgccccgtccgggaggt

SEQ ID NO: 43058 - DNA, 20 bp, Artificial Sequence
  Description of Artificial Sequence: Synthetic oligonucleotide
  Target: ATXN2; (+) strand; PAM type: NRG; PAM sequence: GGG
gccgccccgtccgggaggtg

SEQ ID NO: 43059 - DNA, 20 bp, Artificial Sequence
  Description of Artificial Sequence: Synthetic oligonucleotide
  Target: ATXN2; (+) strand; PAM type: NRG; PAM sequence: GGG
ccgccccgtccgggaggtgg

SEQ ID NO: 43060 - DNA, 20 bp, Artificial Sequence
  Description of Artificial Sequence: Synthetic oligonucleotide
  Target: ATXN2; (+) strand; PAM type: NRG; PAM sequence: GGG
cgccccgtccgggaggtggg

SEQ ID NO: 43061 - DNA, 20 bp, Artificial Sequence
  Description of Artificial Sequence: Synthetic oligonucleotide
  Target: ATXN2; (+) strand; PAM type: NRG; PAM sequence: CGG
aggtggggggcacctctgcc

SEQ ID NO: 43062 - DNA, 20 bp, Artificial Sequence
  Description of Artificial Sequence: Synthetic oligonucleotide
  Target: ATXN2; (+) strand; PAM type: NRG; PAM sequence: TGG
ctctgcccggccgccccttc

SEQ ID NO: 43063 - DNA, 20 bp, Artificial Sequence
  Description of Artificial Sequence: Synthetic oligonucleotide
  Target: ATXN2; (+) strand; PAM type: NRG; PAM sequence: GGG
tctgcccggccgccccttct

SEQ ID NO: 43064 - DNA, 20 bp, Artificial Sequence
  Description of Artificial Sequence: Synthetic oligonucleotide
  Target: ATXN2; (+) strand; PAM type: NRG; PAM sequence: AAG
gcccggccgccccttctggg

SEQ ID NO: 43065 - DNA, 20 bp, Artificial Sequence
  Description of Artificial Sequence: Synthetic oligonucleotide
  Target: ATXN2; (+) strand; PAM type: NRG; PAM sequence: GAG
ggccgccccttctgggaagt

SEQ ID NO: 43066 - DNA, 20 bp, Artificial Sequence
  Description of Artificial Sequence: Synthetic oligonucleotide
  Target: ATXN2; (+) strand; PAM type: NRG; PAM sequence: AGG
gccgccccttctgggaagtg

SEQ ID NO: 43067 - DNA, 20 bp, Artificial Sequence
  Description of Artificial Sequence: Synthetic oligonucleotide
  Target: ATXN2; (+) strand; PAM type: NRG; PAM sequence: GAG
cgccccttctgggaagtgag

SEQ ID NO: 43068 - DNA, 20 bp, Artificial Sequence
  Description of Artificial Sequence: Synthetic oligonucleotide
  Target: ATXN2; (+) strand; PAM type: NRG; PAM sequence: CGG
aagtgaggagcccctctgcc

SEQ ID NO: 43069 - DNA, 20 bp, Artificial Sequence
  Description of Artificial Sequence: Synthetic oligonucleotide
  Target: ATXN2; (+) strand; PAM type: NRG; PAM sequence: TGG
tgcccggccaccaccccgtc

SEQ ID NO: 43070 - DNA, 20 bp, Artificial Sequence
  Description of Artificial Sequence: Synthetic oligonucleotide
  Target: ATXN2; (+) strand; PAM type: NRG; PAM sequence: GGG
gcccggccaccaccccgtct

SEQ ID NO: 43071 - DNA, 20 bp, Artificial Sequence
  Description of Artificial Sequence: Synthetic oligonucleotide
  Target: ATXN2; (+) strand; PAM type: NRG; PAM sequence: GAG
ccggccaccaccccgtctgg

SEQ ID NO: 43072 - DNA, 20 bp, Artificial Sequence
  Description of Artificial Sequence: Synthetic oligonucleotide
  Target: ATXN2; (+) strand; PAM type: NRG; PAM sequence: AGG
cggccaccaccccgtctggg

SEQ ID NO: 43073 - DNA, 20 bp, Artificial Sequence
  Description of Artificial Sequence: Synthetic oligonucleotide
  Target: ATXN2; (+) strand; PAM type: NRG; PAM sequence: CAG
cgtctgggaggtgtacccaa

SEQ ID NO: 43074 - DNA, 20 bp, Artificial Sequence
  Description of Artificial Sequence: Synthetic oligonucleotide
  Target: ATXN2; (+) strand; PAM type: NRG; PAM sequence: GAG
ggtgtacccaacagcttatt

SEQ ID NO: 43075 - DNA, 20 bp, Artificial Sequence
  Description of Artificial Sequence: Synthetic oligonucleotide
  Target: ATXN2; (+) strand; PAM type: NRG; PAM sequence: CGG
acccaacagcttattgagaa

SEQ ID NO: 43076 - DNA, 20 bp, Artificial Sequence
  Description of Artificial Sequence: Synthetic oligonucleotide
  Target: ATXN2; (+) strand; PAM type: NRG; PAM sequence: GGG
cccaacagcttattgagaac

SEQ ID NO: 43077 - DNA, 20 bp, Artificial Sequence
  Description of Artificial Sequence: Synthetic oligonucleotide
  Target: ATXN2; (+) strand; PAM type: NRG; PAM sequence: TGG
agaacgggccatgatgacaa

SEQ ID NO: 43078 - DNA, 20 bp, Artificial Sequence
  Description of Artificial Sequence: Synthetic oligonucleotide
  Target: ATXN2; (+) strand; PAM type: NRG; PAM sequence: CGG
acgggccatgatgacaatgg

SEQ ID NO: 43079 - DNA, 20 bp, Artificial Sequence
  Description of Artificial Sequence: Synthetic oligonucleotide
  Target: ATXN2; (+) strand; PAM type: NRG; PAM sequence: TGG
tgatgacaatggcggctttg

SEQ ID NO: 43080 - DNA, 20 bp, Artificial Sequence
  Description of Artificial Sequence: Synthetic oligonucleotide
  Target: ATXN2; (+) strand; PAM type: NRG; PAM sequence: TAG
acaatggcggctttgtggaa

SEQ ID NO: 43081 - DNA, 20 bp, Artificial Sequence
  Description of Artificial Sequence: Synthetic oligonucleotide
  Target: ATXN2; (+) strand; PAM type: NRG; PAM sequence: AAG
ggcggctttgtggaatagaa

SEQ ID NO: 43082 - DNA, 20 bp, Artificial Sequence
  Description of Artificial Sequence: Synthetic oligonucleotide
  Target: ATXN2; (+) strand; PAM type: NRG; PAM sequence: AGG
gcggctttgtggaatagaaa

SEQ ID NO: 43083 - DNA, 20 bp, Artificial Sequence
  Description of Artificial Sequence: Synthetic oligonucleotide
  Target: ATXN2; (+) strand; PAM type: NRG; PAM sequence: GGG
cggctttgtggaatagaaaa

SEQ ID NO: 43084 - DNA, 20 bp, Artificial Sequence
  Description of Artificial Sequence: Synthetic oligonucleotide
  Target: ATXN2; (+) strand; PAM type: NRG; PAM sequence: GGG
ggctttgtggaatagaaaag

SEQ ID NO: 43085 - DNA, 20 bp, Artificial Sequence
  Description of Artificial Sequence: Synthetic oligonucleotide
  Target: ATXN2; (+) strand; PAM type: NRG; PAM sequence: GGG
gctttgtggaatagaaaagg

SEQ ID NO: 43086 - DNA, 20 bp, Artificial Sequence
  Description of Artificial Sequence: Synthetic oligonucleotide
  Target: ATXN2; (+) strand; PAM type: NRG; PAM sequence: AAG
tgtggaatagaaaaggggga

SEQ ID NO: 43087 - DNA, 20 bp, Artificial Sequence
  Description of Artificial Sequence: Synthetic oligonucleotide
  Target: ATXN2; (+) strand; PAM type: NRG; PAM sequence: AGG
gtggaatagaaaagggggaa

SEQ ID NO: 43088 - DNA, 20 bp, Artificial Sequence
  Description of Artificial Sequence: Synthetic oligonucleotide
  Target: ATXN2; (+) strand; PAM type: NRG; PAM sequence: TGG
gaatagaaaagggggaaagg

SEQ ID NO: 43089 - DNA, 20 bp, Artificial Sequence
  Description of Artificial Sequence: Synthetic oligonucleotide
  Target: ATXN2; (+) strand; PAM type: NRG; PAM sequence: GGG
aatagaaaagggggaaaggt

SEQ ID NO: 43090 - DNA, 20 bp, Artificial Sequence
  Description of Artificial Sequence: Synthetic oligonucleotide
  Target: ATXN2; (+) strand; PAM type: NRG; PAM sequence: GGG
atagaaaagggggaaaggtg

SEQ ID NO: 43091 - DNA, 20 bp, Artificial Sequence
  Description of Artificial Sequence: Synthetic oligonucleotide
  Target: ATXN2; (+) strand; PAM type: NRG; PAM sequence: AAG
aaagggggaaaggtggggaa

SEQ ID NO: 43092 - DNA, 20 bp, Artificial Sequence
  Description of Artificial Sequence: Synthetic oligonucleotide
  Target: ATXN2; (+) strand; PAM type: NRG; PAM sequence: GAG
ggaaaggtggggaaaagatt

SEQ ID NO: 43093 - DNA, 20 bp, Artificial Sequence
  Description of Artificial Sequence: Synthetic oligonucleotide
  Target: ATXN2; (+) strand; PAM type: NRG; PAM sequence: CGG
tggggaaaagattgagaaat

SEQ ID NO: 43094 - DNA, 20 bp, Artificial Sequence
  Description of Artificial Sequence: Synthetic oligonucleotide
  Target: ATXN2; (+) strand; PAM type: NRG; PAM sequence: TGG
gaaaagattgagaaatcgga

SEQ ID NO: 43095 - DNA, 20 bp, Artificial Sequence
  Description of Artificial Sequence: Synthetic oligonucleotide
  Target: ATXN2; (+) strand; PAM type: NRG; PAM sequence: TGG
tcggatggttgctgcgtctg

SEQ ID NO: 43096 - DNA, 20 bp, Artificial Sequence
  Description of Artificial Sequence: Synthetic oligonucleotide
  Target: ATXN2; (+) strand; PAM type: NRG; PAM sequence: GAG
ggatggttgctgcgtctgtg

SEQ ID NO: 43097 - DNA, 20 bp, Artificial Sequence
  Description of Artificial Sequence: Synthetic oligonucleotide
  Target: ATXN2; (+) strand; PAM type: NRG; PAM sequence: AAG
ggttgctgcgtctgtggaga

SEQ ID NO: 43098 - DNA, 20 bp, Artificial Sequence
  Description of Artificial Sequence: Synthetic oligonucleotide
  Target: ATXN2; (+) strand; PAM type: NRG; PAM sequence: AAG
tgctgcgtctgtggagaaag

SEQ ID NO: 43099 - DNA, 20 bp, Artificial Sequence
  Description of Artificial Sequence: Synthetic oligonucleotide
  Target: ATXN2; (+) strand; PAM type: NRG; PAM sequence: TAG
tgcgtctgtggagaaagaag

SEQ ID NO: 43100 - DNA, 20 bp, Artificial Sequence
  Description of Artificial Sequence: Synthetic oligonucleotide
  Target: ATXN2; (+) strand; PAM type: NRG; PAM sequence: TGG
tgtggagaaagaagtagaca

SEQ ID NO: 43101 - DNA, 20 bp, Artificial Sequence
  Description of Artificial Sequence: Synthetic oligonucleotide
  Target: ATXN2; (+) strand; PAM type: NRG; PAM sequence: TAG
ggagaaagaagtagacatgg

SEQ ID NO: 43102 - DNA, 20 bp, Artificial Sequence
  Description of Artificial Sequence: Synthetic oligonucleotide
  Target: ATXN2; (+) strand; PAM type: NRG; PAM sequence: AAG
ttttcattttgttctgtact

SEQ ID NO: 43103 - DNA, 20 bp, Artificial Sequence
  Description of Artificial Sequence: Synthetic oligonucleotide
  Target: ATXN2; (+) strand; PAM type: NRG; PAM sequence: AAG
cattttgttctgtactaaga

SEQ ID NO: 43104 - DNA, 20 bp, Artificial Sequence
  Description of Artificial Sequence: Synthetic oligonucleotide
  Target: ATXN2; (+) strand; PAM type: NRG; PAM sequence: TGG
taagaaagattcttctgcct

SEQ ID NO: 43105 - DNA, 20 bp, Artificial Sequence
  Description of Artificial Sequence: Synthetic oligonucleotide
  Target: ATXN2; (+) strand; PAM type: NRG; PAM sequence: GGG
aagaaagattcttctgcctt

SEQ ID NO: 43106 - DNA, 20 bp, Artificial Sequence
  Description of Artificial Sequence: Synthetic oligonucleotide
  Target: ATXN2; (+) strand; PAM type: NRG; PAM sequence: CAG
gaaacatgtgctgtgtcact

SEQ ID NO: 43107 - DNA, 20 bp, Artificial Sequence
  Description of Artificial Sequence: Synthetic oligonucleotide
  Target: ATXN2; (+) strand; PAM type: NRG; PAM sequence: AGG
aaacatgtgctgtgtcactc

SEQ ID NO: 43108 - DNA, 20 bp, Artificial Sequence
  Description of Artificial Sequence: Synthetic oligonucleotide
  Target: ATXN2; (+) strand; PAM type: NRG; PAM sequence: GGG
aacatgtgctgtgtcactca

SEQ ID NO: 43109 - DNA, 20 bp, Artificial Sequence
  Description of Artificial Sequence: Synthetic oligonucleotide
  Target: ATXN2; (+) strand; PAM type: NRG; PAM sequence: TGG
ctgtgtcactcagggttaaa

SEQ ID NO: 43110 - DNA, 20 bp, Artificial Sequence
  Description of Artificial Sequence: Synthetic oligonucleotide
  Target: ATXN2; (+) strand; PAM type: NRG; PAM sequence: AAG
cactcagggttaaatggatt

SEQ ID NO: 43111 - DNA, 20 bp, Artificial Sequence
  Description of Artificial Sequence: Synthetic oligonucleotide
  Target: ATXN2; (+) strand; PAM type: NRG; PAM sequence: AGG
actcagggttaaatggatta

SEQ ID NO: 43112 - DNA, 20 bp, Artificial Sequence
  Description of Artificial Sequence: Synthetic oligonucleotide
  Target: ATXN2; (+) strand; PAM type: NRG; PAM sequence: GGG
ctcagggttaaatggattaa

SEQ ID NO: 43113 - DNA, 20 bp, Artificial Sequence
  Description of Artificial Sequence: Synthetic oligonucleotide
  Target: ATXN2; (+) strand; PAM type: NRG; PAM sequence: CGG
agggttaaatggattaaggg

SEQ ID NO: 43114 - DNA, 20 bp, Artificial Sequence
  Description of Artificial Sequence: Synthetic oligonucleotide
  Target: ATXN2; (+) strand; PAM type: NRG; PAM sequence: AAG
aaatggattaagggcggtgc

SEQ ID NO: 43115 - DNA, 20 bp, Artificial Sequence
  Description of Artificial Sequence: Synthetic oligonucleotide
  Target: ATXN2; (+) strand; PAM type: NRG; PAM sequence: CAG
gcaagatgtgctttgttaaa

SEQ ID NO: 43116 - DNA, 20 bp, Artificial Sequence
  Description of Artificial Sequence: Synthetic oligonucleotide
  Target: ATXN2; (+) strand; PAM type: NRG; PAM sequence: AAG
ctttgttaaacagatgcttg

SEQ ID NO: 43117 - DNA, 20 bp, Artificial Sequence
  Description of Artificial Sequence: Synthetic oligonucleotide
  Target: ATXN2; (+) strand; PAM type: NRG; PAM sequence: AGG
tttgttaaacagatgcttga

SEQ ID NO: 43118 - DNA, 20 bp, Artificial Sequence
  Description of Artificial Sequence: Synthetic oligonucleotide
  Target: ATXN2; (+) strand; PAM type: NRG; PAM sequence: CAG
gttaaacagatgcttgaagg

SEQ ID NO: 43119 - DNA, 20 bp, Artificial Sequence
  Description of Artificial Sequence: Synthetic oligonucleotide
  Target: ATXN2; (+) strand; PAM type: NRG; PAM sequence: AAG
ttgaaggcagcatgctcgtt

SEQ ID NO: 43120 - DNA, 20 bp, Artificial Sequence
  Description of Artificial Sequence: Synthetic oligonucleotide
  Target: ATXN2; (+) strand; PAM type: NRG; PAM sequence: GAG
gaaggcagcatgctcgttaa

SEQ ID NO: 43121 - DNA, 20 bp, Artificial Sequence
  Description of Artificial Sequence: Synthetic oligonucleotide
  Target: ATXN2; (+) strand; PAM type: NRG; PAM sequence: AAG
catcaccactccctaatctc

SEQ ID NO: 43122 - DNA, 20 bp, Artificial Sequence
  Description of Artificial Sequence: Synthetic oligonucleotide
  Target: ATXN2; (+) strand; PAM type: NRG; PAM sequence: CAG
actccctaatctcaagtacc

SEQ ID NO: 43123 - DNA, 20 bp, Artificial Sequence
  Description of Artificial Sequence: Synthetic oligonucleotide
  Target: ATXN2; (+) strand; PAM type: NRG; PAM sequence: AGG
ctccctaatctcaagtaccc

SEQ ID NO: 43124 - DNA, 20 bp, Artificial Sequence
  Description of Artificial Sequence: Synthetic oligonucleotide
  Target: ATXN2; (+) strand; PAM type: NRG; PAM sequence: GGG
tccctaatctcaagtaccca

SEQ ID NO: 43125 - DNA, 20 bp, Artificial Sequence
  Description of Artificial Sequence: Synthetic oligonucleotide
  Target: ATXN2; (+) strand; PAM type: NRG; PAM sequence: CGG
acccagggacacaaacactg

SEQ ID NO: 43126 - DNA, 20 bp, Artificial Sequence
  Description of Artificial Sequence: Synthetic oligonucleotide
  Target: ATXN2; (+) strand; PAM type: NRG; PAM sequence: AAG
cagggacacaaacactgcgg

SEQ ID NO: 43127 - DNA, 20 bp, Artificial Sequence
  Description of Artificial Sequence: Synthetic oligonucleotide
  Target: ATXN2; (+) strand; PAM type: NRG; PAM sequence: AGG
agggacacaaacactgcgga

SEQ ID NO: 43128 - DNA, 20 bp, Artificial Sequence
  Description of Artificial Sequence: Synthetic oligonucleotide
  Target: ATXN2; (+) strand; PAM type: NRG; PAM sequence: CAG
acaaacactgcggaaggccg

SEQ ID NO: 43129 - DNA, 20 bp, Artificial Sequence
  Description of Artificial Sequence: Synthetic oligonucleotide
  Target: ATXN2; (+) strand; PAM type: NRG; PAM sequence: AGG
caaacactgcggaaggccgc

SEQ ID NO: 43130 - DNA, 20 bp, Artificial Sequence
  Description of Artificial Sequence: Synthetic oligonucleotide
  Target: ATXN2; (+) strand; PAM type: NRG; PAM sequence: GGG
aaacactgcggaaggccgca

SEQ ID NO: 43131 - DNA, 20 bp, Artificial Sequence
  Description of Artificial Sequence: Synthetic oligonucleotide
  Target: ATXN2; (+) strand; PAM type: NRG; PAM sequence: TAG
aggccgcagggtcctctgcc

SEQ ID NO: 43132 - DNA, 20 bp, Artificial Sequence
  Description of Artificial Sequence: Synthetic oligonucleotide
  Target: ATXN2; (+) strand; PAM type: NRG; PAM sequence: AGG
ggccgcagggtcctctgcct

SEQ ID NO: 43133 - DNA, 20 bp, Artificial Sequence
  Description of Artificial Sequence: Synthetic oligonucleotide
  Target: ATXN2; (+) strand; PAM type: NRG; PAM sequence: CAG
ggtcctctgcctaggaaaac

SEQ ID NO: 43134 - DNA, 20 bp, Artificial Sequence
  Description of Artificial Sequence: Synthetic oligonucleotide
  Target: ATXN2; (+) strand; PAM type: NRG; PAM sequence: GAG
tcctctgcctaggaaaacca

SEQ ID NO: 43135 - DNA, 20 bp, Artificial Sequence
  Description of Artificial Sequence: Synthetic oligonucleotide
  Target: ATXN2; (+) strand; PAM type: NRG; PAM sequence: GAG
cctgccaaatccccctctgc

SEQ ID NO: 43136 - DNA, 20 bp, Artificial Sequence
  Description of Artificial Sequence: Synthetic oligonucleotide
  Target: ATXN2; (+) strand; PAM type: NRG; PAM sequence: AAG
cccctctgcgagaaacaccc

SEQ ID NO: 43137 - DNA, 20 bp, Artificial Sequence
  Description of Artificial Sequence: Synthetic oligonucleotide
  Target: ATXN2; (+) strand; PAM type: NRG; PAM sequence: AAG
gatcaattaaaaaaaaaaaa

SEQ ID NO: 43138 - DNA, 20 bp, Artificial Sequence
  Description of Artificial Sequence: Synthetic oligonucleotide
  Target: ATXN2; (+) strand; PAM type: NRG; PAM sequence: TAG
aaaaaaaaaaaaagacttta

SEQ ID NO: 43139 - DNA, 20 bp, Artificial Sequence
  Description of Artificial Sequence: Synthetic oligonucleotide
  Target: ATXN2; (+) strand; PAM type: NRG; PAM sequence: AAG
aaagactttatagcaaattt

SEQ ID NO: 43140 - DNA, 20 bp, Artificial Sequence
  Description of Artificial Sequence: Synthetic oligonucleotide
  Target: ATXN2; (+) strand; PAM type: NRG; PAM sequence: CAG
aaaatatcatctattgctca

SEQ ID NO: 43141 - DNA, 20 bp, Artificial Sequence
  Description of Artificial Sequence: Synthetic oligonucleotide
  Target: ATXN2; (+) strand; PAM type: NRG; PAM sequence: CAG
ctcacagatatattcatatg

SEQ ID NO: 43142 - DNA, 20 bp, Artificial Sequence
  Description of Artificial Sequence: Synthetic oligonucleotide
  Target: ATXN2; (+) strand; PAM type: NRG; PAM sequence: AAG
tcatatgcagtataaatata

SEQ ID NO: 43143 - DNA, 20 bp, Artificial Sequence
  Description of Artificial Sequence: Synthetic oligonucleotide
  Target: ATXN2; (+) strand; PAM type: NRG; PAM sequence: CAG
tataaatataaagaactgca

SEQ ID NO: 43144 - DNA, 20 bp, Artificial Sequence
  Description of Artificial Sequence: Synthetic oligonucleotide
  Target: ATXN2; (+) strand; PAM type: NRG; PAM sequence: AAG
atataaagaactgcacagaa

SEQ ID NO: 43145 - DNA, 20 bp, Artificial Sequence
  Description of Artificial Sequence: Synthetic oligonucleotide
  Target: ATXN2; (+) strand; PAM type: NRG; PAM sequence: TGG
agaaaagaaacccttccttt

SEQ ID NO: 43146 - DNA, 20 bp, Artificial Sequence
  Description of Artificial Sequence: Synthetic oligonucleotide
  Target: ATXN2; (+) strand; PAM type: NRG; PAM sequence: AAG
aaagaaacccttccttttgg

SEQ ID NO: 43147 - DNA, 20 bp, Artificial Sequence
  Description of Artificial Sequence: Synthetic oligonucleotide
  Target: ATXN2; (+) strand; PAM type: NRG; PAM sequence: AGG
aagaaacccttccttttgga

SEQ ID NO: 43148 - DNA, 20 bp, Artificial Sequence
  Description of Artificial Sequence: Synthetic oligonucleotide
  Target: ATXN2; (+) strand; PAM type: NRG; PAM sequence: CAG
cccttccttttggaaggaaa

SEQ ID NO: 43149 - DNA, 20 bp, Artificial Sequence
  Description of Artificial Sequence: Synthetic oligonucleotide
  Target: ATXN2; (+) strand; PAM type: NRG; PAM sequence: AGG
ccttccttttggaaggaaac

SEQ ID NO: 43150 - DNA, 20 bp, Artificial Sequence
  Description of Artificial Sequence: Synthetic oligonucleotide
  Target: ATXN2; (+) strand; PAM type: NRG; PAM sequence: GGG
cttccttttggaaggaaaca

SEQ ID NO: 43151 - DNA, 20 bp, Artificial Sequence
  Description of Artificial Sequence: Synthetic oligonucleotide
  Target: ATXN2; (+) strand; PAM type: NRG; PAM sequence: GGG
ttccttttggaaggaaacag

SEQ ID NO: 43152 - DNA, 20 bp, Artificial Sequence
  Description of Artificial Sequence: Synthetic oligonucleotide
  Target: ATXN2; (+) strand; PAM type: NRG; PAM sequence: GGG
tccttttggaaggaaacagg

SEQ ID NO: 43153 - DNA, 20 bp, Artificial Sequence
  Description of Artificial Sequence: Synthetic oligonucleotide
  Target: ATXN2; (+) strand; PAM type: NRG; PAM sequence: AAG
ttttggaaggaaacaggggg

SEQ ID NO: 43154 - DNA, 20 bp, Artificial Sequence
  Description of Artificial Sequence: Synthetic oligonucleotide
  Target: ATXN2; (+) strand; PAM type: NRG; PAM sequence: CAG
tggaaggaaacagggggaag

SEQ ID NO: 43155 - DNA, 20 bp, Artificial Sequence
  Description of Artificial Sequence: Synthetic oligonucleotide
  Target: ATXN2; (+) strand; PAM type: NRG; PAM sequence: GAG
ggaaacagggggaagcagct

SEQ ID NO: 43156 - DNA, 20 bp, Artificial Sequence
  Description of Artificial Sequence: Synthetic oligonucleotide
  Target: ATXN2; (+) strand; PAM type: NRG; PAM sequence: AGG
gaaacagggggaagcagctg

SEQ ID NO: 43157 - DNA, 20 bp, Artificial Sequence
  Description of Artificial Sequence: Synthetic oligonucleotide
  Target: ATXN2; (+) strand; PAM type: NRG; PAM sequence: GAG
aacagggggaagcagctgag

SEQ ID NO: 43158 - DNA, 20 bp, Artificial Sequence
  Description of Artificial Sequence: Synthetic oligonucleotide
  Target: ATXN2; (+) strand; PAM type: NRG; PAM sequence: AGG
acagggggaagcagctgagg

SEQ ID NO: 43159 - DNA, 20 bp, Artificial Sequence
  Description of Artificial Sequence: Synthetic oligonucleotide
  Target: ATXN2; (+) strand; PAM type: NRG; PAM sequence: GGG
cagggggaagcagctgagga

SEQ ID NO: 43160 - DNA, 20 bp, Artificial Sequence
  Description of Artificial Sequence: Synthetic oligonucleotide
  Target: ATXN2; (+) strand; PAM type: NRG; PAM sequence: GGG
agggggaagcagctgaggag

SEQ ID NO: 43161 - DNA, 20 bp, Artificial Sequence
  Description of Artificial Sequence: Synthetic oligonucleotide
  Target: ATXN2; (+) strand; PAM type: NRG; PAM sequence: CAG
gggaagcagctgaggagggg

SEQ ID NO: 43162 - DNA, 20 bp, Artificial Sequence
  Description of Artificial Sequence: Synthetic oligonucleotide
  Target: ATXN2; (+) strand; PAM type: NRG; PAM sequence: AAG
ctgaggaggggcagatacat

SEQ ID NO: 43163 - DNA, 20 bp, Artificial Sequence
  Description of Artificial Sequence: Synthetic oligonucleotide
  Target: ATXN2; (+) strand; PAM type: NRG; PAM sequence: GAG
gaggaggggcagatacataa

SEQ ID NO: 43164 - DNA, 20 bp, Artificial Sequence
  Description of Artificial Sequence: Synthetic oligonucleotide
  Target: ATXN2; (+) strand; PAM type: NRG; PAM sequence: AGG
aggaggggcagatacataag

SEQ ID NO: 43165 - DNA, 20 bp, Artificial Sequence
  Description of Artificial Sequence: Synthetic oligonucleotide
  Target: ATXN2; (+) strand; PAM type: NRG; PAM sequence: GAG
gaggggcagatacataagag

SEQ ID NO: 43166 - DNA, 20 bp, Artificial Sequence
  Description of Artificial Sequence: Synthetic oligonucleotide
  Target: ATXN2; (+) strand; PAM type: NRG; PAM sequence: TAG
taagaggagtttaactgtgt

SEQ ID NO: 43167 - DNA, 20 bp, Artificial Sequence
  Description of Artificial Sequence: Synthetic oligonucleotide
  Target: ATXN2; (+) strand; PAM type: NRG; PAM sequence: AAG
gttagaatgctttatttact

SEQ ID NO: 43168 - DNA, 20 bp, Artificial Sequence
  Description of Artificial Sequence: Synthetic oligonucleotide
  Target: ATXN2; (+) strand; PAM type: NRG; PAM sequence: TGG
gaatgctttatttactaagc

SEQ ID NO: 43169 - DNA, 20 bp, Artificial Sequence
  Description of Artificial Sequence: Synthetic oligonucleotide
  Target: ATXN2; (+) strand; PAM type: NRG; PAM sequence: GGG
aatgctttatttactaagct

SEQ ID NO: 43170 - DNA, 20 bp, Artificial Sequence
  Description of Artificial Sequence: Synthetic oligonucleotide
  Target: ATXN2; (+) strand; PAM type: NRG; PAM sequence: TAG
gctttatttactaagctggg

SEQ ID NO: 43171 - DNA, 20 bp, Artificial Sequence
  Description of Artificial Sequence: Synthetic oligonucleotide
  Target: ATXN2; (+) strand; PAM type: NRG; PAM sequence: TGG
ttatttactaagctgggtag

SEQ ID NO: 43172 - DNA, 20 bp, Artificial Sequence
  Description of Artificial Sequence: Synthetic oligonucleotide
  Target: ATXN2; (+) strand; PAM type: NRG; PAM sequence: GGG
tatttactaagctgggtagt

SEQ ID NO: 43173 - DNA, 20 bp, Artificial Sequence
  Description of Artificial Sequence: Synthetic oligonucleotide
  Target: ATXN2; (+) strand; PAM type: NRG; PAM sequence: GAG
tttttttttttttttttttt

SEQ ID NO: 43174 - DNA, 20 bp, Artificial Sequence
  Description of Artificial Sequence: Synthetic oligonucleotide
  Target: ATXN2; (+) strand; PAM type: NRG; PAM sequence: CAG
ttttttttttttttgagatg

SEQ ID NO: 43175 - DNA, 20 bp, Artificial Sequence
  Description of Artificial Sequence: Synthetic oligonucleotide
  Target: ATXN2; (+) strand; PAM type: NRG; PAM sequence: CAG
tgcagtcttgctctgtcgcc

SEQ ID NO: 43176 - DNA, 20 bp, Artificial Sequence
  Description of Artificial Sequence: Synthetic oligonucleotide
  Target: ATXN2; (+) strand; PAM type: NRG; PAM sequence: AGG
gcagtcttgctctgtcgccc

SEQ ID NO: 43177 - DNA, 20 bp, Artificial Sequence
  Description of Artificial Sequence: Synthetic oligonucleotide
  Target: ATXN2; (+) strand; PAM type: NRG; PAM sequence: TGG
tcttgctctgtcgcccagga

SEQ ID NO: 43178 - DNA, 20 bp, Artificial Sequence
  Description of Artificial Sequence: Synthetic oligonucleotide
  Target: ATXN2; (+) strand; PAM type: NRG; PAM sequence: GAG
ttgctctgtcgcccaggatg

SEQ ID NO: 43179 - DNA, 20 bp, Artificial Sequence
  Description of Artificial Sequence: Synthetic oligonucleotide
  Target: ATXN2; (+) strand; PAM type: NRG; PAM sequence: TGG
ctctgtcgcccaggatggag

SEQ ID NO: 43180 - DNA, 20 bp, Artificial Sequence
  Description of Artificial Sequence: Synthetic oligonucleotide
  Target: ATXN2; (+) strand; PAM type: NRG; PAM sequence: GAG
ctgtcgcccaggatggagtg

SEQ ID NO: 43181 - DNA, 20 bp, Artificial Sequence
  Description of Artificial Sequence: Synthetic oligonucleotide
  Target: ATXN2; (+) strand; PAM type: NRG; PAM sequence: TGG
tcgcccaggatggagtggag

SEQ ID NO: 43182 - DNA, 20 bp, Artificial Sequence
  Description of Artificial Sequence: Synthetic oligonucleotide
  Target: ATXN2; (+) strand; PAM type: NRG; PAM sequence: CGG
ggagtggagtggtgtgatct

SEQ ID NO: 43183 - DNA, 20 bp, Artificial Sequence
  Description of Artificial Sequence: Synthetic oligonucleotide
  Target: ATXN2; (+) strand; PAM type: NRG; PAM sequence: TGG
tcactgcaacctctgtctcc

SEQ ID NO: 43184 - DNA, 20 bp, Artificial Sequence
  Description of Artificial Sequence: Synthetic oligonucleotide
  Target: ATXN2; (+) strand; PAM type: NRG; PAM sequence: GGG
cactgcaacctctgtctcct

SEQ ID NO: 43185 - DNA, 20 bp, Artificial Sequence
  Description of Artificial Sequence: Synthetic oligonucleotide
  Target: ATXN2; (+) strand; PAM type: NRG; PAM sequence: AAG
aacctctgtctcctgggttc

SEQ ID NO: 43186 - DNA, 20 bp, Artificial Sequence
  Description of Artificial Sequence: Synthetic oligonucleotide
  Target: ATXN2; (+) strand; PAM type: NRG; PAM sequence: CAG
ttcaagcgattatcctgcct

SEQ ID NO: 43187 - DNA, 20 bp, Artificial Sequence
  Description of Artificial Sequence: Synthetic oligonucleotide
  Target: ATXN2; (+) strand; PAM type: NRG; PAM sequence: AAG
ttatcctgcctcagcctgcc

SEQ ID NO: 43188 - DNA, 20 bp, Artificial Sequence
  Description of Artificial Sequence: Synthetic oligonucleotide
  Target: ATXN2; (+) strand; PAM type: NRG; PAM sequence: TAG
tcctgcctcagcctgccaag

SEQ ID NO: 43189 - DNA, 20 bp, Artificial Sequence
  Description of Artificial Sequence: Synthetic oligonucleotide
  Target: ATXN2; (+) strand; PAM type: NRG; PAM sequence: TGG
gcctcagcctgccaagtagc

SEQ ID NO: 43190 - DNA, 20 bp, Artificial Sequence
  Description of Artificial Sequence: Synthetic oligonucleotide
  Target: ATXN2; (+) strand; PAM type: NRG; PAM sequence: GGG
cctcagcctgccaagtagct

SEQ ID NO: 43191 - DNA, 20 bp, Artificial Sequence
  Description of Artificial Sequence: Synthetic oligonucleotide
  Target: ATXN2; (+) strand; PAM type: NRG; PAM sequence: AAG
tgccaagtagctgggattac

SEQ ID NO: 43192 - DNA, 20 bp, Artificial Sequence
  Description of Artificial Sequence: Synthetic oligonucleotide
  Target: ATXN2; (+) strand; PAM type: NRG; PAM sequence: TAG
caagtgtgcgccaccatgcc

SEQ ID NO: 43193 - DNA, 20 bp, Artificial Sequence
  Description of Artificial Sequence: Synthetic oligonucleotide
  Target: ATXN2; (+) strand; PAM type: NRG; PAM sequence: TGG
ctagctaatttttctatttt

SEQ ID NO: 43194 - DNA, 20 bp, Artificial Sequence
  Description of Artificial Sequence: Synthetic oligonucleotide
  Target: ATXN2; (+) strand; PAM type: NRG; PAM sequence: AAG
taatttttctatttttggtc

SEQ ID NO: 43195 - DNA, 20 bp, Artificial Sequence
  Description of Artificial Sequence: Synthetic oligonucleotide
  Target: ATXN2; (+) strand; PAM type: NRG; PAM sequence: CAG
ttttctatttttggtcaaga

SEQ ID NO: 43196 - DNA, 20 bp, Artificial Sequence
  Description of Artificial Sequence: Synthetic oligonucleotide
  Target: ATXN2; (+) strand; PAM type: NRG; PAM sequence: AGG
tttctatttttggtcaagac

SEQ ID NO: 43197 - DNA, 20 bp, Artificial Sequence
  Description of Artificial Sequence: Synthetic oligonucleotide
  Target: ATXN2; (+) strand; PAM type: NRG; PAM sequence: GGG
ttctatttttggtcaagaca

SEQ ID NO: 43198 - DNA, 20 bp, Artificial Sequence
  Description of Artificial Sequence: Synthetic oligonucleotide
  Target: ATXN2; (+) strand; PAM type: NRG; PAM sequence: CAG
cagggtttcaccatgttgac

SEQ ID NO: 43199 - DNA, 20 bp, Artificial Sequence
  Description of Artificial Sequence: Synthetic oligonucleotide
  Target: ATXN2; (+) strand; PAM type: NRG; PAM sequence: AGG
agggtttcaccatgttgacc

SEQ ID NO: 43200 - DNA, 20 bp, Artificial Sequence
  Description of Artificial Sequence: Synthetic oligonucleotide
  Target: ATXN2; (+) strand; PAM type: NRG; PAM sequence: TGG
tttcaccatgttgaccaggc

SEQ ID NO: 43201 - DNA, 20 bp, Artificial Sequence
  Description of Artificial Sequence: Synthetic oligonucleotide
  Target: ATXN2; (+) strand; PAM type: NRG; PAM sequence: TAG
tggtctcgaactcctgacct

SEQ ID NO: 43202 - DNA, 20 bp, Artificial Sequence
  Description of Artificial Sequence: Synthetic oligonucleotide
  Target: ATXN2; (+) strand; PAM type: NRG; PAM sequence: AGG
ggtctcgaactcctgacctt

SEQ ID NO: 43203 - DNA, 20 bp, Artificial Sequence
  Description of Artificial Sequence: Synthetic oligonucleotide
  Target: ATXN2; (+) strand; PAM type: NRG; PAM sequence: CGG
cttaggtgatctgcccacct

SEQ ID NO: 43204 - DNA, 20 bp, Artificial Sequence
  Description of Artificial Sequence: Synthetic oligonucleotide
  Target: ATXN2; (+) strand; PAM type: NRG; PAM sequence: AAG
ctgcccacctcggcctccca

SEQ ID NO: 43205 - DNA, 20 bp, Artificial Sequence
  Description of Artificial Sequence: Synthetic oligonucleotide
  Target: ATXN2; (+) strand; PAM type: NRG; PAM sequence: TAG
acctcggcctcccaaagtgc

SEQ ID NO: 43206 - DNA, 20 bp, Artificial Sequence
  Description of Artificial Sequence: Synthetic oligonucleotide
  Target: ATXN2; (+) strand; PAM type: NRG; PAM sequence: AGG
cctcggcctcccaaagtgct

SEQ ID NO: 43207 - DNA, 20 bp, Artificial Sequence
  Description of Artificial Sequence: Synthetic oligonucleotide
  Target: ATXN2; (+) strand; PAM type: NRG; PAM sequence: CAG
ctcccaaagtgctaggatta

SEQ ID NO: 43208 - DNA, 20 bp, Artificial Sequence
  Description of Artificial Sequence: Synthetic oligonucleotide
  Target: ATXN2; (+) strand; PAM type: NRG; PAM sequence: AGG
tcccaaagtgctaggattac

SEQ ID NO: 43209 - DNA, 20 bp, Artificial Sequence
  Description of Artificial Sequence: Synthetic oligonucleotide
  Target: ATXN2; (+) strand; PAM type: NRG; PAM sequence: GAG
agtgctaggattacaggtgt

SEQ ID NO: 43210 - DNA, 20 bp, Artificial Sequence
  Description of Artificial Sequence: Synthetic oligonucleotide
  Target: ATXN2; (+) strand; PAM type: NRG; PAM sequence: TAG
cccgccaacaaatgaaaact

SEQ ID NO: 43211 - DNA, 20 bp, Artificial Sequence
  Description of Artificial Sequence: Synthetic oligonucleotide
  Target: ATXN2; (+) strand; PAM type: NRG; PAM sequence: AGG
ccgccaacaaatgaaaactt

SEQ ID NO: 43212 - DNA, 20 bp, Artificial Sequence
  Description of Artificial Sequence: Synthetic oligonucleotide
  Target: ATXN2; (+) strand; PAM type: NRG; PAM sequence: TAG
cttaggttaacaactgttaa

SEQ ID NO: 43213 - DNA, 20 bp, Artificial Sequence
  Description of Artificial Sequence: Synthetic oligonucleotide
  Target: ATXN2; (+) strand; PAM type: NRG; PAM sequence: AAG
aacaactgttaatagcatta

SEQ ID NO: 43214 - DNA, 20 bp, Artificial Sequence
  Description of Artificial Sequence: Synthetic oligonucleotide
  Target: ATXN2; (+) strand; PAM type: NRG; PAM sequence: TAG
ttaatagcattaaagctgaa

SEQ ID NO: 43215 - DNA, 20 bp, Artificial Sequence
  Description of Artificial Sequence: Synthetic oligonucleotide
  Target: ATXN2; (+) strand; PAM type: NRG; PAM sequence: AAG
ctgaatagatacatgtgcta

SEQ ID NO: 43216 - DNA, 20 bp, Artificial Sequence
  Description of Artificial Sequence: Synthetic oligonucleotide
  Target: ATXN2; (+) strand; PAM type: NRG; PAM sequence: AAG
gtgctaaagtatgaaataat

SEQ ID NO: 43217 - DNA, 20 bp, Artificial Sequence
  Description of Artificial Sequence: Synthetic oligonucleotide
  Target: ATXN2; (+) strand; PAM type: NRG; PAM sequence: TAG
ctaaagtatgaaataataag

SEQ ID NO: 43218 - DNA, 20 bp, Artificial Sequence
  Description of Artificial Sequence: Synthetic oligonucleotide
  Target: ATXN2; (+) strand; PAM type: NRG; PAM sequence: AAG
gtattttgaatgttaccaat

SEQ ID NO: 43219 - DNA, 20 bp, Artificial Sequence
  Description of Artificial Sequence: Synthetic oligonucleotide
  Target: ATXN2; (+) strand; PAM type: NRG; PAM sequence: AAG
ttgaatgttaccaataagtc

SEQ ID NO: 43220 - DNA, 20 bp, Artificial Sequence
  Description of Artificial Sequence: Synthetic oligonucleotide
  Target: ATXN2; (+) strand; PAM type: NRG; PAM sequence: AAG
ttaccaataagtcaagaatg

SEQ ID NO: 43221 - DNA, 20 bp, Artificial Sequence
  Description of Artificial Sequence: Synthetic oligonucleotide
  Target: ATXN2; (+) strand; PAM type: NRG; PAM sequence: TAG
atgaagctattgttaacatt

SEQ ID NO: 43222 - DNA, 20 bp, Artificial Sequence
  Description of Artificial Sequence: Synthetic oligonucleotide
  Target: ATXN2; (+) strand; PAM type: NRG; PAM sequence: AAG
agctattgttaacatttaga

SEQ ID NO: 43223 - DNA, 20 bp, Artificial Sequence
  Description of Artificial Sequence: Synthetic oligonucleotide
  Target: ATXN2; (+) strand; PAM type: NRG; PAM sequence: CAG
acatttagaaagctaaaaca

SEQ ID NO: 43224 - DNA, 20 bp, Artificial Sequence
  Description of Artificial Sequence: Synthetic oligonucleotide
  Target: ATXN2; (+) strand; PAM type: NRG; PAM sequence: AGG
catttagaaagctaaaacac

SEQ ID NO: 43225 - DNA, 20 bp, Artificial Sequence
  Description of Artificial Sequence: Synthetic oligonucleotide
  Target: ATXN2; (+) strand; PAM type: NRG; PAM sequence: GAG
agaaagctaaaacacaggct

SEQ ID NO: 43226 - DNA, 20 bp, Artificial Sequence
  Description of Artificial Sequence: Synthetic oligonucleotide
  Target: ATXN2; (+) strand; PAM type: NRG; PAM sequence: AGG
gaaagctaaaacacaggctg

SEQ ID NO: 43227 - DNA, 20 bp, Artificial Sequence
  Description of Artificial Sequence: Synthetic oligonucleotide
  Target: ATXN2; (+) strand; PAM type: NRG; PAM sequence: AAG
gctaaaacacaggctgagga

SEQ ID NO: 43228 - DNA, 20 bp, Artificial Sequence
  Description of Artificial Sequence: Synthetic oligonucleotide
  Target: ATXN2; (+) strand; PAM type: NRG; PAM sequence: AGG
ctaaaacacaggctgaggaa

SEQ ID NO: 43229 - DNA, 20 bp, Artificial Sequence
  Description of Artificial Sequence: Synthetic oligonucleotide
  Target: ATXN2; (+) strand; PAM type: NRG; PAM sequence: TGG
ggaaaggctacctttgcctt

SEQ ID NO: 43230 - DNA, 20 bp, Artificial Sequence
  Description of Artificial Sequence: Synthetic oligonucleotide
  Target: ATXN2; (+) strand; PAM type: NRG; PAM sequence: CAG
ggttcactcatcctttaatt

SEQ ID NO: 43231 - DNA, 20 bp, Artificial Sequence
  Description of Artificial Sequence: Synthetic oligonucleotide
  Target: ATXN2; (+) strand; PAM type: NRG; PAM sequence: AAG
aattcagctactttttttaa

SEQ ID NO: 43232 - DNA, 20 bp, Artificial Sequence
  Description of Artificial Sequence: Synthetic oligonucleotide
  Target: ATXN2; (+) strand; PAM type: NRG; PAM sequence: AGG
attcagctactttttttaaa

SEQ ID NO: 43233 - DNA, 20 bp, Artificial Sequence
  Description of Artificial Sequence: Synthetic oligonucleotide
  Target: ATXN2; (+) strand; PAM type: NRG; PAM sequence: TGG
agctactttttttaaaaggc

SEQ ID NO: 43234 - DNA, 20 bp, Artificial Sequence
  Description of Artificial Sequence: Synthetic oligonucleotide
  Target: ATXN2; (+) strand; PAM type: NRG; PAM sequence: TAG
ttttttaaaaggctggtatt

SEQ ID NO: 43235 - DNA, 20 bp, Artificial Sequence
  Description of Artificial Sequence: Synthetic oligonucleotide
  Target: ATXN2; (+) strand; PAM type: NRG; PAM sequence: AAG
gtatttagattttcctttct

SEQ ID NO: 43236 - DNA, 20 bp, Artificial Sequence
  Description of Artificial Sequence: Synthetic oligonucleotide
  Target: ATXN2; (+) strand; PAM type: NRG; PAM sequence: AAG
tttagattttcctttctaag

SEQ ID NO: 43237 - DNA, 20 bp, Artificial Sequence
  Description of Artificial Sequence: Synthetic oligonucleotide
  Target: ATXN2; (+) strand; PAM type: NRG; PAM sequence: AAG
attttcctttctaagaagct

SEQ ID NO: 43238 - DNA, 20 bp, Artificial Sequence
  Description of Artificial Sequence: Synthetic oligonucleotide
  Target: ATXN2; (+) strand; PAM type: NRG; PAM sequence: AAG
tttctaagaagctaagtttc

SEQ ID NO: 43239 - DNA, 20 bp, Artificial Sequence
  Description of Artificial Sequence: Synthetic oligonucleotide
  Target: ATXN2; (+) strand; PAM type: NRG; PAM sequence: AAG
ctaagaagctaagtttcaag

SEQ ID NO: 43240 - DNA, 20 bp, Artificial Sequence
  Description of Artificial Sequence: Synthetic oligonucleotide
  Target: ATXN2; (+) strand; PAM type: NRG; PAM sequence: TGG
taagtttcaagaagatttat

SEQ ID NO: 43241 - DNA, 20 bp, Artificial Sequence
  Description of Artificial Sequence: Synthetic oligonucleotide
  Target: ATXN2; (+) strand; PAM type: NRG; PAM sequence: TGG
tttcaagaagatttattggt

SEQ ID NO: 43242 - DNA, 20 bp, Artificial Sequence
  Description of Artificial Sequence: Synthetic oligonucleotide
  Target: ATXN2; (+) strand; PAM type: NRG; PAM sequence: TAG
aaaatctacctcgataccta

SEQ ID NO: 43243 - DNA, 20 bp, Artificial Sequence
  Description of Artificial Sequence: Synthetic oligonucleotide
  Target: ATXN2; (+) strand; PAM type: NRG; PAM sequence: AAG
ctatagtaaataacatgcaa

SEQ ID NO: 43244 - DNA, 20 bp, Artificial Sequence
  Description of Artificial Sequence: Synthetic oligonucleotide
  Target: ATXN2; (+) strand; PAM type: NRG; PAM sequence: AAG
aaaagaatgaaatgacaatc

SEQ ID NO: 43245 - DNA, 20 bp, Artificial Sequence
  Description of Artificial Sequence: Synthetic oligonucleotide
  Target: ATXN2; (+) strand; PAM type: NRG; PAM sequence: AGG
aaagaatgaaatgacaatca

SEQ ID NO: 43246 - DNA, 20 bp, Artificial Sequence
  Description of Artificial Sequence: Synthetic oligonucleotide
  Target: ATXN2; (+) strand; PAM type: NRG; PAM sequence: GAG
agaatgaaatgacaatcaag

SEQ ID NO: 43247 - DNA, 20 bp, Artificial Sequence
  Description of Artificial Sequence: Synthetic oligonucleotide
  Target: ATXN2; (+) strand; PAM type: NRG; PAM sequence: GAG
aatgaaatgacaatcaagga

SEQ ID NO: 43248 - DNA, 20 bp, Artificial Sequence
  Description of Artificial Sequence: Synthetic oligonucleotide
  Target: ATXN2; (+) strand; PAM type: NRG; PAM sequence: AAG
gacaatcaaggagagatgtt

SEQ ID NO: 43249 - DNA, 20 bp, Artificial Sequence
  Description of Artificial Sequence: Synthetic oligonucleotide
  Target: ATXN2; (+) strand; PAM type: NRG; PAM sequence: AAG
tcaaggagagatgttaagta

SEQ ID NO: 43250 - DNA, 20 bp, Artificial Sequence
  Description of Artificial Sequence: Synthetic oligonucleotide
  Target: ATXN2; (+) strand; PAM type: NRG; PAM sequence: AAG
tgttaagtaaagcctgtgct

SEQ ID NO: 43251 - DNA, 20 bp, Artificial Sequence
  Description of Artificial Sequence: Synthetic oligonucleotide
  Target: ATXN2; (+) strand; PAM type: NRG; PAM sequence: CAG
aagtaaagcctgtgctaaga

SEQ ID NO: 43252 - DNA, 20 bp, Artificial Sequence
  Description of Artificial Sequence: Synthetic oligonucleotide
  Target: ATXN2; (+) strand; PAM type: NRG; PAM sequence: GAG
gtaaagcctgtgctaagaca

SEQ ID NO: 43253 - DNA, 20 bp, Artificial Sequence
  Description of Artificial Sequence: Synthetic oligonucleotide
  Target: ATXN2; (+) strand; PAM type: NRG; PAM sequence: CAG
aagacagagaaataatgtta

SEQ ID NO: 43254 - DNA, 20 bp, Artificial Sequence
  Description of Artificial Sequence: Synthetic oligonucleotide
  Target: ATXN2; (+) strand; PAM type: NRG; PAM sequence: AAG
cagagaaataatgttacaga

SEQ ID NO: 43255 - DNA, 20 bp, Artificial Sequence
  Description of Artificial Sequence: Synthetic oligonucleotide
  Target: ATXN2; (+) strand; PAM type: NRG; PAM sequence: AAG
ccacaatatatttgtgtaca

SEQ ID NO: 43256 - DNA, 20 bp, Artificial Sequence
  Description of Artificial Sequence: Synthetic oligonucleotide
  Target: ATXN2; (+) strand; PAM type: NRG; PAM sequence: CAG
gtataaatctccaactacct

SEQ ID NO: 43257 - DNA, 20 bp, Artificial Sequence
  Description of Artificial Sequence: Synthetic oligonucleotide
  Target: ATXN2; (+) strand; PAM type: NRG; PAM sequence: CAG
ctccaactacctcagaacac

SEQ ID NO: 43258 - DNA, 20 bp, Artificial Sequence
  Description of Artificial Sequence: Synthetic oligonucleotide
  Target: ATXN2; (+) strand; PAM type: NRG; PAM sequence: GAG
ccaactacctcagaacacca

SEQ ID NO: 43259 - DNA, 20 bp, Artificial Sequence
  Description of Artificial Sequence: Synthetic oligonucleotide
  Target: ATXN2; (+) strand; PAM type: NRG; PAM sequence: CAG
tacctcagaacaccagagtc

SEQ ID NO: 43260 - DNA, 20 bp, Artificial Sequence
  Description of Artificial Sequence: Synthetic oligonucleotide
  Target: ATXN2; (+) strand; PAM type: NRG; PAM sequence: TAG
acatcttccatttgccacac

SEQ ID NO: 43261 - DNA, 20 bp, Artificial Sequence
  Description of Artificial Sequence: Synthetic oligonucleotide
  Target: ATXN2; (+) strand; PAM type: NRG; PAM sequence: TGG
acactagattattaatgact

SEQ ID NO: 43262 - DNA, 20 bp, Artificial Sequence
  Description of Artificial Sequence: Synthetic oligonucleotide
  Target: ATXN2; (+) strand; PAM type: NRG; PAM sequence: TAG
ggccttgctctactaatatc

SEQ ID NO: 43263 - DNA, 20 bp, Artificial Sequence
  Description of Artificial Sequence: Synthetic oligonucleotide
  Target: ATXN2; (+) strand; PAM type: NRG; PAM sequence: AAG
atatctagcttcactgaaca

SEQ ID NO: 43264 - DNA, 20 bp, Artificial Sequence
  Description of Artificial Sequence: Synthetic oligonucleotide
  Target: ATXN2; (+) strand; PAM type: NRG; PAM sequence: TAG
aagtacaaatgaccatcaaa

SEQ ID NO: 43265 - DNA, 20 bp, Artificial Sequence
  Description of Artificial Sequence: Synthetic oligonucleotide
  Target: ATXN2; (+) strand; PAM type: NRG; PAM sequence: AAG
acaaatgaccatcaaatagt

SEQ ID NO: 43266 - DNA, 20 bp, Artificial Sequence
  Description of Artificial Sequence: Synthetic oligonucleotide
  Target: ATXN2; (+) strand; PAM type: NRG; PAM sequence: TGG
tcaaatagtaagctgtgcta

SEQ ID NO: 43267 - DNA, 20 bp, Artificial Sequence
  Description of Artificial Sequence: Synthetic oligonucleotide
  Target: ATXN2; (+) strand; PAM type: NRG; PAM sequence: TGG
aatagtaagctgtgctatgg

SEQ ID NO: 43268 - DNA, 20 bp, Artificial Sequence
  Description of Artificial Sequence: Synthetic oligonucleotide
  Target: ATXN2; (+) strand; PAM type: NRG; PAM sequence: CAG
gctatggtggtttcaaatgt

SEQ ID NO: 43269 - DNA, 20 bp, Artificial Sequence
  Description of Artificial Sequence: Synthetic oligonucleotide
  Target: ATXN2; (+) strand; PAM type: NRG; PAM sequence: AGG
ctatggtggtttcaaatgtc

SEQ ID NO: 43270 - DNA, 20 bp, Artificial Sequence
  Description of Artificial Sequence: Synthetic oligonucleotide
  Target: ATXN2; (+) strand; PAM type: NRG; PAM sequence: GGG
tatggtggtttcaaatgtca

SEQ ID NO: 43271 - DNA, 20 bp, Artificial Sequence
  Description of Artificial Sequence: Synthetic oligonucleotide
  Target: ATXN2; (+) strand; PAM type: NRG; PAM sequence: TAG
gttaccaaatctcatgattt

SEQ ID NO: 43272 - DNA, 20 bp, Artificial Sequence
  Description of Artificial Sequence: Synthetic oligonucleotide
  Target: ATXN2; (+) strand; PAM type: NRG; PAM sequence: AAG
gattttagttatcccactta

SEQ ID NO: 43273 - DNA, 20 bp, Artificial Sequence
  Description of Artificial Sequence: Synthetic oligonucleotide
  Target: ATXN2; (+) strand; PAM type: NRG; PAM sequence: AGG
attttagttatcccacttaa

SEQ ID NO: 43274 - DNA, 20 bp, Artificial Sequence
  Description of Artificial Sequence: Synthetic oligonucleotide
  Target: ATXN2; (+) strand; PAM type: NRG; PAM sequence: TAG
tagttatcccacttaaagga

SEQ ID NO: 43275 - DNA, 20 bp, Artificial Sequence
  Description of Artificial Sequence: Synthetic oligonucleotide
  Target: ATXN2; (+) strand; PAM type: NRG; PAM sequence: AGG
agttatcccacttaaaggat

SEQ ID NO: 43276 - DNA, 20 bp, Artificial Sequence
  Description of Artificial Sequence: Synthetic oligonucleotide
  Target: ATXN2; (+) strand; PAM type: NRG; PAM sequence: AAG
tcccacttaaaggataggca

SEQ ID NO: 43277 - DNA, 20 bp, Artificial Sequence
  Description of Artificial Sequence: Synthetic oligonucleotide
  Target: ATXN2; (+) strand; PAM type: NRG; PAM sequence: TGG
tgttctgctttctacatata

SEQ ID NO: 43278 - DNA, 20 bp, Artificial Sequence
  Description of Artificial Sequence: Synthetic oligonucleotide
  Target: ATXN2; (+) strand; PAM type: NRG; PAM sequence: TAG
acataacgcatttttataaa

SEQ ID NO: 43279 - DNA, 20 bp, Artificial Sequence
  Description of Artificial Sequence: Synthetic oligonucleotide
  Target: ATXN2; (+) strand; PAM type: NRG; PAM sequence: TAG
tttataaatagataaatctt

SEQ ID NO: 43280 - DNA, 20 bp, Artificial Sequence
  Description of Artificial Sequence: Synthetic oligonucleotide
  Target: ATXN2; (+) strand; PAM type: NRG; PAM sequence: CAG
tttctaaaactcaaattcat

SEQ ID NO: 43281 - DNA, 20 bp, Artificial Sequence
  Description of Artificial Sequence: Synthetic oligonucleotide
  Target: ATXN2; (+) strand; PAM type: NRG; PAM sequence: TAG
taaaactcaaattcatcagt

SEQ ID NO: 43282 - DNA, 20 bp, Artificial Sequence
  Description of Artificial Sequence: Synthetic oligonucleotide
  Target: ATXN2; (+) strand; PAM type: NRG; PAM sequence: CAG
atcaatctgttttctatgtt

SEQ ID NO: 43283 - DNA, 20 bp, Artificial Sequence
  Description of Artificial Sequence: Synthetic oligonucleotide
  Target: ATXN2; (+) strand; PAM type: NRG; PAM sequence: TGG
tttctatgttcagaaacaac

SEQ ID NO: 43284 - DNA, 20 bp, Artificial Sequence
  Description of Artificial Sequence: Synthetic oligonucleotide
  Target: ATXN2; (+) strand; PAM type: NRG; PAM sequence: AAG
ggtgatatacctgtaaaatt

SEQ ID NO: 43285 - DNA, 20 bp, Artificial Sequence
  Description of Artificial Sequence: Synthetic oligonucleotide
  Target: ATXN2; (+) strand; PAM type: NRG; PAM sequence: AAG
ctgtaaaattaagaactgtt

SEQ ID NO: 43286 - DNA, 20 bp, Artificial Sequence
  Description of Artificial Sequence: Synthetic oligonucleotide
  Target: ATXN2; (+) strand; PAM type: NRG; PAM sequence: CAG
aattaagaactgttaagaca

SEQ ID NO: 43287 - DNA, 20 bp, Artificial Sequence
  Description of Artificial Sequence: Synthetic oligonucleotide
  Target: ATXN2; (+) strand; PAM type: NRG; PAM sequence: AGG
attaagaactgttaagacac

SEQ ID NO: 43288 - DNA, 20 bp, Artificial Sequence
  Description of Artificial Sequence: Synthetic oligonucleotide
  Target: ATXN2; (+) strand; PAM type: NRG; PAM sequence: TAG
ctttaacatcacattctttt

SEQ ID NO: 43289 - DNA, 20 bp, Artificial Sequence
  Description of Artificial Sequence: Synthetic oligonucleotide
  Target: ATXN2; (+) strand; PAM type: NRG; PAM sequence: GAG
catcacattctttttagtat

SEQ ID NO: 43290 - DNA, 20 bp, Artificial Sequence
  Description of Artificial Sequence: Synthetic oligonucleotide
  Target: ATXN2; (+) strand; PAM type: NRG; PAM sequence: TAG
ttctttttagtatgagatga

SEQ ID NO: 43291 - DNA, 20 bp, Artificial Sequence
  Description of Artificial Sequence: Synthetic oligonucleotide
  Target: ATXN2; (+) strand; PAM type: NRG; PAM sequence: TAG
tagtatgagatgatagaaat

SEQ ID NO: 43292 - DNA, 20 bp, Artificial Sequence
  Description of Artificial Sequence: Synthetic oligonucleotide
  Target: ATXN2; (+) strand; PAM type: NRG; PAM sequence: AAG
gagatgatagaaattagaat

SEQ ID NO: 43293 - DNA, 20 bp, Artificial Sequence
  Description of Artificial Sequence: Synthetic oligonucleotide
  Target: ATXN2; (+) strand; PAM type: NRG; PAM sequence: AAG
tagaaattagaataagatat

SEQ ID NO: 43294 - DNA, 20 bp, Artificial Sequence
  Description of Artificial Sequence: Synthetic oligonucleotide
  Target: ATXN2; (+) strand; PAM type: NRG; PAM sequence: CAG
attagaataagatataagat

SEQ ID NO: 43295 - DNA, 20 bp, Artificial Sequence
  Description of Artificial Sequence: Synthetic oligonucleotide
  Target: ATXN2; (+) strand; PAM type: NRG; PAM sequence: TGG
ataatttcaaatattaaatt

SEQ ID NO: 43296 - DNA, 20 bp, Artificial Sequence
  Description of Artificial Sequence: Synthetic oligonucleotide
  Target: ATXN2; (+) strand; PAM type: NRG; PAM sequence: TGG
caaatattaaatttggattt

SEQ ID NO: 43297 - DNA, 20 bp, Artificial Sequence
  Description of Artificial Sequence: Synthetic oligonucleotide
  Target: ATXN2; (+) strand; PAM type: NRG; PAM sequence: AAG
tttggattttggaatttgtc

SEQ ID NO: 43298 - DNA, 20 bp, Artificial Sequence
  Description of Artificial Sequence: Synthetic oligonucleotide
  Target: ATXN2; (+) strand; PAM type: NRG; PAM sequence: TAG
aatacatttatctatcacaa

SEQ ID NO: 43299 - DNA, 20 bp, Artificial Sequence
  Description of Artificial Sequence: Synthetic oligonucleotide
  Target: ATXN2; (+) strand; PAM type: NRG; PAM sequence: AAG
catttatctatcacaatagt

SEQ ID NO: 43300 - DNA, 20 bp, Artificial Sequence
  Description of Artificial Sequence: Synthetic oligonucleotide
  Target: ATXN2; (+) strand; PAM type: NRG; PAM sequence: AAG
ttatctatcacaatagtaag

SEQ ID NO: 43301 - DNA, 20 bp, Artificial Sequence
  Description of Artificial Sequence: Synthetic oligonucleotide
  Target: ATXN2; (+) strand; PAM type: NRG; PAM sequence: TGG
ttgaacaaaaatattctgta

SEQ ID NO: 43302 - DNA, 20 bp, Artificial Sequence
  Description of Artificial Sequence: Synthetic oligonucleotide
  Target: ATXN2; (+) strand; PAM type: NRG; PAM sequence: GGG
tgaacaaaaatattctgtat

SEQ ID NO: 43303 - DNA, 20 bp, Artificial Sequence
  Description of Artificial Sequence: Synthetic oligonucleotide
  Target: ATXN2; (+) strand; PAM type: NRG; PAM sequence: TAG
attctgtatgggcatgaaat

SEQ ID NO: 43304 - DNA, 20 bp, Artificial Sequence
  Description of Artificial Sequence: Synthetic oligonucleotide
  Target: ATXN2; (+) strand; PAM type: NRG; PAM sequence: CAG
catacttcttcctattccta

SEQ ID NO: 43305 - DNA, 20 bp, Artificial Sequence
  Description of Artificial Sequence: Synthetic oligonucleotide
  Target: ATXN2; (+) strand; PAM type: NRG; PAM sequence: AAG
ttcttcctattcctacagtt

SEQ ID NO: 43306 - DNA, 20 bp, Artificial Sequence
  Description of Artificial Sequence: Synthetic oligonucleotide
  Target: ATXN2; (+) strand; PAM type: NRG; PAM sequence: CAG
taaactctaacctttgtttt

SEQ ID NO: 43307 - DNA, 20 bp, Artificial Sequence
  Description of Artificial Sequence: Synthetic oligonucleotide
  Target: ATXN2; (+) strand; PAM type: NRG; PAM sequence: GAG
aacctttgttttcagctttt

SEQ ID NO: 43308 - DNA, 20 bp, Artificial Sequence
  Description of Artificial Sequence: Synthetic oligonucleotide
  Target: ATXN2; (+) strand; PAM type: NRG; PAM sequence: AAG
ctttgttttcagcttttgag

SEQ ID NO: 43309 - DNA, 20 bp, Artificial Sequence
  Description of Artificial Sequence: Synthetic oligonucleotide
  Target: ATXN2; (+) strand; PAM type: NRG; PAM sequence: TAG
gttttcagcttttgagaagc

SEQ ID NO: 43310 - DNA, 20 bp, Artificial Sequence
  Description of Artificial Sequence: Synthetic oligonucleotide
  Target: ATXN2; (+) strand; PAM type: NRG; PAM sequence: AGG
ttttcagcttttgagaagct

SEQ ID NO: 43311 - DNA, 20 bp, Artificial Sequence
  Description of Artificial Sequence: Synthetic oligonucleotide
  Target: ATXN2; (+) strand; PAM type: NRG; PAM sequence: TGG
gaagctaggtgatgtttcat

SEQ ID NO: 43312 - DNA, 20 bp, Artificial Sequence
  Description of Artificial Sequence: Synthetic oligonucleotide
  Target: ATXN2; (+) strand; PAM type: NRG; PAM sequence: GGG
aagctaggtgatgtttcatt

SEQ ID NO: 43313 - DNA, 20 bp, Artificial Sequence
  Description of Artificial Sequence: Synthetic oligonucleotide
  Target: ATXN2; (+) strand; PAM type: NRG; PAM sequence: CAG
aatattttctttattccctg

SEQ ID NO: 43314 - DNA, 20 bp, Artificial Sequence
  Description of Artificial Sequence: Synthetic oligonucleotide
  Target: ATXN2; (+) strand; PAM type: NRG; PAM sequence: AGG
atattttctttattccctgc

SEQ ID NO: 43315 - DNA, 20 bp, Artificial Sequence
  Description of Artificial Sequence: Synthetic oligonucleotide
  Target: ATXN2; (+) strand; PAM type: NRG; PAM sequence: GAG
attttctttattccctgcag

SEQ ID NO: 43316 - DNA, 20 bp, Artificial Sequence
  Description of Artificial Sequence: Synthetic oligonucleotide
  Target: ATXN2; (+) strand; PAM type: NRG; PAM sequence: GAG
tttctttattccctgcagga

SEQ ID NO: 43317 - DNA, 20 bp, Artificial Sequence
  Description of Artificial Sequence: Synthetic oligonucleotide
  Target: ATXN2; (+) strand; PAM type: NRG; PAM sequence: AAG
gagttctgcctctgatcttg

SEQ ID NO: 43318 - DNA, 20 bp, Artificial Sequence
  Description of Artificial Sequence: Synthetic oligonucleotide
  Target: ATXN2; (+) strand; PAM type: NRG; PAM sequence: TGG
ctgcctctgatcttgaagcc

SEQ ID NO: 43319 - DNA, 20 bp, Artificial Sequence
  Description of Artificial Sequence: Synthetic oligonucleotide
  Target: ATXN2; (+) strand; PAM type: NRG; PAM sequence: TAG
atcttgaagcctggaatctt

SEQ ID NO: 43320 - DNA, 20 bp, Artificial Sequence
  Description of Artificial Sequence: Synthetic oligonucleotide
  Target: ATXN2; (+) strand; PAM type: NRG; PAM sequence: TAG
tgaagcctggaatctttagc

SEQ ID NO: 43321 - DNA, 20 bp, Artificial Sequence
  Description of Artificial Sequence: Synthetic oligonucleotide
  Target: ATXN2; (+) strand; PAM type: NRG; PAM sequence: CAG
acaattttttaaaaaaaatt

SEQ ID NO: 43322 - DNA, 20 bp, Artificial Sequence
  Description of Artificial Sequence: Synthetic oligonucleotide
  Target: ATXN2; (+) strand; PAM type: NRG; PAM sequence: AAG
tttttaaaaaaaattcagat

SEQ ID NO: 43323 - DNA, 20 bp, Artificial Sequence
  Description of Artificial Sequence: Synthetic oligonucleotide
  Target: ATXN2; (+) strand; PAM type: NRG; PAM sequence: TAG
taaaaaaaattcagataagt

SEQ ID NO: 43324 - DNA, 20 bp, Artificial Sequence
  Description of Artificial Sequence: Synthetic oligonucleotide
  Target: ATXN2; (+) strand; PAM type: NRG; PAM sequence: AAG
aaaattcagataagttagaa

SEQ ID NO: 43325 - DNA, 20 bp, Artificial Sequence
  Description of Artificial Sequence: Synthetic oligonucleotide
  Target: ATXN2; (+) strand; PAM type: NRG; PAM sequence: AAG
ataagttagaaaagcaaaac

SEQ ID NO: 43326 - DNA, 20 bp, Artificial Sequence
  Description of Artificial Sequence: Synthetic oligonucleotide
  Target: ATXN2; (+) strand; PAM type: NRG; PAM sequence: TGG
attttgatttcctatgtttt

SEQ ID NO: 43327 - DNA, 20 bp, Artificial Sequence
  Description of Artificial Sequence: Synthetic oligonucleotide
  Target: ATXN2; (+) strand; PAM type: NRG; PAM sequence: CAG
aaataatgctttcatttaaa

SEQ ID NO: 43328 - DNA, 20 bp, Artificial Sequence
  Description of Artificial Sequence: Synthetic oligonucleotide
  Target: ATXN2; (+) strand; PAM type: NRG; PAM sequence: GAG
ataatgctttcatttaaaca

SEQ ID NO: 43329 - DNA, 20 bp, Artificial Sequence
  Description of Artificial Sequence: Synthetic oligonucleotide
  Target: ATXN2; (+) strand; PAM type: NRG; PAM sequence: AGG
taatgctttcatttaaacag

SEQ ID NO: 43330 - DNA, 20 bp, Artificial Sequence
  Description of Artificial Sequence: Synthetic oligonucleotide
  Target: ATXN2; (+) strand; PAM type: NRG; PAM sequence: CAG
cagaggctttttttcctttg

SEQ ID NO: 43331 - DNA, 20 bp, Artificial Sequence
  Description of Artificial Sequence: Synthetic oligonucleotide
  Target: ATXN2; (+) strand; PAM type: NRG; PAM sequence: TAG
caccaataattttatttatg

SEQ ID NO: 43332 - DNA, 20 bp, Artificial Sequence
  Description of Artificial Sequence: Synthetic oligonucleotide
  Target: ATXN2; (+) strand; PAM type: NRG; PAM sequence: AGG
accaataattttatttatgt

SEQ ID NO: 43333 - DNA, 20 bp, Artificial Sequence
  Description of Artificial Sequence: Synthetic oligonucleotide
  Target: ATXN2; (+) strand; PAM type: NRG; PAM sequence: CAG
ttatgtaggtatttgacacc

SEQ ID NO: 43334 - DNA, 20 bp, Artificial Sequence
  Description of Artificial Sequence: Synthetic oligonucleotide
  Target: ATXN2; (+) strand; PAM type: NRG; PAM sequence: AGG
tatgtaggtatttgacaccc

SEQ ID NO: 43335 - DNA, 20 bp, Artificial Sequence
  Description of Artificial Sequence: Synthetic oligonucleotide
  Target: ATXN2; (+) strand; PAM type: NRG; PAM sequence: CAG
gaatgttaacctttgtaaca

SEQ ID NO: 43336 - DNA, 20 bp, Artificial Sequence
  Description of Artificial Sequence: Synthetic oligonucleotide
  Target: ATXN2; (+) strand; PAM type: NRG; PAM sequence: TAG
acacagacactatattaaat

SEQ ID NO: 43337 - DNA, 20 bp, Artificial Sequence
  Description of Artificial Sequence: Synthetic oligonucleotide
  Target: ATXN2; (+) strand; PAM type: NRG; PAM sequence: TAG
cagacactatattaaattag

SEQ ID NO: 43338 - DNA, 20 bp, Artificial Sequence
  Description of Artificial Sequence: Synthetic oligonucleotide
  Target: ATXN2; (+) strand; PAM type: NRG; PAM sequence: TAG
gtctatgaataaaaataacc

SEQ ID NO: 43339 - DNA, 20 bp, Artificial Sequence
  Description of Artificial Sequence: Synthetic oligonucleotide
  Target: ATXN2; (+) strand; PAM type: NRG; PAM sequence: CAG
ccctctaacattcaatttca

SEQ ID NO: 43340 - DNA, 20 bp, Artificial Sequence
  Description of Artificial Sequence: Synthetic oligonucleotide
  Target: ATXN2; (+) strand; PAM type: NRG; PAM sequence: GAG
taacattcaatttcacagct

SEQ ID NO: 43341 - DNA, 20 bp, Artificial Sequence
  Description of Artificial Sequence: Synthetic oligonucleotide
  Target: ATXN2; (+) strand; PAM type: NRG; PAM sequence: TGG
caatttcacagctgagatta

SEQ ID NO: 43342 - DNA, 20 bp, Artificial Sequence
  Description of Artificial Sequence: Synthetic oligonucleotide
  Target: ATXN2; (+) strand; PAM type: NRG; PAM sequence: CAG
cacagctgagattatggatc

SEQ ID NO: 43343 - DNA, 20 bp, Artificial Sequence
  Description of Artificial Sequence: Synthetic oligonucleotide
  Target: ATXN2; (+) strand; PAM type: NRG; PAM sequence: AAG
agctgagattatggatccag

SEQ ID NO: 43344 - DNA, 20 bp, Artificial Sequence
  Description of Artificial Sequence: Synthetic oligonucleotide
  Target: ATXN2; (+) strand; PAM type: NRG; PAM sequence: TAG
cctttgttacataccctcac

SEQ ID NO: 43345 - DNA, 20 bp, Artificial Sequence
  Description of Artificial Sequence: Synthetic oligonucleotide
  Target: ATXN2; (+) strand; PAM type: NRG; PAM sequence: AAG
ttgttacataccctcactag

SEQ ID NO: 43346 - DNA, 20 bp, Artificial Sequence
  Description of Artificial Sequence: Synthetic oligonucleotide
  Target: ATXN2; (+) strand; PAM type: NRG; PAM sequence: AGG
tgttacataccctcactaga

SEQ ID NO: 43347 - DNA, 20 bp, Artificial Sequence
  Description of Artificial Sequence: Synthetic oligonucleotide
  Target: ATXN2; (+) strand; PAM type: NRG; PAM sequence: GGG
gttacataccctcactagaa

SEQ ID NO: 43348 - DNA, 20 bp, Artificial Sequence
  Description of Artificial Sequence: Synthetic oligonucleotide
  Target: ATXN2; (+) strand; PAM type: NRG; PAM sequence: GGG
ttacataccctcactagaag

SEQ ID NO: 43349 - DNA, 20 bp, Artificial Sequence
  Description of Artificial Sequence: Synthetic oligonucleotide
  Target: ATXN2; (+) strand; PAM type: NRG; PAM sequence: CAG
accctcactagaaggggtaa

SEQ ID NO: 43350 - DNA, 20 bp, Artificial Sequence
  Description of Artificial Sequence: Synthetic oligonucleotide
  Target: ATXN2; (+) strand; PAM type: NRG; PAM sequence: CAG
ggtaacagctctgttcgatg

SEQ ID NO: 43351 - DNA, 20 bp, Artificial Sequence
  Description of Artificial Sequence: Synthetic oligonucleotide
  Target: ATXN2; (+) strand; PAM type: NRG; PAM sequence: AGG
gtaacagctctgttcgatgc

SEQ ID NO: 43352 - DNA, 20 bp, Artificial Sequence
  Description of Artificial Sequence: Synthetic oligonucleotide
  Target: ATXN2; (+) strand; PAM type: NRG; PAM sequence: TAG
agctctgttcgatgcaggac

SEQ ID NO: 43353 - DNA, 20 bp, Artificial Sequence
  Description of Artificial Sequence: Synthetic oligonucleotide
  Target: ATXN2; (+) strand; PAM type: NRG; PAM sequence: CAG
tctgttcgatgcaggactag

SEQ ID NO: 43354 - DNA, 20 bp, Artificial Sequence
  Description of Artificial Sequence: Synthetic oligonucleotide
  Target: ATXN2; (+) strand; PAM type: NRG; PAM sequence: AGG
ctgttcgatgcaggactagc

SEQ ID NO: 43355 - DNA, 20 bp, Artificial Sequence
  Description of Artificial Sequence: Synthetic oligonucleotide
  Target: ATXN2; (+) strand; PAM type: NRG; PAM sequence: TAG
cgatgcaggactagcaggcg

SEQ ID NO: 43356 - DNA, 20 bp, Artificial Sequence
  Description of Artificial Sequence: Synthetic oligonucleotide
  Target: ATXN2; (+) strand; PAM type: NRG; PAM sequence: AGG
gatgcaggactagcaggcgt

SEQ ID NO: 43357 - DNA, 20 bp, Artificial Sequence
  Description of Artificial Sequence: Synthetic oligonucleotide
  Target: ATXN2; (+) strand; PAM type: NRG; PAM sequence: GAG
tgcaggactagcaggcgtag

SEQ ID NO: 43358 - DNA, 20 bp, Artificial Sequence
  Description of Artificial Sequence: Synthetic oligonucleotide
  Target: ATXN2; (+) strand; PAM type: NRG; PAM sequence: CAG
actagcaggcgtaggagatg

SEQ ID NO: 43359 - DNA, 20 bp, Artificial Sequence
  Description of Artificial Sequence: Synthetic oligonucleotide
  Target: ATXN2; (+) strand; PAM type: NRG; PAM sequence: TGG
gcaggcgtaggagatgcagc

SEQ ID NO: 43360 - DNA, 20 bp, Artificial Sequence
  Description of Artificial Sequence: Synthetic oligonucleotide
  Target: ATXN2; (+) strand; PAM type: NRG; PAM sequence: TAG
cgtaggagatgcagctggaa

SEQ ID NO: 43361 - DNA, 20 bp, Artificial Sequence
  Description of Artificial Sequence: Synthetic oligonucleotide
  Target: ATXN2; (+) strand; PAM type: NRG; PAM sequence: AGG
gtaggagatgcagctggaat

SEQ ID NO: 43362 - DNA, 20 bp, Artificial Sequence
  Description of Artificial Sequence: Synthetic oligonucleotide
  Target: ATXN2; (+) strand; PAM type: NRG; PAM sequence: TGG
agatgcagctggaataggca

SEQ ID NO: 43363 - DNA, 20 bp, Artificial Sequence
  Description of Artificial Sequence: Synthetic oligonucleotide
  Target: ATXN2; (+) strand; PAM type: NRG; PAM sequence: CAG
agctggaataggcatggcaa

SEQ ID NO: 43364 - DNA, 20 bp, Artificial Sequence
  Description of Artificial Sequence: Synthetic oligonucleotide
  Target: ATXN2; (+) strand; PAM type: NRG; PAM sequence: CAG
aataggcatggcaacagctt

SEQ ID NO: 43365 - DNA, 20 bp, Artificial Sequence
  Description of Artificial Sequence: Synthetic oligonucleotide
  Target: ATXN2; (+) strand; PAM type: NRG; PAM sequence: TGG
ggcatggcaacagcttcagt

SEQ ID NO: 43366 - DNA, 20 bp, Artificial Sequence
  Description of Artificial Sequence: Synthetic oligonucleotide
  Target: ATXN2; (+) strand; PAM type: NRG; PAM sequence: CAG
agcttcagttggaataatac

SEQ ID NO: 43367 - DNA, 20 bp, Artificial Sequence
  Description of Artificial Sequence: Synthetic oligonucleotide
  Target: ATXN2; (+) strand; PAM type: NRG; PAM sequence: TGG
cagttggaataataccagct

SEQ ID NO: 43368 - DNA, 20 bp, Artificial Sequence
  Description of Artificial Sequence: Synthetic oligonucleotide
  Target: ATXN2; (+) strand; PAM type: NRG; PAM sequence: GGG
agttggaataataccagctt

SEQ ID NO: 43369 - DNA, 20 bp, Artificial Sequence
  Description of Artificial Sequence: Synthetic oligonucleotide
  Target: ATXN2; (+) strand; PAM type: NRG; PAM sequence: GGG
gttggaataataccagcttg

SEQ ID NO: 43370 - DNA, 20 bp, Artificial Sequence
  Description of Artificial Sequence: Synthetic oligonucleotide
  Target: ATXN2; (+) strand; PAM type: NRG; PAM sequence: GAG
tggaataataccagcttggg

SEQ ID NO: 43371 - DNA, 20 bp, Artificial Sequence
  Description of Artificial Sequence: Synthetic oligonucleotide
  Target: ATXN2; (+) strand; PAM type: NRG; PAM sequence: AAG
aataataccagcttggggag

SEQ ID NO: 43372 - DNA, 20 bp, Artificial Sequence
  Description of Artificial Sequence: Synthetic oligonucleotide
  Target: ATXN2; (+) strand; PAM type: NRG; PAM sequence: AAG
ataccagcttggggagaagc

SEQ ID NO: 43373 - DNA, 20 bp, Artificial Sequence
  Description of Artificial Sequence: Synthetic oligonucleotide
  Target: ATXN2; (+) strand; PAM type: NRG; PAM sequence: TGG
gcttggggagaagcaagaac

SEQ ID NO: 43374 - DNA, 20 bp, Artificial Sequence
  Description of Artificial Sequence: Synthetic oligonucleotide
  Target: ATXN2; (+) strand; PAM type: NRG; PAM sequence: TGG
agaagcaagaactggcccac

SEQ ID NO: 43375 - DNA, 20 bp, Artificial Sequence
  Description of Artificial Sequence: Synthetic oligonucleotide
  Target: ATXN2; (+) strand; PAM type: NRG; PAM sequence: GGG
gaagcaagaactggcccact

SEQ ID NO: 43376 - DNA, 20 bp, Artificial Sequence
  Description of Artificial Sequence: Synthetic oligonucleotide
  Target: ATXN2; (+) strand; PAM type: NRG; PAM sequence: GGG
aagcaagaactggcccactg

SEQ ID NO: 43377 - DNA, 20 bp, Artificial Sequence
  Description of Artificial Sequence: Synthetic oligonucleotide
  Target: ATXN2; (+) strand; PAM type: NRG; PAM sequence: GGG
agcaagaactggcccactgg

SEQ ID NO: 43378 - DNA, 20 bp, Artificial Sequence
  Description of Artificial Sequence: Synthetic oligonucleotide
  Target: ATXN2; (+) strand; PAM type: NRG; PAM sequence: TGG
atttccaatactgttctgtc

SEQ ID NO: 43379 - DNA, 20 bp, Artificial Sequence
  Description of Artificial Sequence: Synthetic oligonucleotide
  Target: ATXN2; (+) strand; PAM type: NRG; PAM sequence: GGG
tttccaatactgttctgtct

SEQ ID NO: 43380 - DNA, 20 bp, Artificial Sequence
  Description of Artificial Sequence: Synthetic oligonucleotide
  Target: ATXN2; (+) strand; PAM type: NRG; PAM sequence: GAG
tccaatactgttctgtctgg

SEQ ID NO: 43381 - DNA, 20 bp, Artificial Sequence
  Description of Artificial Sequence: Synthetic oligonucleotide
  Target: ATXN2; (+) strand; PAM type: NRG; PAM sequence: TGG
actgttctgtctgggagacc

SEQ ID NO: 43382 - DNA, 20 bp, Artificial Sequence
  Description of Artificial Sequence: Synthetic oligonucleotide
  Target: ATXN2; (+) strand; PAM type: NRG; PAM sequence: GGG
ctgttctgtctgggagacct

SEQ ID NO: 43383 - DNA, 20 bp, Artificial Sequence
  Description of Artificial Sequence: Synthetic oligonucleotide
  Target: ATXN2; (+) strand; PAM type: NRG; PAM sequence: GAG
tctgggagacctgggtctat

SEQ ID NO: 43384 - DNA, 20 bp, Artificial Sequence
  Description of Artificial Sequence: Synthetic oligonucleotide
  Target: ATXN2; (+) strand; PAM type: NRG; PAM sequence: TAG
agacctgggtctatgagttt

SEQ ID NO: 43385 - DNA, 20 bp, Artificial Sequence
  Description of Artificial Sequence: Synthetic oligonucleotide
  Target: ATXN2; (+) strand; PAM type: NRG; PAM sequence: AGG
gacctgggtctatgagtttt

SEQ ID NO: 43386 - DNA, 20 bp, Artificial Sequence
  Description of Artificial Sequence: Synthetic oligonucleotide
  Target: ATXN2; (+) strand; PAM type: NRG; PAM sequence: GGG
acctgggtctatgagtttta

SEQ ID NO: 43387 - DNA, 20 bp, Artificial Sequence
  Description of Artificial Sequence: Synthetic oligonucleotide
  Target: ATXN2; (+) strand; PAM type: NRG; PAM sequence: GGG
cctgggtctatgagttttag

SEQ ID NO: 43388 - DNA, 20 bp, Artificial Sequence
  Description of Artificial Sequence: Synthetic oligonucleotide
  Target: ATXN2; (+) strand; PAM type: NRG; PAM sequence: TGG
tgagttttaggggataatct

SEQ ID NO: 43389 - DNA, 20 bp, Artificial Sequence
  Description of Artificial Sequence: Synthetic oligonucleotide
  Target: ATXN2; (+) strand; PAM type: NRG; PAM sequence: TAG
ttaggggataatcttggaac

SEQ ID NO: 43390 - DNA, 20 bp, Artificial Sequence
  Description of Artificial Sequence: Synthetic oligonucleotide
  Target: ATXN2; (+) strand; PAM type: NRG; PAM sequence: AAG
ggggataatcttggaactag

SEQ ID NO: 43391 - DNA, 20 bp, Artificial Sequence
  Description of Artificial Sequence: Synthetic oligonucleotide
  Target: ATXN2; (+) strand; PAM type: NRG; PAM sequence: AAG
ataatcttggaactagaaga

SEQ ID NO: 43392 - DNA, 20 bp, Artificial Sequence
  Description of Artificial Sequence: Synthetic oligonucleotide
  Target: ATXN2; (+) strand; PAM type: NRG; PAM sequence: AGG
taatcttggaactagaagaa

SEQ ID NO: 43393 - DNA, 20 bp, Artificial Sequence
  Description of Artificial Sequence: Synthetic oligonucleotide
  Target: ATXN2; (+) strand; PAM type: NRG; PAM sequence: GGG
aatcttggaactagaagaaa

SEQ ID NO: 43394 - DNA, 20 bp, Artificial Sequence
  Description of Artificial Sequence: Synthetic oligonucleotide
  Target: ATXN2; (+) strand; PAM type: NRG; PAM sequence: CAG
aaatgtatttattacattct

SEQ ID NO: 43395 - DNA, 20 bp, Artificial Sequence
  Description of Artificial Sequence: Synthetic oligonucleotide
  Target: ATXN2; (+) strand; PAM type: NRG; PAM sequence: AAG
gttcaaatgttacttcctaa

SEQ ID NO: 43396 - DNA, 20 bp, Artificial Sequence
  Description of Artificial Sequence: Synthetic oligonucleotide
  Target: ATXN2; (+) strand; PAM type: NRG; PAM sequence: GAG
tcaaatgttacttcctaaaa

SEQ ID NO: 43397 - DNA, 20 bp, Artificial Sequence
  Description of Artificial Sequence: Synthetic oligonucleotide
  Target: ATXN2; (+) strand; PAM type: NRG; PAM sequence: AGG
caaatgttacttcctaaaag

SEQ ID NO: 43398 - DNA, 20 bp, Artificial Sequence
  Description of Artificial Sequence: Synthetic oligonucleotide
  Target: ATXN2; (+) strand; PAM type: NRG; PAM sequence: CAG
ttacttcctaaaagaggctt

SEQ ID NO: 43399 - DNA, 20 bp, Artificial Sequence
  Description of Artificial Sequence: Synthetic oligonucleotide
  Target: ATXN2; (+) strand; PAM type: NRG; PAM sequence: AGG
tacttcctaaaagaggcttc

SEQ ID NO: 43400 - DNA, 20 bp, Artificial Sequence
  Description of Artificial Sequence: Synthetic oligonucleotide
  Target: ATXN2; (+) strand; PAM type: NRG; PAM sequence: AAG
agaggcttcaggcttctctg

SEQ ID NO: 43401 - DNA, 20 bp, Artificial Sequence
  Description of Artificial Sequence: Synthetic oligonucleotide
  Target: ATXN2; (+) strand; PAM type: NRG; PAM sequence: TAG
ttcaggcttctctgaagatc

SEQ ID NO: 43402 - DNA, 20 bp, Artificial Sequence
  Description of Artificial Sequence: Synthetic oligonucleotide
  Target: ATXN2; (+) strand; PAM type: NRG; PAM sequence: AGG
tcaggcttctctgaagatct

SEQ ID NO: 43403 - DNA, 20 bp, Artificial Sequence
  Description of Artificial Sequence: Synthetic oligonucleotide
  Target: ATXN2; (+) strand; PAM type: NRG; PAM sequence: TAG
gtaaataaaactgtcctctc

SEQ ID NO: 43404 - DNA, 20 bp, Artificial Sequence
  Description of Artificial Sequence: Synthetic oligonucleotide
  Target: ATXN2; (+) strand; PAM type: NRG; PAM sequence: TAG
tgttttcttttccaaaatgt

SEQ ID NO: 43405 - DNA, 20 bp, Artificial Sequence
  Description of Artificial Sequence: Synthetic oligonucleotide
  Target: ATXN2; (+) strand; PAM type: NRG; PAM sequence: AGG
gttttcttttccaaaatgtt

SEQ ID NO: 43406 - DNA, 20 bp, Artificial Sequence
  Description of Artificial Sequence: Synthetic oligonucleotide
  Target: ATXN2; (+) strand; PAM type: NRG; PAM sequence: TGG
ccaaaatgttaggaatttgc

SEQ ID NO: 43407 - DNA, 20 bp, Artificial Sequence
  Description of Artificial Sequence: Synthetic oligonucleotide
  Target: ATXN2; (+) strand; PAM type: NRG; PAM sequence: AAG
ttgctggcaatcaaaaccac

SEQ ID NO: 43408 - DNA, 20 bp, Artificial Sequence
  Description of Artificial Sequence: Synthetic oligonucleotide
  Target: ATXN2; (+) strand; PAM type: NRG; PAM sequence: AAG
atcaaaaccacaagtatatg

SEQ ID NO: 43409 - DNA, 20 bp, Artificial Sequence
  Description of Artificial Sequence: Synthetic oligonucleotide
  Target: ATXN2; (+) strand; PAM type: NRG; PAM sequence: CAG
aaccacaagtatatgaagaa

SEQ ID NO: 43410 - DNA, 20 bp, Artificial Sequence
  Description of Artificial Sequence: Synthetic oligonucleotide
  Target: ATXN2; (+) strand; PAM type: NRG; PAM sequence: CAG
cacaagtatatgaagaacag

SEQ ID NO: 43411 - DNA, 20 bp, Artificial Sequence
  Description of Artificial Sequence: Synthetic oligonucleotide
  Target: ATXN2; (+) strand; PAM type: NRG; PAM sequence: AAG
acagcagcaattactaacat

SEQ ID NO: 43412 - DNA, 20 bp, Artificial Sequence
  Description of Artificial Sequence: Synthetic oligonucleotide
  Target: ATXN2; (+) strand; PAM type: NRG; PAM sequence: AAG
ctctcctaactaaatgtatc

SEQ ID NO: 43413 - DNA, 20 bp, Artificial Sequence
  Description of Artificial Sequence: Synthetic oligonucleotide
  Target: ATXN2; (+) strand; PAM type: NRG; PAM sequence: CAG
atcaagtgattctcctgcct

SEQ ID NO: 43414 - DNA, 20 bp, Artificial Sequence
  Description of Artificial Sequence: Synthetic oligonucleotide
  Target: ATXN2; (+) strand; PAM type: NRG; PAM sequence: TGG
gattctcctgcctcagcctc

SEQ ID NO: 43415 - DNA, 20 bp, Artificial Sequence
  Description of Artificial Sequence: Synthetic oligonucleotide
  Target: ATXN2; (+) strand; PAM type: NRG; PAM sequence: GAG
ttctcctgcctcagcctctg

SEQ ID NO: 43416 - DNA, 20 bp, Artificial Sequence
  Description of Artificial Sequence: Synthetic oligonucleotide
  Target: ATXN2; (+) strand; PAM type: NRG; PAM sequence: TAG
tcctgcctcagcctctggag

SEQ ID NO: 43417 - DNA, 20 bp, Artificial Sequence
  Description of Artificial Sequence: Synthetic oligonucleotide
  Target: ATXN2; (+) strand; PAM type: NRG; PAM sequence: TGG
gcctcagcctctggagtagc

SEQ ID NO: 43418 - DNA, 20 bp, Artificial Sequence
  Description of Artificial Sequence: Synthetic oligonucleotide
  Target: ATXN2; (+) strand; PAM type: NRG; PAM sequence: GGG
cctcagcctctggagtagct

SEQ ID NO: 43419 - DNA, 20 bp, Artificial Sequence
  Description of Artificial Sequence: Synthetic oligonucleotide
  Target: ATXN2; (+) strand; PAM type: NRG; PAM sequence: AAG
ctctggagtagctgggatta

SEQ ID NO: 43420 - DNA, 20 bp, Artificial Sequence
  Description of Artificial Sequence: Synthetic oligonucleotide
  Target: ATXN2; (+) strand; PAM type: NRG; PAM sequence: AGG
tctggagtagctgggattaa

SEQ ID NO: 43421 - DNA, 20 bp, Artificial Sequence
  Description of Artificial Sequence: Synthetic oligonucleotide
  Target: ATXN2; (+) strand; PAM type: NRG; PAM sequence: CAG
aaggcactcgccaccacaac

SEQ ID NO: 43422 - DNA, 20 bp, Artificial Sequence
  Description of Artificial Sequence: Synthetic oligonucleotide
  Target: ATXN2; (+) strand; PAM type: NRG; PAM sequence: TAG
agctaatttttttgtatttt

SEQ ID NO: 43423 - DNA, 20 bp, Artificial Sequence
  Description of Artificial Sequence: Synthetic oligonucleotide
  Target: ATXN2; (+) strand; PAM type: NRG; PAM sequence: TAG
taatttttttgtatttttag

SEQ ID NO: 43424 - DNA, 20 bp, Artificial Sequence
  Description of Artificial Sequence: Synthetic oligonucleotide
  Target: ATXN2; (+) strand; PAM type: NRG; PAM sequence: GAG
atttttttgtatttttagta

SEQ ID NO: 43425 - DNA, 20 bp, Artificial Sequence
  Description of Artificial Sequence: Synthetic oligonucleotide
  Target: ATXN2; (+) strand; PAM type: NRG; PAM sequence: CGG
ttttgtatttttagtagaga

SEQ ID NO: 43426 - DNA, 20 bp, Artificial Sequence
  Description of Artificial Sequence: Synthetic oligonucleotide
  Target: ATXN2; (+) strand; PAM type: NRG; PAM sequence: GGG
tttgtatttttagtagagac

SEQ ID NO: 43427 - DNA, 20 bp, Artificial Sequence
  Description of Artificial Sequence: Synthetic oligonucleotide
  Target: ATXN2; (+) strand; PAM type: NRG; PAM sequence: GGG
ttgtatttttagtagagacg

SEQ ID NO: 43428 - DNA, 20 bp, Artificial Sequence
  Description of Artificial Sequence: Synthetic oligonucleotide
  Target: ATXN2; (+) strand; PAM type: NRG; PAM sequence: TGG
gagacggggtttcaccatgc

SEQ ID NO: 43429 - DNA, 20 bp, Artificial Sequence
  Description of Artificial Sequence: Synthetic oligonucleotide
  Target: ATXN2; (+) strand; PAM type: NRG; PAM sequence: CAG
cggggtttcaccatgctggc

SEQ ID NO: 43430 - DNA, 20 bp, Artificial Sequence
  Description of Artificial Sequence: Synthetic oligonucleotide
  Target: ATXN2; (+) strand; PAM type: NRG; PAM sequence: AGG
ggggtttcaccatgctggcc

SEQ ID NO: 43431 - DNA, 20 bp, Artificial Sequence
  Description of Artificial Sequence: Synthetic oligonucleotide
  Target: ATXN2; (+) strand; PAM type: NRG; PAM sequence: TGG
tttcaccatgctggccaggc

SEQ ID NO: 43432 - DNA, 20 bp, Artificial Sequence
  Description of Artificial Sequence: Synthetic oligonucleotide
  Target: ATXN2; (+) strand; PAM type: NRG; PAM sequence: CAG
tggtctcaaactcctgacct

SEQ ID NO: 43433 - DNA, 20 bp, Artificial Sequence
  Description of Artificial Sequence: Synthetic oligonucleotide
  Target: ATXN2; (+) strand; PAM type: NRG; PAM sequence: AGG
ggtctcaaactcctgacctc

SEQ ID NO: 43434 - DNA, 20 bp, Artificial Sequence
  Description of Artificial Sequence: Synthetic oligonucleotide
  Target: ATXN2; (+) strand; PAM type: NRG; PAM sequence: TGG
ctcaggtgatctgcctacct

SEQ ID NO: 43435 - DNA, 20 bp, Artificial Sequence
  Description of Artificial Sequence: Synthetic oligonucleotide
  Target: ATXN2; (+) strand; PAM type: NRG; PAM sequence: AAG
ctgcctaccttggcctccca

SEQ ID NO: 43436 - DNA, 20 bp, Artificial Sequence
  Description of Artificial Sequence: Synthetic oligonucleotide
  Target: ATXN2; (+) strand; PAM type: NRG; PAM sequence: TGG
accttggcctcccaaagtgc

SEQ ID NO: 43437 - DNA, 20 bp, Artificial Sequence
  Description of Artificial Sequence: Synthetic oligonucleotide
  Target: ATXN2; (+) strand; PAM type: NRG; PAM sequence: GGG
ccttggcctcccaaagtgct

SEQ ID NO: 43438 - DNA, 20 bp, Artificial Sequence
  Description of Artificial Sequence: Synthetic oligonucleotide
  Target: ATXN2; (+) strand; PAM type: NRG; PAM sequence: CAG
ctcccaaagtgctgggatta

SEQ ID NO: 43439 - DNA, 20 bp, Artificial Sequence
  Description of Artificial Sequence: Synthetic oligonucleotide
  Target: ATXN2; (+) strand; PAM type: NRG; PAM sequence: AGG
tcccaaagtgctgggattac

SEQ ID NO: 43440 - DNA, 20 bp, Artificial Sequence
  Description of Artificial Sequence: Synthetic oligonucleotide
  Target: ATXN2; (+) strand; PAM type: NRG; PAM sequence: GAG
agtgctgggattacaggcat

SEQ ID NO: 43441 - DNA, 20 bp, Artificial Sequence
  Description of Artificial Sequence: Synthetic oligonucleotide
  Target: ATXN2; (+) strand; PAM type: NRG; PAM sequence: CAG
caggcatgagccaccatgcc

SEQ ID NO: 43442 - DNA, 20 bp, Artificial Sequence
  Description of Artificial Sequence: Synthetic oligonucleotide
  Target: ATXN2; (+) strand; PAM type: NRG; PAM sequence: TAG
ccagccctacacattcttta

SEQ ID NO: 43443 - DNA, 20 bp, Artificial Sequence
  Description of Artificial Sequence: Synthetic oligonucleotide
  Target: ATXN2; (+) strand; PAM type: NRG; PAM sequence: AAG
acattctttatagcaacatc

SEQ ID NO: 43444 - DNA, 20 bp, Artificial Sequence
  Description of Artificial Sequence: Synthetic oligonucleotide
  Target: ATXN2; (+) strand; PAM type: NRG; PAM sequence: AGG
cattctttatagcaacatca

SEQ ID NO: 43445 - DNA, 20 bp, Artificial Sequence
  Description of Artificial Sequence: Synthetic oligonucleotide
  Target: ATXN2; (+) strand; PAM type: NRG; PAM sequence: CAG
caacatcaaggtccactgtg

SEQ ID NO: 43446 - DNA, 20 bp, Artificial Sequence
  Description of Artificial Sequence: Synthetic oligonucleotide
  Target: ATXN2; (+) strand; PAM type: NRG; PAM sequence: AAG
aggtccactgtgcagtaatt

SEQ ID NO: 43447 - DNA, 20 bp, Artificial Sequence
  Description of Artificial Sequence: Synthetic oligonucleotide
  Target: ATXN2; (+) strand; PAM type: NRG; PAM sequence: AGG
ggtccactgtgcagtaatta

SEQ ID NO: 43448 - DNA, 20 bp, Artificial Sequence
  Description of Artificial Sequence: Synthetic oligonucleotide
  Target: ATXN2; (+) strand; PAM type: NRG; PAM sequence: GAG
tgcagtaattaaggaaactt

SEQ ID NO: 43449 - DNA, 20 bp, Artificial Sequence
  Description of Artificial Sequence: Synthetic oligonucleotide
  Target: ATXN2; (+) strand; PAM type: NRG; PAM sequence: AAG
attaaggaaacttgagaccc

SEQ ID NO: 43450 - DNA, 20 bp, Artificial Sequence
  Description of Artificial Sequence: Synthetic oligonucleotide
  Target: ATXN2; (+) strand; PAM type: NRG; PAM sequence: TAG
aggaaacttgagacccaagt

SEQ ID NO: 43451 - DNA, 20 bp, Artificial Sequence
  Description of Artificial Sequence: Synthetic oligonucleotide
  Target: ATXN2; (+) strand; PAM type: NRG; PAM sequence: AAG
ttgagacccaagttagtcaa

SEQ ID NO: 43452 - DNA, 20 bp, Artificial Sequence
  Description of Artificial Sequence: Synthetic oligonucleotide
  Target: ATXN2; (+) strand; PAM type: NRG; PAM sequence: AGG
tgagacccaagttagtcaaa

SEQ ID NO: 43453 - DNA, 20 bp, Artificial Sequence
  Description of Artificial Sequence: Synthetic oligonucleotide
  Target: ATXN2; (+) strand; PAM type: NRG; PAM sequence: GGG
gagacccaagttagtcaaaa

SEQ ID NO: 43454 - DNA, 20 bp, Artificial Sequence
  Description of Artificial Sequence: Synthetic oligonucleotide
  Target: ATXN2; (+) strand; PAM type: NRG; PAM sequence: GGG
agacccaagttagtcaaaag

SEQ ID NO: 43455 - DNA, 20 bp, Artificial Sequence
  Description of Artificial Sequence: Synthetic oligonucleotide
  Target: ATXN2; (+) strand; PAM type: NRG; PAM sequence: AAG
cccaagttagtcaaaagggg

SEQ ID NO: 43456 - DNA, 20 bp, Artificial Sequence
  Description of Artificial Sequence: Synthetic oligonucleotide
  Target: ATXN2; (+) strand; PAM type: NRG; PAM sequence: AAG
tcaaaaggggaagataataa

SEQ ID NO: 43457 - DNA, 20 bp, Artificial Sequence
  Description of Artificial Sequence: Synthetic oligonucleotide
  Target: ATXN2; (+) strand; PAM type: NRG; PAM sequence: CAG
aaaggggaagataataaaag

SEQ ID NO: 43458 - DNA, 20 bp, Artificial Sequence
  Description of Artificial Sequence: Synthetic oligonucleotide
  Target: ATXN2; (+) strand; PAM type: NRG; PAM sequence: AGG
aaggggaagataataaaagc

SEQ ID NO: 43459 - DNA, 20 bp, Artificial Sequence
  Description of Artificial Sequence: Synthetic oligonucleotide
  Target: ATXN2; (+) strand; PAM type: NRG; PAM sequence: GGG
aggggaagataataaaagca

SEQ ID NO: 43460 - DNA, 20 bp, Artificial Sequence
  Description of Artificial Sequence: Synthetic oligonucleotide
  Target: ATXN2; (+) strand; PAM type: NRG; PAM sequence: AAG
ttgtatcccatatgacttcc

SEQ ID NO: 43461 - DNA, 20 bp, Artificial Sequence
  Description of Artificial Sequence: Synthetic oligonucleotide
  Target: ATXN2; (+) strand; PAM type: NRG; PAM sequence: TAG
acttccaagtatatatctaa

SEQ ID NO: 43462 - DNA, 20 bp, Artificial Sequence
  Description of Artificial Sequence: Synthetic oligonucleotide
  Target: ATXN2; (+) strand; PAM type: NRG; PAM sequence: AGG
cttccaagtatatatctaat

SEQ ID NO: 43463 - DNA, 20 bp, Artificial Sequence
  Description of Artificial Sequence: Synthetic oligonucleotide
  Target: ATXN2; (+) strand; PAM type: NRG; PAM sequence: CAG
taccattataaacctaactg

SEQ ID NO: 43464 - DNA, 20 bp, Artificial Sequence
  Description of Artificial Sequence: Synthetic oligonucleotide
  Target: ATXN2; (+) strand; PAM type: NRG; PAM sequence: GAG
ccattataaacctaactgca

SEQ ID NO: 43465 - DNA, 20 bp, Artificial Sequence
  Description of Artificial Sequence: Synthetic oligonucleotide
  Target: ATXN2; (+) strand; PAM type: NRG; PAM sequence: CAG
ataaacctaactgcagagct

SEQ ID NO: 43466 - DNA, 20 bp, Artificial Sequence
  Description of Artificial Sequence: Synthetic oligonucleotide
  Target: ATXN2; (+) strand; PAM type: NRG; PAM sequence: AAG
aactgcagagctcagattca

SEQ ID NO: 43467 - DNA, 20 bp, Artificial Sequence
  Description of Artificial Sequence: Synthetic oligonucleotide
  Target: ATXN2; (+) strand; PAM type: NRG; PAM sequence: AGG
actgcagagctcagattcaa

SEQ ID NO: 43468 - DNA, 20 bp, Artificial Sequence
  Description of Artificial Sequence: Synthetic oligonucleotide
  Target: ATXN2; (+) strand; PAM type: NRG; PAM sequence: TAG
agagctcagattcaaaggtt

SEQ ID NO: 43469 - DNA, 20 bp, Artificial Sequence
  Description of Artificial Sequence: Synthetic oligonucleotide
  Target: ATXN2; (+) strand; PAM type: NRG; PAM sequence: GAG
agctcagattcaaaggttta

SEQ ID NO: 43470 - DNA, 20 bp, Artificial Sequence
  Description of Artificial Sequence: Synthetic oligonucleotide
  Target: ATXN2; (+) strand; PAM type: NRG; PAM sequence: TGG
attcaaaggtttagagaaaa

SEQ ID NO: 43471 - DNA, 20 bp, Artificial Sequence
  Description of Artificial Sequence: Synthetic oligonucleotide
  Target: ATXN2; (+) strand; PAM type: NRG; PAM sequence: CAG
atggttcgattatttcattt

SEQ ID NO: 43472 - DNA, 20 bp, Artificial Sequence
  Description of Artificial Sequence: Synthetic oligonucleotide
  Target: ATXN2; (+) strand; PAM type: NRG; PAM sequence: AAG
ttcagtgttttttttttttt

SEQ ID NO: 43473 - DNA, 20 bp, Artificial Sequence
  Description of Artificial Sequence: Synthetic oligonucleotide
  Target: ATXN2; (+) strand; PAM type: NRG; PAM sequence: AAG
tttttttttttttaagtcac

SEQ ID NO: 43474 - DNA, 20 bp, Artificial Sequence
  Description of Artificial Sequence: Synthetic oligonucleotide
  Target: ATXN2; (+) strand; PAM type: NRG; PAM sequence: AGG
ttttttttttttaagtcaca

SEQ ID NO: 43475 - DNA, 20 bp, Artificial Sequence
  Description of Artificial Sequence: Synthetic oligonucleotide
  Target: ATXN2; (+) strand; PAM type: NRG; PAM sequence: GGG
tttttttttttaagtcacaa

SEQ ID NO: 43476 - DNA, 20 bp, Artificial Sequence
  Description of Artificial Sequence: Synthetic oligonucleotide
  Target: ATXN2; (+) strand; PAM type: NRG; PAM sequence: CGG
tttttaagtcacaagggtca

SEQ ID NO: 43477 - DNA, 20 bp, Artificial Sequence
  Description of Artificial Sequence: Synthetic oligonucleotide
  Target: ATXN2; (+) strand; PAM type: NRG; PAM sequence: AAG
ttaagtcacaagggtcacgg

SEQ ID NO: 43478 - DNA, 20 bp, Artificial Sequence
  Description of Artificial Sequence: Synthetic oligonucleotide
  Target: ATXN2; (+) strand; PAM type: NRG; PAM sequence: TAG
acaactgccatttttccaat

SEQ ID NO: 43479 - DNA, 20 bp, Artificial Sequence
  Description of Artificial Sequence: Synthetic oligonucleotide
  Target: ATXN2; (+) strand; PAM type: NRG; PAM sequence: AAG
ccatttttccaattagtaaa

SEQ ID NO: 43480 - DNA, 20 bp, Artificial Sequence
  Description of Artificial Sequence: Synthetic oligonucleotide
  Target: ATXN2; (+) strand; PAM type: NRG; PAM sequence: GAG
atttttccaattagtaaaaa

SEQ ID NO: 43481 - DNA, 20 bp, Artificial Sequence
  Description of Artificial Sequence: Synthetic oligonucleotide
  Target: ATXN2; (+) strand; PAM type: NRG; PAM sequence: GAG
aaaatctataatgctattct

SEQ ID NO: 43482 - DNA, 20 bp, Artificial Sequence
  Description of Artificial Sequence: Synthetic oligonucleotide
  Target: ATXN2; (+) strand; PAM type: NRG; PAM sequence: CAG
ttattctcaaaatttatttc

SEQ ID NO: 43483 - DNA, 20 bp, Artificial Sequence
  Description of Artificial Sequence: Synthetic oligonucleotide
  Target: ATXN2; (+) strand; PAM type: NRG; PAM sequence: AAG
aatttatttccagaccatct

SEQ ID NO: 43484 - DNA, 20 bp, Artificial Sequence
  Description of Artificial Sequence: Synthetic oligonucleotide
  Target: ATXN2; (+) strand; PAM type: NRG; PAM sequence: AAG
gaccatctaagtaatgtcaa

SEQ ID NO: 43485 - DNA, 20 bp, Artificial Sequence
  Description of Artificial Sequence: Synthetic oligonucleotide
  Target: ATXN2; (+) strand; PAM type: NRG; PAM sequence: CAG
aagtaatgtcaaaagattaa

SEQ ID NO: 43486 - DNA, 20 bp, Artificial Sequence
  Description of Artificial Sequence: Synthetic oligonucleotide
  Target: ATXN2; (+) strand; PAM type: NRG; PAM sequence: TAG
atgtcaaaagattaacagaa

SEQ ID NO: 43487 - DNA, 20 bp, Artificial Sequence
  Description of Artificial Sequence: Synthetic oligonucleotide
  Target: ATXN2; (+) strand; PAM type: NRG; PAM sequence: AAG
aaagattaacagaatagctg

SEQ ID NO: 43488 - DNA, 20 bp, Artificial Sequence
  Description of Artificial Sequence: Synthetic oligonucleotide
  Target: ATXN2; (+) strand; PAM type: NRG; PAM sequence: CAG
gattaacagaatagctgaag

SEQ ID NO: 43489 - DNA, 20 bp, Artificial Sequence
  Description of Artificial Sequence: Synthetic oligonucleotide
  Target: ATXN2; (+) strand; PAM type: NRG; PAM sequence: TGG
ttttttttttttttttgaaa

SEQ ID NO: 43490 - DNA, 20 bp, Artificial Sequence
  Description of Artificial Sequence: Synthetic oligonucleotide
  Target: ATXN2; (+) strand; PAM type: NRG; PAM sequence: GAG
ttttttttttttttgaaatg

SEQ ID NO: 43491 - DNA, 20 bp, Artificial Sequence
  Description of Artificial Sequence: Synthetic oligonucleotide
  Target: ATXN2; (+) strand; PAM type: NRG; PAM sequence: TAG
tgaaatggagtctcactcta

SEQ ID NO: 43492 - DNA, 20 bp, Artificial Sequence
  Description of Artificial Sequence: Synthetic oligonucleotide
  Target: ATXN2; (+) strand; PAM type: NRG; PAM sequence: CAG
tggagtctcactctatagcc

SEQ ID NO: 43493 - DNA, 20 bp, Artificial Sequence
  Description of Artificial Sequence: Synthetic oligonucleotide
  Target: ATXN2; (+) strand; PAM type: NRG; PAM sequence: AGG
ggagtctcactctatagccc

SEQ ID NO: 43494 - DNA, 20 bp, Artificial Sequence
  Description of Artificial Sequence: Synthetic oligonucleotide
  Target: ATXN2; (+) strand; PAM type: NRG; PAM sequence: TGG
tctcactctatagcccaggc

SEQ ID NO: 43495 - DNA, 20 bp, Artificial Sequence
  Description of Artificial Sequence: Synthetic oligonucleotide
  Target: ATXN2; (+) strand; PAM type: NRG; PAM sequence: GAG
tcactctatagcccaggctg

SEQ ID NO: 43496 - DNA, 20 bp, Artificial Sequence
  Description of Artificial Sequence: Synthetic oligonucleotide
  Target: ATXN2; (+) strand; PAM type: NRG; PAM sequence: CAG
ctatagcccaggctggagtg

SEQ ID NO: 43497 - DNA, 20 bp, Artificial Sequence
  Description of Artificial Sequence: Synthetic oligonucleotide
  Target: ATXN2; (+) strand; PAM type: NRG; PAM sequence: TGG
tagcccaggctggagtgcag

SEQ ID NO: 43498 - DNA, 20 bp, Artificial Sequence
  Description of Artificial Sequence: Synthetic oligonucleotide
  Target: ATXN2; (+) strand; PAM type: NRG; PAM sequence: CGG
tcaccgcaacctacacctcc

SEQ ID NO: 43499 - DNA, 20 bp, Artificial Sequence
  Description of Artificial Sequence: Synthetic oligonucleotide
  Target: ATXN2; (+) strand; PAM type: NRG; PAM sequence: GGG
caccgcaacctacacctccc

SEQ ID NO: 43500 - DNA, 20 bp, Artificial Sequence
  Description of Artificial Sequence: Synthetic oligonucleotide
  Target: ATXN2; (+) strand; PAM type: NRG; PAM sequence: TGG
aacctacacctcccgggtcc

SEQ ID NO: 43501 - DNA, 20 bp, Artificial Sequence
  Description of Artificial Sequence: Synthetic oligonucleotide
  Target: ATXN2; (+) strand; PAM type: NRG; PAM sequence: AAG
cacctcccgggtcctggttc

SEQ ID NO: 43502 - DNA, 20 bp, Artificial Sequence
  Description of Artificial Sequence: Synthetic oligonucleotide
  Target: ATXN2; (+) strand; PAM type: NRG; PAM sequence: CAG
ttcaagcaattctcctgcct

SEQ ID NO: 43503 - DNA, 20 bp, Artificial Sequence
  Description of Artificial Sequence: Synthetic oligonucleotide
  Target: ATXN2; (+) strand; PAM type: NRG; PAM sequence: GAG
ttctcctgcctcagcctcct

SEQ ID NO: 43504 - DNA, 20 bp, Artificial Sequence
  Description of Artificial Sequence: Synthetic oligonucleotide
  Target: ATXN2; (+) strand; PAM type: NRG; PAM sequence: CAG
tcctgcctcagcctcctgag

SEQ ID NO: 43505 - DNA, 20 bp, Artificial Sequence
  Description of Artificial Sequence: Synthetic oligonucleotide
  Target: ATXN2; (+) strand; PAM type: NRG; PAM sequence: TGG
gcctcagcctcctgagcagc

SEQ ID NO: 43506 - DNA, 20 bp, Artificial Sequence
  Description of Artificial Sequence: Synthetic oligonucleotide
  Target: ATXN2; (+) strand; PAM type: NRG; PAM sequence: GGG
cctcagcctcctgagcagct

SEQ ID NO: 43507 - DNA, 20 bp, Artificial Sequence
  Description of Artificial Sequence: Synthetic oligonucleotide
  Target: ATXN2; (+) strand; PAM type: NRG; PAM sequence: AAG
tcctgagcagctgggattac

SEQ ID NO: 43508 - DNA, 20 bp, Artificial Sequence
  Description of Artificial Sequence: Synthetic oligonucleotide
  Target: ATXN2; (+) strand; PAM type: NRG; PAM sequence: CAG
caagaacgcgccacaatgcc

SEQ ID NO: 43509 - DNA, 20 bp, Artificial Sequence
  Description of Artificial Sequence: Synthetic oligonucleotide
  Target: ATXN2; (+) strand; PAM type: NRG; PAM sequence: TAG
ccagctaatttttgtatttt

SEQ ID NO: 43510 - DNA, 20 bp, Artificial Sequence
  Description of Artificial Sequence: Synthetic oligonucleotide
  Target: ATXN2; (+) strand; PAM type: NRG; PAM sequence: TAG
gctaatttttgtatttttag

SEQ ID NO: 43511 - DNA, 20 bp, Artificial Sequence
  Description of Artificial Sequence: Synthetic oligonucleotide
  Target: ATXN2; (+) strand; PAM type: NRG; PAM sequence: GAG
taatttttgtatttttagta

SEQ ID NO: 43512 - DNA, 20 bp, Artificial Sequence
  Description of Artificial Sequence: Synthetic oligonucleotide
  Target: ATXN2; (+) strand; PAM type: NRG; PAM sequence: TGG
gagacgacgtttcaccatgt

SEQ ID NO: 43513 - DNA, 20 bp, Artificial Sequence
  Description of Artificial Sequence: Synthetic oligonucleotide
  Target: ATXN2; (+) strand; PAM type: NRG; PAM sequence: CAG
cgacgtttcaccatgttggc

SEQ ID NO: 43514 - DNA, 20 bp, Artificial Sequence
  Description of Artificial Sequence: Synthetic oligonucleotide
  Target: ATXN2; (+) strand; PAM type: NRG; PAM sequence: AGG
gacgtttcaccatgttggcc

SEQ ID NO: 43515 - DNA, 20 bp, Artificial Sequence
  Description of Artificial Sequence: Synthetic oligonucleotide
  Target: ATXN2; (+) strand; PAM type: NRG; PAM sequence: TGG
tttcaccatgttggccaggc

SEQ ID NO: 43516 - DNA, 20 bp, Artificial Sequence
  Description of Artificial Sequence: Synthetic oligonucleotide
  Target: ATXN2; (+) strand; PAM type: NRG; PAM sequence: CAG
acctcgtgatccacccgcct

SEQ ID NO: 43517 - DNA, 20 bp, Artificial Sequence
  Description of Artificial Sequence: Synthetic oligonucleotide
  Target: ATXN2; (+) strand; PAM type: NRG; PAM sequence: AAG
ccacccgcctcagcctcccc

SEQ ID NO: 43518 - DNA, 20 bp, Artificial Sequence
  Description of Artificial Sequence: Synthetic oligonucleotide
  Target: ATXN2; (+) strand; PAM type: NRG; PAM sequence: TGG
gcctcagcctccccaagtgc

SEQ ID NO: 43519 - DNA, 20 bp, Artificial Sequence
  Description of Artificial Sequence: Synthetic oligonucleotide
  Target: ATXN2; (+) strand; PAM type: NRG; PAM sequence: GGG
cctcagcctccccaagtgct

SEQ ID NO: 43520 - DNA, 20 bp, Artificial Sequence
  Description of Artificial Sequence: Synthetic oligonucleotide
  Target: ATXN2; (+) strand; PAM type: NRG; PAM sequence: CAG
ctccccaagtgctgggatta

SEQ ID NO: 43521 - DNA, 20 bp, Artificial Sequence
  Description of Artificial Sequence: Synthetic oligonucleotide
  Target: ATXN2; (+) strand; PAM type: NRG; PAM sequence: GAG
agtgctgggattacagccgt

SEQ ID NO: 43522 - DNA, 20 bp, Artificial Sequence
  Description of Artificial Sequence: Synthetic oligonucleotide
  Target: ATXN2; (+) strand; PAM type: NRG; PAM sequence: CGG
cgtgagccactgcgcctgac

SEQ ID NO: 43523 - DNA, 20 bp, Artificial Sequence
  Description of Artificial Sequence: Synthetic oligonucleotide
  Target: ATXN2; (+) strand; PAM type: NRG; PAM sequence: AAG
ccactgcgcctgaccggctg

SEQ ID NO: 43524 - DNA, 20 bp, Artificial Sequence
  Description of Artificial Sequence: Synthetic oligonucleotide
  Target: ATXN2; (+) strand; PAM type: NRG; PAM sequence: AAG
ctgcgcctgaccggctgaag

SEQ ID NO: 43525 - DNA, 20 bp, Artificial Sequence
  Description of Artificial Sequence: Synthetic oligonucleotide
  Target: ATXN2; (+) strand; PAM type: NRG; PAM sequence: TGG
ttttaaaatttttgttttct

SEQ ID NO: 43526 - DNA, 20 bp, Artificial Sequence
  Description of Artificial Sequence: Synthetic oligonucleotide
  Target: ATXN2; (+) strand; PAM type: NRG; PAM sequence: TAG
taaaatttttgttttcttgg

SEQ ID NO: 43527 - DNA, 20 bp, Artificial Sequence
  Description of Artificial Sequence: Synthetic oligonucleotide
  Target: ATXN2; (+) strand; PAM type: NRG; PAM sequence: AAG
tttgttttcttggtagtctt

SEQ ID NO: 43528 - DNA, 20 bp, Artificial Sequence
  Description of Artificial Sequence: Synthetic oligonucleotide
  Target: ATXN2; (+) strand; PAM type: NRG; PAM sequence: AAG
tggtagtcttaagataattg

SEQ ID NO: 43529 - DNA, 20 bp, Artificial Sequence
  Description of Artificial Sequence: Synthetic oligonucleotide
  Target: ATXN2; (+) strand; PAM type: NRG; PAM sequence: AAG
tcttaagataattgaagacc

SEQ ID NO: 43530 - DNA, 20 bp, Artificial Sequence
  Description of Artificial Sequence: Synthetic oligonucleotide
  Target: ATXN2; (+) strand; PAM type: NRG; PAM sequence: AGG
cttaagataattgaagacca

SEQ ID NO: 43531 - DNA, 20 bp, Artificial Sequence
  Description of Artificial Sequence: Synthetic oligonucleotide
  Target: ATXN2; (+) strand; PAM type: NRG; PAM sequence: AAG
aagataattgaagaccaagg

SEQ ID NO: 43532 - DNA, 20 bp, Artificial Sequence
  Description of Artificial Sequence: Synthetic oligonucleotide
  Target: ATXN2; (+) strand; PAM type: NRG; PAM sequence: AAG
agaccaaggaagaaaataaa

SEQ ID NO: 43533 - DNA, 20 bp, Artificial Sequence
  Description of Artificial Sequence: Synthetic oligonucleotide
  Target: ATXN2; (+) strand; PAM type: NRG; PAM sequence: AAG
ggaagaaaataaaaagtaca

SEQ ID NO: 43534 - DNA, 20 bp, Artificial Sequence
  Description of Artificial Sequence: Synthetic oligonucleotide
  Target: ATXN2; (+) strand; PAM type: NRG; PAM sequence: AGG
gaagaaaataaaaagtacaa

SEQ ID NO: 43535 - DNA, 20 bp, Artificial Sequence
  Description of Artificial Sequence: Synthetic oligonucleotide
  Target: ATXN2; (+) strand; PAM type: NRG; PAM sequence: TAG
ataaaaagtacaaaggaatt

SEQ ID NO: 43536 - DNA, 20 bp, Artificial Sequence
  Description of Artificial Sequence: Synthetic oligonucleotide
  Target: ATXN2; (+) strand; PAM type: NRG; PAM sequence: AGG
taaaaagtacaaaggaattt

SEQ ID NO: 43537 - DNA, 20 bp, Artificial Sequence
  Description of Artificial Sequence: Synthetic oligonucleotide
  Target: ATXN2; (+) strand; PAM type: NRG; PAM sequence: AAG
acatgaatgtgcatcacatg

SEQ ID NO: 43538 - DNA, 20 bp, Artificial Sequence
  Description of Artificial Sequence: Synthetic oligonucleotide
  Target: ATXN2; (+) strand; PAM type: NRG; PAM sequence: GAG
aatgtgcatcacatgaagct

SEQ ID NO: 43539 - DNA, 20 bp, Artificial Sequence
  Description of Artificial Sequence: Synthetic oligonucleotide
  Target: ATXN2; (+) strand; PAM type: NRG; PAM sequence: CAG
gtgcatcacatgaagctgag

SEQ ID NO: 43540 - DNA, 20 bp, Artificial Sequence
  Description of Artificial Sequence: Synthetic oligonucleotide
  Target: ATXN2; (+) strand; PAM type: NRG; PAM sequence: TAG
tgaagctgagcagaaatgta

SEQ ID NO: 43541 - DNA, 20 bp, Artificial Sequence
  Description of Artificial Sequence: Synthetic oligonucleotide
  Target: ATXN2; (+) strand; PAM type: NRG; PAM sequence: CAG
aaatgtatagcaactaaaaa

SEQ ID NO: 43542 - DNA, 20 bp, Artificial Sequence
  Description of Artificial Sequence: Synthetic oligonucleotide
  Target: ATXN2; (+) strand; PAM type: NRG; PAM sequence: CAG
aactaaaaacagatttaaca

SEQ ID NO: 43543 - DNA, 20 bp, Artificial Sequence
  Description of Artificial Sequence: Synthetic oligonucleotide
  Target: ATXN2; (+) strand; PAM type: NRG; PAM sequence: GAG
aaaacagatttaacacagct

SEQ ID NO: 43544 - DNA, 20 bp, Artificial Sequence
  Description of Artificial Sequence: Synthetic oligonucleotide
  Target: ATXN2; (+) strand; PAM type: NRG; PAM sequence: AAG
agttttgtttttgtttcctt

SEQ ID NO: 43545 - DNA, 20 bp, Artificial Sequence
  Description of Artificial Sequence: Synthetic oligonucleotide
  Target: ATXN2; (+) strand; PAM type: NRG; PAM sequence: AAG
tttttgtttccttaagcttg

SEQ ID NO: 43546 - DNA, 20 bp, Artificial Sequence
  Description of Artificial Sequence: Synthetic oligonucleotide
  Target: ATXN2; (+) strand; PAM type: NRG; PAM sequence: GAG
gtttcttttttctttttttt

SEQ ID NO: 43547 - DNA, 20 bp, Artificial Sequence
  Description of Artificial Sequence: Synthetic oligonucleotide
  Target: ATXN2; (+) strand; PAM type: NRG; PAM sequence: TAG
cttttttcttttttttgaga

SEQ ID NO: 43548 - DNA, 20 bp, Artificial Sequence
  Description of Artificial Sequence: Synthetic oligonucleotide
  Target: ATXN2; (+) strand; PAM type: NRG; PAM sequence: GAG
tttttcttttttttgagata

SEQ ID NO: 43549 - DNA, 20 bp, Artificial Sequence
  Description of Artificial Sequence: Synthetic oligonucleotide
  Target: ATXN2; (+) strand; PAM type: NRG; PAM sequence: CAG
agagtttcgctcttgtcacc

SEQ ID NO: 43550 - DNA, 20 bp, Artificial Sequence
  Description of Artificial Sequence: Synthetic oligonucleotide
  Target: ATXN2; (+) strand; PAM type: NRG; PAM sequence: TGG
ttcgctcttgtcacccagac

SEQ ID NO: 43551 - DNA, 20 bp, Artificial Sequence
  Description of Artificial Sequence: Synthetic oligonucleotide
  Target: ATXN2; (+) strand; PAM type: NRG; PAM sequence: GAG
cgctcttgtcacccagactg

SEQ ID NO: 43552 - DNA, 20 bp, Artificial Sequence
  Description of Artificial Sequence: Synthetic oligonucleotide
  Target: ATXN2; (+) strand; PAM type: NRG; PAM sequence: TGG
tcacccagactggagtgcaa

SEQ ID NO: 43553 - DNA, 20 bp, Artificial Sequence
  Description of Artificial Sequence: Synthetic oligonucleotide
  Target: ATXN2; (+) strand; PAM type: NRG; PAM sequence: TGG
ggagtgcaatggtgtgatct

SEQ ID NO: 43554 - DNA, 20 bp, Artificial Sequence
  Description of Artificial Sequence: Synthetic oligonucleotide
  Target: ATXN2; (+) strand; PAM type: NRG; PAM sequence: TGG
tcactgcaaccttcacctcc

SEQ ID NO: 43555 - DNA, 20 bp, Artificial Sequence
  Description of Artificial Sequence: Synthetic oligonucleotide
  Target: ATXN2; (+) strand; PAM type: NRG; PAM sequence: GGG
cactgcaaccttcacctcct

SEQ ID NO: 43556 - DNA, 20 bp, Artificial Sequence
  Description of Artificial Sequence: Synthetic oligonucleotide
  Target: ATXN2; (+) strand; PAM type: NRG; PAM sequence: CAG
ttcaaatgattctcctgcct

SEQ ID NO: 43557 - DNA, 20 bp, Artificial Sequence
  Description of Artificial Sequence: Synthetic oligonucleotide
  Target: ATXN2; (+) strand; PAM type: NRG; PAM sequence: TAG
tcctgcctcagcctctcaaa

SEQ ID NO: 43558 - DNA, 20 bp, Artificial Sequence
  Description of Artificial Sequence: Synthetic oligonucleotide
  Target: ATXN2; (+) strand; PAM type: NRG; PAM sequence: CAG
tctcaaatagccaccacact

SEQ ID NO: 43559 - DNA, 20 bp, Artificial Sequence
  Description of Artificial Sequence: Synthetic oligonucleotide
  Target: ATXN2; (+) strand; PAM type: NRG; PAM sequence: TAG
ctcagctaattttgtatttt

SEQ ID NO: 43560 - DNA, 20 bp, Artificial Sequence
  Description of Artificial Sequence: Synthetic oligonucleotide
  Target: ATXN2; (+) strand; PAM type: NRG; PAM sequence: TAG
agctaattttgtatttttag

SEQ ID NO: 43561 - DNA, 20 bp, Artificial Sequence
  Description of Artificial Sequence: Synthetic oligonucleotide
  Target: ATXN2; (+) strand; PAM type: NRG; PAM sequence: GAG
ctaattttgtatttttagta

SEQ ID NO: 43562 - DNA, 20 bp, Artificial Sequence
  Description of Artificial Sequence: Synthetic oligonucleotide
  Target: ATXN2; (+) strand; PAM type: NRG; PAM sequence: TGG
ttttgtatttttagtagaga

SEQ ID NO: 43563 - DNA, 20 bp, Artificial Sequence
  Description of Artificial Sequence: Synthetic oligonucleotide
  Target: ATXN2; (+) strand; PAM type: NRG; PAM sequence: GGG
tttgtatttttagtagagat

SEQ ID NO: 43564 - DNA, 20 bp, Artificial Sequence
  Description of Artificial Sequence: Synthetic oligonucleotide
  Target: ATXN2; (+) strand; PAM type: NRG; PAM sequence: GGG
ttgtatttttagtagagatg

SEQ ID NO: 43565 - DNA, 20 bp, Artificial Sequence
  Description of Artificial Sequence: Synthetic oligonucleotide
  Target: ATXN2; (+) strand; PAM type: NRG; PAM sequence: TGG
gagatggggtttcatcatgt

SEQ ID NO: 43566 - DNA, 20 bp, Artificial Sequence
  Description of Artificial Sequence: Synthetic oligonucleotide
  Target: ATXN2; (+) strand; PAM type: NRG; PAM sequence: CAG
tggggtttcatcatgttggt

SEQ ID NO: 43567 - DNA, 20 bp, Artificial Sequence
  Description of Artificial Sequence: Synthetic oligonucleotide
  Target: ATXN2; (+) strand; PAM type: NRG; PAM sequence: AGG
ggggtttcatcatgttggtc

SEQ ID NO: 43568 - DNA, 20 bp, Artificial Sequence
  Description of Artificial Sequence: Synthetic oligonucleotide
  Target: ATXN2; (+) strand; PAM type: NRG; PAM sequence: CAG
tttcatcatgttggtcaggc

SEQ ID NO: 43569 - DNA, 20 bp, Artificial Sequence
  Description of Artificial Sequence: Synthetic oligonucleotide
  Target: ATXN2; (+) strand; PAM type: NRG; PAM sequence: AAG
agtcttgaactcctgacctc

SEQ ID NO: 43570 - DNA, 20 bp, Artificial Sequence
  Description of Artificial Sequence: Synthetic oligonucleotide
  Target: ATXN2; (+) strand; PAM type: NRG; PAM sequence: CAG
ctcaagtgatccacccacct

SEQ ID NO: 43571 - DNA, 20 bp, Artificial Sequence
  Description of Artificial Sequence: Synthetic oligonucleotide
  Target: ATXN2; (+) strand; PAM type: NRG; PAM sequence: AAG
ccacccacctcagcctccca

SEQ ID NO: 43572 - DNA, 20 bp, Artificial Sequence
  Description of Artificial Sequence: Synthetic oligonucleotide
  Target: ATXN2; (+) strand; PAM type: NRG; PAM sequence: TGG
acctcagcctcccaaagtgc

SEQ ID NO: 43573 - DNA, 20 bp, Artificial Sequence
  Description of Artificial Sequence: Synthetic oligonucleotide
  Target: ATXN2; (+) strand; PAM type: NRG; PAM sequence: GGG
cctcagcctcccaaagtgct

SEQ ID NO: 43574 - DNA, 20 bp, Artificial Sequence
  Description of Artificial Sequence: Synthetic oligonucleotide
  Target: ATXN2; (+) strand; PAM type: NRG; PAM sequence: CAG
ctcccaaagtgctgggatta

SEQ ID NO: 43575 - DNA, 20 bp, Artificial Sequence
  Description of Artificial Sequence: Synthetic oligonucleotide
  Target: ATXN2; (+) strand; PAM type: NRG; PAM sequence: AGG
tcccaaagtgctgggattac

SEQ ID NO: 43576 - DNA, 20 bp, Artificial Sequence
  Description of Artificial Sequence: Synthetic oligonucleotide
  Target: ATXN2; (+) strand; PAM type: NRG; PAM sequence: GAG
agtgctgggattacaggcat

SEQ ID NO: 43577 - DNA, 20 bp, Artificial Sequence
  Description of Artificial Sequence: Synthetic oligonucleotide
  Target: ATXN2; (+) strand; PAM type: NRG; PAM sequence: CAG
gggattacaggcatgagcca

SEQ ID NO: 43578 - DNA, 20 bp, Artificial Sequence
  Description of Artificial Sequence: Synthetic oligonucleotide
  Target: ATXN2; (+) strand; PAM type: NRG; PAM sequence: TGG
caggcatgagccacagcaac

SEQ ID NO: 43579 - DNA, 20 bp, Artificial Sequence
  Description of Artificial Sequence: Synthetic oligonucleotide
  Target: ATXN2; (+) strand; PAM type: NRG; PAM sequence: AAG
ggccgatcttgtttctttta

SEQ ID NO: 43580 - DNA, 20 bp, Artificial Sequence
  Description of Artificial Sequence: Synthetic oligonucleotide
  Target: ATXN2; (+) strand; PAM type: NRG; PAM sequence: AGG
gccgatcttgtttcttttaa

SEQ ID NO: 43581 - DNA, 20 bp, Artificial Sequence
  Description of Artificial Sequence: Synthetic oligonucleotide
  Target: ATXN2; (+) strand; PAM type: NRG; PAM sequence: TGG
tgtttcttttaaaggttctc

SEQ ID NO: 43582 - DNA, 20 bp, Artificial Sequence
  Description of Artificial Sequence: Synthetic oligonucleotide
  Target: ATXN2; (+) strand; PAM type: NRG; PAM sequence: AAG
aggttctctggactgattaa

SEQ ID NO: 43583 - DNA, 20 bp, Artificial Sequence
  Description of Artificial Sequence: Synthetic oligonucleotide
  Target: ATXN2; (+) strand; PAM type: NRG; PAM sequence: GAG
gttctctggactgattaaaa

SEQ ID NO: 43584 - DNA, 20 bp, Artificial Sequence
  Description of Artificial Sequence: Synthetic oligonucleotide
  Target: ATXN2; (+) strand; PAM type: NRG; PAM sequence: AAG
tggactgattaaaagagaaa

SEQ ID NO: 43585 - DNA, 20 bp, Artificial Sequence
  Description of Artificial Sequence: Synthetic oligonucleotide
  Target: ATXN2; (+) strand; PAM type: NRG; PAM sequence: AAG
tttgtttgtttgtttgtttt

SEQ ID NO: 43586 - DNA, 20 bp, Artificial Sequence
  Description of Artificial Sequence: Synthetic oligonucleotide
  Target: ATXN2; (+) strand; PAM type: NRG; PAM sequence: AAG
ttgttttaagtattctttgt

SEQ ID NO: 43587 - DNA, 20 bp, Artificial Sequence
  Description of Artificial Sequence: Synthetic oligonucleotide
  Target: ATXN2; (+) strand; PAM type: NRG; PAM sequence: CAG
ttgtaagctcttgcttacca

SEQ ID NO: 43588 - DNA, 20 bp, Artificial Sequence
  Description of Artificial Sequence: Synthetic oligonucleotide
  Target: ATXN2; (+) strand; PAM type: NRG; PAM sequence: TGG
gctcttgcttaccacagtta

SEQ ID NO: 43589 - DNA, 20 bp, Artificial Sequence
  Description of Artificial Sequence: Synthetic oligonucleotide
  Target: ATXN2; (+) strand; PAM type: NRG; PAM sequence: GGG
ctcttgcttaccacagttat

SEQ ID NO: 43590 - DNA, 20 bp, Artificial Sequence
  Description of Artificial Sequence: Synthetic oligonucleotide
  Target: ATXN2; (+) strand; PAM type: NRG; PAM sequence: AAG
ttaccacagttatgggaaca

SEQ ID NO: 43591 - DNA, 20 bp, Artificial Sequence
  Description of Artificial Sequence: Synthetic oligonucleotide
  Target: ATXN2; (+) strand; PAM type: NRG; PAM sequence: AAG
agttatgggaacaaagcact

SEQ ID NO: 43592 - DNA, 20 bp, Artificial Sequence
  Description of Artificial Sequence: Synthetic oligonucleotide
  Target: ATXN2; (+) strand; PAM type: NRG; PAM sequence: AGG
gttatgggaacaaagcacta

SEQ ID NO: 43593 - DNA, 20 bp, Artificial Sequence
  Description of Artificial Sequence: Synthetic oligonucleotide
  Target: ATXN2; (+) strand; PAM type: NRG; PAM sequence: TGG
acaaagcactaaggactgat

SEQ ID NO: 43594 - DNA, 20 bp, Artificial Sequence
  Description of Artificial Sequence: Synthetic oligonucleotide
  Target: ATXN2; (+) strand; PAM type: NRG; PAM sequence: AAG
gcactaaggactgattggca

SEQ ID NO: 43595 - DNA, 20 bp, Artificial Sequence
  Description of Artificial Sequence: Synthetic oligonucleotide
  Target: ATXN2; (+) strand; PAM type: NRG; PAM sequence: TAG
ctaaggactgattggcaaag

SEQ ID NO: 43596 - DNA, 20 bp, Artificial Sequence
  Description of Artificial Sequence: Synthetic oligonucleotide
  Target: ATXN2; (+) strand; PAM type: NRG; PAM sequence: AAG
actgattggcaaagtagcaa

SEQ ID NO: 43597 - DNA, 20 bp, Artificial Sequence
  Description of Artificial Sequence: Synthetic oligonucleotide
  Target: ATXN2; (+) strand; PAM type: NRG; PAM sequence: CAG
gattggcaaagtagcaaaag

SEQ ID NO: 43598 - DNA, 20 bp, Artificial Sequence
  Description of Artificial Sequence: Synthetic oligonucleotide
  Target: ATXN2; (+) strand; PAM type: NRG; PAM sequence: CAG
ggcaaagtagcaaaagcagt

SEQ ID NO: 43599 - DNA, 20 bp, Artificial Sequence
  Description of Artificial Sequence: Synthetic oligonucleotide
  Target: ATXN2; (+) strand; PAM type: NRG; PAM sequence: TAG
tgtaaaatcatgtcaacgtc

SEQ ID NO: 43600 - DNA, 20 bp, Artificial Sequence
  Description of Artificial Sequence: Synthetic oligonucleotide
  Target: ATXN2; (+) strand; PAM type: NRG; PAM sequence: GAG
tttttttttttttttttttt

SEQ ID NO: 43601 - DNA, 20 bp, Artificial Sequence
  Description of Artificial Sequence: Synthetic oligonucleotide
  Target: ATXN2; (+) strand; PAM type: NRG; PAM sequence: CAG
ttttttttttttttttgaga

SEQ ID NO: 43602 - DNA, 20 bp, Artificial Sequence
  Description of Artificial Sequence: Synthetic oligonucleotide
  Target: ATXN2; (+) strand; PAM type: NRG; PAM sequence: GAG
ttttttttttttttgagaca

SEQ ID NO: 43603 - DNA, 20 bp, Artificial Sequence
  Description of Artificial Sequence: Synthetic oligonucleotide
  Target: ATXN2; (+) strand; PAM type: NRG; PAM sequence: TGG
tcttgctctgttgcccatgc

SEQ ID NO: 43604 - DNA, 20 bp, Artificial Sequence
  Description of Artificial Sequence: Synthetic oligonucleotide
  Target: ATXN2; (+) strand; PAM type: NRG; PAM sequence: GAG
ttgctctgttgcccatgctg

SEQ ID NO: 43605 - DNA, 20 bp, Artificial Sequence
  Description of Artificial Sequence: Synthetic oligonucleotide
  Target: ATXN2; (+) strand; PAM type: NRG; PAM sequence: TGG
ttgcccatgctggagtgcaa

SEQ ID NO: 43606 - DNA, 20 bp, Artificial Sequence
  Description of Artificial Sequence: Synthetic oligonucleotide
  Target: ATXN2; (+) strand; PAM type: NRG; PAM sequence: CAG
ggagtgcaatggcgtgatct

SEQ ID NO: 43607 - DNA, 20 bp, Artificial Sequence
  Description of Artificial Sequence: Synthetic oligonucleotide
  Target: ATXN2; (+) strand; PAM type: NRG; PAM sequence: AAG
gcgtgatctcagctaactgc

SEQ ID NO: 43608 - DNA, 20 bp, Artificial Sequence
  Description of Artificial Sequence: Synthetic oligonucleotide
  Target: ATXN2; (+) strand; PAM type: NRG; PAM sequence: GAG
aactgcaagctccgcttccc

SEQ ID NO: 43609 - DNA, 20 bp, Artificial Sequence
  Description of Artificial Sequence: Synthetic oligonucleotide
  Target: ATXN2; (+) strand; PAM type: NRG; PAM sequence: CAG
ttcatgccattctcctgcct

SEQ ID NO: 43610 - DNA, 20 bp, Artificial Sequence
  Description of Artificial Sequence: Synthetic oligonucleotide
  Target: ATXN2; (+) strand; PAM type: NRG; PAM sequence: AAG
ttctcctgcctcagcctccc

SEQ ID NO: 43611 - DNA, 20 bp, Artificial Sequence
  Description of Artificial Sequence: Synthetic oligonucleotide
  Target: ATXN2; (+) strand; PAM type: NRG; PAM sequence: TAG
tcctgcctcagcctcccaag

SEQ ID NO: 43612 - DNA, 20 bp, Artificial Sequence
  Description of Artificial Sequence: Synthetic oligonucleotide
  Target: ATXN2; (+) strand; PAM type: NRG; PAM sequence: TGG
gcctcagcctcccaagtagc

SEQ ID NO: 43613 - DNA, 20 bp, Artificial Sequence
  Description of Artificial Sequence: Synthetic oligonucleotide
  Target: ATXN2; (+) strand; PAM type: NRG; PAM sequence: GGG
cctcagcctcccaagtagct

SEQ ID NO: 43614 - DNA, 20 bp, Artificial Sequence
  Description of Artificial Sequence: Synthetic oligonucleotide
  Target: ATXN2; (+) strand; PAM type: NRG; PAM sequence: CAG
ctcccaagtagctgggacta

SEQ ID NO: 43615 - DNA, 20 bp, Artificial Sequence
  Description of Artificial Sequence: Synthetic oligonucleotide
  Target: ATXN2; (+) strand; PAM type: NRG; PAM sequence: AGG
tcccaagtagctgggactac

SEQ ID NO: 43616 - DNA, 20 bp, Artificial Sequence
  Description of Artificial Sequence: Synthetic oligonucleotide
  Target: ATXN2; (+) strand; PAM type: NRG; PAM sequence: CGG
caggcacccgccaccatgcc

SEQ ID NO: 43617 - DNA, 20 bp, Artificial Sequence
  Description of Artificial Sequence: Synthetic oligonucleotide
  Target: ATXN2; (+) strand; PAM type: NRG; PAM sequence: TAG
gctaattttttttgtacttt

SEQ ID NO: 43618 - DNA, 20 bp, Artificial Sequence
  Description of Artificial Sequence: Synthetic oligonucleotide
  Target: ATXN2; (+) strand; PAM type: NRG; PAM sequence: TAG
aattttttttgtacttttag

SEQ ID NO: 43619 - DNA, 20 bp, Artificial Sequence
  Description of Artificial Sequence: Synthetic oligonucleotide
  Target: ATXN2; (+) strand; PAM type: NRG; PAM sequence: AGG
attttttttgtacttttagt

SEQ ID NO: 43620 - DNA, 20 bp, Artificial Sequence
  Description of Artificial Sequence: Synthetic oligonucleotide
  Target: ATXN2; (+) strand; PAM type: NRG; PAM sequence: GGG
ttttttttgtacttttagta

SEQ ID NO: 43621 - DNA, 20 bp, Artificial Sequence
  Description of Artificial Sequence: Synthetic oligonucleotide
  Target: ATXN2; (+) strand; PAM type: NRG; PAM sequence: CGG
ttttgtacttttagtaggga

SEQ ID NO: 43622 - DNA, 20 bp, Artificial Sequence
  Description of Artificial Sequence: Synthetic oligonucleotide
  Target: ATXN2; (+) strand; PAM type: NRG; PAM sequence: GGG
tttgtacttttagtagggac

SEQ ID NO: 43623 - DNA, 20 bp, Artificial Sequence
  Description of Artificial Sequence: Synthetic oligonucleotide
  Target: ATXN2; (+) strand; PAM type: NRG; PAM sequence: GGG
ttgtacttttagtagggacg

SEQ ID NO: 43624 - DNA, 20 bp, Artificial Sequence
  Description of Artificial Sequence: Synthetic oligonucleotide
  Target: ATXN2; (+) strand; PAM type: NRG; PAM sequence: TAG
gggacggggtttcaccgtgt

SEQ ID NO: 43625 - DNA, 20 bp, Artificial Sequence
  Description of Artificial Sequence: Synthetic oligonucleotide
  Target: ATXN2; (+) strand; PAM type: NRG; PAM sequence: CAG
cggggtttcaccgtgttagc

SEQ ID NO: 43626 - DNA, 20 bp, Artificial Sequence
  Description of Artificial Sequence: Synthetic oligonucleotide
  Target: ATXN2; (+) strand; PAM type: NRG; PAM sequence: AGG
ggggtttcaccgtgttagcc

SEQ ID NO: 43627 - DNA, 20 bp, Artificial Sequence
  Description of Artificial Sequence: Synthetic oligonucleotide
  Target: ATXN2; (+) strand; PAM type: NRG; PAM sequence: TGG
tttcaccgtgttagccagga

SEQ ID NO: 43628 - DNA, 20 bp, Artificial Sequence
  Description of Artificial Sequence: Synthetic oligonucleotide
  Target: ATXN2; (+) strand; PAM type: NRG; PAM sequence: CAG
accttgtgatccgcccacct

SEQ ID NO: 43629 - DNA, 20 bp, Artificial Sequence
  Description of Artificial Sequence: Synthetic oligonucleotide
  Target: ATXN2; (+) strand; PAM type: NRG; PAM sequence: AAG
ccgcccacctcagcctccca

SEQ ID NO: 43630 - DNA, 20 bp, Artificial Sequence
  Description of Artificial Sequence: Synthetic oligonucleotide
  Target: ATXN2; (+) strand; PAM type: NRG; PAM sequence: TGG
acctcagcctcccaaagtgc

SEQ ID NO: 43631 - DNA, 20 bp, Artificial Sequence
  Description of Artificial Sequence: Synthetic oligonucleotide
  Target: ATXN2; (+) strand; PAM type: NRG; PAM sequence: GGG
cctcagcctcccaaagtgct

SEQ ID NO: 43632 - DNA, 20 bp, Artificial Sequence
  Description of Artificial Sequence: Synthetic oligonucleotide
  Target: ATXN2; (+) strand; PAM type: NRG; PAM sequence: CAG
ctcccaaagtgctgggatta

SEQ ID NO: 43633 - DNA, 20 bp, Artificial Sequence
  Description of Artificial Sequence: Synthetic oligonucleotide
  Target: ATXN2; (+) strand; PAM type: NRG; PAM sequence: AGG
tcccaaagtgctgggattac

SEQ ID NO: 43634 - DNA, 20 bp, Artificial Sequence
  Description of Artificial Sequence: Synthetic oligonucleotide
  Target: ATXN2; (+) strand; PAM type: NRG; PAM sequence: GAG
agtgctgggattacaggcgt

SEQ ID NO: 43635 - DNA, 20 bp, Artificial Sequence
  Description of Artificial Sequence: Synthetic oligonucleotide
  Target: ATXN2; (+) strand; PAM type: NRG; PAM sequence: CAG
caggcgtgagccaccacacc

SEQ ID NO: 43636 - DNA, 20 bp, Artificial Sequence
  Description of Artificial Sequence: Synthetic oligonucleotide
  Target: ATXN2; (+) strand; PAM type: NRG; PAM sequence: TAG
gcctaatttttatactttta

SEQ ID NO: 43637 - DNA, 20 bp, Artificial Sequence
  Description of Artificial Sequence: Synthetic oligonucleotide
  Target: ATXN2; (+) strand; PAM type: NRG; PAM sequence: CAG
tatacttttatagctgctgt

SEQ ID NO: 43638 - DNA, 20 bp, Artificial Sequence
  Description of Artificial Sequence: Synthetic oligonucleotide
  Target: ATXN2; (+) strand; PAM type: NRG; PAM sequence: TGG
tgctaatcacaaataaaact

SEQ ID NO: 43639 - DNA, 20 bp, Artificial Sequence
  Description of Artificial Sequence: Synthetic oligonucleotide
  Target: ATXN2; (+) strand; PAM type: NRG; PAM sequence: TGG
gtatttgatattccttatta

SEQ ID NO: 43640 - DNA, 20 bp, Artificial Sequence
  Description of Artificial Sequence: Synthetic oligonucleotide
  Target: ATXN2; (+) strand; PAM type: NRG; PAM sequence: TAG
tattccttattatggaaata

SEQ ID NO: 43641 - DNA, 20 bp, Artificial Sequence
  Description of Artificial Sequence: Synthetic oligonucleotide
  Target: ATXN2; (+) strand; PAM type: NRG; PAM sequence: TGG
ccttattatggaaatatagt

SEQ ID NO: 43642 - DNA, 20 bp, Artificial Sequence
  Description of Artificial Sequence: Synthetic oligonucleotide
  Target: ATXN2; (+) strand; PAM type: NRG; PAM sequence: GGG
cttattatggaaatatagtt

SEQ ID NO: 43643 - DNA, 20 bp, Artificial Sequence
  Description of Artificial Sequence: Synthetic oligonucleotide
  Target: ATXN2; (+) strand; PAM type: NRG; PAM sequence: TAG
atggaaatatagttgggaat

SEQ ID NO: 43644 - DNA, 20 bp, Artificial Sequence
  Description of Artificial Sequence: Synthetic oligonucleotide
  Target: ATXN2; (+) strand; PAM type: NRG; PAM sequence: CAG
ttgggaattagtgccatata

SEQ ID NO: 43645 - DNA, 20 bp, Artificial Sequence
  Description of Artificial Sequence: Synthetic oligonucleotide
  Target: ATXN2; (+) strand; PAM type: NRG; PAM sequence: TAG
agtgccatatacagatgcta

SEQ ID NO: 43646 - DNA, 20 bp, Artificial Sequence
  Description of Artificial Sequence: Synthetic oligonucleotide
  Target: ATXN2; (+) strand; PAM type: NRG; PAM sequence: AAG
atagaaacacactacaatgt

SEQ ID NO: 43647 - DNA, 20 bp, Artificial Sequence
  Description of Artificial Sequence: Synthetic oligonucleotide
  Target: ATXN2; (+) strand; PAM type: NRG; PAM sequence: TAG
aagccaaaaataaatgttta

SEQ ID NO: 43648 - DNA, 20 bp, Artificial Sequence
  Description of Artificial Sequence: Synthetic oligonucleotide
  Target: ATXN2; (+) strand; PAM type: NRG; PAM sequence: AAG
atagaatgtactgataaaca

SEQ ID NO: 43649 - DNA, 20 bp, Artificial Sequence
  Description of Artificial Sequence: Synthetic oligonucleotide
  Target: ATXN2; (+) strand; PAM type: NRG; PAM sequence: AAG
tgataaacaaagctgctaaa

SEQ ID NO: 43650 - DNA, 20 bp, Artificial Sequence
  Description of Artificial Sequence: Synthetic oligonucleotide
  Target: ATXN2; (+) strand; PAM type: NRG; PAM sequence: AAG
aacaaagctgctaaaaagat

SEQ ID NO: 43651 - DNA, 20 bp, Artificial Sequence
  Description of Artificial Sequence: Synthetic oligonucleotide
  Target: ATXN2; (+) strand; PAM type: NRG; PAM sequence: AGG
acaaagctgctaaaaagata

SEQ ID NO: 43652 - DNA, 20 bp, Artificial Sequence
  Description of Artificial Sequence: Synthetic oligonucleotide
  Target: ATXN2; (+) strand; PAM type: NRG; PAM sequence: CGG
gctaaaaagataaggaaata

SEQ ID NO: 43653 - DNA, 20 bp, Artificial Sequence
  Description of Artificial Sequence: Synthetic oligonucleotide
  Target: ATXN2; (+) strand; PAM type: NRG; PAM sequence: TAG
ggaaatacggtccctccaaa

SEQ ID NO: 43654 - DNA, 20 bp, Artificial Sequence
  Description of Artificial Sequence: Synthetic oligonucleotide
  Target: ATXN2; (+) strand; PAM type: NRG; PAM sequence: TAG
atactgtgtttgcctcatat

SEQ ID NO: 43655 - DNA, 20 bp, Artificial Sequence
  Description of Artificial Sequence: Synthetic oligonucleotide
  Target: ATXN2; (+) strand; PAM type: NRG; PAM sequence: GAG
actgtgtttgcctcatatta

SEQ ID NO: 43656 - DNA, 20 bp, Artificial Sequence
  Description of Artificial Sequence: Synthetic oligonucleotide
  Target: ATXN2; (+) strand; PAM type: NRG; PAM sequence: GAG
tgtgtttgcctcatattaga

SEQ ID NO: 43657 - DNA, 20 bp, Artificial Sequence
  Description of Artificial Sequence: Synthetic oligonucleotide
  Target: ATXN2; (+) strand; PAM type: NRG; PAM sequence: AGG
gtgtttgcctcatattagag

SEQ ID NO: 43658 - DNA, 20 bp, Artificial Sequence
  Description of Artificial Sequence: Synthetic oligonucleotide
  Target: ATXN2; (+) strand; PAM type: NRG; PAM sequence: TAG
aggtactttacaaaacttta

SEQ ID NO: 43659 - DNA, 20 bp, Artificial Sequence
  Description of Artificial Sequence: Synthetic oligonucleotide
  Target: ATXN2; (+) strand; PAM type: NRG; PAM sequence: TAG
atctgtatttatgaacctta

SEQ ID NO: 43660 - DNA, 20 bp, Artificial Sequence
  Description of Artificial Sequence: Synthetic oligonucleotide
  Target: ATXN2; (+) strand; PAM type: NRG; PAM sequence: AGG
tctgtatttatgaaccttat

SEQ ID NO: 43661 - DNA, 20 bp, Artificial Sequence
  Description of Artificial Sequence: Synthetic oligonucleotide
  Target: ATXN2; (+) strand; PAM type: NRG; PAM sequence: TAG
ctcatcacaatcccataatg

SEQ ID NO: 43662 - DNA, 20 bp, Artificial Sequence
  Description of Artificial Sequence: Synthetic oligonucleotide
  Target: ATXN2; (+) strand; PAM type: NRG; PAM sequence: TAG
cacaatcccataatgtagac

SEQ ID NO: 43663 - DNA, 20 bp, Artificial Sequence
  Description of Artificial Sequence: Synthetic oligonucleotide
  Target: ATXN2; (+) strand; PAM type: NRG; PAM sequence: AGG
acaatcccataatgtagact

SEQ ID NO: 43664 - DNA, 20 bp, Artificial Sequence
  Description of Artificial Sequence: Synthetic oligonucleotide
  Target: ATXN2; (+) strand; PAM type: NRG; PAM sequence: AAG
tcccataatgtagactaggc

SEQ ID NO: 43665 - DNA, 20 bp, Artificial Sequence
  Description of Artificial Sequence: Synthetic oligonucleotide
  Target: ATXN2; (+) strand; PAM type: NRG; PAM sequence: CAG
tcactgcgaaatctcaactt

SEQ ID NO: 43666 - DNA, 20 bp, Artificial Sequence
  Description of Artificial Sequence: Synthetic oligonucleotide
  Target: ATXN2; (+) strand; PAM type: NRG; PAM sequence: GAG
cgaaatctcaacttcagaat

SEQ ID NO: 43667 - DNA, 20 bp, Artificial Sequence
  Description of Artificial Sequence: Synthetic oligonucleotide
  Target: ATXN2; (+) strand; PAM type: NRG; PAM sequence: AAG
tgctttaatatatgatgaat

SEQ ID NO: 43668 - DNA, 20 bp, Artificial Sequence
  Description of Artificial Sequence: Synthetic oligonucleotide
  Target: ATXN2; (+) strand; PAM type: NRG; PAM sequence: TGG
tttaatatatgatgaataag

SEQ ID NO: 43669 - DNA, 20 bp, Artificial Sequence
  Description of Artificial Sequence: Synthetic oligonucleotide
  Target: ATXN2; (+) strand; PAM type: NRG; PAM sequence: TAG
aatatatgatgaataagtgg

SEQ ID NO: 43670 - DNA, 20 bp, Artificial Sequence
  Description of Artificial Sequence: Synthetic oligonucleotide
  Target: ATXN2; (+) strand; PAM type: NRG; PAM sequence: GAG
tatatgatgaataagtggta

SEQ ID NO: 43671 - DNA, 20 bp, Artificial Sequence
  Description of Artificial Sequence: Synthetic oligonucleotide
  Target: ATXN2; (+) strand; PAM type: NRG; PAM sequence: CAG
gatgaataagtggtagagcc

SEQ ID NO: 43672 - DNA, 20 bp, Artificial Sequence
  Description of Artificial Sequence: Synthetic oligonucleotide
  Target: ATXN2; (+) strand; PAM type: NRG; PAM sequence: TGG
tagagcccagaataaaaata

SEQ ID NO: 43673 - DNA, 20 bp, Artificial Sequence
  Description of Artificial Sequence: Synthetic oligonucleotide
  Target: ATXN2; (+) strand; PAM type: NRG; PAM sequence: GGG
agagcccagaataaaaatat

SEQ ID NO: 43674 - DNA, 20 bp, Artificial Sequence
  Description of Artificial Sequence: Synthetic oligonucleotide
  Target: ATXN2; (+) strand; PAM type: NRG; PAM sequence: TGG
aatatgggtttcccaattcc

SEQ ID NO: 43675 - DNA, 20 bp, Artificial Sequence
  Description of Artificial Sequence: Synthetic oligonucleotide
  Target: ATXN2; (+) strand; PAM type: NRG; PAM sequence: CAG
catacttacacttcctcaaa

SEQ ID NO: 43676 - DNA, 20 bp, Artificial Sequence
  Description of Artificial Sequence: Synthetic oligonucleotide
  Target: ATXN2; (+) strand; PAM type: NRG; PAM sequence: GAG
tacttacacttcctcaaaca

SEQ ID NO: 43677 - DNA, 20 bp, Artificial Sequence
  Description of Artificial Sequence: Synthetic oligonucleotide
  Target: ATXN2; (+) strand; PAM type: NRG; PAM sequence: TAG
cacttcctcaaacagagttg

SEQ ID NO: 43678 - DNA, 20 bp, Artificial Sequence
  Description of Artificial Sequence: Synthetic oligonucleotide
  Target: ATXN2; (+) strand; PAM type: NRG; PAM sequence: CAG
cctcaaacagagttgtagct

SEQ ID NO: 43679 - DNA, 20 bp, Artificial Sequence
  Description of Artificial Sequence: Synthetic oligonucleotide
  Target: ATXN2; (+) strand; PAM type: NRG; PAM sequence: TAG
agctcagccctctttatatc

SEQ ID NO: 43680 - DNA, 20 bp, Artificial Sequence
  Description of Artificial Sequence: Synthetic oligonucleotide
  Target: ATXN2; (+) strand; PAM type: NRG; PAM sequence: GAG
atctagtgtaatgacaaaat

SEQ ID NO: 43681 - DNA, 20 bp, Artificial Sequence
  Description of Artificial Sequence: Synthetic oligonucleotide
  Target: ATXN2; (+) strand; PAM type: NRG; PAM sequence: AAG
tgagtaccatcattatgccc

SEQ ID NO: 43682 - DNA, 20 bp, Artificial Sequence
  Description of Artificial Sequence: Synthetic oligonucleotide
  Target: ATXN2; (+) strand; PAM type: NRG; PAM sequence: GAG
ctgatgaccacgttcccccc

SEQ ID NO: 43683 - DNA, 20 bp, Artificial Sequence
  Description of Artificial Sequence: Synthetic oligonucleotide
  Target: ATXN2; (+) strand; PAM type: NRG; PAM sequence: AGG
tgatgaccacgttccccccg

SEQ ID NO: 43684 - DNA, 20 bp, Artificial Sequence
  Description of Artificial Sequence: Synthetic oligonucleotide
  Target: ATXN2; (+) strand; PAM type: NRG; PAM sequence: GGG
gatgaccacgttccccccga

SEQ ID NO: 43685 - DNA, 20 bp, Artificial Sequence
  Description of Artificial Sequence: Synthetic oligonucleotide
  Target: ATXN2; (+) strand; PAM type: NRG; PAM sequence: TGG
ccacgttccccccgagggac

SEQ ID NO: 43686 - DNA, 20 bp, Artificial Sequence
  Description of Artificial Sequence: Synthetic oligonucleotide
  Target: ATXN2; (+) strand; PAM type: NRG; PAM sequence: TGG
gagggactggtccttgctac

SEQ ID NO: 43687 - DNA, 20 bp, Artificial Sequence
  Description of Artificial Sequence: Synthetic oligonucleotide
  Target: ATXN2; (+) strand; PAM type: NRG; PAM sequence: GAG
gggactggtccttgctactg

SEQ ID NO: 43688 - DNA, 20 bp, Artificial Sequence
  Description of Artificial Sequence: Synthetic oligonucleotide
  Target: ATXN2; (+) strand; PAM type: NRG; PAM sequence: AGG
ggactggtccttgctactgg

SEQ ID NO: 43689 - DNA, 20 bp, Artificial Sequence
  Description of Artificial Sequence: Synthetic oligonucleotide
  Target: ATXN2; (+) strand; PAM type: NRG; PAM sequence: GAG
actggtccttgctactggag

SEQ ID NO: 43690 - DNA, 20 bp, Artificial Sequence
  Description of Artificial Sequence: Synthetic oligonucleotide
  Target: ATXN2; (+) strand; PAM type: NRG; PAM sequence: TAG
ggtccttgctactggaggag

SEQ ID NO: 43691 - DNA, 20 bp, Artificial Sequence
  Description of Artificial Sequence: Synthetic oligonucleotide
  Target: ATXN2; (+) strand; PAM type: NRG; PAM sequence: TGG
tggaggagtagctgcttcac

SEQ ID NO: 43692 - DNA, 20 bp, Artificial Sequence
  Description of Artificial Sequence: Synthetic oligonucleotide
  Target: ATXN2; (+) strand; PAM type: NRG; PAM sequence: GGG
ggaggagtagctgcttcact

SEQ ID NO: 43693 - DNA, 20 bp, Artificial Sequence
  Description of Artificial Sequence: Synthetic oligonucleotide
  Target: ATXN2; (+) strand; PAM type: NRG; PAM sequence: TGG
ggagtagctgcttcactggg

SEQ ID NO: 43694 - DNA, 20 bp, Artificial Sequence
  Description of Artificial Sequence: Synthetic oligonucleotide
  Target: ATXN2; (+) strand; PAM type: NRG; PAM sequence: GGG
gagtagctgcttcactgggt

SEQ ID NO: 43695 - DNA, 20 bp, Artificial Sequence
  Description of Artificial Sequence: Synthetic oligonucleotide
  Target: ATXN2; (+) strand; PAM type: NRG; PAM sequence: TGG
ctgcttcactgggtgggttg

SEQ ID NO: 43696 - DNA, 20 bp, Artificial Sequence
  Description of Artificial Sequence: Synthetic oligonucleotide
  Target: ATXN2; (+) strand; PAM type: NRG; PAM sequence: GGG
tgcttcactgggtgggttgt

SEQ ID NO: 43697 - DNA, 20 bp, Artificial Sequence
  Description of Artificial Sequence: Synthetic oligonucleotide
  Target: ATXN2; (+) strand; PAM type: NRG; PAM sequence: TAG
gggttgtgggatacaaattc

SEQ ID NO: 43698 - DNA, 20 bp, Artificial Sequence
  Description of Artificial Sequence: Synthetic oligonucleotide
  Target: ATXN2; (+) strand; PAM type: NRG; PAM sequence: AGG
ggttgtgggatacaaattct

SEQ ID NO: 43699 - DNA, 20 bp, Artificial Sequence
  Description of Artificial Sequence: Synthetic oligonucleotide
  Target: ATXN2; (+) strand; PAM type: NRG; PAM sequence: TGG
ggatacaaattctaggccac

SEQ ID NO: 43700 - DNA, 20 bp, Artificial Sequence
  Description of Artificial Sequence: Synthetic oligonucleotide
  Target: ATXN2; (+) strand; PAM type: NRG; PAM sequence: TGG
aaattctaggccactggata

SEQ ID NO: 43701 - DNA, 20 bp, Artificial Sequence
  Description of Artificial Sequence: Synthetic oligonucleotide
  Target: ATXN2; (+) strand; PAM type: NRG; PAM sequence: CAG
actggatatggaacccctcc

SEQ ID NO: 43702 - DNA, 20 bp, Artificial Sequence
  Description of Artificial Sequence: Synthetic oligonucleotide
  Target: ATXN2; (+) strand; PAM type: NRG; PAM sequence: CAG
ggatatggaacccctcccag

SEQ ID NO: 43703 - DNA, 20 bp, Artificial Sequence
  Description of Artificial Sequence: Synthetic oligonucleotide
  Target: ATXN2; (+) strand; PAM type: NRG; PAM sequence: GAG
agcagaaactctgtgatttc

SEQ ID NO: 43704 - DNA, 20 bp, Artificial Sequence
  Description of Artificial Sequence: Synthetic oligonucleotide
  Target: ATXN2; (+) strand; PAM type: NRG; PAM sequence: AGG
gcagaaactctgtgatttcg

SEQ ID NO: 43705 - DNA, 20 bp, Artificial Sequence
  Description of Artificial Sequence: Synthetic oligonucleotide
  Target: ATXN2; (+) strand; PAM type: NRG; PAM sequence: TGG
tgtgatttcgaggatgtcgc

SEQ ID NO: 43706 - DNA, 20 bp, Artificial Sequence
  Description of Artificial Sequence: Synthetic oligonucleotide
  Target: ATXN2; (+) strand; PAM type: NRG; PAM sequence: GGG
gtgatttcgaggatgtcgct

SEQ ID NO: 43707 - DNA, 20 bp, Artificial Sequence
  Description of Artificial Sequence: Synthetic oligonucleotide
  Target: ATXN2; (+) strand; PAM type: NRG; PAM sequence: TGG
cgaggatgtcgctgggcctt

SEQ ID NO: 43708 - DNA, 20 bp, Artificial Sequence
  Description of Artificial Sequence: Synthetic oligonucleotide
  Target: ATXN2; (+) strand; PAM type: NRG; PAM sequence: GGG
gaggatgtcgctgggccttt

SEQ ID NO: 43709 - DNA, 20 bp, Artificial Sequence
  Description of Artificial Sequence: Synthetic oligonucleotide
  Target: ATXN2; (+) strand; PAM type: NRG; PAM sequence: GGG
aggatgtcgctgggcctttg

SEQ ID NO: 43710 - DNA, 20 bp, Artificial Sequence
  Description of Artificial Sequence: Synthetic oligonucleotide
  Target: ATXN2; (+) strand; PAM type: NRG; PAM sequence: TGG
tgggcctttggggacatcct

SEQ ID NO: 43711 - DNA, 20 bp, Artificial Sequence
  Description of Artificial Sequence: Synthetic oligonucleotide
  Target: ATXN2; (+) strand; PAM type: NRG; PAM sequence: GAG
ggcctttggggacatccttg

SEQ ID NO: 43712 - DNA, 20 bp, Artificial Sequence
  Description of Artificial Sequence: Synthetic oligonucleotide
  Target: ATXN2; (+) strand; PAM type: NRG; PAM sequence: AGG
gcctttggggacatccttgg

SEQ ID NO: 43713 - DNA, 20 bp, Artificial Sequence
  Description of Artificial Sequence: Synthetic oligonucleotide
  Target: ATXN2; (+) strand; PAM type: NRG; PAM sequence: AAG
gggacatccttggaggccct

SEQ ID NO: 43714 - DNA, 20 bp, Artificial Sequence
  Description of Artificial Sequence: Synthetic oligonucleotide
  Target: ATXN2; (+) strand; PAM type: NRG; PAM sequence: AGG
ggacatccttggaggcccta

SEQ ID NO: 43715 - DNA, 20 bp, Artificial Sequence
  Description of Artificial Sequence: Synthetic oligonucleotide
  Target: ATXN2; (+) strand; PAM type: NRG; PAM sequence: AAG
catccttggaggccctaagg

SEQ ID NO: 43716 - DNA, 20 bp, Artificial Sequence
  Description of Artificial Sequence: Synthetic oligonucleotide
  Target: ATXN2; (+) strand; PAM type: NRG; PAM sequence: CAG
tggaggccctaaggaagaaa

SEQ ID NO: 43717 - DNA, 20 bp, Artificial Sequence
  Description of Artificial Sequence: Synthetic oligonucleotide
  Target: ATXN2; (+) strand; PAM type: NRG; PAM sequence: CAG
ataaattccatgatattcat

SEQ ID NO: 43718 - DNA, 20 bp, Artificial Sequence
  Description of Artificial Sequence: Synthetic oligonucleotide
  Target: ATXN2; (+) strand; PAM type: NRG; PAM sequence: CAG
acacacactcactcactcta

SEQ ID NO: 43719 - DNA, 20 bp, Artificial Sequence
  Description of Artificial Sequence: Synthetic oligonucleotide
  Target: ATXN2; (+) strand; PAM type: NRG; PAM sequence: TGG
ctcactctacagtttttcct

SEQ ID NO: 43720 - DNA, 20 bp, Artificial Sequence
  Description of Artificial Sequence: Synthetic oligonucleotide
  Target: ATXN2; (+) strand; PAM type: NRG; PAM sequence: TAG
agtttttccttggttaaaaa

SEQ ID NO: 43721 - DNA, 20 bp, Artificial Sequence
  Description of Artificial Sequence: Synthetic oligonucleotide
  Target: ATXN2; (+) strand; PAM type: NRG; PAM sequence: TGG
aaacaccatacatatttttt

SEQ ID NO: 43722 - DNA, 20 bp, Artificial Sequence
  Description of Artificial Sequence: Synthetic oligonucleotide
  Target: ATXN2; (+) strand; PAM type: NRG; PAM sequence: CAG
tttggccatactaattcttt

SEQ ID NO: 43723 - DNA, 20 bp, Artificial Sequence
  Description of Artificial Sequence: Synthetic oligonucleotide
  Target: ATXN2; (+) strand; PAM type: NRG; PAM sequence: TGG
attctttcagaattattttg

SEQ ID NO: 43724 - DNA, 20 bp, Artificial Sequence
  Description of Artificial Sequence: Synthetic oligonucleotide
  Target: ATXN2; (+) strand; PAM type: NRG; PAM sequence: AAG
ttattttgtggaatgccaca

SEQ ID NO: 43725 - DNA, 20 bp, Artificial Sequence
  Description of Artificial Sequence: Synthetic oligonucleotide
  Target: ATXN2; (+) strand; PAM type: NRG; PAM sequence: AAG
attatttccctttattttta

SEQ ID NO: 43726 - DNA, 20 bp, Artificial Sequence
  Description of Artificial Sequence: Synthetic oligonucleotide
  Target: ATXN2; (+) strand; PAM type: NRG; PAM sequence: AAG
tttccctttatttttaaaga

SEQ ID NO: 43727 - DNA, 20 bp, Artificial Sequence
  Description of Artificial Sequence: Synthetic oligonucleotide
  Target: ATXN2; (+) strand; PAM type: NRG; PAM sequence: AGG
ttccctttatttttaaagaa

SEQ ID NO: 43728 - DNA, 20 bp, Artificial Sequence
  Description of Artificial Sequence: Synthetic oligonucleotide
  Target: ATXN2; (+) strand; PAM type: NRG; PAM sequence: GGG
tccctttatttttaaagaaa

SEQ ID NO: 43729 - DNA, 20 bp, Artificial Sequence
  Description of Artificial Sequence: Synthetic oligonucleotide
  Target: ATXN2; (+) strand; PAM type: NRG; PAM sequence: GAG
cctttatttttaaagaaagg

SEQ ID NO: 43730 - DNA, 20 bp, Artificial Sequence
  Description of Artificial Sequence: Synthetic oligonucleotide
  Target: ATXN2; (+) strand; PAM type: NRG; PAM sequence: AGG
ctttatttttaaagaaaggg

SEQ ID NO: 43731 - DNA, 20 bp, Artificial Sequence
  Description of Artificial Sequence: Synthetic oligonucleotide
  Target: ATXN2; (+) strand; PAM type: NRG; PAM sequence: GGG
tttatttttaaagaaaggga

SEQ ID NO: 43732 - DNA, 20 bp, Artificial Sequence
  Description of Artificial Sequence: Synthetic oligonucleotide
  Target: ATXN2; (+) strand; PAM type: NRG; PAM sequence: AAG
tttaaagaaagggagggatg

SEQ ID NO: 43733 - DNA, 20 bp, Artificial Sequence
  Description of Artificial Sequence: Synthetic oligonucleotide
  Target: ATXN2; (+) strand; PAM type: NRG; PAM sequence: TGG
aagaaagggagggatgaagt

SEQ ID NO: 43734 - DNA, 20 bp, Artificial Sequence
  Description of Artificial Sequence: Synthetic oligonucleotide
  Target: ATXN2; (+) strand; PAM type: NRG; PAM sequence: TGG
aaagggagggatgaagttgg

SEQ ID NO: 43735 - DNA, 20 bp, Artificial Sequence
  Description of Artificial Sequence: Synthetic oligonucleotide
  Target: ATXN2; (+) strand; PAM type: NRG; PAM sequence: AAG
ggagggatgaagttggtggt

SEQ ID NO: 43736 - DNA, 20 bp, Artificial Sequence
  Description of Artificial Sequence: Synthetic oligonucleotide
  Target: ATXN2; (+) strand; PAM type: NRG; PAM sequence: AAG
ggtggtaagaaatcaacaat

SEQ ID NO: 43737 - DNA, 20 bp, Artificial Sequence
  Description of Artificial Sequence: Synthetic oligonucleotide
  Target: ATXN2; (+) strand; PAM type: NRG; PAM sequence: AAG
aataagatgtcaactcttaa

SEQ ID NO: 43738 - DNA, 20 bp, Artificial Sequence
  Description of Artificial Sequence: Synthetic oligonucleotide
  Target: ATXN2; (+) strand; PAM type: NRG; PAM sequence: TAG
gtcaactcttaaaagaactg

SEQ ID NO: 43739 - DNA, 20 bp, Artificial Sequence
  Description of Artificial Sequence: Synthetic oligonucleotide
  Target: ATXN2; (+) strand; PAM type: NRG; PAM sequence: AAG
tcaactatgtcttatttgta

SEQ ID NO: 43740 - DNA, 20 bp, Artificial Sequence
  Description of Artificial Sequence: Synthetic oligonucleotide
  Target: ATXN2; (+) strand; PAM type: NRG; PAM sequence: TAG
tttgtaaagaaatatgttac

SEQ ID NO: 43741 - DNA, 20 bp, Artificial Sequence
  Description of Artificial Sequence: Synthetic oligonucleotide
  Target: ATXN2; (+) strand; PAM type: NRG; PAM sequence: TAG
ttctacattacttctaaaat

SEQ ID NO: 43742 - DNA, 20 bp, Artificial Sequence
  Description of Artificial Sequence: Synthetic oligonucleotide
  Target: ATXN2; (+) strand; PAM type: NRG; PAM sequence: CAG
ttagaaaaaaaaaatttaaa

SEQ ID NO: 43743 - DNA, 20 bp, Artificial Sequence
  Description of Artificial Sequence: Synthetic oligonucleotide
  Target: ATXN2; (+) strand; PAM type: NRG; PAM sequence: AAG
gaaaaaaaaaatttaaacag

SEQ ID NO: 43744 - DNA, 20 bp, Artificial Sequence
  Description of Artificial Sequence: Synthetic oligonucleotide
  Target: ATXN2; (+) strand; PAM type: NRG; PAM sequence: TAG
cttaaatttctctaaaattt

SEQ ID NO: 43745 - DNA, 20 bp, Artificial Sequence
  Description of Artificial Sequence: Synthetic oligonucleotide
  Target: ATXN2; (+) strand; PAM type: NRG; PAM sequence: CGG
tgatcatcaattttaaaact

SEQ ID NO: 43746 - DNA, 20 bp, Artificial Sequence
  Description of Artificial Sequence: Synthetic oligonucleotide
  Target: ATXN2; (+) strand; PAM type: NRG; PAM sequence: CAG
ttttaaaactcggcttaaaa

SEQ ID NO: 43747 - DNA, 20 bp, Artificial Sequence
  Description of Artificial Sequence: Synthetic oligonucleotide
  Target: ATXN2; (+) strand; PAM type: NRG; PAM sequence: AAG
aaaactcggcttaaaacagt

SEQ ID NO: 43748 - DNA, 20 bp, Artificial Sequence
  Description of Artificial Sequence: Synthetic oligonucleotide
  Target: ATXN2; (+) strand; PAM type: NRG; PAM sequence: CAG
actcggcttaaaacagtaag

SEQ ID NO: 43749 - DNA, 20 bp, Artificial Sequence
  Description of Artificial Sequence: Synthetic oligonucleotide
  Target: ATXN2; (+) strand; PAM type: NRG; PAM sequence: AAG
aacagtaagcagtaacctgt

SEQ ID NO: 43750 - DNA, 20 bp, Artificial Sequence
  Description of Artificial Sequence: Synthetic oligonucleotide
  Target: ATXN2; (+) strand; PAM type: NRG; PAM sequence: CAG
agtaagcagtaacctgtaag

SEQ ID NO: 43751 - DNA, 20 bp, Artificial Sequence
  Description of Artificial Sequence: Synthetic oligonucleotide
  Target: ATXN2; (+) strand; PAM type: NRG; PAM sequence: TAG
gtaacctgtaagcagtttct

SEQ ID NO: 43752 - DNA, 20 bp, Artificial Sequence
  Description of Artificial Sequence: Synthetic oligonucleotide
  Target: ATXN2; (+) strand; PAM type: NRG; PAM sequence: AGG
taacctgtaagcagtttctt

SEQ ID NO: 43753 - DNA, 20 bp, Artificial Sequence
  Description of Artificial Sequence: Synthetic oligonucleotide
  Target: ATXN2; (+) strand; PAM type: NRG; PAM sequence: TAG
tgtaagcagtttcttaggct

SEQ ID NO: 43754 - DNA, 20 bp, Artificial Sequence
  Description of Artificial Sequence: Synthetic oligonucleotide
  Target: ATXN2; (+) strand; PAM type: NRG; PAM sequence: CAG
aagcagtttcttaggcttag

SEQ ID NO: 43755 - DNA, 20 bp, Artificial Sequence
  Description of Artificial Sequence: Synthetic oligonucleotide
  Target: ATXN2; (+) strand; PAM type: NRG; PAM sequence: AGG
agcagtttcttaggcttagc

SEQ ID NO: 43756 - DNA, 20 bp, Artificial Sequence
  Description of Artificial Sequence: Synthetic oligonucleotide
  Target: ATXN2; (+) strand; PAM type: NRG; PAM sequence: GAG
tcttaggcttagcaggctgt

SEQ ID NO: 43757 - DNA, 20 bp, Artificial Sequence
  Description of Artificial Sequence: Synthetic oligonucleotide
  Target: ATXN2; (+) strand; PAM type: NRG; PAM sequence: AAG
gtgagctgaaaattctatta

SEQ ID NO: 43758 - DNA, 20 bp, Artificial Sequence
  Description of Artificial Sequence: Synthetic oligonucleotide
  Target: ATXN2; (+) strand; PAM type: NRG; PAM sequence: AGG
tgagctgaaaattctattaa

SEQ ID NO: 43759 - DNA, 20 bp, Artificial Sequence
  Description of Artificial Sequence: Synthetic oligonucleotide
  Target: ATXN2; (+) strand; PAM type: NRG; PAM sequence: GGG
gagctgaaaattctattaaa

SEQ ID NO: 43760 - DNA, 20 bp, Artificial Sequence
  Description of Artificial Sequence: Synthetic oligonucleotide
  Target: ATXN2; (+) strand; PAM type: NRG; PAM sequence: TAG
attaaagggatgacttgtat

SEQ ID NO: 43761 - DNA, 20 bp, Artificial Sequence
  Description of Artificial Sequence: Synthetic oligonucleotide
  Target: ATXN2; (+) strand; PAM type: NRG; PAM sequence: TAG
gacttgtattagtctattaa

SEQ ID NO: 43762 - DNA, 20 bp, Artificial Sequence
  Description of Artificial Sequence: Synthetic oligonucleotide
  Target: ATXN2; (+) strand; PAM type: NRG; PAM sequence: TGG
tgaccaaaataactgacatt

SEQ ID NO: 43763 - DNA, 20 bp, Artificial Sequence
  Description of Artificial Sequence: Synthetic oligonucleotide
  Target: ATXN2; (+) strand; PAM type: NRG; PAM sequence: GGG
gaccaaaataactgacattt

SEQ ID NO: 43764 - DNA, 20 bp, Artificial Sequence
  Description of Artificial Sequence: Synthetic oligonucleotide
  Target: ATXN2; (+) strand; PAM type: NRG; PAM sequence: GGG
accaaaataactgacatttg

SEQ ID NO: 43765 - DNA, 20 bp, Artificial Sequence
  Description of Artificial Sequence: Synthetic oligonucleotide
  Target: ATXN2; (+) strand; PAM type: NRG; PAM sequence: GGG
ccaaaataactgacatttgg

SEQ ID NO: 43766 - DNA, 20 bp, Artificial Sequence
  Description of Artificial Sequence: Synthetic oligonucleotide
  Target: ATXN2; (+) strand; PAM type: NRG; PAM sequence: GAG
aaaataactgacatttgggg

SEQ ID NO: 43767 - DNA, 20 bp, Artificial Sequence
  Description of Artificial Sequence: Synthetic oligonucleotide
  Target: ATXN2; (+) strand; PAM type: NRG; PAM sequence: CAG
ctgacatttgggggagaaat

SEQ ID NO: 43768 - DNA, 20 bp, Artificial Sequence
  Description of Artificial Sequence: Synthetic oligonucleotide
  Target: ATXN2; (+) strand; PAM type: NRG; PAM sequence: TAG
tattgattctgccatgccac

SEQ ID NO: 43769 - DNA, 20 bp, Artificial Sequence
  Description of Artificial Sequence: Synthetic oligonucleotide
  Target: ATXN2; (+) strand; PAM type: NRG; PAM sequence: CAG
agtgactactctttctaaat

SEQ ID NO: 43770 - DNA, 20 bp, Artificial Sequence
  Description of Artificial Sequence: Synthetic oligonucleotide
  Target: ATXN2; (+) strand; PAM type: NRG; PAM sequence: TAG
taaatcagtctactgtgcat

SEQ ID NO: 43771 - DNA, 20 bp, Artificial Sequence
  Description of Artificial Sequence: Synthetic oligonucleotide
  Target: ATXN2; (+) strand; PAM type: NRG; PAM sequence: CAG
tgtgcattagaccaatctat

SEQ ID NO: 43772 - DNA, 20 bp, Artificial Sequence
  Description of Artificial Sequence: Synthetic oligonucleotide
  Target: ATXN2; (+) strand; PAM type: NRG; PAM sequence: AGG
gtgcattagaccaatctatc

SEQ ID NO: 43773 - DNA, 20 bp, Artificial Sequence
  Description of Artificial Sequence: Synthetic oligonucleotide
  Target: ATXN2; (+) strand; PAM type: NRG; PAM sequence: AAG
tagaccaatctatcaggtaa

SEQ ID NO: 43774 - DNA, 20 bp, Artificial Sequence
  Description of Artificial Sequence: Synthetic oligonucleotide
  Target: ATXN2; (+) strand; PAM type: NRG; PAM sequence: GAG
gaccaatctatcaggtaaaa

SEQ ID NO: 43775 - DNA, 20 bp, Artificial Sequence
  Description of Artificial Sequence: Synthetic oligonucleotide
  Target: ATXN2; (+) strand; PAM type: NRG; PAM sequence: TGG
caatctatcaggtaaaagag

SEQ ID NO: 43776 - DNA, 20 bp, Artificial Sequence
  Description of Artificial Sequence: Synthetic oligonucleotide
  Target: ATXN2; (+) strand; PAM type: NRG; PAM sequence: CAG
ctatcaggtaaaagagtgga

SEQ ID NO: 43777 - DNA, 20 bp, Artificial Sequence
  Description of Artificial Sequence: Synthetic oligonucleotide
  Target: ATXN2; (+) strand; PAM type: NRG; PAM sequence: TGG
aggtaaaagagtggacagaa

SEQ ID NO: 43778 - DNA, 20 bp, Artificial Sequence
  Description of Artificial Sequence: Synthetic oligonucleotide
  Target: ATXN2; (+) strand; PAM type: NRG; PAM sequence: CAG
gtggacagaatggccctcat

SEQ ID NO: 43779 - DNA, 20 bp, Artificial Sequence
  Description of Artificial Sequence: Synthetic oligonucleotide
  Target: ATXN2; (+) strand; PAM type: NRG; PAM sequence: GAG
ggacagaatggccctcatca

SEQ ID NO: 43780 - DNA, 20 bp, Artificial Sequence
  Description of Artificial Sequence: Synthetic oligonucleotide
  Target: ATXN2; (+) strand; PAM type: NRG; PAM sequence: AAG
cagaatggccctcatcagag

SEQ ID NO: 43781 - DNA, 20 bp, Artificial Sequence
  Description of Artificial Sequence: Synthetic oligonucleotide
  Target: ATXN2; (+) strand; PAM type: NRG; PAM sequence: TGG
ccctcatcagagaagcctac

SEQ ID NO: 43782 - DNA, 20 bp, Artificial Sequence
  Description of Artificial Sequence: Synthetic oligonucleotide
  Target: ATXN2; (+) strand; PAM type: NRG; PAM sequence: AAG
agcctactggtgttaacacc

SEQ ID NO: 43783 - DNA, 20 bp, Artificial Sequence
  Description of Artificial Sequence: Synthetic oligonucleotide
  Target: ATXN2; (+) strand; PAM type: NRG; PAM sequence: AAG
cgaaaacttccctaatgtca

SEQ ID NO: 43784 - DNA, 20 bp, Artificial Sequence
  Description of Artificial Sequence: Synthetic oligonucleotide
  Target: ATXN2; (+) strand; PAM type: NRG; PAM sequence: CGG
aatctcctcactctctcacc

SEQ ID NO: 43785 - DNA, 20 bp, Artificial Sequence
  Description of Artificial Sequence: Synthetic oligonucleotide
  Target: ATXN2; (+) strand; PAM type: NRG; PAM sequence: TAG
cacccggctgccaaactctt

SEQ ID NO: 43786 - DNA, 20 bp, Artificial Sequence
  Description of Artificial Sequence: Synthetic oligonucleotide
  Target: ATXN2; (+) strand; PAM type: NRG; PAM sequence: TAG
aaattaatatatgttgccaa

SEQ ID NO: 43787 - DNA, 20 bp, Artificial Sequence
  Description of Artificial Sequence: Synthetic oligonucleotide
  Target: ATXN2; (+) strand; PAM type: NRG; PAM sequence: AAG
tattttatttttatttttat

SEQ ID NO: 43788 - DNA, 20 bp, Artificial Sequence
  Description of Artificial Sequence: Synthetic oligonucleotide
  Target: ATXN2; (+) strand; PAM type: NRG; PAM sequence: CAG
ttatttttatttttataaga

SEQ ID NO: 43789 - DNA, 20 bp, Artificial Sequence
  Description of Artificial Sequence: Synthetic oligonucleotide
  Target: ATXN2; (+) strand; PAM type: NRG; PAM sequence: GAG
atttttatttttataagaca

SEQ ID NO: 43790 - DNA, 20 bp, Artificial Sequence
  Description of Artificial Sequence: Synthetic oligonucleotide
  Target: ATXN2; (+) strand; PAM type: NRG; PAM sequence: CAG
cagagtctgtctctgtcgcc

SEQ ID NO: 43791 - DNA, 20 bp, Artificial Sequence
  Description of Artificial Sequence: Synthetic oligonucleotide
  Target: ATXN2; (+) strand; PAM type: NRG; PAM sequence: AGG
agagtctgtctctgtcgccc

SEQ ID NO: 43792 - DNA, 20 bp, Artificial Sequence
  Description of Artificial Sequence: Synthetic oligonucleotide
  Target: ATXN2; (+) strand; PAM type: NRG; PAM sequence: TGG
tctgtctctgtcgcccaggc

SEQ ID NO: 43793 - DNA, 20 bp, Artificial Sequence
  Description of Artificial Sequence: Synthetic oligonucleotide
  Target: ATXN2; (+) strand; PAM type: NRG; PAM sequence: GAG
tgtctctgtcgcccaggctg

SEQ ID NO: 43794 - DNA, 20 bp, Artificial Sequence
  Description of Artificial Sequence: Synthetic oligonucleotide
  Target: ATXN2; (+) strand; PAM type: NRG; PAM sequence: CAG
ctgtcgcccaggctggagtg

SEQ ID NO: 43795 - DNA, 20 bp, Artificial Sequence
  Description of Artificial Sequence: Synthetic oligonucleotide
  Target: ATXN2; (+) strand; PAM type: NRG; PAM sequence: TGG
tcgcccaggctggagtgcag

SEQ ID NO: 43796 - DNA, 20 bp, Artificial Sequence
  Description of Artificial Sequence: Synthetic oligonucleotide
  Target: ATXN2; (+) strand; PAM type: NRG; PAM sequence: CAG
tcactgcaacctctgcctcc

SEQ ID NO: 43797 - DNA, 20 bp, Artificial Sequence
  Description of Artificial Sequence: Synthetic oligonucleotide
  Target: ATXN2; (+) strand; PAM type: NRG; PAM sequence: AGG
cactgcaacctctgcctccc

SEQ ID NO: 43798 - DNA, 20 bp, Artificial Sequence
  Description of Artificial Sequence: Synthetic oligonucleotide
  Target: ATXN2; (+) strand; PAM type: NRG; PAM sequence: AAG
aacctctgcctcccaggttc

SEQ ID NO: 43799 - DNA, 20 bp, Artificial Sequence
  Description of Artificial Sequence: Synthetic oligonucleotide
  Target: ATXN2; (+) strand; PAM type: NRG; PAM sequence: CAG
ttcaagtgattctcctgcct

SEQ ID NO: 43800 - DNA, 20 bp, Artificial Sequence
  Description of Artificial Sequence: Synthetic oligonucleotide
  Target: ATXN2; (+) strand; PAM type: NRG; PAM sequence: AAG
ttctcctgcctcagcctccc

SEQ ID NO: 43801 - DNA, 20 bp, Artificial Sequence
  Description of Artificial Sequence: Synthetic oligonucleotide
  Target: ATXN2; (+) strand; PAM type: NRG; PAM sequence: TAG
tcctgcctcagcctcccaag

SEQ ID NO: 43802 - DNA, 20 bp, Artificial Sequence
  Description of Artificial Sequence: Synthetic oligonucleotide
  Target: ATXN2; (+) strand; PAM type: NRG; PAM sequence: TGG
gcctcagcctcccaagtagc

SEQ ID NO: 43803 - DNA, 20 bp, Artificial Sequence
  Description of Artificial Sequence: Synthetic oligonucleotide
  Target: ATXN2; (+) strand; PAM type: NRG; PAM sequence: GGG
cctcagcctcccaagtagct

SEQ ID NO: 43804 - DNA, 20 bp, Artificial Sequence
  Description of Artificial Sequence: Synthetic oligonucleotide
  Target: ATXN2; (+) strand; PAM type: NRG; PAM sequence: TAG
cccaagtagctgggtatttt

SEQ ID NO: 43805 - DNA, 20 bp, Artificial Sequence
  Description of Artificial Sequence: Synthetic oligonucleotide
  Target: ATXN2; (+) strand; PAM type: NRG; PAM sequence: TAG
aagtagctgggtatttttag

SEQ ID NO: 43806 - DNA, 20 bp, Artificial Sequence
  Description of Artificial Sequence: Synthetic oligonucleotide
  Target: ATXN2; (+) strand; PAM type: NRG; PAM sequence: GAG
gtagctgggtatttttagta

SEQ ID NO: 43807 - DNA, 20 bp, Artificial Sequence
  Description of Artificial Sequence: Synthetic oligonucleotide
  Target: ATXN2; (+) strand; PAM type: NRG; PAM sequence: GAG
tgggtatttttagtagagac

SEQ ID NO: 43808 - DNA, 20 bp, Artificial Sequence
  Description of Artificial Sequence: Synthetic oligonucleotide
  Target: ATXN2; (+) strand; PAM type: NRG; PAM sequence: AGG
gggtatttttagtagagacg

SEQ ID NO: 43809 - DNA, 20 bp, Artificial Sequence
  Description of Artificial Sequence: Synthetic oligonucleotide
  Target: ATXN2; (+) strand; PAM type: NRG; PAM sequence: TGG
gagacgaggtttcaccatgt

SEQ ID NO: 43810 - DNA, 20 bp, Artificial Sequence
  Description of Artificial Sequence: Synthetic oligonucleotide
  Target: ATXN2; (+) strand; PAM type: NRG; PAM sequence: CAG
cgaggtttcaccatgttggc

SEQ ID NO: 43811 - DNA, 20 bp, Artificial Sequence
  Description of Artificial Sequence: Synthetic oligonucleotide
  Target: ATXN2; (+) strand; PAM type: NRG; PAM sequence: AGG
gaggtttcaccatgttggcc

SEQ ID NO: 43812 - DNA, 20 bp, Artificial Sequence
  Description of Artificial Sequence: Synthetic oligonucleotide
  Target: ATXN2; (+) strand; PAM type: NRG; PAM sequence: TGG
tttcaccatgttggccaggc

SEQ ID NO: 43813 - DNA, 20 bp, Artificial Sequence
  Description of Artificial Sequence: Synthetic oligonucleotide
  Target: ATXN2; (+) strand; PAM type: NRG; PAM sequence: AAG
ggtctcaaactcctgacctc

SEQ ID NO: 43814 - DNA, 20 bp, Artificial Sequence
  Description of Artificial Sequence: Synthetic oligonucleotide
  Target: ATXN2; (+) strand; PAM type: NRG; PAM sequence: CAG
ctcaagtgatccacctgcct

SEQ ID NO: 43815 - DNA, 20 bp, Artificial Sequence
  Description of Artificial Sequence: Synthetic oligonucleotide
  Target: ATXN2; (+) strand; PAM type: NRG; PAM sequence: AAG
ccacctgcctcagcctccca

SEQ ID NO: 43816 - DNA, 20 bp, Artificial Sequence
  Description of Artificial Sequence: Synthetic oligonucleotide
  Target: ATXN2; (+) strand; PAM type: NRG; PAM sequence: GAG
cctcagcctcccaaagtgct

SEQ ID NO: 43817 - DNA, 20 bp, Artificial Sequence
  Description of Artificial Sequence: Synthetic oligonucleotide
  Target: ATXN2; (+) strand; PAM type: NRG; PAM sequence: CAG
ctcccaaagtgctgagatta

SEQ ID NO: 43818 - DNA, 20 bp, Artificial Sequence
  Description of Artificial Sequence: Synthetic oligonucleotide
  Target: ATXN2; (+) strand; PAM type: NRG; PAM sequence: AGG
tcccaaagtgctgagattac

SEQ ID NO: 43819 - DNA, 20 bp, Artificial Sequence
  Description of Artificial Sequence: Synthetic oligonucleotide
  Target: ATXN2; (+) strand; PAM type: NRG; PAM sequence: TAG
agtgctgagattacaggcgt

SEQ ID NO: 43820 - DNA, 20 bp, Artificial Sequence
  Description of Artificial Sequence: Synthetic oligonucleotide
  Target: ATXN2; (+) strand; PAM type: NRG; PAM sequence: TGG
caggcgttagccaccatgcc

SEQ ID NO: 43821 - DNA, 20 bp, Artificial Sequence
  Description of Artificial Sequence: Synthetic oligonucleotide
  Target: ATXN2; (+) strand; PAM type: NRG; PAM sequence: CAG
ccaccatgcctggcttccaa

SEQ ID NO: 43822 - DNA, 20 bp, Artificial Sequence
  Description of Artificial Sequence: Synthetic oligonucleotide
  Target: ATXN2; (+) strand; PAM type: NRG; PAM sequence: AGG
caccatgcctggcttccaac

SEQ ID NO: 43823 - DNA, 20 bp, Artificial Sequence
  Description of Artificial Sequence: Synthetic oligonucleotide
  Target: ATXN2; (+) strand; PAM type: NRG; PAM sequence: TAG
ttaaacacgaacatgatctt

SEQ ID NO: 43824 - DNA, 20 bp, Artificial Sequence
  Description of Artificial Sequence: Synthetic oligonucleotide
  Target: ATXN2; (+) strand; PAM type: NRG; PAM sequence: AAG
aacacgaacatgatctttag

SEQ ID NO: 43825 - DNA, 20 bp, Artificial Sequence
  Description of Artificial Sequence: Synthetic oligonucleotide
  Target: ATXN2; (+) strand; PAM type: NRG; PAM sequence: TGG
tatacactataattttcaaa

SEQ ID NO: 43826 - DNA, 20 bp, Artificial Sequence
  Description of Artificial Sequence: Synthetic oligonucleotide
  Target: ATXN2; (+) strand; PAM type: NRG; PAM sequence: CAG
ttcaacatctctgaatgaca

SEQ ID NO: 43827 - DNA, 20 bp, Artificial Sequence
  Description of Artificial Sequence: Synthetic oligonucleotide
  Target: ATXN2; (+) strand; PAM type: NRG; PAM sequence: AAG
acatctctgaatgacacaga

SEQ ID NO: 43828 - DNA, 20 bp, Artificial Sequence
  Description of Artificial Sequence: Synthetic oligonucleotide
  Target: ATXN2; (+) strand; PAM type: NRG; PAM sequence: AAG
agaaagtatatttctgtgtg

SEQ ID NO: 43829 - DNA, 20 bp, Artificial Sequence
  Description of Artificial Sequence: Synthetic oligonucleotide
  Target: ATXN2; (+) strand; PAM type: NRG; PAM sequence: GAG
tctgtgtgaagttaatacat

SEQ ID NO: 43830 - DNA, 20 bp, Artificial Sequence
  Description of Artificial Sequence: Synthetic oligonucleotide
  Target: ATXN2; (+) strand; PAM type: NRG; PAM sequence: CAG
gtgtgaagttaatacatgag

SEQ ID NO: 43831 - DNA, 20 bp, Artificial Sequence
  Description of Artificial Sequence: Synthetic oligonucleotide
  Target: ATXN2; (+) strand; PAM type: NRG; PAM sequence: AAG
ccttaaatcttaatgtaata

SEQ ID NO: 43832 - DNA, 20 bp, Artificial Sequence
  Description of Artificial Sequence: Synthetic oligonucleotide
  Target: ATXN2; (+) strand; PAM type: NRG; PAM sequence: CAG
taatgtaataaagatgttca

SEQ ID NO: 43833 - DNA, 20 bp, Artificial Sequence
  Description of Artificial Sequence: Synthetic oligonucleotide
  Target: ATXN2; (+) strand; PAM type: NRG; PAM sequence: TGG
aacatcgcttactcaaatga

SEQ ID NO: 43834 - DNA, 20 bp, Artificial Sequence
  Description of Artificial Sequence: Synthetic oligonucleotide
  Target: ATXN2; (+) strand; PAM type: NRG; PAM sequence: AAG
ttactcaaatgatggactac

SEQ ID NO: 43835 - DNA, 20 bp, Artificial Sequence
  Description of Artificial Sequence: Synthetic oligonucleotide
  Target: ATXN2; (+) strand; PAM type: NRG; PAM sequence: CAG
gactacaagaaaaatatcaa

SEQ ID NO: 43836 - DNA, 20 bp, Artificial Sequence
  Description of Artificial Sequence: Synthetic oligonucleotide
  Target: ATXN2; (+) strand; PAM type: NRG; PAM sequence: TAG
tatcaacagaattttgcatt

SEQ ID NO: 43837 - DNA, 20 bp, Artificial Sequence
  Description of Artificial Sequence: Synthetic oligonucleotide
  Target: ATXN2; (+) strand; PAM type: NRG; PAM sequence: AAG
tgcatttagtgaccactatt

SEQ ID NO: 43838 - DNA, 20 bp, Artificial Sequence
  Description of Artificial Sequence: Synthetic oligonucleotide
  Target: ATXN2; (+) strand; PAM type: NRG; PAM sequence: AGG
gcatttagtgaccactatta

SEQ ID NO: 43839 - DNA, 20 bp, Artificial Sequence
  Description of Artificial Sequence: Synthetic oligonucleotide
  Target: ATXN2; (+) strand; PAM type: NRG; PAM sequence: GAG
accactattaaggccctttt

SEQ ID NO: 43840 - DNA, 20 bp, Artificial Sequence
  Description of Artificial Sequence: Synthetic oligonucleotide
  Target: ATXN2; (+) strand; PAM type: NRG; PAM sequence: AAG
tattaaggcccttttgagca

SEQ ID NO: 43841 - DNA, 20 bp, Artificial Sequence
  Description of Artificial Sequence: Synthetic oligonucleotide
  Target: ATXN2; (+) strand; PAM type: NRG; PAM sequence: AAG
taaggcccttttgagcaaag

SEQ ID NO: 43842 - DNA, 20 bp, Artificial Sequence
  Description of Artificial Sequence: Synthetic oligonucleotide
  Target: ATXN2; (+) strand; PAM type: NRG; PAM sequence: CAG
aaagaagtcaccttgaaaat

SEQ ID NO: 43843 - DNA, 20 bp, Artificial Sequence
  Description of Artificial Sequence: Synthetic oligonucleotide
  Target: ATXN2; (+) strand; PAM type: NRG; PAM sequence: TGG
gaagtcaccttgaaaatcag

SEQ ID NO: 43844 - DNA, 20 bp, Artificial Sequence
  Description of Artificial Sequence: Synthetic oligonucleotide
  Target: ATXN2; (+) strand; PAM type: NRG; PAM sequence: AAG
atcagtggaacttgctcttc

SEQ ID NO: 43845 - DNA, 20 bp, Artificial Sequence
  Description of Artificial Sequence: Synthetic oligonucleotide
  Target: ATXN2; (+) strand; PAM type: NRG; PAM sequence: AGG
tcagtggaacttgctcttca

SEQ ID NO: 43846 - DNA, 20 bp, Artificial Sequence
  Description of Artificial Sequence: Synthetic oligonucleotide
  Target: ATXN2; (+) strand; PAM type: NRG; PAM sequence: TAG
tggaacttgctcttcaaggt

SEQ ID NO: 43847 - DNA, 20 bp, Artificial Sequence
  Description of Artificial Sequence: Synthetic oligonucleotide
  Target: ATXN2; (+) strand; PAM type: NRG; PAM sequence: CAG
ctcttcaaggttagatgctt

SEQ ID NO: 43848 - DNA, 20 bp, Artificial Sequence
  Description of Artificial Sequence: Synthetic oligonucleotide
  Target: ATXN2; (+) strand; PAM type: NRG; PAM sequence: AAG
aaggttagatgcttcagtca

SEQ ID NO: 43849 - DNA, 20 bp, Artificial Sequence
  Description of Artificial Sequence: Synthetic oligonucleotide
  Target: ATXN2; (+) strand; PAM type: NRG; PAM sequence: TAG
agtcatatgacctgcctgct

SEQ ID NO: 43850 - DNA, 20 bp, Artificial Sequence
  Description of Artificial Sequence: Synthetic oligonucleotide
  Target: ATXN2; (+) strand; PAM type: NRG; PAM sequence: TGG
atatgacctgcctgcttaga

SEQ ID NO: 43851 - DNA, 20 bp, Artificial Sequence
  Description of Artificial Sequence: Synthetic oligonucleotide
  Target: ATXN2; (+) strand; PAM type: NRG; PAM sequence: AAG
gatggtaacaatttatttaa

SEQ ID NO: 43852 - DNA, 20 bp, Artificial Sequence
  Description of Artificial Sequence: Synthetic oligonucleotide
  Target: ATXN2; (+) strand; PAM type: NRG; PAM sequence: TAG
ggtaacaatttatttaaaag

SEQ ID NO: 43853 - DNA, 20 bp, Artificial Sequence
  Description of Artificial Sequence: Synthetic oligonucleotide
  Target: ATXN2; (+) strand; PAM type: NRG; PAM sequence: CAG
ttatttaaaagtagccaata

SEQ ID NO: 43854 - DNA, 20 bp, Artificial Sequence
  Description of Artificial Sequence: Synthetic oligonucleotide
  Target: ATXN2; (+) strand; PAM type: NRG; PAM sequence: CAG
gtagccaatacagttttctc

SEQ ID NO: 43855 - DNA, 20 bp, Artificial Sequence
  Description of Artificial Sequence: Synthetic oligonucleotide
  Target: ATXN2; (+) strand; PAM type: NRG; PAM sequence: AGG
tagccaatacagttttctcc

SEQ ID NO: 43856 - DNA, 20 bp, Artificial Sequence
  Description of Artificial Sequence: Synthetic oligonucleotide
  Target: ATXN2; (+) strand; PAM type: NRG; PAM sequence: GGG
agccaatacagttttctcca

SEQ ID NO: 43857 - DNA, 20 bp, Artificial Sequence
  Description of Artificial Sequence: Synthetic oligonucleotide
  Target: ATXN2; (+) strand; PAM type: NRG; PAM sequence: AAG
caatacagttttctccaggg

SEQ ID NO: 43858 - DNA, 20 bp, Artificial Sequence
  Description of Artificial Sequence: Synthetic oligonucleotide
  Target: ATXN2; (+) strand; PAM type: NRG; PAM sequence: CAG
tacagttttctccagggaag

SEQ ID NO: 43859 - DNA, 20 bp, Artificial Sequence
  Description of Artificial Sequence: Synthetic oligonucleotide
  Target: ATXN2; (+) strand; PAM type: NRG; PAM sequence: AGG
acagttttctccagggaagc

SEQ ID NO: 43860 - DNA, 20 bp, Artificial Sequence
  Description of Artificial Sequence: Synthetic oligonucleotide
  Target: ATXN2; (+) strand; PAM type: NRG; PAM sequence: GAG
agttttctccagggaagcag

SEQ ID NO: 43861 - DNA, 20 bp, Artificial Sequence
  Description of Artificial Sequence: Synthetic oligonucleotide
  Target: ATXN2; (+) strand; PAM type: NRG; PAM sequence: CGG
caggagaaacacattttgtg

SEQ ID NO: 43862 - DNA, 20 bp, Artificial Sequence
  Description of Artificial Sequence: Synthetic oligonucleotide
  Target: ATXN2; (+) strand; PAM type: NRG; PAM sequence: TAG
ttttgtgcggaaaactttat

SEQ ID NO: 43863 - DNA, 20 bp, Artificial Sequence
  Description of Artificial Sequence: Synthetic oligonucleotide
  Target: ATXN2; (+) strand; PAM type: NRG; PAM sequence: AAG
aactttattagtcccaacat

SEQ ID NO: 43864 - DNA, 20 bp, Artificial Sequence
  Description of Artificial Sequence: Synthetic oligonucleotide
  Target: ATXN2; (+) strand; PAM type: NRG; PAM sequence: CAG
actaattttaatgaacaaat

SEQ ID NO: 43865 - DNA, 20 bp, Artificial Sequence
  Description of Artificial Sequence: Synthetic oligonucleotide
  Target: ATXN2; (+) strand; PAM type: NRG; PAM sequence: CAG
aaaattttaacacaaatatt

SEQ ID NO: 43866 - DNA, 20 bp, Artificial Sequence
  Description of Artificial Sequence: Synthetic oligonucleotide
  Target: ATXN2; (+) strand; PAM type: NRG; PAM sequence: TAG
ttaacacaaatattcagaac

SEQ ID NO: 43867 - DNA, 20 bp, Artificial Sequence
  Description of Artificial Sequence: Synthetic oligonucleotide
  Target: ATXN2; (+) strand; PAM type: NRG; PAM sequence: AAG
atattcagaactagtatcaa

SEQ ID NO: 43868 - DNA, 20 bp, Artificial Sequence
  Description of Artificial Sequence: Synthetic oligonucleotide
  Target: ATXN2; (+) strand; PAM type: NRG; PAM sequence: AGG
tattcagaactagtatcaaa

SEQ ID NO: 43869 - DNA, 20 bp, Artificial Sequence
  Description of Artificial Sequence: Synthetic oligonucleotide
  Target: ATXN2; (+) strand; PAM type: NRG; PAM sequence: CAG
atcaaaaggacattatgatt

SEQ ID NO: 43870 - DNA, 20 bp, Artificial Sequence
  Description of Artificial Sequence: Synthetic oligonucleotide
  Target: ATXN2; (+) strand; PAM type: NRG; PAM sequence: CAG
ggacattatgattcagaaaa

SEQ ID NO: 43871 - DNA, 20 bp, Artificial Sequence
  Description of Artificial Sequence: Synthetic oligonucleotide
  Target: ATXN2; (+) strand; PAM type: NRG; PAM sequence: AGG
gacattatgattcagaaaac

SEQ ID NO: 43872 - DNA, 20 bp, Artificial Sequence
  Description of Artificial Sequence: Synthetic oligonucleotide
  Target: ATXN2; (+) strand; PAM type: NRG; PAM sequence: TGG
gaaaacaggtttttaatata

SEQ ID NO: 43873 - DNA, 20 bp, Artificial Sequence
  Description of Artificial Sequence: Synthetic oligonucleotide
  Target: ATXN2; (+) strand; PAM type: NRG; PAM sequence: GGG
aaaacaggtttttaatatat

SEQ ID NO: 43874 - DNA, 20 bp, Artificial Sequence
  Description of Artificial Sequence: Synthetic oligonucleotide
  Target: ATXN2; (+) strand; PAM type: NRG; PAM sequence: TGG
acaggtttttaatatatggg

SEQ ID NO: 43875 - DNA, 20 bp, Artificial Sequence
  Description of Artificial Sequence: Synthetic oligonucleotide
  Target: ATXN2; (+) strand; PAM type: NRG; PAM sequence: TAG
tatatgggtggcatttaaat

SEQ ID NO: 43876 - DNA, 20 bp, Artificial Sequence
  Description of Artificial Sequence: Synthetic oligonucleotide
  Target: ATXN2; (+) strand; PAM type: NRG; PAM sequence: TGG
atatccctgtatttgatatg

SEQ ID NO: 43877 - DNA, 20 bp, Artificial Sequence
  Description of Artificial Sequence: Synthetic oligonucleotide
  Target: ATXN2; (+) strand; PAM type: NRG; PAM sequence: TGG
tatttgatatgtggcaatga

SEQ ID NO: 43878 - DNA, 20 bp, Artificial Sequence
  Description of Artificial Sequence: Synthetic oligonucleotide
  Target: ATXN2; (+) strand; PAM type: NRG; PAM sequence: TAG
atatgtggcaatgatggatt

SEQ ID NO: 43879 - DNA, 20 bp, Artificial Sequence
  Description of Artificial Sequence: Synthetic oligonucleotide
  Target: ATXN2; (+) strand; PAM type: NRG; PAM sequence: AAG
tttagcgccaaatactgaat

SEQ ID NO: 43880 - DNA, 20 bp, Artificial Sequence
  Description of Artificial Sequence: Synthetic oligonucleotide
  Target: ATXN2; (+) strand; PAM type: NRG; PAM sequence: AAG
aaatactgaataagaattac

SEQ ID NO: 43881 - DNA, 20 bp, Artificial Sequence
  Description of Artificial Sequence: Synthetic oligonucleotide
  Target: ATXN2; (+) strand; PAM type: NRG; PAM sequence: GAG
attttattcttatttttgac

SEQ ID NO: 43882 - DNA, 20 bp, Artificial Sequence
  Description of Artificial Sequence: Synthetic oligonucleotide
  Target: ATXN2; (+) strand; PAM type: NRG; PAM sequence: AGG
ttttattcttatttttgacg

SEQ ID NO: 43883 - DNA, 20 bp, Artificial Sequence
  Description of Artificial Sequence: Synthetic oligonucleotide
  Target: ATXN2; (+) strand; PAM type: NRG; PAM sequence: AAG
attcttatttttgacgagga

SEQ ID NO: 43884 - DNA, 20 bp, Artificial Sequence
  Description of Artificial Sequence: Synthetic oligonucleotide
  Target: ATXN2; (+) strand; PAM type: NRG; PAM sequence: TAG
atttttgacgaggaaagaaa

SEQ ID NO: 43885 - DNA, 20 bp, Artificial Sequence
  Description of Artificial Sequence: Synthetic oligonucleotide
  Target: ATXN2; (+) strand; PAM type: NRG; PAM sequence: CAG
cgtttttatcaattttatct

SEQ ID NO: 43886 - DNA, 20 bp, Artificial Sequence
  Description of Artificial Sequence: Synthetic oligonucleotide
  Target: ATXN2; (+) strand; PAM type: NRG; PAM sequence: AAG
tatcaattttatctcagatc

SEQ ID NO: 43887 - DNA, 20 bp, Artificial Sequence
  Description of Artificial Sequence: Synthetic oligonucleotide
  Target: ATXN2; (+) strand; PAM type: NRG; PAM sequence: AGG
atcaattttatctcagatca

SEQ ID NO: 43888 - DNA, 20 bp, Artificial Sequence
  Description of Artificial Sequence: Synthetic oligonucleotide
  Target: ATXN2; (+) strand; PAM type: NRG; PAM sequence: CAG
ctcagatcaaggacttcttc

SEQ ID NO: 43889 - DNA, 20 bp, Artificial Sequence
  Description of Artificial Sequence: Synthetic oligonucleotide
  Target: ATXN2; (+) strand; PAM type: NRG; PAM sequence: AAG
caaggacttcttccagatta

SEQ ID NO: 43890 - DNA, 20 bp, Artificial Sequence
  Description of Artificial Sequence: Synthetic oligonucleotide
  Target: ATXN2; (+) strand; PAM type: NRG; PAM sequence: CAG
ggacttcttccagattaaag

SEQ ID NO: 43891 - DNA, 20 bp, Artificial Sequence
  Description of Artificial Sequence: Synthetic oligonucleotide
  Target: ATXN2; (+) strand; PAM type: NRG; PAM sequence: AAG
aaagcagcctttcactatgt

SEQ ID NO: 43892 - DNA, 20 bp, Artificial Sequence
  Description of Artificial Sequence: Synthetic oligonucleotide
  Target: ATXN2; (+) strand; PAM type: NRG; PAM sequence: AAG
tttcactatgtaagattgca

SEQ ID NO: 43893 - DNA, 20 bp, Artificial Sequence
  Description of Artificial Sequence: Synthetic oligonucleotide
  Target: ATXN2; (+) strand; PAM type: NRG; PAM sequence: CAG
ctaactttaaaaaaattact

SEQ ID NO: 43894 - DNA, 20 bp, Artificial Sequence
  Description of Artificial Sequence: Synthetic oligonucleotide
  Target: ATXN2; (+) strand; PAM type: NRG; PAM sequence: TAG
aaaaattactcagttaaatt

SEQ ID NO: 43895 - DNA, 20 bp, Artificial Sequence
  Description of Artificial Sequence: Synthetic oligonucleotide
  Target: ATXN2; (+) strand; PAM type: NRG; PAM sequence: TGG
agttaaatttagaattcttc

SEQ ID NO: 43896 - DNA, 20 bp, Artificial Sequence
  Description of Artificial Sequence: Synthetic oligonucleotide
  Target: ATXN2; (+) strand; PAM type: NRG; PAM sequence: AAG
aaaatcaactactttaatct

SEQ ID NO: 43897 - DNA, 20 bp, Artificial Sequence
  Description of Artificial Sequence: Synthetic oligonucleotide
  Target: ATXN2; (+) strand; PAM type: NRG; PAM sequence: AGG
aaatcaactactttaatcta

SEQ ID NO: 43898 - DNA, 20 bp, Artificial Sequence
  Description of Artificial Sequence: Synthetic oligonucleotide
  Target: ATXN2; (+) strand; PAM type: NRG; PAM sequence: GGG
aatcaactactttaatctaa

SEQ ID NO: 43899 - DNA, 20 bp, Artificial Sequence
  Description of Artificial Sequence: Synthetic oligonucleotide
  Target: ATXN2; (+) strand; PAM type: NRG; PAM sequence: CAG
caactactttaatctaaggg

SEQ ID NO: 43900 - DNA, 20 bp, Artificial Sequence
  Description of Artificial Sequence: Synthetic oligonucleotide
  Target: ATXN2; (+) strand; PAM type: NRG; PAM sequence: AAG
aatctaagggcagacacgca

SEQ ID NO: 43901 - DNA, 20 bp, Artificial Sequence
  Description of Artificial Sequence: Synthetic oligonucleotide
  Target: ATXN2; (+) strand; PAM type: NRG; PAM sequence: CAG
taagggcagacacgcaaagt

SEQ ID NO: 43902 - DNA, 20 bp, Artificial Sequence
  Description of Artificial Sequence: Synthetic oligonucleotide
  Target: ATXN2; (+) strand; PAM type: NRG; PAM sequence: TGG
gacacgcaaagtcagctaca

SEQ ID NO: 43903 - DNA, 20 bp, Artificial Sequence
  Description of Artificial Sequence: Synthetic oligonucleotide
  Target: ATXN2; (+) strand; PAM type: NRG; PAM sequence: GGG
acacgcaaagtcagctacat

SEQ ID NO: 43904 - DNA, 20 bp, Artificial Sequence
  Description of Artificial Sequence: Synthetic oligonucleotide
  Target: ATXN2; (+) strand; PAM type: NRG; PAM sequence: AAG
atgggctgtcgctctcaaaa

SEQ ID NO: 43905 - DNA, 20 bp, Artificial Sequence
  Description of Artificial Sequence: Synthetic oligonucleotide
  Target: ATXN2; (+) strand; PAM type: NRG; PAM sequence: CAG
tgtcgctctcaaaaaagacc

SEQ ID NO: 43906 - DNA, 20 bp, Artificial Sequence
  Description of Artificial Sequence: Synthetic oligonucleotide
  Target: ATXN2; (+) strand; PAM type: NRG; PAM sequence: TGG
gaaaacaccatccctgctta

SEQ ID NO: 43907 - DNA, 20 bp, Artificial Sequence
  Description of Artificial Sequence: Synthetic oligonucleotide
  Target: ATXN2; (+) strand; PAM type: NRG; PAM sequence: TAG
ccatccctgcttatggccaa

SEQ ID NO: 43908 - DNA, 20 bp, Artificial Sequence
  Description of Artificial Sequence: Synthetic oligonucleotide
  Target: ATXN2; (+) strand; PAM type: NRG; PAM sequence: AGG
catccctgcttatggccaat

SEQ ID NO: 43909 - DNA, 20 bp, Artificial Sequence
  Description of Artificial Sequence: Synthetic oligonucleotide
  Target: ATXN2; (+) strand; PAM type: NRG; PAM sequence: AAG
ccctgcttatggccaatagg

SEQ ID NO: 43910 - DNA, 20 bp, Artificial Sequence
  Description of Artificial Sequence: Synthetic oligonucleotide
  Target: ATXN2; (+) strand; PAM type: NRG; PAM sequence: AGG
cctgcttatggccaatagga

SEQ ID NO: 43911 - DNA, 20 bp, Artificial Sequence
  Description of Artificial Sequence: Synthetic oligonucleotide
  Target: ATXN2; (+) strand; PAM type: NRG; PAM sequence: TAG
tggccaataggaaggttcac

SEQ ID NO: 43912 - DNA, 20 bp, Artificial Sequence
  Description of Artificial Sequence: Synthetic oligonucleotide
  Target: ATXN2; (+) strand; PAM type: NRG; PAM sequence: AGG
ggccaataggaaggttcact

SEQ ID NO: 43913 - DNA, 20 bp, Artificial Sequence
  Description of Artificial Sequence: Synthetic oligonucleotide
  Target: ATXN2; (+) strand; PAM type: NRG; PAM sequence: TGG
aggaaggttcactaggacct

SEQ ID NO: 43914 - DNA, 20 bp, Artificial Sequence
  Description of Artificial Sequence: Synthetic oligonucleotide
  Target: ATXN2; (+) strand; PAM type: NRG; PAM sequence: AAG
gttcactaggaccttggcca

SEQ ID NO: 43915 - DNA, 20 bp, Artificial Sequence
  Description of Artificial Sequence: Synthetic oligonucleotide
  Target: ATXN2; (+) strand; PAM type: NRG; PAM sequence: GAG
tcactaggaccttggccaaa

SEQ ID NO: 43916 - DNA, 20 bp, Artificial Sequence
  Description of Artificial Sequence: Synthetic oligonucleotide
  Target: ATXN2; (+) strand; PAM type: NRG; PAM sequence: AAG
aagagctgtaaaatgaacct

SEQ ID NO: 43917 - DNA, 20 bp, Artificial Sequence
  Description of Artificial Sequence: Synthetic oligonucleotide
  Target: ATXN2; (+) strand; PAM type: NRG; PAM sequence: AAG
tgtaaaatgaacctaagttc

SEQ ID NO: 43918 - DNA, 20 bp, Artificial Sequence
  Description of Artificial Sequence: Synthetic oligonucleotide
  Target: ATXN2; (+) strand; PAM type: NRG; PAM sequence: TGG
aatgaacctaagttcaagac

SEQ ID NO: 43919 - DNA, 20 bp, Artificial Sequence
  Description of Artificial Sequence: Synthetic oligonucleotide
  Target: ATXN2; (+) strand; PAM type: NRG; PAM sequence: AAG
cctaagttcaagactggctg

SEQ ID NO: 43920 - DNA, 20 bp, Artificial Sequence
  Description of Artificial Sequence: Synthetic oligonucleotide
  Target: ATXN2; (+) strand; PAM type: NRG; PAM sequence: AAG
agttcaagactggctgaaga

SEQ ID NO: 43921 - DNA, 20 bp, Artificial Sequence
  Description of Artificial Sequence: Synthetic oligonucleotide
  Target: ATXN2; (+) strand; PAM type: NRG; PAM sequence: CAG
atttgtttaactactgtata

SEQ ID NO: 43922 - DNA, 20 bp, Artificial Sequence
  Description of Artificial Sequence: Synthetic oligonucleotide
  Target: ATXN2; (+) strand; PAM type: NRG; PAM sequence: AAG
ctactgtatacagtgcaaat

SEQ ID NO: 43923 - DNA, 20 bp, Artificial Sequence
  Description of Artificial Sequence: Synthetic oligonucleotide
  Target: ATXN2; (+) strand; PAM type: NRG; PAM sequence: AGG
tactgtatacagtgcaaata

SEQ ID NO: 43924 - DNA, 20 bp, Artificial Sequence
  Description of Artificial Sequence: Synthetic oligonucleotide
  Target: ATXN2; (+) strand; PAM type: NRG; PAM sequence: GAG
ctgtatacagtgcaaataag

SEQ ID NO: 43925 - DNA, 20 bp, Artificial Sequence
  Description of Artificial Sequence: Synthetic oligonucleotide
  Target: ATXN2; (+) strand; PAM type: NRG; PAM sequence: AGG
tgtatacagtgcaaataagg

SEQ ID NO: 43926 - DNA, 20 bp, Artificial Sequence
  Description of Artificial Sequence: Synthetic oligonucleotide
  Target: ATXN2; (+) strand; PAM type: NRG; PAM sequence: GGG
gtatacagtgcaaataagga

SEQ ID NO: 43927 - DNA, 20 bp, Artificial Sequence
  Description of Artificial Sequence: Synthetic oligonucleotide
  Target: ATXN2; (+) strand; PAM type: NRG; PAM sequence: GGG
tatacagtgcaaataaggag

SEQ ID NO: 43928 - DNA, 20 bp, Artificial Sequence
  Description of Artificial Sequence: Synthetic oligonucleotide
  Target: ATXN2; (+) strand; PAM type: NRG; PAM sequence: GGG
atacagtgcaaataaggagg

SEQ ID NO: 43929 - DNA, 20 bp, Artificial Sequence
  Description of Artificial Sequence: Synthetic oligonucleotide
  Target: ATXN2; (+) strand; PAM type: NRG; PAM sequence: AAG
cagtgcaaataaggaggggg

SEQ ID NO: 43930 - DNA, 20 bp, Artificial Sequence
  Description of Artificial Sequence: Synthetic oligonucleotide
  Target: ATXN2; (+) strand; PAM type: NRG; PAM sequence: AGG
agtgcaaataaggaggggga

SEQ ID NO: 43931 - DNA, 20 bp, Artificial Sequence
  Description of Artificial Sequence: Synthetic oligonucleotide
  Target: ATXN2; (+) strand; PAM type: NRG; PAM sequence: TGG
aataaggagggggaaggctg

SEQ ID NO: 43932 - DNA, 20 bp, Artificial Sequence
  Description of Artificial Sequence: Synthetic oligonucleotide
  Target: ATXN2; (+) strand; PAM type: NRG; PAM sequence: GGG
ataaggagggggaaggctgt

SEQ ID NO: 43933 - DNA, 20 bp, Artificial Sequence
  Description of Artificial Sequence: Synthetic oligonucleotide
  Target: ATXN2; (+) strand; PAM type: NRG; PAM sequence: GGG
taaggagggggaaggctgtg

SEQ ID NO: 43934 - DNA, 20 bp, Artificial Sequence
  Description of Artificial Sequence: Synthetic oligonucleotide
  Target: ATXN2; (+) strand; PAM type: NRG; PAM sequence: CAG
ggagggggaaggctgtgggg

SEQ ID NO: 43935 - DNA, 20 bp, Artificial Sequence
  Description of Artificial Sequence: Synthetic oligonucleotide
  Target: ATXN2; (+) strand; PAM type: NRG; PAM sequence: TGG
ggctgtggggcagacccttc

SEQ ID NO: 43936 - DNA, 20 bp, Artificial Sequence
  Description of Artificial Sequence: Synthetic oligonucleotide
  Target: ATXN2; (+) strand; PAM type: NRG; PAM sequence: GGG
gctgtggggcagacccttct

SEQ ID NO: 43937 - DNA, 20 bp, Artificial Sequence
  Description of Artificial Sequence: Synthetic oligonucleotide
  Target: ATXN2; (+) strand; PAM type: NRG; PAM sequence: GGG
ctgtggggcagacccttctg

SEQ ID NO: 43938 - DNA, 20 bp, Artificial Sequence
  Description of Artificial Sequence: Synthetic oligonucleotide
  Target: ATXN2; (+) strand; PAM type: NRG; PAM sequence: AAG
cagacccttctggggctgta

SEQ ID NO: 43939 - DNA, 20 bp, Artificial Sequence
  Description of Artificial Sequence: Synthetic oligonucleotide
  Target: ATXN2; (+) strand; PAM type: NRG; PAM sequence: AAG
acccttctggggctgtaaag

SEQ ID NO: 43940 - DNA, 20 bp, Artificial Sequence
  Description of Artificial Sequence: Synthetic oligonucleotide
  Target: ATXN2; (+) strand; PAM type: NRG; PAM sequence: CAG
ctgtaaagaagcataattat

SEQ ID NO: 43941 - DNA, 20 bp, Artificial Sequence
  Description of Artificial Sequence: Synthetic oligonucleotide
  Target: ATXN2; (+) strand; PAM type: NRG; PAM sequence: AGG
tgtaaagaagcataattatc

SEQ ID NO: 43942 - DNA, 20 bp, Artificial Sequence
  Description of Artificial Sequence: Synthetic oligonucleotide
  Target: ATXN2; (+) strand; PAM type: NRG; PAM sequence: CAG
aaagaagcataattatcagg

SEQ ID NO: 43943 - DNA, 20 bp, Artificial Sequence
  Description of Artificial Sequence: Synthetic oligonucleotide
  Target: ATXN2; (+) strand; PAM type: NRG; PAM sequence: GAG
agaagcataattatcaggca

SEQ ID NO: 43944 - DNA, 20 bp, Artificial Sequence
  Description of Artificial Sequence: Synthetic oligonucleotide
  Target: ATXN2; (+) strand; PAM type: NRG; PAM sequence: AAG
cccctttttaacaacaattc

SEQ ID NO: 43945 - DNA, 20 bp, Artificial Sequence
  Description of Artificial Sequence: Synthetic oligonucleotide
  Target: ATXN2; (+) strand; PAM type: NRG; PAM sequence: GAG
cctttttaacaacaattcaa

SEQ ID NO: 43946 - DNA, 20 bp, Artificial Sequence
  Description of Artificial Sequence: Synthetic oligonucleotide
  Target: ATXN2; (+) strand; PAM type: NRG; PAM sequence: GAG
tttttaacaacaattcaaga

SEQ ID NO: 43947 - DNA, 20 bp, Artificial Sequence
  Description of Artificial Sequence: Synthetic oligonucleotide
  Target: ATXN2; (+) strand; PAM type: NRG; PAM sequence: TAG
caacaattcaagagagttta

SEQ ID NO: 43948 - DNA, 20 bp, Artificial Sequence
  Description of Artificial Sequence: Synthetic oligonucleotide
  Target: ATXN2; (+) strand; PAM type: NRG; PAM sequence: AAG
aatttctctctaatgaacaa

SEQ ID NO: 43949 - DNA, 20 bp, Artificial Sequence
  Description of Artificial Sequence: Synthetic oligonucleotide
  Target: ATXN2; (+) strand; PAM type: NRG; PAM sequence: AGG
atttctctctaatgaacaaa

SEQ ID NO: 43950 - DNA, 20 bp, Artificial Sequence
  Description of Artificial Sequence: Synthetic oligonucleotide
  Target: ATXN2; (+) strand; PAM type: NRG; PAM sequence: TAG
tctaatgaacaaaaggttaa

SEQ ID NO: 43951 - DNA, 20 bp, Artificial Sequence
  Description of Artificial Sequence: Synthetic oligonucleotide
  Target: ATXN2; (+) strand; PAM type: NRG; PAM sequence: TAG
gaacaaaaggttaatagaaa

SEQ ID NO: 43952 - DNA, 20 bp, Artificial Sequence
  Description of Artificial Sequence: Synthetic oligonucleotide
  Target: ATXN2; (+) strand; PAM type: NRG; PAM sequence: AAG
gaaatagttttaataaacta

SEQ ID NO: 43953 - DNA, 20 bp, Artificial Sequence
  Description of Artificial Sequence: Synthetic oligonucleotide
  Target: ATXN2; (+) strand; PAM type: NRG; PAM sequence: CAG
aataaactaaagttaaaaca

SEQ ID NO: 43954 - DNA, 20 bp, Artificial Sequence
  Description of Artificial Sequence: Synthetic oligonucleotide
  Target: ATXN2; (+) strand; PAM type: NRG; PAM sequence: TAG
aagttaaaacacagaaatta

SEQ ID NO: 43955 - DNA, 20 bp, Artificial Sequence
  Description of Artificial Sequence: Synthetic oligonucleotide
  Target: ATXN2; (+) strand; PAM type: NRG; PAM sequence: AGG
agttaaaacacagaaattat

SEQ ID NO: 43956 - DNA, 20 bp, Artificial Sequence
  Description of Artificial Sequence: Synthetic oligonucleotide
  Target: ATXN2; (+) strand; PAM type: NRG; PAM sequence: AAG
ttataggttattaaataatg

SEQ ID NO: 43957 - DNA, 20 bp, Artificial Sequence
  Description of Artificial Sequence: Synthetic oligonucleotide
  Target: ATXN2; (+) strand; PAM type: NRG; PAM sequence: GAG
ataggttattaaataatgaa

SEQ ID NO: 43958 - DNA, 20 bp, Artificial Sequence
  Description of Artificial Sequence: Synthetic oligonucleotide
  Target: ATXN2; (+) strand; PAM type: NRG; PAM sequence: AGG
taggttattaaataatgaag

SEQ ID NO: 43959 - DNA, 20 bp, Artificial Sequence
  Description of Artificial Sequence: Synthetic oligonucleotide
  Target: ATXN2; (+) strand; PAM type: NRG; PAM sequence: TAG
tttgtaattataaactcaca

SEQ ID NO: 43960 - DNA, 20 bp, Artificial Sequence
  Description of Artificial Sequence: Synthetic oligonucleotide
  Target: ATXN2; (+) strand; PAM type: NRG; PAM sequence: AGG
ttgtaattataaactcacat

SEQ ID NO: 43961 - DNA, 20 bp, Artificial Sequence
  Description of Artificial Sequence: Synthetic oligonucleotide
  Target: ATXN2; (+) strand; PAM type: NRG; PAM sequence: GAG
gtaattataaactcacatag

SEQ ID NO: 43962 - DNA, 20 bp, Artificial Sequence
  Description of Artificial Sequence: Synthetic oligonucleotide
  Target: ATXN2; (+) strand; PAM type: NRG; PAM sequence: AAG
actcacataggagttaaaca

SEQ ID NO: 43963 - DNA, 20 bp, Artificial Sequence
  Description of Artificial Sequence: Synthetic oligonucleotide
  Target: ATXN2; (+) strand; PAM type: NRG; PAM sequence: TGG
acaaaaacatgaacaaattg

SEQ ID NO: 43964 - DNA, 20 bp, Artificial Sequence
  Description of Artificial Sequence: Synthetic oligonucleotide
  Target: ATXN2; (+) strand; PAM type: NRG; PAM sequence: AAG
ttgtggtattgtaccttctg

SEQ ID NO: 43965 - DNA, 20 bp, Artificial Sequence
  Description of Artificial Sequence: Synthetic oligonucleotide
  Target: ATXN2; (+) strand; PAM type: NRG; PAM sequence: TAG
accttctgaagacatgcgtt

SEQ ID NO: 43966 - DNA, 20 bp, Artificial Sequence
  Description of Artificial Sequence: Synthetic oligonucleotide
  Target: ATXN2; (+) strand; PAM type: NRG; PAM sequence: AGG
ccttctgaagacatgcgttt

SEQ ID NO: 43967 - DNA, 20 bp, Artificial Sequence
  Description of Artificial Sequence: Synthetic oligonucleotide
  Target: ATXN2; (+) strand; PAM type: NRG; PAM sequence: TAG
tgaagacatgcgtttaggca

SEQ ID NO: 43968 - DNA, 20 bp, Artificial Sequence
  Description of Artificial Sequence: Synthetic oligonucleotide
  Target: ATXN2; (+) strand; PAM type: NRG; PAM sequence: TAG
agacatgcgtttaggcatag

SEQ ID NO: 43969 - DNA, 20 bp, Artificial Sequence
  Description of Artificial Sequence: Synthetic oligonucleotide
  Target: ATXN2; (+) strand; PAM type: NRG; PAM sequence: GAG
acatgcgtttaggcatagta

SEQ ID NO: 43970 - DNA, 20 bp, Artificial Sequence
  Description of Artificial Sequence: Synthetic oligonucleotide
  Target: ATXN2; (+) strand; PAM type: NRG; PAM sequence: CAG
gcgtttaggcatagtagaga

SEQ ID NO: 43971 - DNA, 20 bp, Artificial Sequence
  Description of Artificial Sequence: Synthetic oligonucleotide
  Target: ATXN2; (+) strand; PAM type: NRG; PAM sequence: AGG
cgtttaggcatagtagagac

SEQ ID NO: 43972 - DNA, 20 bp, Artificial Sequence
  Description of Artificial Sequence: Synthetic oligonucleotide
  Target: ATXN2; (+) strand; PAM type: NRG; PAM sequence: GAG
tttaggcatagtagagacag

SEQ ID NO: 43973 - DNA, 20 bp, Artificial Sequence
  Description of Artificial Sequence: Synthetic oligonucleotide
  Target: ATXN2; (+) strand; PAM type: NRG; PAM sequence: TGG
ggcatagtagagacaggagc

SEQ ID NO: 43974 - DNA, 20 bp, Artificial Sequence
  Description of Artificial Sequence: Synthetic oligonucleotide
  Target: ATXN2; (+) strand; PAM type: NRG; PAM sequence: GAG
catagtagagacaggagctg

SEQ ID NO: 43975 - DNA, 20 bp, Artificial Sequence
  Description of Artificial Sequence: Synthetic oligonucleotide
  Target: ATXN2; (+) strand; PAM type: NRG; PAM sequence: GAG
gacaggagctggagaaccat

SEQ ID NO: 43976 - DNA, 20 bp, Artificial Sequence
  Description of Artificial Sequence: Synthetic oligonucleotide
  Target: ATXN2; (+) strand; PAM type: NRG; PAM sequence: CAG
aggagctggagaaccatgag

SEQ ID NO: 43977 - DNA, 20 bp, Artificial Sequence
  Description of Artificial Sequence: Synthetic oligonucleotide
  Target: ATXN2; (+) strand; PAM type: NRG; PAM sequence: GAG
gagctggagaaccatgagca

SEQ ID NO: 43978 - DNA, 20 bp, Artificial Sequence
  Description of Artificial Sequence: Synthetic oligonucleotide
  Target: ATXN2; (+) strand; PAM type: NRG; PAM sequence: AGG
agctggagaaccatgagcag

SEQ ID NO: 43979 - DNA, 20 bp, Artificial Sequence
  Description of Artificial Sequence: Synthetic oligonucleotide
  Target: ATXN2; (+) strand; PAM type: NRG; PAM sequence: GGG
gctggagaaccatgagcaga

SEQ ID NO: 43980 - DNA, 20 bp, Artificial Sequence
  Description of Artificial Sequence: Synthetic oligonucleotide
  Target: ATXN2; (+) strand; PAM type: NRG; PAM sequence: GGG
ctggagaaccatgagcagag

SEQ ID NO: 43981 - DNA, 20 bp, Artificial Sequence
  Description of Artificial Sequence: Synthetic oligonucleotide
  Target: ATXN2; (+) strand; PAM type: NRG; PAM sequence: GAG
agaaccatgagcagaggggt

SEQ ID NO: 43982 - DNA, 20 bp, Artificial Sequence
  Description of Artificial Sequence: Synthetic oligonucleotide
  Target: ATXN2; (+) strand; PAM type: NRG; PAM sequence: CGG
ccatgagcagaggggtgaga

SEQ ID NO: 43983 - DNA, 20 bp, Artificial Sequence
  Description of Artificial Sequence: Synthetic oligonucleotide
  Target: ATXN2; (+) strand; PAM type: NRG; PAM sequence: GGG
catgagcagaggggtgagac

SEQ ID NO: 43984 - DNA, 20 bp, Artificial Sequence
  Description of Artificial Sequence: Synthetic oligonucleotide
  Target: ATXN2; (+) strand; PAM type: NRG; PAM sequence: GGG
atgagcagaggggtgagacg

SEQ ID NO: 43985 - DNA, 20 bp, Artificial Sequence
  Description of Artificial Sequence: Synthetic oligonucleotide
  Target: ATXN2; (+) strand; PAM type: NRG; PAM sequence: GGG
tgagcagaggggtgagacgg

SEQ ID NO: 43986 - DNA, 20 bp, Artificial Sequence
  Description of Artificial Sequence: Synthetic oligonucleotide
  Target: ATXN2; (+) strand; PAM type: NRG; PAM sequence: TGG
agaggggtgagacgggggtc

SEQ ID NO: 43987 - DNA, 20 bp, Artificial Sequence
  Description of Artificial Sequence: Synthetic oligonucleotide
  Target: ATXN2; (+) strand; PAM type: NRG; PAM sequence: TGG
gggtgagacgggggtctgga

SEQ ID NO: 43988 - DNA, 20 bp, Artificial Sequence
  Description of Artificial Sequence: Synthetic oligonucleotide
  Target: ATXN2; (+) strand; PAM type: NRG; PAM sequence: GAG
acgggggtctggatggccgc

SEQ ID NO: 43989 - DNA, 20 bp, Artificial Sequence
  Description of Artificial Sequence: Synthetic oligonucleotide
  Target: ATXN2; (+) strand; PAM type: NRG; PAM sequence: AGG
cgggggtctggatggccgcg

SEQ ID NO: 43990 - DNA, 20 bp, Artificial Sequence
  Description of Artificial Sequence: Synthetic oligonucleotide
  Target: ATXN2; (+) strand; PAM type: NRG; PAM sequence: GGG
gggggtctggatggccgcga

SEQ ID NO: 43991 - DNA, 20 bp, Artificial Sequence
  Description of Artificial Sequence: Synthetic oligonucleotide
  Target: ATXN2; (+) strand; PAM type: NRG; PAM sequence: GGG
ggggtctggatggccgcgag

SEQ ID NO: 43992 - DNA, 20 bp, Artificial Sequence
  Description of Artificial Sequence: Synthetic oligonucleotide
  Target: ATXN2; (+) strand; PAM type: NRG; PAM sequence: GGG
gggtctggatggccgcgagg

SEQ ID NO: 43993 - DNA, 20 bp, Artificial Sequence
  Description of Artificial Sequence: Synthetic oligonucleotide
  Target: ATXN2; (+) strand; PAM type: NRG; PAM sequence: GGG
ggtctggatggccgcgaggg

SEQ ID NO: 43994 - DNA, 20 bp, Artificial Sequence
  Description of Artificial Sequence: Synthetic oligonucleotide
  Target: ATXN2; (+) strand; PAM type: NRG; PAM sequence: TGG
ggatggccgcgaggggggcc

SEQ ID NO: 43995 - DNA, 20 bp, Artificial Sequence
  Description of Artificial Sequence: Synthetic oligonucleotide
  Target: ATXN2; (+) strand; PAM type: NRG; PAM sequence: GAG
atggccgcgaggggggcctg

SEQ ID NO: 43996 - DNA, 20 bp, Artificial Sequence
  Description of Artificial Sequence: Synthetic oligonucleotide
  Target: ATXN2; (+) strand; PAM type: NRG; PAM sequence: AGG
tggccgcgaggggggcctgg

SEQ ID NO: 43997 - DNA, 20 bp, Artificial Sequence
  Description of Artificial Sequence: Synthetic oligonucleotide
  Target: ATXN2; (+) strand; PAM type: NRG; PAM sequence: GGG
ggccgcgaggggggcctgga

SEQ ID NO: 43998 - DNA, 20 bp, Artificial Sequence
  Description of Artificial Sequence: Synthetic oligonucleotide
  Target: ATXN2; (+) strand; PAM type: NRG; PAM sequence: CGG
cgcgaggggggcctggaggg

SEQ ID NO: 43999 - DNA, 20 bp, Artificial Sequence
  Description of Artificial Sequence: Synthetic oligonucleotide
  Target: ATXN2; (+) strand; PAM type: NRG; PAM sequence: TAG
gggcctggagggcggccgtg

SEQ ID NO: 44000 - DNA, 20 bp, Artificial Sequence
  Description of Artificial Sequence: Synthetic oligonucleotide
  Target: ATXN2; (+) strand; PAM type: NRG; PAM sequence: AGG
ggcctggagggcggccgtgt

SEQ ID NO: 44001 - DNA, 20 bp, Artificial Sequence
  Description of Artificial Sequence: Synthetic oligonucleotide
  Target: ATXN2; (+) strand; PAM type: NRG; PAM sequence: GGG
gcctggagggcggccgtgta

SEQ ID NO: 44002 - DNA, 20 bp, Artificial Sequence
  Description of Artificial Sequence: Synthetic oligonucleotide
  Target: ATXN2; (+) strand; PAM type: NRG; PAM sequence: GGG
cctggagggcggccgtgtag

SEQ ID NO: 44003 - DNA, 20 bp, Artificial Sequence
  Description of Artificial Sequence: Synthetic oligonucleotide
  Target: ATXN2; (+) strand; PAM type: NRG; PAM sequence: TGG
ggagggcggccgtgtagggg

SEQ ID NO: 44004 - DNA, 20 bp, Artificial Sequence
  Description of Artificial Sequence: Synthetic oligonucleotide
  Target: ATXN2; (+) strand; PAM type: NRG; PAM sequence: GAG
ccgtgtaggggtggctgccc

SEQ ID NO: 44005 - DNA, 20 bp, Artificial Sequence
  Description of Artificial Sequence: Synthetic oligonucleotide
  Target: ATXN2; (+) strand; PAM type: NRG; PAM sequence: AGG
cgtgtaggggtggctgcccg

SEQ ID NO: 44006 - DNA, 20 bp, Artificial Sequence
  Description of Artificial Sequence: Synthetic oligonucleotide
  Target: ATXN2; (+) strand; PAM type: NRG; PAM sequence: TGG
gtaggggtggctgcccgagg

SEQ ID NO: 44007 - DNA, 20 bp, Artificial Sequence
  Description of Artificial Sequence: Synthetic oligonucleotide
  Target: ATXN2; (+) strand; PAM type: NRG; PAM sequence: AAG
ggggtggctgcccgaggtgg

SEQ ID NO: 44008 - DNA, 20 bp, Artificial Sequence
  Description of Artificial Sequence: Synthetic oligonucleotide
  Target: ATXN2; (+) strand; PAM type: NRG; PAM sequence: GAG
ggtggctgcccgaggtggaa

SEQ ID NO: 44009 - DNA, 20 bp, Artificial Sequence
  Description of Artificial Sequence: Synthetic oligonucleotide
  Target: ATXN2; (+) strand; PAM type: NRG; PAM sequence: GAG
tggctgcccgaggtggaaga

SEQ ID NO: 44010 - DNA, 20 bp, Artificial Sequence
  Description of Artificial Sequence: Synthetic oligonucleotide
  Target: ATXN2; (+) strand; PAM type: NRG; PAM sequence: TGG
tgcccgaggtggaagagagt

SEQ ID NO: 44011 - DNA, 20 bp, Artificial Sequence
  Description of Artificial Sequence: Synthetic oligonucleotide
  Target: ATXN2; (+) strand; PAM type: NRG; PAM sequence: GGG
gcccgaggtggaagagagtt

SEQ ID NO: 44012 - DNA, 20 bp, Artificial Sequence
  Description of Artificial Sequence: Synthetic oligonucleotide
  Target: ATXN2; (+) strand; PAM type: NRG; PAM sequence: TGG
gaagagagttgggacctgac

SEQ ID NO: 44013 - DNA, 20 bp, Artificial Sequence
  Description of Artificial Sequence: Synthetic oligonucleotide
  Target: ATXN2; (+) strand; PAM type: NRG; PAM sequence: TAG
gagagttgggacctgactgg

SEQ ID NO: 44014 - DNA, 20 bp, Artificial Sequence
  Description of Artificial Sequence: Synthetic oligonucleotide
  Target: ATXN2; (+) strand; PAM type: NRG; PAM sequence: GAG
gttgggacctgactggtagc

SEQ ID NO: 44015 - DNA, 20 bp, Artificial Sequence
  Description of Artificial Sequence: Synthetic oligonucleotide
  Target: ATXN2; (+) strand; PAM type: NRG; PAM sequence: AAG
gggacctgactggtagcgag

SEQ ID NO: 44016 - DNA, 20 bp, Artificial Sequence
  Description of Artificial Sequence: Synthetic oligonucleotide
  Target: ATXN2; (+) strand; PAM type: NRG; PAM sequence: AGG
ggacctgactggtagcgaga

SEQ ID NO: 44017 - DNA, 20 bp, Artificial Sequence
  Description of Artificial Sequence: Synthetic oligonucleotide
  Target: ATXN2; (+) strand; PAM type: NRG; PAM sequence: TGG
cctgactggtagcgagaagg

SEQ ID NO: 44018 - DNA, 20 bp, Artificial Sequence
  Description of Artificial Sequence: Synthetic oligonucleotide
  Target: ATXN2; (+) strand; PAM type: NRG; PAM sequence: GGG
ctgactggtagcgagaaggt

SEQ ID NO: 44019 - DNA, 20 bp, Artificial Sequence
  Description of Artificial Sequence: Synthetic oligonucleotide
  Target: ATXN2; (+) strand; PAM type: NRG; PAM sequence: GAG
ctggtagcgagaaggtgggc

SEQ ID NO: 44020 - DNA, 20 bp, Artificial Sequence
  Description of Artificial Sequence: Synthetic oligonucleotide
  Target: ATXN2; (+) strand; PAM type: NRG; PAM sequence: GAG
ggtagcgagaaggtgggcga

SEQ ID NO: 44021 - DNA, 20 bp, Artificial Sequence
  Description of Artificial Sequence: Synthetic oligonucleotide
  Target: ATXN2; (+) strand; PAM type: NRG; PAM sequence: AGG
gtagcgagaaggtgggcgag

SEQ ID NO: 44022 - DNA, 20 bp, Artificial Sequence
  Description of Artificial Sequence: Synthetic oligonucleotide
  Target: ATXN2; (+) strand; PAM type: NRG; PAM sequence: AAG
gcgagaaggtgggcgagagg

SEQ ID NO: 44023 - DNA, 20 bp, Artificial Sequence
  Description of Artificial Sequence: Synthetic oligonucleotide
  Target: ATXN2; (+) strand; PAM type: NRG; PAM sequence: AGG
cgagaaggtgggcgagagga

SEQ ID NO: 44024 - DNA, 20 bp, Artificial Sequence
  Description of Artificial Sequence: Synthetic oligonucleotide
  Target: ATXN2; (+) strand; PAM type: NRG; PAM sequence: GAG
agaaggtgggcgagaggaag

SEQ ID NO: 44025 - DNA, 20 bp, Artificial Sequence
  Description of Artificial Sequence: Synthetic oligonucleotide
  Target: ATXN2; (+) strand; PAM type: NRG; PAM sequence: TGG
ggtgggcgagaggaaggaga

SEQ ID NO: 44026 - DNA, 20 bp, Artificial Sequence
  Description of Artificial Sequence: Synthetic oligonucleotide
  Target: ATXN2; (+) strand; PAM type: NRG; PAM sequence: GGG
gtgggcgagaggaaggagat

SEQ ID NO: 44027 - DNA, 20 bp, Artificial Sequence
  Description of Artificial Sequence: Synthetic oligonucleotide
  Target: ATXN2; (+) strand; PAM type: NRG; PAM sequence: AAG
gcgagaggaaggagatgggc

SEQ ID NO: 44028 - DNA, 20 bp, Artificial Sequence
  Description of Artificial Sequence: Synthetic oligonucleotide
  Target: ATXN2; (+) strand; PAM type: NRG; PAM sequence: AGG
cgagaggaaggagatgggca

SEQ ID NO: 44029 - DNA, 20 bp, Artificial Sequence
  Description of Artificial Sequence: Synthetic oligonucleotide
  Target: ATXN2; (+) strand; PAM type: NRG; PAM sequence: TGG
gaaggagatgggcaaggcga

SEQ ID NO: 44030 - DNA, 20 bp, Artificial Sequence
  Description of Artificial Sequence: Synthetic oligonucleotide
  Target: ATXN2; (+) strand; PAM type: NRG; PAM sequence: CAG
gagatgggcaaggcgatggc

SEQ ID NO: 44031 - DNA, 20 bp, Artificial Sequence
  Description of Artificial Sequence: Synthetic oligonucleotide
  Target: ATXN2; (+) strand; PAM type: NRG; PAM sequence: AGG
agatgggcaaggcgatggcc

SEQ ID NO: 44032 - DNA, 20 bp, Artificial Sequence
  Description of Artificial Sequence: Synthetic oligonucleotide
  Target: ATXN2; (+) strand; PAM type: NRG; PAM sequence: GGG
gatgggcaaggcgatggcca

SEQ ID NO: 44033 - DNA, 20 bp, Artificial Sequence
  Description of Artificial Sequence: Synthetic oligonucleotide
  Target: ATXN2; (+) strand; PAM type: NRG; PAM sequence: CAG
gatggccagggaacacctga

SEQ ID NO: 44034 - DNA, 20 bp, Artificial Sequence
  Description of Artificial Sequence: Synthetic oligonucleotide
  Target: ATXN2; (+) strand; PAM type: NRG; PAM sequence: AAG
ctgacagaacaaatgatatg

SEQ ID NO: 44035 - DNA, 20 bp, Artificial Sequence
  Description of Artificial Sequence: Synthetic oligonucleotide
  Target: ATXN2; (+) strand; PAM type: NRG; PAM sequence: AGG
tgacagaacaaatgatatga

SEQ ID NO: 44036 - DNA, 20 bp, Artificial Sequence
  Description of Artificial Sequence: Synthetic oligonucleotide
  Target: ATXN2; (+) strand; PAM type: NRG; PAM sequence: AAG
agaacaaatgatatgaagga

SEQ ID NO: 44037 - DNA, 20 bp, Artificial Sequence
  Description of Artificial Sequence: Synthetic oligonucleotide
  Target: ATXN2; (+) strand; PAM type: NRG; PAM sequence: AAG
gaaggaaagtataaaaacta

SEQ ID NO: 44038 - DNA, 20 bp, Artificial Sequence
  Description of Artificial Sequence: Synthetic oligonucleotide
  Target: ATXN2; (+) strand; PAM type: NRG; PAM sequence: GAG
taaaaactaaagaaaaaaat

SEQ ID NO: 44039 - DNA, 20 bp, Artificial Sequence
  Description of Artificial Sequence: Synthetic oligonucleotide
  Target: ATXN2; (+) strand; PAM type: NRG; PAM sequence: AGG
aaaaactaaagaaaaaaatg

SEQ ID NO: 44040 - DNA, 20 bp, Artificial Sequence
  Description of Artificial Sequence: Synthetic oligonucleotide
  Target: ATXN2; (+) strand; PAM type: NRG; PAM sequence: GGG
aaaactaaagaaaaaaatga

SEQ ID NO: 44041 - DNA, 20 bp, Artificial Sequence
  Description of Artificial Sequence: Synthetic oligonucleotide
  Target: ATXN2; (+) strand; PAM type: NRG; PAM sequence: AAG
aagaaaaaaatgagggaaaa

SEQ ID NO: 44042 - DNA, 20 bp, Artificial Sequence
  Description of Artificial Sequence: Synthetic oligonucleotide
  Target: ATXN2; (+) strand; PAM type: NRG; PAM sequence: CAG
aaatgagggaaaaaagtaaa

SEQ ID NO: 44043 - DNA, 20 bp, Artificial Sequence
  Description of Artificial Sequence: Synthetic oligonucleotide
  Target: ATXN2; (+) strand; PAM type: NRG; PAM sequence: AAG
gaaaaaagtaaacagaaaaa

SEQ ID NO: 44044 - DNA, 20 bp, Artificial Sequence
  Description of Artificial Sequence: Synthetic oligonucleotide
  Target: ATXN2; (+) strand; PAM type: NRG; PAM sequence: GAG
cttgtacattttaacccttt

SEQ ID NO: 44045 - DNA, 20 bp, Artificial Sequence
  Description of Artificial Sequence: Synthetic oligonucleotide
  Target: ATXN2; (+) strand; PAM type: NRG; PAM sequence: AGG
ttgtacattttaaccctttg

SEQ ID NO: 44046 - DNA, 20 bp, Artificial Sequence
  Description of Artificial Sequence: Synthetic oligonucleotide
  Target: ATXN2; (+) strand; PAM type: NRG; PAM sequence: CAG
acattttaaccctttgagga

SEQ ID NO: 44047 - DNA, 20 bp, Artificial Sequence
  Description of Artificial Sequence: Synthetic oligonucleotide
  Target: ATXN2; (+) strand; PAM type: NRG; PAM sequence: AAG
acagtcatttgatttgtgat

SEQ ID NO: 44048 - DNA, 20 bp, Artificial Sequence
  Description of Artificial Sequence: Synthetic oligonucleotide
  Target: ATXN2; (+) strand; PAM type: NRG; PAM sequence: TAG
atttgatttgtgataagttt

SEQ ID NO: 44049 - DNA, 20 bp, Artificial Sequence
  Description of Artificial Sequence: Synthetic oligonucleotide
  Target: ATXN2; (+) strand; PAM type: NRG; PAM sequence: AAG
cattttactttaacctcctt

SEQ ID NO: 44050 - DNA, 20 bp, Artificial Sequence
  Description of Artificial Sequence: Synthetic oligonucleotide
  Target: ATXN2; (+) strand; PAM type: NRG; PAM sequence: AAG
actttaacctccttaagatt

SEQ ID NO: 44051 - DNA, 20 bp, Artificial Sequence
  Description of Artificial Sequence: Synthetic oligonucleotide
  Target: ATXN2; (+) strand; PAM type: NRG; PAM sequence: AAG
taaatgaatacacgttccca

SEQ ID NO: 44052 - DNA, 20 bp, Artificial Sequence
  Description of Artificial Sequence: Synthetic oligonucleotide
  Target: ATXN2; (+) strand; PAM type: NRG; PAM sequence: AGG
aaatgaatacacgttcccaa

SEQ ID NO: 44053 - DNA, 20 bp, Artificial Sequence
  Description of Artificial Sequence: Synthetic oligonucleotide
  Target: ATXN2; (+) strand; PAM type: NRG; PAM sequence: GGG
aatgaatacacgttcccaaa

SEQ ID NO: 44054 - DNA, 20 bp, Artificial Sequence
  Description of Artificial Sequence: Synthetic oligonucleotide
  Target: ATXN2; (+) strand; PAM type: NRG; PAM sequence: TAG
cacgttcccaaagggttaat

SEQ ID NO: 44055 - DNA, 20 bp, Artificial Sequence
  Description of Artificial Sequence: Synthetic oligonucleotide
  Target: ATXN2; (+) strand; PAM type: NRG; PAM sequence: AGG
acgttcccaaagggttaatt

SEQ ID NO: 44056 - DNA, 20 bp, Artificial Sequence
  Description of Artificial Sequence: Synthetic oligonucleotide
  Target: ATXN2; (+) strand; PAM type: NRG; PAM sequence: AAG
aggatctatacacactattg

SEQ ID NO: 44057 - DNA, 20 bp, Artificial Sequence
  Description of Artificial Sequence: Synthetic oligonucleotide
  Target: ATXN2; (+) strand; PAM type: NRG; PAM sequence: AAG
atctatacacactattgaag

SEQ ID NO: 44058 - DNA, 20 bp, Artificial Sequence
  Description of Artificial Sequence: Synthetic oligonucleotide
  Target: ATXN2; (+) strand; PAM type: NRG; PAM sequence: CAG
atacacactattgaagaaga

SEQ ID NO: 44059 - DNA, 20 bp, Artificial Sequence
  Description of Artificial Sequence: Synthetic oligonucleotide
  Target: ATXN2; (+) strand; PAM type: NRG; PAM sequence: AAG
cactattgaagaagacagtt

SEQ ID NO: 44060 - DNA, 20 bp, Artificial Sequence
  Description of Artificial Sequence: Synthetic oligonucleotide
  Target: ATXN2; (+) strand; PAM type: NRG; PAM sequence: CAG
ctgcttctataactgtttct

SEQ ID NO: 44061 - DNA, 20 bp, Artificial Sequence
  Description of Artificial Sequence: Synthetic oligonucleotide
  Target: ATXN2; (+) strand; PAM type: NRG; PAM sequence: TGG
tataactgtttctcagtaac

SEQ ID NO: 44062 - DNA, 20 bp, Artificial Sequence
  Description of Artificial Sequence: Synthetic oligonucleotide
  Target: ATXN2; (+) strand; PAM type: NRG; PAM sequence: AAG
tctcagtaactggttgttta

SEQ ID NO: 44063 - DNA, 20 bp, Artificial Sequence
  Description of Artificial Sequence: Synthetic oligonucleotide
  Target: ATXN2; (+) strand; PAM type: NRG; PAM sequence: AGG
ctcagtaactggttgtttaa

SEQ ID NO: 44064 - DNA, 20 bp, Artificial Sequence
  Description of Artificial Sequence: Synthetic oligonucleotide
  Target: ATXN2; (+) strand; PAM type: NRG; PAM sequence: TAG
taaaggaatataacatacac

SEQ ID NO: 44065 - DNA, 20 bp, Artificial Sequence
  Description of Artificial Sequence: Synthetic oligonucleotide
  Target: ATXN2; (+) strand; PAM type: NRG; PAM sequence: CAG
aaatcacaataattcctact

SEQ ID NO: 44066 - DNA, 20 bp, Artificial Sequence
  Description of Artificial Sequence: Synthetic oligonucleotide
  Target: ATXN2; (+) strand; PAM type: NRG; PAM sequence: AGG
aatcacaataattcctactc

SEQ ID NO: 44067 - DNA, 20 bp, Artificial Sequence
  Description of Artificial Sequence: Synthetic oligonucleotide
  Target: ATXN2; (+) strand; PAM type: NRG; PAM sequence: GAG
tcacaataattcctactcag

SEQ ID NO: 44068 - DNA, 20 bp, Artificial Sequence
  Description of Artificial Sequence: Synthetic oligonucleotide
  Target: ATXN2; (+) strand; PAM type: NRG; PAM sequence: AAG
aataattcctactcaggagt

SEQ ID NO: 44069 - DNA, 20 bp, Artificial Sequence
  Description of Artificial Sequence: Synthetic oligonucleotide
  Target: ATXN2; (+) strand; PAM type: NRG; PAM sequence: TAG
agtaagattatttactgtat

SEQ ID NO: 44070 - DNA, 20 bp, Artificial Sequence
  Description of Artificial Sequence: Synthetic oligonucleotide
  Target: ATXN2; (+) strand; PAM type: NRG; PAM sequence: GAG
actgtattagttttaactct

SEQ ID NO: 44071 - DNA, 20 bp, Artificial Sequence
  Description of Artificial Sequence: Synthetic oligonucleotide
  Target: ATXN2; (+) strand; PAM type: NRG; PAM sequence: AGG
ctgtattagttttaactctg

SEQ ID NO: 44072 - DNA, 20 bp, Artificial Sequence
  Description of Artificial Sequence: Synthetic oligonucleotide
  Target: ATXN2; (+) strand; PAM type: NRG; PAM sequence: AAG
ctctgaggcataacgaaaat

SEQ ID NO: 44073 - DNA, 20 bp, Artificial Sequence
  Description of Artificial Sequence: Synthetic oligonucleotide
  Target: ATXN2; (+) strand; PAM type: NRG; PAM sequence: CAG
tgaggcataacgaaaataag

SEQ ID NO: 44074 - DNA, 20 bp, Artificial Sequence
  Description of Artificial Sequence: Synthetic oligonucleotide
  Target: ATXN2; (+) strand; PAM type: NRG; PAM sequence: TAG
ggcataacgaaaataagcag

SEQ ID NO: 44075 - DNA, 20 bp, Artificial Sequence
  Description of Artificial Sequence: Synthetic oligonucleotide
  Target: ATXN2; (+) strand; PAM type: NRG; PAM sequence: TAG
cagtagctattatatccaat

SEQ ID NO: 44076 - DNA, 20 bp, Artificial Sequence
  Description of Artificial Sequence: Synthetic oligonucleotide
  Target: ATXN2; (+) strand; PAM type: NRG; PAM sequence: TGG
ttatatccaattagaaatgc

SEQ ID NO: 44077 - DNA, 20 bp, Artificial Sequence
  Description of Artificial Sequence: Synthetic oligonucleotide
  Target: ATXN2; (+) strand; PAM type: NRG; PAM sequence: CAG
caattatctatgattttcat

SEQ ID NO: 44078 - DNA, 20 bp, Artificial Sequence
  Description of Artificial Sequence: Synthetic oligonucleotide
  Target: ATXN2; (+) strand; PAM type: NRG; PAM sequence: AGG
aattatctatgattttcatc

SEQ ID NO: 44079 - DNA, 20 bp, Artificial Sequence
  Description of Artificial Sequence: Synthetic oligonucleotide
  Target: ATXN2; (+) strand; PAM type: NRG; PAM sequence: CAG
atcaggtttacacttgaacc

SEQ ID NO: 44080 - DNA, 20 bp, Artificial Sequence
  Description of Artificial Sequence: Synthetic oligonucleotide
  Target: ATXN2; (+) strand; PAM type: NRG; PAM sequence: CAG
ttacacttgaacccagaact

SEQ ID NO: 44081 - DNA, 20 bp, Artificial Sequence
  Description of Artificial Sequence: Synthetic oligonucleotide
  Target: ATXN2; (+) strand; PAM type: NRG; PAM sequence: TGG
cttgaacccagaactcagtt

SEQ ID NO: 44082 - DNA, 20 bp, Artificial Sequence
  Description of Artificial Sequence: Synthetic oligonucleotide
  Target: ATXN2; (+) strand; PAM type: NRG; PAM sequence: AAG
actcagtttggaatcttatt

SEQ ID NO: 44083 - DNA, 20 bp, Artificial Sequence
  Description of Artificial Sequence: Synthetic oligonucleotide
  Target: ATXN2; (+) strand; PAM type: NRG; PAM sequence: AAG
agtttggaatcttattaagc

SEQ ID NO: 44084 - DNA, 20 bp, Artificial Sequence
  Description of Artificial Sequence: Synthetic oligonucleotide
  Target: ATXN2; (+) strand; PAM type: NRG; PAM sequence: AAG
ttattaagcaagtcccattt

SEQ ID NO: 44085 - DNA, 20 bp, Artificial Sequence
  Description of Artificial Sequence: Synthetic oligonucleotide
  Target: ATXN2; (+) strand; PAM type: NRG; PAM sequence: TAG
ttaagcaagtcccatttaag

SEQ ID NO: 44086 - DNA, 20 bp, Artificial Sequence
  Description of Artificial Sequence: Synthetic oligonucleotide
  Target: ATXN2; (+) strand; PAM type: NRG; PAM sequence: TAG
gaaataaaacattactcttc

SEQ ID NO: 44087 - DNA, 20 bp, Artificial Sequence
  Description of Artificial Sequence: Synthetic oligonucleotide
  Target: ATXN2; (+) strand; PAM type: NRG; PAM sequence: GAG
aataaaacattactcttcta

SEQ ID NO: 44088 - DNA, 20 bp, Artificial Sequence
  Description of Artificial Sequence: Synthetic oligonucleotide
  Target: ATXN2; (+) strand; PAM type: NRG; PAM sequence: GAG
ctagagtttgtgactcctgt

SEQ ID NO: 44089 - DNA, 20 bp, Artificial Sequence
  Description of Artificial Sequence: Synthetic oligonucleotide
  Target: ATXN2; (+) strand; PAM type: NRG; PAM sequence: AAG
tcattgctatttcaaaaaaa

SEQ ID NO: 44090 - DNA, 20 bp, Artificial Sequence
  Description of Artificial Sequence: Synthetic oligonucleotide
  Target: ATXN2; (+) strand; PAM type: NRG; PAM sequence: TAG
aagtcttgacctcattaaac

SEQ ID NO: 44091 - DNA, 20 bp, Artificial Sequence
  Description of Artificial Sequence: Synthetic oligonucleotide
  Target: ATXN2; (+) strand; PAM type: NRG; PAM sequence: AAG
tgacctcattaaactagaaa

SEQ ID NO: 44092 - DNA, 20 bp, Artificial Sequence
  Description of Artificial Sequence: Synthetic oligonucleotide
  Target: ATXN2; (+) strand; PAM type: NRG; PAM sequence: AGG
gacctcattaaactagaaaa

SEQ ID NO: 44093 - DNA, 20 bp, Artificial Sequence
  Description of Artificial Sequence: Synthetic oligonucleotide
  Target: ATXN2; (+) strand; PAM type: NRG; PAM sequence: GGG
acctcattaaactagaaaaa

SEQ ID NO: 44094 - DNA, 20 bp, Artificial Sequence
  Description of Artificial Sequence: Synthetic oligonucleotide
  Target: ATXN2; (+) strand; PAM type: NRG; PAM sequence: GAG
ctcattaaactagaaaaagg

SEQ ID NO: 44095 - DNA, 20 bp, Artificial Sequence
  Description of Artificial Sequence: Synthetic oligonucleotide
  Target: ATXN2; (+) strand; PAM type: NRG; PAM sequence: CAG
gaccttctaaataatttata

SEQ ID NO: 44096 - DNA, 20 bp, Artificial Sequence
  Description of Artificial Sequence: Synthetic oligonucleotide
  Target: ATXN2; (+) strand; PAM type: NRG; PAM sequence: AAG
atacagttaaacacttatct

SEQ ID NO: 44097 - DNA, 20 bp, Artificial Sequence
  Description of Artificial Sequence: Synthetic oligonucleotide
  Target: ATXN2; (+) strand; PAM type: NRG; PAM sequence: AAG
taataaatactgcaactaca

SEQ ID NO: 44098 - DNA, 20 bp, Artificial Sequence
  Description of Artificial Sequence: Synthetic oligonucleotide
  Target: ATXN2; (+) strand; PAM type: NRG; PAM sequence: CAG
taaatactgcaactacaaag

SEQ ID NO: 44099 - DNA, 20 bp, Artificial Sequence
  Description of Artificial Sequence: Synthetic oligonucleotide
  Target: ATXN2; (+) strand; PAM type: NRG; PAM sequence: TGG
accaaataaatttatactga

SEQ ID NO: 44100 - DNA, 20 bp, Artificial Sequence
  Description of Artificial Sequence: Synthetic oligonucleotide
  Target: ATXN2; (+) strand; PAM type: NRG; PAM sequence: TAG
tttatactgatggatatgcc

SEQ ID NO: 44101 - DNA, 20 bp, Artificial Sequence
  Description of Artificial Sequence: Synthetic oligonucleotide
  Target: ATXN2; (+) strand; PAM type: NRG; PAM sequence: AGG
ttatactgatggatatgcct

SEQ ID NO: 44102 - DNA, 20 bp, Artificial Sequence
  Description of Artificial Sequence: Synthetic oligonucleotide
  Target: ATXN2; (+) strand; PAM type: NRG; PAM sequence: AAG
ctgatggatatgcctaggta

SEQ ID NO: 44103 - DNA, 20 bp, Artificial Sequence
  Description of Artificial Sequence: Synthetic oligonucleotide
  Target: ATXN2; (+) strand; PAM type: NRG; PAM sequence: CAG
gatatgcctaggtaaagata

SEQ ID NO: 44104 - DNA, 20 bp, Artificial Sequence
  Description of Artificial Sequence: Synthetic oligonucleotide
  Target: ATXN2; (+) strand; PAM type: NRG; PAM sequence: TAG
tgcctaggtaaagatacagc

SEQ ID NO: 44105 - DNA, 20 bp, Artificial Sequence
  Description of Artificial Sequence: Synthetic oligonucleotide
  Target: ATXN2; (+) strand; PAM type: NRG; PAM sequence: CAG
cttaccttaatcttatcaaa

SEQ ID NO: 44106 - DNA, 20 bp, Artificial Sequence
  Description of Artificial Sequence: Synthetic oligonucleotide
  Target: ATXN2; (+) strand; PAM type: NRG; PAM sequence: CAG
cttaatcttatcaaacagtc

SEQ ID NO: 44107 - DNA, 20 bp, Artificial Sequence
  Description of Artificial Sequence: Synthetic oligonucleotide
  Target: ATXN2; (+) strand; PAM type: NRG; PAM sequence: AGG
ttaatcttatcaaacagtcc

SEQ ID NO: 44108 - DNA, 20 bp, Artificial Sequence
  Description of Artificial Sequence: Synthetic oligonucleotide
  Target: ATXN2; (+) strand; PAM type: NRG; PAM sequence: TAG
cagtccaggtctcctctcca

SEQ ID NO: 44109 - DNA, 20 bp, Artificial Sequence
  Description of Artificial Sequence: Synthetic oligonucleotide
  Target: ATXN2; (+) strand; PAM type: NRG; PAM sequence: AGG
agtccaggtctcctctccat

SEQ ID NO: 44110 - DNA, 20 bp, Artificial Sequence
  Description of Artificial Sequence: Synthetic oligonucleotide
  Target: ATXN2; (+) strand; PAM type: NRG; PAM sequence: GGG
gtccaggtctcctctccata

SEQ ID NO: 44111 - DNA, 20 bp, Artificial Sequence
  Description of Artificial Sequence: Synthetic oligonucleotide
  Target: ATXN2; (+) strand; PAM type: NRG; PAM sequence: AAG
ccatagggttccacacactt

SEQ ID NO: 44112 - DNA, 20 bp, Artificial Sequence
  Description of Artificial Sequence: Synthetic oligonucleotide
  Target: ATXN2; (+) strand; PAM type: NRG; PAM sequence: CAG
cttaagtatcatatatttct

SEQ ID NO: 44113 - DNA, 20 bp, Artificial Sequence
  Description of Artificial Sequence: Synthetic oligonucleotide
  Target: ATXN2; (+) strand; PAM type: NRG; PAM sequence: CAG
atatatttctcagccccctt

SEQ ID NO: 44114 - DNA, 20 bp, Artificial Sequence
  Description of Artificial Sequence: Synthetic oligonucleotide
  Target: ATXN2; (+) strand; PAM type: NRG; PAM sequence: AGG
tatatttctcagcccccttc

SEQ ID NO: 44115 - DNA, 20 bp, Artificial Sequence
  Description of Artificial Sequence: Synthetic oligonucleotide
  Target: ATXN2; (+) strand; PAM type: NRG; PAM sequence: CAG
aaacaactaaaatctttcct

SEQ ID NO: 44116 - DNA, 20 bp, Artificial Sequence
  Description of Artificial Sequence: Synthetic oligonucleotide
  Target: ATXN2; (+) strand; PAM type: NRG; PAM sequence: GAG
aactaaaatctttcctcagt

SEQ ID NO: 44117 - DNA, 20 bp, Artificial Sequence
  Description of Artificial Sequence: Synthetic oligonucleotide
  Target: ATXN2; (+) strand; PAM type: NRG; PAM sequence: AAG
aaatctttcctcagtgagca

SEQ ID NO: 44118 - DNA, 20 bp, Artificial Sequence
  Description of Artificial Sequence: Synthetic oligonucleotide
  Target: ATXN2; (+) strand; PAM type: NRG; PAM sequence: AAG
gaaatttcacccccaatatt

SEQ ID NO: 44119 - DNA, 20 bp, Artificial Sequence
  Description of Artificial Sequence: Synthetic oligonucleotide
  Target: ATXN2; (+) strand; PAM type: NRG; PAM sequence: AAG
attaagtactgaaaatactc

SEQ ID NO: 44120 - DNA, 20 bp, Artificial Sequence
  Description of Artificial Sequence: Synthetic oligonucleotide
  Target: ATXN2; (+) strand; PAM type: NRG; PAM sequence: GAG
taagtactgaaaatactcaa

SEQ ID NO: 44121 - DNA, 20 bp, Artificial Sequence
  Description of Artificial Sequence: Synthetic oligonucleotide
  Target: ATXN2; (+) strand; PAM type: NRG; PAM sequence: TGG
aatactcaagagtgtccatt

SEQ ID NO: 44122 - DNA, 20 bp, Artificial Sequence
  Description of Artificial Sequence: Synthetic oligonucleotide
  Target: ATXN2; (+) strand; PAM type: NRG; PAM sequence: GAG
tactcaagagtgtccatttg

SEQ ID NO: 44123 - DNA, 20 bp, Artificial Sequence
  Description of Artificial Sequence: Synthetic oligonucleotide
  Target: ATXN2; (+) strand; PAM type: NRG; PAM sequence: GAG
ctcaagagtgtccatttgga

SEQ ID NO: 44124 - DNA, 20 bp, Artificial Sequence
  Description of Artificial Sequence: Synthetic oligonucleotide
  Target: ATXN2; (+) strand; PAM type: NRG; PAM sequence: AGG
tcaagagtgtccatttggag

SEQ ID NO: 44125 - DNA, 20 bp, Artificial Sequence
  Description of Artificial Sequence: Synthetic oligonucleotide
  Target: ATXN2; (+) strand; PAM type: NRG; PAM sequence: TGG
gtccatttggagaggaattc

SEQ ID NO: 44126 - DNA, 20 bp, Artificial Sequence
  Description of Artificial Sequence: Synthetic oligonucleotide
  Target: ATXN2; (+) strand; PAM type: NRG; PAM sequence: GAG
ccatttggagaggaattctg

SEQ ID NO: 44127 - DNA, 20 bp, Artificial Sequence
  Description of Artificial Sequence: Synthetic oligonucleotide
  Target: ATXN2; (+) strand; PAM type: NRG; PAM sequence: AAG
tggagaggaattctggagaa

SEQ ID NO: 44128 - DNA, 20 bp, Artificial Sequence
  Description of Artificial Sequence: Synthetic oligonucleotide
  Target: ATXN2; (+) strand; PAM type: NRG; PAM sequence: TGG
tcaatgaaaacaaatgaaat

SEQ ID NO: 44129 - DNA, 20 bp, Artificial Sequence
  Description of Artificial Sequence: Synthetic oligonucleotide
  Target: ATXN2; (+) strand; PAM type: NRG; PAM sequence: TAG
aacaaatgaaattggaaact

SEQ ID NO: 44130 - DNA, 20 bp, Artificial Sequence
  Description of Artificial Sequence: Synthetic oligonucleotide
  Target: ATXN2; (+) strand; PAM type: NRG; PAM sequence: TAG
tctaactttccaaatttaaa

SEQ ID NO: 44131 - DNA, 20 bp, Artificial Sequence
  Description of Artificial Sequence: Synthetic oligonucleotide
  Target: ATXN2; (+) strand; PAM type: NRG; PAM sequence: AAG
atgtccactcttttcccaca

SEQ ID NO: 44132 - DNA, 20 bp, Artificial Sequence
  Description of Artificial Sequence: Synthetic oligonucleotide
  Target: ATXN2; (+) strand; PAM type: NRG; PAM sequence: TAG
ccactcttttcccacaaagt

SEQ ID NO: 44133 - DNA, 20 bp, Artificial Sequence
  Description of Artificial Sequence: Synthetic oligonucleotide
  Target: ATXN2; (+) strand; PAM type: NRG; PAM sequence: TAG
tactatttccataccatcca

SEQ ID NO: 44134 - DNA, 20 bp, Artificial Sequence
  Description of Artificial Sequence: Synthetic oligonucleotide
  Target: ATXN2; (+) strand; PAM type: NRG; PAM sequence: CAG
ccatccatagaactgttgtt

SEQ ID NO: 44135 - DNA, 20 bp, Artificial Sequence
  Description of Artificial Sequence: Synthetic oligonucleotide
  Target: ATXN2; (+) strand; PAM type: NRG; PAM sequence: TGG
tgttcagtatccctgattta

SEQ ID NO: 44136 - DNA, 20 bp, Artificial Sequence
  Description of Artificial Sequence: Synthetic oligonucleotide
  Target: ATXN2; (+) strand; PAM type: NRG; PAM sequence: AAG
agtatccctgatttatggaa

SEQ ID NO: 44137 - DNA, 20 bp, Artificial Sequence
  Description of Artificial Sequence: Synthetic oligonucleotide
  Target: ATXN2; (+) strand; PAM type: NRG; PAM sequence: AAG
ggaaaagatccacaacctac

SEQ ID NO: 44138 - DNA, 20 bp, Artificial Sequence
  Description of Artificial Sequence: Synthetic oligonucleotide
  Target: ATXN2; (+) strand; PAM type: NRG; PAM sequence: TAG
cctacaagatatattcaacc

SEQ ID NO: 44139 - DNA, 20 bp, Artificial Sequence
  Description of Artificial Sequence: Synthetic oligonucleotide
  Target: ATXN2; (+) strand; PAM type: NRG; PAM sequence: TAG
agatatattcaacctagatt

SEQ ID NO: 44140 - DNA, 20 bp, Artificial Sequence
  Description of Artificial Sequence: Synthetic oligonucleotide
  Target: ATXN2; (+) strand; PAM type: NRG; PAM sequence: GAG
atatattcaacctagattta

SEQ ID NO: 44141 - DNA, 20 bp, Artificial Sequence
  Description of Artificial Sequence: Synthetic oligonucleotide
  Target: ATXN2; (+) strand; PAM type: NRG; PAM sequence: AGG
tatattcaacctagatttag

SEQ ID NO: 44142 - DNA, 20 bp, Artificial Sequence
  Description of Artificial Sequence: Synthetic oligonucleotide
  Target: ATXN2; (+) strand; PAM type: NRG; PAM sequence: TAG
attcaacctagatttagagg

SEQ ID NO: 44143 - DNA, 20 bp, Artificial Sequence
  Description of Artificial Sequence: Synthetic oligonucleotide
  Target: ATXN2; (+) strand; PAM type: NRG; PAM sequence: GAG
tcaacctagatttagaggta

SEQ ID NO: 44144 - DNA, 20 bp, Artificial Sequence
  Description of Artificial Sequence: Synthetic oligonucleotide
  Target: ATXN2; (+) strand; PAM type: NRG; PAM sequence: AAG
taaaaaatgtcttcctacta

SEQ ID NO: 44145 - DNA, 20 bp, Artificial Sequence
  Description of Artificial Sequence: Synthetic oligonucleotide
  Target: ATXN2; (+) strand; PAM type: NRG; PAM sequence: CAG
atgtcttcctactaaagatt

SEQ ID NO: 44146 - DNA, 20 bp, Artificial Sequence
  Description of Artificial Sequence: Synthetic oligonucleotide
  Target: ATXN2; (+) strand; PAM type: NRG; PAM sequence: AGG
tgtcttcctactaaagattc

SEQ ID NO: 44147 - DNA, 20 bp, Artificial Sequence
  Description of Artificial Sequence: Synthetic oligonucleotide
  Target: ATXN2; (+) strand; PAM type: NRG; PAM sequence: AAG
gattcaggtttcttttactt

SEQ ID NO: 44148 - DNA, 20 bp, Artificial Sequence
  Description of Artificial Sequence: Synthetic oligonucleotide
  Target: ATXN2; (+) strand; PAM type: NRG; PAM sequence: TAG
taaactgtaacatccaccct

SEQ ID NO: 44149 - DNA, 20 bp, Artificial Sequence
  Description of Artificial Sequence: Synthetic oligonucleotide
  Target: ATXN2; (+) strand; PAM type: NRG; PAM sequence: AAG
gtaacatccacccttagact

SEQ ID NO: 44150 - DNA, 20 bp, Artificial Sequence
  Description of Artificial Sequence: Synthetic oligonucleotide
  Target: ATXN2; (+) strand; PAM type: NRG; PAM sequence: AGG
taacatccacccttagacta

SEQ ID NO: 44151 - DNA, 20 bp, Artificial Sequence
  Description of Artificial Sequence: Synthetic oligonucleotide
  Target: ATXN2; (+) strand; PAM type: NRG; PAM sequence: GGG
aacatccacccttagactaa

SEQ ID NO: 44152 - DNA, 20 bp, Artificial Sequence
  Description of Artificial Sequence: Synthetic oligonucleotide
  Target: ATXN2; (+) strand; PAM type: NRG; PAM sequence: AAG
ggttgtttttgttgtttttt

SEQ ID NO: 44153 - DNA, 20 bp, Artificial Sequence
  Description of Artificial Sequence: Synthetic oligonucleotide
  Target: ATXN2; (+) strand; PAM type: NRG; PAM sequence: TAG
gttttttaagcaaatttctc

SEQ ID NO: 44154 - DNA, 20 bp, Artificial Sequence
  Description of Artificial Sequence: Synthetic oligonucleotide
  Target: ATXN2; (+) strand; PAM type: NRG; PAM sequence: AAG
ttgatcatgtcttgtattat

SEQ ID NO: 44155 - DNA, 20 bp, Artificial Sequence
  Description of Artificial Sequence: Synthetic oligonucleotide
  Target: ATXN2; (+) strand; PAM type: NRG; PAM sequence: CAG
tcttgtattataagttacct

SEQ ID NO: 44156 - DNA, 20 bp, Artificial Sequence
  Description of Artificial Sequence: Synthetic oligonucleotide
  Target: ATXN2; (+) strand; PAM type: NRG; PAM sequence: AAG
ttacctcagatcctttcttg

SEQ ID NO: 44157 - DNA, 20 bp, Artificial Sequence
  Description of Artificial Sequence: Synthetic oligonucleotide
  Target: ATXN2; (+) strand; PAM type: NRG; PAM sequence: AAG
ctcagatcctttcttgaagt

SEQ ID NO: 44158 - DNA, 20 bp, Artificial Sequence
  Description of Artificial Sequence: Synthetic oligonucleotide
  Target: ATXN2; (+) strand; PAM type: NRG; PAM sequence: TAG
ttcttgaagtaagcataata

SEQ ID NO: 44159 - DNA, 20 bp, Artificial Sequence
  Description of Artificial Sequence: Synthetic oligonucleotide
  Target: ATXN2; (+) strand; PAM type: NRG; PAM sequence: CAG
aaattgatctatattaacca

SEQ ID NO: 44160 - DNA, 20 bp, Artificial Sequence
  Description of Artificial Sequence: Synthetic oligonucleotide
  Target: ATXN2; (+) strand; PAM type: NRG; PAM sequence: TAG
attaaccacagtgttgcaca

SEQ ID NO: 44161 - DNA, 20 bp, Artificial Sequence
  Description of Artificial Sequence: Synthetic oligonucleotide
  Target: ATXN2; (+) strand; PAM type: NRG; PAM sequence: AGG
ttaaccacagtgttgcacat

SEQ ID NO: 44162 - DNA, 20 bp, Artificial Sequence
  Description of Artificial Sequence: Synthetic oligonucleotide
  Target: ATXN2; (+) strand; PAM type: NRG; PAM sequence: TAG
ccacagtgttgcacataggt

SEQ ID NO: 44163 - DNA, 20 bp, Artificial Sequence
  Description of Artificial Sequence: Synthetic oligonucleotide
  Target: ATXN2; (+) strand; PAM type: NRG; PAM sequence: CAG
gtctaaaaaattttattatc

SEQ ID NO: 44164 - DNA, 20 bp, Artificial Sequence
  Description of Artificial Sequence: Synthetic oligonucleotide
  Target: ATXN2; (+) strand; PAM type: NRG; PAM sequence: GAG
tatccagtgtttttaaaatt

SEQ ID NO: 44165 - DNA, 20 bp, Artificial Sequence
  Description of Artificial Sequence: Synthetic oligonucleotide
  Target: ATXN2; (+) strand; PAM type: NRG; PAM sequence: AAG
taaaattgagaacctaccca

SEQ ID NO: 44166 - DNA, 20 bp, Artificial Sequence
  Description of Artificial Sequence: Synthetic oligonucleotide
  Target: ATXN2; (+) strand; PAM type: NRG; PAM sequence: AAG
ttccaatttctttatatgtg

SEQ ID NO: 44167 - DNA, 20 bp, Artificial Sequence
  Description of Artificial Sequence: Synthetic oligonucleotide
  Target: ATXN2; (+) strand; PAM type: NRG; PAM sequence: TGG
ctttatatgtgaagtgtttt

SEQ ID NO: 44168 - DNA, 20 bp, Artificial Sequence
  Description of Artificial Sequence: Synthetic oligonucleotide
  Target: ATXN2; (+) strand; PAM type: NRG; PAM sequence: AAG
tatgtgaagtgtttttggcc

SEQ ID NO: 44169 - DNA, 20 bp, Artificial Sequence
  Description of Artificial Sequence: Synthetic oligonucleotide
  Target: ATXN2; (+) strand; PAM type: NRG; PAM sequence: TGG
ttttggccaagtgattgtct

SEQ ID NO: 44170 - DNA, 20 bp, Artificial Sequence
  Description of Artificial Sequence: Synthetic oligonucleotide
  Target: ATXN2; (+) strand; PAM type: NRG; PAM sequence: GGG
tttggccaagtgattgtctt

SEQ ID NO: 44171 - DNA, 20 bp, Artificial Sequence
  Description of Artificial Sequence: Synthetic oligonucleotide
  Target: ATXN2; (+) strand; PAM type: NRG; PAM sequence: TAG
tgattgtcttgggttaaatg

SEQ ID NO: 44172 - DNA, 20 bp, Artificial Sequence
  Description of Artificial Sequence: Synthetic oligonucleotide
  Target: ATXN2; (+) strand; PAM type: NRG; PAM sequence: TAG
ttaaatgtagcactttatct

SEQ ID NO: 44173 - DNA, 20 bp, Artificial Sequence
  Description of Artificial Sequence: Synthetic oligonucleotide
  Target: ATXN2; (+) strand; PAM type: NRG; PAM sequence: AAG
tactaatttaatatccacaa

SEQ ID NO: 44174 - DNA, 20 bp, Artificial Sequence
  Description of Artificial Sequence: Synthetic oligonucleotide
  Target: ATXN2; (+) strand; PAM type: NRG; PAM sequence: AAG
tatccacaaaagccaatttt

SEQ ID NO: 44175 - DNA, 20 bp, Artificial Sequence
  Description of Artificial Sequence: Synthetic oligonucleotide
  Target: ATXN2; (+) strand; PAM type: NRG; PAM sequence: AAG
gccaattttaagtaatgctg

SEQ ID NO: 44176 - DNA, 20 bp, Artificial Sequence
  Description of Artificial Sequence: Synthetic oligonucleotide
  Target: ATXN2; (+) strand; PAM type: NRG; PAM sequence: AAG
tttaagtaatgctgaagtga

SEQ ID NO: 44177 - DNA, 20 bp, Artificial Sequence
  Description of Artificial Sequence: Synthetic oligonucleotide
  Target: ATXN2; (+) strand; PAM type: NRG; PAM sequence: AAG
agctactcaccaaatcatta

SEQ ID NO: 44178 - DNA, 20 bp, Artificial Sequence
  Description of Artificial Sequence: Synthetic oligonucleotide
  Target: ATXN2; (+) strand; PAM type: NRG; PAM sequence: CAG
attaaagtgcacattcatat

SEQ ID NO: 44179 - DNA, 20 bp, Artificial Sequence
  Description of Artificial Sequence: Synthetic oligonucleotide
  Target: ATXN2; (+) strand; PAM type: NRG; PAM sequence: AAG
tcagttatgtaaactatttt

SEQ ID NO: 44180 - DNA, 20 bp, Artificial Sequence
  Description of Artificial Sequence: Synthetic oligonucleotide
  Target: ATXN2; (+) strand; PAM type: NRG; PAM sequence: AAG
taaactattttaagtatttt

SEQ ID NO: 44181 - DNA, 20 bp, Artificial Sequence
  Description of Artificial Sequence: Synthetic oligonucleotide
  Target: ATXN2; (+) strand; PAM type: NRG; PAM sequence: TAG
ttttaagtattttaagtatt

SEQ ID NO: 44182 - DNA, 20 bp, Artificial Sequence
  Description of Artificial Sequence: Synthetic oligonucleotide
  Target: ATXN2; (+) strand; PAM type: NRG; PAM sequence: AAG
attttatcaatgatattgac

SEQ ID NO: 44183 - DNA, 20 bp, Artificial Sequence
  Description of Artificial Sequence: Synthetic oligonucleotide
  Target: ATXN2; (+) strand; PAM type: NRG; PAM sequence: TGG
atcaatgatattgacaagtc

SEQ ID NO: 44184 - DNA, 20 bp, Artificial Sequence
  Description of Artificial Sequence: Synthetic oligonucleotide
  Target: ATXN2; (+) strand; PAM type: NRG; PAM sequence: TGG
tgcctccattaactactctt

SEQ ID NO: 44185 - DNA, 20 bp, Artificial Sequence
  Description of Artificial Sequence: Synthetic oligonucleotide
  Target: ATXN2; (+) strand; PAM type: NRG; PAM sequence: CAG
aactactctttggtctgaac

SEQ ID NO: 44186 - DNA, 20 bp, Artificial Sequence
  Description of Artificial Sequence: Synthetic oligonucleotide
  Target: ATXN2; (+) strand; PAM type: NRG; PAM sequence: CGG
ctttggtctgaaccagaatt

SEQ ID NO: 44187 - DNA, 20 bp, Artificial Sequence
  Description of Artificial Sequence: Synthetic oligonucleotide
  Target: ATXN2; (+) strand; PAM type: NRG; PAM sequence: GGG
tttggtctgaaccagaattc

SEQ ID NO: 44188 - DNA, 20 bp, Artificial Sequence
  Description of Artificial Sequence: Synthetic oligonucleotide
  Target: ATXN2; (+) strand; PAM type: NRG; PAM sequence: AAG
agaattcgggttgaaatctg

SEQ ID NO: 44189 - DNA, 20 bp, Artificial Sequence
  Description of Artificial Sequence: Synthetic oligonucleotide
  Target: ATXN2; (+) strand; PAM type: NRG; PAM sequence: GAG
cgggttgaaatctgaagtgt

SEQ ID NO: 44190 - DNA, 20 bp, Artificial Sequence
  Description of Artificial Sequence: Synthetic oligonucleotide
  Target: ATXN2; (+) strand; PAM type: NRG; PAM sequence: AAG
gttgaaatctgaagtgtgag

SEQ ID NO: 44191 - DNA, 20 bp, Artificial Sequence
  Description of Artificial Sequence: Synthetic oligonucleotide
  Target: ATXN2; (+) strand; PAM type: NRG; PAM sequence: TGG
gaaatctgaagtgtgagaag

SEQ ID NO: 44192 - DNA, 20 bp, Artificial Sequence
  Description of Artificial Sequence: Synthetic oligonucleotide
  Target: ATXN2; (+) strand; PAM type: NRG; PAM sequence: TGG
gtgtgagaagtggatcttga

SEQ ID NO: 44193 - DNA, 20 bp, Artificial Sequence
  Description of Artificial Sequence: Synthetic oligonucleotide
  Target: ATXN2; (+) strand; PAM type: NRG; PAM sequence: TGG
agaagtggatcttgatggca

SEQ ID NO: 44194 - DNA, 20 bp, Artificial Sequence
  Description of Artificial Sequence: Synthetic oligonucleotide
  Target: ATXN2; (+) strand; PAM type: NRG; PAM sequence: GAG
aagtggatcttgatggcatg

SEQ ID NO: 44195 - DNA, 20 bp, Artificial Sequence
  Description of Artificial Sequence: Synthetic oligonucleotide
  Target: ATXN2; (+) strand; PAM type: NRG; PAM sequence: CAG
tgatggcatggagcccgatc

SEQ ID NO: 44196 - DNA, 20 bp, Artificial Sequence
  Description of Artificial Sequence: Synthetic oligonucleotide
  Target: ATXN2; (+) strand; PAM type: NRG; PAM sequence: AGG
gatggcatggagcccgatcc

SEQ ID NO: 44197 - DNA, 20 bp, Artificial Sequence
  Description of Artificial Sequence: Synthetic oligonucleotide
  Target: ATXN2; (+) strand; PAM type: NRG; PAM sequence: TGG
gcatggagcccgatccaggc

SEQ ID NO: 44198 - DNA, 20 bp, Artificial Sequence
  Description of Artificial Sequence: Synthetic oligonucleotide
  Target: ATXN2; (+) strand; PAM type: NRG; PAM sequence: CGG
gatccaggctggcccatacg

SEQ ID NO: 44199 - DNA, 20 bp, Artificial Sequence
  Description of Artificial Sequence: Synthetic oligonucleotide
  Target: ATXN2; (+) strand; PAM type: NRG; PAM sequence: CAG
aattctgtctcccacttccc

SEQ ID NO: 44200 - DNA, 20 bp, Artificial Sequence
  Description of Artificial Sequence: Synthetic oligonucleotide
  Target: ATXN2; (+) strand; PAM type: NRG; PAM sequence: AGG
attctgtctcccacttcccc

SEQ ID NO: 44201 - DNA, 20 bp, Artificial Sequence
  Description of Artificial Sequence: Synthetic oligonucleotide
  Target: ATXN2; (+) strand; PAM type: NRG; PAM sequence: CAG
gacttctctatttctttgtc

SEQ ID NO: 44202 - DNA, 20 bp, Artificial Sequence
  Description of Artificial Sequence: Synthetic oligonucleotide
  Target: ATXN2; (+) strand; PAM type: NRG; PAM sequence: AGG
acttctctatttctttgtcc

SEQ ID NO: 44203 - DNA, 20 bp, Artificial Sequence
  Description of Artificial Sequence: Synthetic oligonucleotide
  Target: ATXN2; (+) strand; PAM type: NRG; PAM sequence: GAG
ttctctatttctttgtccag

SEQ ID NO: 44204 - DNA, 20 bp, Artificial Sequence
  Description of Artificial Sequence: Synthetic oligonucleotide
  Target: ATXN2; (+) strand; PAM type: NRG; PAM sequence: AGG
tctctatttctttgtccagg

SEQ ID NO: 44205 - DNA, 20 bp, Artificial Sequence
  Description of Artificial Sequence: Synthetic oligonucleotide
  Target: ATXN2; (+) strand; PAM type: NRG; PAM sequence: GAG
tatttattttccctgaaaat

SEQ ID NO: 44206 - DNA, 20 bp, Artificial Sequence
  Description of Artificial Sequence: Synthetic oligonucleotide
  Target: ATXN2; (+) strand; PAM type: NRG; PAM sequence: GAG
tttattttccctgaaaatga

SEQ ID NO: 44207 - DNA, 20 bp, Artificial Sequence
  Description of Artificial Sequence: Synthetic oligonucleotide
  Target: ATXN2; (+) strand; PAM type: NRG; PAM sequence: AAG
tctaaatcattttattctaa

SEQ ID NO: 44208 - DNA, 20 bp, Artificial Sequence
  Description of Artificial Sequence: Synthetic oligonucleotide
  Target: ATXN2; (+) strand; PAM type: NRG; PAM sequence: AGG
ctaaatcattttattctaaa

SEQ ID NO: 44209 - DNA, 20 bp, Artificial Sequence
  Description of Artificial Sequence: Synthetic oligonucleotide
  Target: ATXN2; (+) strand; PAM type: NRG; PAM sequence: AAG
attttattctaaaaggtacc

SEQ ID NO: 44210 - DNA, 20 bp, Artificial Sequence
  Description of Artificial Sequence: Synthetic oligonucleotide
  Target: ATXN2; (+) strand; PAM type: NRG; PAM sequence: AAG
agccaatgaaacatatctaa

SEQ ID NO: 44211 - DNA, 20 bp, Artificial Sequence
  Description of Artificial Sequence: Synthetic oligonucleotide
  Target: ATXN2; (+) strand; PAM type: NRG; PAM sequence: TAG
aaacatatctaaaagtcatc

SEQ ID NO: 44212 - DNA, 20 bp, Artificial Sequence
  Description of Artificial Sequence: Synthetic oligonucleotide
  Target: ATXN2; (+) strand; PAM type: NRG; PAM sequence: CAG
atatctaaaagtcatctaga

SEQ ID NO: 44213 - DNA, 20 bp, Artificial Sequence
  Description of Artificial Sequence: Synthetic oligonucleotide
  Target: ATXN2; (+) strand; PAM type: NRG; PAM sequence: AAG
tctaaaagtcatctagacag

SEQ ID NO: 44214 - DNA, 20 bp, Artificial Sequence
  Description of Artificial Sequence: Synthetic oligonucleotide
  Target: ATXN2; (+) strand; PAM type: NRG; PAM sequence: AGG
ctaaaagtcatctagacaga

SEQ ID NO: 44215 - DNA, 20 bp, Artificial Sequence
  Description of Artificial Sequence: Synthetic oligonucleotide
  Target: ATXN2; (+) strand; PAM type: NRG; PAM sequence: GGG
taaaagtcatctagacagaa

SEQ ID NO: 44216 - DNA, 20 bp, Artificial Sequence
  Description of Artificial Sequence: Synthetic oligonucleotide
  Target: ATXN2; (+) strand; PAM type: NRG; PAM sequence: AAG
aagggaatgcttgttacaaa

SEQ ID NO: 44217 - DNA, 20 bp, Artificial Sequence
  Description of Artificial Sequence: Synthetic oligonucleotide
  Target: ATXN2; (+) strand; PAM type: NRG; PAM sequence: AGG
agggaatgcttgttacaaaa

SEQ ID NO: 44218 - DNA, 20 bp, Artificial Sequence
  Description of Artificial Sequence: Synthetic oligonucleotide
  Target: ATXN2; (+) strand; PAM type: NRG; PAM sequence: CAG
aaaccaaactgcctcactcc

SEQ ID NO: 44219 - DNA, 20 bp, Artificial Sequence
  Description of Artificial Sequence: Synthetic oligonucleotide
  Target: ATXN2; (+) strand; PAM type: NRG; PAM sequence: GAG
ctgttcttccatcttaccct

SEQ ID NO: 44220 - DNA, 20 bp, Artificial Sequence
  Description of Artificial Sequence: Synthetic oligonucleotide
  Target: ATXN2; (+) strand; PAM type: NRG; PAM sequence: TGG
ttaccctgagttctaacctc

SEQ ID NO: 44221 - DNA, 20 bp, Artificial Sequence
  Description of Artificial Sequence: Synthetic oligonucleotide
  Target: ATXN2; (+) strand; PAM type: NRG; PAM sequence: TAG
ctctggactgtcccttccct

SEQ ID NO: 44222 - DNA, 20 bp, Artificial Sequence
  Description of Artificial Sequence: Synthetic oligonucleotide
  Target: ATXN2; (+) strand; PAM type: NRG; PAM sequence: AAG
ttcccttagattctgctcct

SEQ ID NO: 44223 - DNA, 20 bp, Artificial Sequence
  Description of Artificial Sequence: Synthetic oligonucleotide
  Target: ATXN2; (+) strand; PAM type: NRG; PAM sequence: AAG
agattctgctcctaagcaca

SEQ ID NO: 44224 - DNA, 20 bp, Artificial Sequence
  Description of Artificial Sequence: Synthetic oligonucleotide
  Target: ATXN2; (+) strand; PAM type: NRG; PAM sequence: CAG
ctcctaagcacaaagtttaa

SEQ ID NO: 44225 - DNA, 20 bp, Artificial Sequence
  Description of Artificial Sequence: Synthetic oligonucleotide
  Target: ATXN2; (+) strand; PAM type: NRG; PAM sequence: TGG
catcccacttgacctctcta

SEQ ID NO: 44226 - DNA, 20 bp, Artificial Sequence
  Description of Artificial Sequence: Synthetic oligonucleotide
  Target: ATXN2; (+) strand; PAM type: NRG; PAM sequence: TGG
atggctgattccatcaatct

SEQ ID NO: 44227 - DNA, 20 bp, Artificial Sequence
  Description of Artificial Sequence: Synthetic oligonucleotide
  Target: ATXN2; (+) strand; PAM type: NRG; PAM sequence: GAG
ttctcaattttattttctct

SEQ ID NO: 44228 - DNA, 20 bp, Artificial Sequence
  Description of Artificial Sequence: Synthetic oligonucleotide
  Target: ATXN2; (+) strand; PAM type: NRG; PAM sequence: TGG
tctgagatctcttctctcac

SEQ ID NO: 44229 - DNA, 20 bp, Artificial Sequence
  Description of Artificial Sequence: Synthetic oligonucleotide
  Target: ATXN2; (+) strand; PAM type: NRG; PAM sequence: TGG
ttctctcactggctgttctt

SEQ ID NO: 44230 - DNA, 20 bp, Artificial Sequence
  Description of Artificial Sequence: Synthetic oligonucleotide
  Target: ATXN2; (+) strand; PAM type: NRG; PAM sequence: TGG
ggctgttctttggtttttca

SEQ ID NO: 44231 - DNA, 20 bp, Artificial Sequence
  Description of Artificial Sequence: Synthetic oligonucleotide
  Target: ATXN2; (+) strand; PAM type: NRG; PAM sequence: CGG
gtttttcatggctccaatat

SEQ ID NO: 44232 - DNA, 20 bp, Artificial Sequence
  Description of Artificial Sequence: Synthetic oligonucleotide
  Target: ATXN2; (+) strand; PAM type: NRG; PAM sequence: CAG
gaaacctcaaactgaaccgc

SEQ ID NO: 44233 - DNA, 20 bp, Artificial Sequence
  Description of Artificial Sequence: Synthetic oligonucleotide
  Target: ATXN2; (+) strand; PAM type: NRG; PAM sequence: CAG
aaactgaaccgccagtctca

SEQ ID NO: 44234 - DNA, 20 bp, Artificial Sequence
  Description of Artificial Sequence: Synthetic oligonucleotide
  Target: ATXN2; (+) strand; PAM type: NRG; PAM sequence: CAG
ctcacagtgtcaacatctat

SEQ ID NO: 44235 - DNA, 20 bp, Artificial Sequence
  Description of Artificial Sequence: Synthetic oligonucleotide
  Target: ATXN2; (+) strand; PAM type: NRG; PAM sequence: TGG
acagtgtcaacatctatcag

SEQ ID NO: 44236 - DNA, 20 bp, Artificial Sequence
  Description of Artificial Sequence: Synthetic oligonucleotide
  Target: ATXN2; (+) strand; PAM type: NRG; PAM sequence: CAG
gacatgtcaattcaaatcac

SEQ ID NO: 44237 - DNA, 20 bp, Artificial Sequence
  Description of Artificial Sequence: Synthetic oligonucleotide
  Target: ATXN2; (+) strand; PAM type: NRG; PAM sequence: AAG
aattcaaatcaccagactct

SEQ ID NO: 44238 - DNA, 20 bp, Artificial Sequence
  Description of Artificial Sequence: Synthetic oligonucleotide
  Target: ATXN2; (+) strand; PAM type: NRG; PAM sequence: AAG
actctaagctgactgccttt

SEQ ID NO: 44239 - DNA, 20 bp, Artificial Sequence
  Description of Artificial Sequence: Synthetic oligonucleotide
  Target: ATXN2; (+) strand; PAM type: NRG; PAM sequence: GAG
tctaagctgactgcctttaa

SEQ ID NO: 44240 - DNA, 20 bp, Artificial Sequence
  Description of Artificial Sequence: Synthetic oligonucleotide
  Target: ATXN2; (+) strand; PAM type: NRG; PAM sequence: GAG
taagctgactgcctttaaga

SEQ ID NO: 44241 - DNA, 20 bp, Artificial Sequence
  Description of Artificial Sequence: Synthetic oligonucleotide
  Target: ATXN2; (+) strand; PAM type: NRG; PAM sequence: AGG
aagctgactgcctttaagag

SEQ ID NO: 44242 - DNA, 20 bp, Artificial Sequence
  Description of Artificial Sequence: Synthetic oligonucleotide
  Target: ATXN2; (+) strand; PAM type: NRG; PAM sequence: TAG
ggatgcatctcttactttac

SEQ ID NO: 44243 - DNA, 20 bp, Artificial Sequence
  Description of Artificial Sequence: Synthetic oligonucleotide
  Target: ATXN2; (+) strand; PAM type: NRG; PAM sequence: TAG
gcatctcttactttactaga

SEQ ID NO: 44244 - DNA, 20 bp, Artificial Sequence
  Description of Artificial Sequence: Synthetic oligonucleotide
  Target: ATXN2; (+) strand; PAM type: NRG; PAM sequence: AGG
catctcttactttactagat

SEQ ID NO: 44245 - DNA, 20 bp, Artificial Sequence
  Description of Artificial Sequence: Synthetic oligonucleotide
  Target: ATXN2; (+) strand; PAM type: NRG; PAM sequence: TAG
ctcttactttactagatagg

SEQ ID NO: 44246 - DNA, 20 bp, Artificial Sequence
  Description of Artificial Sequence: Synthetic oligonucleotide
  Target: ATXN2; (+) strand; PAM type: NRG; PAM sequence: CAG
ttactttactagataggtag

SEQ ID NO: 44247 - DNA, 20 bp, Artificial Sequence
  Description of Artificial Sequence: Synthetic oligonucleotide
  Target: ATXN2; (+) strand; PAM type: NRG; PAM sequence: AGG
tactttactagataggtagc

SEQ ID NO: 44248 - DNA, 20 bp, Artificial Sequence
  Description of Artificial Sequence: Synthetic oligonucleotide
  Target: ATXN2; (+) strand; PAM type: NRG; PAM sequence: AAG
acacgtttatgaataaatga

SEQ ID NO: 44249 - DNA, 20 bp, Artificial Sequence
  Description of Artificial Sequence: Synthetic oligonucleotide
  Target: ATXN2; (+) strand; PAM type: NRG; PAM sequence: AAG
tgaataaatgaaagacccac

SEQ ID NO: 44250 - DNA, 20 bp, Artificial Sequence
  Description of Artificial Sequence: Synthetic oligonucleotide
  Target: ATXN2; (+) strand; PAM type: NRG; PAM sequence: TAG
cacaagcccacatatgcaat

SEQ ID NO: 44251 - DNA, 20 bp, Artificial Sequence
  Description of Artificial Sequence: Synthetic oligonucleotide
  Target: ATXN2; (+) strand; PAM type: NRG; PAM sequence: CGG
tatgcaattagctgcacaaa

SEQ ID NO: 44252 - DNA, 20 bp, Artificial Sequence
  Description of Artificial Sequence: Synthetic oligonucleotide
  Target: ATXN2; (+) strand; PAM type: NRG; PAM sequence: GAG
tgcaattagctgcacaaacg

SEQ ID NO: 44253 - DNA, 20 bp, Artificial Sequence
  Description of Artificial Sequence: Synthetic oligonucleotide
  Target: ATXN2; (+) strand; PAM type: NRG; PAM sequence: CAG
atgtttcctctctctcttac

SEQ ID NO: 44254 - DNA, 20 bp, Artificial Sequence
  Description of Artificial Sequence: Synthetic oligonucleotide
  Target: ATXN2; (+) strand; PAM type: NRG; PAM sequence: AAG
ctcttaccagtacatccatt

SEQ ID NO: 44255 - DNA, 20 bp, Artificial Sequence
  Description of Artificial Sequence: Synthetic oligonucleotide
  Target: ATXN2; (+) strand; PAM type: NRG; PAM sequence: TAG
agtacatccattaagtcact

SEQ ID NO: 44256 - DNA, 20 bp, Artificial Sequence
  Description of Artificial Sequence: Synthetic oligonucleotide
  Target: ATXN2; (+) strand; PAM type: NRG; PAM sequence: CAG
cttagttatcaaataaacct

SEQ ID NO: 44257 - DNA, 20 bp, Artificial Sequence
  Description of Artificial Sequence: Synthetic oligonucleotide
  Target: ATXN2; (+) strand; PAM type: NRG; PAM sequence: AGG
ttagttatcaaataaacctc

SEQ ID NO: 44258 - DNA, 20 bp, Artificial Sequence
  Description of Artificial Sequence: Synthetic oligonucleotide
  Target: ATXN2; (+) strand; PAM type: NRG; PAM sequence: TAG
cctcaggctcatcccttaac

SEQ ID NO: 44259 - DNA, 20 bp, Artificial Sequence
  Description of Artificial Sequence: Synthetic oligonucleotide
  Target: ATXN2; (+) strand; PAM type: NRG; PAM sequence: AGG
ctcaggctcatcccttaact

SEQ ID NO: 44260 - DNA, 20 bp, Artificial Sequence
  Description of Artificial Sequence: Synthetic oligonucleotide
  Target: ATXN2; (+) strand; PAM type: NRG; PAM sequence: TGG
aggctcatcccttaactagg

SEQ ID NO: 44261 - DNA, 20 bp, Artificial Sequence
  Description of Artificial Sequence: Synthetic oligonucleotide
  Target: ATXN2; (+) strand; PAM type: NRG; PAM sequence: CAG
aggtggttaccaaattctca

SEQ ID NO: 44262 - DNA, 20 bp, Artificial Sequence
  Description of Artificial Sequence: Synthetic oligonucleotide
  Target: ATXN2; (+) strand; PAM type: NRG; PAM sequence: CAG
ttctcacagttgaactattt

SEQ ID NO: 44263 - DNA, 20 bp, Artificial Sequence
  Description of Artificial Sequence: Synthetic oligonucleotide
  Target: ATXN2; (+) strand; PAM type: NRG; PAM sequence: CAG
actaactgttctctgtgtct

SEQ ID NO: 44264 - DNA, 20 bp, Artificial Sequence
  Description of Artificial Sequence: Synthetic oligonucleotide
  Target: ATXN2; (+) strand; PAM type: NRG; PAM sequence: CAG
actgttctctgtgtctcagc

SEQ ID NO: 44265 - DNA, 20 bp, Artificial Sequence
  Description of Artificial Sequence: Synthetic oligonucleotide
  Target: ATXN2; (+) strand; PAM type: NRG; PAM sequence: CAG
tcagccagtcctcaatgccc

SEQ ID NO: 44266 - DNA, 20 bp, Artificial Sequence
  Description of Artificial Sequence: Synthetic oligonucleotide
  Target: ATXN2; (+) strand; PAM type: NRG; PAM sequence: AGG
cagccagtcctcaatgcccc

SEQ ID NO: 44267 - DNA, 20 bp, Artificial Sequence
  Description of Artificial Sequence: Synthetic oligonucleotide
  Target: ATXN2; (+) strand; PAM type: NRG; PAM sequence: GGG
agccagtcctcaatgcccca

SEQ ID NO: 44268 - DNA, 20 bp, Artificial Sequence
  Description of Artificial Sequence: Synthetic oligonucleotide
  Target: ATXN2; (+) strand; PAM type: NRG; PAM sequence: CAG
ttcaccccatctccttccaa

SEQ ID NO: 44269 - DNA, 20 bp, Artificial Sequence
  Description of Artificial Sequence: Synthetic oligonucleotide
  Target: ATXN2; (+) strand; PAM type: NRG; PAM sequence: AGG
tcaccccatctccttccaac

SEQ ID NO: 44270 - DNA, 20 bp, Artificial Sequence
  Description of Artificial Sequence: Synthetic oligonucleotide
  Target: ATXN2; (+) strand; PAM type: NRG; PAM sequence: GGG
caccccatctccttccaaca

SEQ ID NO: 44271 - DNA, 20 bp, Artificial Sequence
  Description of Artificial Sequence: Synthetic oligonucleotide
  Target: ATXN2; (+) strand; PAM type: NRG; PAM sequence: TAG
ccttccaacagggtgctctt

SEQ ID NO: 44272 - DNA, 20 bp, Artificial Sequence
  Description of Artificial Sequence: Synthetic oligonucleotide
  Target: ATXN2; (+) strand; PAM type: NRG; PAM sequence: AAG
gctctttagcatgacatgcc

SEQ ID NO: 44273 - DNA, 20 bp, Artificial Sequence
  Description of Artificial Sequence: Synthetic oligonucleotide
  Target: ATXN2; (+) strand; PAM type: NRG; PAM sequence: CAG
gccaagtcctttaatgacct

SEQ ID NO: 44274 - DNA, 20 bp, Artificial Sequence
  Description of Artificial Sequence: Synthetic oligonucleotide
  Target: ATXN2; (+) strand; PAM type: NRG; PAM sequence: CAG
tgccactgctgcacctgaca

SEQ ID NO: 44275 - DNA, 20 bp, Artificial Sequence
  Description of Artificial Sequence: Synthetic oligonucleotide
  Target: ATXN2; (+) strand; PAM type: NRG; PAM sequence: CAG
ctgacacagatcctgtgttc

SEQ ID NO: 44276 - DNA, 20 bp, Artificial Sequence
  Description of Artificial Sequence: Synthetic oligonucleotide
  Target: ATXN2; (+) strand; PAM type: NRG; PAM sequence: CAG
ttccagacacatgcaacaac

SEQ ID NO: 44277 - DNA, 20 bp, Artificial Sequence
  Description of Artificial Sequence: Synthetic oligonucleotide
  Target: ATXN2; (+) strand; PAM type: NRG; PAM sequence: GAG
gcaacaaccagccctctcct

SEQ ID NO: 44278 - DNA, 20 bp, Artificial Sequence
  Description of Artificial Sequence: Synthetic oligonucleotide
  Target: ATXN2; (+) strand; PAM type: NRG; PAM sequence: TGG
caaccagccctctcctgagc

SEQ ID NO: 44279 - DNA, 20 bp, Artificial Sequence
  Description of Artificial Sequence: Synthetic oligonucleotide
  Target: ATXN2; (+) strand; PAM type: NRG; PAM sequence: TAG
gagctggccaaattttctca

SEQ ID NO: 44280 - DNA, 20 bp, Artificial Sequence
  Description of Artificial Sequence: Synthetic oligonucleotide
  Target: ATXN2; (+) strand; PAM type: NRG; PAM sequence: TGG
ctcatagccatgcttgtaca

SEQ ID NO: 44281 - DNA, 20 bp, Artificial Sequence
  Description of Artificial Sequence: Synthetic oligonucleotide
  Target: ATXN2; (+) strand; PAM type: NRG; PAM sequence: CAG
gcttgtacatggcttttcat

SEQ ID NO: 44282 - DNA, 20 bp, Artificial Sequence
  Description of Artificial Sequence: Synthetic oligonucleotide
  Target: ATXN2; (+) strand; PAM type: NRG; PAM sequence: AGG
cttgtacatggcttttcatc

SEQ ID NO: 44283 - DNA, 20 bp, Artificial Sequence
  Description of Artificial Sequence: Synthetic oligonucleotide
  Target: ATXN2; (+) strand; PAM type: NRG; PAM sequence: AAG
tcttctcccaactcttctct

SEQ ID NO: 44284 - DNA, 20 bp, Artificial Sequence
  Description of Artificial Sequence: Synthetic oligonucleotide
  Target: ATXN2; (+) strand; PAM type: NRG; PAM sequence: AAG
caactcttctctaagtgtca

SEQ ID NO: 44285 - DNA, 20 bp, Artificial Sequence
  Description of Artificial Sequence: Synthetic oligonucleotide
  Target: ATXN2; (+) strand; PAM type: NRG; PAM sequence: GAG
caaaatgtcacctcctcaat

SEQ ID NO: 44286 - DNA, 20 bp, Artificial Sequence
  Description of Artificial Sequence: Synthetic oligonucleotide
  Target: ATXN2; (+) strand; PAM type: NRG; PAM sequence: AGG
aaaatgtcacctcctcaatg

SEQ ID NO: 44287 - DNA, 20 bp, Artificial Sequence
  Description of Artificial Sequence: Synthetic oligonucleotide
  Target: ATXN2; (+) strand; PAM type: NRG; PAM sequence: CAG
tgaggttttctctgactcta

SEQ ID NO: 44288 - DNA, 20 bp, Artificial Sequence
  Description of Artificial Sequence: Synthetic oligonucleotide
  Target: ATXN2; (+) strand; PAM type: NRG; PAM sequence: AGG
gaggttttctctgactctac

SEQ ID NO: 44289 - DNA, 20 bp, Artificial Sequence
  Description of Artificial Sequence: Synthetic oligonucleotide
  Target: ATXN2; (+) strand; PAM type: NRG; PAM sequence: TAG
tctgactctacaggttatgc

SEQ ID NO: 44290 - DNA, 20 bp, Artificial Sequence
  Description of Artificial Sequence: Synthetic oligonucleotide
  Target: ATXN2; (+) strand; PAM type: NRG; PAM sequence: TAG
ctcctcattctgtatgttcc

SEQ ID NO: 44291 - DNA, 20 bp, Artificial Sequence
  Description of Artificial Sequence: Synthetic oligonucleotide
  Target: ATXN2; (+) strand; PAM type: NRG; PAM sequence: AAG
ctttgaacatgcctttaacc

SEQ ID NO: 44292 - DNA, 20 bp, Artificial Sequence
  Description of Artificial Sequence: Synthetic oligonucleotide
  Target: ATXN2; (+) strand; PAM type: NRG; PAM sequence: CAG
ttgttacacgtgtcccccac

SEQ ID NO: 44293 - DNA, 20 bp, Artificial Sequence
  Description of Artificial Sequence: Synthetic oligonucleotide
  Target: ATXN2; (+) strand; PAM type: NRG; PAM sequence: AAG
caccagataactattttaac

SEQ ID NO: 44294 - DNA, 20 bp, Artificial Sequence
  Description of Artificial Sequence: Synthetic oligonucleotide
  Target: ATXN2; (+) strand; PAM type: NRG; PAM sequence: AAG
actattttaacaagctcttc

SEQ ID NO: 44295 - DNA, 20 bp, Artificial Sequence
  Description of Artificial Sequence: Synthetic oligonucleotide
  Target: ATXN2; (+) strand; PAM type: NRG; PAM sequence: TGG
taacaagctcttcaagatct

SEQ ID NO: 44296 - DNA, 20 bp, Artificial Sequence
  Description of Artificial Sequence: Synthetic oligonucleotide
  Target: ATXN2; (+) strand; PAM type: NRG; PAM sequence: TGG
caccgtgatataccaacact

SEQ ID NO: 44297 - DNA, 20 bp, Artificial Sequence
  Description of Artificial Sequence: Synthetic oligonucleotide
  Target: ATXN2; (+) strand; PAM type: NRG; PAM sequence: CAG
tataccaacacttggctcca

SEQ ID NO: 44298 - DNA, 20 bp, Artificial Sequence
  Description of Artificial Sequence: Synthetic oligonucleotide
  Target: ATXN2; (+) strand; PAM type: NRG; PAM sequence: GAG
taccaacacttggctccaca

SEQ ID NO: 44299 - DNA, 20 bp, Artificial Sequence
  Description of Artificial Sequence: Synthetic oligonucleotide
  Target: ATXN2; (+) strand; PAM type: NRG; PAM sequence: AAG
tccacagagcttactctcaa

SEQ ID NO: 44300 - DNA, 20 bp, Artificial Sequence
  Description of Artificial Sequence: Synthetic oligonucleotide
  Target: ATXN2; (+) strand; PAM type: NRG; PAM sequence: AAG
ctctcaaaagcatattttcc

SEQ ID NO: 44301 - DNA, 20 bp, Artificial Sequence
  Description of Artificial Sequence: Synthetic oligonucleotide
  Target: ATXN2; (+) strand; PAM type: NRG; PAM sequence: CAG
caccataaccttttctctaa

SEQ ID NO: 44302 - DNA, 20 bp, Artificial Sequence
  Description of Artificial Sequence: Synthetic oligonucleotide
  Target: ATXN2; (+) strand; PAM type: NRG; PAM sequence: AAG
tctacttgcattctctacct

SEQ ID NO: 44303 - DNA, 20 bp, Artificial Sequence
  Description of Artificial Sequence: Synthetic oligonucleotide
  Target: ATXN2; (+) strand; PAM type: NRG; PAM sequence: AAG
tctctacctaagctatatta

SEQ ID NO: 44304 - DNA, 20 bp, Artificial Sequence
  Description of Artificial Sequence: Synthetic oligonucleotide
  Target: ATXN2; (+) strand; PAM type: NRG; PAM sequence: AGG
ctctacctaagctatattaa

SEQ ID NO: 44305 - DNA, 20 bp, Artificial Sequence
  Description of Artificial Sequence: Synthetic oligonucleotide
  Target: ATXN2; (+) strand; PAM type: NRG; PAM sequence: AAG
tacctaagctatattaaagg

SEQ ID NO: 44306 - DNA, 20 bp, Artificial Sequence
  Description of Artificial Sequence: Synthetic oligonucleotide
  Target: ATXN2; (+) strand; PAM type: NRG; PAM sequence: GAG
cctaagctatattaaaggaa

SEQ ID NO: 44307 - DNA, 20 bp, Artificial Sequence
  Description of Artificial Sequence: Synthetic oligonucleotide
  Target: ATXN2; (+) strand; PAM type: NRG; PAM sequence: AGG
ctaagctatattaaaggaag

SEQ ID NO: 44308 - DNA, 20 bp, Artificial Sequence
  Description of Artificial Sequence: Synthetic oligonucleotide
  Target: ATXN2; (+) strand; PAM type: NRG; PAM sequence: CAG
taacaatacaccgtctcaca

SEQ ID NO: 44309 - DNA, 20 bp, Artificial Sequence
  Description of Artificial Sequence: Synthetic oligonucleotide
  Target: ATXN2; (+) strand; PAM type: NRG; PAM sequence: GAG
caccgtctcacacagacctt

SEQ ID NO: 44310 - DNA, 20 bp, Artificial Sequence
  Description of Artificial Sequence: Synthetic oligonucleotide
  Target: ATXN2; (+) strand; PAM type: NRG; PAM sequence: TAG
catgatttcctttaaatacc

SEQ ID NO: 44311 - DNA, 20 bp, Artificial Sequence
  Description of Artificial Sequence: Synthetic oligonucleotide
  Target: ATXN2; (+) strand; PAM type: NRG; PAM sequence: TGG
gctgtgcccctcacgttcac

SEQ ID NO: 44312 - DNA, 20 bp, Artificial Sequence
  Description of Artificial Sequence: Synthetic oligonucleotide
  Target: ATXN2; (+) strand; PAM type: NRG; PAM sequence: CAG
tcactcctatcatcattttc

SEQ ID NO: 44313 - DNA, 20 bp, Artificial Sequence
  Description of Artificial Sequence: Synthetic oligonucleotide
  Target: ATXN2; (+) strand; PAM type: NRG; PAM sequence: AGG
cactcctatcatcattttcc

SEQ ID NO: 44314 - DNA, 20 bp, Artificial Sequence
  Description of Artificial Sequence: Synthetic oligonucleotide
  Target: ATXN2; (+) strand; PAM type: NRG; PAM sequence: GGG
actcctatcatcattttcca

SEQ ID NO: 44315 - DNA, 20 bp, Artificial Sequence
  Description of Artificial Sequence: Synthetic oligonucleotide
  Target: ATXN2; (+) strand; PAM type: NRG; PAM sequence: GAG
atcattttccagggccactc

SEQ ID NO: 44316 - DNA, 20 bp, Artificial Sequence
  Description of Artificial Sequence: Synthetic oligonucleotide
  Target: ATXN2; (+) strand; PAM type: NRG; PAM sequence: TGG
gggccactcgagctttgtac

SEQ ID NO: 44317 - DNA, 20 bp, Artificial Sequence
  Description of Artificial Sequence: Synthetic oligonucleotide
  Target: ATXN2; (+) strand; PAM type: NRG; PAM sequence: GGG
ggccactcgagctttgtact

SEQ ID NO: 44318 - DNA, 20 bp, Artificial Sequence
  Description of Artificial Sequence: Synthetic oligonucleotide
  Target: ATXN2; (+) strand; PAM type: NRG; PAM sequence: TGG
actcaatttcttctgctaac

SEQ ID NO: 44319 - DNA, 20 bp, Artificial Sequence
  Description of Artificial Sequence: Synthetic oligonucleotide
  Target: ATXN2; (+) strand; PAM type: NRG; PAM sequence: GAG
cccgttttaaaaattcttct

SEQ ID NO: 44320 - DNA, 20 bp, Artificial Sequence
  Description of Artificial Sequence: Synthetic oligonucleotide
  Target: ATXN2; (+) strand; PAM type: NRG; PAM sequence: AAG
cttctgagttatctctttct

SEQ ID NO: 44321 - DNA, 20 bp, Artificial Sequence
  Description of Artificial Sequence: Synthetic oligonucleotide
  Target: ATXN2; (+) strand; PAM type: NRG; PAM sequence: AGG
ttctgagttatctctttcta

SEQ ID NO: 44322 - DNA, 20 bp, Artificial Sequence
  Description of Artificial Sequence: Synthetic oligonucleotide
  Target: ATXN2; (+) strand; PAM type: NRG; PAM sequence: GGG
tctgagttatctctttctaa

SEQ ID NO: 44323 - DNA, 20 bp, Artificial Sequence
  Description of Artificial Sequence: Synthetic oligonucleotide
  Target: ATXN2; (+) strand; PAM type: NRG; PAM sequence: GAG
ctaagggcactctgaaacat

SEQ ID NO: 44324 - DNA, 20 bp, Artificial Sequence
  Description of Artificial Sequence: Synthetic oligonucleotide
  Target: ATXN2; (+) strand; PAM type: NRG; PAM sequence: AGG
taagggcactctgaaacatg

SEQ ID NO: 44325 - DNA, 20 bp, Artificial Sequence
  Description of Artificial Sequence: Synthetic oligonucleotide
  Target: ATXN2; (+) strand; PAM type: NRG; PAM sequence: AAG
gcactctgaaacatgaggaa

SEQ ID NO: 44326 - DNA, 20 bp, Artificial Sequence
  Description of Artificial Sequence: Synthetic oligonucleotide
  Target: ATXN2; (+) strand; PAM type: NRG; PAM sequence: AAG
ctgaaacatgaggaaaagaa

SEQ ID NO: 44327 - DNA, 20 bp, Artificial Sequence
  Description of Artificial Sequence: Synthetic oligonucleotide
  Target: ATXN2; (+) strand; PAM type: NRG; PAM sequence: GAG
gaggaaaagaaaagcaaaat

SEQ ID NO: 44328 - DNA, 20 bp, Artificial Sequence
  Description of Artificial Sequence: Synthetic oligonucleotide
  Target: ATXN2; (+) strand; PAM type: NRG; PAM sequence: AAG
aaagcaaaatgagtccttta

SEQ ID NO: 44329 - DNA, 20 bp, Artificial Sequence
  Description of Artificial Sequence: Synthetic oligonucleotide
  Target: ATXN2; (+) strand; PAM type: NRG; PAM sequence: CAG
aaatgagtcctttaaagcca

SEQ ID NO: 44330 - DNA, 20 bp, Artificial Sequence
  Description of Artificial Sequence: Synthetic oligonucleotide
  Target: ATXN2; (+) strand; PAM type: NRG; PAM sequence: AAG
atctgtcataatcaactact

SEQ ID NO: 44331 - DNA, 20 bp, Artificial Sequence
  Description of Artificial Sequence: Synthetic oligonucleotide
  Target: ATXN2; (+) strand; PAM type: NRG; PAM sequence: AAG
gtcataatcaactactaaga

SEQ ID NO: 44332 - DNA, 20 bp, Artificial Sequence
  Description of Artificial Sequence: Synthetic oligonucleotide
  Target: ATXN2; (+) strand; PAM type: NRG; PAM sequence: TAG
aatcaactactaagaaagtt

SEQ ID NO: 44333 - DNA, 20 bp, Artificial Sequence
  Description of Artificial Sequence: Synthetic oligonucleotide
  Target: ATXN2; (+) strand; PAM type: NRG; PAM sequence: GAG
tcaactactaagaaagttta

SEQ ID NO: 44334 - DNA, 20 bp, Artificial Sequence
  Description of Artificial Sequence: Synthetic oligonucleotide
  Target: ATXN2; (+) strand; PAM type: NRG; PAM sequence: TAG
tactaagaaagtttagagtt

SEQ ID NO: 44335 - DNA, 20 bp, Artificial Sequence
  Description of Artificial Sequence: Synthetic oligonucleotide
  Target: ATXN2; (+) strand; PAM type: NRG; PAM sequence: TGG
aagtttagagtttagaatac

SEQ ID NO: 44336 - DNA, 20 bp, Artificial Sequence
  Description of Artificial Sequence: Synthetic oligonucleotide
  Target: ATXN2; (+) strand; PAM type: NRG; PAM sequence: CAG
gtttagaatactggtaaaaa

SEQ ID NO: 44337 - DNA, 20 bp, Artificial Sequence
  Description of Artificial Sequence: Synthetic oligonucleotide
  Target: ATXN2; (+) strand; PAM type: NRG; PAM sequence: AAG
aaaactaaaactaaaactaa

SEQ ID NO: 44338 - DNA, 20 bp, Artificial Sequence
  Description of Artificial Sequence: Synthetic oligonucleotide
  Target: ATXN2; (+) strand; PAM type: NRG; PAM sequence: TAG
aaaactaaaactaaaagtta

SEQ ID NO: 44339 - DNA, 20 bp, Artificial Sequence
  Description of Artificial Sequence: Synthetic oligonucleotide
  Target: ATXN2; (+) strand; PAM type: NRG; PAM sequence: CAG
tttttctgttaccttttctc

SEQ ID NO: 44340 - DNA, 20 bp, Artificial Sequence
  Description of Artificial Sequence: Synthetic oligonucleotide
  Target: ATXN2; (+) strand; PAM type: NRG; PAM sequence: GAG
tttctgttaccttttctcca

SEQ ID NO: 44341 - DNA, 20 bp, Artificial Sequence
  Description of Artificial Sequence: Synthetic oligonucleotide
  Target: ATXN2; (+) strand; PAM type: NRG; PAM sequence: AGG
ttctgttaccttttctccag

SEQ ID NO: 44342 - DNA, 20 bp, Artificial Sequence
  Description of Artificial Sequence: Synthetic oligonucleotide
  Target: ATXN2; (+) strand; PAM type: NRG; PAM sequence: TGG
gaggaacatatttcaaaaac

SEQ ID NO: 44343 - DNA, 20 bp, Artificial Sequence
  Description of Artificial Sequence: Synthetic oligonucleotide
  Target: ATXN2; (+) strand; PAM type: NRG; PAM sequence: TAG
aatctctgcccttgcaaatt

SEQ ID NO: 44344 - DNA, 20 bp, Artificial Sequence
  Description of Artificial Sequence: Synthetic oligonucleotide
  Target: ATXN2; (+) strand; PAM type: NRG; PAM sequence: TAG
ttagatattttttaacaact

SEQ ID NO: 44345 - DNA, 20 bp, Artificial Sequence
  Description of Artificial Sequence: Synthetic oligonucleotide
  Target: ATXN2; (+) strand; PAM type: NRG; PAM sequence: AAG
gatattttttaacaacttag

SEQ ID NO: 44346 - DNA, 20 bp, Artificial Sequence
  Description of Artificial Sequence: Synthetic oligonucleotide
  Target: ATXN2; (+) strand; PAM type: NRG; PAM sequence: CGG
aacaacttagaagacaaaac

SEQ ID NO: 44347 - DNA, 20 bp, Artificial Sequence
  Description of Artificial Sequence: Synthetic oligonucleotide
  Target: ATXN2; (+) strand; PAM type: NRG; PAM sequence: CAG
acttagaagacaaaaccggc

SEQ ID NO: 44348 - DNA, 20 bp, Artificial Sequence
  Description of Artificial Sequence: Synthetic oligonucleotide
  Target: ATXN2; (+) strand; PAM type: NRG; PAM sequence: AGG
cttagaagacaaaaccggcc

SEQ ID NO: 44349 - DNA, 20 bp, Artificial Sequence
  Description of Artificial Sequence: Synthetic oligonucleotide
  Target: ATXN2; (+) strand; PAM type: NRG; PAM sequence: CAG
aagacaaaaccggccaggca

SEQ ID NO: 44350 - DNA, 20 bp, Artificial Sequence
  Description of Artificial Sequence: Synthetic oligonucleotide
  Target: ATXN2; (+) strand; PAM type: NRG; PAM sequence: TGG
acaaaaccggccaggcacag

SEQ ID NO: 44351 - DNA, 20 bp, Artificial Sequence
  Description of Artificial Sequence: Synthetic oligonucleotide
  Target: ATXN2; (+) strand; PAM type: NRG; PAM sequence: CAG
gtggctcacacctgtaatcc

SEQ ID NO: 44352 - DNA, 20 bp, Artificial Sequence
  Description of Artificial Sequence: Synthetic oligonucleotide
  Target: ATXN2; (+) strand; PAM type: NRG; PAM sequence: TGG
cacctgtaatcccagcactt

SEQ ID NO: 44353 - DNA, 20 bp, Artificial Sequence
  Description of Artificial Sequence: Synthetic oligonucleotide
  Target: ATXN2; (+) strand; PAM type: NRG; PAM sequence: GGG
acctgtaatcccagcacttt

SEQ ID NO: 44354 - DNA, 20 bp, Artificial Sequence
  Description of Artificial Sequence: Synthetic oligonucleotide
  Target: ATXN2; (+) strand; PAM type: NRG; PAM sequence: GAG
ctgtaatcccagcactttgg

SEQ ID NO: 44355 - DNA, 20 bp, Artificial Sequence
  Description of Artificial Sequence: Synthetic oligonucleotide
  Target: ATXN2; (+) strand; PAM type: NRG; PAM sequence: AGG
tgtaatcccagcactttggg

SEQ ID NO: 44356 - DNA, 20 bp, Artificial Sequence
  Description of Artificial Sequence: Synthetic oligonucleotide
  Target: ATXN2; (+) strand; PAM type: NRG; PAM sequence: GAG
tcccagcactttgggaggcc

SEQ ID NO: 44357 - DNA, 20 bp, Artificial Sequence
  Description of Artificial Sequence: Synthetic oligonucleotide
  Target: ATXN2; (+) strand; PAM type: NRG; PAM sequence: AGG
cccagcactttgggaggccg

SEQ ID NO: 44358 - DNA, 20 bp, Artificial Sequence
  Description of Artificial Sequence: Synthetic oligonucleotide
  Target: ATXN2; (+) strand; PAM type: NRG; PAM sequence: CAG
agcactttgggaggccgagg

SEQ ID NO: 44359 - DNA, 20 bp, Artificial Sequence
  Description of Artificial Sequence: Synthetic oligonucleotide
  Target: ATXN2; (+) strand; PAM type: NRG; PAM sequence: AGG
gcactttgggaggccgaggc

SEQ ID NO: 44360 - DNA, 20 bp, Artificial Sequence
  Description of Artificial Sequence: Synthetic oligonucleotide
  Target: ATXN2; (+) strand; PAM type: NRG; PAM sequence: TGG
ctttgggaggccgaggcagg

SEQ ID NO: 44361 - DNA, 20 bp, Artificial Sequence
  Description of Artificial Sequence: Synthetic oligonucleotide
  Target: ATXN2; (+) strand; PAM type: NRG; PAM sequence: GAG
ggccgaggcaggtggatcac

SEQ ID NO: 44362 - DNA, 20 bp, Artificial Sequence
  Description of Artificial Sequence: Synthetic oligonucleotide
  Target: ATXN2; (+) strand; PAM type: NRG; PAM sequence: AGG
gccgaggcaggtggatcacg

SEQ ID NO: 44363 - DNA, 20 bp, Artificial Sequence
  Description of Artificial Sequence: Synthetic oligonucleotide
  Target: ATXN2; (+) strand; PAM type: NRG; PAM sequence: AAG
ggcaggtggatcacgaggtg

SEQ ID NO: 44364 - DNA, 20 bp, Artificial Sequence
  Description of Artificial Sequence: Synthetic oligonucleotide
  Target: ATXN2; (+) strand; PAM type: NRG; PAM sequence: GAG
caggtggatcacgaggtgaa

SEQ ID NO: 44365 - DNA, 20 bp, Artificial Sequence
  Description of Artificial Sequence: Synthetic oligonucleotide
  Target: ATXN2; (+) strand; PAM type: NRG; PAM sequence: GAG
gatcacgaggtgaagagatc

SEQ ID NO: 44366 - DNA, 20 bp, Artificial Sequence
  Description of Artificial Sequence: Synthetic oligonucleotide
  Target: ATXN2; (+) strand; PAM type: NRG; PAM sequence: TGG
tgaagagatcgagactatcc

SEQ ID NO: 44367 - DNA, 20 bp, Artificial Sequence
  Description of Artificial Sequence: Synthetic oligonucleotide
  Target: ATXN2; (+) strand; PAM type: NRG; PAM sequence: TGG
cgagactatcctggccaaca

SEQ ID NO: 44368 - DNA, 20 bp, Artificial Sequence
  Description of Artificial Sequence: Synthetic oligonucleotide
  Target: ATXN2; (+) strand; PAM type: NRG; PAM sequence: CAG
ccccgtctctactaaaaata

SEQ ID NO: 44369 - DNA, 20 bp, Artificial Sequence
  Description of Artificial Sequence: Synthetic oligonucleotide
  Target: ATXN2; (+) strand; PAM type: NRG; PAM sequence: TAG
tctactaaaaatacagaaat

SEQ ID NO: 44370 - DNA, 20 bp, Artificial Sequence
  Description of Artificial Sequence: Synthetic oligonucleotide
  Target: ATXN2; (+) strand; PAM type: NRG; PAM sequence: TGG
ctaaaaatacagaaattaga

SEQ ID NO: 44371 - DNA, 20 bp, Artificial Sequence
  Description of Artificial Sequence: Synthetic oligonucleotide
  Target: ATXN2; (+) strand; PAM type: NRG; PAM sequence: GGG
taaaaatacagaaattagat

SEQ ID NO: 44372 - DNA, 20 bp, Artificial Sequence
  Description of Artificial Sequence: Synthetic oligonucleotide
  Target: ATXN2; (+) strand; PAM type: NRG; PAM sequence: TGG
atacagaaattagatgggca

SEQ ID NO: 44373 - DNA, 20 bp, Artificial Sequence
  Description of Artificial Sequence: Synthetic oligonucleotide
  Target: ATXN2; (+) strand; PAM type: NRG; PAM sequence: TAG
cagaaattagatgggcatgg

SEQ ID NO: 44374 - DNA, 20 bp, Artificial Sequence
  Description of Artificial Sequence: Synthetic oligonucleotide
  Target: ATXN2; (+) strand; PAM type: NRG; PAM sequence: TAG
ggcatggtagcacgcgccta

SEQ ID NO: 44375 - DNA, 20 bp, Artificial Sequence
  Description of Artificial Sequence: Synthetic oligonucleotide
  Target: ATXN2; (+) strand; PAM type: NRG; PAM sequence: CAG
gtagcacgcgcctatagtcc

SEQ ID NO: 44376 - DNA, 20 bp, Artificial Sequence
  Description of Artificial Sequence: Synthetic oligonucleotide
  Target: ATXN2; (+) strand; PAM type: NRG; PAM sequence: CGG
cgcctatagtcccagctact

SEQ ID NO: 44377 - DNA, 20 bp, Artificial Sequence
  Description of Artificial Sequence: Synthetic oligonucleotide
  Target: ATXN2; (+) strand; PAM type: NRG; PAM sequence: GGG
gcctatagtcccagctactc

SEQ ID NO: 44378 - DNA, 20 bp, Artificial Sequence
  Description of Artificial Sequence: Synthetic oligonucleotide
  Target: ATXN2; (+) strand; PAM type: NRG; PAM sequence: GAG
ctatagtcccagctactcgg

SEQ ID NO: 44379 - DNA, 20 bp, Artificial Sequence
  Description of Artificial Sequence: Synthetic oligonucleotide
  Target: ATXN2; (+) strand; PAM type: NRG; PAM sequence: AGG
tatagtcccagctactcggg

SEQ ID NO: 44380 - DNA, 20 bp, Artificial Sequence
  Description of Artificial Sequence: Synthetic oligonucleotide
  Target: ATXN2; (+) strand; PAM type: NRG; PAM sequence: GAG
tcccagctactcgggaggct

SEQ ID NO: 44381 - DNA, 20 bp, Artificial Sequence
  Description of Artificial Sequence: Synthetic oligonucleotide
  Target: ATXN2; (+) strand; PAM type: NRG; PAM sequence: AGG
cccagctactcgggaggctg

SEQ ID NO: 44382 - DNA, 20 bp, Artificial Sequence
  Description of Artificial Sequence: Synthetic oligonucleotide
  Target: ATXN2; (+) strand; PAM type: NRG; PAM sequence: CAG
agctactcgggaggctgagg

SEQ ID NO: 44383 - DNA, 20 bp, Artificial Sequence
  Description of Artificial Sequence: Synthetic oligonucleotide
  Target: ATXN2; (+) strand; PAM type: NRG; PAM sequence: AGG
gctactcgggaggctgaggc

SEQ ID NO: 44384 - DNA, 20 bp, Artificial Sequence
  Description of Artificial Sequence: Synthetic oligonucleotide
  Target: ATXN2; (+) strand; PAM type: NRG; PAM sequence: GAG
tactcgggaggctgaggcag

SEQ ID NO: 44385 - DNA, 20 bp, Artificial Sequence
  Description of Artificial Sequence: Synthetic oligonucleotide
  Target: ATXN2; (+) strand; PAM type: NRG; PAM sequence: CGG
gcaggagaatcgcttgaacc

SEQ ID NO: 44386 - DNA, 20 bp, Artificial Sequence
  Description of Artificial Sequence: Synthetic oligonucleotide
  Target: ATXN2; (+) strand; PAM type: NRG; PAM sequence: GGG
caggagaatcgcttgaaccc

SEQ ID NO: 44387 - DNA, 20 bp, Artificial Sequence
  Description of Artificial Sequence: Synthetic oligonucleotide
  Target: ATXN2; (+) strand; PAM type: NRG; PAM sequence: CAG
aatcgcttgaacccgggatg

SEQ ID NO: 44388 - DNA, 20 bp, Artificial Sequence
  Description of Artificial Sequence: Synthetic oligonucleotide
  Target: ATXN2; (+) strand; PAM type: NRG; PAM sequence: GAG
tcgcttgaacccgggatgca

SEQ ID NO: 44389 - DNA, 20 bp, Artificial Sequence
  Description of Artificial Sequence: Synthetic oligonucleotide
  Target: ATXN2; (+) strand; PAM type: NRG; PAM sequence: AGG
cgcttgaacccgggatgcag

SEQ ID NO: 44390 - DNA, 20 bp, Artificial Sequence
  Description of Artificial Sequence: Synthetic oligonucleotide
  Target: ATXN2; (+) strand; PAM type: NRG; PAM sequence: CAG
aacccgggatgcagaggttg

SEQ ID NO: 44391 - DNA, 20 bp, Artificial Sequence
  Description of Artificial Sequence: Synthetic oligonucleotide
  Target: ATXN2; (+) strand; PAM type: NRG; PAM sequence: GAG
cgggatgcagaggttgcagt

SEQ ID NO: 44392 - DNA, 20 bp, Artificial Sequence
  Description of Artificial Sequence: Synthetic oligonucleotide
  Target: ATXN2; (+) strand; PAM type: NRG; PAM sequence: GAG
tgcagaggttgcagtgagcc

SEQ ID NO: 44393 - DNA, 20 bp, Artificial Sequence
  Description of Artificial Sequence: Synthetic oligonucleotide
  Target: ATXN2; (+) strand; PAM type: NRG; PAM sequence: CAG
gagattgcaccactgcactc

SEQ ID NO: 44394 - DNA, 20 bp, Artificial Sequence
  Description of Artificial Sequence: Synthetic oligonucleotide
  Target: ATXN2; (+) strand; PAM type: NRG; PAM sequence: TGG
tgcaccactgcactccagcc

SEQ ID NO: 44395 - DNA, 20 bp, Artificial Sequence
  Description of Artificial Sequence: Synthetic oligonucleotide
  Target: ATXN2; (+) strand; PAM type: NRG; PAM sequence: GAG
caccactgcactccagcctg

SEQ ID NO: 44396 - DNA, 20 bp, Artificial Sequence
  Description of Artificial Sequence: Synthetic oligonucleotide
  Target: ATXN2; (+) strand; PAM type: NRG; PAM sequence: CAG
tgcactccagcctggagaca

SEQ ID NO: 44397 - DNA, 20 bp, Artificial Sequence
  Description of Artificial Sequence: Synthetic oligonucleotide
  Target: ATXN2; (+) strand; PAM type: NRG; PAM sequence: GAG
ctccagcctggagacacagc

SEQ ID NO: 44398 - DNA, 20 bp, Artificial Sequence
  Description of Artificial Sequence: Synthetic oligonucleotide
  Target: ATXN2; (+) strand; PAM type: NRG; PAM sequence: AAG
acagcgagattccctctcaa

SEQ ID NO: 44399 - DNA, 20 bp, Artificial Sequence
  Description of Artificial Sequence: Synthetic oligonucleotide
  Target: ATXN2; (+) strand; PAM type: NRG; PAM sequence: AAG
tccctctcaaaagaaaaaaa

SEQ ID NO: 44400 - DNA, 20 bp, Artificial Sequence
  Description of Artificial Sequence: Synthetic oligonucleotide
  Target: ATXN2; (+) strand; PAM type: NRG; PAM sequence: TAG
agacaaaaccaaaatttgtt

SEQ ID NO: 44401 - DNA, 20 bp, Artificial Sequence
  Description of Artificial Sequence: Synthetic oligonucleotide
  Target: ATXN2; (+) strand; PAM type: NRG; PAM sequence: GAG
acaaaaccaaaatttgttta

SEQ ID NO: 44402 - DNA, 20 bp, Artificial Sequence
  Description of Artificial Sequence: Synthetic oligonucleotide
  Target: ATXN2; (+) strand; PAM type: NRG; PAM sequence: CAG
atttgtttagagcataaaaa

SEQ ID NO: 44403 - DNA, 20 bp, Artificial Sequence
  Description of Artificial Sequence: Synthetic oligonucleotide
  Target: ATXN2; (+) strand; PAM type: NRG; PAM sequence: AGG
tttgtttagagcataaaaac

SEQ ID NO: 44404 - DNA, 20 bp, Artificial Sequence
  Description of Artificial Sequence: Synthetic oligonucleotide
  Target: ATXN2; (+) strand; PAM type: NRG; PAM sequence: GGG
ttgtttagagcataaaaaca

SEQ ID NO: 44405 - DNA, 20 bp, Artificial Sequence
  Description of Artificial Sequence: Synthetic oligonucleotide
  Target: ATXN2; (+) strand; PAM type: NRG; PAM sequence: TAG
tagagcataaaaacagggta

SEQ ID NO: 44406 - DNA, 20 bp, Artificial Sequence
  Description of Artificial Sequence: Synthetic oligonucleotide
  Target: ATXN2; (+) strand; PAM type: NRG; PAM sequence: AGG
agagcataaaaacagggtat

SEQ ID NO: 44407 - DNA, 20 bp, Artificial Sequence
  Description of Artificial Sequence: Synthetic oligonucleotide
  Target: ATXN2; (+) strand; PAM type: NRG; PAM sequence: TGG
catttattccctttttttaa

SEQ ID NO: 44408 - DNA, 20 bp, Artificial Sequence
  Description of Artificial Sequence: Synthetic oligonucleotide
  Target: ATXN2; (+) strand; PAM type: NRG; PAM sequence: CAG
tttttaatggaaatttatca

SEQ ID NO: 44409 - DNA, 20 bp, Artificial Sequence
  Description of Artificial Sequence: Synthetic oligonucleotide
  Target: ATXN2; (+) strand; PAM type: NRG; PAM sequence: TGG
taatggaaatttatcacagt

SEQ ID NO: 44410 - DNA, 20 bp, Artificial Sequence
  Description of Artificial Sequence: Synthetic oligonucleotide
  Target: ATXN2; (+) strand; PAM type: NRG; PAM sequence: AAG
aatttatcacagttggtaat

SEQ ID NO: 44411 - DNA, 20 bp, Artificial Sequence
  Description of Artificial Sequence: Synthetic oligonucleotide
  Target: ATXN2; (+) strand; PAM type: NRG; PAM sequence: GAG
tttatcacagttggtaataa

SEQ ID NO: 44412 - DNA, 20 bp, Artificial Sequence
  Description of Artificial Sequence: Synthetic oligonucleotide
  Target: ATXN2; (+) strand; PAM type: NRG; PAM sequence: AAG
acatttattcatcataaatt

SEQ ID NO: 44413 - DNA, 20 bp, Artificial Sequence
  Description of Artificial Sequence: Synthetic oligonucleotide
  Target: ATXN2; (+) strand; PAM type: NRG; PAM sequence: AAG
aattaagctgatgaaaatca

SEQ ID NO: 44414 - DNA, 20 bp, Artificial Sequence
  Description of Artificial Sequence: Synthetic oligonucleotide
  Target: ATXN2; (+) strand; PAM type: NRG; PAM sequence: AAG
ttttcaaacttacgtatacg

SEQ ID NO: 44415 - DNA, 20 bp, Artificial Sequence
  Description of Artificial Sequence: Synthetic oligonucleotide
  Target: ATXN2; (+) strand; PAM type: NRG; PAM sequence: TAG
agataaactgctatcatacg

SEQ ID NO: 44416 - DNA, 20 bp, Artificial Sequence
  Description of Artificial Sequence: Synthetic oligonucleotide
  Target: ATXN2; (+) strand; PAM type: NRG; PAM sequence: TGG
attatatcgaaacatatcat

SEQ ID NO: 44417 - DNA, 20 bp, Artificial Sequence
  Description of Artificial Sequence: Synthetic oligonucleotide
  Target: ATXN2; (+) strand; PAM type: NRG; PAM sequence: GGG
ttatatcgaaacatatcatt

SEQ ID NO: 44418 - DNA, 20 bp, Artificial Sequence
  Description of Artificial Sequence: Synthetic oligonucleotide
  Target: ATXN2; (+) strand; PAM type: NRG; PAM sequence: TAG
atcattgggatcccatccat

SEQ ID NO: 44419 - DNA, 20 bp, Artificial Sequence
  Description of Artificial Sequence: Synthetic oligonucleotide
  Target: ATXN2; (+) strand; PAM type: NRG; PAM sequence: TAG
tgggatcccatccattagac

SEQ ID NO: 44420 - DNA, 20 bp, Artificial Sequence
  Description of Artificial Sequence: Synthetic oligonucleotide
  Target: ATXN2; (+) strand; PAM type: NRG; PAM sequence: AAG
gatcccatccattagactag

SEQ ID NO: 44421 - DNA, 20 bp, Artificial Sequence
  Description of Artificial Sequence: Synthetic oligonucleotide
  Target: ATXN2; (+) strand; PAM type: NRG; PAM sequence: AAG
cattagactagaagaaaatg

SEQ ID NO: 44422 - DNA, 20 bp, Artificial Sequence
  Description of Artificial Sequence: Synthetic oligonucleotide
  Target: ATXN2; (+) strand; PAM type: NRG; PAM sequence: AAG
gcttgtttttcaaaatgtca

SEQ ID NO: 44423 - DNA, 20 bp, Artificial Sequence
  Description of Artificial Sequence: Synthetic oligonucleotide
  Target: ATXN2; (+) strand; PAM type: NRG; PAM sequence: TAG
tgtttttcaaaatgtcaaag

SEQ ID NO: 44424 - DNA, 20 bp, Artificial Sequence
  Description of Artificial Sequence: Synthetic oligonucleotide
  Target: ATXN2; (+) strand; PAM type: NRG; PAM sequence: CAG
agtagttgttccctttcatt

SEQ ID NO: 44425 - DNA, 20 bp, Artificial Sequence
  Description of Artificial Sequence: Synthetic oligonucleotide
  Target: ATXN2; (+) strand; PAM type: NRG; PAM sequence: GAG
caatatctaacaaactactt

SEQ ID NO: 44426 - DNA, 20 bp, Artificial Sequence
  Description of Artificial Sequence: Synthetic oligonucleotide
  Target: ATXN2; (+) strand; PAM type: NRG; PAM sequence: TAG
acaaactacttgagcaaaat

SEQ ID NO: 44427 - DNA, 20 bp, Artificial Sequence
  Description of Artificial Sequence: Synthetic oligonucleotide
  Target: ATXN2; (+) strand; PAM type: NRG; PAM sequence: TAG
cttgagcaaaattagcaaat

SEQ ID NO: 44428 - DNA, 20 bp, Artificial Sequence
  Description of Artificial Sequence: Synthetic oligonucleotide
  Target: ATXN2; (+) strand; PAM type: NRG; PAM sequence: TAG
aaaattagcaaattagaaaa

SEQ ID NO: 44429 - DNA, 20 bp, Artificial Sequence
  Description of Artificial Sequence: Synthetic oligonucleotide
  Target: ATXN2; (+) strand; PAM type: NRG; PAM sequence: AGG
aaattagcaaattagaaaat

SEQ ID NO: 44430 - DNA, 20 bp, Artificial Sequence
  Description of Artificial Sequence: Synthetic oligonucleotide
  Target: ATXN2; (+) strand; PAM type: NRG; PAM sequence: TAG
aaatttccttaaaaatgttt

SEQ ID NO: 44431 - DNA, 20 bp, Artificial Sequence
  Description of Artificial Sequence: Synthetic oligonucleotide
  Target: ATXN2; (+) strand; PAM type: NRG; PAM sequence: CAG
tgttttagaaaaatacttat

SEQ ID NO: 44432 - DNA, 20 bp, Artificial Sequence
  Description of Artificial Sequence: Synthetic oligonucleotide
  Target: ATXN2; (+) strand; PAM type: NRG; PAM sequence: CAG
aaaatacttatcagcccctc

SEQ ID NO: 44433 - DNA, 20 bp, Artificial Sequence
  Description of Artificial Sequence: Synthetic oligonucleotide
  Target: ATXN2; (+) strand; PAM type: NRG; PAM sequence: AAG
tatcagcccctccagttgat

SEQ ID NO: 44434 - DNA, 20 bp, Artificial Sequence
  Description of Artificial Sequence: Synthetic oligonucleotide
  Target: ATXN2; (+) strand; PAM type: NRG; PAM sequence: GAG
actatacaacacaattattt

SEQ ID NO: 44435 - DNA, 20 bp, Artificial Sequence
  Description of Artificial Sequence: Synthetic oligonucleotide
  Target: ATXN2; (+) strand; PAM type: NRG; PAM sequence: CAG
atacaacacaattatttgag

SEQ ID NO: 44436 - DNA, 20 bp, Artificial Sequence
  Description of Artificial Sequence: Synthetic oligonucleotide
  Target: ATXN2; (+) strand; PAM type: NRG; PAM sequence: AAG
tatttgagcagttattttta

SEQ ID NO: 44437 - DNA, 20 bp, Artificial Sequence
  Description of Artificial Sequence: Synthetic oligonucleotide
  Target: ATXN2; (+) strand; PAM type: NRG; PAM sequence: TAG
gagcagttatttttaaagtt

SEQ ID NO: 44438 - DNA, 20 bp, Artificial Sequence
  Description of Artificial Sequence: Synthetic oligonucleotide
  Target: ATXN2; (+) strand; PAM type: NRG; PAM sequence: TAG
attttaattacttcataaaa

SEQ ID NO: 44439 - DNA, 20 bp, Artificial Sequence
  Description of Artificial Sequence: Synthetic oligonucleotide
  Target: ATXN2; (+) strand; PAM type: NRG; PAM sequence: CAG
ttacttcataaaatagcctt

SEQ ID NO: 44440 - DNA, 20 bp, Artificial Sequence
  Description of Artificial Sequence: Synthetic oligonucleotide
  Target: ATXN2; (+) strand; PAM type: NRG; PAM sequence: CAG
tcataaaatagccttcagat

SEQ ID NO: 44441 - DNA, 20 bp, Artificial Sequence
  Description of Artificial Sequence: Synthetic oligonucleotide
  Target: ATXN2; (+) strand; PAM type: NRG; PAM sequence: AGG
cataaaatagccttcagatc

SEQ ID NO: 44442 - DNA, 20 bp, Artificial Sequence
  Description of Artificial Sequence: Synthetic oligonucleotide
  Target: ATXN2; (+) strand; PAM type: NRG; PAM sequence: GGG
ataaaatagccttcagatca

SEQ ID NO: 44443 - DNA, 20 bp, Artificial Sequence
  Description of Artificial Sequence: Synthetic oligonucleotide
  Target: ATXN2; (+) strand; PAM type: NRG; PAM sequence: AAG
ctcttttctctaacctgtaa

SEQ ID NO: 44444 - DNA, 20 bp, Artificial Sequence
  Description of Artificial Sequence: Synthetic oligonucleotide
  Target: ATXN2; (+) strand; PAM type: NRG; PAM sequence: CAG
aacctgtaaaagccaccttt

SEQ ID NO: 44445 - DNA, 20 bp, Artificial Sequence
  Description of Artificial Sequence: Synthetic oligonucleotide
  Target: ATXN2; (+) strand; PAM type: NRG; PAM sequence: TAG
tgtaaaagccacctttcagt

SEQ ID NO: 44446 - DNA, 20 bp, Artificial Sequence
  Description of Artificial Sequence: Synthetic oligonucleotide
  Target: ATXN2; (+) strand; PAM type: NRG; PAM sequence: GAG
taaaagccacctttcagtta

SEQ ID NO: 44447 - DNA, 20 bp, Artificial Sequence
  Description of Artificial Sequence: Synthetic oligonucleotide
  Target: ATXN2; (+) strand; PAM type: NRG; PAM sequence: GAG
catttacctgtaaccttctt

SEQ ID NO: 44448 - DNA, 20 bp, Artificial Sequence
  Description of Artificial Sequence: Synthetic oligonucleotide
  Target: ATXN2; (+) strand; PAM type: NRG; PAM sequence: TGG
taaccttcttgagatcacac

SEQ ID NO: 44449 - DNA, 20 bp, Artificial Sequence
  Description of Artificial Sequence: Synthetic oligonucleotide
  Target: ATXN2; (+) strand; PAM type: NRG; PAM sequence: CAG
cttgagatcacactggtcct

SEQ ID NO: 44450 - DNA, 20 bp, Artificial Sequence
  Description of Artificial Sequence: Synthetic oligonucleotide
  Target: ATXN2; (+) strand; PAM type: NRG; PAM sequence: AGG
ttgagatcacactggtcctc

SEQ ID NO: 44451 - DNA, 20 bp, Artificial Sequence
  Description of Artificial Sequence: Synthetic oligonucleotide
  Target: ATXN2; (+) strand; PAM type: NRG; PAM sequence: TGG
cacactggtcctcaggtctg

SEQ ID NO: 44452 - DNA, 20 bp, Artificial Sequence
  Description of Artificial Sequence: Synthetic oligonucleotide
  Target: ATXN2; (+) strand; PAM type: NRG; PAM sequence: GAG
cactggtcctcaggtctgtg

SEQ ID NO: 44453 - DNA, 20 bp, Artificial Sequence
  Description of Artificial Sequence: Synthetic oligonucleotide
  Target: ATXN2; (+) strand; PAM type: NRG; PAM sequence: AGG
actggtcctcaggtctgtgg

SEQ ID NO: 44454 - DNA, 20 bp, Artificial Sequence
  Description of Artificial Sequence: Synthetic oligonucleotide
  Target: ATXN2; (+) strand; PAM type: NRG; PAM sequence: CAG
gtcctcaggtctgtggagga

SEQ ID NO: 44455 - DNA, 20 bp, Artificial Sequence
  Description of Artificial Sequence: Synthetic oligonucleotide
  Target: ATXN2; (+) strand; PAM type: NRG; PAM sequence: AGG
tcctcaggtctgtggaggac

SEQ ID NO: 44456 - DNA, 20 bp, Artificial Sequence
  Description of Artificial Sequence: Synthetic oligonucleotide
  Target: ATXN2; (+) strand; PAM type: NRG; PAM sequence: GAG
ctcaggtctgtggaggacag

SEQ ID NO: 44457 - DNA, 20 bp, Artificial Sequence
  Description of Artificial Sequence: Synthetic oligonucleotide
  Target: ATXN2; (+) strand; PAM type: NRG; PAM sequence: AGG
tcaggtctgtggaggacagg

SEQ ID NO: 44458 - DNA, 20 bp, Artificial Sequence
  Description of Artificial Sequence: Synthetic oligonucleotide
  Target: ATXN2; (+) strand; PAM type: NRG; PAM sequence: AAG
atattttacttcttttaaac

SEQ ID NO: 44459 - DNA, 20 bp, Artificial Sequence
  Description of Artificial Sequence: Synthetic oligonucleotide
  Target: ATXN2; (+) strand; PAM type: NRG; PAM sequence: AGG
tattttacttcttttaaaca

SEQ ID NO: 44460 - DNA, 20 bp, Artificial Sequence
  Description of Artificial Sequence: Synthetic oligonucleotide
  Target: ATXN2; (+) strand; PAM type: NRG; PAM sequence: GGG
attttacttcttttaaacaa

SEQ ID NO: 44461 - DNA, 20 bp, Artificial Sequence
  Description of Artificial Sequence: Synthetic oligonucleotide
  Target: ATXN2; (+) strand; PAM type: NRG; PAM sequence: TGG
tttaaacaagggattccaca

SEQ ID NO: 44462 - DNA, 20 bp, Artificial Sequence
  Description of Artificial Sequence: Synthetic oligonucleotide
  Target: ATXN2; (+) strand; PAM type: NRG; PAM sequence: AAG
caagggattccacatggaac

SEQ ID NO: 44463 - DNA, 20 bp, Artificial Sequence
  Description of Artificial Sequence: Synthetic oligonucleotide
  Target: ATXN2; (+) strand; PAM type: NRG; PAM sequence: AGG
aagggattccacatggaaca

SEQ ID NO: 44464 - DNA, 20 bp, Artificial Sequence
  Description of Artificial Sequence: Synthetic oligonucleotide
  Target: ATXN2; (+) strand; PAM type: NRG; PAM sequence: GGG
agggattccacatggaacaa

SEQ ID NO: 44465 - DNA, 20 bp, Artificial Sequence
  Description of Artificial Sequence: Synthetic oligonucleotide
  Target: ATXN2; (+) strand; PAM type: NRG; PAM sequence: GGG
gggattccacatggaacaag

SEQ ID NO: 44466 - DNA, 20 bp, Artificial Sequence
  Description of Artificial Sequence: Synthetic oligonucleotide
  Target: ATXN2; (+) strand; PAM type: NRG; PAM sequence: CAG
gaacaaggggtgctttttaa

SEQ ID NO: 44467 - DNA, 20 bp, Artificial Sequence
  Description of Artificial Sequence: Synthetic oligonucleotide
  Target: ATXN2; (+) strand; PAM type: NRG; PAM sequence: TGG
ccaaaaatacttccaatgtt

SEQ ID NO: 44468 - DNA, 20 bp, Artificial Sequence
  Description of Artificial Sequence: Synthetic oligonucleotide
  Target: ATXN2; (+) strand; PAM type: NRG; PAM sequence: GGG
caaaaatacttccaatgttt

SEQ ID NO: 44469 - DNA, 20 bp, Artificial Sequence
  Description of Artificial Sequence: Synthetic oligonucleotide
  Target: ATXN2; (+) strand; PAM type: NRG; PAM sequence: GAG
aaaatacttccaatgtttgg

SEQ ID NO: 44470 - DNA, 20 bp, Artificial Sequence
  Description of Artificial Sequence: Synthetic oligonucleotide
  Target: ATXN2; (+) strand; PAM type: NRG; PAM sequence: AAG
tacttccaatgtttgggaga

SEQ ID NO: 44471 - DNA, 20 bp, Artificial Sequence
  Description of Artificial Sequence: Synthetic oligonucleotide
  Target: ATXN2; (+) strand; PAM type: NRG; PAM sequence: AAG
ttccaatgtttgggagaaag

SEQ ID NO: 44472 - DNA, 20 bp, Artificial Sequence
  Description of Artificial Sequence: Synthetic oligonucleotide
  Target: ATXN2; (+) strand; PAM type: NRG; PAM sequence: AGG
tccaatgtttgggagaaaga

SEQ ID NO: 44473 - DNA, 20 bp, Artificial Sequence
  Description of Artificial Sequence: Synthetic oligonucleotide
  Target: ATXN2; (+) strand; PAM type: NRG; PAM sequence: GGG
ccaatgtttgggagaaagaa

SEQ ID NO: 44474 - DNA, 20 bp, Artificial Sequence
  Description of Artificial Sequence: Synthetic oligonucleotide
  Target: ATXN2; (+) strand; PAM type: NRG; PAM sequence: GAG
aatgtttgggagaaagaagg

SEQ ID NO: 44475 - DNA, 20 bp, Artificial Sequence
  Description of Artificial Sequence: Synthetic oligonucleotide
  Target: ATXN2; (+) strand; PAM type: NRG; PAM sequence: AAG
gtttgggagaaagaagggag

SEQ ID NO: 44476 - DNA, 20 bp, Artificial Sequence
  Description of Artificial Sequence: Synthetic oligonucleotide
  Target: ATXN2; (+) strand; PAM type: NRG; PAM sequence: AAG
ccctcatattcaacgattcc

SEQ ID NO: 44477 - DNA, 20 bp, Artificial Sequence
  Description of Artificial Sequence: Synthetic oligonucleotide
  Target: ATXN2; (+) strand; PAM type: NRG; PAM sequence: AGG
cctcatattcaacgattcca

SEQ ID NO: 44478 - DNA, 20 bp, Artificial Sequence
  Description of Artificial Sequence: Synthetic oligonucleotide
  Target: ATXN2; (+) strand; PAM type: NRG; PAM sequence: CGG
atattcaacgattccaaggt

SEQ ID NO: 44479 - DNA, 20 bp, Artificial Sequence
  Description of Artificial Sequence: Synthetic oligonucleotide
  Target: ATXN2; (+) strand; PAM type: NRG; PAM sequence: TGG
acgattccaaggtcggacta

SEQ ID NO: 44480 - DNA, 20 bp, Artificial Sequence
  Description of Artificial Sequence: Synthetic oligonucleotide
  Target: ATXN2; (+) strand; PAM type: NRG; PAM sequence: TAG
ccaaggtcggactatggtac

SEQ ID NO: 44481 - DNA, 20 bp, Artificial Sequence
  Description of Artificial Sequence: Synthetic oligonucleotide
  Target: ATXN2; (+) strand; PAM type: NRG; PAM sequence: AGG
caaggtcggactatggtact

SEQ ID NO: 44482 - DNA, 20 bp, Artificial Sequence
  Description of Artificial Sequence: Synthetic oligonucleotide
  Target: ATXN2; (+) strand; PAM type: NRG; PAM sequence: TGG
ggactatggtactaggtccc

SEQ ID NO: 44483 - DNA, 20 bp, Artificial Sequence
  Description of Artificial Sequence: Synthetic oligonucleotide
  Target: ATXN2; (+) strand; PAM type: NRG; PAM sequence: TGG
tggcaacctccccttcctcc

SEQ ID NO: 44484 - DNA, 20 bp, Artificial Sequence
  Description of Artificial Sequence: Synthetic oligonucleotide
  Target: ATXN2; (+) strand; PAM type: NRG; PAM sequence: GGG
ggcaacctccccttcctcct

SEQ ID NO: 44485 - DNA, 20 bp, Artificial Sequence
  Description of Artificial Sequence: Synthetic oligonucleotide
  Target: ATXN2; (+) strand; PAM type: NRG; PAM sequence: TGG
tcctcctgggaatgctcaaa

SEQ ID NO: 44486 - DNA, 20 bp, Artificial Sequence
  Description of Artificial Sequence: Synthetic oligonucleotide
  Target: ATXN2; (+) strand; PAM type: NRG; PAM sequence: GGG
cctcctgggaatgctcaaat

SEQ ID NO: 44487 - DNA, 20 bp, Artificial Sequence
  Description of Artificial Sequence: Synthetic oligonucleotide
  Target: ATXN2; (+) strand; PAM type: NRG; PAM sequence: AAG
cctgggaatgctcaaatggg

SEQ ID NO: 44488 - DNA, 20 bp, Artificial Sequence
  Description of Artificial Sequence: Synthetic oligonucleotide
  Target: ATXN2; (+) strand; PAM type: NRG; PAM sequence: AGG
ctgggaatgctcaaatggga

SEQ ID NO: 44489 - DNA, 20 bp, Artificial Sequence
  Description of Artificial Sequence: Synthetic oligonucleotide
  Target: ATXN2; (+) strand; PAM type: NRG; PAM sequence: CAG
ggaatgctcaaatgggaagg

SEQ ID NO: 44490 - DNA, 20 bp, Artificial Sequence
  Description of Artificial Sequence: Synthetic oligonucleotide
  Target: ATXN2; (+) strand; PAM type: NRG; PAM sequence: CGG
aatgggaaggcagcatgaaa

SEQ ID NO: 44491 - DNA, 20 bp, Artificial Sequence
  Description of Artificial Sequence: Synthetic oligonucleotide
  Target: ATXN2; (+) strand; PAM type: NRG; PAM sequence: CAG
aggcagcatgaaacggtgaa

SEQ ID NO: 44492 - DNA, 20 bp, Artificial Sequence
  Description of Artificial Sequence: Synthetic oligonucleotide
  Target: ATXN2; (+) strand; PAM type: NRG; PAM sequence: AGG
ggcagcatgaaacggtgaac

SEQ ID NO: 44493 - DNA, 20 bp, Artificial Sequence
  Description of Artificial Sequence: Synthetic oligonucleotide
  Target: ATXN2; (+) strand; PAM type: NRG; PAM sequence: TGG
aacggtgaacaggcaatcac

SEQ ID NO: 44494 - DNA, 20 bp, Artificial Sequence
  Description of Artificial Sequence: Synthetic oligonucleotide
  Target: ATXN2; (+) strand; PAM type: NRG; PAM sequence: AAG
gaacaggcaatcactggaca

SEQ ID NO: 44495 - DNA, 20 bp, Artificial Sequence
  Description of Artificial Sequence: Synthetic oligonucleotide
  Target: ATXN2; (+) strand; PAM type: NRG; PAM sequence: AAG
caatcactggacaaagtcac

SEQ ID NO: 44496 - DNA, 20 bp, Artificial Sequence
  Description of Artificial Sequence: Synthetic oligonucleotide
  Target: ATXN2; (+) strand; PAM type: NRG; PAM sequence: TGG
ctggacaaagtcacaagaac

SEQ ID NO: 44497 - DNA, 20 bp, Artificial Sequence
  Description of Artificial Sequence: Synthetic oligonucleotide
  Target: ATXN2; (+) strand; PAM type: NRG; PAM sequence: GGG
tggacaaagtcacaagaact

SEQ ID NO: 44498 - DNA, 20 bp, Artificial Sequence
  Description of Artificial Sequence: Synthetic oligonucleotide
  Target: ATXN2; (+) strand; PAM type: NRG; PAM sequence: TAG
aagtcacaagaactgggctt

SEQ ID NO: 44499 - DNA, 20 bp, Artificial Sequence
  Description of Artificial Sequence: Synthetic oligonucleotide
  Target: ATXN2; (+) strand; PAM type: NRG; PAM sequence: TGG
caagaactgggctttagaaa

SEQ ID NO: 44500 - DNA, 20 bp, Artificial Sequence
  Description of Artificial Sequence: Synthetic oligonucleotide
  Target: ATXN2; (+) strand; PAM type: NRG; PAM sequence: TAG
tttagaaatggttttaccat

SEQ ID NO: 44501 - DNA, 20 bp, Artificial Sequence
  Description of Artificial Sequence: Synthetic oligonucleotide
  Target: ATXN2; (+) strand; PAM type: NRG; PAM sequence: CAG
agaaatggttttaccattag

SEQ ID NO: 44502 - DNA, 20 bp, Artificial Sequence
  Description of Artificial Sequence: Synthetic oligonucleotide
  Target: ATXN2; (+) strand; PAM type: NRG; PAM sequence: CAG
cattagcagttgtgacacct

SEQ ID NO: 44503 - DNA, 20 bp, Artificial Sequence
  Description of Artificial Sequence: Synthetic oligonucleotide
  Target: ATXN2; (+) strand; PAM type: NRG; PAM sequence: AAG
tagcagttgtgacacctcag

SEQ ID NO: 44504 - DNA, 20 bp, Artificial Sequence
  Description of Artificial Sequence: Synthetic oligonucleotide
  Target: ATXN2; (+) strand; PAM type: NRG; PAM sequence: TGG
cagttgtgacacctcagaag

SEQ ID NO: 44505 - DNA, 20 bp, Artificial Sequence
  Description of Artificial Sequence: Synthetic oligonucleotide
  Target: ATXN2; (+) strand; PAM type: NRG; PAM sequence: TGG
cacctcagaagtggcaactc

SEQ ID NO: 44506 - DNA, 20 bp, Artificial Sequence
  Description of Artificial Sequence: Synthetic oligonucleotide
  Target: ATXN2; (+) strand; PAM type: NRG; PAM sequence: CAG
aataccctaacctataacct

SEQ ID NO: 44507 - DNA, 20 bp, Artificial Sequence
  Description of Artificial Sequence: Synthetic oligonucleotide
  Target: ATXN2; (+) strand; PAM type: NRG; PAM sequence: TAG
cctaacctataacctcagca

SEQ ID NO: 44508 - DNA, 20 bp, Artificial Sequence
  Description of Artificial Sequence: Synthetic oligonucleotide
  Target: ATXN2; (+) strand; PAM type: NRG; PAM sequence: AGG
ctaacctataacctcagcat

SEQ ID NO: 44509 - DNA, 20 bp, Artificial Sequence
  Description of Artificial Sequence: Synthetic oligonucleotide
  Target: ATXN2; (+) strand; PAM type: NRG; PAM sequence: GAG
aggtaactccacaattctac

SEQ ID NO: 44510 - DNA, 20 bp, Artificial Sequence
  Description of Artificial Sequence: Synthetic oligonucleotide
  Target: ATXN2; (+) strand; PAM type: NRG; PAM sequence: AGG
ggtaactccacaattctacg

SEQ ID NO: 44511 - DNA, 20 bp, Artificial Sequence
  Description of Artificial Sequence: Synthetic oligonucleotide
  Target: ATXN2; (+) strand; PAM type: NRG; PAM sequence: TAG
acaattctacgaggaaacta

SEQ ID NO: 44512 - DNA, 20 bp, Artificial Sequence
  Description of Artificial Sequence: Synthetic oligonucleotide
  Target: ATXN2; (+) strand; PAM type: NRG; PAM sequence: AGG
caattctacgaggaaactat

SEQ ID NO: 44513 - DNA, 20 bp, Artificial Sequence
  Description of Artificial Sequence: Synthetic oligonucleotide
  Target: ATXN2; (+) strand; PAM type: NRG; PAM sequence: AAG
taggaaattaccattcgcaa

SEQ ID NO: 44514 - DNA, 20 bp, Artificial Sequence
  Description of Artificial Sequence: Synthetic oligonucleotide
  Target: ATXN2; (+) strand; PAM type: NRG; PAM sequence: AGG
aggaaattaccattcgcaaa

SEQ ID NO: 44515 - DNA, 20 bp, Artificial Sequence
  Description of Artificial Sequence: Synthetic oligonucleotide
  Target: ATXN2; (+) strand; PAM type: NRG; PAM sequence: GGG
ggaaattaccattcgcaaaa

SEQ ID NO: 44516 - DNA, 20 bp, Artificial Sequence
  Description of Artificial Sequence: Synthetic oligonucleotide
  Target: ATXN2; (+) strand; PAM type: NRG; PAM sequence: GAG
aaattaccattcgcaaaagg

SEQ ID NO: 44517 - DNA, 20 bp, Artificial Sequence
  Description of Artificial Sequence: Synthetic oligonucleotide
  Target: ATXN2; (+) strand; PAM type: NRG; PAM sequence: AGG
aattaccattcgcaaaaggg

SEQ ID NO: 44518 - DNA, 20 bp, Artificial Sequence
  Description of Artificial Sequence: Synthetic oligonucleotide
  Target: ATXN2; (+) strand; PAM type: NRG; PAM sequence: TGG
gggaggctgccttctttttt

SEQ ID NO: 44519 - DNA, 20 bp, Artificial Sequence
  Description of Artificial Sequence: Synthetic oligonucleotide
  Target: ATXN2; (+) strand; PAM type: NRG; PAM sequence: TGG
aggctgccttctttttttgg

SEQ ID NO: 44520 - DNA, 20 bp, Artificial Sequence
  Description of Artificial Sequence: Synthetic oligonucleotide
  Target: ATXN2; (+) strand; PAM type: NRG; PAM sequence: GGG
ggctgccttctttttttggt

SEQ ID NO: 44521 - DNA, 20 bp, Artificial Sequence
  Description of Artificial Sequence: Synthetic oligonucleotide
  Target: ATXN2; (+) strand; PAM type: NRG; PAM sequence: GGG
gctgccttctttttttggtg

SEQ ID NO: 44522 - DNA, 20 bp, Artificial Sequence
  Description of Artificial Sequence: Synthetic oligonucleotide
  Target: ATXN2; (+) strand; PAM type: NRG; PAM sequence: GGG
ctgccttctttttttggtgg

SEQ ID NO: 44523 - DNA, 20 bp, Artificial Sequence
  Description of Artificial Sequence: Synthetic oligonucleotide
  Target: ATXN2; (+) strand; PAM type: NRG; PAM sequence: GGG
tgccttctttttttggtggg

SEQ ID NO: 44524 - DNA, 20 bp, Artificial Sequence
  Description of Artificial Sequence: Synthetic oligonucleotide
  Target: ATXN2; (+) strand; PAM type: NRG; PAM sequence: GGG
gccttctttttttggtgggg

SEQ ID NO: 44525 - DNA, 20 bp, Artificial Sequence
  Description of Artificial Sequence: Synthetic oligonucleotide
  Target: ATXN2; (+) strand; PAM type: NRG; PAM sequence: GAG
cttctttttttggtgggggg

SEQ ID NO: 44526 - DNA, 20 bp, Artificial Sequence
  Description of Artificial Sequence: Synthetic oligonucleotide
  Target: ATXN2; (+) strand; PAM type: NRG; PAM sequence: CAG
tttttttggtgggggggagc

SEQ ID NO: 44527 - DNA, 20 bp, Artificial Sequence
  Description of Artificial Sequence: Synthetic oligonucleotide
  Target: ATXN2; (+) strand; PAM type: NRG; PAM sequence: AGG
ttttttggtgggggggagcc

SEQ ID NO: 44528 - DNA, 20 bp, Artificial Sequence
  Description of Artificial Sequence: Synthetic oligonucleotide
  Target: ATXN2; (+) strand; PAM type: NRG; PAM sequence: GGG
tttttggtgggggggagcca

SEQ ID NO: 44529 - DNA, 20 bp, Artificial Sequence
  Description of Artificial Sequence: Synthetic oligonucleotide
  Target: ATXN2; (+) strand; PAM type: NRG; PAM sequence: GGG
ttttggtgggggggagccag

SEQ ID NO: 44530 - DNA, 20 bp, Artificial Sequence
  Description of Artificial Sequence: Synthetic oligonucleotide
  Target: ATXN2; (+) strand; PAM type: NRG; PAM sequence: AAG
ggtgggggggagccaggggc

SEQ ID NO: 44531 - DNA, 20 bp, Artificial Sequence
  Description of Artificial Sequence: Synthetic oligonucleotide
  Target: ATXN2; (+) strand; PAM type: NRG; PAM sequence: AAG
ggggggagccaggggcaagc

SEQ ID NO: 44532 - DNA, 20 bp, Artificial Sequence
  Description of Artificial Sequence: Synthetic oligonucleotide
  Target: ATXN2; (+) strand; PAM type: NRG; PAM sequence: AAG
caggggcaagcaagtttatt

SEQ ID NO: 44533 - DNA, 20 bp, Artificial Sequence
  Description of Artificial Sequence: Synthetic oligonucleotide
  Target: ATXN2; (+) strand; PAM type: NRG; PAM sequence: AAG
ggcaagcaagtttattaaga

SEQ ID NO: 44534 - DNA, 20 bp, Artificial Sequence
  Description of Artificial Sequence: Synthetic oligonucleotide
  Target: ATXN2; (+) strand; PAM type: NRG; PAM sequence: AAG
tttattaagaaagtaaataa

SEQ ID NO: 44535 - DNA, 20 bp, Artificial Sequence
  Description of Artificial Sequence: Synthetic oligonucleotide
  Target: ATXN2; (+) strand; PAM type: NRG; PAM sequence: TAG
aataaaagaatcctactcca

SEQ ID NO: 44536 - DNA, 20 bp, Artificial Sequence
  Description of Artificial Sequence: Synthetic oligonucleotide
  Target: ATXN2; (+) strand; PAM type: NRG; PAM sequence: AGG
ataaaagaatcctactccat

SEQ ID NO: 44537 - DNA, 20 bp, Artificial Sequence
  Description of Artificial Sequence: Synthetic oligonucleotide
  Target: ATXN2; (+) strand; PAM type: NRG; PAM sequence: CAG
aaagaatcctactccatagg

SEQ ID NO: 44538 - DNA, 20 bp, Artificial Sequence
  Description of Artificial Sequence: Synthetic oligonucleotide
  Target: ATXN2; (+) strand; PAM type: NRG; PAM sequence: GAG
agaatcctactccataggca

SEQ ID NO: 44539 - DNA, 20 bp, Artificial Sequence
  Description of Artificial Sequence: Synthetic oligonucleotide
  Target: ATXN2; (+) strand; PAM type: NRG; PAM sequence: CAG
atcctactccataggcagag

SEQ ID NO: 44540 - DNA, 20 bp, Artificial Sequence
  Description of Artificial Sequence: Synthetic oligonucleotide
  Target: ATXN2; (+) strand; PAM type: NRG; PAM sequence: GAG
actccataggcagagcagct

SEQ ID NO: 44541 - DNA, 20 bp, Artificial Sequence
  Description of Artificial Sequence: Synthetic oligonucleotide
  Target: ATXN2; (+) strand; PAM type: NRG; PAM sequence: AGG
ctccataggcagagcagctg

SEQ ID NO: 44542 - DNA, 20 bp, Artificial Sequence
  Description of Artificial Sequence: Synthetic oligonucleotide
  Target: ATXN2; (+) strand; PAM type: NRG; PAM sequence: AAG
ggctgcattctttaacgtaa

SEQ ID NO: 44543 - DNA, 20 bp, Artificial Sequence
  Description of Artificial Sequence: Synthetic oligonucleotide
  Target: ATXN2; (+) strand; PAM type: NRG; PAM sequence: TGG
acgtaaaagaatcaaccaat

SEQ ID NO: 44544 - DNA, 20 bp, Artificial Sequence
  Description of Artificial Sequence: Synthetic oligonucleotide
  Target: ATXN2; (+) strand; PAM type: NRG; PAM sequence: GGG
cgtaaaagaatcaaccaatt

SEQ ID NO: 44545 - DNA, 20 bp, Artificial Sequence
  Description of Artificial Sequence: Synthetic oligonucleotide
  Target: ATXN2; (+) strand; PAM type: NRG; PAM sequence: CAG
agaatcaaccaattgggcca

SEQ ID NO: 44546 - DNA, 20 bp, Artificial Sequence
  Description of Artificial Sequence: Synthetic oligonucleotide
  Target: ATXN2; (+) strand; PAM type: NRG; PAM sequence: AGG
gaatcaaccaattgggccac

SEQ ID NO: 44547 - DNA, 20 bp, Artificial Sequence
  Description of Artificial Sequence: Synthetic oligonucleotide
  Target: ATXN2; (+) strand; PAM type: NRG; PAM sequence: TGG
caaccaattgggccacaggc

SEQ ID NO: 44548 - DNA, 20 bp, Artificial Sequence
  Description of Artificial Sequence: Synthetic oligonucleotide
  Target: ATXN2; (+) strand; PAM type: NRG; PAM sequence: AAG
ccaattgggccacaggctgg

SEQ ID NO: 44549 - DNA, 20 bp, Artificial Sequence
  Description of Artificial Sequence: Synthetic oligonucleotide
  Target: ATXN2; (+) strand; PAM type: NRG; PAM sequence: CAG
caggctggaagactatttac

SEQ ID NO: 44550 - DNA, 20 bp, Artificial Sequence
  Description of Artificial Sequence: Synthetic oligonucleotide
  Target: ATXN2; (+) strand; PAM type: NRG; PAM sequence: TGG
taccagtgaatattactgcc

SEQ ID NO: 44551 - DNA, 20 bp, Artificial Sequence
  Description of Artificial Sequence: Synthetic oligonucleotide
  Target: ATXN2; (+) strand; PAM type: NRG; PAM sequence: AAG
atgtttcaactcctttttta

SEQ ID NO: 44552 - DNA, 20 bp, Artificial Sequence
  Description of Artificial Sequence: Synthetic oligonucleotide
  Target: ATXN2; (+) strand; PAM type: NRG; PAM sequence: TGG
ctccttttttaaagccttac

SEQ ID NO: 44553 - DNA, 20 bp, Artificial Sequence
  Description of Artificial Sequence: Synthetic oligonucleotide
  Target: ATXN2; (+) strand; PAM type: NRG; PAM sequence: AAG
tttaaagccttactggtgaa

SEQ ID NO: 44554 - DNA, 20 bp, Artificial Sequence
  Description of Artificial Sequence: Synthetic oligonucleotide
  Target: ATXN2; (+) strand; PAM type: NRG; PAM sequence: AAG
ccttactggtgaaaagtata

SEQ ID NO: 44555 - DNA, 20 bp, Artificial Sequence
  Description of Artificial Sequence: Synthetic oligonucleotide
  Target: ATXN2; (+) strand; PAM type: NRG; PAM sequence: CAG
ctggtgaaaagtataaagtc

SEQ ID NO: 44556 - DNA, 20 bp, Artificial Sequence
  Description of Artificial Sequence: Synthetic oligonucleotide
  Target: ATXN2; (+) strand; PAM type: NRG; PAM sequence: AAG
gaaaagtataaagtccagta

SEQ ID NO: 44557 - DNA, 20 bp, Artificial Sequence
  Description of Artificial Sequence: Synthetic oligonucleotide
  Target: ATXN2; (+) strand; PAM type: NRG; PAM sequence: AGG
aaaagtataaagtccagtaa

SEQ ID NO: 44558 - DNA, 20 bp, Artificial Sequence
  Description of Artificial Sequence: Synthetic oligonucleotide
  Target: ATXN2; (+) strand; PAM type: NRG; PAM sequence: CAG
gtaaaggttgtaatccatcc

SEQ ID NO: 44559 - DNA, 20 bp, Artificial Sequence
  Description of Artificial Sequence: Synthetic oligonucleotide
  Target: ATXN2; (+) strand; PAM type: NRG; PAM sequence: AAG
aaggttgtaatccatcccag

SEQ ID NO: 44560 - DNA, 20 bp, Artificial Sequence
  Description of Artificial Sequence: Synthetic oligonucleotide
  Target: ATXN2; (+) strand; PAM type: NRG; PAM sequence: AAG
gaagaatgaacacatcaacc

SEQ ID NO: 44561 - DNA, 20 bp, Artificial Sequence
  Description of Artificial Sequence: Synthetic oligonucleotide
  Target: ATXN2; (+) strand; PAM type: NRG; PAM sequence: TGG
catcaaccaagcaatgctga

SEQ ID NO: 44562 - DNA, 20 bp, Artificial Sequence
  Description of Artificial Sequence: Synthetic oligonucleotide
  Target: ATXN2; (+) strand; PAM type: NRG; PAM sequence: AAG
ctgatggcaacctcaatgct

SEQ ID NO: 44563 - DNA, 20 bp, Artificial Sequence
  Description of Artificial Sequence: Synthetic oligonucleotide
  Target: ATXN2; (+) strand; PAM type: NRG; PAM sequence: AGG
tgatggcaacctcaatgcta

SEQ ID NO: 44564 - DNA, 20 bp, Artificial Sequence
  Description of Artificial Sequence: Synthetic oligonucleotide
  Target: ATXN2; (+) strand; PAM type: NRG; PAM sequence: AAG
caatgctaaggcttgcctcg

SEQ ID NO: 44565 - DNA, 20 bp, Artificial Sequence
  Description of Artificial Sequence: Synthetic oligonucleotide
  Target: ATXN2; (+) strand; PAM type: NRG; PAM sequence: TGG
cgaagttcacctattaacct

SEQ ID NO: 44566 - DNA, 20 bp, Artificial Sequence
  Description of Artificial Sequence: Synthetic oligonucleotide
  Target: ATXN2; (+) strand; PAM type: NRG; PAM sequence: GGG
gaagttcacctattaacctt

SEQ ID NO: 44567 - DNA, 20 bp, Artificial Sequence
  Description of Artificial Sequence: Synthetic oligonucleotide
  Target: ATXN2; (+) strand; PAM type: NRG; PAM sequence: CAG
tgggtcctcctgtgctactc

SEQ ID NO: 44568 - DNA, 20 bp, Artificial Sequence
  Description of Artificial Sequence: Synthetic oligonucleotide
  Target: ATXN2; (+) strand; PAM type: NRG; PAM sequence: AGG
gggtcctcctgtgctactcc

SEQ ID NO: 44569 - DNA, 20 bp, Artificial Sequence
  Description of Artificial Sequence: Synthetic oligonucleotide
  Target: ATXN2; (+) strand; PAM type: NRG; PAM sequence: AAG
cctcctgtgctactccaggt

SEQ ID NO: 44570 - DNA, 20 bp, Artificial Sequence
  Description of Artificial Sequence: Synthetic oligonucleotide
  Target: ATXN2; (+) strand; PAM type: NRG; PAM sequence: AAG
tccaggtaagactataatgt

SEQ ID NO: 44571 - DNA, 20 bp, Artificial Sequence
  Description of Artificial Sequence: Synthetic oligonucleotide
  Target: ATXN2; (+) strand; PAM type: NRG; PAM sequence: TGG
aattccttttgccaaacaca

SEQ ID NO: 44572 - DNA, 20 bp, Artificial Sequence
  Description of Artificial Sequence: Synthetic oligonucleotide
  Target: ATXN2; (+) strand; PAM type: NRG; PAM sequence: GGG
attccttttgccaaacacat

SEQ ID NO: 44573 - DNA, 20 bp, Artificial Sequence
  Description of Artificial Sequence: Synthetic oligonucleotide
  Target: ATXN2; (+) strand; PAM type: NRG; PAM sequence: CAG
ccttttgccaaacacatggg

SEQ ID NO: 44574 - DNA, 20 bp, Artificial Sequence
  Description of Artificial Sequence: Synthetic oligonucleotide
  Target: ATXN2; (+) strand; PAM type: NRG; PAM sequence: AGG
cttttgccaaacacatgggc

SEQ ID NO: 44575 - DNA, 20 bp, Artificial Sequence
  Description of Artificial Sequence: Synthetic oligonucleotide
  Target: ATXN2; (+) strand; PAM type: NRG; PAM sequence: TGG
caggaaatcacacttactta

SEQ ID NO: 44576 - DNA, 20 bp, Artificial Sequence
  Description of Artificial Sequence: Synthetic oligonucleotide
  Target: ATXN2; (+) strand; PAM type: NRG; PAM sequence: GAG
ggaaatcacacttacttatg

SEQ ID NO: 44577 - DNA, 20 bp, Artificial Sequence
  Description of Artificial Sequence: Synthetic oligonucleotide
  Target: ATXN2; (+) strand; PAM type: NRG; PAM sequence: AGG
gaaatcacacttacttatgg

SEQ ID NO: 44578 - DNA, 20 bp, Artificial Sequence
  Description of Artificial Sequence: Synthetic oligonucleotide
  Target: ATXN2; (+) strand; PAM type: NRG; PAM sequence: AAG
tggaggctttaaaattactt

SEQ ID NO: 44579 - DNA, 20 bp, Artificial Sequence
  Description of Artificial Sequence: Synthetic oligonucleotide
  Target: ATXN2; (+) strand; PAM type: NRG; PAM sequence: AAG
acataaaaaaaaaaaaaaaa

SEQ ID NO: 44580 - DNA, 20 bp, Artificial Sequence
  Description of Artificial Sequence: Synthetic oligonucleotide
  Target: ATXN2; (+) strand; PAM type: NRG; PAM sequence: CGG
aaaaaaaaaagcacacaata

SEQ ID NO: 44581 - DNA, 20 bp, Artificial Sequence
  Description of Artificial Sequence: Synthetic oligonucleotide
  Target: ATXN2; (+) strand; PAM type: NRG; PAM sequence: AAG
aaaaaagcacacaatacgga

SEQ ID NO: 44582 - DNA, 20 bp, Artificial Sequence
  Description of Artificial Sequence: Synthetic oligonucleotide
  Target: ATXN2; (+) strand; PAM type: NRG; PAM sequence: CAG
acacaatacggaaagacatc

SEQ ID NO: 44583 - DNA, 20 bp, Artificial Sequence
  Description of Artificial Sequence: Synthetic oligonucleotide
  Target: ATXN2; (+) strand; PAM type: NRG; PAM sequence: AAG
acggaaagacatccagtaaa

SEQ ID NO: 44584 - DNA, 20 bp, Artificial Sequence
  Description of Artificial Sequence: Synthetic oligonucleotide
  Target: ATXN2; (+) strand; PAM type: NRG; PAM sequence: CAG
aagtaaatgtcttccaatcc

SEQ ID NO: 44585 - DNA, 20 bp, Artificial Sequence
  Description of Artificial Sequence: Synthetic oligonucleotide
  Target: ATXN2; (+) strand; PAM type: NRG; PAM sequence: AAG
gtgcataaataactactatt

SEQ ID NO: 44586 - DNA, 20 bp, Artificial Sequence
  Description of Artificial Sequence: Synthetic oligonucleotide
  Target: ATXN2; (+) strand; PAM type: NRG; PAM sequence: GAG
gcataaataactactattaa

SEQ ID NO: 44587 - DNA, 20 bp, Artificial Sequence
  Description of Artificial Sequence: Synthetic oligonucleotide
  Target: ATXN2; (+) strand; PAM type: NRG; PAM sequence: TGG
ataactactattaagagttc

SEQ ID NO: 44588 - DNA, 20 bp, Artificial Sequence
  Description of Artificial Sequence: Synthetic oligonucleotide
  Target: ATXN2; (+) strand; PAM type: NRG; PAM sequence: CGG
ctactattaagagttctggc

SEQ ID NO: 44589 - DNA, 20 bp, Artificial Sequence
  Description of Artificial Sequence: Synthetic oligonucleotide
  Target: ATXN2; (+) strand; PAM type: NRG; PAM sequence: GGG
tactattaagagttctggcc

SEQ ID NO: 44590 - DNA, 20 bp, Artificial Sequence
  Description of Artificial Sequence: Synthetic oligonucleotide
  Target: ATXN2; (+) strand; PAM type: NRG; PAM sequence: CGG
ttaagagttctggccgggca

SEQ ID NO: 44591 - DNA, 20 bp, Artificial Sequence
  Description of Artificial Sequence: Synthetic oligonucleotide
  Target: ATXN2; (+) strand; PAM type: NRG; PAM sequence: TGG
agagttctggccgggcacgg

SEQ ID NO: 44592 - DNA, 20 bp, Artificial Sequence
  Description of Artificial Sequence: Synthetic oligonucleotide
  Target: ATXN2; (+) strand; PAM type: NRG; PAM sequence: TGG
cgggcacggtggctcatgcc

SEQ ID NO: 44593 - DNA, 20 bp, Artificial Sequence
  Description of Artificial Sequence: Synthetic oligonucleotide
  Target: ATXN2; (+) strand; PAM type: NRG; PAM sequence: CAG
gtggctcatgcctggtatcc

SEQ ID NO: 44594 - DNA, 20 bp, Artificial Sequence
  Description of Artificial Sequence: Synthetic oligonucleotide
  Target: ATXN2; (+) strand; PAM type: NRG; PAM sequence: TGG
tgcctggtatcccagcactt

SEQ ID NO: 44595 - DNA, 20 bp, Artificial Sequence
  Description of Artificial Sequence: Synthetic oligonucleotide
  Target: ATXN2; (+) strand; PAM type: NRG; PAM sequence: GGG
gcctggtatcccagcacttt

SEQ ID NO: 44596 - DNA, 20 bp, Artificial Sequence
  Description of Artificial Sequence: Synthetic oligonucleotide
  Target: ATXN2; (+) strand; PAM type: NRG; PAM sequence: GAG
ctggtatcccagcactttgg

SEQ ID NO: 44597 - DNA, 20 bp, Artificial Sequence
  Description of Artificial Sequence: Synthetic oligonucleotide
  Target: ATXN2; (+) strand; PAM type: NRG; PAM sequence: AGG
tggtatcccagcactttggg

SEQ ID NO: 44598 - DNA, 20 bp, Artificial Sequence
  Description of Artificial Sequence: Synthetic oligonucleotide
  Target: ATXN2; (+) strand; PAM type: NRG; PAM sequence: GAG
tcccagcactttgggaggcc

SEQ ID NO: 44599 - DNA, 20 bp, Artificial Sequence
  Description of Artificial Sequence: Synthetic oligonucleotide
  Target: ATXN2; (+) strand; PAM type: NRG; PAM sequence: AGG
cccagcactttgggaggccg

SEQ ID NO: 44600 - DNA, 20 bp, Artificial Sequence
  Description of Artificial Sequence: Synthetic oligonucleotide
  Target: ATXN2; (+) strand; PAM type: NRG; PAM sequence: CAG
agcactttgggaggccgagg

SEQ ID NO: 44601 - DNA, 20 bp, Artificial Sequence
  Description of Artificial Sequence: Synthetic oligonucleotide
  Target: ATXN2; (+) strand; PAM type: NRG; PAM sequence: AGG
gcactttgggaggccgaggc

SEQ ID NO: 44602 - DNA, 20 bp, Artificial Sequence
  Description of Artificial Sequence: Synthetic oligonucleotide
  Target: ATXN2; (+) strand; PAM type: NRG; PAM sequence: GAG
actttgggaggccgaggcag

SEQ ID NO: 44603 - DNA, 20 bp, Artificial Sequence
  Description of Artificial Sequence: Synthetic oligonucleotide
  Target: ATXN2; (+) strand; PAM type: NRG; PAM sequence: AGG
ctttgggaggccgaggcagg

SEQ ID NO: 44604 - DNA, 20 bp, Artificial Sequence
  Description of Artificial Sequence: Synthetic oligonucleotide
  Target: ATXN2; (+) strand; PAM type: NRG; PAM sequence: AAG
gccgaggcaggaggatcacg

SEQ ID NO: 44605 - DNA, 20 bp, Artificial Sequence
  Description of Artificial Sequence: Synthetic oligonucleotide
  Target: ATXN2; (+) strand; PAM type: NRG; PAM sequence: CAG
aggcaggaggatcacgaagt

SEQ ID NO: 44606 - DNA, 20 bp, Artificial Sequence
  Description of Artificial Sequence: Synthetic oligonucleotide
  Target: ATXN2; (+) strand; PAM type: NRG; PAM sequence: AGG
ggcaggaggatcacgaagtc

SEQ ID NO: 44607 - DNA, 20 bp, Artificial Sequence
  Description of Artificial Sequence: Synthetic oligonucleotide
  Target: ATXN2; (+) strand; PAM type: NRG; PAM sequence: GAG
caggaggatcacgaagtcag

SEQ ID NO: 44608 - DNA, 20 bp, Artificial Sequence
  Description of Artificial Sequence: Synthetic oligonucleotide
  Target: ATXN2; (+) strand; PAM type: NRG; PAM sequence: GAG
gatcacgaagtcaggagatt

SEQ ID NO: 44609 - DNA, 20 bp, Artificial Sequence
  Description of Artificial Sequence: Synthetic oligonucleotide
  Target: ATXN2; (+) strand; PAM type: NRG; PAM sequence: TGG
tcaggagattgagaccatgc

SEQ ID NO: 44610 - DNA, 20 bp, Artificial Sequence
  Description of Artificial Sequence: Synthetic oligonucleotide
  Target: ATXN2; (+) strand; PAM type: NRG; PAM sequence: TGG
tgagaccatgctggctaaca

SEQ ID NO: 44611 - DNA, 20 bp, Artificial Sequence
  Description of Artificial Sequence: Synthetic oligonucleotide
  Target: ATXN2; (+) strand; PAM type: NRG; PAM sequence: TAG
ctactaaaaatacaaaaaat

SEQ ID NO: 44612 - DNA, 20 bp, Artificial Sequence
  Description of Artificial Sequence: Synthetic oligonucleotide
  Target: ATXN2; (+) strand; PAM type: NRG; PAM sequence: CAG
taaaaatacaaaaaattagc

SEQ ID NO: 44613 - DNA, 20 bp, Artificial Sequence
  Description of Artificial Sequence: Synthetic oligonucleotide
  Target: ATXN2; (+) strand; PAM type: NRG; PAM sequence: AGG
aaaaatacaaaaaattagcc

SEQ ID NO: 44614 - DNA, 20 bp, Artificial Sequence
  Description of Artificial Sequence: Synthetic oligonucleotide
  Target: ATXN2; (+) strand; PAM type: NRG; PAM sequence: TGG
tacaaaaaattagccaggtg

SEQ ID NO: 44615 - DNA, 20 bp, Artificial Sequence
  Description of Artificial Sequence: Synthetic oligonucleotide
  Target: ATXN2; (+) strand; PAM type: NRG; PAM sequence: TGG
aaaaaattagccaggtgtgg

SEQ ID NO: 44616 - DNA, 20 bp, Artificial Sequence
  Description of Artificial Sequence: Synthetic oligonucleotide
  Target: ATXN2; (+) strand; PAM type: NRG; PAM sequence: CGG
aaattagccaggtgtggtgg

SEQ ID NO: 44617 - DNA, 20 bp, Artificial Sequence
  Description of Artificial Sequence: Synthetic oligonucleotide
  Target: ATXN2; (+) strand; PAM type: NRG; PAM sequence: GGG
aattagccaggtgtggtggc

SEQ ID NO: 44618 - DNA, 20 bp, Artificial Sequence
  Description of Artificial Sequence: Synthetic oligonucleotide
  Target: ATXN2; (+) strand; PAM type: NRG; PAM sequence: GAG
ttagccaggtgtggtggcgg

SEQ ID NO: 44619 - DNA, 20 bp, Artificial Sequence
  Description of Artificial Sequence: Synthetic oligonucleotide
  Target: ATXN2; (+) strand; PAM type: NRG; PAM sequence: TAG
ggtgtggtggcgggagcctg

SEQ ID NO: 44620 - DNA, 20 bp, Artificial Sequence
  Description of Artificial Sequence: Synthetic oligonucleotide
  Target: ATXN2; (+) strand; PAM type: NRG; PAM sequence: CAG
gtggcgggagcctgtagtcc

SEQ ID NO: 44621 - DNA, 20 bp, Artificial Sequence
  Description of Artificial Sequence: Synthetic oligonucleotide
  Target: ATXN2; (+) strand; PAM type: NRG; PAM sequence: TGG
agcctgtagtcccagctact

SEQ ID NO: 44622 - DNA, 20 bp, Artificial Sequence
  Description of Artificial Sequence: Synthetic oligonucleotide
  Target: ATXN2; (+) strand; PAM type: NRG; PAM sequence: GGG
gcctgtagtcccagctactt

SEQ ID NO: 44623 - DNA, 20 bp, Artificial Sequence
  Description of Artificial Sequence: Synthetic oligonucleotide
  Target: ATXN2; (+) strand; PAM type: NRG; PAM sequence: GAG
ctgtagtcccagctacttgg

SEQ ID NO: 44624 - DNA, 20 bp, Artificial Sequence
  Description of Artificial Sequence: Synthetic oligonucleotide
  Target: ATXN2; (+) strand; PAM type: NRG; PAM sequence: AGG
tgtagtcccagctacttggg

SEQ ID NO: 44625 - DNA, 20 bp, Artificial Sequence
  Description of Artificial Sequence: Synthetic oligonucleotide
  Target: ATXN2; (+) strand; PAM type: NRG; PAM sequence: TAG
gtcccagctacttgggaggc

SEQ ID NO: 44626 - DNA, 20 bp, Artificial Sequence
  Description of Artificial Sequence: Synthetic oligonucleotide
  Target: ATXN2; (+) strand; PAM type: NRG; PAM sequence: AGG
tcccagctacttgggaggct

SEQ ID NO: 44627 - DNA, 20 bp, Artificial Sequence
  Description of Artificial Sequence: Synthetic oligonucleotide
  Target: ATXN2; (+) strand; PAM type: NRG; PAM sequence: GGG
cccagctacttgggaggcta

SEQ ID NO: 44628 - DNA, 20 bp, Artificial Sequence
  Description of Artificial Sequence: Synthetic oligonucleotide
  Target: ATXN2; (+) strand; PAM type: NRG; PAM sequence: CAG
agctacttgggaggctaggg

SEQ ID NO: 44629 - DNA, 20 bp, Artificial Sequence
  Description of Artificial Sequence: Synthetic oligonucleotide
  Target: ATXN2; (+) strand; PAM type: NRG; PAM sequence: AGG
gctacttgggaggctagggc

SEQ ID NO: 44630 - DNA, 20 bp, Artificial Sequence
  Description of Artificial Sequence: Synthetic oligonucleotide
  Target: ATXN2; (+) strand; PAM type: NRG; PAM sequence: GAG
tacttgggaggctagggcag

SEQ ID NO: 44631 - DNA, 20 bp, Artificial Sequence
  Description of Artificial Sequence: Synthetic oligonucleotide
  Target: ATXN2; (+) strand; PAM type: NRG; PAM sequence: TGG
gggaggctagggcaggagaa

SEQ ID NO: 44632 - DNA, 20 bp, Artificial Sequence
  Description of Artificial Sequence: Synthetic oligonucleotide
  Target: ATXN2; (+) strand; PAM type: NRG; PAM sequence: CGG
gcaggagaatggtgtgaacc

SEQ ID NO: 44633 - DNA, 20 bp, Artificial Sequence
  Description of Artificial Sequence: Synthetic oligonucleotide
  Target: ATXN2; (+) strand; PAM type: NRG; PAM sequence: GGG
caggagaatggtgtgaaccc

SEQ ID NO: 44634 - DNA, 20 bp, Artificial Sequence
  Description of Artificial Sequence: Synthetic oligonucleotide
  Target: ATXN2; (+) strand; PAM type: NRG; PAM sequence: GAG
ggagaatggtgtgaacccgg

SEQ ID NO: 44635 - DNA, 20 bp, Artificial Sequence
  Description of Artificial Sequence: Synthetic oligonucleotide
  Target: ATXN2; (+) strand; PAM type: NRG; PAM sequence: AGG
gagaatggtgtgaacccggg

SEQ ID NO: 44636 - DNA, 20 bp, Artificial Sequence
  Description of Artificial Sequence: Synthetic oligonucleotide
  Target: ATXN2; (+) strand; PAM type: NRG; PAM sequence: CAG
aatggtgtgaacccgggagg

SEQ ID NO: 44637 - DNA, 20 bp, Artificial Sequence
  Description of Artificial Sequence: Synthetic oligonucleotide
  Target: ATXN2; (+) strand; PAM type: NRG; PAM sequence: GAG
tggtgtgaacccgggaggca

SEQ ID NO: 44638 - DNA, 20 bp, Artificial Sequence
  Description of Artificial Sequence: Synthetic oligonucleotide
  Target: ATXN2; (+) strand; PAM type: NRG; PAM sequence: CAG
aacccgggaggcagagcttg

SEQ ID NO: 44639 - DNA, 20 bp, Artificial Sequence
  Description of Artificial Sequence: Synthetic oligonucleotide
  Target: ATXN2; (+) strand; PAM type: NRG; PAM sequence: GAG
cgggaggcagagcttgcagt

SEQ ID NO: 44640 - DNA, 20 bp, Artificial Sequence
  Description of Artificial Sequence: Synthetic oligonucleotide
  Target: ATXN2; (+) strand; PAM type: NRG; PAM sequence: GAG
ggcagagcttgcagtgagct

SEQ ID NO: 44641 - DNA, 20 bp, Artificial Sequence
  Description of Artificial Sequence: Synthetic oligonucleotide
  Target: ATXN2; (+) strand; PAM type: NRG; PAM sequence: AAG
gagatcacaccactgcactc

SEQ ID NO: 44642 - DNA, 20 bp, Artificial Sequence
  Description of Artificial Sequence: Synthetic oligonucleotide
  Target: ATXN2; (+) strand; PAM type: NRG; PAM sequence: TGG
cacaccactgcactcaagtc

SEQ ID NO: 44643 - DNA, 20 bp, Artificial Sequence
  Description of Artificial Sequence: Synthetic oligonucleotide
  Target: ATXN2; (+) strand; PAM type: NRG; PAM sequence: GGG
acaccactgcactcaagtct

SEQ ID NO: 44644 - DNA, 20 bp, Artificial Sequence
  Description of Artificial Sequence: Synthetic oligonucleotide
  Target: ATXN2; (+) strand; PAM type: NRG; PAM sequence: CAG
ctgcactcaagtctgggcga

SEQ ID NO: 44645 - DNA, 20 bp, Artificial Sequence
  Description of Artificial Sequence: Synthetic oligonucleotide
  Target: ATXN2; (+) strand; PAM type: NRG; PAM sequence: GAG
gcactcaagtctgggcgaca

SEQ ID NO: 44646 - DNA, 20 bp, Artificial Sequence
  Description of Artificial Sequence: Synthetic oligonucleotide
  Target: ATXN2; (+) strand; PAM type: NRG; PAM sequence: GAG
tcaagtctgggcgacagagc

SEQ ID NO: 44647 - DNA, 20 bp, Artificial Sequence
  Description of Artificial Sequence: Synthetic oligonucleotide
  Target: ATXN2; (+) strand; PAM type: NRG; PAM sequence: AAG
agagcgagactccatcttaa

SEQ ID NO: 44648 - DNA, 20 bp, Artificial Sequence
  Description of Artificial Sequence: Synthetic oligonucleotide
  Target: ATXN2; (+) strand; PAM type: NRG; PAM sequence: AAG
tccatcttaaaagaaaaaaa

SEQ ID NO: 44649 - DNA, 20 bp, Artificial Sequence
  Description of Artificial Sequence: Synthetic oligonucleotide
  Target: ATXN2; (+) strand; PAM type: NRG; PAM sequence: GAG
catcttaaaagaaaaaaaaa

SEQ ID NO: 44650 - DNA, 20 bp, Artificial Sequence
  Description of Artificial Sequence: Synthetic oligonucleotide
  Target: ATXN2; (+) strand; PAM type: NRG; PAM sequence: CAG
aaaagaaaaaaaaagagttt

SEQ ID NO: 44651 - DNA, 20 bp, Artificial Sequence
  Description of Artificial Sequence: Synthetic oligonucleotide
  Target: ATXN2; (+) strand; PAM type: NRG; PAM sequence: CGG
gaaaaaaaaagagtttcagc

SEQ ID NO: 44652 - DNA, 20 bp, Artificial Sequence
  Description of Artificial Sequence: Synthetic oligonucleotide
  Target: ATXN2; (+) strand; PAM type: NRG; PAM sequence: GGG
aaaaaaaaagagtttcagcc

SEQ ID NO: 44653 - DNA, 20 bp, Artificial Sequence
  Description of Artificial Sequence: Synthetic oligonucleotide
  Target: ATXN2; (+) strand; PAM type: NRG; PAM sequence: CAG
aaaagagtttcagccgggcg

SEQ ID NO: 44654 - DNA, 20 bp, Artificial Sequence
  Description of Artificial Sequence: Synthetic oligonucleotide
  Target: ATXN2; (+) strand; PAM type: NRG; PAM sequence: TGG
agagtttcagccgggcgcag

SEQ ID NO: 44655 - DNA, 20 bp, Artificial Sequence
  Description of Artificial Sequence: Synthetic oligonucleotide
  Target: ATXN2; (+) strand; PAM type: NRG; PAM sequence: CAG
gtggctcatgcctgtaatcc

SEQ ID NO: 44656 - DNA, 20 bp, Artificial Sequence
  Description of Artificial Sequence: Synthetic oligonucleotide
  Target: ATXN2; (+) strand; PAM type: NRG; PAM sequence: GAG
gcctgtaatcccagcacttt

SEQ ID NO: 44657 - DNA, 20 bp, Artificial Sequence
  Description of Artificial Sequence: Synthetic oligonucleotide
  Target: ATXN2; (+) strand; PAM type: NRG; PAM sequence: GAG
ctgtaatcccagcactttga

SEQ ID NO: 44658 - DNA, 20 bp, Artificial Sequence
  Description of Artificial Sequence: Synthetic oligonucleotide
  Target: ATXN2; (+) strand; PAM type: NRG; PAM sequence: AGG
tgtaatcccagcactttgag

SEQ ID NO: 44659 - DNA, 20 bp, Artificial Sequence
  Description of Artificial Sequence: Synthetic oligonucleotide
  Target: ATXN2; (+) strand; PAM type: NRG; PAM sequence: AAG
tcccagcactttgagaggcc

SEQ ID NO: 44660 - DNA, 20 bp, Artificial Sequence
  Description of Artificial Sequence: Synthetic oligonucleotide
  Target: ATXN2; (+) strand; PAM type: NRG; PAM sequence: AGG
cccagcactttgagaggcca

SEQ ID NO: 44661 - DNA, 20 bp, Artificial Sequence
  Description of Artificial Sequence: Synthetic oligonucleotide
  Target: ATXN2; (+) strand; PAM type: NRG; PAM sequence: TGG
agcactttgagaggccaagg

SEQ ID NO: 44662 - DNA, 20 bp, Artificial Sequence
  Description of Artificial Sequence: Synthetic oligonucleotide
  Target: ATXN2; (+) strand; PAM type: NRG; PAM sequence: GGG
gcactttgagaggccaaggt

SEQ ID NO: 44663 - DNA, 20 bp, Artificial Sequence
  Description of Artificial Sequence: Synthetic oligonucleotide
  Target: ATXN2; (+) strand; PAM type: NRG; PAM sequence: TGG
ctttgagaggccaaggtggg

SEQ ID NO: 44664 - DNA, 20 bp, Artificial Sequence
  Description of Artificial Sequence: Synthetic oligonucleotide
  Target: ATXN2; (+) strand; PAM type: NRG; PAM sequence: GAG
ccaaggtgggtggatcacct

SEQ ID NO: 44665 - DNA, 20 bp, Artificial Sequence
  Description of Artificial Sequence: Synthetic oligonucleotide
  Target: ATXN2; (+) strand; PAM type: NRG; PAM sequence: TAG
gtgggtggatcacctgagat

SEQ ID NO: 44666 - DNA, 20 bp, Artificial Sequence
  Description of Artificial Sequence: Synthetic oligonucleotide
  Target: ATXN2; (+) strand; PAM type: NRG; PAM sequence: AGG
tgggtggatcacctgagatt

SEQ ID NO: 44667 - DNA, 20 bp, Artificial Sequence
  Description of Artificial Sequence: Synthetic oligonucleotide
  Target: ATXN2; (+) strand; PAM type: NRG; PAM sequence: GAG
ggtggatcacctgagattag

SEQ ID NO: 44668 - DNA, 20 bp, Artificial Sequence
  Description of Artificial Sequence: Synthetic oligonucleotide
  Target: ATXN2; (+) strand; PAM type: NRG; PAM sequence: CGG
atcacctgagattaggagtt

SEQ ID NO: 44669 - DNA, 20 bp, Artificial Sequence
  Description of Artificial Sequence: Synthetic oligonucleotide
  Target: ATXN2; (+) strand; PAM type: NRG; PAM sequence: GGG
tcacctgagattaggagttc

SEQ ID NO: 44670 - DNA, 20 bp, Artificial Sequence
  Description of Artificial Sequence: Synthetic oligonucleotide
  Target: ATXN2; (+) strand; PAM type: NRG; PAM sequence: CAG
tgagattaggagttcgggac

SEQ ID NO: 44671 - DNA, 20 bp, Artificial Sequence
  Description of Artificial Sequence: Synthetic oligonucleotide
  Target: ATXN2; (+) strand; PAM type: NRG; PAM sequence: TGG
ttaggagttcgggaccagcc

SEQ ID NO: 44672 - DNA, 20 bp, Artificial Sequence
  Description of Artificial Sequence: Synthetic oligonucleotide
  Target: ATXN2; (+) strand; PAM type: NRG; PAM sequence: TAG
ctactaaaaatacaaaaaat

SEQ ID NO: 44673 - DNA, 20 bp, Artificial Sequence
  Description of Artificial Sequence: Synthetic oligonucleotide
  Target: ATXN2; (+) strand; PAM type: NRG; PAM sequence: CAG
taaaaatacaaaaaattagc

SEQ ID NO: 44674 - DNA, 20 bp, Artificial Sequence
  Description of Artificial Sequence: Synthetic oligonucleotide
  Target: ATXN2; (+) strand; PAM type: NRG; PAM sequence: TGG
tacaaaaaattagccagatg

SEQ ID NO: 44675 - DNA, 20 bp, Artificial Sequence
  Description of Artificial Sequence: Synthetic oligonucleotide
  Target: ATXN2; (+) strand; PAM type: NRG; PAM sequence: TGG
aaaaaattagccagatgtgg

SEQ ID NO: 44676 - DNA, 20 bp, Artificial Sequence
  Description of Artificial Sequence: Synthetic oligonucleotide
  Target: ATXN2; (+) strand; PAM type: NRG; PAM sequence: CGG
aaattagccagatgtggtgg

SEQ ID NO: 44677 - DNA, 20 bp, Artificial Sequence
  Description of Artificial Sequence: Synthetic oligonucleotide
  Target: ATXN2; (+) strand; PAM type: NRG; PAM sequence: GGG
aattagccagatgtggtggc

SEQ ID NO: 44678 - DNA, 20 bp, Artificial Sequence
  Description of Artificial Sequence: Synthetic oligonucleotide
  Target: ATXN2; (+) strand; PAM type: NRG; PAM sequence: TAG
gatgtggtggcgggcgcttg

SEQ ID NO: 44679 - DNA, 20 bp, Artificial Sequence
  Description of Artificial Sequence: Synthetic oligonucleotide
  Target: ATXN2; (+) strand; PAM type: NRG; PAM sequence: CAG
gtggcgggcgcttgtagtcc

SEQ ID NO: 44680 - DNA, 20 bp, Artificial Sequence
  Description of Artificial Sequence: Synthetic oligonucleotide
  Target: ATXN2; (+) strand; PAM type: NRG; PAM sequence: CAG
cgcttgtagtcccagctact

SEQ ID NO: 44681 - DNA, 20 bp, Artificial Sequence
  Description of Artificial Sequence: Synthetic oligonucleotide
  Target: ATXN2; (+) strand; PAM type: NRG; PAM sequence: AAG
ttgtagtcccagctactcag

SEQ ID NO: 44682 - DNA, 20 bp, Artificial Sequence
  Description of Artificial Sequence: Synthetic oligonucleotide
  Target: ATXN2; (+) strand; PAM type: NRG; PAM sequence: AGG
tgtagtcccagctactcaga

SEQ ID NO: 44683 - DNA, 20 bp, Artificial Sequence
  Description of Artificial Sequence: Synthetic oligonucleotide
  Target: ATXN2; (+) strand; PAM type: NRG; PAM sequence: AAG
cccagctactcagaaggctg

SEQ ID NO: 44684 - DNA, 20 bp, Artificial Sequence
  Description of Artificial Sequence: Synthetic oligonucleotide
  Target: ATXN2; (+) strand; PAM type: NRG; PAM sequence: CAG
agctactcagaaggctgaag

SEQ ID NO: 44685 - DNA, 20 bp, Artificial Sequence
  Description of Artificial Sequence: Synthetic oligonucleotide
  Target: ATXN2; (+) strand; PAM type: NRG; PAM sequence: AGG
gctactcagaaggctgaagc

SEQ ID NO: 44686 - DNA, 20 bp, Artificial Sequence
  Description of Artificial Sequence: Synthetic oligonucleotide
  Target: ATXN2; (+) strand; PAM type: NRG; PAM sequence: GAG
tactcagaaggctgaagcag

SEQ ID NO: 44687 - DNA, 20 bp, Artificial Sequence
  Description of Artificial Sequence: Synthetic oligonucleotide
  Target: ATXN2; (+) strand; PAM type: NRG; PAM sequence: TGG
gcaggagaatcgcttgaacc

SEQ ID NO: 44688 - DNA, 20 bp, Artificial Sequence
  Description of Artificial Sequence: Synthetic oligonucleotide
  Target: ATXN2; (+) strand; PAM type: NRG; PAM sequence: AAG
ggagaatcgcttgaacctgg

SEQ ID NO: 44689 - DNA, 20 bp, Artificial Sequence
  Description of Artificial Sequence: Synthetic oligonucleotide
  Target: ATXN2; (+) strand; PAM type: NRG; PAM sequence: AGG
gagaatcgcttgaacctgga

SEQ ID NO: 44690 - DNA, 20 bp, Artificial Sequence
  Description of Artificial Sequence: Synthetic oligonucleotide
  Target: ATXN2; (+) strand; PAM type: NRG; PAM sequence: CAG
aatcgcttgaacctggaagg

SEQ ID NO: 44691 - DNA, 20 bp, Artificial Sequence
  Description of Artificial Sequence: Synthetic oligonucleotide
  Target: ATXN2; (+) strand; PAM type: NRG; PAM sequence: GAG
tcgcttgaacctggaaggca

SEQ ID NO: 44692 - DNA, 20 bp, Artificial Sequence
  Description of Artificial Sequence: Synthetic oligonucleotide
  Target: ATXN2; (+) strand; PAM type: NRG; PAM sequence: AGG
cgcttgaacctggaaggcag

SEQ ID NO: 44693 - DNA, 20 bp, Artificial Sequence
  Description of Artificial Sequence: Synthetic oligonucleotide
  Target: ATXN2; (+) strand; PAM type: NRG; PAM sequence: CAG
aacctggaaggcagaggttt

SEQ ID NO: 44694 - DNA, 20 bp, Artificial Sequence
  Description of Artificial Sequence: Synthetic oligonucleotide
  Target: ATXN2; (+) strand; PAM type: NRG; PAM sequence: GAG
tggaaggcagaggtttcagt

SEQ ID NO: 44695 - DNA, 20 bp, Artificial Sequence
  Description of Artificial Sequence: Synthetic oligonucleotide
  Target: ATXN2; (+) strand; PAM type: NRG; PAM sequence: AAG
ggcagaggtttcagtgagcc

SEQ ID NO: 44696 - DNA, 20 bp, Artificial Sequence
  Description of Artificial Sequence: Synthetic oligonucleotide
  Target: ATXN2; (+) strand; PAM type: NRG; PAM sequence: CAG
aagatcacgccattgcactc

SEQ ID NO: 44697 - DNA, 20 bp, Artificial Sequence
  Description of Artificial Sequence: Synthetic oligonucleotide
  Target: ATXN2; (+) strand; PAM type: NRG; PAM sequence: TGG
cacgccattgcactccagcc

SEQ ID NO: 44698 - DNA, 20 bp, Artificial Sequence
  Description of Artificial Sequence: Synthetic oligonucleotide
  Target: ATXN2; (+) strand; PAM type: NRG; PAM sequence: CAG
ttgcactccagcctggacaa

SEQ ID NO: 44699 - DNA, 20 bp, Artificial Sequence
  Description of Artificial Sequence: Synthetic oligonucleotide
  Target: ATXN2; (+) strand; PAM type: NRG; PAM sequence: GAG
gcactccagcctggacaaca

SEQ ID NO: 44700 - DNA, 20 bp, Artificial Sequence
  Description of Artificial Sequence: Synthetic oligonucleotide
  Target: ATXN2; (+) strand; PAM type: NRG; PAM sequence: AAG
tccagcctggacaacagagc

SEQ ID NO: 44701 - DNA, 20 bp, Artificial Sequence
  Description of Artificial Sequence: Synthetic oligonucleotide
  Target: ATXN2; (+) strand; PAM type: NRG; PAM sequence: AAG
gagcaagactccgtctcaaa

SEQ ID NO: 44702 - DNA, 20 bp, Artificial Sequence
  Description of Artificial Sequence: Synthetic oligonucleotide
  Target: ATXN2; (+) strand; PAM type: NRG; PAM sequence: GAG
gcaagactccgtctcaaaaa

SEQ ID NO: 44703 - DNA, 20 bp, Artificial Sequence
  Description of Artificial Sequence: Synthetic oligonucleotide
  Target: ATXN2; (+) strand; PAM type: NRG; PAM sequence: TGG
ccgtctcaaaaagagtttct

SEQ ID NO: 44704 - DNA, 20 bp, Artificial Sequence
  Description of Artificial Sequence: Synthetic oligonucleotide
  Target: ATXN2; (+) strand; PAM type: NRG; PAM sequence: GGG
cgtctcaaaaagagtttctt

SEQ ID NO: 44705 - DNA, 20 bp, Artificial Sequence
  Description of Artificial Sequence: Synthetic oligonucleotide
  Target: ATXN2; (+) strand; PAM type: NRG; PAM sequence: CAG
gagtttcttgggtgtaattt

SEQ ID NO: 44706 - DNA, 20 bp, Artificial Sequence
  Description of Artificial Sequence: Synthetic oligonucleotide
  Target: ATXN2; (+) strand; PAM type: NRG; PAM sequence: TAG
gtgtaatttcagacatcttc

SEQ ID NO: 44707 - DNA, 20 bp, Artificial Sequence
  Description of Artificial Sequence: Synthetic oligonucleotide
  Target: ATXN2; (+) strand; PAM type: NRG; PAM sequence: AGG
tgtaatttcagacatcttct

SEQ ID NO: 44708 - DNA, 20 bp, Artificial Sequence
  Description of Artificial Sequence: Synthetic oligonucleotide
  Target: ATXN2; (+) strand; PAM type: NRG; PAM sequence: AAG
tcagacatcttctaggcaat

SEQ ID NO: 44709 - DNA, 20 bp, Artificial Sequence
  Description of Artificial Sequence: Synthetic oligonucleotide
  Target: ATXN2; (+) strand; PAM type: NRG; PAM sequence: CAG
ctaggcaataagaatatgaa

SEQ ID NO: 44710 - DNA, 20 bp, Artificial Sequence
  Description of Artificial Sequence: Synthetic oligonucleotide
  Target: ATXN2; (+) strand; PAM type: NRG; PAM sequence: TGG
aaaaaaaaaaaaaaatttca

SEQ ID NO: 44711 - DNA, 20 bp, Artificial Sequence
  Description of Artificial Sequence: Synthetic oligonucleotide
  Target: ATXN2; (+) strand; PAM type: NRG; PAM sequence: CAG
aaaaaaaaaaatttcatggc

SEQ ID NO: 44712 - DNA, 20 bp, Artificial Sequence
  Description of Artificial Sequence: Synthetic oligonucleotide
  Target: ATXN2; (+) strand; PAM type: NRG; PAM sequence: AGG
aaaaaaaaaatttcatggcc

SEQ ID NO: 44713 - DNA, 20 bp, Artificial Sequence
  Description of Artificial Sequence: Synthetic oligonucleotide
  Target: ATXN2; (+) strand; PAM type: NRG; PAM sequence: CGG
aaaaatttcatggccaggtg

SEQ ID NO: 44714 - DNA, 20 bp, Artificial Sequence
  Description of Artificial Sequence: Synthetic oligonucleotide
  Target: ATXN2; (+) strand; PAM type: NRG; PAM sequence: TGG
aatttcatggccaggtgcgg

SEQ ID NO: 44715 - DNA, 20 bp, Artificial Sequence
  Description of Artificial Sequence: Synthetic oligonucleotide
  Target: ATXN2; (+) strand; PAM type: NRG; PAM sequence: CAG
ccaggtgcggtggctcatgc

SEQ ID NO: 44716 - DNA, 20 bp, Artificial Sequence
  Description of Artificial Sequence: Synthetic oligonucleotide
  Target: ATXN2; (+) strand; PAM type: NRG; PAM sequence: CAG
gtggctcatgccagtaatcg

SEQ ID NO: 44717 - DNA, 20 bp, Artificial Sequence
  Description of Artificial Sequence: Synthetic oligonucleotide
  Target: ATXN2; (+) strand; PAM type: NRG; PAM sequence: TGG
tgccagtaatcgcagcactt

SEQ ID NO: 44718 - DNA, 20 bp, Artificial Sequence
  Description of Artificial Sequence: Synthetic oligonucleotide
  Target: ATXN2; (+) strand; PAM type: NRG; PAM sequence: GGG
gccagtaatcgcagcacttt

SEQ ID NO: 44719 - DNA, 20 bp, Artificial Sequence
  Description of Artificial Sequence: Synthetic oligonucleotide
  Target: ATXN2; (+) strand; PAM type: NRG; PAM sequence: GAG
cagtaatcgcagcactttgg

SEQ ID NO: 44720 - DNA, 20 bp, Artificial Sequence
  Description of Artificial Sequence: Synthetic oligonucleotide
  Target: ATXN2; (+) strand; PAM type: NRG; PAM sequence: AGG
agtaatcgcagcactttggg

SEQ ID NO: 44721 - DNA, 20 bp, Artificial Sequence
  Description of Artificial Sequence: Synthetic oligonucleotide
  Target: ATXN2; (+) strand; PAM type: NRG; PAM sequence: GAG
tcgcagcactttgggaggct

SEQ ID NO: 44722 - DNA, 20 bp, Artificial Sequence
  Description of Artificial Sequence: Synthetic oligonucleotide
  Target: ATXN2; (+) strand; PAM type: NRG; PAM sequence: AGG
cgcagcactttgggaggctg

SEQ ID NO: 44723 - DNA, 20 bp, Artificial Sequence
  Description of Artificial Sequence: Synthetic oligonucleotide
  Target: ATXN2; (+) strand; PAM type: NRG; PAM sequence: CAG
agcactttgggaggctgagg

SEQ ID NO: 44724 - DNA, 20 bp, Artificial Sequence
  Description of Artificial Sequence: Synthetic oligonucleotide
  Target: ATXN2; (+) strand; PAM type: NRG; PAM sequence: AGG
gcactttgggaggctgaggc

SEQ ID NO: 44725 - DNA, 20 bp, Artificial Sequence
  Description of Artificial Sequence: Synthetic oligonucleotide
  Target: ATXN2; (+) strand; PAM type: NRG; PAM sequence: TGG
ctttgggaggctgaggcagg

SEQ ID NO: 44726 - DNA, 20 bp, Artificial Sequence
  Description of Artificial Sequence: Synthetic oligonucleotide
  Target: ATXN2; (+) strand; PAM type: NRG; PAM sequence: GAG
ggctgaggcaggtggatcac

SEQ ID NO: 44727 - DNA, 20 bp, Artificial Sequence
  Description of Artificial Sequence: Synthetic oligonucleotide
  Target: ATXN2; (+) strand; PAM type: NRG; PAM sequence: CAG
aggcaggtggatcacgagtt

SEQ ID NO: 44728 - DNA, 20 bp, Artificial Sequence
  Description of Artificial Sequence: Synthetic oligonucleotide
  Target: ATXN2; (+) strand; PAM type: NRG; PAM sequence: AGG
ggcaggtggatcacgagttc

SEQ ID NO: 44729 - DNA, 20 bp, Artificial Sequence
  Description of Artificial Sequence: Synthetic oligonucleotide
  Target: ATXN2; (+) strand; PAM type: NRG; PAM sequence: GAG
caggtggatcacgagttcag

SEQ ID NO: 44730 - DNA, 20 bp, Artificial Sequence
  Description of Artificial Sequence: Synthetic oligonucleotide
  Target: ATXN2; (+) strand; PAM type: NRG; PAM sequence: AAG
gatcacgagttcaggagttc

SEQ ID NO: 44731 - DNA, 20 bp, Artificial Sequence
  Description of Artificial Sequence: Synthetic oligonucleotide
  Target: ATXN2; (+) strand; PAM type: NRG; PAM sequence: CAG
cgagttcaggagttcaagac

SEQ ID NO: 44732 - DNA, 20 bp, Artificial Sequence
  Description of Artificial Sequence: Synthetic oligonucleotide
  Target: ATXN2; (+) strand; PAM type: NRG; PAM sequence: TGG
caagaccagcctgacaaaca

SEQ ID NO: 44733 - DNA, 20 bp, Artificial Sequence
  Description of Artificial Sequence: Synthetic oligonucleotide
  Target: ATXN2; (+) strand; PAM type: NRG; PAM sequence: TAG
tctactaaaaacacaaaaat

SEQ ID NO: 44734 - DNA, 20 bp, Artificial Sequence
  Description of Artificial Sequence: Synthetic oligonucleotide
  Target: ATXN2; (+) strand; PAM type: NRG; PAM sequence: TGG
ctaaaaacacaaaaattagc

SEQ ID NO: 44735 - DNA, 20 bp, Artificial Sequence
  Description of Artificial Sequence: Synthetic oligonucleotide
  Target: ATXN2; (+) strand; PAM type: NRG; PAM sequence: GGG
taaaaacacaaaaattagct

SEQ ID NO: 44736 - DNA, 20 bp, Artificial Sequence
  Description of Artificial Sequence: Synthetic oligonucleotide
  Target: ATXN2; (+) strand; PAM type: NRG; PAM sequence: TGG
acacaaaaattagctgggca

SEQ ID NO: 44737 - DNA, 20 bp, Artificial Sequence
  Description of Artificial Sequence: Synthetic oligonucleotide
  Target: ATXN2; (+) strand; PAM type: NRG; PAM sequence: TGG
caaaaattagctgggcatgg

SEQ ID NO: 44738 - DNA, 20 bp, Artificial Sequence
  Description of Artificial Sequence: Synthetic oligonucleotide
  Target: ATXN2; (+) strand; PAM type: NRG; PAM sequence: CAG
aaattagctgggcatggtgg

SEQ ID NO: 44739 - DNA, 20 bp, Artificial Sequence
  Description of Artificial Sequence: Synthetic oligonucleotide
  Target: ATXN2; (+) strand; PAM type: NRG; PAM sequence: CAG
tgggcatggtggcagctact

SEQ ID NO: 44740 - DNA, 20 bp, Artificial Sequence
  Description of Artificial Sequence: Synthetic oligonucleotide
  Target: ATXN2; (+) strand; PAM type: NRG; PAM sequence: AGG
gggcatggtggcagctactc

SEQ ID NO: 44741 - DNA, 20 bp, Artificial Sequence
  Description of Artificial Sequence: Synthetic oligonucleotide
  Target: ATXN2; (+) strand; PAM type: NRG; PAM sequence: GAG
gcatggtggcagctactcag

SEQ ID NO: 44742 - DNA, 20 bp, Artificial Sequence
  Description of Artificial Sequence: Synthetic oligonucleotide
  Target: ATXN2; (+) strand; PAM type: NRG; PAM sequence: AGG
catggtggcagctactcagg

SEQ ID NO: 44743 - DNA, 20 bp, Artificial Sequence
  Description of Artificial Sequence: Synthetic oligonucleotide
  Target: ATXN2; (+) strand; PAM type: NRG; PAM sequence: GAG
tggcagctactcaggaggct

SEQ ID NO: 44744 - DNA, 20 bp, Artificial Sequence
  Description of Artificial Sequence: Synthetic oligonucleotide
  Target: ATXN2; (+) strand; PAM type: NRG; PAM sequence: AGG
ggcagctactcaggaggctg

SEQ ID NO: 44745 - DNA, 20 bp, Artificial Sequence
  Description of Artificial Sequence: Synthetic oligonucleotide
  Target: ATXN2; (+) strand; PAM type: NRG; PAM sequence: CAG
agctactcaggaggctgagg

SEQ ID NO: 44746 - DNA, 20 bp, Artificial Sequence
  Description of Artificial Sequence: Synthetic oligonucleotide
  Target: ATXN2; (+) strand; PAM type: NRG; PAM sequence: AGG
gctactcaggaggctgaggc

SEQ ID NO: 44747 - DNA, 20 bp, Artificial Sequence
  Description of Artificial Sequence: Synthetic oligonucleotide
  Target: ATXN2; (+) strand; PAM type: NRG; PAM sequence: GAG
tactcaggaggctgaggcag

SEQ ID NO: 44748 - DNA, 20 bp, Artificial Sequence
  Description of Artificial Sequence: Synthetic oligonucleotide
  Target: ATXN2; (+) strand; PAM type: NRG; PAM sequence: CGG
gcaggagaatcgcttgaacc

SEQ ID NO: 44749 - DNA, 20 bp, Artificial Sequence
  Description of Artificial Sequence: Synthetic oligonucleotide
  Target: ATXN2; (+) strand; PAM type: NRG; PAM sequence: GGG
caggagaatcgcttgaaccc

SEQ ID NO: 44750 - DNA, 20 bp, Artificial Sequence
  Description of Artificial Sequence: Synthetic oligonucleotide
  Target: ATXN2; (+) strand; PAM type: NRG; PAM sequence: GAG
ggagaatcgcttgaacccgg

SEQ ID NO: 44751 - DNA, 20 bp, Artificial Sequence
  Description of Artificial Sequence: Synthetic oligonucleotide
  Target: ATXN2; (+) strand; PAM type: NRG; PAM sequence: AGG
gagaatcgcttgaacccggg

SEQ ID NO: 44752 - DNA, 20 bp, Artificial Sequence
  Description of Artificial Sequence: Synthetic oligonucleotide
  Target: ATXN2; (+) strand; PAM type: NRG; PAM sequence: CGG
aatcgcttgaacccgggagg

SEQ ID NO: 44753 - DNA, 20 bp, Artificial Sequence
  Description of Artificial Sequence: Synthetic oligonucleotide
  Target: ATXN2; (+) strand; PAM type: NRG; PAM sequence: GAG
tcgcttgaacccgggaggcg

SEQ ID NO: 44754 - DNA, 20 bp, Artificial Sequence
  Description of Artificial Sequence: Synthetic oligonucleotide
  Target: ATXN2; (+) strand; PAM type: NRG; PAM sequence: AGG
cgcttgaacccgggaggcgg

SEQ ID NO: 44755 - DNA, 20 bp, Artificial Sequence
  Description of Artificial Sequence: Synthetic oligonucleotide
  Target: ATXN2; (+) strand; PAM type: NRG; PAM sequence: CAG
aacccgggaggcggaggttg

SEQ ID NO: 44756 - DNA, 20 bp, Artificial Sequence
  Description of Artificial Sequence: Synthetic oligonucleotide
  Target: ATXN2; (+) strand; PAM type: NRG; PAM sequence: CAG
aggcggaggttgcagtgtga

SEQ ID NO: 44757 - DNA, 20 bp, Artificial Sequence
  Description of Artificial Sequence: Synthetic oligonucleotide
  Target: ATXN2; (+) strand; PAM type: NRG; PAM sequence: GAG
gcggaggttgcagtgtgaca

SEQ ID NO: 44758 - DNA, 20 bp, Artificial Sequence
  Description of Artificial Sequence: Synthetic oligonucleotide
  Target: ATXN2; (+) strand; PAM type: NRG; PAM sequence: AAG
aggttgcagtgtgacagagc

SEQ ID NO: 44759 - DNA, 20 bp, Artificial Sequence
  Description of Artificial Sequence: Synthetic oligonucleotide
  Target: ATXN2; (+) strand; PAM type: NRG; PAM sequence: AAG
gcaagactctgtctcaaaaa

SEQ ID NO: 44760 - DNA, 20 bp, Artificial Sequence
  Description of Artificial Sequence: Synthetic oligonucleotide
  Target: ATXN2; (+) strand; PAM type: NRG; PAM sequence: AAG
tctcaaaaaaagaaaaaaaa

SEQ ID NO: 44761 - DNA, 20 bp, Artificial Sequence
  Description of Artificial Sequence: Synthetic oligonucleotide
  Target: ATXN2; (+) strand; PAM type: NRG; PAM sequence: TAG
aaaagaaaaaaaaaagcaaa

SEQ ID NO: 44762 - DNA, 20 bp, Artificial Sequence
  Description of Artificial Sequence: Synthetic oligonucleotide
  Target: ATXN2; (+) strand; PAM type: NRG; PAM sequence: AGG
aaagaaaaaaaaaagcaaat

SEQ ID NO: 44763 - DNA, 20 bp, Artificial Sequence
  Description of Artificial Sequence: Synthetic oligonucleotide
  Target: ATXN2; (+) strand; PAM type: NRG; PAM sequence: CAG
aaaaaaagcaaataggatcc

SEQ ID NO: 44764 - DNA, 20 bp, Artificial Sequence
  Description of Artificial Sequence: Synthetic oligonucleotide
  Target: ATXN2; (+) strand; PAM type: NRG; PAM sequence: TAG
ctttttctcttaataaatct

SEQ ID NO: 44765 - DNA, 20 bp, Artificial Sequence
  Description of Artificial Sequence: Synthetic oligonucleotide
  Target: ATXN2; (+) strand; PAM type: NRG; PAM sequence: TGG
tcttagatatctttccatat

SEQ ID NO: 44766 - DNA, 20 bp, Artificial Sequence
  Description of Artificial Sequence: Synthetic oligonucleotide
  Target: ATXN2; (+) strand; PAM type: NRG; PAM sequence: TGG
tattggaacaccattctttt

SEQ ID NO: 44767 - DNA, 20 bp, Artificial Sequence
  Description of Artificial Sequence: Synthetic oligonucleotide
  Target: ATXN2; (+) strand; PAM type: NRG; PAM sequence: GGG
attggaacaccattcttttt

SEQ ID NO: 44768 - DNA, 20 bp, Artificial Sequence
  Description of Artificial Sequence: Synthetic oligonucleotide
  Target: ATXN2; (+) strand; PAM type: NRG; PAM sequence: GAG
tggaacaccattctttttgg

SEQ ID NO: 44769 - DNA, 20 bp, Artificial Sequence
  Description of Artificial Sequence: Synthetic oligonucleotide
  Target: ATXN2; (+) strand; PAM type: NRG; PAM sequence: TAG
cattctttttgggagatatg

SEQ ID NO: 44770 - DNA, 20 bp, Artificial Sequence
  Description of Artificial Sequence: Synthetic oligonucleotide
  Target: ATXN2; (+) strand; PAM type: NRG; PAM sequence: TGG
tatgtagtgtttcaattgaa

SEQ ID NO: 44771 - DNA, 20 bp, Artificial Sequence
  Description of Artificial Sequence: Synthetic oligonucleotide
  Target: ATXN2; (+) strand; PAM type: NRG; PAM sequence: TAG
tctaactcatgctatattga

SEQ ID NO: 44772 - DNA, 20 bp, Artificial Sequence
  Description of Artificial Sequence: Synthetic oligonucleotide
  Target: ATXN2; (+) strand; PAM type: NRG; PAM sequence: TAG
atgctatattgatagacact

SEQ ID NO: 44773 - DNA, 20 bp, Artificial Sequence
  Description of Artificial Sequence: Synthetic oligonucleotide
  Target: ATXN2; (+) strand; PAM type: NRG; PAM sequence: TAG
tgtttccaatttttcactat

SEQ ID NO: 44774 - DNA, 20 bp, Artificial Sequence
  Description of Artificial Sequence: Synthetic oligonucleotide
  Target: ATXN2; (+) strand; PAM type: NRG; PAM sequence: TGG
cactattagaaataatgcta

SEQ ID NO: 44775 - DNA, 20 bp, Artificial Sequence
  Description of Artificial Sequence: Synthetic oligonucleotide
  Target: ATXN2; (+) strand; PAM type: NRG; PAM sequence: CAG
attagaaataatgctatggc

SEQ ID NO: 44776 - DNA, 20 bp, Artificial Sequence
  Description of Artificial Sequence: Synthetic oligonucleotide
  Target: ATXN2; (+) strand; PAM type: NRG; PAM sequence: AGG
ttagaaataatgctatggcc

SEQ ID NO: 44777 - DNA, 20 bp, Artificial Sequence
  Description of Artificial Sequence: Synthetic oligonucleotide
  Target: ATXN2; (+) strand; PAM type: NRG; PAM sequence: TGG
aataatgctatggccaggca

SEQ ID NO: 44778 - DNA, 20 bp, Artificial Sequence
  Description of Artificial Sequence: Synthetic oligonucleotide
  Target: ATXN2; (+) strand; PAM type: NRG; PAM sequence: TGG
aatgctatggccaggcatgg

SEQ ID NO: 44779 - DNA, 20 bp, Artificial Sequence
  Description of Artificial Sequence: Synthetic oligonucleotide
  Target: ATXN2; (+) strand; PAM type: NRG; PAM sequence: CAG
gtggttcacgcctataatct

SEQ ID NO: 44780 - DNA, 20 bp, Artificial Sequence
  Description of Artificial Sequence: Synthetic oligonucleotide
  Target: ATXN2; (+) strand; PAM type: NRG; PAM sequence: TGG
cgcctataatctcagcactt

SEQ ID NO: 44781 - DNA, 20 bp, Artificial Sequence
  Description of Artificial Sequence: Synthetic oligonucleotide
  Target: ATXN2; (+) strand; PAM type: NRG; PAM sequence: GGG
gcctataatctcagcacttt

SEQ ID NO: 44782 - DNA, 20 bp, Artificial Sequence
  Description of Artificial Sequence: Synthetic oligonucleotide
  Target: ATXN2; (+) strand; PAM type: NRG; PAM sequence: GAG
ctataatctcagcactttgg

SEQ ID NO: 44783 - DNA, 20 bp, Artificial Sequence
  Description of Artificial Sequence: Synthetic oligonucleotide
  Target: ATXN2; (+) strand; PAM type: NRG; PAM sequence: AGG
tataatctcagcactttggg

SEQ ID NO: 44784 - DNA, 20 bp, Artificial Sequence
  Description of Artificial Sequence: Synthetic oligonucleotide
  Target: ATXN2; (+) strand; PAM type: NRG; PAM sequence: GAG
tctcagcactttgggaggcc

SEQ ID NO: 44785 - DNA, 20 bp, Artificial Sequence
  Description of Artificial Sequence: Synthetic oligonucleotide
  Target: ATXN2; (+) strand; PAM type: NRG; PAM sequence: AGG
ctcagcactttgggaggccg

SEQ ID NO: 44786 - DNA, 20 bp, Artificial Sequence
  Description of Artificial Sequence: Synthetic oligonucleotide
  Target: ATXN2; (+) strand; PAM type: NRG; PAM sequence: TGG
agcactttgggaggccgagg

SEQ ID NO: 44787 - DNA, 20 bp, Artificial Sequence
  Description of Artificial Sequence: Synthetic oligonucleotide
  Target: ATXN2; (+) strand; PAM type: NRG; PAM sequence: GGG
gcactttgggaggccgaggt

SEQ ID NO: 44788 - DNA, 20 bp, Artificial Sequence
  Description of Artificial Sequence: Synthetic oligonucleotide
  Target: ATXN2; (+) strand; PAM type: NRG; PAM sequence: CAG
ctttgggaggccgaggtggg

SEQ ID NO: 44789 - DNA, 20 bp, Artificial Sequence
  Description of Artificial Sequence: Synthetic oligonucleotide
  Target: ATXN2; (+) strand; PAM type: NRG; PAM sequence: GAG
ccgaggtgggcagatcacct

SEQ ID NO: 44790 - DNA, 20 bp, Artificial Sequence
  Description of Artificial Sequence: Synthetic oligonucleotide
  Target: ATXN2; (+) strand; PAM type: NRG; PAM sequence: AGG
cgaggtgggcagatcacctg

SEQ ID NO: 44791 - DNA, 20 bp, Artificial Sequence
  Description of Artificial Sequence: Synthetic oligonucleotide
  Target: ATXN2; (+) strand; PAM type: NRG; PAM sequence: CAG
gtgggcagatcacctgaggt

SEQ ID NO: 44792 - DNA, 20 bp, Artificial Sequence
  Description of Artificial Sequence: Synthetic oligonucleotide
  Target: ATXN2; (+) strand; PAM type: NRG; PAM sequence: AGG
tgggcagatcacctgaggtc

SEQ ID NO: 44793 - DNA, 20 bp, Artificial Sequence
  Description of Artificial Sequence: Synthetic oligonucleotide
  Target: ATXN2; (+) strand; PAM type: NRG; PAM sequence: GAG
ggcagatcacctgaggtcag

SEQ ID NO: 44794 - DNA, 20 bp, Artificial Sequence
  Description of Artificial Sequence: Synthetic oligonucleotide
  Target: ATXN2; (+) strand; PAM type: NRG; PAM sequence: AAG
tcacctgaggtcaggagttc

SEQ ID NO: 44795 - DNA, 20 bp, Artificial Sequence
  Description of Artificial Sequence: Synthetic oligonucleotide
  Target: ATXN2; (+) strand; PAM type: NRG; PAM sequence: CAG
tgaggtcaggagttcaagac

SEQ ID NO: 44796 - DNA, 20 bp, Artificial Sequence
  Description of Artificial Sequence: Synthetic oligonucleotide
  Target: ATXN2; (+) strand; PAM type: NRG; PAM sequence: TGG
tcaggagttcaagaccagcc

SEQ ID NO: 44797 - DNA, 20 bp, Artificial Sequence
  Description of Artificial Sequence: Synthetic oligonucleotide
  Target: ATXN2; (+) strand; PAM type: NRG; PAM sequence: TGG
agaccagcctggccaacata

SEQ ID NO: 44798 - DNA, 20 bp, Artificial Sequence
  Description of Artificial Sequence: Synthetic oligonucleotide
  Target: ATXN2; (+) strand; PAM type: NRG; PAM sequence: TAG
tctactaaaaatacaaaaat

SEQ ID NO: 44799 - DNA, 20 bp, Artificial Sequence
  Description of Artificial Sequence: Synthetic oligonucleotide
  Target: ATXN2; (+) strand; PAM type: NRG; PAM sequence: TGG
ctaaaaatacaaaaattagc

SEQ ID NO: 44800 - DNA, 20 bp, Artificial Sequence
  Description of Artificial Sequence: Synthetic oligonucleotide
  Target: ATXN2; (+) strand; PAM type: NRG; PAM sequence: GGG
taaaaatacaaaaattagct

SEQ ID NO: 44801 - DNA, 20 bp, Artificial Sequence
  Description of Artificial Sequence: Synthetic oligonucleotide
  Target: ATXN2; (+) strand; PAM type: NRG; PAM sequence: TGG
atacaaaaattagctgggtg

SEQ ID NO: 44802 - DNA, 20 bp, Artificial Sequence
  Description of Artificial Sequence: Synthetic oligonucleotide
  Target: ATXN2; (+) strand; PAM type: NRG; PAM sequence: TGG
caaaaattagctgggtgtgg

SEQ ID NO: 44803 - DNA, 20 bp, Artificial Sequence
  Description of Artificial Sequence: Synthetic oligonucleotide
  Target: ATXN2; (+) strand; PAM type: NRG; PAM sequence: TAG
ggtgtggtggcgcacgccta

SEQ ID NO: 44804 - DNA, 20 bp, Artificial Sequence
  Description of Artificial Sequence: Synthetic oligonucleotide
  Target: ATXN2; (+) strand; PAM type: NRG; PAM sequence: CAG
gtggcgcacgcctatagtcc

SEQ ID NO: 44805 - DNA, 20 bp, Artificial Sequence
  Description of Artificial Sequence: Synthetic oligonucleotide
  Target: ATXN2; (+) strand; PAM type: NRG; PAM sequence: TGG
cgcctatagtcccagctgct

SEQ ID NO: 44806 - DNA, 20 bp, Artificial Sequence
  Description of Artificial Sequence: Synthetic oligonucleotide
  Target: ATXN2; (+) strand; PAM type: NRG; PAM sequence: AAG
tatagtcccagctgcttgga

SEQ ID NO: 44807 - DNA, 20 bp, Artificial Sequence
  Description of Artificial Sequence: Synthetic oligonucleotide
  Target: ATXN2; (+) strand; PAM type: NRG; PAM sequence: GAG
tcccagctgcttggaaagct

SEQ ID NO: 44808 - DNA, 20 bp, Artificial Sequence
  Description of Artificial Sequence: Synthetic oligonucleotide
  Target: ATXN2; (+) strand; PAM type: NRG; PAM sequence: AGG
cccagctgcttggaaagctg

SEQ ID NO: 44809 - DNA, 20 bp, Artificial Sequence
  Description of Artificial Sequence: Synthetic oligonucleotide
  Target: ATXN2; (+) strand; PAM type: NRG; PAM sequence: CAG
agctgcttggaaagctgagg

SEQ ID NO: 44810 - DNA, 20 bp, Artificial Sequence
  Description of Artificial Sequence: Synthetic oligonucleotide
  Target: ATXN2; (+) strand; PAM type: NRG; PAM sequence: TAG
tgcttggaaagctgaggcag

SEQ ID NO: 44811 - DNA, 20 bp, Artificial Sequence
  Description of Artificial Sequence: Synthetic oligonucleotide
  Target: ATXN2; (+) strand; PAM type: NRG; PAM sequence: CAG
gcagtagaatcacttgaacc

SEQ ID NO: 44812 - DNA, 20 bp, Artificial Sequence
  Description of Artificial Sequence: Synthetic oligonucleotide
  Target: ATXN2; (+) strand; PAM type: NRG; PAM sequence: AGG
cagtagaatcacttgaaccc

SEQ ID NO: 44813 - DNA, 20 bp, Artificial Sequence
  Description of Artificial Sequence: Synthetic oligonucleotide
  Target: ATXN2; (+) strand; PAM type: NRG; PAM sequence: GAG
gtagaatcacttgaacccag

SEQ ID NO: 44814 - DNA, 20 bp, Artificial Sequence
  Description of Artificial Sequence: Synthetic oligonucleotide
  Target: ATXN2; (+) strand; PAM type: NRG; PAM sequence: AGG
tagaatcacttgaacccagg

SEQ ID NO: 44815 - DNA, 20 bp, Artificial Sequence
  Description of Artificial Sequence: Synthetic oligonucleotide
  Target: ATXN2; (+) strand; PAM type: NRG; PAM sequence: TGG
aatcacttgaacccaggagg

SEQ ID NO: 44816 - DNA, 20 bp, Artificial Sequence
  Description of Artificial Sequence: Synthetic oligonucleotide
  Target: ATXN2; (+) strand; PAM type: NRG; PAM sequence: GAG
tcacttgaacccaggaggtg

SEQ ID NO: 44817 - DNA, 20 bp, Artificial Sequence
  Description of Artificial Sequence: Synthetic oligonucleotide
  Target: ATXN2; (+) strand; PAM type: NRG; PAM sequence: AGG
cacttgaacccaggaggtgg

SEQ ID NO: 44818 - DNA, 20 bp, Artificial Sequence
  Description of Artificial Sequence: Synthetic oligonucleotide
  Target: ATXN2; (+) strand; PAM type: NRG; PAM sequence: CAG
aacccaggaggtggaggtta

SEQ ID NO: 44819 - DNA, 20 bp, Artificial Sequence
  Description of Artificial Sequence: Synthetic oligonucleotide
  Target: ATXN2; (+) strand; PAM type: NRG; PAM sequence: AGG
acccaggaggtggaggttac

SEQ ID NO: 44820 - DNA, 20 bp, Artificial Sequence
  Description of Artificial Sequence: Synthetic oligonucleotide
  Target: ATXN2; (+) strand; PAM type: NRG; PAM sequence: GGG
cccaggaggtggaggttaca

SEQ ID NO: 44821 - DNA, 20 bp, Artificial Sequence
  Description of Artificial Sequence: Synthetic oligonucleotide
  Target: ATXN2; (+) strand; PAM type: NRG; PAM sequence: GAG
caggaggtggaggttacagg

SEQ ID NO: 44822 - DNA, 20 bp, Artificial Sequence
  Description of Artificial Sequence: Synthetic oligonucleotide
  Target: ATXN2; (+) strand; PAM type: NRG; PAM sequence: GAG
ggtggaggttacagggagcc

SEQ ID NO: 44823 - DNA, 20 bp, Artificial Sequence
  Description of Artificial Sequence: Synthetic oligonucleotide
  Target: ATXN2; (+) strand; PAM type: NRG; PAM sequence: CAG
gagatcgcaccactgcactc

SEQ ID NO: 44824 - DNA, 20 bp, Artificial Sequence
  Description of Artificial Sequence: Synthetic oligonucleotide
  Target: ATXN2; (+) strand; PAM type: NRG; PAM sequence: TGG
cgcaccactgcactccagtc

SEQ ID NO: 44825 - DNA, 20 bp, Artificial Sequence
  Description of Artificial Sequence: Synthetic oligonucleotide
  Target: ATXN2; (+) strand; PAM type: NRG; PAM sequence: GGG
gcaccactgcactccagtct

SEQ ID NO: 44826 - DNA, 20 bp, Artificial Sequence
  Description of Artificial Sequence: Synthetic oligonucleotide
  Target: ATXN2; (+) strand; PAM type: NRG; PAM sequence: CAG
ctgcactccagtctgggtga

SEQ ID NO: 44827 - DNA, 20 bp, Artificial Sequence
  Description of Artificial Sequence: Synthetic oligonucleotide
  Target: ATXN2; (+) strand; PAM type: NRG; PAM sequence: GAG
gcactccagtctgggtgaca

SEQ ID NO: 44828 - DNA, 20 bp, Artificial Sequence
  Description of Artificial Sequence: Synthetic oligonucleotide
  Target: ATXN2; (+) strand; PAM type: NRG; PAM sequence: GAG
tccagtctgggtgacagagt

SEQ ID NO: 44829 - DNA, 20 bp, Artificial Sequence
  Description of Artificial Sequence: Synthetic oligonucleotide
  Target: ATXN2; (+) strand; PAM type: NRG; PAM sequence: CAG
gactccatctctcaaaacaa

SEQ ID NO: 44830 - DNA, 20 bp, Artificial Sequence
  Description of Artificial Sequence: Synthetic oligonucleotide
  Target: ATXN2; (+) strand; PAM type: NRG; PAM sequence: AAG
aacaacagcaacaacaacaa

SEQ ID NO: 44831 - DNA, 20 bp, Artificial Sequence
  Description of Artificial Sequence: Synthetic oligonucleotide
  Target: ATXN2; (+) strand; PAM type: NRG; PAM sequence: TGG
gctgaaaaaaaaaaaaatcc

SEQ ID NO: 44832 - DNA, 20 bp, Artificial Sequence
  Description of Artificial Sequence: Synthetic oligonucleotide
  Target: ATXN2; (+) strand; PAM type: NRG; PAM sequence: CAG
aaaaaaaaaaaaatcctggt

SEQ ID NO: 44833 - DNA, 20 bp, Artificial Sequence
  Description of Artificial Sequence: Synthetic oligonucleotide
  Target: ATXN2; (+) strand; PAM type: NRG; PAM sequence: AGG
aaaaaaaaaaaatcctggtc

SEQ ID NO: 44834 - DNA, 20 bp, Artificial Sequence
  Description of Artificial Sequence: Synthetic oligonucleotide
  Target: ATXN2; (+) strand; PAM type: NRG; PAM sequence: TGG
aaaatcctggtcaggcatga

SEQ ID NO: 44835 - DNA, 20 bp, Artificial Sequence
  Description of Artificial Sequence: Synthetic oligonucleotide
  Target: ATXN2; (+) strand; PAM type: NRG; PAM sequence: CAG
atggctcacacctgtaatcc

SEQ ID NO: 44836 - DNA, 20 bp, Artificial Sequence
  Description of Artificial Sequence: Synthetic oligonucleotide
  Target: ATXN2; (+) strand; PAM type: NRG; PAM sequence: TGG
cacctgtaatcccagcactt

SEQ ID NO: 44837 - DNA, 20 bp, Artificial Sequence
  Description of Artificial Sequence: Synthetic oligonucleotide
  Target: ATXN2; (+) strand; PAM type: NRG; PAM sequence: GGG
acctgtaatcccagcacttt

SEQ ID NO: 44838 - DNA, 20 bp, Artificial Sequence
  Description of Artificial Sequence: Synthetic oligonucleotide
  Target: ATXN2; (+) strand; PAM type: NRG; PAM sequence: GAG
ctgtaatcccagcactttgg

SEQ ID NO: 44839 - DNA, 20 bp, Artificial Sequence
  Description of Artificial Sequence: Synthetic oligonucleotide
  Target: ATXN2; (+) strand; PAM type: NRG; PAM sequence: AGG
tgtaatcccagcactttggg

SEQ ID NO: 44840 - DNA, 20 bp, Artificial Sequence
  Description of Artificial Sequence: Synthetic oligonucleotide
  Target: ATXN2; (+) strand; PAM type: NRG; PAM sequence: GAG
tcccagcactttgggaggct

SEQ ID NO: 44841 - DNA, 20 bp, Artificial Sequence
  Description of Artificial Sequence: Synthetic oligonucleotide
  Target: ATXN2; (+) strand; PAM type: NRG; PAM sequence: AGG
cccagcactttgggaggctg

SEQ ID NO: 44842 - DNA, 20 bp, Artificial Sequence
  Description of Artificial Sequence: Synthetic oligonucleotide
  Target: ATXN2; (+) strand; PAM type: NRG; PAM sequence: TGG
agcactttgggaggctgagg

SEQ ID NO: 44843 - DNA, 20 bp, Artificial Sequence
  Description of Artificial Sequence: Synthetic oligonucleotide
  Target: ATXN2; (+) strand; PAM type: NRG; PAM sequence: GGG
gcactttgggaggctgaggt

SEQ ID NO: 44844 - DNA, 20 bp, Artificial Sequence
  Description of Artificial Sequence: Synthetic oligonucleotide
  Target: ATXN2; (+) strand; PAM type: NRG; PAM sequence: TGG
ctttgggaggctgaggtggg

SEQ ID NO: 44845 - DNA, 20 bp, Artificial Sequence
  Description of Artificial Sequence: Synthetic oligonucleotide
  Target: ATXN2; (+) strand; PAM type: NRG; PAM sequence: GAG
ctgaggtgggtggattacct

SEQ ID NO: 44846 - DNA, 20 bp, Artificial Sequence
  Description of Artificial Sequence: Synthetic oligonucleotide
  Target: ATXN2; (+) strand; PAM type: NRG; PAM sequence: CAG
gtgggtggattacctgagct

SEQ ID NO: 44847 - DNA, 20 bp, Artificial Sequence
  Description of Artificial Sequence: Synthetic oligonucleotide
  Target: ATXN2; (+) strand; PAM type: NRG; PAM sequence: AGG
tgggtggattacctgagctc

SEQ ID NO: 44848 - DNA, 20 bp, Artificial Sequence
  Description of Artificial Sequence: Synthetic oligonucleotide
  Target: ATXN2; (+) strand; PAM type: NRG; PAM sequence: GAG
ggtggattacctgagctcag

SEQ ID NO: 44849 - DNA, 20 bp, Artificial Sequence
  Description of Artificial Sequence: Synthetic oligonucleotide
  Target: ATXN2; (+) strand; PAM type: NRG; PAM sequence: CAG
ttacctgagctcaggagttc

SEQ ID NO: 44850 - DNA, 20 bp, Artificial Sequence
  Description of Artificial Sequence: Synthetic oligonucleotide
  Target: ATXN2; (+) strand; PAM type: NRG; PAM sequence: TGG
tcaggagttccagatcaccc

SEQ ID NO: 44851 - DNA, 20 bp, Artificial Sequence
  Description of Artificial Sequence: Synthetic oligonucleotide
  Target: ATXN2; (+) strand; PAM type: NRG; PAM sequence: GGG
caggagttccagatcaccct

SEQ ID NO: 44852 - DNA, 20 bp, Artificial Sequence
  Description of Artificial Sequence: Synthetic oligonucleotide
  Target: ATXN2; (+) strand; PAM type: NRG; PAM sequence: TGG
ccagatcaccctgggcaaca

SEQ ID NO: 44853 - DNA, 20 bp, Artificial Sequence
  Description of Artificial Sequence: Synthetic oligonucleotide
  Target: ATXN2; (+) strand; PAM type: NRG; PAM sequence: CAG
atggtaaaaccctgtctctg

SEQ ID NO: 44854 - DNA, 20 bp, Artificial Sequence
  Description of Artificial Sequence: Synthetic oligonucleotide
  Target: ATXN2; (+) strand; PAM type: NRG; PAM sequence: AAG
aaaccctgtctctgcagaaa

SEQ ID NO: 44855 - DNA, 20 bp, Artificial Sequence
  Description of Artificial Sequence: Synthetic oligonucleotide
  Target: ATXN2; (+) strand; PAM type: NRG; PAM sequence: TGG
ataattatttgcatgtctta

SEQ ID NO: 44856 - DNA, 20 bp, Artificial Sequence
  Description of Artificial Sequence: Synthetic oligonucleotide
  Target: ATXN2; (+) strand; PAM type: NRG; PAM sequence: GAG
tgcatgtcttatggatatat

SEQ ID NO: 44857 - DNA, 20 bp, Artificial Sequence
  Description of Artificial Sequence: Synthetic oligonucleotide
  Target: ATXN2; (+) strand; PAM type: NRG; PAM sequence: AGG
gcatgtcttatggatatatg

SEQ ID NO: 44858 - DNA, 20 bp, Artificial Sequence
  Description of Artificial Sequence: Synthetic oligonucleotide
  Target: ATXN2; (+) strand; PAM type: NRG; PAM sequence: GGG
catgtcttatggatatatga

SEQ ID NO: 44859 - DNA, 20 bp, Artificial Sequence
  Description of Artificial Sequence: Synthetic oligonucleotide
  Target: ATXN2; (+) strand; PAM type: NRG; PAM sequence: TAG
tgagggcaaaaataaattac

SEQ ID NO: 44860 - DNA, 20 bp, Artificial Sequence
  Description of Artificial Sequence: Synthetic oligonucleotide
  Target: ATXN2; (+) strand; PAM type: NRG; PAM sequence: GAG
agggcaaaaataaattacta

SEQ ID NO: 44861 - DNA, 20 bp, Artificial Sequence
  Description of Artificial Sequence: Synthetic oligonucleotide
  Target: ATXN2; (+) strand; PAM type: NRG; PAM sequence: TAG
caaaaataaattactagaga

SEQ ID NO: 44862 - DNA, 20 bp, Artificial Sequence
  Description of Artificial Sequence: Synthetic oligonucleotide
  Target: ATXN2; (+) strand; PAM type: NRG; PAM sequence: TGG
attactagagatagaactgc

SEQ ID NO: 44863 - DNA, 20 bp, Artificial Sequence
  Description of Artificial Sequence: Synthetic oligonucleotide
  Target: ATXN2; (+) strand; PAM type: NRG; PAM sequence: AAG
gagatagaactgctggaaca

SEQ ID NO: 44864 - DNA, 20 bp, Artificial Sequence
  Description of Artificial Sequence: Synthetic oligonucleotide
  Target: ATXN2; (+) strand; PAM type: NRG; PAM sequence: TAG
tgtgcattttaaattttgat

SEQ ID NO: 44865 - DNA, 20 bp, Artificial Sequence
  Description of Artificial Sequence: Synthetic oligonucleotide
  Target: ATXN2; (+) strand; PAM type: NRG; PAM sequence: CAG
taaattttgattagcattgc

SEQ ID NO: 44866 - DNA, 20 bp, Artificial Sequence
  Description of Artificial Sequence: Synthetic oligonucleotide
  Target: ATXN2; (+) strand; PAM type: NRG; PAM sequence: CAG
tagcattgccagattctctc

SEQ ID NO: 44867 - DNA, 20 bp, Artificial Sequence
  Description of Artificial Sequence: Synthetic oligonucleotide
  Target: ATXN2; (+) strand; PAM type: NRG; PAM sequence: AAG
attgccagattctctccaga

SEQ ID NO: 44868 - DNA, 20 bp, Artificial Sequence
  Description of Artificial Sequence: Synthetic oligonucleotide
  Target: ATXN2; (+) strand; PAM type: NRG; PAM sequence: TAG
caatttatccacctcaccaa

SEQ ID NO: 44869 - DNA, 20 bp, Artificial Sequence
  Description of Artificial Sequence: Synthetic oligonucleotide
  Target: ATXN2; (+) strand; PAM type: NRG; PAM sequence: AAG
ccacctcaccaatagtgtaa

SEQ ID NO: 44870 - DNA, 20 bp, Artificial Sequence
  Description of Artificial Sequence: Synthetic oligonucleotide
  Target: ATXN2; (+) strand; PAM type: NRG; PAM sequence: AAG
cctcaccaatagtgtaaaag

SEQ ID NO: 44871 - DNA, 20 bp, Artificial Sequence
  Description of Artificial Sequence: Synthetic oligonucleotide
  Target: ATXN2; (+) strand; PAM type: NRG; PAM sequence: CAG
gtttcctcatatttttcata

SEQ ID NO: 44872 - DNA, 20 bp, Artificial Sequence
  Description of Artificial Sequence: Synthetic oligonucleotide
  Target: ATXN2; (+) strand; PAM type: NRG; PAM sequence: AGG
tttcctcatatttttcatac

SEQ ID NO: 44873 - DNA, 20 bp, Artificial Sequence
  Description of Artificial Sequence: Synthetic oligonucleotide
  Target: ATXN2; (+) strand; PAM type: NRG; PAM sequence: CAG
catacaggtgacgtgatgta

SEQ ID NO: 44874 - DNA, 20 bp, Artificial Sequence
  Description of Artificial Sequence: Synthetic oligonucleotide
  Target: ATXN2; (+) strand; PAM type: NRG; PAM sequence: GAG
gtgacgtgatgtacagactt

SEQ ID NO: 44875 - DNA, 20 bp, Artificial Sequence
  Description of Artificial Sequence: Synthetic oligonucleotide
  Target: ATXN2; (+) strand; PAM type: NRG; PAM sequence: TAG
agacttgagaaccattatat

SEQ ID NO: 44876 - DNA, 20 bp, Artificial Sequence
  Description of Artificial Sequence: Synthetic oligonucleotide
  Target: ATXN2; (+) strand; PAM type: NRG; PAM sequence: AGG
gacttgagaaccattatatt

SEQ ID NO: 44877 - DNA, 20 bp, Artificial Sequence
  Description of Artificial Sequence: Synthetic oligonucleotide
  Target: ATXN2; (+) strand; PAM type: NRG; PAM sequence: AAG
aggttatatatgatttgtta

SEQ ID NO: 44878 - DNA, 20 bp, Artificial Sequence
  Description of Artificial Sequence: Synthetic oligonucleotide
  Target: ATXN2; (+) strand; PAM type: NRG; PAM sequence: GAG
tatatgatttgttaaagttt

SEQ ID NO: 44879 - DNA, 20 bp, Artificial Sequence
  Description of Artificial Sequence: Synthetic oligonucleotide
  Target: ATXN2; (+) strand; PAM type: NRG; PAM sequence: CAG
acatgttgcctgtgtatgtc

SEQ ID NO: 44880 - DNA, 20 bp, Artificial Sequence
  Description of Artificial Sequence: Synthetic oligonucleotide
  Target: ATXN2; (+) strand; PAM type: NRG; PAM sequence: TAG
tgtatgtccagttttattac

SEQ ID NO: 44881 - DNA, 20 bp, Artificial Sequence
  Description of Artificial Sequence: Synthetic oligonucleotide
  Target: ATXN2; (+) strand; PAM type: NRG; PAM sequence: TAG
ccagttttattactagactt

SEQ ID NO: 44882 - DNA, 20 bp, Artificial Sequence
  Description of Artificial Sequence: Synthetic oligonucleotide
  Target: ATXN2; (+) strand; PAM type: NRG; PAM sequence: AGG
cagttttattactagacttt

SEQ ID NO: 44883 - DNA, 20 bp, Artificial Sequence
  Description of Artificial Sequence: Synthetic oligonucleotide
  Target: ATXN2; (+) strand; PAM type: NRG; PAM sequence: AAG
tattactagactttaggtca

SEQ ID NO: 44884 - DNA, 20 bp, Artificial Sequence
  Description of Artificial Sequence: Synthetic oligonucleotide
  Target: ATXN2; (+) strand; PAM type: NRG; PAM sequence: TAG
tactagactttaggtcaaag

SEQ ID NO: 44885 - DNA, 20 bp, Artificial Sequence
  Description of Artificial Sequence: Synthetic oligonucleotide
  Target: ATXN2; (+) strand; PAM type: NRG; PAM sequence: AGG
actagactttaggtcaaagt

SEQ ID NO: 44886 - DNA, 20 bp, Artificial Sequence
  Description of Artificial Sequence: Synthetic oligonucleotide
  Target: ATXN2; (+) strand; PAM type: NRG; PAM sequence: CAG
taggtcaaagtaggacattt

SEQ ID NO: 44887 - DNA, 20 bp, Artificial Sequence
  Description of Artificial Sequence: Synthetic oligonucleotide
  Target: ATXN2; (+) strand; PAM type: NRG; PAM sequence: AGG
aggtcaaagtaggacatttc

SEQ ID NO: 44888 - DNA, 20 bp, Artificial Sequence
  Description of Artificial Sequence: Synthetic oligonucleotide
  Target: ATXN2; (+) strand; PAM type: NRG; PAM sequence: GAG
acatttcaggcttcctgtct

SEQ ID NO: 44889 - DNA, 20 bp, Artificial Sequence
  Description of Artificial Sequence: Synthetic oligonucleotide
  Target: ATXN2; (+) strand; PAM type: NRG; PAM sequence: AGG
catttcaggcttcctgtctg

SEQ ID NO: 44890 - DNA, 20 bp, Artificial Sequence
  Description of Artificial Sequence: Synthetic oligonucleotide
  Target: ATXN2; (+) strand; PAM type: NRG; PAM sequence: AAG
ttcaggcttcctgtctgagg

SEQ ID NO: 44891 - DNA, 20 bp, Artificial Sequence
  Description of Artificial Sequence: Synthetic oligonucleotide
  Target: ATXN2; (+) strand; PAM type: NRG; PAM sequence: GAG
caggcttcctgtctgaggaa

SEQ ID NO: 44892 - DNA, 20 bp, Artificial Sequence
  Description of Artificial Sequence: Synthetic oligonucleotide
  Target: ATXN2; (+) strand; PAM type: NRG; PAM sequence: AAG
tgaggaagagtgtcattatt

SEQ ID NO: 44893 - DNA, 20 bp, Artificial Sequence
  Description of Artificial Sequence: Synthetic oligonucleotide
  Target: ATXN2; (+) strand; PAM type: NRG; PAM sequence: CAG
tatgccttaaacatcaaaca

SEQ ID NO: 44894 - DNA, 20 bp, Artificial Sequence
  Description of Artificial Sequence: Synthetic oligonucleotide
  Target: ATXN2; (+) strand; PAM type: NRG; PAM sequence: TGG
caaattctctttctactcaa

SEQ ID NO: 44895 - DNA, 20 bp, Artificial Sequence
  Description of Artificial Sequence: Synthetic oligonucleotide
  Target: ATXN2; (+) strand; PAM type: NRG; PAM sequence: AAG
attctctttctactcaatgg

SEQ ID NO: 44896 - DNA, 20 bp, Artificial Sequence
  Description of Artificial Sequence: Synthetic oligonucleotide
  Target: ATXN2; (+) strand; PAM type: NRG; PAM sequence: TGG
tcttcattctactcaaatat

SEQ ID NO: 44897 - DNA, 20 bp, Artificial Sequence
  Description of Artificial Sequence: Synthetic oligonucleotide
  Target: ATXN2; (+) strand; PAM type: NRG; PAM sequence: TGG
ggtaccataacactcatttt

SEQ ID NO: 44898 - DNA, 20 bp, Artificial Sequence
  Description of Artificial Sequence: Synthetic oligonucleotide
  Target: ATXN2; (+) strand; PAM type: NRG; PAM sequence: AAG
ccataacactcatttttggc

SEQ ID NO: 44899 - DNA, 20 bp, Artificial Sequence
  Description of Artificial Sequence: Synthetic oligonucleotide
  Target: ATXN2; (+) strand; PAM type: NRG; PAM sequence: AAG
tctctatgctctctatccta

SEQ ID NO: 44900 - DNA, 20 bp, Artificial Sequence
  Description of Artificial Sequence: Synthetic oligonucleotide
  Target: ATXN2; (+) strand; PAM type: NRG; PAM sequence: CAG
tatgctctctatcctaaaga

SEQ ID NO: 44901 - DNA, 20 bp, Artificial Sequence
  Description of Artificial Sequence: Synthetic oligonucleotide
  Target: ATXN2; (+) strand; PAM type: NRG; PAM sequence: GAG
tgctctctatcctaaagaca

SEQ ID NO: 44902 - DNA, 20 bp, Artificial Sequence
  Description of Artificial Sequence: Synthetic oligonucleotide
  Target: ATXN2; (+) strand; PAM type: NRG; PAM sequence: AAG
ctaaagacagagtctttatt

SEQ ID NO: 44903 - DNA, 20 bp, Artificial Sequence
  Description of Artificial Sequence: Synthetic oligonucleotide
  Target: ATXN2; (+) strand; PAM type: NRG; PAM sequence: TAG
ttgtttttatttttatttct

SEQ ID NO: 44904 - DNA, 20 bp, Artificial Sequence
  Description of Artificial Sequence: Synthetic oligonucleotide
  Target: ATXN2; (+) strand; PAM type: NRG; PAM sequence: GAG
gtttttatttttatttctta

SEQ ID NO: 44905 - DNA, 20 bp, Artificial Sequence
  Description of Artificial Sequence: Synthetic oligonucleotide
  Target: ATXN2; (+) strand; PAM type: NRG; PAM sequence: AAG
tttatttttatttcttagag

SEQ ID NO: 44906 - DNA, 20 bp, Artificial Sequence
  Description of Artificial Sequence: Synthetic oligonucleotide
  Target: ATXN2; (+) strand; PAM type: NRG; PAM sequence: AGG
ttatttttatttcttagaga

SEQ ID NO: 44907 - DNA, 20 bp, Artificial Sequence
  Description of Artificial Sequence: Synthetic oligonucleotide
  Target: ATXN2; (+) strand; PAM type: NRG; PAM sequence: GGG
tatttttatttcttagagaa

SEQ ID NO: 44908 - DNA, 20 bp, Artificial Sequence
  Description of Artificial Sequence: Synthetic oligonucleotide
  Target: ATXN2; (+) strand; PAM type: NRG; PAM sequence: GGG
atttttatttcttagagaag

SEQ ID NO: 44909 - DNA, 20 bp, Artificial Sequence
  Description of Artificial Sequence: Synthetic oligonucleotide
  Target: ATXN2; (+) strand; PAM type: NRG; PAM sequence: CAG
aggggtctccttatgtcatt

SEQ ID NO: 44910 - DNA, 20 bp, Artificial Sequence
  Description of Artificial Sequence: Synthetic oligonucleotide
  Target: ATXN2; (+) strand; PAM type: NRG; PAM sequence: AGG
ggggtctccttatgtcattc

SEQ ID NO: 44911 - DNA, 20 bp, Artificial Sequence
  Description of Artificial Sequence: Synthetic oligonucleotide
  Target: ATXN2; (+) strand; PAM type: NRG; PAM sequence: TGG
tctccttatgtcattcaggc

SEQ ID NO: 44912 - DNA, 20 bp, Artificial Sequence
  Description of Artificial Sequence: Synthetic oligonucleotide
  Target: ATXN2; (+) strand; PAM type: NRG; PAM sequence: TGG
tcaggctggactccaactcc

SEQ ID NO: 44913 - DNA, 20 bp, Artificial Sequence
  Description of Artificial Sequence: Synthetic oligonucleotide
  Target: ATXN2; (+) strand; PAM type: NRG; PAM sequence: GGG
caggctggactccaactcct

SEQ ID NO: 44914 - DNA, 20 bp, Artificial Sequence
  Description of Artificial Sequence: Synthetic oligonucleotide
  Target: ATXN2; (+) strand; PAM type: NRG; PAM sequence: AAG
ggactccaactcctgggctc

SEQ ID NO: 44915 - DNA, 20 bp, Artificial Sequence
  Description of Artificial Sequence: Synthetic oligonucleotide
  Target: ATXN2; (+) strand; PAM type: NRG; PAM sequence: CAG
ctcaagtgatcctcctgctt

SEQ ID NO: 44916 - DNA, 20 bp, Artificial Sequence
  Description of Artificial Sequence: Synthetic oligonucleotide
  Target: ATXN2; (+) strand; PAM type: NRG; PAM sequence: AAG
tcctcctgcttcagcctccc

SEQ ID NO: 44917 - DNA, 20 bp, Artificial Sequence
  Description of Artificial Sequence: Synthetic oligonucleotide
  Target: ATXN2; (+) strand; PAM type: NRG; PAM sequence: TAG
tcctgcttcagcctcccaag

SEQ ID NO: 44918 - DNA, 20 bp, Artificial Sequence
  Description of Artificial Sequence: Synthetic oligonucleotide
  Target: ATXN2; (+) strand; PAM type: NRG; PAM sequence: TGG
gcttcagcctcccaagtagc

SEQ ID NO: 44919 - DNA, 20 bp, Artificial Sequence
  Description of Artificial Sequence: Synthetic oligonucleotide
  Target: ATXN2; (+) strand; PAM type: NRG; PAM sequence: GGG
cttcagcctcccaagtagct

SEQ ID NO: 44920 - DNA, 20 bp, Artificial Sequence
  Description of Artificial Sequence: Synthetic oligonucleotide
  Target: ATXN2; (+) strand; PAM type: NRG; PAM sequence: CAG
ctcccaagtagctgggactg

SEQ ID NO: 44921 - DNA, 20 bp, Artificial Sequence
  Description of Artificial Sequence: Synthetic oligonucleotide
  Target: ATXN2; (+) strand; PAM type: NRG; PAM sequence: AGG
tcccaagtagctgggactgc

SEQ ID NO: 44922 - DNA, 20 bp, Artificial Sequence
  Description of Artificial Sequence: Synthetic oligonucleotide
  Target: ATXN2; (+) strand; PAM type: NRG; PAM sequence: CAG
ctgggactgcaggcatgtgc

SEQ ID NO: 44923 - DNA, 20 bp, Artificial Sequence
  Description of Artificial Sequence: Synthetic oligonucleotide
  Target: ATXN2; (+) strand; PAM type: NRG; PAM sequence: CAG
caggcatgtgccagcatacc

SEQ ID NO: 44924 - DNA, 20 bp, Artificial Sequence
  Description of Artificial Sequence: Synthetic oligonucleotide
  Target: ATXN2; (+) strand; PAM type: NRG; PAM sequence: AAG
atgtgccagcatacccagct

SEQ ID NO: 44925 - DNA, 20 bp, Artificial Sequence
  Description of Artificial Sequence: Synthetic oligonucleotide
  Target: ATXN2; (+) strand; PAM type: NRG; PAM sequence: AAG
catacccagctaagcacttc

SEQ ID NO: 44926 - DNA, 20 bp, Artificial Sequence
  Description of Artificial Sequence: Synthetic oligonucleotide
  Target: ATXN2; (+) strand; PAM type: NRG; PAM sequence: CAG
ccagctaagcacttcaagta

SEQ ID NO: 44927 - DNA, 20 bp, Artificial Sequence
  Description of Artificial Sequence: Synthetic oligonucleotide
  Target: ATXN2; (+) strand; PAM type: NRG; PAM sequence: AAG
caagtacagataatgcatta

SEQ ID NO: 44928 - DNA, 20 bp, Artificial Sequence
  Description of Artificial Sequence: Synthetic oligonucleotide
  Target: ATXN2; (+) strand; PAM type: NRG; PAM sequence: GAG
agtacagataatgcattaaa

SEQ ID NO: 44929 - DNA, 20 bp, Artificial Sequence
  Description of Artificial Sequence: Synthetic oligonucleotide
  Target: ATXN2; (+) strand; PAM type: NRG; PAM sequence: GAG
tacagataatgcattaaaga

SEQ ID NO: 44930 - DNA, 20 bp, Artificial Sequence
  Description of Artificial Sequence: Synthetic oligonucleotide
  Target: ATXN2; (+) strand; PAM type: NRG; PAM sequence: TAG
attaaagagagaaacaaaac

SEQ ID NO: 44931 - DNA, 20 bp, Artificial Sequence
  Description of Artificial Sequence: Synthetic oligonucleotide
  Target: ATXN2; (+) strand; PAM type: NRG; PAM sequence: AAG
aaacaaaactagtatgtgac

SEQ ID NO: 44932 - DNA, 20 bp, Artificial Sequence
  Description of Artificial Sequence: Synthetic oligonucleotide
  Target: ATXN2; (+) strand; PAM type: NRG; PAM sequence: GAG
acaaaactagtatgtgacaa

SEQ ID NO: 44933 - DNA, 20 bp, Artificial Sequence
  Description of Artificial Sequence: Synthetic oligonucleotide
  Target: ATXN2; (+) strand; PAM type: NRG; PAM sequence: AGG
caaaactagtatgtgacaag

SEQ ID NO: 44934 - DNA, 20 bp, Artificial Sequence
  Description of Artificial Sequence: Synthetic oligonucleotide
  Target: ATXN2; (+) strand; PAM type: NRG; PAM sequence: TAG
gtatgtgacaagaggcgttt

SEQ ID NO: 44935 - DNA, 20 bp, Artificial Sequence
  Description of Artificial Sequence: Synthetic oligonucleotide
  Target: ATXN2; (+) strand; PAM type: NRG; PAM sequence: AAG
aagaggcgttttagaaataa

SEQ ID NO: 44936 - DNA, 20 bp, Artificial Sequence
  Description of Artificial Sequence: Synthetic oligonucleotide
  Target: ATXN2; (+) strand; PAM type: NRG; PAM sequence: TGG
ttagaaataaaagaattttg

SEQ ID NO: 44937 - DNA, 20 bp, Artificial Sequence
  Description of Artificial Sequence: Synthetic oligonucleotide
  Target: ATXN2; (+) strand; PAM type: NRG; PAM sequence: GAG
agaaataaaagaattttgtg

SEQ ID NO: 44938 - DNA, 20 bp, Artificial Sequence
  Description of Artificial Sequence: Synthetic oligonucleotide
  Target: ATXN2; (+) strand; PAM type: NRG; PAM sequence: AAG
gtggagaataatccaaattt

SEQ ID NO: 44939 - DNA, 20 bp, Artificial Sequence
  Description of Artificial Sequence: Synthetic oligonucleotide
  Target: ATXN2; (+) strand; PAM type: NRG; PAM sequence: AAG
aataatccaaatttaagacc

SEQ ID NO: 44940 - DNA, 20 bp, Artificial Sequence
  Description of Artificial Sequence: Synthetic oligonucleotide
  Target: ATXN2; (+) strand; PAM type: NRG; PAM sequence: CAG
cttaatgacaaccttttctt

SEQ ID NO: 44941 - DNA, 20 bp, Artificial Sequence
  Description of Artificial Sequence: Synthetic oligonucleotide
  Target: ATXN2; (+) strand; PAM type: NRG; PAM sequence: AAG
tgacaaccttttcttcagac

SEQ ID NO: 44942 - DNA, 20 bp, Artificial Sequence
  Description of Artificial Sequence: Synthetic oligonucleotide
  Target: ATXN2; (+) strand; PAM type: NRG; PAM sequence: GAG
acaaccttttcttcagacaa

SEQ ID NO: 44943 - DNA, 20 bp, Artificial Sequence
  Description of Artificial Sequence: Synthetic oligonucleotide
  Target: ATXN2; (+) strand; PAM type: NRG; PAM sequence: AGG
caaccttttcttcagacaag

SEQ ID NO: 44944 - DNA, 20 bp, Artificial Sequence
  Description of Artificial Sequence: Synthetic oligonucleotide
  Target: ATXN2; (+) strand; PAM type: NRG; PAM sequence: TAG
tcctacttcaacctcttctc

SEQ ID NO: 44945 - DNA, 20 bp, Artificial Sequence
  Description of Artificial Sequence: Synthetic oligonucleotide
  Target: ATXN2; (+) strand; PAM type: NRG; PAM sequence: AGG
cctacttcaacctcttctct

SEQ ID NO: 44946 - DNA, 20 bp, Artificial Sequence
  Description of Artificial Sequence: Synthetic oligonucleotide
  Target: ATXN2; (+) strand; PAM type: NRG; PAM sequence: AAG
ttcaacctcttctctaggtg

SEQ ID NO: 44947 - DNA, 20 bp, Artificial Sequence
  Description of Artificial Sequence: Synthetic oligonucleotide
  Target: ATXN2; (+) strand; PAM type: NRG; PAM sequence: AAG
tctaggtgaagtcaacaatt

SEQ ID NO: 44948 - DNA, 20 bp, Artificial Sequence
  Description of Artificial Sequence: Synthetic oligonucleotide
  Target: ATXN2; (+) strand; PAM type: NRG; PAM sequence: TAG
aattaagacaccactttcct

SEQ ID NO: 44949 - DNA, 20 bp, Artificial Sequence
  Description of Artificial Sequence: Synthetic oligonucleotide
  Target: ATXN2; (+) strand; PAM type: NRG; PAM sequence: AGG
attaagacaccactttcctt

SEQ ID NO: 44950 - DNA, 20 bp, Artificial Sequence
  Description of Artificial Sequence: Synthetic oligonucleotide
  Target: ATXN2; (+) strand; PAM type: NRG; PAM sequence: TGG
tttccttaggctaccttatt

SEQ ID NO: 44951 - DNA, 20 bp, Artificial Sequence
  Description of Artificial Sequence: Synthetic oligonucleotide
  Target: ATXN2; (+) strand; PAM type: NRG; PAM sequence: TGG
cttaggctaccttatttggc

SEQ ID NO: 44952 - DNA, 20 bp, Artificial Sequence
  Description of Artificial Sequence: Synthetic oligonucleotide
  Target: ATXN2; (+) strand; PAM type: NRG; PAM sequence: GGG
ttaggctaccttatttggct

SEQ ID NO: 44953 - DNA, 20 bp, Artificial Sequence
  Description of Artificial Sequence: Synthetic oligonucleotide
  Target: ATXN2; (+) strand; PAM type: NRG; PAM sequence: AAG
ccttatttggctgggtgtta

SEQ ID NO: 44954 - DNA, 20 bp, Artificial Sequence
  Description of Artificial Sequence: Synthetic oligonucleotide
  Target: ATXN2; (+) strand; PAM type: NRG; PAM sequence: CGG
ggtgttaaagcaaaacacac

SEQ ID NO: 44955 - DNA, 20 bp, Artificial Sequence
  Description of Artificial Sequence: Synthetic oligonucleotide
  Target: ATXN2; (+) strand; PAM type: NRG; PAM sequence: TGG
aaacacaccggcatttccca

SEQ ID NO: 44956 - DNA, 20 bp, Artificial Sequence
  Description of Artificial Sequence: Synthetic oligonucleotide
  Target: ATXN2; (+) strand; PAM type: NRG; PAM sequence: AAG
atggtttctaattttaattt

SEQ ID NO: 44957 - DNA, 20 bp, Artificial Sequence
  Description of Artificial Sequence: Synthetic oligonucleotide
  Target: ATXN2; (+) strand; PAM type: NRG; PAM sequence: AAG
tattatttattttaatcaca

SEQ ID NO: 44958 - DNA, 20 bp, Artificial Sequence
  Description of Artificial Sequence: Synthetic oligonucleotide
  Target: ATXN2; (+) strand; PAM type: NRG; PAM sequence: AAG
tatttattttaatcacaaag

SEQ ID NO: 44959 - DNA, 20 bp, Artificial Sequence
  Description of Artificial Sequence: Synthetic oligonucleotide
  Target: ATXN2; (+) strand; PAM type: NRG; PAM sequence: GAG
atcacaaagaagtaattcat

SEQ ID NO: 44960 - DNA, 20 bp, Artificial Sequence
  Description of Artificial Sequence: Synthetic oligonucleotide
  Target: ATXN2; (+) strand; PAM type: NRG; PAM sequence: AAG
agtaattcatgagcatccac

SEQ ID NO: 44961 - DNA, 20 bp, Artificial Sequence
  Description of Artificial Sequence: Synthetic oligonucleotide
  Target: ATXN2; (+) strand; PAM type: NRG; PAM sequence: CAG
ttcatgagcatccacaagaa

SEQ ID NO: 44962 - DNA, 20 bp, Artificial Sequence
  Description of Artificial Sequence: Synthetic oligonucleotide
  Target: ATXN2; (+) strand; PAM type: NRG; PAM sequence: CAG
tgagcatccacaagaacaga

SEQ ID NO: 44963 - DNA, 20 bp, Artificial Sequence
  Description of Artificial Sequence: Synthetic oligonucleotide
  Target: ATXN2; (+) strand; PAM type: NRG; PAM sequence: AAG
tactcctgcttaacccctac

SEQ ID NO: 44964 - DNA, 20 bp, Artificial Sequence
  Description of Artificial Sequence: Synthetic oligonucleotide
  Target: ATXN2; (+) strand; PAM type: NRG; PAM sequence: TGG
atttttctttatatattgct

SEQ ID NO: 44965 - DNA, 20 bp, Artificial Sequence
  Description of Artificial Sequence: Synthetic oligonucleotide
  Target: ATXN2; (+) strand; PAM type: NRG; PAM sequence: GGG
tttttctttatatattgctt

SEQ ID NO: 44966 - DNA, 20 bp, Artificial Sequence
  Description of Artificial Sequence: Synthetic oligonucleotide
  Target: ATXN2; (+) strand; PAM type: NRG; PAM sequence: GAG
tttctttatatattgcttgg

SEQ ID NO: 44967 - DNA, 20 bp, Artificial Sequence
  Description of Artificial Sequence: Synthetic oligonucleotide
  Target: ATXN2; (+) strand; PAM type: NRG; PAM sequence: AAG
tttatatattgcttgggaga

SEQ ID NO: 44968 - DNA, 20 bp, Artificial Sequence
  Description of Artificial Sequence: Synthetic oligonucleotide
  Target: ATXN2; (+) strand; PAM type: NRG; PAM sequence: TAG
attgcttgggagaaagtctc

SEQ ID NO: 44969 - DNA, 20 bp, Artificial Sequence
  Description of Artificial Sequence: Synthetic oligonucleotide
  Target: ATXN2; (+) strand; PAM type: NRG; PAM sequence: AAG
tacaataacaacaacaacaa

SEQ ID NO: 44970 - DNA, 20 bp, Artificial Sequence
  Description of Artificial Sequence: Synthetic oligonucleotide
  Target: ATXN2; (+) strand; PAM type: NRG; PAM sequence: AAG
agcacatttaaattacaacc

SEQ ID NO: 44971 - DNA, 20 bp, Artificial Sequence
  Description of Artificial Sequence: Synthetic oligonucleotide
  Target: ATXN2; (+) strand; PAM type: NRG; PAM sequence: CAG
tttaaattacaaccaagtga

SEQ ID NO: 44972 - DNA, 20 bp, Artificial Sequence
  Description of Artificial Sequence: Synthetic oligonucleotide
  Target: ATXN2; (+) strand; PAM type: NRG; PAM sequence: AGG
ttaaattacaaccaagtgac

SEQ ID NO: 44973 - DNA, 20 bp, Artificial Sequence
  Description of Artificial Sequence: Synthetic oligonucleotide
  Target: ATXN2; (+) strand; PAM type: NRG; PAM sequence: CAG
tgacaggatgtcatactgac

SEQ ID NO: 44974 - DNA, 20 bp, Artificial Sequence
  Description of Artificial Sequence: Synthetic oligonucleotide
  Target: ATXN2; (+) strand; PAM type: NRG; PAM sequence: GAG
acaggatgtcatactgacca

SEQ ID NO: 44975 - DNA, 20 bp, Artificial Sequence
  Description of Artificial Sequence: Synthetic oligonucleotide
  Target: ATXN2; (+) strand; PAM type: NRG; PAM sequence: TAG
atgtcatactgaccagagtc

SEQ ID NO: 44976 - DNA, 20 bp, Artificial Sequence
  Description of Artificial Sequence: Synthetic oligonucleotide
  Target: ATXN2; (+) strand; PAM type: NRG; PAM sequence: AAG
agagtctagcaataattaca

SEQ ID NO: 44977 - DNA, 20 bp, Artificial Sequence
  Description of Artificial Sequence: Synthetic oligonucleotide
  Target: ATXN2; (+) strand; PAM type: NRG; PAM sequence: AAG
acttactacgtcattttcca

SEQ ID NO: 44978 - DNA, 20 bp, Artificial Sequence
  Description of Artificial Sequence: Synthetic oligonucleotide
  Target: ATXN2; (+) strand; PAM type: NRG; PAM sequence: AAG
acgtcattttccaaagcctc

SEQ ID NO: 44979 - DNA, 20 bp, Artificial Sequence
  Description of Artificial Sequence: Synthetic oligonucleotide
  Target: ATXN2; (+) strand; PAM type: NRG; PAM sequence: TGG
caaagcctcaagttcctcat

SEQ ID NO: 44980 - DNA, 20 bp, Artificial Sequence
  Description of Artificial Sequence: Synthetic oligonucleotide
  Target: ATXN2; (+) strand; PAM type: NRG; PAM sequence: GAG
tcaagttcctcattggctgt

SEQ ID NO: 44981 - DNA, 20 bp, Artificial Sequence
  Description of Artificial Sequence: Synthetic oligonucleotide
  Target: ATXN2; (+) strand; PAM type: NRG; PAM sequence: CAG
ctgtgagttcacctgcatcc

SEQ ID NO: 44982 - DNA, 20 bp, Artificial Sequence
  Description of Artificial Sequence: Synthetic oligonucleotide
  Target: ATXN2; (+) strand; PAM type: NRG; PAM sequence: AGG
tgtgagttcacctgcatccc

SEQ ID NO: 44983 - DNA, 20 bp, Artificial Sequence
  Description of Artificial Sequence: Synthetic oligonucleotide
  Target: ATXN2; (+) strand; PAM type: NRG; PAM sequence: GGG
gtgagttcacctgcatccca

SEQ ID NO: 44984 - DNA, 20 bp, Artificial Sequence
  Description of Artificial Sequence: Synthetic oligonucleotide
  Target: ATXN2; (+) strand; PAM type: NRG; PAM sequence: CAG
tcacctgcatcccagggctc

SEQ ID NO: 44985 - DNA, 20 bp, Artificial Sequence
  Description of Artificial Sequence: Synthetic oligonucleotide
  Target: ATXN2; (+) strand; PAM type: NRG; PAM sequence: AGG
cacctgcatcccagggctcc

SEQ ID NO: 44986 - DNA, 20 bp, Artificial Sequence
  Description of Artificial Sequence: Synthetic oligonucleotide
  Target: ATXN2; (+) strand; PAM type: NRG; PAM sequence: TAG
tttgtgttcgccattcactt

SEQ ID NO: 44987 - DNA, 20 bp, Artificial Sequence
  Description of Artificial Sequence: Synthetic oligonucleotide
  Target: ATXN2; (+) strand; PAM type: NRG; PAM sequence: TAG
gccattcactttagcactga

SEQ ID NO: 44988 - DNA, 20 bp, Artificial Sequence
  Description of Artificial Sequence: Synthetic oligonucleotide
  Target: ATXN2; (+) strand; PAM type: NRG; PAM sequence: CAG
attcactttagcactgatag

SEQ ID NO: 44989 - DNA, 20 bp, Artificial Sequence
  Description of Artificial Sequence: Synthetic oligonucleotide
  Target: ATXN2; (+) strand; PAM type: NRG; PAM sequence: GAG
tcactttagcactgatagca

SEQ ID NO: 44990 - DNA, 20 bp, Artificial Sequence
  Description of Artificial Sequence: Synthetic oligonucleotide
  Target: ATXN2; (+) strand; PAM type: NRG; PAM sequence: CAG
tttagcactgatagcagagt

SEQ ID NO: 44991 - DNA, 20 bp, Artificial Sequence
  Description of Artificial Sequence: Synthetic oligonucleotide
  Target: ATXN2; (+) strand; PAM type: NRG; PAM sequence: AAG
actgatagcagagtcagtaa

SEQ ID NO: 44992 - DNA, 20 bp, Artificial Sequence
  Description of Artificial Sequence: Synthetic oligonucleotide
  Target: ATXN2; (+) strand; PAM type: NRG; PAM sequence: AAG
agtcagtaaaagcatctgca

SEQ ID NO: 44993 - DNA, 20 bp, Artificial Sequence
  Description of Artificial Sequence: Synthetic oligonucleotide
  Target: ATXN2; (+) strand; PAM type: NRG; PAM sequence: TGG
gtaaaagcatctgcaaagaa

SEQ ID NO: 44994 - DNA, 20 bp, Artificial Sequence
  Description of Artificial Sequence: Synthetic oligonucleotide
  Target: ATXN2; (+) strand; PAM type: NRG; PAM sequence: TGG
gcatctgcaaagaatggttt

SEQ ID NO: 44995 - DNA, 20 bp, Artificial Sequence
  Description of Artificial Sequence: Synthetic oligonucleotide
  Target: ATXN2; (+) strand; PAM type: NRG; PAM sequence: AAG
caaagaatggttttggttga

SEQ ID NO: 44996 - DNA, 20 bp, Artificial Sequence
  Description of Artificial Sequence: Synthetic oligonucleotide
  Target: ATXN2; (+) strand; PAM type: NRG; PAM sequence: TGG
ggttgaaagtttatataatc

SEQ ID NO: 44997 - DNA, 20 bp, Artificial Sequence
  Description of Artificial Sequence: Synthetic oligonucleotide
  Target: ATXN2; (+) strand; PAM type: NRG; PAM sequence: CAG
agtttatataatctggcaat

SEQ ID NO: 44998 - DNA, 20 bp, Artificial Sequence
  Description of Artificial Sequence: Synthetic oligonucleotide
  Target: ATXN2; (+) strand; PAM type: NRG; PAM sequence: AAG
acacacgtgaattaccaaca

SEQ ID NO: 44999 - DNA, 20 bp, Artificial Sequence
  Description of Artificial Sequence: Synthetic oligonucleotide
  Target: ATXN2; (+) strand; PAM type: NRG; PAM sequence: CAG
ttgtttaacttaaaatctaa

SEQ ID NO: 45000 - DNA, 20 bp, Artificial Sequence
  Description of Artificial Sequence: Synthetic oligonucleotide
  Target: ATXN2; (+) strand; PAM type: NRG; PAM sequence: TAG
aacatttattgaacataatt

SEQ ID NO: 45001 - DNA, 20 bp, Artificial Sequence
  Description of Artificial Sequence: Synthetic oligonucleotide
  Target: ATXN2; (+) strand; PAM type: NRG; PAM sequence: AGG
acatttattgaacataattt

SEQ ID NO: 45002 - DNA, 20 bp, Artificial Sequence
  Description of Artificial Sequence: Synthetic oligonucleotide
  Target: ATXN2; (+) strand; PAM type: NRG; PAM sequence: AAG
atttaggttgatgaaaacaa

SEQ ID NO: 45003 - DNA, 20 bp, Artificial Sequence
  Description of Artificial Sequence: Synthetic oligonucleotide
  Target: ATXN2; (+) strand; PAM type: NRG; PAM sequence: AAG
aagaccaatgcactataata

SEQ ID NO: 45004 - DNA, 20 bp, Artificial Sequence
  Description of Artificial Sequence: Synthetic oligonucleotide
  Target: ATXN2; (+) strand; PAM type: NRG; PAM sequence: AGG
agaccaatgcactataataa

SEQ ID NO: 45005 - DNA, 20 bp, Artificial Sequence
  Description of Artificial Sequence: Synthetic oligonucleotide
  Target: ATXN2; (+) strand; PAM type: NRG; PAM sequence: AAG
acttaaaacttatgtatgtg

SEQ ID NO: 45006 - DNA, 20 bp, Artificial Sequence
  Description of Artificial Sequence: Synthetic oligonucleotide
  Target: ATXN2; (+) strand; PAM type: NRG; PAM sequence: CGG
aactgctatctaaactgata

SEQ ID NO: 45007 - DNA, 20 bp, Artificial Sequence
  Description of Artificial Sequence: Synthetic oligonucleotide
  Target: ATXN2; (+) strand; PAM type: NRG; PAM sequence: TAG
ctaaactgatacggaatata

SEQ ID NO: 45008 - DNA, 20 bp, Artificial Sequence
  Description of Artificial Sequence: Synthetic oligonucleotide
  Target: ATXN2; (+) strand; PAM type: NRG; PAM sequence: CAG
gatacggaatatatagtatt

SEQ ID NO: 45009 - DNA, 20 bp, Artificial Sequence
  Description of Artificial Sequence: Synthetic oligonucleotide
  Target: ATXN2; (+) strand; PAM type: NRG; PAM sequence: AAG
gaatatatagtattcagtaa

SEQ ID NO: 45010 - DNA, 20 bp, Artificial Sequence
  Description of Artificial Sequence: Synthetic oligonucleotide
  Target: ATXN2; (+) strand; PAM type: NRG; PAM sequence: TAG
gtatgctttcacgtttaatt

SEQ ID NO: 45011 - DNA, 20 bp, Artificial Sequence
  Description of Artificial Sequence: Synthetic oligonucleotide
  Target: ATXN2; (+) strand; PAM type: NRG; PAM sequence: TGG
ttcacgtttaatttagcaaa

SEQ ID NO: 45012 - DNA, 20 bp, Artificial Sequence
  Description of Artificial Sequence: Synthetic oligonucleotide
  Target: ATXN2; (+) strand; PAM type: NRG; PAM sequence: CAG
taatttagcaaatggaatca

SEQ ID NO: 45013 - DNA, 20 bp, Artificial Sequence
  Description of Artificial Sequence: Synthetic oligonucleotide
  Target: ATXN2; (+) strand; PAM type: NRG; PAM sequence: CAG
atggaatcacagatgactat

SEQ ID NO: 45014 - DNA, 20 bp, Artificial Sequence
  Description of Artificial Sequence: Synthetic oligonucleotide
  Target: ATXN2; (+) strand; PAM type: NRG; PAM sequence: AAG
atcacagatgactatcagta

SEQ ID NO: 45015 - DNA, 20 bp, Artificial Sequence
  Description of Artificial Sequence: Synthetic oligonucleotide
  Target: ATXN2; (+) strand; PAM type: NRG; PAM sequence: AGG
tcacagatgactatcagtaa

SEQ ID NO: 45016 - DNA, 20 bp, Artificial Sequence
  Description of Artificial Sequence: Synthetic oligonucleotide
  Target: ATXN2; (+) strand; PAM type: NRG; PAM sequence: AAG
ttttcttttcatataatttt

SEQ ID NO: 45017 - DNA, 20 bp, Artificial Sequence
  Description of Artificial Sequence: Synthetic oligonucleotide
  Target: ATXN2; (+) strand; PAM type: NRG; PAM sequence: AAG
atataattttaagccacacg

SEQ ID NO: 45018 - DNA, 20 bp, Artificial Sequence
  Description of Artificial Sequence: Synthetic oligonucleotide
  Target: ATXN2; (+) strand; PAM type: NRG; PAM sequence: GAG
agcatttttttttttttttt

SEQ ID NO: 45019 - DNA, 20 bp, Artificial Sequence
  Description of Artificial Sequence: Synthetic oligonucleotide
  Target: ATXN2; (+) strand; PAM type: NRG; PAM sequence: TAG
ttttttttttttttttgaga

SEQ ID NO: 45020 - DNA, 20 bp, Artificial Sequence
  Description of Artificial Sequence: Synthetic oligonucleotide
  Target: ATXN2; (+) strand; PAM type: NRG; PAM sequence: GAG
ttttttttttttttgagata

SEQ ID NO: 45021 - DNA, 20 bp, Artificial Sequence
  Description of Artificial Sequence: Synthetic oligonucleotide
  Target: ATXN2; (+) strand; PAM type: NRG; PAM sequence: CAG
tagagtctcgttctgttgcc

SEQ ID NO: 45022 - DNA, 20 bp, Artificial Sequence
  Description of Artificial Sequence: Synthetic oligonucleotide
  Target: ATXN2; (+) strand; PAM type: NRG; PAM sequence: AGG
agagtctcgttctgttgccc

SEQ ID NO: 45023 - DNA, 20 bp, Artificial Sequence
  Description of Artificial Sequence: Synthetic oligonucleotide
  Target: ATXN2; (+) strand; PAM type: NRG; PAM sequence: TGG
tctcgttctgttgcccaggc

SEQ ID NO: 45024 - DNA, 20 bp, Artificial Sequence
  Description of Artificial Sequence: Synthetic oligonucleotide
  Target: ATXN2; (+) strand; PAM type: NRG; PAM sequence: CAG
ctgttgcccaggctggaatg

SEQ ID NO: 45025 - DNA, 20 bp, Artificial Sequence
  Description of Artificial Sequence: Synthetic oligonucleotide
  Target: ATXN2; (+) strand; PAM type: NRG; PAM sequence: TGG
ttgcccaggctggaatgcag

SEQ ID NO: 45026 - DNA, 20 bp, Artificial Sequence
  Description of Artificial Sequence: Synthetic oligonucleotide
  Target: ATXN2; (+) strand; PAM type: NRG; PAM sequence: CGG
ggaatgcagtggcgtgatct

SEQ ID NO: 45027 - DNA, 20 bp, Artificial Sequence
  Description of Artificial Sequence: Synthetic oligonucleotide
  Target: ATXN2; (+) strand; PAM type: NRG; PAM sequence: CGG
tcactgcaacctctgcctcc

SEQ ID NO: 45028 - DNA, 20 bp, Artificial Sequence
  Description of Artificial Sequence: Synthetic oligonucleotide
  Target: ATXN2; (+) strand; PAM type: NRG; PAM sequence: GGG
cactgcaacctctgcctccc

SEQ ID NO: 45029 - DNA, 20 bp, Artificial Sequence
  Description of Artificial Sequence: Synthetic oligonucleotide
  Target: ATXN2; (+) strand; PAM type: NRG; PAM sequence: AAG
aacctctgcctcccgggttc

SEQ ID NO: 45030 - DNA, 20 bp, Artificial Sequence
  Description of Artificial Sequence: Synthetic oligonucleotide
  Target: ATXN2; (+) strand; PAM type: NRG; PAM sequence: CAG
ttcaagcgattctcctgcct

SEQ ID NO: 45031 - DNA, 20 bp, Artificial Sequence
  Description of Artificial Sequence: Synthetic oligonucleotide
  Target: ATXN2; (+) strand; PAM type: NRG; PAM sequence: GAG
ttctcctgcctcagtctccc

SEQ ID NO: 45032 - DNA, 20 bp, Artificial Sequence
  Description of Artificial Sequence: Synthetic oligonucleotide
  Target: ATXN2; (+) strand; PAM type: NRG; PAM sequence: TAG
tcctgcctcagtctcccgag

SEQ ID NO: 45033 - DNA, 20 bp, Artificial Sequence
  Description of Artificial Sequence: Synthetic oligonucleotide
  Target: ATXN2; (+) strand; PAM type: NRG; PAM sequence: TGG
gcctcagtctcccgagtagc

SEQ ID NO: 45034 - DNA, 20 bp, Artificial Sequence
  Description of Artificial Sequence: Synthetic oligonucleotide
  Target: ATXN2; (+) strand; PAM type: NRG; PAM sequence: GGG
cctcagtctcccgagtagct

SEQ ID NO: 45035 - DNA, 20 bp, Artificial Sequence
  Description of Artificial Sequence: Synthetic oligonucleotide
  Target: ATXN2; (+) strand; PAM type: NRG; PAM sequence: CAG
ctcccgagtagctgggacta

SEQ ID NO: 45036 - DNA, 20 bp, Artificial Sequence
  Description of Artificial Sequence: Synthetic oligonucleotide
  Target: ATXN2; (+) strand; PAM type: NRG; PAM sequence: AGG
tcccgagtagctgggactac

SEQ ID NO: 45037 - DNA, 20 bp, Artificial Sequence
  Description of Artificial Sequence: Synthetic oligonucleotide
  Target: ATXN2; (+) strand; PAM type: NRG; PAM sequence: CGG
caggtgtgtaccaccacgcc

SEQ ID NO: 45038 - DNA, 20 bp, Artificial Sequence
  Description of Artificial Sequence: Synthetic oligonucleotide
  Target: ATXN2; (+) strand; PAM type: NRG; PAM sequence: TAG
cggataattttttgtatttt

SEQ ID NO: 45039 - DNA, 20 bp, Artificial Sequence
  Description of Artificial Sequence: Synthetic oligonucleotide
  Target: ATXN2; (+) strand; PAM type: NRG; PAM sequence: TAG
ataattttttgtatttttag

SEQ ID NO: 45040 - DNA, 20 bp, Artificial Sequence
  Description of Artificial Sequence: Synthetic oligonucleotide
  Target: ATXN2; (+) strand; PAM type: NRG; PAM sequence: CGG
ttttttgtatttttagtaga

SEQ ID NO: 45041 - DNA, 20 bp, Artificial Sequence
  Description of Artificial Sequence: Synthetic oligonucleotide
  Target: ATXN2; (+) strand; PAM type: NRG; PAM sequence: GGG
tttttgtatttttagtagac

SEQ ID NO: 45042 - DNA, 20 bp, Artificial Sequence
  Description of Artificial Sequence: Synthetic oligonucleotide
  Target: ATXN2; (+) strand; PAM type: NRG; PAM sequence: GGG
ttttgtatttttagtagacg

SEQ ID NO: 45043 - DNA, 20 bp, Artificial Sequence
  Description of Artificial Sequence: Synthetic oligonucleotide
  Target: ATXN2; (+) strand; PAM type: NRG; PAM sequence: TAG
tagacggggtttcaccgtgt

SEQ ID NO: 45044 - DNA, 20 bp, Artificial Sequence
  Description of Artificial Sequence: Synthetic oligonucleotide
  Target: ATXN2; (+) strand; PAM type: NRG; PAM sequence: CAG
cggggtttcaccgtgttagc

SEQ ID NO: 45045 - DNA, 20 bp, Artificial Sequence
  Description of Artificial Sequence: Synthetic oligonucleotide
  Target: ATXN2; (+) strand; PAM type: NRG; PAM sequence: AGG
ggggtttcaccgtgttagcc

SEQ ID NO: 45046 - DNA, 20 bp, Artificial Sequence
  Description of Artificial Sequence: Synthetic oligonucleotide
  Target: ATXN2; (+) strand; PAM type: NRG; PAM sequence: TGG
tttcaccgtgttagccaggc

SEQ ID NO: 45047 - DNA, 20 bp, Artificial Sequence
  Description of Artificial Sequence: Synthetic oligonucleotide
  Target: ATXN2; (+) strand; PAM type: NRG; PAM sequence: TAG
ctggtcttgatctcctgacc

SEQ ID NO: 45048 - DNA, 20 bp, Artificial Sequence
  Description of Artificial Sequence: Synthetic oligonucleotide
  Target: ATXN2; (+) strand; PAM type: NRG; PAM sequence: TGG
acctagtgatacccccacct

SEQ ID NO: 45049 - DNA, 20 bp, Artificial Sequence
  Description of Artificial Sequence: Synthetic oligonucleotide
  Target: ATXN2; (+) strand; PAM type: NRG; PAM sequence: AAG
acccccaccttggcctccca

SEQ ID NO: 45050 - DNA, 20 bp, Artificial Sequence
  Description of Artificial Sequence: Synthetic oligonucleotide
  Target: ATXN2; (+) strand; PAM type: NRG; PAM sequence: TGG
accttggcctcccaaagtgc

SEQ ID NO: 45051 - DNA, 20 bp, Artificial Sequence
  Description of Artificial Sequence: Synthetic oligonucleotide
  Target: ATXN2; (+) strand; PAM type: NRG; PAM sequence: GGG
ccttggcctcccaaagtgct

SEQ ID NO: 45052 - DNA, 20 bp, Artificial Sequence
  Description of Artificial Sequence: Synthetic oligonucleotide
  Target: ATXN2; (+) strand; PAM type: NRG; PAM sequence: CAG
ctcccaaagtgctgggatta

SEQ ID NO: 45053 - DNA, 20 bp, Artificial Sequence
  Description of Artificial Sequence: Synthetic oligonucleotide
  Target: ATXN2; (+) strand; PAM type: NRG; PAM sequence: AGG
tcccaaagtgctgggattac

SEQ ID NO: 45054 - DNA, 20 bp, Artificial Sequence
  Description of Artificial Sequence: Synthetic oligonucleotide
  Target: ATXN2; (+) strand; PAM type: NRG; PAM sequence: GAG
agtgctgggattacaggcat

SEQ ID NO: 45055 - DNA, 20 bp, Artificial Sequence
  Description of Artificial Sequence: Synthetic oligonucleotide
  Target: ATXN2; (+) strand; PAM type: NRG; PAM sequence: CAG
caggcatgagccaccatgcc

SEQ ID NO: 45056 - DNA, 20 bp, Artificial Sequence
  Description of Artificial Sequence: Synthetic oligonucleotide
  Target: ATXN2; (+) strand; PAM type: NRG; PAM sequence: AAG
caccatgcccagcccacatg

SEQ ID NO: 45057 - DNA, 20 bp, Artificial Sequence
  Description of Artificial Sequence: Synthetic oligonucleotide
  Target: ATXN2; (+) strand; PAM type: NRG; PAM sequence: CAG
taattcattaaattatatta

SEQ ID NO: 45058 - DNA, 20 bp, Artificial Sequence
  Description of Artificial Sequence: Synthetic oligonucleotide
  Target: ATXN2; (+) strand; PAM type: NRG; PAM sequence: AGG
aattcattaaattatattac

SEQ ID NO: 45059 - DNA, 20 bp, Artificial Sequence
  Description of Artificial Sequence: Synthetic oligonucleotide
  Target: ATXN2; (+) strand; PAM type: NRG; PAM sequence: CAG
ggtaattactctgcatgtct

SEQ ID NO: 45060 - DNA, 20 bp, Artificial Sequence
  Description of Artificial Sequence: Synthetic oligonucleotide
  Target: ATXN2; (+) strand; PAM type: NRG; PAM sequence: AAG
aattactctgcatgtctcag

SEQ ID NO: 45061 - DNA, 20 bp, Artificial Sequence
  Description of Artificial Sequence: Synthetic oligonucleotide
  Target: ATXN2; (+) strand; PAM type: NRG; PAM sequence: AAG
tgcatgtctcagaagtgacc

SEQ ID NO: 45062 - DNA, 20 bp, Artificial Sequence
  Description of Artificial Sequence: Synthetic oligonucleotide
  Target: ATXN2; (+) strand; PAM type: NRG; PAM sequence: TGG
gaagtgaccaagaaaatttc

SEQ ID NO: 45063 - DNA, 20 bp, Artificial Sequence
  Description of Artificial Sequence: Synthetic oligonucleotide
  Target: ATXN2; (+) strand; PAM type: NRG; PAM sequence: CAG
tgaccaagaaaatttctggc

SEQ ID NO: 45064 - DNA, 20 bp, Artificial Sequence
  Description of Artificial Sequence: Synthetic oligonucleotide
  Target: ATXN2; (+) strand; PAM type: NRG; PAM sequence: TGG
agaaaatttctggccagatg

SEQ ID NO: 45065 - DNA, 20 bp, Artificial Sequence
  Description of Artificial Sequence: Synthetic oligonucleotide
  Target: ATXN2; (+) strand; PAM type: NRG; PAM sequence: TGG
aaatttctggccagatgtgg

SEQ ID NO: 45066 - DNA, 20 bp, Artificial Sequence
  Description of Artificial Sequence: Synthetic oligonucleotide
  Target: ATXN2; (+) strand; PAM type: NRG; PAM sequence: CAG
gtggctcatgcctgtaatac

SEQ ID NO: 45067 - DNA, 20 bp, Artificial Sequence
  Description of Artificial Sequence: Synthetic oligonucleotide
  Target: ATXN2; (+) strand; PAM type: NRG; PAM sequence: TGG
tgcctgtaataccagcactt

SEQ ID NO: 45068 - DNA, 20 bp, Artificial Sequence
  Description of Artificial Sequence: Synthetic oligonucleotide
  Target: ATXN2; (+) strand; PAM type: NRG; PAM sequence: GGG
gcctgtaataccagcacttt

SEQ ID NO: 45069 - DNA, 20 bp, Artificial Sequence
  Description of Artificial Sequence: Synthetic oligonucleotide
  Target: ATXN2; (+) strand; PAM type: NRG; PAM sequence: GAG
ctgtaataccagcactttgg

SEQ ID NO: 45070 - DNA, 20 bp, Artificial Sequence
  Description of Artificial Sequence: Synthetic oligonucleotide
  Target: ATXN2; (+) strand; PAM type: NRG; PAM sequence: AGG
tgtaataccagcactttggg

SEQ ID NO: 45071 - DNA, 20 bp, Artificial Sequence
  Description of Artificial Sequence: Synthetic oligonucleotide
  Target: ATXN2; (+) strand; PAM type: NRG; PAM sequence: CAG
taccagcactttgggaggcc

SEQ ID NO: 45072 - DNA, 20 bp, Artificial Sequence
  Description of Artificial Sequence: Synthetic oligonucleotide
  Target: ATXN2; (+) strand; PAM type: NRG; PAM sequence: AGG
accagcactttgggaggccc

SEQ ID NO: 45073 - DNA, 20 bp, Artificial Sequence
  Description of Artificial Sequence: Synthetic oligonucleotide
  Target: ATXN2; (+) strand; PAM type: NRG; PAM sequence: CAG
agcactttgggaggcccagg

SEQ ID NO: 45074 - DNA, 20 bp, Artificial Sequence
  Description of Artificial Sequence: Synthetic oligonucleotide
  Target: ATXN2; (+) strand; PAM type: NRG; PAM sequence: AGG
gcactttgggaggcccaggc

SEQ ID NO: 45075 - DNA, 20 bp, Artificial Sequence
  Description of Artificial Sequence: Synthetic oligonucleotide
  Target: ATXN2; (+) strand; PAM type: NRG; PAM sequence: TGG
ctttgggaggcccaggcagg

SEQ ID NO: 45076 - DNA, 20 bp, Artificial Sequence
  Description of Artificial Sequence: Synthetic oligonucleotide
  Target: ATXN2; (+) strand; PAM type: NRG; PAM sequence: GAG
ggcccaggcaggtggatcat

SEQ ID NO: 45077 - DNA, 20 bp, Artificial Sequence
  Description of Artificial Sequence: Synthetic oligonucleotide
  Target: ATXN2; (+) strand; PAM type: NRG; PAM sequence: AGG
gcccaggcaggtggatcatg

SEQ ID NO: 45078 - DNA, 20 bp, Artificial Sequence
  Description of Artificial Sequence: Synthetic oligonucleotide
  Target: ATXN2; (+) strand; PAM type: NRG; PAM sequence: AAG
ggcaggtggatcatgaggtt

SEQ ID NO: 45079 - DNA, 20 bp, Artificial Sequence
  Description of Artificial Sequence: Synthetic oligonucleotide
  Target: ATXN2; (+) strand; PAM type: NRG; PAM sequence: GAG
caggtggatcatgaggttaa

SEQ ID NO: 45080 - DNA, 20 bp, Artificial Sequence
  Description of Artificial Sequence: Synthetic oligonucleotide
  Target: ATXN2; (+) strand; PAM type: NRG; PAM sequence: GAG
gatcatgaggttaagagatc

SEQ ID NO: 45081 - DNA, 20 bp, Artificial Sequence
  Description of Artificial Sequence: Synthetic oligonucleotide
  Target: ATXN2; (+) strand; PAM type: NRG; PAM sequence: TGG
ttaagagatcgagaccatcc

SEQ ID NO: 45082 - DNA, 20 bp, Artificial Sequence
  Description of Artificial Sequence: Synthetic oligonucleotide
  Target: ATXN2; (+) strand; PAM type: NRG; PAM sequence: TGG
cgagaccatcctggccaaca

SEQ ID NO: 45083 - DNA, 20 bp, Artificial Sequence
  Description of Artificial Sequence: Synthetic oligonucleotide
  Target: ATXN2; (+) strand; PAM type: NRG; PAM sequence: TAG
tctactaaaaatacaaaaat

SEQ ID NO: 45084 - DNA, 20 bp, Artificial Sequence
  Description of Artificial Sequence: Synthetic oligonucleotide
  Target: ATXN2; (+) strand; PAM type: NRG; PAM sequence: TGG
ctaaaaatacaaaaattagt

SEQ ID NO: 45085 - DNA, 20 bp, Artificial Sequence
  Description of Artificial Sequence: Synthetic oligonucleotide
  Target: ATXN2; (+) strand; PAM type: NRG; PAM sequence: GGG
taaaaatacaaaaattagtt

SEQ ID NO: 45086 - DNA, 20 bp, Artificial Sequence
  Description of Artificial Sequence: Synthetic oligonucleotide
  Target: ATXN2; (+) strand; PAM type: NRG; PAM sequence: TGG
atacaaaaattagttgggca

SEQ ID NO: 45087 - DNA, 20 bp, Artificial Sequence
  Description of Artificial Sequence: Synthetic oligonucleotide
  Target: ATXN2; (+) strand; PAM type: NRG; PAM sequence: TGG
caaaaattagttgggcatgg

SEQ ID NO: 45088 - DNA, 20 bp, Artificial Sequence
  Description of Artificial Sequence: Synthetic oligonucleotide
  Target: ATXN2; (+) strand; PAM type: NRG; PAM sequence: TAG
ggcatggtggcacatgcctg

SEQ ID NO: 45089 - DNA, 20 bp, Artificial Sequence
  Description of Artificial Sequence: Synthetic oligonucleotide
  Target: ATXN2; (+) strand; PAM type: NRG; PAM sequence: CAG
gtggcacatgcctgtagtcc

SEQ ID NO: 45090 - DNA, 20 bp, Artificial Sequence
  Description of Artificial Sequence: Synthetic oligonucleotide
  Target: ATXN2; (+) strand; PAM type: NRG; PAM sequence: CGG
tgcctgtagtcccagctact

SEQ ID NO: 45091 - DNA, 20 bp, Artificial Sequence
  Description of Artificial Sequence: Synthetic oligonucleotide
  Target: ATXN2; (+) strand; PAM type: NRG; PAM sequence: GGG
gcctgtagtcccagctactc

SEQ ID NO: 45092 - DNA, 20 bp, Artificial Sequence
  Description of Artificial Sequence: Synthetic oligonucleotide
  Target: ATXN2; (+) strand; PAM type: NRG; PAM sequence: GAG
ctgtagtcccagctactcgg

SEQ ID NO: 45093 - DNA, 20 bp, Artificial Sequence
  Description of Artificial Sequence: Synthetic oligonucleotide
  Target: ATXN2; (+) strand; PAM type: NRG; PAM sequence: AGG
tgtagtcccagctactcggg

SEQ ID NO: 45094 - DNA, 20 bp, Artificial Sequence
  Description of Artificial Sequence: Synthetic oligonucleotide
  Target: ATXN2; (+) strand; PAM type: NRG; PAM sequence: GAG
tcccagctactcgggaggct

SEQ ID NO: 45095 - DNA, 20 bp, Artificial Sequence
  Description of Artificial Sequence: Synthetic oligonucleotide
  Target: ATXN2; (+) strand; PAM type: NRG; PAM sequence: AGG
cccagctactcgggaggctg

SEQ ID NO: 45096 - DNA, 20 bp, Artificial Sequence
  Description of Artificial Sequence: Synthetic oligonucleotide
  Target: ATXN2; (+) strand; PAM type: NRG; PAM sequence: AAG
agctactcgggaggctgagg

SEQ ID NO: 45097 - DNA, 20 bp, Artificial Sequence
  Description of Artificial Sequence: Synthetic oligonucleotide
  Target: ATXN2; (+) strand; PAM type: NRG; PAM sequence: AGG
gctactcgggaggctgagga

SEQ ID NO: 45098 - DNA, 20 bp, Artificial Sequence
  Description of Artificial Sequence: Synthetic oligonucleotide
  Target: ATXN2; (+) strand; PAM type: NRG; PAM sequence: GAG
tactcgggaggctgaggaag

SEQ ID NO: 45099 - DNA, 20 bp, Artificial Sequence
  Description of Artificial Sequence: Synthetic oligonucleotide
  Target: ATXN2; (+) strand; PAM type: NRG; PAM sequence: CGG
gaaggagaatcgtttgaacc

SEQ ID NO: 45100 - DNA, 20 bp, Artificial Sequence
  Description of Artificial Sequence: Synthetic oligonucleotide
  Target: ATXN2; (+) strand; PAM type: NRG; PAM sequence: GGG
aaggagaatcgtttgaaccc

SEQ ID NO: 45101 - DNA, 20 bp, Artificial Sequence
  Description of Artificial Sequence: Synthetic oligonucleotide
  Target: ATXN2; (+) strand; PAM type: NRG; PAM sequence: GAG
ggagaatcgtttgaacccgg

SEQ ID NO: 45102 - DNA, 20 bp, Artificial Sequence
  Description of Artificial Sequence: Synthetic oligonucleotide
  Target: ATXN2; (+) strand; PAM type: NRG; PAM sequence: AGG
gagaatcgtttgaacccggg

SEQ ID NO: 45103 - DNA, 20 bp, Artificial Sequence
  Description of Artificial Sequence: Synthetic oligonucleotide
  Target: ATXN2; (+) strand; PAM type: NRG; PAM sequence: TGG
aatcgtttgaacccgggagg

SEQ ID NO: 45104 - DNA, 20 bp, Artificial Sequence
  Description of Artificial Sequence: Synthetic oligonucleotide
  Target: ATXN2; (+) strand; PAM type: NRG; PAM sequence: GAG
tcgtttgaacccgggaggtg

SEQ ID NO: 45105 - DNA, 20 bp, Artificial Sequence
  Description of Artificial Sequence: Synthetic oligonucleotide
  Target: ATXN2; (+) strand; PAM type: NRG; PAM sequence: AGG
cgtttgaacccgggaggtgg

SEQ ID NO: 45106 - DNA, 20 bp, Artificial Sequence
  Description of Artificial Sequence: Synthetic oligonucleotide
  Target: ATXN2; (+) strand; PAM type: NRG; PAM sequence: TGG
gaggtggaggttgcaatgaa

SEQ ID NO: 45107 - DNA, 20 bp, Artificial Sequence
  Description of Artificial Sequence: Synthetic oligonucleotide
  Target: ATXN2; (+) strand; PAM type: NRG; PAM sequence: GAG
ggtggaggttgcaatgaatg

SEQ ID NO: 45108 - DNA, 20 bp, Artificial Sequence
  Description of Artificial Sequence: Synthetic oligonucleotide
  Target: ATXN2; (+) strand; PAM type: NRG; PAM sequence: CAG
gagatcacgccactgtgctc

SEQ ID NO: 45109 - DNA, 20 bp, Artificial Sequence
  Description of Artificial Sequence: Synthetic oligonucleotide
  Target: ATXN2; (+) strand; PAM type: NRG; PAM sequence: TGG
cacgccactgtgctccagcc

SEQ ID NO: 45110 - DNA, 20 bp, Artificial Sequence
  Description of Artificial Sequence: Synthetic oligonucleotide
  Target: ATXN2; (+) strand; PAM type: NRG; PAM sequence: CAG
actgtgctccagcctggcga

SEQ ID NO: 45111 - DNA, 20 bp, Artificial Sequence
  Description of Artificial Sequence: Synthetic oligonucleotide
  Target: ATXN2; (+) strand; PAM type: NRG; PAM sequence: GAG
tgtgctccagcctggcgaca

SEQ ID NO: 45112 - DNA, 20 bp, Artificial Sequence
  Description of Artificial Sequence: Synthetic oligonucleotide
  Target: ATXN2; (+) strand; PAM type: NRG; PAM sequence: GAG
ctccagcctggcgacagagt

SEQ ID NO: 45113 - DNA, 20 bp, Artificial Sequence
  Description of Artificial Sequence: Synthetic oligonucleotide
  Target: ATXN2; (+) strand; PAM type: NRG; PAM sequence: AAG
gaccctgtctcaaaaaaaaa

SEQ ID NO: 45114 - DNA, 20 bp, Artificial Sequence
  Description of Artificial Sequence: Synthetic oligonucleotide
  Target: ATXN2; (+) strand; PAM type: NRG; PAM sequence: AAG
gtctcaaaaaaaaaaagaaa

SEQ ID NO: 45115 - DNA, 20 bp, Artificial Sequence
  Description of Artificial Sequence: Synthetic oligonucleotide
  Target: ATXN2; (+) strand; PAM type: NRG; PAM sequence: GAG
tttttttttttttctttttt

SEQ ID NO: 45116 - DNA, 20 bp, Artificial Sequence
  Description of Artificial Sequence: Synthetic oligonucleotide
  Target: ATXN2; (+) strand; PAM type: NRG; PAM sequence: TGG
tttttttttcttttttgaga

SEQ ID NO: 45117 - DNA, 20 bp, Artificial Sequence
  Description of Artificial Sequence: Synthetic oligonucleotide
  Target: ATXN2; (+) strand; PAM type: NRG; PAM sequence: GAG
tttttttcttttttgagatg

SEQ ID NO: 45118 - DNA, 20 bp, Artificial Sequence
  Description of Artificial Sequence: Synthetic oligonucleotide
  Target: ATXN2; (+) strand; PAM type: NRG; PAM sequence: CAG
atggagcttgctctttcacc

SEQ ID NO: 45119 - DNA, 20 bp, Artificial Sequence
  Description of Artificial Sequence: Synthetic oligonucleotide
  Target: ATXN2; (+) strand; PAM type: NRG; PAM sequence: CGG
gcttgctctttcacccagac

SEQ ID NO: 45120 - DNA, 20 bp, Artificial Sequence
  Description of Artificial Sequence: Synthetic oligonucleotide
  Target: ATXN2; (+) strand; PAM type: NRG; PAM sequence: GAG
ttgctctttcacccagaccg

SEQ ID NO: 45121 - DNA, 20 bp, Artificial Sequence
  Description of Artificial Sequence: Synthetic oligonucleotide
  Target: ATXN2; (+) strand; PAM type: NRG; PAM sequence: CAG
ctttcacccagaccggagtg

SEQ ID NO: 45122 - DNA, 20 bp, Artificial Sequence
  Description of Artificial Sequence: Synthetic oligonucleotide
  Target: ATXN2; (+) strand; PAM type: NRG; PAM sequence: CGG
ggagtgcagtgacaccatct

SEQ ID NO: 45123 - DNA, 20 bp, Artificial Sequence
  Description of Artificial Sequence: Synthetic oligonucleotide
  Target: ATXN2; (+) strand; PAM type: NRG; PAM sequence: CAG
tccctgcaacatccaccttc

SEQ ID NO: 45124 - DNA, 20 bp, Artificial Sequence
  Description of Artificial Sequence: Synthetic oligonucleotide
  Target: ATXN2; (+) strand; PAM type: NRG; PAM sequence: AGG
ccctgcaacatccaccttcc

SEQ ID NO: 45125 - DNA, 20 bp, Artificial Sequence
  Description of Artificial Sequence: Synthetic oligonucleotide
  Target: ATXN2; (+) strand; PAM type: NRG; PAM sequence: AAG
aacatccaccttccaggttc

SEQ ID NO: 45126 - DNA, 20 bp, Artificial Sequence
  Description of Artificial Sequence: Synthetic oligonucleotide
  Target: ATXN2; (+) strand; PAM type: NRG; PAM sequence: AGG
acatccaccttccaggttca

SEQ ID NO: 45127 - DNA, 20 bp, Artificial Sequence
  Description of Artificial Sequence: Synthetic oligonucleotide
  Target: ATXN2; (+) strand; PAM type: NRG; PAM sequence: GGG
catccaccttccaggttcaa

SEQ ID NO: 45128 - DNA, 20 bp, Artificial Sequence
  Description of Artificial Sequence: Synthetic oligonucleotide
  Target: ATXN2; (+) strand; PAM type: NRG; PAM sequence: CAG
ttcaagggaatctcctgcct

SEQ ID NO: 45129 - DNA, 20 bp, Artificial Sequence
  Description of Artificial Sequence: Synthetic oligonucleotide
  Target: ATXN2; (+) strand; PAM type: NRG; PAM sequence: AAG
atctcctgcctcagcctccc

SEQ ID NO: 45130 - DNA, 20 bp, Artificial Sequence
  Description of Artificial Sequence: Synthetic oligonucleotide
  Target: ATXN2; (+) strand; PAM type: NRG; PAM sequence: TAG
tcctgcctcagcctcccaag

SEQ ID NO: 45131 - DNA, 20 bp, Artificial Sequence
  Description of Artificial Sequence: Synthetic oligonucleotide
  Target: ATXN2; (+) strand; PAM type: NRG; PAM sequence: AAG
cctcagcctcccaagtagct

SEQ ID NO: 45132 - DNA, 20 bp, Artificial Sequence
  Description of Artificial Sequence: Synthetic oligonucleotide
  Target: ATXN2; (+) strand; PAM type: NRG; PAM sequence: CAG
ctcccaagtagctaagatta

SEQ ID NO: 45133 - DNA, 20 bp, Artificial Sequence
  Description of Artificial Sequence: Synthetic oligonucleotide
  Target: ATXN2; (+) strand; PAM type: NRG; PAM sequence: AGG
tcccaagtagctaagattac

SEQ ID NO: 45134 - DNA, 20 bp, Artificial Sequence
  Description of Artificial Sequence: Synthetic oligonucleotide
  Target: ATXN2; (+) strand; PAM type: NRG; PAM sequence: CAG
caggcgcccaccaacacgcc

SEQ ID NO: 45135 - DNA, 20 bp, Artificial Sequence
  Description of Artificial Sequence: Synthetic oligonucleotide
  Target: ATXN2; (+) strand; PAM type: NRG; PAM sequence: TAG
ccagctaatgtttgtatttt

SEQ ID NO: 45136 - DNA, 20 bp, Artificial Sequence
  Description of Artificial Sequence: Synthetic oligonucleotide
  Target: ATXN2; (+) strand; PAM type: NRG; PAM sequence: CAG
gctaatgtttgtatttttag

SEQ ID NO: 45137 - DNA, 20 bp, Artificial Sequence
  Description of Artificial Sequence: Synthetic oligonucleotide
  Target: ATXN2; (+) strand; PAM type: NRG; PAM sequence: GAG
taatgtttgtatttttagca

SEQ ID NO: 45138 - DNA, 20 bp, Artificial Sequence
  Description of Artificial Sequence: Synthetic oligonucleotide
  Target: ATXN2; (+) strand; PAM type: NRG; PAM sequence: CAG
gtttgtatttttagcagaga

SEQ ID NO: 45139 - DNA, 20 bp, Artificial Sequence
  Description of Artificial Sequence: Synthetic oligonucleotide
  Target: ATXN2; (+) strand; PAM type: NRG; PAM sequence: AGG
tttgtatttttagcagagac

SEQ ID NO: 45140 - DNA, 20 bp, Artificial Sequence
  Description of Artificial Sequence: Synthetic oligonucleotide
  Target: ATXN2; (+) strand; PAM type: NRG; PAM sequence: GGG
ttgtatttttagcagagaca

SEQ ID NO: 45141 - DNA, 20 bp, Artificial Sequence
  Description of Artificial Sequence: Synthetic oligonucleotide
  Target: ATXN2; (+) strand; PAM type: NRG; PAM sequence: TGG
gagacagggtttcaccatgt

SEQ ID NO: 45142 - DNA, 20 bp, Artificial Sequence
  Description of Artificial Sequence: Synthetic oligonucleotide
  Target: ATXN2; (+) strand; PAM type: NRG; PAM sequence: CAG
cagggtttcaccatgttggc

SEQ ID NO: 45143 - DNA, 20 bp, Artificial Sequence
  Description of Artificial Sequence: Synthetic oligonucleotide
  Target: ATXN2; (+) strand; PAM type: NRG; PAM sequence: AGG
agggtttcaccatgttggcc

SEQ ID NO: 45144 - DNA, 20 bp, Artificial Sequence
  Description of Artificial Sequence: Synthetic oligonucleotide
  Target: ATXN2; (+) strand; PAM type: NRG; PAM sequence: TGG
tttcaccatgttggccaggc

SEQ ID NO: 45145 - DNA, 20 bp, Artificial Sequence
  Description of Artificial Sequence: Synthetic oligonucleotide
  Target: ATXN2; (+) strand; PAM type: NRG; PAM sequence: CAG
tggtctcgaactcctgacct

SEQ ID NO: 45146 - DNA, 20 bp, Artificial Sequence
  Description of Artificial Sequence: Synthetic oligonucleotide
  Target: ATXN2; (+) strand; PAM type: NRG; PAM sequence: AGG
ggtctcgaactcctgacctc

SEQ ID NO: 45147 - DNA, 20 bp, Artificial Sequence
  Description of Artificial Sequence: Synthetic oligonucleotide
  Target: ATXN2; (+) strand; PAM type: NRG; PAM sequence: TGG
ctcaggtgatccacccacct

SEQ ID NO: 45148 - DNA, 20 bp, Artificial Sequence
  Description of Artificial Sequence: Synthetic oligonucleotide
  Target: ATXN2; (+) strand; PAM type: NRG; PAM sequence: AAG
ccacccaccttggcctccca

SEQ ID NO: 45149 - DNA, 20 bp, Artificial Sequence
  Description of Artificial Sequence: Synthetic oligonucleotide
  Target: ATXN2; (+) strand; PAM type: NRG; PAM sequence: TGG
accttggcctcccaaagtgc

SEQ ID NO: 45150 - DNA, 20 bp, Artificial Sequence
  Description of Artificial Sequence: Synthetic oligonucleotide
  Target: ATXN2; (+) strand; PAM type: NRG; PAM sequence: GGG
ccttggcctcccaaagtgct

SEQ ID NO: 45151 - DNA, 20 bp, Artificial Sequence
  Description of Artificial Sequence: Synthetic oligonucleotide
  Target: ATXN2; (+) strand; PAM type: NRG; PAM sequence: CAG
ctcccaaagtgctgggatta

SEQ ID NO: 45152 - DNA, 20 bp, Artificial Sequence
  Description of Artificial Sequence: Synthetic oligonucleotide
  Target: ATXN2; (+) strand; PAM type: NRG; PAM sequence: AGG
tcccaaagtgctgggattac

SEQ ID NO: 45153 - DNA, 20 bp, Artificial Sequence
  Description of Artificial Sequence: Synthetic oligonucleotide
  Target: ATXN2; (+) strand; PAM type: NRG; PAM sequence: GAG
agtgctgggattacaggtgt

SEQ ID NO: 45154 - DNA, 20 bp, Artificial Sequence
  Description of Artificial Sequence: Synthetic oligonucleotide
  Target: ATXN2; (+) strand; PAM type: NRG; PAM sequence: CGG
caggtgtgagcaaccatgcc

SEQ ID NO: 45155 - DNA, 20 bp, Artificial Sequence
  Description of Artificial Sequence: Synthetic oligonucleotide
  Target: ATXN2; (+) strand; PAM type: NRG; PAM sequence: TGG
aaaatatctcttttgtttaa

SEQ ID NO: 45156 - DNA, 20 bp, Artificial Sequence
  Description of Artificial Sequence: Synthetic oligonucleotide
  Target: ATXN2; (+) strand; PAM type: NRG; PAM sequence: TAG
tgtttaatggatgcactaat

SEQ ID NO: 45157 - DNA, 20 bp, Artificial Sequence
  Description of Artificial Sequence: Synthetic oligonucleotide
  Target: ATXN2; (+) strand; PAM type: NRG; PAM sequence: CGG
gcactaattagatatacctt

SEQ ID NO: 45158 - DNA, 20 bp, Artificial Sequence
  Description of Artificial Sequence: Synthetic oligonucleotide
  Target: ATXN2; (+) strand; PAM type: NRG; PAM sequence: GAG
actaattagatataccttcg

SEQ ID NO: 45159 - DNA, 20 bp, Artificial Sequence
  Description of Artificial Sequence: Synthetic oligonucleotide
  Target: ATXN2; (+) strand; PAM type: NRG; PAM sequence: CAG
atataccttcggagtacttg

SEQ ID NO: 45160 - DNA, 20 bp, Artificial Sequence
  Description of Artificial Sequence: Synthetic oligonucleotide
  Target: ATXN2; (+) strand; PAM type: NRG; PAM sequence: TGG
tacttgcagccaaatatatg

SEQ ID NO: 45161 - DNA, 20 bp, Artificial Sequence
  Description of Artificial Sequence: Synthetic oligonucleotide
  Target: ATXN2; (+) strand; PAM type: NRG; PAM sequence: CAG
tccatattcatgtctatgta

SEQ ID NO: 45162 - DNA, 20 bp, Artificial Sequence
  Description of Artificial Sequence: Synthetic oligonucleotide
  Target: ATXN2; (+) strand; PAM type: NRG; PAM sequence: TGG
atattcatgtctatgtacag

SEQ ID NO: 45163 - DNA, 20 bp, Artificial Sequence
  Description of Artificial Sequence: Synthetic oligonucleotide
  Target: ATXN2; (+) strand; PAM type: NRG; PAM sequence: CAG
atgtacagtggtcaatatcc

SEQ ID NO: 45164 - DNA, 20 bp, Artificial Sequence
  Description of Artificial Sequence: Synthetic oligonucleotide
  Target: ATXN2; (+) strand; PAM type: NRG; PAM sequence: TAG
tcccagcaaactcttgccat

SEQ ID NO: 45165 - DNA, 20 bp, Artificial Sequence
  Description of Artificial Sequence: Synthetic oligonucleotide
  Target: ATXN2; (+) strand; PAM type: NRG; PAM sequence: AAG
actcttgccattagtaaatg

SEQ ID NO: 45166 - DNA, 20 bp, Artificial Sequence
  Description of Artificial Sequence: Synthetic oligonucleotide
  Target: ATXN2; (+) strand; PAM type: NRG; PAM sequence: AAG
ttagtaaatgaagccattct

SEQ ID NO: 45167 - DNA, 20 bp, Artificial Sequence
  Description of Artificial Sequence: Synthetic oligonucleotide
  Target: ATXN2; (+) strand; PAM type: NRG; PAM sequence: TGG
gtaaatgaagccattctaag

SEQ ID NO: 45168 - DNA, 20 bp, Artificial Sequence
  Description of Artificial Sequence: Synthetic oligonucleotide
  Target: ATXN2; (+) strand; PAM type: NRG; PAM sequence: CAG
ctaagtggtttaacccctcc

SEQ ID NO: 45169 - DNA, 20 bp, Artificial Sequence
  Description of Artificial Sequence: Synthetic oligonucleotide
  Target: ATXN2; (+) strand; PAM type: NRG; PAM sequence: AAG
tatataaccactctgctaca

SEQ ID NO: 45170 - DNA, 20 bp, Artificial Sequence
  Description of Artificial Sequence: Synthetic oligonucleotide
  Target: ATXN2; (+) strand; PAM type: NRG; PAM sequence: CAG
aaccactctgctacaaagtt

SEQ ID NO: 45171 - DNA, 20 bp, Artificial Sequence
  Description of Artificial Sequence: Synthetic oligonucleotide
  Target: ATXN2; (+) strand; PAM type: NRG; PAM sequence: AGG
accactctgctacaaagttc

SEQ ID NO: 45172 - DNA, 20 bp, Artificial Sequence
  Description of Artificial Sequence: Synthetic oligonucleotide
  Target: ATXN2; (+) strand; PAM type: NRG; PAM sequence: CAG
gctacaaagttcaggcccta

SEQ ID NO: 45173 - DNA, 20 bp, Artificial Sequence
  Description of Artificial Sequence: Synthetic oligonucleotide
  Target: ATXN2; (+) strand; PAM type: NRG; PAM sequence: CAG
ccctacagtattacctgtct

SEQ ID NO: 45174 - DNA, 20 bp, Artificial Sequence
  Description of Artificial Sequence: Synthetic oligonucleotide
  Target: ATXN2; (+) strand; PAM type: NRG; PAM sequence: AAG
acagtattacctgtctcaga

SEQ ID NO: 45175 - DNA, 20 bp, Artificial Sequence
  Description of Artificial Sequence: Synthetic oligonucleotide
  Target: ATXN2; (+) strand; PAM type: NRG; PAM sequence: CAG
attacctgtctcagaaagtt

SEQ ID NO: 45176 - DNA, 20 bp, Artificial Sequence
  Description of Artificial Sequence: Synthetic oligonucleotide
  Target: ATXN2; (+) strand; PAM type: NRG; PAM sequence: AGG
ttacctgtctcagaaagttc

SEQ ID NO: 45177 - DNA, 20 bp, Artificial Sequence
  Description of Artificial Sequence: Synthetic oligonucleotide
  Target: ATXN2; (+) strand; PAM type: NRG; PAM sequence: TAG
cctgtctcagaaagttcagg

SEQ ID NO: 45178 - DNA, 20 bp, Artificial Sequence
  Description of Artificial Sequence: Synthetic oligonucleotide
  Target: ATXN2; (+) strand; PAM type: NRG; PAM sequence: CAG
gtctcagaaagttcaggtag

SEQ ID NO: 45179 - DNA, 20 bp, Artificial Sequence
  Description of Artificial Sequence: Synthetic oligonucleotide
  Target: ATXN2; (+) strand; PAM type: NRG; PAM sequence: AGG
tctcagaaagttcaggtagc

SEQ ID NO: 45180 - DNA, 20 bp, Artificial Sequence
  Description of Artificial Sequence: Synthetic oligonucleotide
  Target: ATXN2; (+) strand; PAM type: NRG; PAM sequence: TGG
gttcaggtagcaggcatacc

SEQ ID NO: 45181 - DNA, 20 bp, Artificial Sequence
  Description of Artificial Sequence: Synthetic oligonucleotide
  Target: ATXN2; (+) strand; PAM type: NRG; PAM sequence: AAG
ctcttctactaatgttattg

SEQ ID NO: 45182 - DNA, 20 bp, Artificial Sequence
  Description of Artificial Sequence: Synthetic oligonucleotide
  Target: ATXN2; (+) strand; PAM type: NRG; PAM sequence: GAG
cttctactaatgttattgaa

SEQ ID NO: 45183 - DNA, 20 bp, Artificial Sequence
  Description of Artificial Sequence: Synthetic oligonucleotide
  Target: ATXN2; (+) strand; PAM type: NRG; PAM sequence: AAG
tgaagagtactgacttatga

SEQ ID NO: 45184 - DNA, 20 bp, Artificial Sequence
  Description of Artificial Sequence: Synthetic oligonucleotide
  Target: ATXN2; (+) strand; PAM type: NRG; PAM sequence: TAG
ctgacttatgaaagcaaatg

SEQ ID NO: 45185 - DNA, 20 bp, Artificial Sequence
  Description of Artificial Sequence: Synthetic oligonucleotide
  Target: ATXN2; (+) strand; PAM type: NRG; PAM sequence: TAG
caaatgtagcatccacatgt

SEQ ID NO: 45186 - DNA, 20 bp, Artificial Sequence
  Description of Artificial Sequence: Synthetic oligonucleotide
  Target: ATXN2; (+) strand; PAM type: NRG; PAM sequence: TGG
tagctgaccatactgctgtc

SEQ ID NO: 45187 - DNA, 20 bp, Artificial Sequence
  Description of Artificial Sequence: Synthetic oligonucleotide
  Target: ATXN2; (+) strand; PAM type: NRG; PAM sequence: CAG
gaccatactgctgtctggca

SEQ ID NO: 45188 - DNA, 20 bp, Artificial Sequence
  Description of Artificial Sequence: Synthetic oligonucleotide
  Target: ATXN2; (+) strand; PAM type: NRG; PAM sequence: AGG
accatactgctgtctggcac

SEQ ID NO: 45189 - DNA, 20 bp, Artificial Sequence
  Description of Artificial Sequence: Synthetic oligonucleotide
  Target: ATXN2; (+) strand; PAM type: NRG; PAM sequence: TAG
ctggcacaggaaattttctc

SEQ ID NO: 45190 - DNA, 20 bp, Artificial Sequence
  Description of Artificial Sequence: Synthetic oligonucleotide
  Target: ATXN2; (+) strand; PAM type: NRG; PAM sequence: TGG
cacaggaaattttctctagt

SEQ ID NO: 45191 - DNA, 20 bp, Artificial Sequence
  Description of Artificial Sequence: Synthetic oligonucleotide
  Target: ATXN2; (+) strand; PAM type: NRG; PAM sequence: GGG
acaggaaattttctctagtt

SEQ ID NO: 45192 - DNA, 20 bp, Artificial Sequence
  Description of Artificial Sequence: Synthetic oligonucleotide
  Target: ATXN2; (+) strand; PAM type: NRG; PAM sequence: GAG
aggaaattttctctagttgg

SEQ ID NO: 45193 - DNA, 20 bp, Artificial Sequence
  Description of Artificial Sequence: Synthetic oligonucleotide
  Target: ATXN2; (+) strand; PAM type: NRG; PAM sequence: TAG
aattttctctagttgggagt

SEQ ID NO: 45194 - DNA, 20 bp, Artificial Sequence
  Description of Artificial Sequence: Synthetic oligonucleotide
  Target: ATXN2; (+) strand; PAM type: NRG; PAM sequence: CAG
ctctagttgggagttagact

SEQ ID NO: 45195 - DNA, 20 bp, Artificial Sequence
  Description of Artificial Sequence: Synthetic oligonucleotide
  Target: ATXN2; (+) strand; PAM type: NRG; PAM sequence: AAG
gagttagactcagctaaata

SEQ ID NO: 45196 - DNA, 20 bp, Artificial Sequence
  Description of Artificial Sequence: Synthetic oligonucleotide
  Target: ATXN2; (+) strand; PAM type: NRG; PAM sequence: AGG
agttagactcagctaaataa

SEQ ID NO: 45197 - DNA, 20 bp, Artificial Sequence
  Description of Artificial Sequence: Synthetic oligonucleotide
  Target: ATXN2; (+) strand; PAM type: NRG; PAM sequence: TGG
tcagctaaataaaggcccac

SEQ ID NO: 45198 - DNA, 20 bp, Artificial Sequence
  Description of Artificial Sequence: Synthetic oligonucleotide
  Target: ATXN2; (+) strand; PAM type: NRG; PAM sequence: GGG
cagctaaataaaggcccact

SEQ ID NO: 45199 - DNA, 20 bp, Artificial Sequence
  Description of Artificial Sequence: Synthetic oligonucleotide
  Target: ATXN2; (+) strand; PAM type: NRG; PAM sequence: TGG
aaaggcccactgggcaatga

SEQ ID NO: 45200 - DNA, 20 bp, Artificial Sequence
  Description of Artificial Sequence: Synthetic oligonucleotide
  Target: ATXN2; (+) strand; PAM type: NRG; PAM sequence: TAG
ccactgggcaatgatggcac

SEQ ID NO: 45201 - DNA, 20 bp, Artificial Sequence
  Description of Artificial Sequence: Synthetic oligonucleotide
  Target: ATXN2; (+) strand; PAM type: NRG; PAM sequence: AGG
cactgggcaatgatggcact

SEQ ID NO: 45202 - DNA, 20 bp, Artificial Sequence
  Description of Artificial Sequence: Synthetic oligonucleotide
  Target: ATXN2; (+) strand; PAM type: NRG; PAM sequence: TAG
tggcactaggaaacgctctg

SEQ ID NO: 45203 - DNA, 20 bp, Artificial Sequence
  Description of Artificial Sequence: Synthetic oligonucleotide
  Target: ATXN2; (+) strand; PAM type: NRG; PAM sequence: CAG
taggaaacgctctgtagata

SEQ ID NO: 45204 - DNA, 20 bp, Artificial Sequence
  Description of Artificial Sequence: Synthetic oligonucleotide
  Target: ATXN2; (+) strand; PAM type: NRG; PAM sequence: AGG
aggaaacgctctgtagatac

SEQ ID NO: 45205 - DNA, 20 bp, Artificial Sequence
  Description of Artificial Sequence: Synthetic oligonucleotide
  Target: ATXN2; (+) strand; PAM type: NRG; PAM sequence: TGG
caggcttgcatttaaatgac

SEQ ID NO: 45206 - DNA, 20 bp, Artificial Sequence
  Description of Artificial Sequence: Synthetic oligonucleotide
  Target: ATXN2; (+) strand; PAM type: NRG; PAM sequence: TAG
catttaaatgactggaccca

SEQ ID NO: 45207 - DNA, 20 bp, Artificial Sequence
  Description of Artificial Sequence: Synthetic oligonucleotide
  Target: ATXN2; (+) strand; PAM type: NRG; PAM sequence: AGG
atttaaatgactggacccat

SEQ ID NO: 45208 - DNA, 20 bp, Artificial Sequence
  Description of Artificial Sequence: Synthetic oligonucleotide
  Target: ATXN2; (+) strand; PAM type: NRG; PAM sequence: GGG
tttaaatgactggacccata

SEQ ID NO: 45209 - DNA, 20 bp, Artificial Sequence
  Description of Artificial Sequence: Synthetic oligonucleotide
  Target: ATXN2; (+) strand; PAM type: NRG; PAM sequence: AAG
ggtaccacctactacgaact

SEQ ID NO: 45210 - DNA, 20 bp, Artificial Sequence
  Description of Artificial Sequence: Synthetic oligonucleotide
  Target: ATXN2; (+) strand; PAM type: NRG; PAM sequence: AGG
gtaccacctactacgaacta

SEQ ID NO: 45211 - DNA, 20 bp, Artificial Sequence
  Description of Artificial Sequence: Synthetic oligonucleotide
  Target: ATXN2; (+) strand; PAM type: NRG; PAM sequence: GAG
accacctactacgaactaag

SEQ ID NO: 45212 - DNA, 20 bp, Artificial Sequence
  Description of Artificial Sequence: Synthetic oligonucleotide
  Target: ATXN2; (+) strand; PAM type: NRG; PAM sequence: TGG
gagtaatacttctgctgatc

SEQ ID NO: 45213 - DNA, 20 bp, Artificial Sequence
  Description of Artificial Sequence: Synthetic oligonucleotide
  Target: ATXN2; (+) strand; PAM type: NRG; PAM sequence: GAG
tctgctgatctggctctgct

SEQ ID NO: 45214 - DNA, 20 bp, Artificial Sequence
  Description of Artificial Sequence: Synthetic oligonucleotide
  Target: ATXN2; (+) strand; PAM type: NRG; PAM sequence: AGG
ctgctgatctggctctgctg

SEQ ID NO: 45215 - DNA, 20 bp, Artificial Sequence
  Description of Artificial Sequence: Synthetic oligonucleotide
  Target: ATXN2; (+) strand; PAM type: NRG; PAM sequence: AAG
ctggctctgctgaggaatat

SEQ ID NO: 45216 - DNA, 20 bp, Artificial Sequence
  Description of Artificial Sequence: Synthetic oligonucleotide
  Target: ATXN2; (+) strand; PAM type: NRG; PAM sequence: CAG
tgctgaggaatataagctcc

SEQ ID NO: 45217 - DNA, 20 bp, Artificial Sequence
  Description of Artificial Sequence: Synthetic oligonucleotide
  Target: ATXN2; (+) strand; PAM type: NRG; PAM sequence: CAG
tcccagccactgttccttcc

SEQ ID NO: 45218 - DNA, 20 bp, Artificial Sequence
  Description of Artificial Sequence: Synthetic oligonucleotide
  Target: ATXN2; (+) strand; PAM type: NRG; PAM sequence: AAG
ctgttccttcccagtactgt

SEQ ID NO: 45219 - DNA, 20 bp, Artificial Sequence
  Description of Artificial Sequence: Synthetic oligonucleotide
  Target: ATXN2; (+) strand; PAM type: NRG; PAM sequence: AAG
cagtactgtaagttgccact

SEQ ID NO: 45220 - DNA, 20 bp, Artificial Sequence
  Description of Artificial Sequence: Synthetic oligonucleotide
  Target: ATXN2; (+) strand; PAM type: NRG; PAM sequence: GAG
gtactgtaagttgccactaa

SEQ ID NO: 45221 - DNA, 20 bp, Artificial Sequence
  Description of Artificial Sequence: Synthetic oligonucleotide
  Target: ATXN2; (+) strand; PAM type: NRG; PAM sequence: AGG
tactgtaagttgccactaag

SEQ ID NO: 45222 - DNA, 20 bp, Artificial Sequence
  Description of Artificial Sequence: Synthetic oligonucleotide
  Target: ATXN2; (+) strand; PAM type: NRG; PAM sequence: GAG
ctgtaagttgccactaagag

SEQ ID NO: 45223 - DNA, 20 bp, Artificial Sequence
  Description of Artificial Sequence: Synthetic oligonucleotide
  Target: ATXN2; (+) strand; PAM type: NRG; PAM sequence: AGG
tgtaagttgccactaagagg

SEQ ID NO: 45224 - DNA, 20 bp, Artificial Sequence
  Description of Artificial Sequence: Synthetic oligonucleotide
  Target: ATXN2; (+) strand; PAM type: NRG; PAM sequence: AAG
aagttgccactaagaggagg

SEQ ID NO: 45225 - DNA, 20 bp, Artificial Sequence
  Description of Artificial Sequence: Synthetic oligonucleotide
  Target: ATXN2; (+) strand; PAM type: NRG; PAM sequence: AGG
agttgccactaagaggagga

SEQ ID NO: 45226 - DNA, 20 bp, Artificial Sequence
  Description of Artificial Sequence: Synthetic oligonucleotide
  Target: ATXN2; (+) strand; PAM type: NRG; PAM sequence: GGG
gttgccactaagaggaggaa

SEQ ID NO: 45227 - DNA, 20 bp, Artificial Sequence
  Description of Artificial Sequence: Synthetic oligonucleotide
  Target: ATXN2; (+) strand; PAM type: NRG; PAM sequence: AAG
aacacacaatactcctacaa

SEQ ID NO: 45228 - DNA, 20 bp, Artificial Sequence
  Description of Artificial Sequence: Synthetic oligonucleotide
  Target: ATXN2; (+) strand; PAM type: NRG; PAM sequence: GAG
cacacaatactcctacaaaa

SEQ ID NO: 45229 - DNA, 20 bp, Artificial Sequence
  Description of Artificial Sequence: Synthetic oligonucleotide
  Target: ATXN2; (+) strand; PAM type: NRG; PAM sequence: AGG
acacaatactcctacaaaag

SEQ ID NO: 45230 - DNA, 20 bp, Artificial Sequence
  Description of Artificial Sequence: Synthetic oligonucleotide
  Target: ATXN2; (+) strand; PAM type: NRG; PAM sequence: CAG
tcctacaaaagaggttattc

SEQ ID NO: 45231 - DNA, 20 bp, Artificial Sequence
  Description of Artificial Sequence: Synthetic oligonucleotide
  Target: ATXN2; (+) strand; PAM type: NRG; PAM sequence: TGG
acaaaagaggttattccaga

SEQ ID NO: 45232 - DNA, 20 bp, Artificial Sequence
  Description of Artificial Sequence: Synthetic oligonucleotide
  Target: ATXN2; (+) strand; PAM type: NRG; PAM sequence: TGG
ttccagatggattttttatt

SEQ ID NO: 45233 - DNA, 20 bp, Artificial Sequence
  Description of Artificial Sequence: Synthetic oligonucleotide
  Target: ATXN2; (+) strand; PAM type: NRG; PAM sequence: TGG
aactgtcattgtctccctaa

SEQ ID NO: 45234 - DNA, 20 bp, Artificial Sequence
  Description of Artificial Sequence: Synthetic oligonucleotide
  Target: ATXN2; (+) strand; PAM type: NRG; PAM sequence: GGG
actgtcattgtctccctaat

SEQ ID NO: 45235 - DNA, 20 bp, Artificial Sequence
  Description of Artificial Sequence: Synthetic oligonucleotide
  Target: ATXN2; (+) strand; PAM type: NRG; PAM sequence: AAG
cattgtctccctaatgggca

SEQ ID NO: 45236 - DNA, 20 bp, Artificial Sequence
  Description of Artificial Sequence: Synthetic oligonucleotide
  Target: ATXN2; (+) strand; PAM type: NRG; PAM sequence: AAG
gggcaaagtgatgccaaaat

SEQ ID NO: 45237 - DNA, 20 bp, Artificial Sequence
  Description of Artificial Sequence: Synthetic oligonucleotide
  Target: ATXN2; (+) strand; PAM type: NRG; PAM sequence: GAG
gatgccaaaataagaaatct

SEQ ID NO: 45238 - DNA, 20 bp, Artificial Sequence
  Description of Artificial Sequence: Synthetic oligonucleotide
  Target: ATXN2; (+) strand; PAM type: NRG; PAM sequence: CAG
ccaaaataagaaatctgagc

SEQ ID NO: 45239 - DNA, 20 bp, Artificial Sequence
  Description of Artificial Sequence: Synthetic oligonucleotide
  Target: ATXN2; (+) strand; PAM type: NRG; PAM sequence: AAG
aaatctgagccagcaaattt

SEQ ID NO: 45240 - DNA, 20 bp, Artificial Sequence
  Description of Artificial Sequence: Synthetic oligonucleotide
  Target: ATXN2; (+) strand; PAM type: NRG; PAM sequence: TGG
tgagccagcaaatttaagca

SEQ ID NO: 45241 - DNA, 20 bp, Artificial Sequence
  Description of Artificial Sequence: Synthetic oligonucleotide
  Target: ATXN2; (+) strand; PAM type: NRG; PAM sequence: AAG
aaatttaagcatggaacttc

SEQ ID NO: 45242 - DNA, 20 bp, Artificial Sequence
  Description of Artificial Sequence: Synthetic oligonucleotide
  Target: ATXN2; (+) strand; PAM type: NRG; PAM sequence: TAG
taagcatggaacttcaagcc

SEQ ID NO: 45243 - DNA, 20 bp, Artificial Sequence
  Description of Artificial Sequence: Synthetic oligonucleotide
  Target: ATXN2; (+) strand; PAM type: NRG; PAM sequence: TAG
aacctcttcttatcccaaac

SEQ ID NO: 45244 - DNA, 20 bp, Artificial Sequence
  Description of Artificial Sequence: Synthetic oligonucleotide
  Target: ATXN2; (+) strand; PAM type: NRG; PAM sequence: AGG
acctcttcttatcccaaact

SEQ ID NO: 45245 - DNA, 20 bp, Artificial Sequence
  Description of Artificial Sequence: Synthetic oligonucleotide
  Target: ATXN2; (+) strand; PAM type: NRG; PAM sequence: TGG
ttcttatcccaaactaggtg

SEQ ID NO: 45246 - DNA, 20 bp, Artificial Sequence
  Description of Artificial Sequence: Synthetic oligonucleotide
  Target: ATXN2; (+) strand; PAM type: NRG; PAM sequence: GGG
tcttatcccaaactaggtgt

SEQ ID NO: 45247 - DNA, 20 bp, Artificial Sequence
  Description of Artificial Sequence: Synthetic oligonucleotide
  Target: ATXN2; (+) strand; PAM type: NRG; PAM sequence: TAG
tatcccaaactaggtgtggg

SEQ ID NO: 45248 - DNA, 20 bp, Artificial Sequence
  Description of Artificial Sequence: Synthetic oligonucleotide
  Target: ATXN2; (+) strand; PAM type: NRG; PAM sequence: AGG
atcccaaactaggtgtgggt

SEQ ID NO: 45249 - DNA, 20 bp, Artificial Sequence
  Description of Artificial Sequence: Synthetic oligonucleotide
  Target: ATXN2; (+) strand; PAM type: NRG; PAM sequence: GAG
aactaggtgtgggtaggtat

SEQ ID NO: 45250 - DNA, 20 bp, Artificial Sequence
  Description of Artificial Sequence: Synthetic oligonucleotide
  Target: ATXN2; (+) strand; PAM type: NRG; PAM sequence: CAG
gagtgtgtgtacctgtacat

SEQ ID NO: 45251 - DNA, 20 bp, Artificial Sequence
  Description of Artificial Sequence: Synthetic oligonucleotide
  Target: ATXN2; (+) strand; PAM type: NRG; PAM sequence: AGG
agtgtgtgtacctgtacatc

SEQ ID NO: 45252 - DNA, 20 bp, Artificial Sequence
  Description of Artificial Sequence: Synthetic oligonucleotide
  Target: ATXN2; (+) strand; PAM type: NRG; PAM sequence: GGG
gtgtgtgtacctgtacatca

SEQ ID NO: 45253 - DNA, 20 bp, Artificial Sequence
  Description of Artificial Sequence: Synthetic oligonucleotide
  Target: ATXN2; (+) strand; PAM type: NRG; PAM sequence: AAG
acctgtacatcagggaataa

SEQ ID NO: 45254 - DNA, 20 bp, Artificial Sequence
  Description of Artificial Sequence: Synthetic oligonucleotide
  Target: ATXN2; (+) strand; PAM type: NRG; PAM sequence: TGG
taaaagcattaatccacctc

SEQ ID NO: 45255 - DNA, 20 bp, Artificial Sequence
  Description of Artificial Sequence: Synthetic oligonucleotide
  Target: ATXN2; (+) strand; PAM type: NRG; PAM sequence: GGG
aaaagcattaatccacctct

SEQ ID NO: 45256 - DNA, 20 bp, Artificial Sequence
  Description of Artificial Sequence: Synthetic oligonucleotide
  Target: ATXN2; (+) strand; PAM type: NRG; PAM sequence: TAG
cattaatccacctctgggct

SEQ ID NO: 45257 - DNA, 20 bp, Artificial Sequence
  Description of Artificial Sequence: Synthetic oligonucleotide
  Target: ATXN2; (+) strand; PAM type: NRG; PAM sequence: CAG
ccacctctgggcttagctgc

SEQ ID NO: 45258 - DNA, 20 bp, Artificial Sequence
  Description of Artificial Sequence: Synthetic oligonucleotide
  Target: ATXN2; (+) strand; PAM type: NRG; PAM sequence: CAG
ggcttagctgccagctccac

SEQ ID NO: 45259 - DNA, 20 bp, Artificial Sequence
  Description of Artificial Sequence: Synthetic oligonucleotide
  Target: ATXN2; (+) strand; PAM type: NRG; PAM sequence: CAG
ttagctgccagctccaccag

SEQ ID NO: 45260 - DNA, 20 bp, Artificial Sequence
  Description of Artificial Sequence: Synthetic oligonucleotide
  Target: ATXN2; (+) strand; PAM type: NRG; PAM sequence: TAG
agcagcactactcccattgc

SEQ ID NO: 45261 - DNA, 20 bp, Artificial Sequence
  Description of Artificial Sequence: Synthetic oligonucleotide
  Target: ATXN2; (+) strand; PAM type: NRG; PAM sequence: AAG
ctcccattgctagcaattct

SEQ ID NO: 45262 - DNA, 20 bp, Artificial Sequence
  Description of Artificial Sequence: Synthetic oligonucleotide
  Target: ATXN2; (+) strand; PAM type: NRG; PAM sequence: GAG
cccattgctagcaattctaa

SEQ ID NO: 45263 - DNA, 20 bp, Artificial Sequence
  Description of Artificial Sequence: Synthetic oligonucleotide
  Target: ATXN2; (+) strand; PAM type: NRG; PAM sequence: AAG
tgctagcaattctaagagcc

SEQ ID NO: 45264 - DNA, 20 bp, Artificial Sequence
  Description of Artificial Sequence: Synthetic oligonucleotide
  Target: ATXN2; (+) strand; PAM type: NRG; PAM sequence: GAG
ctagcaattctaagagccaa

SEQ ID NO: 45265 - DNA, 20 bp, Artificial Sequence
  Description of Artificial Sequence: Synthetic oligonucleotide
  Target: ATXN2; (+) strand; PAM type: NRG; PAM sequence: GAG
ctaagagccaagagtgtgct

SEQ ID NO: 45266 - DNA, 20 bp, Artificial Sequence
  Description of Artificial Sequence: Synthetic oligonucleotide
  Target: ATXN2; (+) strand; PAM type: NRG; PAM sequence: AGG
taagagccaagagtgtgctg

SEQ ID NO: 45267 - DNA, 20 bp, Artificial Sequence
  Description of Artificial Sequence: Synthetic oligonucleotide
  Target: ATXN2; (+) strand; PAM type: NRG; PAM sequence: GGG
aagagccaagagtgtgctga

SEQ ID NO: 45268 - DNA, 20 bp, Artificial Sequence
  Description of Artificial Sequence: Synthetic oligonucleotide
  Target: ATXN2; (+) strand; PAM type: NRG; PAM sequence: GAG
gagccaagagtgtgctgagg

SEQ ID NO: 45269 - DNA, 20 bp, Artificial Sequence
  Description of Artificial Sequence: Synthetic oligonucleotide
  Target: ATXN2; (+) strand; PAM type: NRG; PAM sequence: CAG
agtgtgctgagggagttccc

SEQ ID NO: 45270 - DNA, 20 bp, Artificial Sequence
  Description of Artificial Sequence: Synthetic oligonucleotide
  Target: ATXN2; (+) strand; PAM type: NRG; PAM sequence: GAG
tgtgctgagggagttcccca

SEQ ID NO: 45271 - DNA, 20 bp, Artificial Sequence
  Description of Artificial Sequence: Synthetic oligonucleotide
  Target: ATXN2; (+) strand; PAM type: NRG; PAM sequence: CAG
gctgagggagttccccagag

SEQ ID NO: 45272 - DNA, 20 bp, Artificial Sequence
  Description of Artificial Sequence: Synthetic oligonucleotide
  Target: ATXN2; (+) strand; PAM type: NRG; PAM sequence: CAG
gagggagttccccagagcag

SEQ ID NO: 45273 - DNA, 20 bp, Artificial Sequence
  Description of Artificial Sequence: Synthetic oligonucleotide
  Target: ATXN2; (+) strand; PAM type: NRG; PAM sequence: AGG
agggagttccccagagcagc

SEQ ID NO: 45274 - DNA, 20 bp, Artificial Sequence
  Description of Artificial Sequence: Synthetic oligonucleotide
  Target: ATXN2; (+) strand; PAM type: NRG; PAM sequence: CAG
ttccccagagcagcaggact

SEQ ID NO: 45275 - DNA, 20 bp, Artificial Sequence
  Description of Artificial Sequence: Synthetic oligonucleotide
  Target: ATXN2; (+) strand; PAM type: NRG; PAM sequence: TGG
ccagagcagcaggactcagc

SEQ ID NO: 45276 - DNA, 20 bp, Artificial Sequence
  Description of Artificial Sequence: Synthetic oligonucleotide
  Target: ATXN2; (+) strand; PAM type: NRG; PAM sequence: GGG
cagagcagcaggactcagct

SEQ ID NO: 45277 - DNA, 20 bp, Artificial Sequence
  Description of Artificial Sequence: Synthetic oligonucleotide
  Target: ATXN2; (+) strand; PAM type: NRG; PAM sequence: GGG
agagcagcaggactcagctg

SEQ ID NO: 45278 - DNA, 20 bp, Artificial Sequence
  Description of Artificial Sequence: Synthetic oligonucleotide
  Target: ATXN2; (+) strand; PAM type: NRG; PAM sequence: GGG
gagcagcaggactcagctgg

SEQ ID NO: 45279 - DNA, 20 bp, Artificial Sequence
  Description of Artificial Sequence: Synthetic oligonucleotide
  Target: ATXN2; (+) strand; PAM type: NRG; PAM sequence: TGG
cagcaggactcagctggggg

SEQ ID NO: 45280 - DNA, 20 bp, Artificial Sequence
  Description of Artificial Sequence: Synthetic oligonucleotide
  Target: ATXN2; (+) strand; PAM type: NRG; PAM sequence: TGG
ggactcagctgggggtggaa

SEQ ID NO: 45281 - DNA, 20 bp, Artificial Sequence
  Description of Artificial Sequence: Synthetic oligonucleotide
  Target: ATXN2; (+) strand; PAM type: NRG; PAM sequence: GAG
actcagctgggggtggaatg

SEQ ID NO: 45282 - DNA, 20 bp, Artificial Sequence
  Description of Artificial Sequence: Synthetic oligonucleotide
  Target: ATXN2; (+) strand; PAM type: NRG; PAM sequence: TAG
gggtggaatggagcattcac

SEQ ID NO: 45283 - DNA, 20 bp, Artificial Sequence
  Description of Artificial Sequence: Synthetic oligonucleotide
  Target: ATXN2; (+) strand; PAM type: NRG; PAM sequence: TGG
aatggagcattcactagaaa

SEQ ID NO: 45284 - DNA, 20 bp, Artificial Sequence
  Description of Artificial Sequence: Synthetic oligonucleotide
  Target: ATXN2; (+) strand; PAM type: NRG; PAM sequence: TGG
cactagaaatggctgaattt

SEQ ID NO: 45285 - DNA, 20 bp, Artificial Sequence
  Description of Artificial Sequence: Synthetic oligonucleotide
  Target: ATXN2; (+) strand; PAM type: NRG; PAM sequence: AAG
gaattttggaaaatctctct

SEQ ID NO: 45286 - DNA, 20 bp, Artificial Sequence
  Description of Artificial Sequence: Synthetic oligonucleotide
  Target: ATXN2; (+) strand; PAM type: NRG; PAM sequence: GAG
attttggaaaatctctctaa

SEQ ID NO: 45287 - DNA, 20 bp, Artificial Sequence
  Description of Artificial Sequence: Synthetic oligonucleotide
  Target: ATXN2; (+) strand; PAM type: NRG; PAM sequence: AAG
aaatctctctaagagattct

SEQ ID NO: 45288 - DNA, 20 bp, Artificial Sequence
  Description of Artificial Sequence: Synthetic oligonucleotide
  Target: ATXN2; (+) strand; PAM type: NRG; PAM sequence: GAG
atctctctaagagattctaa

SEQ ID NO: 45289 - DNA, 20 bp, Artificial Sequence
  Description of Artificial Sequence: Synthetic oligonucleotide
  Target: ATXN2; (+) strand; PAM type: NRG; PAM sequence: AAG
caacacctcatctttgctga

SEQ ID NO: 45290 - DNA, 20 bp, Artificial Sequence
  Description of Artificial Sequence: Synthetic oligonucleotide
  Target: ATXN2; (+) strand; PAM type: NRG; PAM sequence: TGG
tctttgctgaaagctactga

SEQ ID NO: 45291 - DNA, 20 bp, Artificial Sequence
  Description of Artificial Sequence: Synthetic oligonucleotide
  Target: ATXN2; (+) strand; PAM type: NRG; PAM sequence: TAG
ctgaaagctactgatggcac

SEQ ID NO: 45292 - DNA, 20 bp, Artificial Sequence
  Description of Artificial Sequence: Synthetic oligonucleotide
  Target: ATXN2; (+) strand; PAM type: NRG; PAM sequence: AAG
ttcttctctacattatctta

SEQ ID NO: 45293 - DNA, 20 bp, Artificial Sequence
  Description of Artificial Sequence: Synthetic oligonucleotide
  Target: ATXN2; (+) strand; PAM type: NRG; PAM sequence: TGG
tacattatcttaaagttatg

SEQ ID NO: 45294 - DNA, 20 bp, Artificial Sequence
  Description of Artificial Sequence: Synthetic oligonucleotide
  Target: ATXN2; (+) strand; PAM type: NRG; PAM sequence: TGG
cttaaagttatgtggattgc

SEQ ID NO: 45295 - DNA, 20 bp, Artificial Sequence
  Description of Artificial Sequence: Synthetic oligonucleotide
  Target: ATXN2; (+) strand; PAM type: NRG; PAM sequence: TAG
attgctggcaaaaattaatt

SEQ ID NO: 45296 - DNA, 20 bp, Artificial Sequence
  Description of Artificial Sequence: Synthetic oligonucleotide
  Target: ATXN2; (+) strand; PAM type: NRG; PAM sequence: AAG
atttagccatgtgtattttc

SEQ ID NO: 45297 - DNA, 20 bp, Artificial Sequence
  Description of Artificial Sequence: Synthetic oligonucleotide
  Target: ATXN2; (+) strand; PAM type: NRG; PAM sequence: AAG
tcaagaatgtaaaatgttcc

SEQ ID NO: 45298 - DNA, 20 bp, Artificial Sequence
  Description of Artificial Sequence: Synthetic oligonucleotide
  Target: ATXN2; (+) strand; PAM type: NRG; PAM sequence: AAG
atcaaataataacctacctt

SEQ ID NO: 45299 - DNA, 20 bp, Artificial Sequence
  Description of Artificial Sequence: Synthetic oligonucleotide
  Target: ATXN2; (+) strand; PAM type: NRG; PAM sequence: TAG
ccctttaattctcacaacac

SEQ ID NO: 45300 - DNA, 20 bp, Artificial Sequence
  Description of Artificial Sequence: Synthetic oligonucleotide
  Target: ATXN2; (+) strand; PAM type: NRG; PAM sequence: TAG
ctagacaaaaaactacacta

SEQ ID NO: 45301 - DNA, 20 bp, Artificial Sequence
  Description of Artificial Sequence: Synthetic oligonucleotide
  Target: ATXN2; (+) strand; PAM type: NRG; PAM sequence: AGG
tagacaaaaaactacactat

SEQ ID NO: 45302 - DNA, 20 bp, Artificial Sequence
  Description of Artificial Sequence: Synthetic oligonucleotide
  Target: ATXN2; (+) strand; PAM type: NRG; PAM sequence: GAG
actataggaaaattccaaac

SEQ ID NO: 45303 - DNA, 20 bp, Artificial Sequence
  Description of Artificial Sequence: Synthetic oligonucleotide
  Target: ATXN2; (+) strand; PAM type: NRG; PAM sequence: TGG
aaacgagtcatattatcttc

SEQ ID NO: 45304 - DNA, 20 bp, Artificial Sequence
  Description of Artificial Sequence: Synthetic oligonucleotide
  Target: ATXN2; (+) strand; PAM type: NRG; PAM sequence: AAG
cgagtcatattatcttctgg

SEQ ID NO: 45305 - DNA, 20 bp, Artificial Sequence
  Description of Artificial Sequence: Synthetic oligonucleotide
  Target: ATXN2; (+) strand; PAM type: NRG; PAM sequence: AAG
gtcatattatcttctggaag

SEQ ID NO: 45306 - DNA, 20 bp, Artificial Sequence
  Description of Artificial Sequence: Synthetic oligonucleotide
  Target: ATXN2; (+) strand; PAM type: NRG; PAM sequence: CAG
ttatcttctggaagaagcaa

SEQ ID NO: 45307 - DNA, 20 bp, Artificial Sequence
  Description of Artificial Sequence: Synthetic oligonucleotide
  Target: ATXN2; (+) strand; PAM type: NRG; PAM sequence: AGG
tatcttctggaagaagcaac

SEQ ID NO: 45308 - DNA, 20 bp, Artificial Sequence
  Description of Artificial Sequence: Synthetic oligonucleotide
  Target: ATXN2; (+) strand; PAM type: NRG; PAM sequence: AAG
aggactgttcctttacgtct

SEQ ID NO: 45309 - DNA, 20 bp, Artificial Sequence
  Description of Artificial Sequence: Synthetic oligonucleotide
  Target: ATXN2; (+) strand; PAM type: NRG; PAM sequence: TAG
tgttaatgtcttaatcatac

SEQ ID NO: 45310 - DNA, 20 bp, Artificial Sequence
  Description of Artificial Sequence: Synthetic oligonucleotide
  Target: ATXN2; (+) strand; PAM type: NRG; PAM sequence: AAG
taatcatactagtttttgaa

SEQ ID NO: 45311 - DNA, 20 bp, Artificial Sequence
  Description of Artificial Sequence: Synthetic oligonucleotide
  Target: ATXN2; (+) strand; PAM type: NRG; PAM sequence: AAG
tttttgaaaagcacacattt

SEQ ID NO: 45312 - DNA, 20 bp, Artificial Sequence
  Description of Artificial Sequence: Synthetic oligonucleotide
  Target: ATXN2; (+) strand; PAM type: NRG; PAM sequence: AAG
agcacacatttaagtaaata

SEQ ID NO: 45313 - DNA, 20 bp, Artificial Sequence
  Description of Artificial Sequence: Synthetic oligonucleotide
  Target: ATXN2; (+) strand; PAM type: NRG; PAM sequence: TAG
aagtaaataaagcatttatt

SEQ ID NO: 45314 - DNA, 20 bp, Artificial Sequence
  Description of Artificial Sequence: Synthetic oligonucleotide
  Target: ATXN2; (+) strand; PAM type: NRG; PAM sequence: TAG
aaataaagcatttatttaga

SEQ ID NO: 45315 - DNA, 20 bp, Artificial Sequence
  Description of Artificial Sequence: Synthetic oligonucleotide
  Target: ATXN2; (+) strand; PAM type: NRG; PAM sequence: AAG
taaagcatttatttagatag

SEQ ID NO: 45316 - DNA, 20 bp, Artificial Sequence
  Description of Artificial Sequence: Synthetic oligonucleotide
  Target: ATXN2; (+) strand; PAM type: NRG; PAM sequence: CAG
catttatttagatagaagct

SEQ ID NO: 45317 - DNA, 20 bp, Artificial Sequence
  Description of Artificial Sequence: Synthetic oligonucleotide
  Target: ATXN2; (+) strand; PAM type: NRG; PAM sequence: AAG
aaacaatactcttttgattc

SEQ ID NO: 45318 - DNA, 20 bp, Artificial Sequence
  Description of Artificial Sequence: Synthetic oligonucleotide
  Target: ATXN2; (+) strand; PAM type: NRG; PAM sequence: AAG
tcttttgattcaagaaatta

SEQ ID NO: 45319 - DNA, 20 bp, Artificial Sequence
  Description of Artificial Sequence: Synthetic oligonucleotide
  Target: ATXN2; (+) strand; PAM type: NRG; PAM sequence: AAG
attcaagaaattaaagctcg

SEQ ID NO: 45320 - DNA, 20 bp, Artificial Sequence
  Description of Artificial Sequence: Synthetic oligonucleotide
  Target: ATXN2; (+) strand; PAM type: NRG; PAM sequence: CAG
caagaaattaaagctcgaag

SEQ ID NO: 45321 - DNA, 20 bp, Artificial Sequence
  Description of Artificial Sequence: Synthetic oligonucleotide
  Target: ATXN2; (+) strand; PAM type: NRG; PAM sequence: TAG
aaattaaagctcgaagcagc

SEQ ID NO: 45322 - DNA, 20 bp, Artificial Sequence
  Description of Artificial Sequence: Synthetic oligonucleotide
  Target: ATXN2; (+) strand; PAM type: NRG; PAM sequence: GAG
attaaagctcgaagcagcta

SEQ ID NO: 45323 - DNA, 20 bp, Artificial Sequence
  Description of Artificial Sequence: Synthetic oligonucleotide
  Target: ATXN2; (+) strand; PAM type: NRG; PAM sequence: TAG
gaagcagctagagattttta

SEQ ID NO: 45324 - DNA, 20 bp, Artificial Sequence
  Description of Artificial Sequence: Synthetic oligonucleotide
  Target: ATXN2; (+) strand; PAM type: NRG; PAM sequence: CGG
tttttatagaaccatataaa

SEQ ID NO: 45325 - DNA, 20 bp, Artificial Sequence
  Description of Artificial Sequence: Synthetic oligonucleotide
  Target: ATXN2; (+) strand; PAM type: NRG; PAM sequence: CAG
aacggatttttttctcacta

SEQ ID NO: 45326 - DNA, 20 bp, Artificial Sequence
  Description of Artificial Sequence: Synthetic oligonucleotide
  Target: ATXN2; (+) strand; PAM type: NRG; PAM sequence: AGG
acggatttttttctcactac

SEQ ID NO: 45327 - DNA, 20 bp, Artificial Sequence
  Description of Artificial Sequence: Synthetic oligonucleotide
  Target: ATXN2; (+) strand; PAM type: NRG; PAM sequence: GGG
cggatttttttctcactaca

SEQ ID NO: 45328 - DNA, 20 bp, Artificial Sequence
  Description of Artificial Sequence: Synthetic oligonucleotide
  Target: ATXN2; (+) strand; PAM type: NRG; PAM sequence: TAG
tgtgtgtgtgtgaaaatatt

SEQ ID NO: 45329 - DNA, 20 bp, Artificial Sequence
  Description of Artificial Sequence: Synthetic oligonucleotide
  Target: ATXN2; (+) strand; PAM type: NRG; PAM sequence: AAG
tgtgtgtgaaaatatttaga

SEQ ID NO: 45330 - DNA, 20 bp, Artificial Sequence
  Description of Artificial Sequence: Synthetic oligonucleotide
  Target: ATXN2; (+) strand; PAM type: NRG; PAM sequence: GAG
gaaaatatttagaaagtctt

SEQ ID NO: 45331 - DNA, 20 bp, Artificial Sequence
  Description of Artificial Sequence: Synthetic oligonucleotide
  Target: ATXN2; (+) strand; PAM type: NRG; PAM sequence: AAG
tatttagaaagtcttgagtc

SEQ ID NO: 45332 - DNA, 20 bp, Artificial Sequence
  Description of Artificial Sequence: Synthetic oligonucleotide
  Target: ATXN2; (+) strand; PAM type: NRG; PAM sequence: AAG
tcaagccgtcttcaaaccaa

SEQ ID NO: 45333 - DNA, 20 bp, Artificial Sequence
  Description of Artificial Sequence: Synthetic oligonucleotide
  Target: ATXN2; (+) strand; PAM type: NRG; PAM sequence: AAG
agatcccaaatgtacacaca

SEQ ID NO: 45334 - DNA, 20 bp, Artificial Sequence
  Description of Artificial Sequence: Synthetic oligonucleotide
  Target: ATXN2; (+) strand; PAM type: NRG; PAM sequence: TAG
tcccaaatgtacacacaaag

SEQ ID NO: 45335 - DNA, 20 bp, Artificial Sequence
  Description of Artificial Sequence: Synthetic oligonucleotide
  Target: ATXN2; (+) strand; PAM type: NRG; PAM sequence: CAG
gtagcttaaatatgttttta

SEQ ID NO: 45336 - DNA, 20 bp, Artificial Sequence
  Description of Artificial Sequence: Synthetic oligonucleotide
  Target: ATXN2; (+) strand; PAM type: NRG; PAM sequence: AAG
tattctaaacaaatttctaa

SEQ ID NO: 45337 - DNA, 20 bp, Artificial Sequence
  Description of Artificial Sequence: Synthetic oligonucleotide
  Target: ATXN2; (+) strand; PAM type: NRG; PAM sequence: AGG
attctaaacaaatttctaaa

SEQ ID NO: 45338 - DNA, 20 bp, Artificial Sequence
  Description of Artificial Sequence: Synthetic oligonucleotide
  Target: ATXN2; (+) strand; PAM type: NRG; PAM sequence: AAG
aaatttctaaaaggatcccc

SEQ ID NO: 45339 - DNA, 20 bp, Artificial Sequence
  Description of Artificial Sequence: Synthetic oligonucleotide
  Target: ATXN2; (+) strand; PAM type: NRG; PAM sequence: AAG
ttctaaaaggatccccaagt

SEQ ID NO: 45340 - DNA, 20 bp, Artificial Sequence
  Description of Artificial Sequence: Synthetic oligonucleotide
  Target: ATXN2; (+) strand; PAM type: NRG; PAM sequence: GAG
ctaaaaggatccccaagtaa

SEQ ID NO: 45341 - DNA, 20 bp, Artificial Sequence
  Description of Artificial Sequence: Synthetic oligonucleotide
  Target: ATXN2; (+) strand; PAM type: NRG; PAM sequence: CAG
aaggatccccaagtaagagc

SEQ ID NO: 45342 - DNA, 20 bp, Artificial Sequence
  Description of Artificial Sequence: Synthetic oligonucleotide
  Target: ATXN2; (+) strand; PAM type: NRG; PAM sequence: TGG
tccccaagtaagagccagtg

SEQ ID NO: 45343 - DNA, 20 bp, Artificial Sequence
  Description of Artificial Sequence: Synthetic oligonucleotide
  Target: ATXN2; (+) strand; PAM type: NRG; PAM sequence: AAG
aagtaagagccagtgtggaa

SEQ ID NO: 45344 - DNA, 20 bp, Artificial Sequence
  Description of Artificial Sequence: Synthetic oligonucleotide
  Target: ATXN2; (+) strand; PAM type: NRG; PAM sequence: AAG
aagagccagtgtggaaaagc

SEQ ID NO: 45345 - DNA, 20 bp, Artificial Sequence
  Description of Artificial Sequence: Synthetic oligonucleotide
  Target: ATXN2; (+) strand; PAM type: NRG; PAM sequence: AAG
gccagtgtggaaaagcaagc

SEQ ID NO: 45346 - DNA, 20 bp, Artificial Sequence
  Description of Artificial Sequence: Synthetic oligonucleotide
  Target: ATXN2; (+) strand; PAM type: NRG; PAM sequence: TAG
caagcaagcgtctaaaactt

SEQ ID NO: 45347 - DNA, 20 bp, Artificial Sequence
  Description of Artificial Sequence: Synthetic oligonucleotide
  Target: ATXN2; (+) strand; PAM type: NRG; PAM sequence: AGG
aagcaagcgtctaaaacttt

SEQ ID NO: 45348 - DNA, 20 bp, Artificial Sequence
  Description of Artificial Sequence: Synthetic oligonucleotide
  Target: ATXN2; (+) strand; PAM type: NRG; PAM sequence: CAG
gcgtctaaaactttaggacc

SEQ ID NO: 45349 - DNA, 20 bp, Artificial Sequence
  Description of Artificial Sequence: Synthetic oligonucleotide
  Target: ATXN2; (+) strand; PAM type: NRG; PAM sequence: AGG
cgtctaaaactttaggaccc

SEQ ID NO: 45350 - DNA, 20 bp, Artificial Sequence
  Description of Artificial Sequence: Synthetic oligonucleotide
  Target: ATXN2; (+) strand; PAM type: NRG; PAM sequence: CAG
ccaggctttattccactgac

SEQ ID NO: 45351 - DNA, 20 bp, Artificial Sequence
  Description of Artificial Sequence: Synthetic oligonucleotide
  Target: ATXN2; (+) strand; PAM type: NRG; PAM sequence: TAG
ttattccactgaccagaatt

SEQ ID NO: 45352 - DNA, 20 bp, Artificial Sequence
  Description of Artificial Sequence: Synthetic oligonucleotide
  Target: ATXN2; (+) strand; PAM type: NRG; PAM sequence: AGG
tattccactgaccagaattt

SEQ ID NO: 45353 - DNA, 20 bp, Artificial Sequence
  Description of Artificial Sequence: Synthetic oligonucleotide
  Target: ATXN2; (+) strand; PAM type: NRG; PAM sequence: AAG
accagaatttaggttgtgtt

SEQ ID NO: 45354 - DNA, 20 bp, Artificial Sequence
  Description of Artificial Sequence: Synthetic oligonucleotide
  Target: ATXN2; (+) strand; PAM type: NRG; PAM sequence: GAG
cagaatttaggttgtgttaa

SEQ ID NO: 45355 - DNA, 20 bp, Artificial Sequence
  Description of Artificial Sequence: Synthetic oligonucleotide
  Target: ATXN2; (+) strand; PAM type: NRG; PAM sequence: AGG
agaatttaggttgtgttaag

SEQ ID NO: 45356 - DNA, 20 bp, Artificial Sequence
  Description of Artificial Sequence: Synthetic oligonucleotide
  Target: ATXN2; (+) strand; PAM type: NRG; PAM sequence: GGG
gaatttaggttgtgttaaga

SEQ ID NO: 45357 - DNA, 20 bp, Artificial Sequence
  Description of Artificial Sequence: Synthetic oligonucleotide
  Target: ATXN2; (+) strand; PAM type: NRG; PAM sequence: AAG
accaaactttttttaaaaaa

SEQ ID NO: 45358 - DNA, 20 bp, Artificial Sequence
  Description of Artificial Sequence: Synthetic oligonucleotide
  Target: ATXN2; (+) strand; PAM type: NRG; PAM sequence: CAG
tttttaaaaaaaagtattca

SEQ ID NO: 45359 - DNA, 20 bp, Artificial Sequence
  Description of Artificial Sequence: Synthetic oligonucleotide
  Target: ATXN2; (+) strand; PAM type: NRG; PAM sequence: AGG
ttttaaaaaaaagtattcac

SEQ ID NO: 45360 - DNA, 20 bp, Artificial Sequence
  Description of Artificial Sequence: Synthetic oligonucleotide
  Target: ATXN2; (+) strand; PAM type: NRG; PAM sequence: TAG
aaaagtattcacaggttatg

SEQ ID NO: 45361 - DNA, 20 bp, Artificial Sequence
  Description of Artificial Sequence: Synthetic oligonucleotide
  Target: ATXN2; (+) strand; PAM type: NRG; PAM sequence: CAG
agtattcacaggttatgtag

SEQ ID NO: 45362 - DNA, 20 bp, Artificial Sequence
  Description of Artificial Sequence: Synthetic oligonucleotide
  Target: ATXN2; (+) strand; PAM type: NRG; PAM sequence: GAG
tgtagcagtctgtcgctttc

SEQ ID NO: 45363 - DNA, 20 bp, Artificial Sequence
  Description of Artificial Sequence: Synthetic oligonucleotide
  Target: ATXN2; (+) strand; PAM type: NRG; PAM sequence: CAG
gcagtctgtcgctttcgaga

SEQ ID NO: 45364 - DNA, 20 bp, Artificial Sequence
  Description of Artificial Sequence: Synthetic oligonucleotide
  Target: ATXN2; (+) strand; PAM type: NRG; PAM sequence: TGG
tgtcgctttcgagacagaaa

SEQ ID NO: 45365 - DNA, 20 bp, Artificial Sequence
  Description of Artificial Sequence: Synthetic oligonucleotide
  Target: ATXN2; (+) strand; PAM type: NRG; PAM sequence: GGG
gtcgctttcgagacagaaat

SEQ ID NO: 45366 - DNA, 20 bp, Artificial Sequence
  Description of Artificial Sequence: Synthetic oligonucleotide
  Target: ATXN2; (+) strand; PAM type: NRG; PAM sequence: GGG
tcgctttcgagacagaaatg

SEQ ID NO: 45367 - DNA, 20 bp, Artificial Sequence
  Description of Artificial Sequence: Synthetic oligonucleotide
  Target: ATXN2; (+) strand; PAM type: NRG; PAM sequence: AAG
ctttcgagacagaaatgggg

SEQ ID NO: 45368 - DNA, 20 bp, Artificial Sequence
  Description of Artificial Sequence: Synthetic oligonucleotide
  Target: ATXN2; (+) strand; PAM type: NRG; PAM sequence: AGG
tttcgagacagaaatgggga

SEQ ID NO: 45369 - DNA, 20 bp, Artificial Sequence
  Description of Artificial Sequence: Synthetic oligonucleotide
  Target: ATXN2; (+) strand; PAM type: NRG; PAM sequence: GGG
ttcgagacagaaatggggaa

SEQ ID NO: 45370 - DNA, 20 bp, Artificial Sequence
  Description of Artificial Sequence: Synthetic oligonucleotide
  Target: ATXN2; (+) strand; PAM type: NRG; PAM sequence: GGG
tcgagacagaaatggggaag

SEQ ID NO: 45371 - DNA, 20 bp, Artificial Sequence
  Description of Artificial Sequence: Synthetic oligonucleotide
  Target: ATXN2; (+) strand; PAM type: NRG; PAM sequence: CAG
aaatggggaaggggaaaaca

SEQ ID NO: 45372 - DNA, 20 bp, Artificial Sequence
  Description of Artificial Sequence: Synthetic oligonucleotide
  Target: ATXN2; (+) strand; PAM type: NRG; PAM sequence: AAG
tggggaaggggaaaacacag

SEQ ID NO: 45373 - DNA, 20 bp, Artificial Sequence
  Description of Artificial Sequence: Synthetic oligonucleotide
  Target: ATXN2; (+) strand; PAM type: NRG; PAM sequence: AAG
cacagaagtgtgattctata

SEQ ID NO: 45374 - DNA, 20 bp, Artificial Sequence
  Description of Artificial Sequence: Synthetic oligonucleotide
  Target: ATXN2; (+) strand; PAM type: NRG; PAM sequence: TGG
ctataaagaatgatattcct

SEQ ID NO: 45375 - DNA, 20 bp, Artificial Sequence
  Description of Artificial Sequence: Synthetic oligonucleotide
  Target: ATXN2; (+) strand; PAM type: NRG; PAM sequence: AAG
tggttttaaaatttcaccaa

SEQ ID NO: 45376 - DNA, 20 bp, Artificial Sequence
  Description of Artificial Sequence: Synthetic oligonucleotide
  Target: ATXN2; (+) strand; PAM type: NRG; PAM sequence: TAG
ttttaaaatttcaccaaaag

SEQ ID NO: 45377 - DNA, 20 bp, Artificial Sequence
  Description of Artificial Sequence: Synthetic oligonucleotide
  Target: ATXN2; (+) strand; PAM type: NRG; PAM sequence: AAG
accaaaagtagctctttcta

SEQ ID NO: 45378 - DNA, 20 bp, Artificial Sequence
  Description of Artificial Sequence: Synthetic oligonucleotide
  Target: ATXN2; (+) strand; PAM type: NRG; PAM sequence: GAG
aagtagctctttctaaagat

SEQ ID NO: 45379 - DNA, 20 bp, Artificial Sequence
  Description of Artificial Sequence: Synthetic oligonucleotide
  Target: ATXN2; (+) strand; PAM type: NRG; PAM sequence: AAG
gctctttctaaagatgagta

SEQ ID NO: 45380 - DNA, 20 bp, Artificial Sequence
  Description of Artificial Sequence: Synthetic oligonucleotide
  Target: ATXN2; (+) strand; PAM type: NRG; PAM sequence: AGG
ctctttctaaagatgagtaa

SEQ ID NO: 45381 - DNA, 20 bp, Artificial Sequence
  Description of Artificial Sequence: Synthetic oligonucleotide
  Target: ATXN2; (+) strand; PAM type: NRG; PAM sequence: TAG
ctaaagatgagtaaaggact

SEQ ID NO: 45382 - DNA, 20 bp, Artificial Sequence
  Description of Artificial Sequence: Synthetic oligonucleotide
  Target: ATXN2; (+) strand; PAM type: NRG; PAM sequence: AGG
taaagatgagtaaaggactt

SEQ ID NO: 45383 - DNA, 20 bp, Artificial Sequence
  Description of Artificial Sequence: Synthetic oligonucleotide
  Target: ATXN2; (+) strand; PAM type: NRG; PAM sequence: GGG
aaagatgagtaaaggactta

SEQ ID NO: 45384 - DNA, 20 bp, Artificial Sequence
  Description of Artificial Sequence: Synthetic oligonucleotide
  Target: ATXN2; (+) strand; PAM type: NRG; PAM sequence: GGG
aagatgagtaaaggacttag

SEQ ID NO: 45385 - DNA, 20 bp, Artificial Sequence
  Description of Artificial Sequence: Synthetic oligonucleotide
  Target: ATXN2; (+) strand; PAM type: NRG; PAM sequence: AAG
atgagtaaaggacttagggg

SEQ ID NO: 45386 - DNA, 20 bp, Artificial Sequence
  Description of Artificial Sequence: Synthetic oligonucleotide
  Target: ATXN2; (+) strand; PAM type: NRG; PAM sequence: CAG
aggacttaggggaagatgtg

SEQ ID NO: 45387 - DNA, 20 bp, Artificial Sequence
  Description of Artificial Sequence: Synthetic oligonucleotide
  Target: ATXN2; (+) strand; PAM type: NRG; PAM sequence: AAG
acttaggggaagatgtgcag

SEQ ID NO: 45388 - DNA, 20 bp, Artificial Sequence
  Description of Artificial Sequence: Synthetic oligonucleotide
  Target: ATXN2; (+) strand; PAM type: NRG; PAM sequence: TGG
taggggaagatgtgcagaag

SEQ ID NO: 45389 - DNA, 20 bp, Artificial Sequence
  Description of Artificial Sequence: Synthetic oligonucleotide
  Target: ATXN2; (+) strand; PAM type: NRG; PAM sequence: GAG
ggggaagatgtgcagaagtg

SEQ ID NO: 45390 - DNA, 20 bp, Artificial Sequence
  Description of Artificial Sequence: Synthetic oligonucleotide
  Target: ATXN2; (+) strand; PAM type: NRG; PAM sequence: GAG
ggaagatgtgcagaagtgga

SEQ ID NO: 45391 - DNA, 20 bp, Artificial Sequence
  Description of Artificial Sequence: Synthetic oligonucleotide
  Target: ATXN2; (+) strand; PAM type: NRG; PAM sequence: TAG
gatgtgcagaagtggagagt

SEQ ID NO: 45392 - DNA, 20 bp, Artificial Sequence
  Description of Artificial Sequence: Synthetic oligonucleotide
  Target: ATXN2; (+) strand; PAM type: NRG; PAM sequence: GAG
gtggagagttagcacgaaat

SEQ ID NO: 45393 - DNA, 20 bp, Artificial Sequence
  Description of Artificial Sequence: Synthetic oligonucleotide
  Target: ATXN2; (+) strand; PAM type: NRG; PAM sequence: AGG
tggagagttagcacgaaatg

SEQ ID NO: 45394 - DNA, 20 bp, Artificial Sequence
  Description of Artificial Sequence: Synthetic oligonucleotide
  Target: ATXN2; (+) strand; PAM type: NRG; PAM sequence: CAG
acgaaatgaggctatatcat

SEQ ID NO: 45395 - DNA, 20 bp, Artificial Sequence
  Description of Artificial Sequence: Synthetic oligonucleotide
  Target: ATXN2; (+) strand; PAM type: NRG; PAM sequence: AGG
cgaaatgaggctatatcatc

SEQ ID NO: 45396 - DNA, 20 bp, Artificial Sequence
  Description of Artificial Sequence: Synthetic oligonucleotide
  Target: ATXN2; (+) strand; PAM type: NRG; PAM sequence: GAG
ggctatatcatcaggatgct

SEQ ID NO: 45397 - DNA, 20 bp, Artificial Sequence
  Description of Artificial Sequence: Synthetic oligonucleotide
  Target: ATXN2; (+) strand; PAM type: NRG; PAM sequence: TGG
caggatgctgagaaaatccc

SEQ ID NO: 45398 - DNA, 20 bp, Artificial Sequence
  Description of Artificial Sequence: Synthetic oligonucleotide
  Target: ATXN2; (+) strand; PAM type: NRG; PAM sequence: AAG
ctgagaaaatccctggctat

SEQ ID NO: 45399 - DNA, 20 bp, Artificial Sequence
  Description of Artificial Sequence: Synthetic oligonucleotide
  Target: ATXN2; (+) strand; PAM type: NRG; PAM sequence: CAG
tggctataagtaatgcattt

SEQ ID NO: 45400 - DNA, 20 bp, Artificial Sequence
  Description of Artificial Sequence: Synthetic oligonucleotide
  Target: ATXN2; (+) strand; PAM type: NRG; PAM sequence: AGG
ggctataagtaatgcatttc

SEQ ID NO: 45401 - DNA, 20 bp, Artificial Sequence
  Description of Artificial Sequence: Synthetic oligonucleotide
  Target: ATXN2; (+) strand; PAM type: NRG; PAM sequence: TAG
tcaggccaacattgcatcat

SEQ ID NO: 45402 - DNA, 20 bp, Artificial Sequence
  Description of Artificial Sequence: Synthetic oligonucleotide
  Target: ATXN2; (+) strand; PAM type: NRG; PAM sequence: TAG
gccaacattgcatcattagc

SEQ ID NO: 45403 - DNA, 20 bp, Artificial Sequence
  Description of Artificial Sequence: Synthetic oligonucleotide
  Target: ATXN2; (+) strand; PAM type: NRG; PAM sequence: AAG
acattgcatcattagctaga

SEQ ID NO: 45404 - DNA, 20 bp, Artificial Sequence
  Description of Artificial Sequence: Synthetic oligonucleotide
  Target: ATXN2; (+) strand; PAM type: NRG; PAM sequence: AGG
cattgcatcattagctagaa

SEQ ID NO: 45405 - DNA, 20 bp, Artificial Sequence
  Description of Artificial Sequence: Synthetic oligonucleotide
  Target: ATXN2; (+) strand; PAM type: NRG; PAM sequence: AAG
tgcatcattagctagaaagg

SEQ ID NO: 45406 - DNA, 20 bp, Artificial Sequence
  Description of Artificial Sequence: Synthetic oligonucleotide
  Target: ATXN2; (+) strand; PAM type: NRG; PAM sequence: AAG
tcattagctagaaaggaagc

SEQ ID NO: 45407 - DNA, 20 bp, Artificial Sequence
  Description of Artificial Sequence: Synthetic oligonucleotide
  Target: ATXN2; (+) strand; PAM type: NRG; PAM sequence: TGG
gctagaaaggaagcaagatc

SEQ ID NO: 45408 - DNA, 20 bp, Artificial Sequence
  Description of Artificial Sequence: Synthetic oligonucleotide
  Target: ATXN2; (+) strand; PAM type: NRG; PAM sequence: GGG
ctagaaaggaagcaagatct

SEQ ID NO: 45409 - DNA, 20 bp, Artificial Sequence
  Description of Artificial Sequence: Synthetic oligonucleotide
  Target: ATXN2; (+) strand; PAM type: NRG; PAM sequence: CAG
gtaaattctgatttgtttta

SEQ ID NO: 45410 - DNA, 20 bp, Artificial Sequence
  Description of Artificial Sequence: Synthetic oligonucleotide
  Target: ATXN2; (+) strand; PAM type: NRG; PAM sequence: TGG
aattctgatttgttttacag

SEQ ID NO: 45411 - DNA, 20 bp, Artificial Sequence
  Description of Artificial Sequence: Synthetic oligonucleotide
  Target: ATXN2; (+) strand; PAM type: NRG; PAM sequence: AAG
atttgttttacagtggttac

SEQ ID NO: 45412 - DNA, 20 bp, Artificial Sequence
  Description of Artificial Sequence: Synthetic oligonucleotide
  Target: ATXN2; (+) strand; PAM type: NRG; PAM sequence: TGG
ttttacagtggttacaagtt

SEQ ID NO: 45413 - DNA, 20 bp, Artificial Sequence
  Description of Artificial Sequence: Synthetic oligonucleotide
  Target: ATXN2; (+) strand; PAM type: NRG; PAM sequence: CAG
tgtttttgtttttgtttttt

SEQ ID NO: 45414 - DNA, 20 bp, Artificial Sequence
  Description of Artificial Sequence: Synthetic oligonucleotide
  Target: ATXN2; (+) strand; PAM type: NRG; PAM sequence: GAG
tttttgtttttgttttttca

SEQ ID NO: 45415 - DNA, 20 bp, Artificial Sequence
  Description of Artificial Sequence: Synthetic oligonucleotide
  Target: ATXN2; (+) strand; PAM type: NRG; PAM sequence: TGG
tgtttttgttttttcagaga

SEQ ID NO: 45416 - DNA, 20 bp, Artificial Sequence
  Description of Artificial Sequence: Synthetic oligonucleotide
  Target: ATXN2; (+) strand; PAM type: NRG; PAM sequence: GGG
gtttttgttttttcagagat

SEQ ID NO: 45417 - DNA, 20 bp, Artificial Sequence
  Description of Artificial Sequence: Synthetic oligonucleotide
  Target: ATXN2; (+) strand; PAM type: NRG; PAM sequence: GGG
tttttgttttttcagagatg

SEQ ID NO: 45418 - DNA, 20 bp, Artificial Sequence
  Description of Artificial Sequence: Synthetic oligonucleotide
  Target: ATXN2; (+) strand; PAM type: NRG; PAM sequence: TGG
ggggtctttgtcactcatgc

SEQ ID NO: 45419 - DNA, 20 bp, Artificial Sequence
  Description of Artificial Sequence: Synthetic oligonucleotide
  Target: ATXN2; (+) strand; PAM type: NRG; PAM sequence: GAG
ggtctttgtcactcatgctg

SEQ ID NO: 45420 - DNA, 20 bp, Artificial Sequence
  Description of Artificial Sequence: Synthetic oligonucleotide
  Target: ATXN2; (+) strand; PAM type: NRG; PAM sequence: TAG
ttgtcactcatgctggagtg

SEQ ID NO: 45421 - DNA, 20 bp, Artificial Sequence
  Description of Artificial Sequence: Synthetic oligonucleotide
  Target: ATXN2; (+) strand; PAM type: NRG; PAM sequence: CAG
gtgtagtgccgcaatcactg

SEQ ID NO: 45422 - DNA, 20 bp, Artificial Sequence
  Description of Artificial Sequence: Synthetic oligonucleotide
  Target: ATXN2; (+) strand; PAM type: NRG; PAM sequence: TGG
tgccgcaatcactgcagccc

SEQ ID NO: 45423 - DNA, 20 bp, Artificial Sequence
  Description of Artificial Sequence: Synthetic oligonucleotide
  Target: ATXN2; (+) strand; PAM type: NRG; PAM sequence: GGG
gccgcaatcactgcagccct

SEQ ID NO: 45424 - DNA, 20 bp, Artificial Sequence
  Description of Artificial Sequence: Synthetic oligonucleotide
  Target: ATXN2; (+) strand; PAM type: NRG; PAM sequence: AAG
atcactgcagccctgggctc

SEQ ID NO: 45425 - DNA, 20 bp, Artificial Sequence
  Description of Artificial Sequence: Synthetic oligonucleotide
  Target: ATXN2; (+) strand; PAM type: NRG; PAM sequence: CAG
ctcaagcaatcctcccacct

SEQ ID NO: 45426 - DNA, 20 bp, Artificial Sequence
  Description of Artificial Sequence: Synthetic oligonucleotide
  Target: ATXN2; (+) strand; PAM type: NRG; PAM sequence: AAG
tcctcccacctcagcctccc

SEQ ID NO: 45427 - DNA, 20 bp, Artificial Sequence
  Description of Artificial Sequence: Synthetic oligonucleotide
  Target: ATXN2; (+) strand; PAM type: NRG; PAM sequence: GAG
cctcagcctcccaagtcgct

SEQ ID NO: 45428 - DNA, 20 bp, Artificial Sequence
  Description of Artificial Sequence: Synthetic oligonucleotide
  Target: ATXN2; (+) strand; PAM type: NRG; PAM sequence: CAG
ctcccaagtcgctgagatta

SEQ ID NO: 45429 - DNA, 20 bp, Artificial Sequence
  Description of Artificial Sequence: Synthetic oligonucleotide
  Target: ATXN2; (+) strand; PAM type: NRG; PAM sequence: AGG
tcccaagtcgctgagattac

SEQ ID NO: 45430 - DNA, 20 bp, Artificial Sequence
  Description of Artificial Sequence: Synthetic oligonucleotide
  Target: ATXN2; (+) strand; PAM type: NRG; PAM sequence: GAG
gtcgctgagattacaggcat

SEQ ID NO: 45431 - DNA, 20 bp, Artificial Sequence
  Description of Artificial Sequence: Synthetic oligonucleotide
  Target: ATXN2; (+) strand; PAM type: NRG; PAM sequence: CAG
caggcatgagccactatgcc

SEQ ID NO: 45432 - DNA, 20 bp, Artificial Sequence
  Description of Artificial Sequence: Synthetic oligonucleotide
  Target: ATXN2; (+) strand; PAM type: NRG; PAM sequence: AAG
catgagccactatgcccagc

SEQ ID NO: 45433 - DNA, 20 bp, Artificial Sequence
  Description of Artificial Sequence: Synthetic oligonucleotide
  Target: ATXN2; (+) strand; PAM type: NRG; PAM sequence: TGG
gccactatgcccagcaagtc

SEQ ID NO: 45434 - DNA, 20 bp, Artificial Sequence
  Description of Artificial Sequence: Synthetic oligonucleotide
  Target: ATXN2; (+) strand; PAM type: NRG; PAM sequence: TGG
ttaaaaaaaaaaaacactgt

SEQ ID NO: 45435 - DNA, 20 bp, Artificial Sequence
  Description of Artificial Sequence: Synthetic oligonucleotide
  Target: ATXN2; (+) strand; PAM type: NRG; PAM sequence: TAG
aaaaaaaaaaacactgttgg

SEQ ID NO: 45436 - DNA, 20 bp, Artificial Sequence
  Description of Artificial Sequence: Synthetic oligonucleotide
  Target: ATXN2; (+) strand; PAM type: NRG; PAM sequence: TAG
aaaacactgttggtagtaaa

SEQ ID NO: 45437 - DNA, 20 bp, Artificial Sequence
  Description of Artificial Sequence: Synthetic oligonucleotide
  Target: ATXN2; (+) strand; PAM type: NRG; PAM sequence: CAG
aaatagtacaatgttgtaac

SEQ ID NO: 45438 - DNA, 20 bp, Artificial Sequence
  Description of Artificial Sequence: Synthetic oligonucleotide
  Target: ATXN2; (+) strand; PAM type: NRG; PAM sequence: AGG
aatagtacaatgttgtaacc

SEQ ID NO: 45439 - DNA, 20 bp, Artificial Sequence
  Description of Artificial Sequence: Synthetic oligonucleotide
  Target: ATXN2; (+) strand; PAM type: NRG; PAM sequence: AAG
ttgtaaccaggattcctgca

SEQ ID NO: 45440 - DNA, 20 bp, Artificial Sequence
  Description of Artificial Sequence: Synthetic oligonucleotide
  Target: ATXN2; (+) strand; PAM type: NRG; PAM sequence: GAG
accaggattcctgcaaagtt

SEQ ID NO: 45441 - DNA, 20 bp, Artificial Sequence
  Description of Artificial Sequence: Synthetic oligonucleotide
  Target: ATXN2; (+) strand; PAM type: NRG; PAM sequence: TGG
aaagttgagaaaaaaacaac

SEQ ID NO: 45442 - DNA, 20 bp, Artificial Sequence
  Description of Artificial Sequence: Synthetic oligonucleotide
  Target: ATXN2; (+) strand; PAM type: NRG; PAM sequence: CAG
aaacaactggctctaatcta

SEQ ID NO: 45443 - DNA, 20 bp, Artificial Sequence
  Description of Artificial Sequence: Synthetic oligonucleotide
  Target: ATXN2; (+) strand; PAM type: NRG; PAM sequence: AGG
aacaactggctctaatctac

SEQ ID NO: 45444 - DNA, 20 bp, Artificial Sequence
  Description of Artificial Sequence: Synthetic oligonucleotide
  Target: ATXN2; (+) strand; PAM type: NRG; PAM sequence: TGG
ctctaatctacaggcaactg

SEQ ID NO: 45445 - DNA, 20 bp, Artificial Sequence
  Description of Artificial Sequence: Synthetic oligonucleotide
  Target: ATXN2; (+) strand; PAM type: NRG; PAM sequence: GGG
tctaatctacaggcaactgt

SEQ ID NO: 45446 - DNA, 20 bp, Artificial Sequence
  Description of Artificial Sequence: Synthetic oligonucleotide
  Target: ATXN2; (+) strand; PAM type: NRG; PAM sequence: CAG
caactgtgggaatttgcatg

SEQ ID NO: 45447 - DNA, 20 bp, Artificial Sequence
  Description of Artificial Sequence: Synthetic oligonucleotide
  Target: ATXN2; (+) strand; PAM type: NRG; PAM sequence: AAG
gcagattttaccaatgccat

SEQ ID NO: 45448 - DNA, 20 bp, Artificial Sequence
  Description of Artificial Sequence: Synthetic oligonucleotide
  Target: ATXN2; (+) strand; PAM type: NRG; PAM sequence: AAG
tttaccaatgccataagtca

SEQ ID NO: 45449 - DNA, 20 bp, Artificial Sequence
  Description of Artificial Sequence: Synthetic oligonucleotide
  Target: ATXN2; (+) strand; PAM type: NRG; PAM sequence: TGG
taattttccatcatccccta

SEQ ID NO: 45450 - DNA, 20 bp, Artificial Sequence
  Description of Artificial Sequence: Synthetic oligonucleotide
  Target: ATXN2; (+) strand; PAM type: NRG; PAM sequence: GAG
tttccatcatcccctatggt

SEQ ID NO: 45451 - DNA, 20 bp, Artificial Sequence
  Description of Artificial Sequence: Synthetic oligonucleotide
  Target: ATXN2; (+) strand; PAM type: NRG; PAM sequence: AAG
tcccctatggtgagaaacaa

SEQ ID NO: 45452 - DNA, 20 bp, Artificial Sequence
  Description of Artificial Sequence: Synthetic oligonucleotide
  Target: ATXN2; (+) strand; PAM type: NRG; PAM sequence: AAG
aacaaaagcattgtaacaac

SEQ ID NO: 45453 - DNA, 20 bp, Artificial Sequence
  Description of Artificial Sequence: Synthetic oligonucleotide
  Target: ATXN2; (+) strand; PAM type: NRG; PAM sequence: AAG
gcattgtaacaacaagatgc

SEQ ID NO: 45454 - DNA, 20 bp, Artificial Sequence
  Description of Artificial Sequence: Synthetic oligonucleotide
  Target: ATXN2; (+) strand; PAM type: NRG; PAM sequence: TAG
caagaatacaacgtgactat

SEQ ID NO: 45455 - DNA, 20 bp, Artificial Sequence
  Description of Artificial Sequence: Synthetic oligonucleotide
  Target: ATXN2; (+) strand; PAM type: NRG; PAM sequence: AAG
atacaacgtgactattagaa

SEQ ID NO: 45456 - DNA, 20 bp, Artificial Sequence
  Description of Artificial Sequence: Synthetic oligonucleotide
  Target: ATXN2; (+) strand; PAM type: NRG; PAM sequence: AAG
aaaagtgttacctgtttctg

SEQ ID NO: 45457 - DNA, 20 bp, Artificial Sequence
  Description of Artificial Sequence: Synthetic oligonucleotide
  Target: ATXN2; (+) strand; PAM type: NRG; PAM sequence: AGG
aaagtgttacctgtttctga

SEQ ID NO: 45458 - DNA, 20 bp, Artificial Sequence
  Description of Artificial Sequence: Synthetic oligonucleotide
  Target: ATXN2; (+) strand; PAM type: NRG; PAM sequence: CAG
acctgtttctgaaggaacta

SEQ ID NO: 45459 - DNA, 20 bp, Artificial Sequence
  Description of Artificial Sequence: Synthetic oligonucleotide
  Target: ATXN2; (+) strand; PAM type: NRG; PAM sequence: AGG
cctgtttctgaaggaactac

SEQ ID NO: 45460 - DNA, 20 bp, Artificial Sequence
  Description of Artificial Sequence: Synthetic oligonucleotide
  Target: ATXN2; (+) strand; PAM type: NRG; PAM sequence: TAG
ttctgaaggaactacaggta

SEQ ID NO: 45461 - DNA, 20 bp, Artificial Sequence
  Description of Artificial Sequence: Synthetic oligonucleotide
  Target: ATXN2; (+) strand; PAM type: NRG; PAM sequence: GAG
ctgaaggaactacaggtata

SEQ ID NO: 45462 - DNA, 20 bp, Artificial Sequence
  Description of Artificial Sequence: Synthetic oligonucleotide
  Target: ATXN2; (+) strand; PAM type: NRG; PAM sequence: GAG
gaaggaactacaggtataga

SEQ ID NO: 45463 - DNA, 20 bp, Artificial Sequence
  Description of Artificial Sequence: Synthetic oligonucleotide
  Target: ATXN2; (+) strand; PAM type: NRG; PAM sequence: AAG
ctacaggtatagagagaaaa

SEQ ID NO: 45464 - DNA, 20 bp, Artificial Sequence
  Description of Artificial Sequence: Synthetic oligonucleotide
  Target: ATXN2; (+) strand; PAM type: NRG; PAM sequence: AGG
tacaggtatagagagaaaaa

SEQ ID NO: 45465 - DNA, 20 bp, Artificial Sequence
  Description of Artificial Sequence: Synthetic oligonucleotide
  Target: ATXN2; (+) strand; PAM type: NRG; PAM sequence: CAG
aggaaaaacataaaaaccat

SEQ ID NO: 45466 - DNA, 20 bp, Artificial Sequence
  Description of Artificial Sequence: Synthetic oligonucleotide
  Target: ATXN2; (+) strand; PAM type: NRG; PAM sequence: GAG
aaacataaaaaccatcagat

SEQ ID NO: 45467 - DNA, 20 bp, Artificial Sequence
  Description of Artificial Sequence: Synthetic oligonucleotide
  Target: ATXN2; (+) strand; PAM type: NRG; PAM sequence: AAG
aaccatcagatgagatgata

SEQ ID NO: 45468 - DNA, 20 bp, Artificial Sequence
  Description of Artificial Sequence: Synthetic oligonucleotide
  Target: ATXN2; (+) strand; PAM type: NRG; PAM sequence: TAG
cagatgagatgataaagaat

SEQ ID NO: 45469 - DNA, 20 bp, Artificial Sequence
  Description of Artificial Sequence: Synthetic oligonucleotide
  Target: ATXN2; (+) strand; PAM type: NRG; PAM sequence: AAG
attagtttttcaatttataa

SEQ ID NO: 45470 - DNA, 20 bp, Artificial Sequence
  Description of Artificial Sequence: Synthetic oligonucleotide
  Target: ATXN2; (+) strand; PAM type: NRG; PAM sequence: TAG
tttcaatttataaaagcctc

SEQ ID NO: 45471 - DNA, 20 bp, Artificial Sequence
  Description of Artificial Sequence: Synthetic oligonucleotide
  Target: ATXN2; (+) strand; PAM type: NRG; PAM sequence: TAG
atttataaaagcctctagac

SEQ ID NO: 45472 - DNA, 20 bp, Artificial Sequence
  Description of Artificial Sequence: Synthetic oligonucleotide
  Target: ATXN2; (+) strand; PAM type: NRG; PAM sequence: CAG
tataaaagcctctagactag

SEQ ID NO: 45473 - DNA, 20 bp, Artificial Sequence
  Description of Artificial Sequence: Synthetic oligonucleotide
  Target: ATXN2; (+) strand; PAM type: NRG; PAM sequence: AGG
ataaaagcctctagactagc

SEQ ID NO: 45474 - DNA, 20 bp, Artificial Sequence
  Description of Artificial Sequence: Synthetic oligonucleotide
  Target: ATXN2; (+) strand; PAM type: NRG; PAM sequence: TGG
tctagactagcaggcgatgt

SEQ ID NO: 45475 - DNA, 20 bp, Artificial Sequence
  Description of Artificial Sequence: Synthetic oligonucleotide
  Target: ATXN2; (+) strand; PAM type: NRG; PAM sequence: GAG
tagactagcaggcgatgttg

SEQ ID NO: 45476 - DNA, 20 bp, Artificial Sequence
  Description of Artificial Sequence: Synthetic oligonucleotide
  Target: ATXN2; (+) strand; PAM type: NRG; PAM sequence: AGG
agactagcaggcgatgttgg

SEQ ID NO: 45477 - DNA, 20 bp, Artificial Sequence
  Description of Artificial Sequence: Synthetic oligonucleotide
  Target: ATXN2; (+) strand; PAM type: NRG; PAM sequence: AAG
ctagcaggcgatgttggagg

SEQ ID NO: 45478 - DNA, 20 bp, Artificial Sequence
  Description of Artificial Sequence: Synthetic oligonucleotide
  Target: ATXN2; (+) strand; PAM type: NRG; PAM sequence: CAG
aaacaaaattgtatcacctc

SEQ ID NO: 45479 - DNA, 20 bp, Artificial Sequence
  Description of Artificial Sequence: Synthetic oligonucleotide
  Target: ATXN2; (+) strand; PAM type: NRG; PAM sequence: CAG
ccacctccatgctaccccca

SEQ ID NO: 45480 - DNA, 20 bp, Artificial Sequence
  Description of Artificial Sequence: Synthetic oligonucleotide
  Target: ATXN2; (+) strand; PAM type: NRG; PAM sequence: CAG
cctccatgctacccccacag

SEQ ID NO: 45481 - DNA, 20 bp, Artificial Sequence
  Description of Artificial Sequence: Synthetic oligonucleotide
  Target: ATXN2; (+) strand; PAM type: NRG; PAM sequence: TGG
ccatgctacccccacagcag

SEQ ID NO: 45482 - DNA, 20 bp, Artificial Sequence
  Description of Artificial Sequence: Synthetic oligonucleotide
  Target: ATXN2; (+) strand; PAM type: NRG; PAM sequence: GGG
catgctacccccacagcagt

SEQ ID NO: 45483 - DNA, 20 bp, Artificial Sequence
  Description of Artificial Sequence: Synthetic oligonucleotide
  Target: ATXN2; (+) strand; PAM type: NRG; PAM sequence: TGG
aacaccttctcttctgattc

SEQ ID NO: 45484 - DNA, 20 bp, Artificial Sequence
  Description of Artificial Sequence: Synthetic oligonucleotide
  Target: ATXN2; (+) strand; PAM type: NRG; PAM sequence: GGG
acaccttctcttctgattct

SEQ ID NO: 45485 - DNA, 20 bp, Artificial Sequence
  Description of Artificial Sequence: Synthetic oligonucleotide
  Target: ATXN2; (+) strand; PAM type: NRG; PAM sequence: CAG
ccttctcttctgattctggg

SEQ ID NO: 45486 - DNA, 20 bp, Artificial Sequence
  Description of Artificial Sequence: Synthetic oligonucleotide
  Target: ATXN2; (+) strand; PAM type: NRG; PAM sequence: TAG
tctgattctgggcagaaact

SEQ ID NO: 45487 - DNA, 20 bp, Artificial Sequence
  Description of Artificial Sequence: Synthetic oligonucleotide
  Target: ATXN2; (+) strand; PAM type: NRG; PAM sequence: TGG
gggcagaaacttagtcattt

SEQ ID NO: 45488 - DNA, 20 bp, Artificial Sequence
  Description of Artificial Sequence: Synthetic oligonucleotide
  Target: ATXN2; (+) strand; PAM type: NRG; PAM sequence: GGG
ggcagaaacttagtcatttt

SEQ ID NO: 45489 - DNA, 20 bp, Artificial Sequence
  Description of Artificial Sequence: Synthetic oligonucleotide
  Target: ATXN2; (+) strand; PAM type: NRG; PAM sequence: CGG
gaaacttagtcattttgggc

SEQ ID NO: 45490 - DNA, 20 bp, Artificial Sequence
  Description of Artificial Sequence: Synthetic oligonucleotide
  Target: ATXN2; (+) strand; PAM type: NRG; PAM sequence: TGG
gggccggtgatgccacctgc

SEQ ID NO: 45491 - DNA, 20 bp, Artificial Sequence
  Description of Artificial Sequence: Synthetic oligonucleotide
  Target: ATXN2; (+) strand; PAM type: NRG; PAM sequence: TGG
ccggtgatgccacctgctgg

SEQ ID NO: 45492 - DNA, 20 bp, Artificial Sequence
  Description of Artificial Sequence: Synthetic oligonucleotide
  Target: ATXN2; (+) strand; PAM type: NRG; PAM sequence: AAG
gccacctgctggtggtcata

SEQ ID NO: 45493 - DNA, 20 bp, Artificial Sequence
  Description of Artificial Sequence: Synthetic oligonucleotide
  Target: ATXN2; (+) strand; PAM type: NRG; PAM sequence: TGG
accaacgtgtgaacctcttc

SEQ ID NO: 45494 - DNA, 20 bp, Artificial Sequence
  Description of Artificial Sequence: Synthetic oligonucleotide
  Target: ATXN2; (+) strand; PAM type: NRG; PAM sequence: GGG
ccaacgtgtgaacctcttct

SEQ ID NO: 45495 - DNA, 20 bp, Artificial Sequence
  Description of Artificial Sequence: Synthetic oligonucleotide
  Target: ATXN2; (+) strand; PAM type: NRG; PAM sequence: CAG
gaacctcttctgggtatccc

SEQ ID NO: 45496 - DNA, 20 bp, Artificial Sequence
  Description of Artificial Sequence: Synthetic oligonucleotide
  Target: ATXN2; (+) strand; PAM type: NRG; PAM sequence: CAG
ggtatccccagccccatacc

SEQ ID NO: 45497 - DNA, 20 bp, Artificial Sequence
  Description of Artificial Sequence: Synthetic oligonucleotide
  Target: ATXN2; (+) strand; PAM type: NRG; PAM sequence: AGG
gtatccccagccccataccc

SEQ ID NO: 45498 - DNA, 20 bp, Artificial Sequence
  Description of Artificial Sequence: Synthetic oligonucleotide
  Target: ATXN2; (+) strand; PAM type: NRG; PAM sequence: CAG
ccagccccatacccaggaaa

SEQ ID NO: 45499 - DNA, 20 bp, Artificial Sequence
  Description of Artificial Sequence: Synthetic oligonucleotide
  Target: ATXN2; (+) strand; PAM type: NRG; PAM sequence: GAG
agccccatacccaggaaaca

SEQ ID NO: 45500 - DNA, 20 bp, Artificial Sequence
  Description of Artificial Sequence: Synthetic oligonucleotide
  Target: ATXN2; (+) strand; PAM type: NRG; PAM sequence: CAG
caggaaacagagtacatatt

SEQ ID NO: 45501 - DNA, 20 bp, Artificial Sequence
  Description of Artificial Sequence: Synthetic oligonucleotide
  Target: ATXN2; (+) strand; PAM type: NRG; PAM sequence: GAG
atctttcctcttttacctct

SEQ ID NO: 45502 - DNA, 20 bp, Artificial Sequence
  Description of Artificial Sequence: Synthetic oligonucleotide
  Target: ATXN2; (+) strand; PAM type: NRG; PAM sequence: GAG
aaaatcattcaaacttgtct

SEQ ID NO: 45503 - DNA, 20 bp, Artificial Sequence
  Description of Artificial Sequence: Synthetic oligonucleotide
  Target: ATXN2; (+) strand; PAM type: NRG; PAM sequence: AAG
acttgtctgagcatttttta

SEQ ID NO: 45504 - DNA, 20 bp, Artificial Sequence
  Description of Artificial Sequence: Synthetic oligonucleotide
  Target: ATXN2; (+) strand; PAM type: NRG; PAM sequence: AGG
cttgtctgagcattttttaa

SEQ ID NO: 45505 - DNA, 20 bp, Artificial Sequence
  Description of Artificial Sequence: Synthetic oligonucleotide
  Target: ATXN2; (+) strand; PAM type: NRG; PAM sequence: GGG
ttgtctgagcattttttaaa

SEQ ID NO: 45506 - DNA, 20 bp, Artificial Sequence
  Description of Artificial Sequence: Synthetic oligonucleotide
  Target: ATXN2; (+) strand; PAM type: NRG; PAM sequence: CAG
ctgagcattttttaaagggc

SEQ ID NO: 45507 - DNA, 20 bp, Artificial Sequence
  Description of Artificial Sequence: Synthetic oligonucleotide
  Target: ATXN2; (+) strand; PAM type: NRG; PAM sequence: TGG
tttttaaagggccagaataa

SEQ ID NO: 45508 - DNA, 20 bp, Artificial Sequence
  Description of Artificial Sequence: Synthetic oligonucleotide
  Target: ATXN2; (+) strand; PAM type: NRG; PAM sequence: TGG
taatggtcaaataactaaaa

SEQ ID NO: 45509 - DNA, 20 bp, Artificial Sequence
  Description of Artificial Sequence: Synthetic oligonucleotide
  Target: ATXN2; (+) strand; PAM type: NRG; PAM sequence: TAG
tggtcaaataactaaaatgg

SEQ ID NO: 45510 - DNA, 20 bp, Artificial Sequence
  Description of Artificial Sequence: Synthetic oligonucleotide
  Target: ATXN2; (+) strand; PAM type: NRG; PAM sequence: TAG
aaaatggtagtgttaaacat

SEQ ID NO: 45511 - DNA, 20 bp, Artificial Sequence
  Description of Artificial Sequence: Synthetic oligonucleotide
  Target: ATXN2; (+) strand; PAM type: NRG; PAM sequence: TGG
actataaaatgacataaaac

SEQ ID NO: 45512 - DNA, 20 bp, Artificial Sequence
  Description of Artificial Sequence: Synthetic oligonucleotide
  Target: ATXN2; (+) strand; PAM type: NRG; PAM sequence: CAG
gatgaaataatcattaacat

SEQ ID NO: 45513 - DNA, 20 bp, Artificial Sequence
  Description of Artificial Sequence: Synthetic oligonucleotide
  Target: ATXN2; (+) strand; PAM type: NRG; PAM sequence: CAG
caaaccctcaaatgtgcttc

SEQ ID NO: 45514 - DNA, 20 bp, Artificial Sequence
  Description of Artificial Sequence: Synthetic oligonucleotide
  Target: ATXN2; (+) strand; PAM type: NRG; PAM sequence: GAG
aaccctcaaatgtgcttcca

SEQ ID NO: 45515 - DNA, 20 bp, Artificial Sequence
  Description of Artificial Sequence: Synthetic oligonucleotide
  Target: ATXN2; (+) strand; PAM type: NRG; PAM sequence: AAG
cctcaaatgtgcttccagag

SEQ ID NO: 45516 - DNA, 20 bp, Artificial Sequence
  Description of Artificial Sequence: Synthetic oligonucleotide
  Target: ATXN2; (+) strand; PAM type: NRG; PAM sequence: CAG
agagaagtcatcaaaatcct

SEQ ID NO: 45517 - DNA, 20 bp, Artificial Sequence
  Description of Artificial Sequence: Synthetic oligonucleotide
  Target: ATXN2; (+) strand; PAM type: NRG; PAM sequence: CAG
ccatttcttctcaactaaat

SEQ ID NO: 45518 - DNA, 20 bp, Artificial Sequence
  Description of Artificial Sequence: Synthetic oligonucleotide
  Target: ATXN2; (+) strand; PAM type: NRG; PAM sequence: AAG
cagccttttctcaaacatca

SEQ ID NO: 45519 - DNA, 20 bp, Artificial Sequence
  Description of Artificial Sequence: Synthetic oligonucleotide
  Target: ATXN2; (+) strand; PAM type: NRG; PAM sequence: CGG
ttgatcaattcctattcctg

SEQ ID NO: 45520 - DNA, 20 bp, Artificial Sequence
  Description of Artificial Sequence: Synthetic oligonucleotide
  Target: ATXN2; (+) strand; PAM type: NRG; PAM sequence: AAG
ggcactttcaacaacttttt

SEQ ID NO: 45521 - DNA, 20 bp, Artificial Sequence
  Description of Artificial Sequence: Synthetic oligonucleotide
  Target: ATXN2; (+) strand; PAM type: NRG; PAM sequence: CAG
ctttcaacaactttttaaga

SEQ ID NO: 45522 - DNA, 20 bp, Artificial Sequence
  Description of Artificial Sequence: Synthetic oligonucleotide
  Target: ATXN2; (+) strand; PAM type: NRG; PAM sequence: TGG
ttatgtgtcatcgttatatg

SEQ ID NO: 45523 - DNA, 20 bp, Artificial Sequence
  Description of Artificial Sequence: Synthetic oligonucleotide
  Target: ATXN2; (+) strand; PAM type: NRG; PAM sequence: AAG
accaatctatatactatata

SEQ ID NO: 45524 - DNA, 20 bp, Artificial Sequence
  Description of Artificial Sequence: Synthetic oligonucleotide
  Target: ATXN2; (+) strand; PAM type: NRG; PAM sequence: CAG
ctatatactatataaagtat

SEQ ID NO: 45525 - DNA, 20 bp, Artificial Sequence
  Description of Artificial Sequence: Synthetic oligonucleotide
  Target: ATXN2; (+) strand; PAM type: NRG; PAM sequence: TAG
ctatataaagtatcagtata

SEQ ID NO: 45526 - DNA, 20 bp, Artificial Sequence
  Description of Artificial Sequence: Synthetic oligonucleotide
  Target: ATXN2; (+) strand; PAM type: NRG; PAM sequence: TGG
taaagtatcagtatatagat

SEQ ID NO: 45527 - DNA, 20 bp, Artificial Sequence
  Description of Artificial Sequence: Synthetic oligonucleotide
  Target: ATXN2; (+) strand; PAM type: NRG; PAM sequence: CAG
atcagtatatagattggtat

SEQ ID NO: 45528 - DNA, 20 bp, Artificial Sequence
  Description of Artificial Sequence: Synthetic oligonucleotide
  Target: ATXN2; (+) strand; PAM type: NRG; PAM sequence: TGG
agtatatagattggtatcag

SEQ ID NO: 45529 - DNA, 20 bp, Artificial Sequence
  Description of Artificial Sequence: Synthetic oligonucleotide
  Target: ATXN2; (+) strand; PAM type: NRG; PAM sequence: GGG
gtatatagattggtatcagt

SEQ ID NO: 45530 - DNA, 20 bp, Artificial Sequence
  Description of Artificial Sequence: Synthetic oligonucleotide
  Target: ATXN2; (+) strand; PAM type: NRG; PAM sequence: TAG
ttggtatcagtgggactatt

SEQ ID NO: 45531 - DNA, 20 bp, Artificial Sequence
  Description of Artificial Sequence: Synthetic oligonucleotide
  Target: ATXN2; (+) strand; PAM type: NRG; PAM sequence: TAG
tgggactatttagtcatttt

SEQ ID NO: 45532 - DNA, 20 bp, Artificial Sequence
  Description of Artificial Sequence: Synthetic oligonucleotide
  Target: ATXN2; (+) strand; PAM type: NRG; PAM sequence: GAG
agtcatttttagcacttact

SEQ ID NO: 45533 - DNA, 20 bp, Artificial Sequence
  Description of Artificial Sequence: Synthetic oligonucleotide
  Target: ATXN2; (+) strand; PAM type: NRG; PAM sequence: AAG
agtacctacaatgcactcat

SEQ ID NO: 45534 - DNA, 20 bp, Artificial Sequence
  Description of Artificial Sequence: Synthetic oligonucleotide
  Target: ATXN2; (+) strand; PAM type: NRG; PAM sequence: TGG
ctacaatgcactcataagtc

SEQ ID NO: 45535 - DNA, 20 bp, Artificial Sequence
  Description of Artificial Sequence: Synthetic oligonucleotide
  Target: ATXN2; (+) strand; PAM type: NRG; PAM sequence: GAG
atgcactcataagtctggac

SEQ ID NO: 45536 - DNA, 20 bp, Artificial Sequence
  Description of Artificial Sequence: Synthetic oligonucleotide
  Target: ATXN2; (+) strand; PAM type: NRG; PAM sequence: AGG
tgcactcataagtctggacg

SEQ ID NO: 45537 - DNA, 20 bp, Artificial Sequence
  Description of Artificial Sequence: Synthetic oligonucleotide
  Target: ATXN2; (+) strand; PAM type: NRG; PAM sequence: TGG
actcataagtctggacgagg

SEQ ID NO: 45538 - DNA, 20 bp, Artificial Sequence
  Description of Artificial Sequence: Synthetic oligonucleotide
  Target: ATXN2; (+) strand; PAM type: NRG; PAM sequence: GGG
ctcataagtctggacgaggt

SEQ ID NO: 45539 - DNA, 20 bp, Artificial Sequence
  Description of Artificial Sequence: Synthetic oligonucleotide
  Target: ATXN2; (+) strand; PAM type: NRG; PAM sequence: GGG
tcataagtctggacgaggtg

SEQ ID NO: 45540 - DNA, 20 bp, Artificial Sequence
  Description of Artificial Sequence: Synthetic oligonucleotide
  Target: ATXN2; (+) strand; PAM type: NRG; PAM sequence: CAG
catttgactgatacaattcc

SEQ ID NO: 45541 - DNA, 20 bp, Artificial Sequence
  Description of Artificial Sequence: Synthetic oligonucleotide
  Target: ATXN2; (+) strand; PAM type: NRG; PAM sequence: TAG
acaattcccagcatttcctg

SEQ ID NO: 45542 - DNA, 20 bp, Artificial Sequence
  Description of Artificial Sequence: Synthetic oligonucleotide
  Target: ATXN2; (+) strand; PAM type: NRG; PAM sequence: AGG
caattcccagcatttcctgt

SEQ ID NO: 45543 - DNA, 20 bp, Artificial Sequence
  Description of Artificial Sequence: Synthetic oligonucleotide
  Target: ATXN2; (+) strand; PAM type: NRG; PAM sequence: TAG
ccagcatttcctgtaggaac

SEQ ID NO: 45544 - DNA, 20 bp, Artificial Sequence
  Description of Artificial Sequence: Synthetic oligonucleotide
  Target: ATXN2; (+) strand; PAM type: NRG; PAM sequence: AGG
cagcatttcctgtaggaact

SEQ ID NO: 45545 - DNA, 20 bp, Artificial Sequence
  Description of Artificial Sequence: Synthetic oligonucleotide
  Target: ATXN2; (+) strand; PAM type: NRG; PAM sequence: GAG
gcatttcctgtaggaactag

SEQ ID NO: 45546 - DNA, 20 bp, Artificial Sequence
  Description of Artificial Sequence: Synthetic oligonucleotide
  Target: ATXN2; (+) strand; PAM type: NRG; PAM sequence: TGG
ctgtaggaactaggagctcc

SEQ ID NO: 45547 - DNA, 20 bp, Artificial Sequence
  Description of Artificial Sequence: Synthetic oligonucleotide
  Target: ATXN2; (+) strand; PAM type: NRG; PAM sequence: GGG
tgtaggaactaggagctcct

SEQ ID NO: 45548 - DNA, 20 bp, Artificial Sequence
  Description of Artificial Sequence: Synthetic oligonucleotide
  Target: ATXN2; (+) strand; PAM type: NRG; PAM sequence: AAG
aactaggagctcctgggtgt

SEQ ID NO: 45549 - DNA, 20 bp, Artificial Sequence
  Description of Artificial Sequence: Synthetic oligonucleotide
  Target: ATXN2; (+) strand; PAM type: NRG; PAM sequence: GAG
ctaggagctcctgggtgtaa

SEQ ID NO: 45550 - DNA, 20 bp, Artificial Sequence
  Description of Artificial Sequence: Synthetic oligonucleotide
  Target: ATXN2; (+) strand; PAM type: NRG; PAM sequence: TAG
agctcctgggtgtaagagac

SEQ ID NO: 45551 - DNA, 20 bp, Artificial Sequence
  Description of Artificial Sequence: Synthetic oligonucleotide
  Target: ATXN2; (+) strand; PAM type: NRG; PAM sequence: CAG
tgggtgtaagagactagtta

SEQ ID NO: 45552 - DNA, 20 bp, Artificial Sequence
  Description of Artificial Sequence: Synthetic oligonucleotide
  Target: ATXN2; (+) strand; PAM type: NRG; PAM sequence: AAG
agagactagttacagaaatg

SEQ ID NO: 45553 - DNA, 20 bp, Artificial Sequence
  Description of Artificial Sequence: Synthetic oligonucleotide
  Target: ATXN2; (+) strand; PAM type: NRG; PAM sequence: TAG
cagaaatgaagcaaatcttt

SEQ ID NO: 45554 - DNA, 20 bp, Artificial Sequence
  Description of Artificial Sequence: Synthetic oligonucleotide
  Target: ATXN2; (+) strand; PAM type: NRG; PAM sequence: GAG
cttttagaatcgaatacaat

SEQ ID NO: 45555 - DNA, 20 bp, Artificial Sequence
  Description of Artificial Sequence: Synthetic oligonucleotide
  Target: ATXN2; (+) strand; PAM type: NRG; PAM sequence: AAG
ctacaatacaattaaaaaca

SEQ ID NO: 45556 - DNA, 20 bp, Artificial Sequence
  Description of Artificial Sequence: Synthetic oligonucleotide
  Target: ATXN2; (+) strand; PAM type: NRG; PAM sequence: AAG
acaattaaaaacaaagttct

SEQ ID NO: 45557 - DNA, 20 bp, Artificial Sequence
  Description of Artificial Sequence: Synthetic oligonucleotide
  Target: ATXN2; (+) strand; PAM type: NRG; PAM sequence: AGG
caattaaaaacaaagttcta

SEQ ID NO: 45558 - DNA, 20 bp, Artificial Sequence
  Description of Artificial Sequence: Synthetic oligonucleotide
  Target: ATXN2; (+) strand; PAM type: NRG; PAM sequence: AAG
aacaaagttctaaggaacaa

SEQ ID NO: 45559 - DNA, 20 bp, Artificial Sequence
  Description of Artificial Sequence: Synthetic oligonucleotide
  Target: ATXN2; (+) strand; PAM type: NRG; PAM sequence: AGG
acaaagttctaaggaacaaa

SEQ ID NO: 45560 - DNA, 20 bp, Artificial Sequence
  Description of Artificial Sequence: Synthetic oligonucleotide
  Target: ATXN2; (+) strand; PAM type: NRG; PAM sequence: TGG
ttctaaggaacaaaaggctc

SEQ ID NO: 45561 - DNA, 20 bp, Artificial Sequence
  Description of Artificial Sequence: Synthetic oligonucleotide
  Target: ATXN2; (+) strand; PAM type: NRG; PAM sequence: GGG
tctaaggaacaaaaggctct

SEQ ID NO: 45562 - DNA, 20 bp, Artificial Sequence
  Description of Artificial Sequence: Synthetic oligonucleotide
  Target: ATXN2; (+) strand; PAM type: NRG; PAM sequence: AAG
aaaaggctctgggctttcta

SEQ ID NO: 45563 - DNA, 20 bp, Artificial Sequence
  Description of Artificial Sequence: Synthetic oligonucleotide
  Target: ATXN2; (+) strand; PAM type: NRG; PAM sequence: CAG
ctctgggctttctaaagtga

SEQ ID NO: 45564 - DNA, 20 bp, Artificial Sequence
  Description of Artificial Sequence: Synthetic oligonucleotide
  Target: ATXN2; (+) strand; PAM type: NRG; PAM sequence: CAG
gctttctaaagtgacagtga

SEQ ID NO: 45565 - DNA, 20 bp, Artificial Sequence
  Description of Artificial Sequence: Synthetic oligonucleotide
  Target: ATXN2; (+) strand; PAM type: NRG; PAM sequence: CAG
aagtgacagtgacagcctat

SEQ ID NO: 45566 - DNA, 20 bp, Artificial Sequence
  Description of Artificial Sequence: Synthetic oligonucleotide
  Target: ATXN2; (+) strand; PAM type: NRG; PAM sequence: CAG
cagtgacagcctatcagcaa

SEQ ID NO: 45567 - DNA, 20 bp, Artificial Sequence
  Description of Artificial Sequence: Synthetic oligonucleotide
  Target: ATXN2; (+) strand; PAM type: NRG; PAM sequence: TAG
cctatcagcaacagctgatc

SEQ ID NO: 45568 - DNA, 20 bp, Artificial Sequence
  Description of Artificial Sequence: Synthetic oligonucleotide
  Target: ATXN2; (+) strand; PAM type: NRG; PAM sequence: AGG
ctatcagcaacagctgatct

SEQ ID NO: 45569 - DNA, 20 bp, Artificial Sequence
  Description of Artificial Sequence: Synthetic oligonucleotide
  Target: ATXN2; (+) strand; PAM type: NRG; PAM sequence: AAG
aacagctgatctaggccttc

SEQ ID NO: 45570 - DNA, 20 bp, Artificial Sequence
  Description of Artificial Sequence: Synthetic oligonucleotide
  Target: ATXN2; (+) strand; PAM type: NRG; PAM sequence: AAG
atctaggccttcaagaacac

SEQ ID NO: 45571 - DNA, 20 bp, Artificial Sequence
  Description of Artificial Sequence: Synthetic oligonucleotide
  Target: ATXN2; (+) strand; PAM type: NRG; PAM sequence: AAG
taggccttcaagaacacaag

SEQ ID NO: 45572 - DNA, 20 bp, Artificial Sequence
  Description of Artificial Sequence: Synthetic oligonucleotide
  Target: ATXN2; (+) strand; PAM type: NRG; PAM sequence: AAG
caagaacacaagaagaaaat

SEQ ID NO: 45573 - DNA, 20 bp, Artificial Sequence
  Description of Artificial Sequence: Synthetic oligonucleotide
  Target: ATXN2; (+) strand; PAM type: NRG; PAM sequence: AAG
aacacaagaagaaaataaga

SEQ ID NO: 45574 - DNA, 20 bp, Artificial Sequence
  Description of Artificial Sequence: Synthetic oligonucleotide
  Target: ATXN2; (+) strand; PAM type: NRG; PAM sequence: AGG
acacaagaagaaaataagaa

SEQ ID NO: 45575 - DNA, 20 bp, Artificial Sequence
  Description of Artificial Sequence: Synthetic oligonucleotide
  Target: ATXN2; (+) strand; PAM type: NRG; PAM sequence: GGG
cacaagaagaaaataagaaa

SEQ ID NO: 45576 - DNA, 20 bp, Artificial Sequence
  Description of Artificial Sequence: Synthetic oligonucleotide
  Target: ATXN2; (+) strand; PAM type: NRG; PAM sequence: GGG
acaagaagaaaataagaaag

SEQ ID NO: 45577 - DNA, 20 bp, Artificial Sequence
  Description of Artificial Sequence: Synthetic oligonucleotide
  Target: ATXN2; (+) strand; PAM type: NRG; PAM sequence: AAG
agaagaaaataagaaagggg

SEQ ID NO: 45578 - DNA, 20 bp, Artificial Sequence
  Description of Artificial Sequence: Synthetic oligonucleotide
  Target: ATXN2; (+) strand; PAM type: NRG; PAM sequence: TGG
ataagaaaggggaagtaaaa

SEQ ID NO: 45579 - DNA, 20 bp, Artificial Sequence
  Description of Artificial Sequence: Synthetic oligonucleotide
  Target: ATXN2; (+) strand; PAM type: NRG; PAM sequence: TAG
gaagtaaaatggttccaaca

SEQ ID NO: 45580 - DNA, 20 bp, Artificial Sequence
  Description of Artificial Sequence: Synthetic oligonucleotide
  Target: ATXN2; (+) strand; PAM type: NRG; PAM sequence: TGG
aaaatggttccaacatagac

SEQ ID NO: 45581 - DNA, 20 bp, Artificial Sequence
  Description of Artificial Sequence: Synthetic oligonucleotide
  Target: ATXN2; (+) strand; PAM type: NRG; PAM sequence: GAG
aatggttccaacatagactg

SEQ ID NO: 45582 - DNA, 20 bp, Artificial Sequence
  Description of Artificial Sequence: Synthetic oligonucleotide
  Target: ATXN2; (+) strand; PAM type: NRG; PAM sequence: TGG
ggttccaacatagactggag

SEQ ID NO: 45583 - DNA, 20 bp, Artificial Sequence
  Description of Artificial Sequence: Synthetic oligonucleotide
  Target: ATXN2; (+) strand; PAM type: NRG; PAM sequence: TAG
tggcattaaaaatacgtgta

SEQ ID NO: 45584 - DNA, 20 bp, Artificial Sequence
  Description of Artificial Sequence: Synthetic oligonucleotide
  Target: ATXN2; (+) strand; PAM type: NRG; PAM sequence: TGG
attaaaaatacgtgtatagc

SEQ ID NO: 45585 - DNA, 20 bp, Artificial Sequence
  Description of Artificial Sequence: Synthetic oligonucleotide
  Target: ATXN2; (+) strand; PAM type: NRG; PAM sequence: GGG
ttaaaaatacgtgtatagct

SEQ ID NO: 45586 - DNA, 20 bp, Artificial Sequence
  Description of Artificial Sequence: Synthetic oligonucleotide
  Target: ATXN2; (+) strand; PAM type: NRG; PAM sequence: GAG
aaaaatacgtgtatagctgg

SEQ ID NO: 45587 - DNA, 20 bp, Artificial Sequence
  Description of Artificial Sequence: Synthetic oligonucleotide
  Target: ATXN2; (+) strand; PAM type: NRG; PAM sequence: CGG
aatacgtgtatagctgggag

SEQ ID NO: 45588 - DNA, 20 bp, Artificial Sequence
  Description of Artificial Sequence: Synthetic oligonucleotide
  Target: ATXN2; (+) strand; PAM type: NRG; PAM sequence: TGG
acgtgtatagctgggagcgg

SEQ ID NO: 45589 - DNA, 20 bp, Artificial Sequence
  Description of Artificial Sequence: Synthetic oligonucleotide
  Target: ATXN2; (+) strand; PAM type: NRG; PAM sequence: CAG
gtggctcacgcctgtaatct

SEQ ID NO: 45590 - DNA, 20 bp, Artificial Sequence
  Description of Artificial Sequence: Synthetic oligonucleotide
  Target: ATXN2; (+) strand; PAM type: NRG; PAM sequence: TGG
cgcctgtaatctcagcattt

SEQ ID NO: 45591 - DNA, 20 bp, Artificial Sequence
  Description of Artificial Sequence: Synthetic oligonucleotide
  Target: ATXN2; (+) strand; PAM type: NRG; PAM sequence: GGG
gcctgtaatctcagcatttt

SEQ ID NO: 45592 - DNA, 20 bp, Artificial Sequence
  Description of Artificial Sequence: Synthetic oligonucleotide
  Target: ATXN2; (+) strand; PAM type: NRG; PAM sequence: GAG
ctgtaatctcagcattttgg

SEQ ID NO: 45593 - DNA, 20 bp, Artificial Sequence
  Description of Artificial Sequence: Synthetic oligonucleotide
  Target: ATXN2; (+) strand; PAM type: NRG; PAM sequence: AGG
tgtaatctcagcattttggg

SEQ ID NO: 45594 - DNA, 20 bp, Artificial Sequence
  Description of Artificial Sequence: Synthetic oligonucleotide
  Target: ATXN2; (+) strand; PAM type: NRG; PAM sequence: CAG
tctcagcattttgggaggcc

SEQ ID NO: 45595 - DNA, 20 bp, Artificial Sequence
  Description of Artificial Sequence: Synthetic oligonucleotide
  Target: ATXN2; (+) strand; PAM type: NRG; PAM sequence: CAG
agcattttgggaggcccagt

SEQ ID NO: 45596 - DNA, 20 bp, Artificial Sequence
  Description of Artificial Sequence: Synthetic oligonucleotide
  Target: ATXN2; (+) strand; PAM type: NRG; PAM sequence: AGG
gcattttgggaggcccagtc

SEQ ID NO: 45597 - DNA, 20 bp, Artificial Sequence
  Description of Artificial Sequence: Synthetic oligonucleotide
  Target: ATXN2; (+) strand; PAM type: NRG; PAM sequence: CAG
ttttgggaggcccagtcagg

SEQ ID NO: 45598 - DNA, 20 bp, Artificial Sequence
  Description of Artificial Sequence: Synthetic oligonucleotide
  Target: ATXN2; (+) strand; PAM type: NRG; PAM sequence: GAG
ggcccagtcaggcagatcac

SEQ ID NO: 45599 - DNA, 20 bp, Artificial Sequence
  Description of Artificial Sequence: Synthetic oligonucleotide
  Target: ATXN2; (+) strand; PAM type: NRG; PAM sequence: AGG
gcccagtcaggcagatcacg

SEQ ID NO: 45600 - DNA, 20 bp, Artificial Sequence
  Description of Artificial Sequence: Synthetic oligonucleotide
  Target: ATXN2; (+) strand; PAM type: NRG; PAM sequence: CAG
agtcaggcagatcacgaggt

SEQ ID NO: 45601 - DNA, 20 bp, Artificial Sequence
  Description of Artificial Sequence: Synthetic oligonucleotide
  Target: ATXN2; (+) strand; PAM type: NRG; PAM sequence: AGG
gtcaggcagatcacgaggtc

SEQ ID NO: 45602 - DNA, 20 bp, Artificial Sequence
  Description of Artificial Sequence: Synthetic oligonucleotide
  Target: ATXN2; (+) strand; PAM type: NRG; PAM sequence: GAG
caggcagatcacgaggtcag

SEQ ID NO: 45603 - DNA, 20 bp, Artificial Sequence
  Description of Artificial Sequence: Synthetic oligonucleotide
  Target: ATXN2; (+) strand; PAM type: NRG; PAM sequence: AAG
gatcacgaggtcaggagatc

SEQ ID NO: 45604 - DNA, 20 bp, Artificial Sequence
  Description of Artificial Sequence: Synthetic oligonucleotide
  Target: ATXN2; (+) strand; PAM type: NRG; PAM sequence: TGG
tcaggagatcaagaccatcc

SEQ ID NO: 45605 - DNA, 20 bp, Artificial Sequence
  Description of Artificial Sequence: Synthetic oligonucleotide
  Target: ATXN2; (+) strand; PAM type: NRG; PAM sequence: CGG
caagaccatcctggttaaca

SEQ ID NO: 45606 - DNA, 20 bp, Artificial Sequence
  Description of Artificial Sequence: Synthetic oligonucleotide
  Target: ATXN2; (+) strand; PAM type: NRG; PAM sequence: AAG
atctctactaaaaatacaaa

SEQ ID NO: 45607 - DNA, 20 bp, Artificial Sequence
  Description of Artificial Sequence: Synthetic oligonucleotide
  Target: ATXN2; (+) strand; PAM type: NRG; PAM sequence: TAG
ctactaaaaatacaaaaagt

SEQ ID NO: 45608 - DNA, 20 bp, Artificial Sequence
  Description of Artificial Sequence: Synthetic oligonucleotide
  Target: ATXN2; (+) strand; PAM type: NRG; PAM sequence: TGG
taaaaatacaaaaagttaga

SEQ ID NO: 45609 - DNA, 20 bp, Artificial Sequence
  Description of Artificial Sequence: Synthetic oligonucleotide
  Target: ATXN2; (+) strand; PAM type: NRG; PAM sequence: GGG
aaaaatacaaaaagttagat

SEQ ID NO: 45610 - DNA, 20 bp, Artificial Sequence
  Description of Artificial Sequence: Synthetic oligonucleotide
  Target: ATXN2; (+) strand; PAM type: NRG; PAM sequence: TAG
tacaaaaagttagatgggcg

SEQ ID NO: 45611 - DNA, 20 bp, Artificial Sequence
  Description of Artificial Sequence: Synthetic oligonucleotide
  Target: ATXN2; (+) strand; PAM type: NRG; PAM sequence: TGG
aaaaagttagatgggcgtag

SEQ ID NO: 45612 - DNA, 20 bp, Artificial Sequence
  Description of Artificial Sequence: Synthetic oligonucleotide
  Target: ATXN2; (+) strand; PAM type: NRG; PAM sequence: CGG
agttagatgggcgtagtggc

SEQ ID NO: 45613 - DNA, 20 bp, Artificial Sequence
  Description of Artificial Sequence: Synthetic oligonucleotide
  Target: ATXN2; (+) strand; PAM type: NRG; PAM sequence: CAG
gtggccggcgcctgtaatcc

SEQ ID NO: 45614 - DNA, 20 bp, Artificial Sequence
  Description of Artificial Sequence: Synthetic oligonucleotide
  Target: ATXN2; (+) strand; PAM type: NRG; PAM sequence: CGG
cgcctgtaatcccagctact

SEQ ID NO: 45615 - DNA, 20 bp, Artificial Sequence
  Description of Artificial Sequence: Synthetic oligonucleotide
  Target: ATXN2; (+) strand; PAM type: NRG; PAM sequence: GGG
gcctgtaatcccagctactc

SEQ ID NO: 45616 - DNA, 20 bp, Artificial Sequence
  Description of Artificial Sequence: Synthetic oligonucleotide
  Target: ATXN2; (+) strand; PAM type: NRG; PAM sequence: GAG
ctgtaatcccagctactcgg

SEQ ID NO: 45617 - DNA, 20 bp, Artificial Sequence
  Description of Artificial Sequence: Synthetic oligonucleotide
  Target: ATXN2; (+) strand; PAM type: NRG; PAM sequence: AGG
tgtaatcccagctactcggg

SEQ ID NO: 45618 - DNA, 20 bp, Artificial Sequence
  Description of Artificial Sequence: Synthetic oligonucleotide
  Target: ATXN2; (+) strand; PAM type: NRG; PAM sequence: GAG
tcccagctactcgggaggct

SEQ ID NO: 45619 - DNA, 20 bp, Artificial Sequence
  Description of Artificial Sequence: Synthetic oligonucleotide
  Target: ATXN2; (+) strand; PAM type: NRG; PAM sequence: AGG
cccagctactcgggaggctg

SEQ ID NO: 45620 - DNA, 20 bp, Artificial Sequence
  Description of Artificial Sequence: Synthetic oligonucleotide
  Target: ATXN2; (+) strand; PAM type: NRG; PAM sequence: CAG
agctactcgggaggctgagg

SEQ ID NO: 45621 - DNA, 20 bp, Artificial Sequence
  Description of Artificial Sequence: Synthetic oligonucleotide
  Target: ATXN2; (+) strand; PAM type: NRG; PAM sequence: AGG
gctactcgggaggctgaggc

SEQ ID NO: 45622 - DNA, 20 bp, Artificial Sequence
  Description of Artificial Sequence: Synthetic oligonucleotide
  Target: ATXN2; (+) strand; PAM type: NRG; PAM sequence: GAG
tactcgggaggctgaggcag

SEQ ID NO: 45623 - DNA, 20 bp, Artificial Sequence
  Description of Artificial Sequence: Synthetic oligonucleotide
  Target: ATXN2; (+) strand; PAM type: NRG; PAM sequence: TGG
gggaggctgaggcaggagaa

SEQ ID NO: 45624 - DNA, 20 bp, Artificial Sequence
  Description of Artificial Sequence: Synthetic oligonucleotide
  Target: ATXN2; (+) strand; PAM type: NRG; PAM sequence: CAG
ggcaggagaatggtgtgaac

SEQ ID NO: 45625 - DNA, 20 bp, Artificial Sequence
  Description of Artificial Sequence: Synthetic oligonucleotide
  Target: ATXN2; (+) strand; PAM type: NRG; PAM sequence: AGG
gcaggagaatggtgtgaacc

SEQ ID NO: 45626 - DNA, 20 bp, Artificial Sequence
  Description of Artificial Sequence: Synthetic oligonucleotide
  Target: ATXN2; (+) strand; PAM type: NRG; PAM sequence: GGG
caggagaatggtgtgaacca

SEQ ID NO: 45627 - DNA, 20 bp, Artificial Sequence
  Description of Artificial Sequence: Synthetic oligonucleotide
  Target: ATXN2; (+) strand; PAM type: NRG; PAM sequence: GAG
ggagaatggtgtgaaccagg

SEQ ID NO: 45628 - DNA, 20 bp, Artificial Sequence
  Description of Artificial Sequence: Synthetic oligonucleotide
  Target: ATXN2; (+) strand; PAM type: NRG; PAM sequence: AGG
gagaatggtgtgaaccaggg

SEQ ID NO: 45629 - DNA, 20 bp, Artificial Sequence
  Description of Artificial Sequence: Synthetic oligonucleotide
  Target: ATXN2; (+) strand; PAM type: NRG; PAM sequence: CAG
aatggtgtgaaccagggagg

SEQ ID NO: 45630 - DNA, 20 bp, Artificial Sequence
  Description of Artificial Sequence: Synthetic oligonucleotide
  Target: ATXN2; (+) strand; PAM type: NRG; PAM sequence: GAG
tggtgtgaaccagggaggca

SEQ ID NO: 45631 - DNA, 20 bp, Artificial Sequence
  Description of Artificial Sequence: Synthetic oligonucleotide
  Target: ATXN2; (+) strand; PAM type: NRG; PAM sequence: CAG
aaccagggaggcagagcttg

SEQ ID NO: 45632 - DNA, 20 bp, Artificial Sequence
  Description of Artificial Sequence: Synthetic oligonucleotide
  Target: ATXN2; (+) strand; PAM type: NRG; PAM sequence: GAG
agggaggcagagcttgcagt

SEQ ID NO: 45633 - DNA, 20 bp, Artificial Sequence
  Description of Artificial Sequence: Synthetic oligonucleotide
  Target: ATXN2; (+) strand; PAM type: NRG; PAM sequence: CAG
gaggcagagcttgcagtgag

SEQ ID NO: 45634 - DNA, 20 bp, Artificial Sequence
  Description of Artificial Sequence: Synthetic oligonucleotide
  Target: ATXN2; (+) strand; PAM type: NRG; PAM sequence: GAG
ggcagagcttgcagtgagca

SEQ ID NO: 45635 - DNA, 20 bp, Artificial Sequence
  Description of Artificial Sequence: Synthetic oligonucleotide
  Target: ATXN2; (+) strand; PAM type: NRG; PAM sequence: CAG
gagatcgcgccactgcactc

SEQ ID NO: 45636 - DNA, 20 bp, Artificial Sequence
  Description of Artificial Sequence: Synthetic oligonucleotide
  Target: ATXN2; (+) strand; PAM type: NRG; PAM sequence: TGG
cgcgccactgcactccagcc

SEQ ID NO: 45637 - DNA, 20 bp, Artificial Sequence
  Description of Artificial Sequence: Synthetic oligonucleotide
  Target: ATXN2; (+) strand; PAM type: NRG; PAM sequence: CAG
ctgcactccagcctggacaa

SEQ ID NO: 45638 - DNA, 20 bp, Artificial Sequence
  Description of Artificial Sequence: Synthetic oligonucleotide
  Target: ATXN2; (+) strand; PAM type: NRG; PAM sequence: GAG
gcactccagcctggacaaca

SEQ ID NO: 45639 - DNA, 20 bp, Artificial Sequence
  Description of Artificial Sequence: Synthetic oligonucleotide
  Target: ATXN2; (+) strand; PAM type: NRG; PAM sequence: GAG
tccagcctggacaacagagc

SEQ ID NO: 45640 - DNA, 20 bp, Artificial Sequence
  Description of Artificial Sequence: Synthetic oligonucleotide
  Target: ATXN2; (+) strand; PAM type: NRG; PAM sequence: TAG
aaaaaacaaaaaaatgtgta

SEQ ID NO: 45641 - DNA, 20 bp, Artificial Sequence
  Description of Artificial Sequence: Synthetic oligonucleotide
  Target: ATXN2; (+) strand; PAM type: NRG; PAM sequence: AGG
aaaaacaaaaaaatgtgtat

SEQ ID NO: 45642 - DNA, 20 bp, Artificial Sequence
  Description of Artificial Sequence: Synthetic oligonucleotide
  Target: ATXN2; (+) strand; PAM type: NRG; PAM sequence: CGG
aacaaaaaaatgtgtatagg

SEQ ID NO: 45643 - DNA, 20 bp, Artificial Sequence
  Description of Artificial Sequence: Synthetic oligonucleotide
  Target: ATXN2; (+) strand; PAM type: NRG; PAM sequence: GGG
acaaaaaaatgtgtataggc

SEQ ID NO: 45644 - DNA, 20 bp, Artificial Sequence
  Description of Artificial Sequence: Synthetic oligonucleotide
  Target: ATXN2; (+) strand; PAM type: NRG; PAM sequence: GGG
caaaaaaatgtgtataggcg

SEQ ID NO: 45645 - DNA, 20 bp, Artificial Sequence
  Description of Artificial Sequence: Synthetic oligonucleotide
  Target: ATXN2; (+) strand; PAM type: NRG; PAM sequence: CAG
aaatgtgtataggcggggtg

SEQ ID NO: 45646 - DNA, 20 bp, Artificial Sequence
  Description of Artificial Sequence: Synthetic oligonucleotide
  Target: ATXN2; (+) strand; PAM type: NRG; PAM sequence: TGG
tgtgtataggcggggtgcag

SEQ ID NO: 45647 - DNA, 20 bp, Artificial Sequence
  Description of Artificial Sequence: Synthetic oligonucleotide
  Target: ATXN2; (+) strand; PAM type: NRG; PAM sequence: TGG
cgcctgtaatcccatcactt

SEQ ID NO: 45648 - DNA, 20 bp, Artificial Sequence
  Description of Artificial Sequence: Synthetic oligonucleotide
  Target: ATXN2; (+) strand; PAM type: NRG; PAM sequence: GGG
gcctgtaatcccatcacttt

SEQ ID NO: 45649 - DNA, 20 bp, Artificial Sequence
  Description of Artificial Sequence: Synthetic oligonucleotide
  Target: ATXN2; (+) strand; PAM type: NRG; PAM sequence: GAG
ctgtaatcccatcactttgg

SEQ ID NO: 45650 - DNA, 20 bp, Artificial Sequence
  Description of Artificial Sequence: Synthetic oligonucleotide
  Target: ATXN2; (+) strand; PAM type: NRG; PAM sequence: AGG
tgtaatcccatcactttggg

SEQ ID NO: 45651 - DNA, 20 bp, Artificial Sequence
  Description of Artificial Sequence: Synthetic oligonucleotide
  Target: ATXN2; (+) strand; PAM type: NRG; PAM sequence: GAG
tcccatcactttgggaggcc

SEQ ID NO: 45652 - DNA, 20 bp, Artificial Sequence
  Description of Artificial Sequence: Synthetic oligonucleotide
  Target: ATXN2; (+) strand; PAM type: NRG; PAM sequence: AGG
cccatcactttgggaggccg

SEQ ID NO: 45653 - DNA, 20 bp, Artificial Sequence
  Description of Artificial Sequence: Synthetic oligonucleotide
  Target: ATXN2; (+) strand; PAM type: NRG; PAM sequence: CGG
atcactttgggaggccgagg

SEQ ID NO: 45654 - DNA, 20 bp, Artificial Sequence
  Description of Artificial Sequence: Synthetic oligonucleotide
  Target: ATXN2; (+) strand; PAM type: NRG; PAM sequence: GGG
tcactttgggaggccgaggc

SEQ ID NO: 45655 - DNA, 20 bp, Artificial Sequence
  Description of Artificial Sequence: Synthetic oligonucleotide
  Target: ATXN2; (+) strand; PAM type: NRG; PAM sequence: CGG
ctttgggaggccgaggcggg

SEQ ID NO: 45656 - DNA, 20 bp, Artificial Sequence
  Description of Artificial Sequence: Synthetic oligonucleotide
  Target: ATXN2; (+) strand; PAM type: NRG; PAM sequence: GAG
ccgaggcgggcggatcacct

SEQ ID NO: 45657 - DNA, 20 bp, Artificial Sequence
  Description of Artificial Sequence: Synthetic oligonucleotide
  Target: ATXN2; (+) strand; PAM type: NRG; PAM sequence: AGG
cgaggcgggcggatcacctg

SEQ ID NO: 45658 - DNA, 20 bp, Artificial Sequence
  Description of Artificial Sequence: Synthetic oligonucleotide
  Target: ATXN2; (+) strand; PAM type: NRG; PAM sequence: CGG
cgggcggatcacctgaggtc

SEQ ID NO: 45659 - DNA, 20 bp, Artificial Sequence
  Description of Artificial Sequence: Synthetic oligonucleotide
  Target: ATXN2; (+) strand; PAM type: NRG; PAM sequence: GAG
ggcggatcacctgaggtccg

SEQ ID NO: 45660 - DNA, 20 bp, Artificial Sequence
  Description of Artificial Sequence: Synthetic oligonucleotide
  Target: ATXN2; (+) strand; PAM type: NRG; PAM sequence: GAG
tcacctgaggtccggagttc

SEQ ID NO: 45661 - DNA, 20 bp, Artificial Sequence
  Description of Artificial Sequence: Synthetic oligonucleotide
  Target: ATXN2; (+) strand; PAM type: NRG; PAM sequence: CAG
tgaggtccggagttcgagac

SEQ ID NO: 45662 - DNA, 20 bp, Artificial Sequence
  Description of Artificial Sequence: Synthetic oligonucleotide
  Target: ATXN2; (+) strand; PAM type: NRG; PAM sequence: TGG
cgagaccagcctgaccaaca

SEQ ID NO: 45663 - DNA, 20 bp, Artificial Sequence
  Description of Artificial Sequence: Synthetic oligonucleotide
  Target: ATXN2; (+) strand; PAM type: NRG; PAM sequence: GAG
agaccagcctgaccaacatg

SEQ ID NO: 45664 - DNA, 20 bp, Artificial Sequence
  Description of Artificial Sequence: Synthetic oligonucleotide
  Target: ATXN2; (+) strand; PAM type: NRG; PAM sequence: TAG
acccccatctctactaaata

SEQ ID NO: 45665 - DNA, 20 bp, Artificial Sequence
  Description of Artificial Sequence: Synthetic oligonucleotide
  Target: ATXN2; (+) strand; PAM type: NRG; PAM sequence: TGG
ctactaaatatagctgtgca

SEQ ID NO: 45666 - DNA, 20 bp, Artificial Sequence
  Description of Artificial Sequence: Synthetic oligonucleotide
  Target: ATXN2; (+) strand; PAM type: NRG; PAM sequence: TGG
ctaaatatagctgtgcatgg

SEQ ID NO: 45667 - DNA, 20 bp, Artificial Sequence
  Description of Artificial Sequence: Synthetic oligonucleotide
  Target: ATXN2; (+) strand; PAM type: NRG; PAM sequence: CAG
gtggtgcatgcctgtaatcc

SEQ ID NO: 45668 - DNA, 20 bp, Artificial Sequence
  Description of Artificial Sequence: Synthetic oligonucleotide
  Target: ATXN2; (+) strand; PAM type: NRG; PAM sequence: CGG
tgcctgtaatcccagctgct

SEQ ID NO: 45669 - DNA, 20 bp, Artificial Sequence
  Description of Artificial Sequence: Synthetic oligonucleotide
  Target: ATXN2; (+) strand; PAM type: NRG; PAM sequence: GGG
gcctgtaatcccagctgctc

SEQ ID NO: 45670 - DNA, 20 bp, Artificial Sequence
  Description of Artificial Sequence: Synthetic oligonucleotide
  Target: ATXN2; (+) strand; PAM type: NRG; PAM sequence: GAG
ctgtaatcccagctgctcgg

SEQ ID NO: 45671 - DNA, 20 bp, Artificial Sequence
  Description of Artificial Sequence: Synthetic oligonucleotide
  Target: ATXN2; (+) strand; PAM type: NRG; PAM sequence: AGG
tgtaatcccagctgctcggg

SEQ ID NO: 45672 - DNA, 20 bp, Artificial Sequence
  Description of Artificial Sequence: Synthetic oligonucleotide
  Target: ATXN2; (+) strand; PAM type: NRG; PAM sequence: AAG
cccagctgctcgggaggctg

SEQ ID NO: 45673 - DNA, 20 bp, Artificial Sequence
  Description of Artificial Sequence: Synthetic oligonucleotide
  Target: ATXN2; (+) strand; PAM type: NRG; PAM sequence: CAG
agctgctcgggaggctgaag

SEQ ID NO: 45674 - DNA, 20 bp, Artificial Sequence
  Description of Artificial Sequence: Synthetic oligonucleotide
  Target: ATXN2; (+) strand; PAM type: NRG; PAM sequence: AGG
gctgctcgggaggctgaagc

SEQ ID NO: 45675 - DNA, 20 bp, Artificial Sequence
  Description of Artificial Sequence: Synthetic oligonucleotide
  Target: ATXN2; (+) strand; PAM type: NRG; PAM sequence: GAG
tgctcgggaggctgaagcag

SEQ ID NO: 45676 - DNA, 20 bp, Artificial Sequence
  Description of Artificial Sequence: Synthetic oligonucleotide
  Target: ATXN2; (+) strand; PAM type: NRG; PAM sequence: TGG
gcaggagaatcacttgaacc

SEQ ID NO: 45677 - DNA, 20 bp, Artificial Sequence
  Description of Artificial Sequence: Synthetic oligonucleotide
  Target: ATXN2; (+) strand; PAM type: NRG; PAM sequence: GGG
caggagaatcacttgaacct

SEQ ID NO: 45678 - DNA, 20 bp, Artificial Sequence
  Description of Artificial Sequence: Synthetic oligonucleotide
  Target: ATXN2; (+) strand; PAM type: NRG; PAM sequence: GAG
ggagaatcacttgaacctgg

SEQ ID NO: 45679 - DNA, 20 bp, Artificial Sequence
  Description of Artificial Sequence: Synthetic oligonucleotide
  Target: ATXN2; (+) strand; PAM type: NRG; PAM sequence: AGG
gagaatcacttgaacctggg

SEQ ID NO: 45680 - DNA, 20 bp, Artificial Sequence
  Description of Artificial Sequence: Synthetic oligonucleotide
  Target: ATXN2; (+) strand; PAM type: NRG; PAM sequence: CAG
aatcacttgaacctgggagg

SEQ ID NO: 45681 - DNA, 20 bp, Artificial Sequence
  Description of Artificial Sequence: Synthetic oligonucleotide
  Target: ATXN2; (+) strand; PAM type: NRG; PAM sequence: GAG
tcacttgaacctgggaggca

SEQ ID NO: 45682 - DNA, 20 bp, Artificial Sequence
  Description of Artificial Sequence: Synthetic oligonucleotide
  Target: ATXN2; (+) strand; PAM type: NRG; PAM sequence: AGG
cacttgaacctgggaggcag

SEQ ID NO: 45683 - DNA, 20 bp, Artificial Sequence
  Description of Artificial Sequence: Synthetic oligonucleotide
  Target: ATXN2; (+) strand; PAM type: NRG; PAM sequence: CGG
aacctgggaggcagaggctg

SEQ ID NO: 45684 - DNA, 20 bp, Artificial Sequence
  Description of Artificial Sequence: Synthetic oligonucleotide
  Target: ATXN2; (+) strand; PAM type: NRG; PAM sequence: GAG
tgggaggcagaggctgcggt

SEQ ID NO: 45685 - DNA, 20 bp, Artificial Sequence
  Description of Artificial Sequence: Synthetic oligonucleotide
  Target: ATXN2; (+) strand; PAM type: NRG; PAM sequence: GAG
ggcagaggctgcggtgagcc

SEQ ID NO: 45686 - DNA, 20 bp, Artificial Sequence
  Description of Artificial Sequence: Synthetic oligonucleotide
  Target: ATXN2; (+) strand; PAM type: NRG; PAM sequence: CAG
gagatcgcaccattgcactc

SEQ ID NO: 45687 - DNA, 20 bp, Artificial Sequence
  Description of Artificial Sequence: Synthetic oligonucleotide
  Target: ATXN2; (+) strand; PAM type: NRG; PAM sequence: TGG
cgcaccattgcactccagcc

SEQ ID NO: 45688 - DNA, 20 bp, Artificial Sequence
  Description of Artificial Sequence: Synthetic oligonucleotide
  Target: ATXN2; (+) strand; PAM type: NRG; PAM sequence: GGG
gcaccattgcactccagcct

SEQ ID NO: 45689 - DNA, 20 bp, Artificial Sequence
  Description of Artificial Sequence: Synthetic oligonucleotide
  Target: ATXN2; (+) strand; PAM type: NRG; PAM sequence: AAG
tgcactccagcctgggtaac

SEQ ID NO: 45690 - DNA, 20 bp, Artificial Sequence
  Description of Artificial Sequence: Synthetic oligonucleotide
  Target: ATXN2; (+) strand; PAM type: NRG; PAM sequence: GAG
cactccagcctgggtaacaa

SEQ ID NO: 45691 - DNA, 20 bp, Artificial Sequence
  Description of Artificial Sequence: Synthetic oligonucleotide
  Target: ATXN2; (+) strand; PAM type: NRG; PAM sequence: CAG
tctgtttaaaattaaatcaa

SEQ ID NO: 45692 - DNA, 20 bp, Artificial Sequence
  Description of Artificial Sequence: Synthetic oligonucleotide
  Target: ATXN2; (+) strand; PAM type: NRG; PAM sequence: AGG
ctgtttaaaattaaatcaac

SEQ ID NO: 45693 - DNA, 20 bp, Artificial Sequence
  Description of Artificial Sequence: Synthetic oligonucleotide
  Target: ATXN2; (+) strand; PAM type: NRG; PAM sequence: TGG
ttaaaattaaatcaacaggc

SEQ ID NO: 45694 - DNA, 20 bp, Artificial Sequence
  Description of Artificial Sequence: Synthetic oligonucleotide
  Target: ATXN2; (+) strand; PAM type: NRG; PAM sequence: GGG
taaaattaaatcaacaggct

SEQ ID NO: 45695 - DNA, 20 bp, Artificial Sequence
  Description of Artificial Sequence: Synthetic oligonucleotide
  Target: ATXN2; (+) strand; PAM type: NRG; PAM sequence: CAG
ttaaatcaacaggctgggca

SEQ ID NO: 45696 - DNA, 20 bp, Artificial Sequence
  Description of Artificial Sequence: Synthetic oligonucleotide
  Target: ATXN2; (+) strand; PAM type: NRG; PAM sequence: TGG
aatcaacaggctgggcacag

SEQ ID NO: 45697 - DNA, 20 bp, Artificial Sequence
  Description of Artificial Sequence: Synthetic oligonucleotide
  Target: ATXN2; (+) strand; PAM type: NRG; PAM sequence: CAG
gtggctcacatctgtaatcc

SEQ ID NO: 45698 - DNA, 20 bp, Artificial Sequence
  Description of Artificial Sequence: Synthetic oligonucleotide
  Target: ATXN2; (+) strand; PAM type: NRG; PAM sequence: TGG
catctgtaatcccagcactt

SEQ ID NO: 45699 - DNA, 20 bp, Artificial Sequence
  Description of Artificial Sequence: Synthetic oligonucleotide
  Target: ATXN2; (+) strand; PAM type: NRG; PAM sequence: GGG
atctgtaatcccagcacttt

SEQ ID NO: 45700 - DNA, 20 bp, Artificial Sequence
  Description of Artificial Sequence: Synthetic oligonucleotide
  Target: ATXN2; (+) strand; PAM type: NRG; PAM sequence: GAG
ctgtaatcccagcactttgg

SEQ ID NO: 45701 - DNA, 20 bp, Artificial Sequence
  Description of Artificial Sequence: Synthetic oligonucleotide
  Target: ATXN2; (+) strand; PAM type: NRG; PAM sequence: AGG
tgtaatcccagcactttggg

SEQ ID NO: 45702 - DNA, 20 bp, Artificial Sequence
  Description of Artificial Sequence: Synthetic oligonucleotide
  Target: ATXN2; (+) strand; PAM type: NRG; PAM sequence: GAG
tcccagcactttgggaggct

SEQ ID NO: 45703 - DNA, 20 bp, Artificial Sequence
  Description of Artificial Sequence: Synthetic oligonucleotide
  Target: ATXN2; (+) strand; PAM type: NRG; PAM sequence: AGG
cccagcactttgggaggctg

SEQ ID NO: 45704 - DNA, 20 bp, Artificial Sequence
  Description of Artificial Sequence: Synthetic oligonucleotide
  Target: ATXN2; (+) strand; PAM type: NRG; PAM sequence: CGG
agcactttgggaggctgagg

SEQ ID NO: 45705 - DNA, 20 bp, Artificial Sequence
  Description of Artificial Sequence: Synthetic oligonucleotide
  Target: ATXN2; (+) strand; PAM type: NRG; PAM sequence: GGG
gcactttgggaggctgaggc

SEQ ID NO: 45706 - DNA, 20 bp, Artificial Sequence
  Description of Artificial Sequence: Synthetic oligonucleotide
  Target: ATXN2; (+) strand; PAM type: NRG; PAM sequence: TGG
ctttgggaggctgaggcggg

SEQ ID NO: 45707 - DNA, 20 bp, Artificial Sequence
  Description of Artificial Sequence: Synthetic oligonucleotide
  Target: ATXN2; (+) strand; PAM type: NRG; PAM sequence: GAG
ggctgaggcgggtggatcat

SEQ ID NO: 45708 - DNA, 20 bp, Artificial Sequence
  Description of Artificial Sequence: Synthetic oligonucleotide
  Target: ATXN2; (+) strand; PAM type: NRG; PAM sequence: AGG
gctgaggcgggtggatcatg

SEQ ID NO: 45709 - DNA, 20 bp, Artificial Sequence
  Description of Artificial Sequence: Synthetic oligonucleotide
  Target: ATXN2; (+) strand; PAM type: NRG; PAM sequence: AAG
ggcgggtggatcatgaggtc

SEQ ID NO: 45710 - DNA, 20 bp, Artificial Sequence
  Description of Artificial Sequence: Synthetic oligonucleotide
  Target: ATXN2; (+) strand; PAM type: NRG; PAM sequence: GAG
cgggtggatcatgaggtcaa

SEQ ID NO: 45711 - DNA, 20 bp, Artificial Sequence
  Description of Artificial Sequence: Synthetic oligonucleotide
  Target: ATXN2; (+) strand; PAM type: NRG; PAM sequence: GAG
gatcatgaggtcaagagatc

SEQ ID NO: 45712 - DNA, 20 bp, Artificial Sequence
  Description of Artificial Sequence: Synthetic oligonucleotide
  Target: ATXN2; (+) strand; PAM type: NRG; PAM sequence: TGG
tcaagagatcgagaccatcc

SEQ ID NO: 45713 - DNA, 20 bp, Artificial Sequence
  Description of Artificial Sequence: Synthetic oligonucleotide
  Target: ATXN2; (+) strand; PAM type: NRG; PAM sequence: TGG
cgagaccatcctggccaaca

SEQ ID NO: 45714 - DNA, 20 bp, Artificial Sequence
  Description of Artificial Sequence: Synthetic oligonucleotide
  Target: ATXN2; (+) strand; PAM type: NRG; PAM sequence: TAG
tctactaaaaatacaaaaat

SEQ ID NO: 45715 - DNA, 20 bp, Artificial Sequence
  Description of Artificial Sequence: Synthetic oligonucleotide
  Target: ATXN2; (+) strand; PAM type: NRG; PAM sequence: AGG
ctactaaaaatacaaaaatt

SEQ ID NO: 45716 - DNA, 20 bp, Artificial Sequence
  Description of Artificial Sequence: Synthetic oligonucleotide
  Target: ATXN2; (+) strand; PAM type: NRG; PAM sequence: TAG
ctaaaaatacaaaaattagg

SEQ ID NO: 45717 - DNA, 20 bp, Artificial Sequence
  Description of Artificial Sequence: Synthetic oligonucleotide
  Target: ATXN2; (+) strand; PAM type: NRG; PAM sequence: AGG
taaaaatacaaaaattaggt

SEQ ID NO: 45718 - DNA, 20 bp, Artificial Sequence
  Description of Artificial Sequence: Synthetic oligonucleotide
  Target: ATXN2; (+) strand; PAM type: NRG; PAM sequence: TGG
atacaaaaattaggtaggcg

SEQ ID NO: 45719 - DNA, 20 bp, Artificial Sequence
  Description of Artificial Sequence: Synthetic oligonucleotide
  Target: ATXN2; (+) strand; PAM type: NRG; PAM sequence: TGG
caaaaattaggtaggcgtgg

SEQ ID NO: 45720 - DNA, 20 bp, Artificial Sequence
  Description of Artificial Sequence: Synthetic oligonucleotide
  Target: ATXN2; (+) strand; PAM type: NRG; PAM sequence: TAG
ggcgtggtggtacacgccta

SEQ ID NO: 45721 - DNA, 20 bp, Artificial Sequence
  Description of Artificial Sequence: Synthetic oligonucleotide
  Target: ATXN2; (+) strand; PAM type: NRG; PAM sequence: CAG
gtggtacacgcctatagtcc

SEQ ID NO: 45722 - DNA, 20 bp, Artificial Sequence
  Description of Artificial Sequence: Synthetic oligonucleotide
  Target: ATXN2; (+) strand; PAM type: NRG; PAM sequence: CGG
cgcctatagtcccagctact

SEQ ID NO: 45723 - DNA, 20 bp, Artificial Sequence
  Description of Artificial Sequence: Synthetic oligonucleotide
  Target: ATXN2; (+) strand; PAM type: NRG; PAM sequence: GGG
gcctatagtcccagctactc

SEQ ID NO: 45724 - DNA, 20 bp, Artificial Sequence
  Description of Artificial Sequence: Synthetic oligonucleotide
  Target: ATXN2; (+) strand; PAM type: NRG; PAM sequence: GAG
ctatagtcccagctactcgg

SEQ ID NO: 45725 - DNA, 20 bp, Artificial Sequence
  Description of Artificial Sequence: Synthetic oligonucleotide
  Target: ATXN2; (+) strand; PAM type: NRG; PAM sequence: AGG
tatagtcccagctactcggg

SEQ ID NO: 45726 - DNA, 20 bp, Artificial Sequence
  Description of Artificial Sequence: Synthetic oligonucleotide
  Target: ATXN2; (+) strand; PAM type: NRG; PAM sequence: GAG
tcccagctactcgggaggct

SEQ ID NO: 45727 - DNA, 20 bp, Artificial Sequence
  Description of Artificial Sequence: Synthetic oligonucleotide
  Target: ATXN2; (+) strand; PAM type: NRG; PAM sequence: AGG
cccagctactcgggaggctg

SEQ ID NO: 45728 - DNA, 20 bp, Artificial Sequence
  Description of Artificial Sequence: Synthetic oligonucleotide
  Target: ATXN2; (+) strand; PAM type: NRG; PAM sequence: CAG
agctactcgggaggctgagg

SEQ ID NO: 45729 - DNA, 20 bp, Artificial Sequence
  Description of Artificial Sequence: Synthetic oligonucleotide
  Target: ATXN2; (+) strand; PAM type: NRG; PAM sequence: AGG
gctactcgggaggctgaggc

SEQ ID NO: 45730 - DNA, 20 bp, Artificial Sequence
  Description of Artificial Sequence: Synthetic oligonucleotide
  Target: ATXN2; (+) strand; PAM type: NRG; PAM sequence: TAG
ccttgaattgcttgaactac

SEQ ID NO: 45731 - DNA, 20 bp, Artificial Sequence
  Description of Artificial Sequence: Synthetic oligonucleotide
  Target: ATXN2; (+) strand; PAM type: NRG; PAM sequence: AGG
cttgaattgcttgaactact

SEQ ID NO: 45732 - DNA, 20 bp, Artificial Sequence
  Description of Artificial Sequence: Synthetic oligonucleotide
  Target: ATXN2; (+) strand; PAM type: NRG; PAM sequence: GGG
ttgaattgcttgaactacta

SEQ ID NO: 45733 - DNA, 20 bp, Artificial Sequence
  Description of Artificial Sequence: Synthetic oligonucleotide
  Target: ATXN2; (+) strand; PAM type: NRG; PAM sequence: GAG
gaattgcttgaactactagg

SEQ ID NO: 45734 - DNA, 20 bp, Artificial Sequence
  Description of Artificial Sequence: Synthetic oligonucleotide
  Target: ATXN2; (+) strand; PAM type: NRG; PAM sequence: AGG
aattgcttgaactactaggg

SEQ ID NO: 45735 - DNA, 20 bp, Artificial Sequence
  Description of Artificial Sequence: Synthetic oligonucleotide
  Target: ATXN2; (+) strand; PAM type: NRG; PAM sequence: CGG
tgcttgaactactagggagg

SEQ ID NO: 45736 - DNA, 20 bp, Artificial Sequence
  Description of Artificial Sequence: Synthetic oligonucleotide
  Target: ATXN2; (+) strand; PAM type: NRG; PAM sequence: GAG
cttgaactactagggaggcg

SEQ ID NO: 45737 - DNA, 20 bp, Artificial Sequence
  Description of Artificial Sequence: Synthetic oligonucleotide
  Target: ATXN2; (+) strand; PAM type: NRG; PAM sequence: AGG
ttgaactactagggaggcgg

SEQ ID NO: 45738 - DNA, 20 bp, Artificial Sequence
  Description of Artificial Sequence: Synthetic oligonucleotide
  Target: ATXN2; (+) strand; PAM type: NRG; PAM sequence: TAG
tactagggaggcggaggttg

SEQ ID NO: 45739 - DNA, 20 bp, Artificial Sequence
  Description of Artificial Sequence: Synthetic oligonucleotide
  Target: ATXN2; (+) strand; PAM type: NRG; PAM sequence: GAG
agggaggcggaggttgtagt

SEQ ID NO: 45740 - DNA, 20 bp, Artificial Sequence
  Description of Artificial Sequence: Synthetic oligonucleotide
  Target: ATXN2; (+) strand; PAM type: NRG; PAM sequence: AAG
ggcggaggttgtagtgagcc

SEQ ID NO: 45741 - DNA, 20 bp, Artificial Sequence
  Description of Artificial Sequence: Synthetic oligonucleotide
  Target: ATXN2; (+) strand; PAM type: NRG; PAM sequence: TGG
tgcgccactgcactccaacc

SEQ ID NO: 45742 - DNA, 20 bp, Artificial Sequence
  Description of Artificial Sequence: Synthetic oligonucleotide
  Target: ATXN2; (+) strand; PAM type: NRG; PAM sequence: GAG
ccactgcactccaacctggc

SEQ ID NO: 45743 - DNA, 20 bp, Artificial Sequence
  Description of Artificial Sequence: Synthetic oligonucleotide
  Target: ATXN2; (+) strand; PAM type: NRG; PAM sequence: GAG
actgcactccaacctggcga

SEQ ID NO: 45744 - DNA, 20 bp, Artificial Sequence
  Description of Artificial Sequence: Synthetic oligonucleotide
  Target: ATXN2; (+) strand; PAM type: NRG; PAM sequence: GAG
cactccaacctggcgagagc

SEQ ID NO: 45745 - DNA, 20 bp, Artificial Sequence
  Description of Artificial Sequence: Synthetic oligonucleotide
  Target: ATXN2; (+) strand; PAM type: NRG; PAM sequence: AAG
acattttctgaattgtacac

SEQ ID NO: 45746 - DNA, 20 bp, Artificial Sequence
  Description of Artificial Sequence: Synthetic oligonucleotide
  Target: ATXN2; (+) strand; PAM type: NRG; PAM sequence: CAG
ctgaattgtacacaagaaca

SEQ ID NO: 45747 - DNA, 20 bp, Artificial Sequence
  Description of Artificial Sequence: Synthetic oligonucleotide
  Target: ATXN2; (+) strand; PAM type: NRG; PAM sequence: AGG
tgaattgtacacaagaacac

SEQ ID NO: 45748 - DNA, 20 bp, Artificial Sequence
  Description of Artificial Sequence: Synthetic oligonucleotide
  Target: ATXN2; (+) strand; PAM type: NRG; PAM sequence: CAG
cacaagaacacaggcttccc

SEQ ID NO: 45749 - DNA, 20 bp, Artificial Sequence
  Description of Artificial Sequence: Synthetic oligonucleotide
  Target: ATXN2; (+) strand; PAM type: NRG; PAM sequence: AGG
acaagaacacaggcttcccc

SEQ ID NO: 45750 - DNA, 20 bp, Artificial Sequence
  Description of Artificial Sequence: Synthetic oligonucleotide
  Target: ATXN2; (+) strand; PAM type: NRG; PAM sequence: GGG
caagaacacaggcttcccca

SEQ ID NO: 45751 - DNA, 20 bp, Artificial Sequence
  Description of Artificial Sequence: Synthetic oligonucleotide
  Target: ATXN2; (+) strand; PAM type: NRG; PAM sequence: AAG
gaacacaggcttccccaggg

SEQ ID NO: 45752 - DNA, 20 bp, Artificial Sequence
  Description of Artificial Sequence: Synthetic oligonucleotide
  Target: ATXN2; (+) strand; PAM type: NRG; PAM sequence: TGG
cacaggcttccccagggaag

SEQ ID NO: 45753 - DNA, 20 bp, Artificial Sequence
  Description of Artificial Sequence: Synthetic oligonucleotide
  Target: ATXN2; (+) strand; PAM type: NRG; PAM sequence: GGG
acaggcttccccagggaagt

SEQ ID NO: 45754 - DNA, 20 bp, Artificial Sequence
  Description of Artificial Sequence: Synthetic oligonucleotide
  Target: ATXN2; (+) strand; PAM type: NRG; PAM sequence: TGG
cttccccagggaagtgggac

SEQ ID NO: 45755 - DNA, 20 bp, Artificial Sequence
  Description of Artificial Sequence: Synthetic oligonucleotide
  Target: ATXN2; (+) strand; PAM type: NRG; PAM sequence: GGG
ttccccagggaagtgggact

SEQ ID NO: 45756 - DNA, 20 bp, Artificial Sequence
  Description of Artificial Sequence: Synthetic oligonucleotide
  Target: ATXN2; (+) strand; PAM type: NRG; PAM sequence: GGG
tccccagggaagtgggactg

SEQ ID NO: 45757 - DNA, 20 bp, Artificial Sequence
  Description of Artificial Sequence: Synthetic oligonucleotide
  Target: ATXN2; (+) strand; PAM type: NRG; PAM sequence: GGG
ccccagggaagtgggactgg

SEQ ID NO: 45758 - DNA, 20 bp, Artificial Sequence
  Description of Artificial Sequence: Synthetic oligonucleotide
  Target: ATXN2; (+) strand; PAM type: NRG; PAM sequence: TAG
agggaagtgggactgggggt

SEQ ID NO: 45759 - DNA, 20 bp, Artificial Sequence
  Description of Artificial Sequence: Synthetic oligonucleotide
  Target: ATXN2; (+) strand; PAM type: NRG; PAM sequence: GAG
ggaagtgggactgggggtta

SEQ ID NO: 45760 - DNA, 20 bp, Artificial Sequence
  Description of Artificial Sequence: Synthetic oligonucleotide
  Target: ATXN2; (+) strand; PAM type: NRG; PAM sequence: GAG
aagtgggactgggggttaga

SEQ ID NO: 45761 - DNA, 20 bp, Artificial Sequence
  Description of Artificial Sequence: Synthetic oligonucleotide
  Target: ATXN2; (+) strand; PAM type: NRG; PAM sequence: AGG
agtgggactgggggttagag

SEQ ID NO: 45762 - DNA, 20 bp, Artificial Sequence
  Description of Artificial Sequence: Synthetic oligonucleotide
  Target: ATXN2; (+) strand; PAM type: NRG; PAM sequence: GAG
tgggactgggggttagagag

SEQ ID NO: 45763 - DNA, 20 bp, Artificial Sequence
  Description of Artificial Sequence: Synthetic oligonucleotide
  Target: ATXN2; (+) strand; PAM type: NRG; PAM sequence: GAG
ctaactgaattgtatactac

SEQ ID NO: 45764 - DNA, 20 bp, Artificial Sequence
  Description of Artificial Sequence: Synthetic oligonucleotide
  Target: ATXN2; (+) strand; PAM type: NRG; PAM sequence: CAG
ctactacaccatgtattata

SEQ ID NO: 45765 - DNA, 20 bp, Artificial Sequence
  Description of Artificial Sequence: Synthetic oligonucleotide
  Target: ATXN2; (+) strand; PAM type: NRG; PAM sequence: AAG
gtattatacagattatatta

SEQ ID NO: 45766 - DNA, 20 bp, Artificial Sequence
  Description of Artificial Sequence: Synthetic oligonucleotide
  Target: ATXN2; (+) strand; PAM type: NRG; PAM sequence: AAG
tattaaagactataatactg

SEQ ID NO: 45767 - DNA, 20 bp, Artificial Sequence
  Description of Artificial Sequence: Synthetic oligonucleotide
  Target: ATXN2; (+) strand; PAM type: NRG; PAM sequence: AAG
taatactgaagaataacaca

SEQ ID NO: 45768 - DNA, 20 bp, Artificial Sequence
  Description of Artificial Sequence: Synthetic oligonucleotide
  Target: ATXN2; (+) strand; PAM type: NRG; PAM sequence: AAG
gaagaataacacaaagaaac

SEQ ID NO: 45769 - DNA, 20 bp, Artificial Sequence
  Description of Artificial Sequence: Synthetic oligonucleotide
  Target: ATXN2; (+) strand; PAM type: NRG; PAM sequence: TGG
aataacacaaagaaacaagt

SEQ ID NO: 45770 - DNA, 20 bp, Artificial Sequence
  Description of Artificial Sequence: Synthetic oligonucleotide
  Target: ATXN2; (+) strand; PAM type: NRG; PAM sequence: GGG
ataacacaaagaaacaagtt

SEQ ID NO: 45771 - DNA, 20 bp, Artificial Sequence
  Description of Artificial Sequence: Synthetic oligonucleotide
  Target: ATXN2; (+) strand; PAM type: NRG; PAM sequence: GGG
taacacaaagaaacaagttg

SEQ ID NO: 45772 - DNA, 20 bp, Artificial Sequence
  Description of Artificial Sequence: Synthetic oligonucleotide
  Target: ATXN2; (+) strand; PAM type: NRG; PAM sequence: AAG
caaagaaacaagttggggat

SEQ ID NO: 45773 - DNA, 20 bp, Artificial Sequence
  Description of Artificial Sequence: Synthetic oligonucleotide
  Target: ATXN2; (+) strand; PAM type: NRG; PAM sequence: CAG
caagttggggataagaaaca

SEQ ID NO: 45774 - DNA, 20 bp, Artificial Sequence
  Description of Artificial Sequence: Synthetic oligonucleotide
  Target: ATXN2; (+) strand; PAM type: NRG; PAM sequence: AAG
tggggataagaaacacagtt

SEQ ID NO: 45775 - DNA, 20 bp, Artificial Sequence
  Description of Artificial Sequence: Synthetic oligonucleotide
  Target: ATXN2; (+) strand; PAM type: NRG; PAM sequence: AGG
ggggataagaaacacagtta

SEQ ID NO: 45776 - DNA, 20 bp, Artificial Sequence
  Description of Artificial Sequence: Synthetic oligonucleotide
  Target: ATXN2; (+) strand; PAM type: NRG; PAM sequence: GGG
gggataagaaacacagttaa

SEQ ID NO: 45777 - DNA, 20 bp, Artificial Sequence
  Description of Artificial Sequence: Synthetic oligonucleotide
  Target: ATXN2; (+) strand; PAM type: NRG; PAM sequence: CAG
aagaaacacagttaagggtg

SEQ ID NO: 45778 - DNA, 20 bp, Artificial Sequence
  Description of Artificial Sequence: Synthetic oligonucleotide
  Target: ATXN2; (+) strand; PAM type: NRG; PAM sequence: AGG
agaaacacagttaagggtgc

SEQ ID NO: 45779 - DNA, 20 bp, Artificial Sequence
  Description of Artificial Sequence: Synthetic oligonucleotide
  Target: ATXN2; (+) strand; PAM type: NRG; PAM sequence: TGG
agttaagggtgcaggatgta

SEQ ID NO: 45780 - DNA, 20 bp, Artificial Sequence
  Description of Artificial Sequence: Synthetic oligonucleotide
  Target: ATXN2; (+) strand; PAM type: NRG; PAM sequence: TGG
agggtgcaggatgtatggac

SEQ ID NO: 45781 - DNA, 20 bp, Artificial Sequence
  Description of Artificial Sequence: Synthetic oligonucleotide
  Target: ATXN2; (+) strand; PAM type: NRG; PAM sequence: AAG
tggactggaacaacaaaacc

SEQ ID NO: 45782 - DNA, 20 bp, Artificial Sequence
  Description of Artificial Sequence: Synthetic oligonucleotide
  Target: ATXN2; (+) strand; PAM type: NRG; PAM sequence: AGG
ggactggaacaacaaaacca

SEQ ID NO: 45783 - DNA, 20 bp, Artificial Sequence
  Description of Artificial Sequence: Synthetic oligonucleotide
  Target: ATXN2; (+) strand; PAM type: NRG; PAM sequence: GGG
gactggaacaacaaaaccaa

SEQ ID NO: 45784 - DNA, 20 bp, Artificial Sequence
  Description of Artificial Sequence: Synthetic oligonucleotide
  Target: ATXN2; (+) strand; PAM type: NRG; PAM sequence: CAG
gaacaacaaaaccaagggca

SEQ ID NO: 45785 - DNA, 20 bp, Artificial Sequence
  Description of Artificial Sequence: Synthetic oligonucleotide
  Target: ATXN2; (+) strand; PAM type: NRG; PAM sequence: AGG
aacaacaaaaccaagggcac

SEQ ID NO: 45786 - DNA, 20 bp, Artificial Sequence
  Description of Artificial Sequence: Synthetic oligonucleotide
  Target: ATXN2; (+) strand; PAM type: NRG; PAM sequence: TGG
aacaaaaccaagggcacagg

SEQ ID NO: 45787 - DNA, 20 bp, Artificial Sequence
  Description of Artificial Sequence: Synthetic oligonucleotide
  Target: ATXN2; (+) strand; PAM type: NRG; PAM sequence: GAG
caaaaccaagggcacaggtg

SEQ ID NO: 45788 - DNA, 20 bp, Artificial Sequence
  Description of Artificial Sequence: Synthetic oligonucleotide
  Target: ATXN2; (+) strand; PAM type: NRG; PAM sequence: CAG
acaggtggagccacgctcct

SEQ ID NO: 45789 - DNA, 20 bp, Artificial Sequence
  Description of Artificial Sequence: Synthetic oligonucleotide
  Target: ATXN2; (+) strand; PAM type: NRG; PAM sequence: AGG
caggtggagccacgctcctc

SEQ ID NO: 45790 - DNA, 20 bp, Artificial Sequence
  Description of Artificial Sequence: Synthetic oligonucleotide
  Target: ATXN2; (+) strand; PAM type: NRG; PAM sequence: TAG
tggagccacgctcctcaggc

SEQ ID NO: 45791 - DNA, 20 bp, Artificial Sequence
  Description of Artificial Sequence: Synthetic oligonucleotide
  Target: ATXN2; (+) strand; PAM type: NRG; PAM sequence: TGG
ccacgctcctcaggctagaa

SEQ ID NO: 45792 - DNA, 20 bp, Artificial Sequence
  Description of Artificial Sequence: Synthetic oligonucleotide
  Target: ATXN2; (+) strand; PAM type: NRG; PAM sequence: GGG
cacgctcctcaggctagaat

SEQ ID NO: 45793 - DNA, 20 bp, Artificial Sequence
  Description of Artificial Sequence: Synthetic oligonucleotide
  Target: ATXN2; (+) strand; PAM type: NRG; PAM sequence: GGG
acgctcctcaggctagaatg

SEQ ID NO: 45794 - DNA, 20 bp, Artificial Sequence
  Description of Artificial Sequence: Synthetic oligonucleotide
  Target: ATXN2; (+) strand; PAM type: NRG; PAM sequence: TAG
ctcctcaggctagaatgggg

SEQ ID NO: 45795 - DNA, 20 bp, Artificial Sequence
  Description of Artificial Sequence: Synthetic oligonucleotide
  Target: ATXN2; (+) strand; PAM type: NRG; PAM sequence: AGG
tcctcaggctagaatggggt

SEQ ID NO: 45796 - DNA, 20 bp, Artificial Sequence
  Description of Artificial Sequence: Synthetic oligonucleotide
  Target: ATXN2; (+) strand; PAM type: NRG; PAM sequence: GGG
cctcaggctagaatggggta

SEQ ID NO: 45797 - DNA, 20 bp, Artificial Sequence
  Description of Artificial Sequence: Synthetic oligonucleotide
  Target: ATXN2; (+) strand; PAM type: NRG; PAM sequence: GGG
ctcaggctagaatggggtag

SEQ ID NO: 45798 - DNA, 20 bp, Artificial Sequence
  Description of Artificial Sequence: Synthetic oligonucleotide
  Target: ATXN2; (+) strand; PAM type: NRG; PAM sequence: AAG
gggtaggggtatgatgacaa

SEQ ID NO: 45799 - DNA, 20 bp, Artificial Sequence
  Description of Artificial Sequence: Synthetic oligonucleotide
  Target: ATXN2; (+) strand; PAM type: NRG; PAM sequence: GAG
gtaggggtatgatgacaaaa

SEQ ID NO: 45800 - DNA, 20 bp, Artificial Sequence
  Description of Artificial Sequence: Synthetic oligonucleotide
  Target: ATXN2; (+) strand; PAM type: NRG; PAM sequence: AGG
taggggtatgatgacaaaag

SEQ ID NO: 45801 - DNA, 20 bp, Artificial Sequence
  Description of Artificial Sequence: Synthetic oligonucleotide
  Target: ATXN2; (+) strand; PAM type: NRG; PAM sequence: TGG
atgatgacaaaagaggactg

SEQ ID NO: 45802 - DNA, 20 bp, Artificial Sequence
  Description of Artificial Sequence: Synthetic oligonucleotide
  Target: ATXN2; (+) strand; PAM type: NRG; PAM sequence: GGG
tgatgacaaaagaggactgt

SEQ ID NO: 45803 - DNA, 20 bp, Artificial Sequence
  Description of Artificial Sequence: Synthetic oligonucleotide
  Target: ATXN2; (+) strand; PAM type: NRG; PAM sequence: GGG
gatgacaaaagaggactgtg

SEQ ID NO: 45804 - DNA, 20 bp, Artificial Sequence
  Description of Artificial Sequence: Synthetic oligonucleotide
  Target: ATXN2; (+) strand; PAM type: NRG; PAM sequence: GAG
tgacaaaagaggactgtggg

SEQ ID NO: 45805 - DNA, 20 bp, Artificial Sequence
  Description of Artificial Sequence: Synthetic oligonucleotide
  Target: ATXN2; (+) strand; PAM type: NRG; PAM sequence: TAG
agaggactgtggggagcctc

SEQ ID NO: 45806 - DNA, 20 bp, Artificial Sequence
  Description of Artificial Sequence: Synthetic oligonucleotide
  Target: ATXN2; (+) strand; PAM type: NRG; PAM sequence: TAG
actgtggggagcctctagat

SEQ ID NO: 45807 - DNA, 20 bp, Artificial Sequence
  Description of Artificial Sequence: Synthetic oligonucleotide
  Target: ATXN2; (+) strand; PAM type: NRG; PAM sequence: AGG
ctgtggggagcctctagatt

SEQ ID NO: 45808 - DNA, 20 bp, Artificial Sequence
  Description of Artificial Sequence: Synthetic oligonucleotide
  Target: ATXN2; (+) strand; PAM type: NRG; PAM sequence: GGG
tgtggggagcctctagatta

SEQ ID NO: 45809 - DNA, 20 bp, Artificial Sequence
  Description of Artificial Sequence: Synthetic oligonucleotide
  Target: ATXN2; (+) strand; PAM type: NRG; PAM sequence: TAG
gcctctagattagggattct

SEQ ID NO: 45810 - DNA, 20 bp, Artificial Sequence
  Description of Artificial Sequence: Synthetic oligonucleotide
  Target: ATXN2; (+) strand; PAM type: NRG; PAM sequence: TGG
ttagcctttttcttaatcca

SEQ ID NO: 45811 - DNA, 20 bp, Artificial Sequence
  Description of Artificial Sequence: Synthetic oligonucleotide
  Target: ATXN2; (+) strand; PAM type: NRG; PAM sequence: GGG
tagcctttttcttaatccat

SEQ ID NO: 45812 - DNA, 20 bp, Artificial Sequence
  Description of Artificial Sequence: Synthetic oligonucleotide
  Target: ATXN2; (+) strand; PAM type: NRG; PAM sequence: TAG
catgggccccttcaatattt

SEQ ID NO: 45813 - DNA, 20 bp, Artificial Sequence
  Description of Artificial Sequence: Synthetic oligonucleotide
  Target: ATXN2; (+) strand; PAM type: NRG; PAM sequence: AGG
atgggccccttcaatatttt

SEQ ID NO: 45814 - DNA, 20 bp, Artificial Sequence
  Description of Artificial Sequence: Synthetic oligonucleotide
  Target: ATXN2; (+) strand; PAM type: NRG; PAM sequence: GGG
tgggccccttcaatatttta

SEQ ID NO: 45815 - DNA, 20 bp, Artificial Sequence
  Description of Artificial Sequence: Synthetic oligonucleotide
  Target: ATXN2; (+) strand; PAM type: NRG; PAM sequence: AAG
gccccttcaatattttaggg

SEQ ID NO: 45816 - DNA, 20 bp, Artificial Sequence
  Description of Artificial Sequence: Synthetic oligonucleotide
  Target: ATXN2; (+) strand; PAM type: NRG; PAM sequence: CAG
gaagcctatgaaaccgtatt

SEQ ID NO: 45817 - DNA, 20 bp, Artificial Sequence
  Description of Artificial Sequence: Synthetic oligonucleotide
  Target: ATXN2; (+) strand; PAM type: NRG; PAM sequence: CAG
acttaaattcgtaaaataca

SEQ ID NO: 45818 - DNA, 20 bp, Artificial Sequence
  Description of Artificial Sequence: Synthetic oligonucleotide
  Target: ATXN2; (+) strand; PAM type: NRG; PAM sequence: AGG
cttaaattcgtaaaatacac

SEQ ID NO: 45819 - DNA, 20 bp, Artificial Sequence
  Description of Artificial Sequence: Synthetic oligonucleotide
  Target: ATXN2; (+) strand; PAM type: NRG; PAM sequence: GAG
aaatacacaggaaatcaaat

SEQ ID NO: 45820 - DNA, 20 bp, Artificial Sequence
  Description of Artificial Sequence: Synthetic oligonucleotide
  Target: ATXN2; (+) strand; PAM type: NRG; PAM sequence: AAG
acaggaaatcaaatgagaac

SEQ ID NO: 45821 - DNA, 20 bp, Artificial Sequence
  Description of Artificial Sequence: Synthetic oligonucleotide
  Target: ATXN2; (+) strand; PAM type: NRG; PAM sequence: CAG
gaacaagtaacaatgaaatg

SEQ ID NO: 45822 - DNA, 20 bp, Artificial Sequence
  Description of Artificial Sequence: Synthetic oligonucleotide
  Target: ATXN2; (+) strand; PAM type: NRG; PAM sequence: TGG
caaaaactaaaaaaatctgt

SEQ ID NO: 45823 - DNA, 20 bp, Artificial Sequence
  Description of Artificial Sequence: Synthetic oligonucleotide
  Target: ATXN2; (+) strand; PAM type: NRG; PAM sequence: TAG
actaaaaaaatctgttggca

SEQ ID NO: 45824 - DNA, 20 bp, Artificial Sequence
  Description of Artificial Sequence: Synthetic oligonucleotide
  Target: ATXN2; (+) strand; PAM type: NRG; PAM sequence: AAG
aacatacatgttcttaatta

SEQ ID NO: 45825 - DNA, 20 bp, Artificial Sequence
  Description of Artificial Sequence: Synthetic oligonucleotide
  Target: ATXN2; (+) strand; PAM type: NRG; PAM sequence: AAG
taattaaagcattaaatatt

SEQ ID NO: 45826 - DNA, 20 bp, Artificial Sequence
  Description of Artificial Sequence: Synthetic oligonucleotide
  Target: ATXN2; (+) strand; PAM type: NRG; PAM sequence: CAG
aagcattaaatattaagatc

SEQ ID NO: 45827 - DNA, 20 bp, Artificial Sequence
  Description of Artificial Sequence: Synthetic oligonucleotide
  Target: ATXN2; (+) strand; PAM type: NRG; PAM sequence: CAG
taaatattaagatccagtaa

SEQ ID NO: 45828 - DNA, 20 bp, Artificial Sequence
  Description of Artificial Sequence: Synthetic oligonucleotide
  Target: ATXN2; (+) strand; PAM type: NRG; PAM sequence: AGG
aaatattaagatccagtaac

SEQ ID NO: 45829 - DNA, 20 bp, Artificial Sequence
  Description of Artificial Sequence: Synthetic oligonucleotide
  Target: ATXN2; (+) strand; PAM type: NRG; PAM sequence: AAG
taataactattataaattta

SEQ ID NO: 45830 - DNA, 20 bp, Artificial Sequence
  Description of Artificial Sequence: Synthetic oligonucleotide
  Target: ATXN2; (+) strand; PAM type: NRG; PAM sequence: GAG
ataactattataaatttaaa

SEQ ID NO: 45831 - DNA, 20 bp, Artificial Sequence
  Description of Artificial Sequence: Synthetic oligonucleotide
  Target: ATXN2; (+) strand; PAM type: NRG; PAM sequence: AGG
taactattataaatttaaag

SEQ ID NO: 45832 - DNA, 20 bp, Artificial Sequence
  Description of Artificial Sequence: Synthetic oligonucleotide
  Target: ATXN2; (+) strand; PAM type: NRG; PAM sequence: AAG
tgaacatacataataatttg

SEQ ID NO: 45833 - DNA, 20 bp, Artificial Sequence
  Description of Artificial Sequence: Synthetic oligonucleotide
  Target: ATXN2; (+) strand; PAM type: NRG; PAM sequence: TGG
atacataataatttgaagcc

SEQ ID NO: 45834 - DNA, 20 bp, Artificial Sequence
  Description of Artificial Sequence: Synthetic oligonucleotide
  Target: ATXN2; (+) strand; PAM type: NRG; PAM sequence: CAG
taataatttgaagcctggtg

SEQ ID NO: 45835 - DNA, 20 bp, Artificial Sequence
  Description of Artificial Sequence: Synthetic oligonucleotide
  Target: ATXN2; (+) strand; PAM type: NRG; PAM sequence: TGG
taatttgaagcctggtgcag

SEQ ID NO: 45836 - DNA, 20 bp, Artificial Sequence
  Description of Artificial Sequence: Synthetic oligonucleotide
  Target: ATXN2; (+) strand; PAM type: NRG; PAM sequence: CAG
gtggcacatgcctataatcc

SEQ ID NO: 45837 - DNA, 20 bp, Artificial Sequence
  Description of Artificial Sequence: Synthetic oligonucleotide
  Target: ATXN2; (+) strand; PAM type: NRG; PAM sequence: CAG
tgcctataatcccagctact

SEQ ID NO: 45838 - DNA, 20 bp, Artificial Sequence
  Description of Artificial Sequence: Synthetic oligonucleotide
  Target: ATXN2; (+) strand; PAM type: NRG; PAM sequence: AGG
gcctataatcccagctactc

SEQ ID NO: 45839 - DNA, 20 bp, Artificial Sequence
  Description of Artificial Sequence: Synthetic oligonucleotide
  Target: ATXN2; (+) strand; PAM type: NRG; PAM sequence: GAG
ctataatcccagctactcag

SEQ ID NO: 45840 - DNA, 20 bp, Artificial Sequence
  Description of Artificial Sequence: Synthetic oligonucleotide
  Target: ATXN2; (+) strand; PAM type: NRG; PAM sequence: AGG
tataatcccagctactcagg

SEQ ID NO: 45841 - DNA, 20 bp, Artificial Sequence
  Description of Artificial Sequence: Synthetic oligonucleotide
  Target: ATXN2; (+) strand; PAM type: NRG; PAM sequence: GAG
tcccagctactcaggaggct

SEQ ID NO: 45842 - DNA, 20 bp, Artificial Sequence
  Description of Artificial Sequence: Synthetic oligonucleotide
  Target: ATXN2; (+) strand; PAM type: NRG; PAM sequence: AGG
cccagctactcaggaggctg

SEQ ID NO: 45843 - DNA, 20 bp, Artificial Sequence
  Description of Artificial Sequence: Synthetic oligonucleotide
  Target: ATXN2; (+) strand; PAM type: NRG; PAM sequence: TGG
agctactcaggaggctgagg

SEQ ID NO: 45844 - DNA, 20 bp, Artificial Sequence
  Description of Artificial Sequence: Synthetic oligonucleotide
  Target: ATXN2; (+) strand; PAM type: NRG; PAM sequence: GGG
gctactcaggaggctgaggt

SEQ ID NO: 45845 - DNA, 20 bp, Artificial Sequence
  Description of Artificial Sequence: Synthetic oligonucleotide
  Target: ATXN2; (+) strand; PAM type: NRG; PAM sequence: GAG
tactcaggaggctgaggtgg

SEQ ID NO: 45846 - DNA, 20 bp, Artificial Sequence
  Description of Artificial Sequence: Synthetic oligonucleotide
  Target: ATXN2; (+) strand; PAM type: NRG; PAM sequence: AGG
actcaggaggctgaggtggg

SEQ ID NO: 45847 - DNA, 20 bp, Artificial Sequence
  Description of Artificial Sequence: Synthetic oligonucleotide
  Target: ATXN2; (+) strand; PAM type: NRG; PAM sequence: GAG
ctgaggtgggaggactgcct

SEQ ID NO: 45848 - DNA, 20 bp, Artificial Sequence
  Description of Artificial Sequence: Synthetic oligonucleotide
  Target: ATXN2; (+) strand; PAM type: NRG; PAM sequence: AAG
ggaggactgcctgagcccac

SEQ ID NO: 45849 - DNA, 20 bp, Artificial Sequence
  Description of Artificial Sequence: Synthetic oligonucleotide
  Target: ATXN2; (+) strand; PAM type: NRG; PAM sequence: AAG
ctgcctgagcccacaagttc

SEQ ID NO: 45850 - DNA, 20 bp, Artificial Sequence
  Description of Artificial Sequence: Synthetic oligonucleotide
  Target: ATXN2; (+) strand; PAM type: NRG; PAM sequence: AGG
tgcctgagcccacaagttca

SEQ ID NO: 45851 - DNA, 20 bp, Artificial Sequence
  Description of Artificial Sequence: Synthetic oligonucleotide
  Target: ATXN2; (+) strand; PAM type: NRG; PAM sequence: CAG
tgagcccacaagttcaaggc

SEQ ID NO: 45852 - DNA, 20 bp, Artificial Sequence
  Description of Artificial Sequence: Synthetic oligonucleotide
  Target: ATXN2; (+) strand; PAM type: NRG; PAM sequence: GAG
agcccacaagttcaaggcca

SEQ ID NO: 45853 - DNA, 20 bp, Artificial Sequence
  Description of Artificial Sequence: Synthetic oligonucleotide
  Target: ATXN2; (+) strand; PAM type: NRG; PAM sequence: CGG
ccacaagttcaaggccagag

SEQ ID NO: 45854 - DNA, 20 bp, Artificial Sequence
  Description of Artificial Sequence: Synthetic oligonucleotide
  Target: ATXN2; (+) strand; PAM type: NRG; PAM sequence: AAG
gccagagcggataccatatc

SEQ ID NO: 45855 - DNA, 20 bp, Artificial Sequence
  Description of Artificial Sequence: Synthetic oligonucleotide
  Target: ATXN2; (+) strand; PAM type: NRG; PAM sequence: GAG
tctgtttctaaaaataattt

SEQ ID NO: 45856 - DNA, 20 bp, Artificial Sequence
  Description of Artificial Sequence: Synthetic oligonucleotide
  Target: ATXN2; (+) strand; PAM type: NRG; PAM sequence: AGG
ctgtttctaaaaataatttg

SEQ ID NO: 45857 - DNA, 20 bp, Artificial Sequence
  Description of Artificial Sequence: Synthetic oligonucleotide
  Target: ATXN2; (+) strand; PAM type: NRG; PAM sequence: CGG
ttctaaaaataatttgaggc

SEQ ID NO: 45858 - DNA, 20 bp, Artificial Sequence
  Description of Artificial Sequence: Synthetic oligonucleotide
  Target: ATXN2; (+) strand; PAM type: NRG; PAM sequence: GGG
tctaaaaataatttgaggcc

SEQ ID NO: 45859 - DNA, 20 bp, Artificial Sequence
  Description of Artificial Sequence: Synthetic oligonucleotide
  Target: ATXN2; (+) strand; PAM type: NRG; PAM sequence: CGG
aaataatttgaggccgggtg

SEQ ID NO: 45860 - DNA, 20 bp, Artificial Sequence
  Description of Artificial Sequence: Synthetic oligonucleotide
  Target: ATXN2; (+) strand; PAM type: NRG; PAM sequence: TGG
taatttgaggccgggtgcgg

SEQ ID NO: 45861 - DNA, 20 bp, Artificial Sequence
  Description of Artificial Sequence: Synthetic oligonucleotide
  Target: ATXN2; (+) strand; PAM type: NRG; PAM sequence: CAG
gtggctcacacctgtaatcc

SEQ ID NO: 45862 - DNA, 20 bp, Artificial Sequence
  Description of Artificial Sequence: Synthetic oligonucleotide
  Target: ATXN2; (+) strand; PAM type: NRG; PAM sequence: TGG
cacctgtaatcccagcactt

SEQ ID NO: 45863 - DNA, 20 bp, Artificial Sequence
  Description of Artificial Sequence: Synthetic oligonucleotide
  Target: ATXN2; (+) strand; PAM type: NRG; PAM sequence: AAG
ctgtaatcccagcactttgg

SEQ ID NO: 45864 - DNA, 20 bp, Artificial Sequence
  Description of Artificial Sequence: Synthetic oligonucleotide
  Target: ATXN2; (+) strand; PAM type: NRG; PAM sequence: AAG
atcccagcactttggaagcc

SEQ ID NO: 45865 - DNA, 20 bp, Artificial Sequence
  Description of Artificial Sequence: Synthetic oligonucleotide
  Target: ATXN2; (+) strand; PAM type: NRG; PAM sequence: AGG
tcccagcactttggaagcca

SEQ ID NO: 45866 - DNA, 20 bp, Artificial Sequence
  Description of Artificial Sequence: Synthetic oligonucleotide
  Target: ATXN2; (+) strand; PAM type: NRG; PAM sequence: CAG
cagcactttggaagccaagg

SEQ ID NO: 45867 - DNA, 20 bp, Artificial Sequence
  Description of Artificial Sequence: Synthetic oligonucleotide
  Target: ATXN2; (+) strand; PAM type: NRG; PAM sequence: AGG
agcactttggaagccaaggc

SEQ ID NO: 45868 - DNA, 20 bp, Artificial Sequence
  Description of Artificial Sequence: Synthetic oligonucleotide
  Target: ATXN2; (+) strand; PAM type: NRG; PAM sequence: CGG
actttggaagccaaggcagg

SEQ ID NO: 45869 - DNA, 20 bp, Artificial Sequence
  Description of Artificial Sequence: Synthetic oligonucleotide
  Target: ATXN2; (+) strand; PAM type: NRG; PAM sequence: GAG
ccaaggcaggcggatcactt

SEQ ID NO: 45870 - DNA, 20 bp, Artificial Sequence
  Description of Artificial Sequence: Synthetic oligonucleotide
  Target: ATXN2; (+) strand; PAM type: NRG; PAM sequence: AGG
caaggcaggcggatcacttg

SEQ ID NO: 45871 - DNA, 20 bp, Artificial Sequence
  Description of Artificial Sequence: Synthetic oligonucleotide
  Target: ATXN2; (+) strand; PAM type: NRG; PAM sequence: CAG
gcaggcggatcacttgaggt

SEQ ID NO: 45872 - DNA, 20 bp, Artificial Sequence
  Description of Artificial Sequence: Synthetic oligonucleotide
  Target: ATXN2; (+) strand; PAM type: NRG; PAM sequence: AGG
caggcggatcacttgaggtc

SEQ ID NO: 45873 - DNA, 20 bp, Artificial Sequence
  Description of Artificial Sequence: Synthetic oligonucleotide
  Target: ATXN2; (+) strand; PAM type: NRG; PAM sequence: GAG
ggcggatcacttgaggtcag

SEQ ID NO: 45874 - DNA, 20 bp, Artificial Sequence
  Description of Artificial Sequence: Synthetic oligonucleotide
  Target: ATXN2; (+) strand; PAM type: NRG; PAM sequence: TGG
gatcacttgaggtcaggagt

SEQ ID NO: 45875 - DNA, 20 bp, Artificial Sequence
  Description of Artificial Sequence: Synthetic oligonucleotide
  Target: ATXN2; (+) strand; PAM type: NRG; PAM sequence: CAG
tgaggtcaggagttggtgac

SEQ ID NO: 45876 - DNA, 20 bp, Artificial Sequence
  Description of Artificial Sequence: Synthetic oligonucleotide
  Target: ATXN2; (+) strand; PAM type: NRG; PAM sequence: TGG
tcaggagttggtgaccagcc

SEQ ID NO: 45877 - DNA, 20 bp, Artificial Sequence
  Description of Artificial Sequence: Synthetic oligonucleotide
  Target: ATXN2; (+) strand; PAM type: NRG; PAM sequence: TGG
ggtgaccagcctggccaata

SEQ ID NO: 45878 - DNA, 20 bp, Artificial Sequence
  Description of Artificial Sequence: Synthetic oligonucleotide
  Target: ATXN2; (+) strand; PAM type: NRG; PAM sequence: TAG
tctactgaaaatacaaacat

SEQ ID NO: 45879 - DNA, 20 bp, Artificial Sequence
  Description of Artificial Sequence: Synthetic oligonucleotide
  Target: ATXN2; (+) strand; PAM type: NRG; PAM sequence: TAG
ctgaaaatacaaacattagc

SEQ ID NO: 45880 - DNA, 20 bp, Artificial Sequence
  Description of Artificial Sequence: Synthetic oligonucleotide
  Target: ATXN2; (+) strand; PAM type: NRG; PAM sequence: AGG
tgaaaatacaaacattagct

SEQ ID NO: 45881 - DNA, 20 bp, Artificial Sequence
  Description of Artificial Sequence: Synthetic oligonucleotide
  Target: ATXN2; (+) strand; PAM type: NRG; PAM sequence: TGG
atacaaacattagctaggcg

SEQ ID NO: 45882 - DNA, 20 bp, Artificial Sequence
  Description of Artificial Sequence: Synthetic oligonucleotide
  Target: ATXN2; (+) strand; PAM type: NRG; PAM sequence: TGG
caaacattagctaggcgtgg

SEQ ID NO: 45883 - DNA, 20 bp, Artificial Sequence
  Description of Artificial Sequence: Synthetic oligonucleotide
  Target: ATXN2; (+) strand; PAM type: NRG; PAM sequence: CAG
gtggtgtgcgcctgtaatcc

SEQ ID NO: 45884 - DNA, 20 bp, Artificial Sequence
  Description of Artificial Sequence: Synthetic oligonucleotide
  Target: ATXN2; (+) strand; PAM type: NRG; PAM sequence: CAG
cgcctgtaatcccagctact

SEQ ID NO: 45885 - DNA, 20 bp, Artificial Sequence
  Description of Artificial Sequence: Synthetic oligonucleotide
  Target: ATXN2; (+) strand; PAM type: NRG; PAM sequence: AGG
gcctgtaatcccagctactc

SEQ ID NO: 45886 - DNA, 20 bp, Artificial Sequence
  Description of Artificial Sequence: Synthetic oligonucleotide
  Target: ATXN2; (+) strand; PAM type: NRG; PAM sequence: GAG
ctgtaatcccagctactcag

SEQ ID NO: 45887 - DNA, 20 bp, Artificial Sequence
  Description of Artificial Sequence: Synthetic oligonucleotide
  Target: ATXN2; (+) strand; PAM type: NRG; PAM sequence: AGG
tgtaatcccagctactcagg

SEQ ID NO: 45888 - DNA, 20 bp, Artificial Sequence
  Description of Artificial Sequence: Synthetic oligonucleotide
  Target: ATXN2; (+) strand; PAM type: NRG; PAM sequence: GAG
tcccagctactcaggaggct

SEQ ID NO: 45889 - DNA, 20 bp, Artificial Sequence
  Description of Artificial Sequence: Synthetic oligonucleotide
  Target: ATXN2; (+) strand; PAM type: NRG; PAM sequence: AGG
cccagctactcaggaggctg

SEQ ID NO: 45890 - DNA, 20 bp, Artificial Sequence
  Description of Artificial Sequence: Synthetic oligonucleotide
  Target: ATXN2; (+) strand; PAM type: NRG; PAM sequence: CAG
agctactcaggaggctgagg

SEQ ID NO: 45891 - DNA, 20 bp, Artificial Sequence
  Description of Artificial Sequence: Synthetic oligonucleotide
  Target: ATXN2; (+) strand; PAM type: NRG; PAM sequence: AGG
gctactcaggaggctgaggc

SEQ ID NO: 45892 - DNA, 20 bp, Artificial Sequence
  Description of Artificial Sequence: Synthetic oligonucleotide
  Target: ATXN2; (+) strand; PAM type: NRG; PAM sequence: GAG
tactcaggaggctgaggcag

SEQ ID NO: 45893 - DNA, 20 bp, Artificial Sequence
  Description of Artificial Sequence: Synthetic oligonucleotide
  Target: ATXN2; (+) strand; PAM type: NRG; PAM sequence: CAG
gcaggagaatcgtttgaacc

SEQ ID NO: 45894 - DNA, 20 bp, Artificial Sequence
  Description of Artificial Sequence: Synthetic oligonucleotide
  Target: ATXN2; (+) strand; PAM type: NRG; PAM sequence: AGG
caggagaatcgtttgaaccc

SEQ ID NO: 45895 - DNA, 20 bp, Artificial Sequence
  Description of Artificial Sequence: Synthetic oligonucleotide
  Target: ATXN2; (+) strand; PAM type: NRG; PAM sequence: GAG
ggagaatcgtttgaacccag

SEQ ID NO: 45896 - DNA, 20 bp, Artificial Sequence
  Description of Artificial Sequence: Synthetic oligonucleotide
  Target: ATXN2; (+) strand; PAM type: NRG; PAM sequence: AGG
gagaatcgtttgaacccagg

SEQ ID NO: 45897 - DNA, 20 bp, Artificial Sequence
  Description of Artificial Sequence: Synthetic oligonucleotide
  Target: ATXN2; (+) strand; PAM type: NRG; PAM sequence: CAG
aatcgtttgaacccaggagg

SEQ ID NO: 45898 - DNA, 20 bp, Artificial Sequence
  Description of Artificial Sequence: Synthetic oligonucleotide
  Target: ATXN2; (+) strand; PAM type: NRG; PAM sequence: GAG
tcgtttgaacccaggaggca

SEQ ID NO: 45899 - DNA, 20 bp, Artificial Sequence
  Description of Artificial Sequence: Synthetic oligonucleotide
  Target: ATXN2; (+) strand; PAM type: NRG; PAM sequence: AGG
cgtttgaacccaggaggcag

SEQ ID NO: 45900 - DNA, 20 bp, Artificial Sequence
  Description of Artificial Sequence: Synthetic oligonucleotide
  Target: ATXN2; (+) strand; PAM type: NRG; PAM sequence: TGG
ccaggaggcagaggttgcaa

SEQ ID NO: 45901 - DNA, 20 bp, Artificial Sequence
  Description of Artificial Sequence: Synthetic oligonucleotide
  Target: ATXN2; (+) strand; PAM type: NRG; PAM sequence: GGG
caggaggcagaggttgcaat

SEQ ID NO: 45902 - DNA, 20 bp, Artificial Sequence
  Description of Artificial Sequence: Synthetic oligonucleotide
  Target: ATXN2; (+) strand; PAM type: NRG; PAM sequence: GAG
ggcagaggttgcaatgggct

SEQ ID NO: 45903 - DNA, 20 bp, Artificial Sequence
  Description of Artificial Sequence: Synthetic oligonucleotide
  Target: ATXN2; (+) strand; PAM type: NRG; PAM sequence: CAG
tgagactgcaccactgcact

SEQ ID NO: 45904 - DNA, 20 bp, Artificial Sequence
  Description of Artificial Sequence: Synthetic oligonucleotide
  Target: ATXN2; (+) strand; PAM type: NRG; PAM sequence: TGG
ctgcaccactgcactcagcc

SEQ ID NO: 45905 - DNA, 20 bp, Artificial Sequence
  Description of Artificial Sequence: Synthetic oligonucleotide
  Target: ATXN2; (+) strand; PAM type: NRG; PAM sequence: GGG
tgcaccactgcactcagcct

SEQ ID NO: 45906 - DNA, 20 bp, Artificial Sequence
  Description of Artificial Sequence: Synthetic oligonucleotide
  Target: ATXN2; (+) strand; PAM type: NRG; PAM sequence: GAG
caccactgcactcagcctgg

SEQ ID NO: 45907 - DNA, 20 bp, Artificial Sequence
  Description of Artificial Sequence: Synthetic oligonucleotide
  Target: ATXN2; (+) strand; PAM type: NRG; PAM sequence: CAG
actgcactcagcctgggaga

SEQ ID NO: 45908 - DNA, 20 bp, Artificial Sequence
  Description of Artificial Sequence: Synthetic oligonucleotide
  Target: ATXN2; (+) strand; PAM type: NRG; PAM sequence: GAG
tgcactcagcctgggagaca

SEQ ID NO: 45909 - DNA, 20 bp, Artificial Sequence
  Description of Artificial Sequence: Synthetic oligonucleotide
  Target: ATXN2; (+) strand; PAM type: NRG; PAM sequence: GAG
ctcagcctgggagacagagc

SEQ ID NO: 45910 - DNA, 20 bp, Artificial Sequence
  Description of Artificial Sequence: Synthetic oligonucleotide
  Target: ATXN2; (+) strand; PAM type: NRG; PAM sequence: GAG
tatacataaaataataattt

SEQ ID NO: 45911 - DNA, 20 bp, Artificial Sequence
  Description of Artificial Sequence: Synthetic oligonucleotide
  Target: ATXN2; (+) strand; PAM type: NRG; PAM sequence: AAG
tttgagatacccataacatc

SEQ ID NO: 45912 - DNA, 20 bp, Artificial Sequence
  Description of Artificial Sequence: Synthetic oligonucleotide
  Target: ATXN2; (+) strand; PAM type: NRG; PAM sequence: GAG
caagcgatatgaaattaact

SEQ ID NO: 45913 - DNA, 20 bp, Artificial Sequence
  Description of Artificial Sequence: Synthetic oligonucleotide
  Target: ATXN2; (+) strand; PAM type: NRG; PAM sequence: TAG
atgaaattaactgagttcta

SEQ ID NO: 45914 - DNA, 20 bp, Artificial Sequence
  Description of Artificial Sequence: Synthetic oligonucleotide
  Target: ATXN2; (+) strand; PAM type: NRG; PAM sequence: AGG
tgaaattaactgagttctat

SEQ ID NO: 45915 - DNA, 20 bp, Artificial Sequence
  Description of Artificial Sequence: Synthetic oligonucleotide
  Target: ATXN2; (+) strand; PAM type: NRG; PAM sequence: AAG
actgagttctataggtgctt

SEQ ID NO: 45916 - DNA, 20 bp, Artificial Sequence
  Description of Artificial Sequence: Synthetic oligonucleotide
  Target: ATXN2; (+) strand; PAM type: NRG; PAM sequence: TAG
ataaatactgctaatactac

SEQ ID NO: 45917 - DNA, 20 bp, Artificial Sequence
  Description of Artificial Sequence: Synthetic oligonucleotide
  Target: ATXN2; (+) strand; PAM type: NRG; PAM sequence: TGG
ttgttgcccatatttttaaa

SEQ ID NO: 45918 - DNA, 20 bp, Artificial Sequence
  Description of Artificial Sequence: Synthetic oligonucleotide
  Target: ATXN2; (+) strand; PAM type: NRG; PAM sequence: AAG
aaaatgctaaatttcacttg

SEQ ID NO: 45919 - DNA, 20 bp, Artificial Sequence
  Description of Artificial Sequence: Synthetic oligonucleotide
  Target: ATXN2; (+) strand; PAM type: NRG; PAM sequence: AGG
aaatgctaaatttcacttga

SEQ ID NO: 45920 - DNA, 20 bp, Artificial Sequence
  Description of Artificial Sequence: Synthetic oligonucleotide
  Target: ATXN2; (+) strand; PAM type: NRG; PAM sequence: TAG
gctaaatttcacttgaaggt

SEQ ID NO: 45921 - DNA, 20 bp, Artificial Sequence
  Description of Artificial Sequence: Synthetic oligonucleotide
  Target: ATXN2; (+) strand; PAM type: NRG; PAM sequence: AAG
cttgaaggttagtgtaaata

SEQ ID NO: 45922 - DNA, 20 bp, Artificial Sequence
  Description of Artificial Sequence: Synthetic oligonucleotide
  Target: ATXN2; (+) strand; PAM type: NRG; PAM sequence: AAG
atgtaaatttctcttcatcc

SEQ ID NO: 45923 - DNA, 20 bp, Artificial Sequence
  Description of Artificial Sequence: Synthetic oligonucleotide
  Target: ATXN2; (+) strand; PAM type: NRG; PAM sequence: AGG
tgtaaatttctcttcatcca

SEQ ID NO: 45924 - DNA, 20 bp, Artificial Sequence
  Description of Artificial Sequence: Synthetic oligonucleotide
  Target: ATXN2; (+) strand; PAM type: NRG; PAM sequence: GAG
attctctccacaaattcttt

SEQ ID NO: 45925 - DNA, 20 bp, Artificial Sequence
  Description of Artificial Sequence: Synthetic oligonucleotide
  Target: ATXN2; (+) strand; PAM type: NRG; PAM sequence: CAG
acaaattctttgagaatcca

SEQ ID NO: 45926 - DNA, 20 bp, Artificial Sequence
  Description of Artificial Sequence: Synthetic oligonucleotide
  Target: ATXN2; (+) strand; PAM type: NRG; PAM sequence: CAG
tctttgagaatccacagatc

SEQ ID NO: 45927 - DNA, 20 bp, Artificial Sequence
  Description of Artificial Sequence: Synthetic oligonucleotide
  Target: ATXN2; (+) strand; PAM type: NRG; PAM sequence: AGG
ctttgagaatccacagatcc

SEQ ID NO: 45928 - DNA, 20 bp, Artificial Sequence
  Description of Artificial Sequence: Synthetic oligonucleotide
  Target: ATXN2; (+) strand; PAM type: NRG; PAM sequence: AAG
agaatccacagatccaggtg

SEQ ID NO: 45929 - DNA, 20 bp, Artificial Sequence
  Description of Artificial Sequence: Synthetic oligonucleotide
  Target: ATXN2; (+) strand; PAM type: NRG; PAM sequence: AAG
tcctgcctctttgtactgac

SEQ ID NO: 45930 - DNA, 20 bp, Artificial Sequence
  Description of Artificial Sequence: Synthetic oligonucleotide
  Target: ATXN2; (+) strand; PAM type: NRG; PAM sequence: CAG
tgcctctttgtactgacaag

SEQ ID NO: 45931 - DNA, 20 bp, Artificial Sequence
  Description of Artificial Sequence: Synthetic oligonucleotide
  Target: ATXN2; (+) strand; PAM type: NRG; PAM sequence: AGG
gcctctttgtactgacaagc

SEQ ID NO: 45932 - DNA, 20 bp, Artificial Sequence
  Description of Artificial Sequence: Synthetic oligonucleotide
  Target: ATXN2; (+) strand; PAM type: NRG; PAM sequence: AAG
tctttgtactgacaagcagg

SEQ ID NO: 45933 - DNA, 20 bp, Artificial Sequence
  Description of Artificial Sequence: Synthetic oligonucleotide
  Target: ATXN2; (+) strand; PAM type: NRG; PAM sequence: AAG
tgtactgacaagcaggaaga

SEQ ID NO: 45934 - DNA, 20 bp, Artificial Sequence
  Description of Artificial Sequence: Synthetic oligonucleotide
  Target: ATXN2; (+) strand; PAM type: NRG; PAM sequence: GAG
tactgacaagcaggaagaaa

SEQ ID NO: 45935 - DNA, 20 bp, Artificial Sequence
  Description of Artificial Sequence: Synthetic oligonucleotide
  Target: ATXN2; (+) strand; PAM type: NRG; PAM sequence: AAG
aagagcctctgccatgaata

SEQ ID NO: 45936 - DNA, 20 bp, Artificial Sequence
  Description of Artificial Sequence: Synthetic oligonucleotide
  Target: ATXN2; (+) strand; PAM type: NRG; PAM sequence: TAG
tctgccatgaataaagcaaa

SEQ ID NO: 45937 - DNA, 20 bp, Artificial Sequence
  Description of Artificial Sequence: Synthetic oligonucleotide
  Target: ATXN2; (+) strand; PAM type: NRG; PAM sequence: AGG
ctgccatgaataaagcaaat

SEQ ID NO: 45938 - DNA, 20 bp, Artificial Sequence
  Description of Artificial Sequence: Synthetic oligonucleotide
  Target: ATXN2; (+) strand; PAM type: NRG; PAM sequence: GAG
catgaataaagcaaataggt

SEQ ID NO: 45939 - DNA, 20 bp, Artificial Sequence
  Description of Artificial Sequence: Synthetic oligonucleotide
  Target: ATXN2; (+) strand; PAM type: NRG; PAM sequence: AGG
atgaataaagcaaataggtg

SEQ ID NO: 45940 - DNA, 20 bp, Artificial Sequence
  Description of Artificial Sequence: Synthetic oligonucleotide
  Target: ATXN2; (+) strand; PAM type: NRG; PAM sequence: GGG
tgaataaagcaaataggtga

SEQ ID NO: 45941 - DNA, 20 bp, Artificial Sequence
  Description of Artificial Sequence: Synthetic oligonucleotide
  Target: ATXN2; (+) strand; PAM type: NRG; PAM sequence: TGG
aaagcaaataggtgagggac

SEQ ID NO: 45942 - DNA, 20 bp, Artificial Sequence
  Description of Artificial Sequence: Synthetic oligonucleotide
  Target: ATXN2; (+) strand; PAM type: NRG; PAM sequence: AAG
gcaaataggtgagggactgg

SEQ ID NO: 45943 - DNA, 20 bp, Artificial Sequence
  Description of Artificial Sequence: Synthetic oligonucleotide
  Target: ATXN2; (+) strand; PAM type: NRG; PAM sequence: AGG
caaataggtgagggactgga

SEQ ID NO: 45944 - DNA, 20 bp, Artificial Sequence
  Description of Artificial Sequence: Synthetic oligonucleotide
  Target: ATXN2; (+) strand; PAM type: NRG; PAM sequence: GAG
aataggtgagggactggaag

SEQ ID NO: 45945 - DNA, 20 bp, Artificial Sequence
  Description of Artificial Sequence: Synthetic oligonucleotide
  Target: ATXN2; (+) strand; PAM type: NRG; PAM sequence: TGG
aggtgagggactggaaggag

SEQ ID NO: 45946 - DNA, 20 bp, Artificial Sequence
  Description of Artificial Sequence: Synthetic oligonucleotide
  Target: ATXN2; (+) strand; PAM type: NRG; PAM sequence: AAG
gactggaaggagtggtcatc

SEQ ID NO: 45947 - DNA, 20 bp, Artificial Sequence
  Description of Artificial Sequence: Synthetic oligonucleotide
  Target: ATXN2; (+) strand; PAM type: NRG; PAM sequence: AGG
actggaaggagtggtcatca

SEQ ID NO: 45948 - DNA, 20 bp, Artificial Sequence
  Description of Artificial Sequence: Synthetic oligonucleotide
  Target: ATXN2; (+) strand; PAM type: NRG; PAM sequence: CAG
aggagtggtcatcaaggctg

SEQ ID NO: 45949 - DNA, 20 bp, Artificial Sequence
  Description of Artificial Sequence: Synthetic oligonucleotide
  Target: ATXN2; (+) strand; PAM type: NRG; PAM sequence: TAG
ggtcatcaaggctgcagaaa

SEQ ID NO: 45950 - DNA, 20 bp, Artificial Sequence
  Description of Artificial Sequence: Synthetic oligonucleotide
  Target: ATXN2; (+) strand; PAM type: NRG; PAM sequence: AGG
gtcatcaaggctgcagaaat

SEQ ID NO: 45951 - DNA, 20 bp, Artificial Sequence
  Description of Artificial Sequence: Synthetic oligonucleotide
  Target: ATXN2; (+) strand; PAM type: NRG; PAM sequence: AAG
aaggctgcagaaataggttt

SEQ ID NO: 45952 - DNA, 20 bp, Artificial Sequence
  Description of Artificial Sequence: Synthetic oligonucleotide
  Target: ATXN2; (+) strand; PAM type: NRG; PAM sequence: AGG
aggctgcagaaataggttta

SEQ ID NO: 45953 - DNA, 20 bp, Artificial Sequence
  Description of Artificial Sequence: Synthetic oligonucleotide
  Target: ATXN2; (+) strand; PAM type: NRG; PAM sequence: AAG
aaggaaaaaaaaaaaaaaaa

SEQ ID NO: 45954 - DNA, 20 bp, Artificial Sequence
  Description of Artificial Sequence: Synthetic oligonucleotide
  Target: ATXN2; (+) strand; PAM type: NRG; PAM sequence: GAG
aaagtctgctgaactcttct

SEQ ID NO: 45955 - DNA, 20 bp, Artificial Sequence
  Description of Artificial Sequence: Synthetic oligonucleotide
  Target: ATXN2; (+) strand; PAM type: NRG; PAM sequence: AGG
aagtctgctgaactcttctg

SEQ ID NO: 45956 - DNA, 20 bp, Artificial Sequence
  Description of Artificial Sequence: Synthetic oligonucleotide
  Target: ATXN2; (+) strand; PAM type: NRG; PAM sequence: CAG
gctgaactcttctgaggctc

SEQ ID NO: 45957 - DNA, 20 bp, Artificial Sequence
  Description of Artificial Sequence: Synthetic oligonucleotide
  Target: ATXN2; (+) strand; PAM type: NRG; PAM sequence: AAG
aactcttctgaggctccagc

SEQ ID NO: 45958 - DNA, 20 bp, Artificial Sequence
  Description of Artificial Sequence: Synthetic oligonucleotide
  Target: ATXN2; (+) strand; PAM type: NRG; PAM sequence: GAG
ctcttctgaggctccagcaa

SEQ ID NO: 45959 - DNA, 20 bp, Artificial Sequence
  Description of Artificial Sequence: Synthetic oligonucleotide
  Target: ATXN2; (+) strand; PAM type: NRG; PAM sequence: TGG
tctgaggctccagcaagagc

SEQ ID NO: 45960 - DNA, 20 bp, Artificial Sequence
  Description of Artificial Sequence: Synthetic oligonucleotide
  Target: ATXN2; (+) strand; PAM type: NRG; PAM sequence: CAG
accctacattcctaactaat

SEQ ID NO: 45961 - DNA, 20 bp, Artificial Sequence
  Description of Artificial Sequence: Synthetic oligonucleotide
  Target: ATXN2; (+) strand; PAM type: NRG; PAM sequence: CAG
ttcctaactaatcagccccc

SEQ ID NO: 45962 - DNA, 20 bp, Artificial Sequence
  Description of Artificial Sequence: Synthetic oligonucleotide
  Target: ATXN2; (+) strand; PAM type: NRG; PAM sequence: TGG
ctaactaatcagccccccag

SEQ ID NO: 45963 - DNA, 20 bp, Artificial Sequence
  Description of Artificial Sequence: Synthetic oligonucleotide
  Target: ATXN2; (+) strand; PAM type: NRG; PAM sequence: GGG
taactaatcagccccccagt

SEQ ID NO: 45964 - DNA, 20 bp, Artificial Sequence
  Description of Artificial Sequence: Synthetic oligonucleotide
  Target: ATXN2; (+) strand; PAM type: NRG; PAM sequence: CAG
ccccccagtgggactttctc

SEQ ID NO: 45965 - DNA, 20 bp, Artificial Sequence
  Description of Artificial Sequence: Synthetic oligonucleotide
  Target: ATXN2; (+) strand; PAM type: NRG; PAM sequence: CAG
ggactttctccagccacacc

SEQ ID NO: 45966 - DNA, 20 bp, Artificial Sequence
  Description of Artificial Sequence: Synthetic oligonucleotide
  Target: ATXN2; (+) strand; PAM type: NRG; PAM sequence: CAG
ctttctccagccacacccag

SEQ ID NO: 45967 - DNA, 20 bp, Artificial Sequence
  Description of Artificial Sequence: Synthetic oligonucleotide
  Target: ATXN2; (+) strand; PAM type: NRG; PAM sequence: AGG
tttctccagccacacccagc

SEQ ID NO: 45968 - DNA, 20 bp, Artificial Sequence
  Description of Artificial Sequence: Synthetic oligonucleotide
  Target: ATXN2; (+) strand; PAM type: NRG; PAM sequence: TGG
tccagccacacccagcaggc

SEQ ID NO: 45969 - DNA, 20 bp, Artificial Sequence
  Description of Artificial Sequence: Synthetic oligonucleotide
  Target: ATXN2; (+) strand; PAM type: NRG; PAM sequence: TAG
ccacacccagcaggctggat

SEQ ID NO: 45970 - DNA, 20 bp, Artificial Sequence
  Description of Artificial Sequence: Synthetic oligonucleotide
  Target: ATXN2; (+) strand; PAM type: NRG; PAM sequence: AGG
cacacccagcaggctggatt

SEQ ID NO: 45971 - DNA, 20 bp, Artificial Sequence
  Description of Artificial Sequence: Synthetic oligonucleotide
  Target: ATXN2; (+) strand; PAM type: NRG; PAM sequence: GAG
cacccagcaggctggattag

SEQ ID NO: 45972 - DNA, 20 bp, Artificial Sequence
  Description of Artificial Sequence: Synthetic oligonucleotide
  Target: ATXN2; (+) strand; PAM type: NRG; PAM sequence: TAG
ccagcaggctggattaggag

SEQ ID NO: 45973 - DNA, 20 bp, Artificial Sequence
  Description of Artificial Sequence: Synthetic oligonucleotide
  Target: ATXN2; (+) strand; PAM type: NRG; PAM sequence: CAG
caggctggattaggagtaga

SEQ ID NO: 45974 - DNA, 20 bp, Artificial Sequence
  Description of Artificial Sequence: Synthetic oligonucleotide
  Target: ATXN2; (+) strand; PAM type: NRG; PAM sequence: GAG
ggctggattaggagtagaca

SEQ ID NO: 45975 - DNA, 20 bp, Artificial Sequence
  Description of Artificial Sequence: Synthetic oligonucleotide
  Target: ATXN2; (+) strand; PAM type: NRG; PAM sequence: AAG
attaggagtagacagagttt

SEQ ID NO: 45976 - DNA, 20 bp, Artificial Sequence
  Description of Artificial Sequence: Synthetic oligonucleotide
  Target: ATXN2; (+) strand; PAM type: NRG; PAM sequence: TAG
gtagacagagtttaagatct

SEQ ID NO: 45977 - DNA, 20 bp, Artificial Sequence
  Description of Artificial Sequence: Synthetic oligonucleotide
  Target: ATXN2; (+) strand; PAM type: NRG; PAM sequence: GAG
agacagagtttaagatctta

SEQ ID NO: 45978 - DNA, 20 bp, Artificial Sequence
  Description of Artificial Sequence: Synthetic oligonucleotide
  Target: ATXN2; (+) strand; PAM type: NRG; PAM sequence: AGG
gacagagtttaagatcttag

SEQ ID NO: 45979 - DNA, 20 bp, Artificial Sequence
  Description of Artificial Sequence: Synthetic oligonucleotide
  Target: ATXN2; (+) strand; PAM type: NRG; PAM sequence: CAG
agtttaagatcttagaggaa

SEQ ID NO: 45980 - DNA, 20 bp, Artificial Sequence
  Description of Artificial Sequence: Synthetic oligonucleotide
  Target: ATXN2; (+) strand; PAM type: NRG; PAM sequence: GAG
tttaagatcttagaggaaca

SEQ ID NO: 45981 - DNA, 20 bp, Artificial Sequence
  Description of Artificial Sequence: Synthetic oligonucleotide
  Target: ATXN2; (+) strand; PAM type: NRG; PAM sequence: GAG
agaggaacagagaacactgt

SEQ ID NO: 45982 - DNA, 20 bp, Artificial Sequence
  Description of Artificial Sequence: Synthetic oligonucleotide
  Target: ATXN2; (+) strand; PAM type: NRG; PAM sequence: AGG
gaggaacagagaacactgtg

SEQ ID NO: 45983 - DNA, 20 bp, Artificial Sequence
  Description of Artificial Sequence: Synthetic oligonucleotide
  Target: ATXN2; (+) strand; PAM type: NRG; PAM sequence: GGG
aggaacagagaacactgtga

SEQ ID NO: 45984 - DNA, 20 bp, Artificial Sequence
  Description of Artificial Sequence: Synthetic oligonucleotide
  Target: ATXN2; (+) strand; PAM type: NRG; PAM sequence: GGG
ggaacagagaacactgtgag

SEQ ID NO: 45985 - DNA, 20 bp, Artificial Sequence
  Description of Artificial Sequence: Synthetic oligonucleotide
  Target: ATXN2; (+) strand; PAM type: NRG; PAM sequence: AAG
cagagaacactgtgaggggc

SEQ ID NO: 45986 - DNA, 20 bp, Artificial Sequence
  Description of Artificial Sequence: Synthetic oligonucleotide
  Target: ATXN2; (+) strand; PAM type: NRG; PAM sequence: AAG
agaacactgtgaggggcaag

SEQ ID NO: 45987 - DNA, 20 bp, Artificial Sequence
  Description of Artificial Sequence: Synthetic oligonucleotide
  Target: ATXN2; (+) strand; PAM type: NRG; PAM sequence: GAG
aacactgtgaggggcaagaa

SEQ ID NO: 45988 - DNA, 20 bp, Artificial Sequence
  Description of Artificial Sequence: Synthetic oligonucleotide
  Target: ATXN2; (+) strand; PAM type: NRG; PAM sequence: TAG
tgtgaggggcaagaagagaa

SEQ ID NO: 45989 - DNA, 20 bp, Artificial Sequence
  Description of Artificial Sequence: Synthetic oligonucleotide
  Target: ATXN2; (+) strand; PAM type: NRG; PAM sequence: AAG
gaggggcaagaagagaatag

SEQ ID NO: 45990 - DNA, 20 bp, Artificial Sequence
  Description of Artificial Sequence: Synthetic oligonucleotide
  Target: ATXN2; (+) strand; PAM type: NRG; PAM sequence: AAG
aagaagagaatagaagtgta

SEQ ID NO: 45991 - DNA, 20 bp, Artificial Sequence
  Description of Artificial Sequence: Synthetic oligonucleotide
  Target: ATXN2; (+) strand; PAM type: NRG; PAM sequence: TAG
gaatagaagtgtaaagttta

SEQ ID NO: 45992 - DNA, 20 bp, Artificial Sequence
  Description of Artificial Sequence: Synthetic oligonucleotide
  Target: ATXN2; (+) strand; PAM type: NRG; PAM sequence: TGG
aagtgtaaagtttatagctg

SEQ ID NO: 45993 - DNA, 20 bp, Artificial Sequence
  Description of Artificial Sequence: Synthetic oligonucleotide
  Target: ATXN2; (+) strand; PAM type: NRG; PAM sequence: CAG
gtaaagtttatagctgtggt

SEQ ID NO: 45994 - DNA, 20 bp, Artificial Sequence
  Description of Artificial Sequence: Synthetic oligonucleotide
  Target: ATXN2; (+) strand; PAM type: NRG; PAM sequence: GAG
aaagtttatagctgtggtca

SEQ ID NO: 45995 - DNA, 20 bp, Artificial Sequence
  Description of Artificial Sequence: Synthetic oligonucleotide
  Target: ATXN2; (+) strand; PAM type: NRG; PAM sequence: TAG
gtttatagctgtggtcagag

SEQ ID NO: 45996 - DNA, 20 bp, Artificial Sequence
  Description of Artificial Sequence: Synthetic oligonucleotide
  Target: ATXN2; (+) strand; PAM type: NRG; PAM sequence: AAG
tggtcagagtagatcttgaa

SEQ ID NO: 45997 - DNA, 20 bp, Artificial Sequence
  Description of Artificial Sequence: Synthetic oligonucleotide
  Target: ATXN2; (+) strand; PAM type: NRG; PAM sequence: TGG
gtagatcttgaaaagcattc

SEQ ID NO: 45998 - DNA, 20 bp, Artificial Sequence
  Description of Artificial Sequence: Synthetic oligonucleotide
  Target: ATXN2; (+) strand; PAM type: NRG; PAM sequence: AAG
gatcttgaaaagcattctgg

SEQ ID NO: 45999 - DNA, 20 bp, Artificial Sequence
  Description of Artificial Sequence: Synthetic oligonucleotide
  Target: ATXN2; (+) strand; PAM type: NRG; PAM sequence: GAG
tcttgaaaagcattctggaa

SEQ ID NO: 46000 - DNA, 20 bp, Artificial Sequence
  Description of Artificial Sequence: Synthetic oligonucleotide
  Target: ATXN2; (+) strand; PAM type: NRG; PAM sequence: AAG
tgaaaagcattctggaagag

SEQ ID NO: 46001 - DNA, 20 bp, Artificial Sequence
  Description of Artificial Sequence: Synthetic oligonucleotide
  Target: ATXN2; (+) strand; PAM type: NRG; PAM sequence: CAG
aaagcattctggaagagaag

SEQ ID NO: 46002 - DNA, 20 bp, Artificial Sequence
  Description of Artificial Sequence: Synthetic oligonucleotide
  Target: ATXN2; (+) strand; PAM type: NRG; PAM sequence: GAG
gaagagaagcagttccttcc

SEQ ID NO: 46003 - DNA, 20 bp, Artificial Sequence
  Description of Artificial Sequence: Synthetic oligonucleotide
  Target: ATXN2; (+) strand; PAM type: NRG; PAM sequence: CAG
gttccttccgagtgatgaca

SEQ ID NO: 46004 - DNA, 20 bp, Artificial Sequence
  Description of Artificial Sequence: Synthetic oligonucleotide
  Target: ATXN2; (+) strand; PAM type: NRG; PAM sequence: AAG
gagtgatgacacagtcatga

SEQ ID NO: 46005 - DNA, 20 bp, Artificial Sequence
  Description of Artificial Sequence: Synthetic oligonucleotide
  Target: ATXN2; (+) strand; PAM type: NRG; PAM sequence: CAG
tgatgacacagtcatgaaag

SEQ ID NO: 46006 - DNA, 20 bp, Artificial Sequence
  Description of Artificial Sequence: Synthetic oligonucleotide
  Target: ATXN2; (+) strand; PAM type: NRG; PAM sequence: AGG
gatgacacagtcatgaaagc

SEQ ID NO: 46007 - DNA, 20 bp, Artificial Sequence
  Description of Artificial Sequence: Synthetic oligonucleotide
  Target: ATXN2; (+) strand; PAM type: NRG; PAM sequence: TGG
agcaggatgctacaacgccg

SEQ ID NO: 46008 - DNA, 20 bp, Artificial Sequence
  Description of Artificial Sequence: Synthetic oligonucleotide
  Target: ATXN2; (+) strand; PAM type: NRG; PAM sequence: GAG
caggatgctacaacgccgtg

SEQ ID NO: 46009 - DNA, 20 bp, Artificial Sequence
  Description of Artificial Sequence: Synthetic oligonucleotide
  Target: ATXN2; (+) strand; PAM type: NRG; PAM sequence: AGG
aggatgctacaacgccgtgg

SEQ ID NO: 46010 - DNA, 20 bp, Artificial Sequence
  Description of Artificial Sequence: Synthetic oligonucleotide
  Target: ATXN2; (+) strand; PAM type: NRG; PAM sequence: AAG
ctacaacgccgtggaggtga

SEQ ID NO: 46011 - DNA, 20 bp, Artificial Sequence
  Description of Artificial Sequence: Synthetic oligonucleotide
  Target: ATXN2; (+) strand; PAM type: NRG; PAM sequence: AGG
tacaacgccgtggaggtgaa

SEQ ID NO: 46012 - DNA, 20 bp, Artificial Sequence
  Description of Artificial Sequence: Synthetic oligonucleotide
  Target: ATXN2; (+) strand; PAM type: NRG; PAM sequence: GGG
acaacgccgtggaggtgaaa

SEQ ID NO: 46013 - DNA, 20 bp, Artificial Sequence
  Description of Artificial Sequence: Synthetic oligonucleotide
  Target: ATXN2; (+) strand; PAM type: NRG; PAM sequence: TGG
gtggaggtgaaagggatgta

SEQ ID NO: 46014 - DNA, 20 bp, Artificial Sequence
  Description of Artificial Sequence: Synthetic oligonucleotide
  Target: ATXN2; (+) strand; PAM type: NRG; PAM sequence: CAG
ggtgaaagggatgtatggaa

SEQ ID NO: 46015 - DNA, 20 bp, Artificial Sequence
  Description of Artificial Sequence: Synthetic oligonucleotide
  Target: ATXN2; (+) strand; PAM type: NRG; PAM sequence: TAG
gggatgtatggaacagaact

SEQ ID NO: 46016 - DNA, 20 bp, Artificial Sequence
  Description of Artificial Sequence: Synthetic oligonucleotide
  Target: ATXN2; (+) strand; PAM type: NRG; PAM sequence: AGG
ggatgtatggaacagaactt

SEQ ID NO: 46017 - DNA, 20 bp, Artificial Sequence
  Description of Artificial Sequence: Synthetic oligonucleotide
  Target: ATXN2; (+) strand; PAM type: NRG; PAM sequence: GAG
atgtatggaacagaacttag

SEQ ID NO: 46018 - DNA, 20 bp, Artificial Sequence
  Description of Artificial Sequence: Synthetic oligonucleotide
  Target: ATXN2; (+) strand; PAM type: NRG; PAM sequence: AGG
tgtatggaacagaacttagg

SEQ ID NO: 46019 - DNA, 20 bp, Artificial Sequence
  Description of Artificial Sequence: Synthetic oligonucleotide
  Target: ATXN2; (+) strand; PAM type: NRG; PAM sequence: AAG
ttaggaggctatgtttccta

SEQ ID NO: 46020 - DNA, 20 bp, Artificial Sequence
  Description of Artificial Sequence: Synthetic oligonucleotide
  Target: ATXN2; (+) strand; PAM type: NRG; PAM sequence: TAG
aggctatgtttcctaaagaa

SEQ ID NO: 46021 - DNA, 20 bp, Artificial Sequence
  Description of Artificial Sequence: Synthetic oligonucleotide
  Target: ATXN2; (+) strand; PAM type: NRG; PAM sequence: CAG
aattattccaacacacacta

SEQ ID NO: 46022 - DNA, 20 bp, Artificial Sequence
  Description of Artificial Sequence: Synthetic oligonucleotide
  Target: ATXN2; (+) strand; PAM type: NRG; PAM sequence: CAG
cacacactacagttgtcctt

SEQ ID NO: 46023 - DNA, 20 bp, Artificial Sequence
  Description of Artificial Sequence: Synthetic oligonucleotide
  Target: ATXN2; (+) strand; PAM type: NRG; PAM sequence: TGG
cagttgtccttcagcatcta

SEQ ID NO: 46024 - DNA, 20 bp, Artificial Sequence
  Description of Artificial Sequence: Synthetic oligonucleotide
  Target: ATXN2; (+) strand; PAM type: NRG; PAM sequence: GGG
agttgtccttcagcatctat

SEQ ID NO: 46025 - DNA, 20 bp, Artificial Sequence
  Description of Artificial Sequence: Synthetic oligonucleotide
  Target: ATXN2; (+) strand; PAM type: NRG; PAM sequence: GGG
gttgtccttcagcatctatg

SEQ ID NO: 46026 - DNA, 20 bp, Artificial Sequence
  Description of Artificial Sequence: Synthetic oligonucleotide
  Target: ATXN2; (+) strand; PAM type: NRG; PAM sequence: GGG
ttgtccttcagcatctatgg

SEQ ID NO: 46027 - DNA, 20 bp, Artificial Sequence
  Description of Artificial Sequence: Synthetic oligonucleotide
  Target: ATXN2; (+) strand; PAM type: NRG; PAM sequence: TGG
cttcagcatctatgggggat

SEQ ID NO: 46028 - DNA, 20 bp, Artificial Sequence
  Description of Artificial Sequence: Synthetic oligonucleotide
  Target: ATXN2; (+) strand; PAM type: NRG; PAM sequence: TAG
ggattggttctaataccccc

SEQ ID NO: 46029 - DNA, 20 bp, Artificial Sequence
  Description of Artificial Sequence: Synthetic oligonucleotide
  Target: ATXN2; (+) strand; PAM type: NRG; PAM sequence: AGG
gattggttctaataccccct

SEQ ID NO: 46030 - DNA, 20 bp, Artificial Sequence
  Description of Artificial Sequence: Synthetic oligonucleotide
  Target: ATXN2; (+) strand; PAM type: NRG; PAM sequence: GGG
attggttctaatacccccta

SEQ ID NO: 46031 - DNA, 20 bp, Artificial Sequence
  Description of Artificial Sequence: Synthetic oligonucleotide
  Target: ATXN2; (+) strand; PAM type: NRG; PAM sequence: CAG
cccctagggataccaaaatc

SEQ ID NO: 46032 - DNA, 20 bp, Artificial Sequence
  Description of Artificial Sequence: Synthetic oligonucleotide
  Target: ATXN2; (+) strand; PAM type: NRG; PAM sequence: AGG
ccctagggataccaaaatcc

SEQ ID NO: 46033 - DNA, 20 bp, Artificial Sequence
  Description of Artificial Sequence: Synthetic oligonucleotide
  Target: ATXN2; (+) strand; PAM type: NRG; PAM sequence: GGG
cctagggataccaaaatcca

SEQ ID NO: 46034 - DNA, 20 bp, Artificial Sequence
  Description of Artificial Sequence: Synthetic oligonucleotide
  Target: ATXN2; (+) strand; PAM type: NRG; PAM sequence: AAG
accaaaatccagggatgctt

SEQ ID NO: 46035 - DNA, 20 bp, Artificial Sequence
  Description of Artificial Sequence: Synthetic oligonucleotide
  Target: ATXN2; (+) strand; PAM type: NRG; PAM sequence: AAG
atgcttaagtccctgataca

SEQ ID NO: 46036 - DNA, 20 bp, Artificial Sequence
  Description of Artificial Sequence: Synthetic oligonucleotide
  Target: ATXN2; (+) strand; PAM type: NRG; PAM sequence: TGG
cttaagtccctgatacaaag

SEQ ID NO: 46037 - DNA, 20 bp, Artificial Sequence
  Description of Artificial Sequence: Synthetic oligonucleotide
  Target: ATXN2; (+) strand; PAM type: NRG; PAM sequence: TAG
gtccctgatacaaagtggtg

SEQ ID NO: 46038 - DNA, 20 bp, Artificial Sequence
  Description of Artificial Sequence: Synthetic oligonucleotide
  Target: ATXN2; (+) strand; PAM type: NRG; PAM sequence: TAG
tctcgcatactttaaacctc

SEQ ID NO: 46039 - DNA, 20 bp, Artificial Sequence
  Description of Artificial Sequence: Synthetic oligonucleotide
  Target: ATXN2; (+) strand; PAM type: NRG; PAM sequence: AGG
ctcgcatactttaaacctct

SEQ ID NO: 46040 - DNA, 20 bp, Artificial Sequence
  Description of Artificial Sequence: Synthetic oligonucleotide
  Target: ATXN2; (+) strand; PAM type: NRG; PAM sequence: AAG
tacctataatacctaataca

SEQ ID NO: 46041 - DNA, 20 bp, Artificial Sequence
  Description of Artificial Sequence: Synthetic oligonucleotide
  Target: ATXN2; (+) strand; PAM type: NRG; PAM sequence: CGG
ctaatacaaagtaaatgcta

SEQ ID NO: 46042 - DNA, 20 bp, Artificial Sequence
  Description of Artificial Sequence: Synthetic oligonucleotide
  Target: ATXN2; (+) strand; PAM type: NRG; PAM sequence: TAG
caaagtaaatgctacggaaa

SEQ ID NO: 46043 - DNA, 20 bp, Artificial Sequence
  Description of Artificial Sequence: Synthetic oligonucleotide
  Target: ATXN2; (+) strand; PAM type: NRG; PAM sequence: TGG
aaatgctacggaaatagttg

SEQ ID NO: 46044 - DNA, 20 bp, Artificial Sequence
  Description of Artificial Sequence: Synthetic oligonucleotide
  Target: ATXN2; (+) strand; PAM type: NRG; PAM sequence: AAG
aaatagttgtggtactgctt

SEQ ID NO: 46045 - DNA, 20 bp, Artificial Sequence
  Description of Artificial Sequence: Synthetic oligonucleotide
  Target: ATXN2; (+) strand; PAM type: NRG; PAM sequence: AGG
aatagttgtggtactgctta

SEQ ID NO: 46046 - DNA, 20 bp, Artificial Sequence
  Description of Artificial Sequence: Synthetic oligonucleotide
  Target: ATXN2; (+) strand; PAM type: NRG; PAM sequence: AAG
actgcttaaggaataatgac

SEQ ID NO: 46047 - DNA, 20 bp, Artificial Sequence
  Description of Artificial Sequence: Synthetic oligonucleotide
  Target: ATXN2; (+) strand; PAM type: NRG; PAM sequence: AAG
aggaataatgacaagaaaaa

SEQ ID NO: 46048 - DNA, 20 bp, Artificial Sequence
  Description of Artificial Sequence: Synthetic oligonucleotide
  Target: ATXN2; (+) strand; PAM type: NRG; PAM sequence: CAG
aaaaaaagtctgtacatgtt

SEQ ID NO: 46049 - DNA, 20 bp, Artificial Sequence
  Description of Artificial Sequence: Synthetic oligonucleotide
  Target: ATXN2; (+) strand; PAM type: NRG; PAM sequence: TAG
aagtctgtacatgttcagta

SEQ ID NO: 46050 - DNA, 20 bp, Artificial Sequence
  Description of Artificial Sequence: Synthetic oligonucleotide
  Target: ATXN2; (+) strand; PAM type: NRG; PAM sequence: CAG
ataatttttttttttctttt

SEQ ID NO: 46051 - DNA, 20 bp, Artificial Sequence
  Description of Artificial Sequence: Synthetic oligonucleotide
  Target: ATXN2; (+) strand; PAM type: NRG; PAM sequence: CAG
tttttttttttcttttcaga

SEQ ID NO: 46052 - DNA, 20 bp, Artificial Sequence
  Description of Artificial Sequence: Synthetic oligonucleotide
  Target: ATXN2; (+) strand; PAM type: NRG; PAM sequence: CAG
tcttctcacactctgttgcg

SEQ ID NO: 46053 - DNA, 20 bp, Artificial Sequence
  Description of Artificial Sequence: Synthetic oligonucleotide
  Target: ATXN2; (+) strand; PAM type: NRG; PAM sequence: AGG
cttctcacactctgttgcgc

SEQ ID NO: 46054 - DNA, 20 bp, Artificial Sequence
  Description of Artificial Sequence: Synthetic oligonucleotide
  Target: ATXN2; (+) strand; PAM type: NRG; PAM sequence: TGG
tcacactctgttgcgcaggc

SEQ ID NO: 46055 - DNA, 20 bp, Artificial Sequence
  Description of Artificial Sequence: Synthetic oligonucleotide
  Target: ATXN2; (+) strand; PAM type: NRG; PAM sequence: GAG
acactctgttgcgcaggctg

SEQ ID NO: 46056 - DNA, 20 bp, Artificial Sequence
  Description of Artificial Sequence: Synthetic oligonucleotide
  Target: ATXN2; (+) strand; PAM type: NRG; PAM sequence: CAG
ctgttgcgcaggctggagtg

SEQ ID NO: 46057 - DNA, 20 bp, Artificial Sequence
  Description of Artificial Sequence: Synthetic oligonucleotide
  Target: ATXN2; (+) strand; PAM type: NRG; PAM sequence: CAG
ggagtgcagtgacacaatct

SEQ ID NO: 46058 - DNA, 20 bp, Artificial Sequence
  Description of Artificial Sequence: Synthetic oligonucleotide
  Target: ATXN2; (+) strand; PAM type: NRG; PAM sequence: TGG
agtgacacaatctcagctca

SEQ ID NO: 46059 - DNA, 20 bp, Artificial Sequence
  Description of Artificial Sequence: Synthetic oligonucleotide
  Target: ATXN2; (+) strand; PAM type: NRG; PAM sequence: CAG
tcatggaaacctctacttct

SEQ ID NO: 46060 - DNA, 20 bp, Artificial Sequence
  Description of Artificial Sequence: Synthetic oligonucleotide
  Target: ATXN2; (+) strand; PAM type: NRG; PAM sequence: AGG
catggaaacctctacttctc

SEQ ID NO: 46061 - DNA, 20 bp, Artificial Sequence
  Description of Artificial Sequence: Synthetic oligonucleotide
  Target: ATXN2; (+) strand; PAM type: NRG; PAM sequence: AAG
aacctctacttctcaggttc

SEQ ID NO: 46062 - DNA, 20 bp, Artificial Sequence
  Description of Artificial Sequence: Synthetic oligonucleotide
  Target: ATXN2; (+) strand; PAM type: NRG; PAM sequence: GAG
attgcttgtctcaacctctc

SEQ ID NO: 46063 - DNA, 20 bp, Artificial Sequence
  Description of Artificial Sequence: Synthetic oligonucleotide
  Target: ATXN2; (+) strand; PAM type: NRG; PAM sequence: TAG
gcttgtctcaacctctcgag

SEQ ID NO: 46064 - DNA, 20 bp, Artificial Sequence
  Description of Artificial Sequence: Synthetic oligonucleotide
  Target: ATXN2; (+) strand; PAM type: NRG; PAM sequence: TGG
gtctcaacctctcgagtagc

SEQ ID NO: 46065 - DNA, 20 bp, Artificial Sequence
  Description of Artificial Sequence: Synthetic oligonucleotide
  Target: ATXN2; (+) strand; PAM type: NRG; PAM sequence: GGG
tctcaacctctcgagtagct

SEQ ID NO: 46066 - DNA, 20 bp, Artificial Sequence
  Description of Artificial Sequence: Synthetic oligonucleotide
  Target: ATXN2; (+) strand; PAM type: NRG; PAM sequence: TGG
attacacatgtgcactacca

SEQ ID NO: 46067 - DNA, 20 bp, Artificial Sequence
  Description of Artificial Sequence: Synthetic oligonucleotide
  Target: ATXN2; (+) strand; PAM type: NRG; PAM sequence: CAG
cacatgtgcactaccatggc

SEQ ID NO: 46068 - DNA, 20 bp, Artificial Sequence
  Description of Artificial Sequence: Synthetic oligonucleotide
  Target: ATXN2; (+) strand; PAM type: NRG; PAM sequence: TAG
cagctaattttttgtactta

SEQ ID NO: 46069 - DNA, 20 bp, Artificial Sequence
  Description of Artificial Sequence: Synthetic oligonucleotide
  Target: ATXN2; (+) strand; PAM type: NRG; PAM sequence: TAG
ctaattttttgtacttatag

SEQ ID NO: 46070 - DNA, 20 bp, Artificial Sequence
  Description of Artificial Sequence: Synthetic oligonucleotide
  Target: ATXN2; (+) strand; PAM type: NRG; PAM sequence: GAG
aattttttgtacttatagta

SEQ ID NO: 46071 - DNA, 20 bp, Artificial Sequence
  Description of Artificial Sequence: Synthetic oligonucleotide
  Target: ATXN2; (+) strand; PAM type: NRG; PAM sequence: TAG
ttttgtacttatagtagagc

SEQ ID NO: 46072 - DNA, 20 bp, Artificial Sequence
  Description of Artificial Sequence: Synthetic oligonucleotide
  Target: ATXN2; (+) strand; PAM type: NRG; PAM sequence: AGG
tttgtacttatagtagagct

SEQ ID NO: 46073 - DNA, 20 bp, Artificial Sequence
  Description of Artificial Sequence: Synthetic oligonucleotide
  Target: ATXN2; (+) strand; PAM type: NRG; PAM sequence: GGG
ttgtacttatagtagagcta

SEQ ID NO: 46074 - DNA, 20 bp, Artificial Sequence
  Description of Artificial Sequence: Synthetic oligonucleotide
  Target: ATXN2; (+) strand; PAM type: NRG; PAM sequence: TGG
gagctagggttttgccatgt

SEQ ID NO: 46075 - DNA, 20 bp, Artificial Sequence
  Description of Artificial Sequence: Synthetic oligonucleotide
  Target: ATXN2; (+) strand; PAM type: NRG; PAM sequence: CAG
tagggttttgccatgttggc

SEQ ID NO: 46076 - DNA, 20 bp, Artificial Sequence
  Description of Artificial Sequence: Synthetic oligonucleotide
  Target: ATXN2; (+) strand; PAM type: NRG; PAM sequence: AGG
agggttttgccatgttggcc

SEQ ID NO: 46077 - DNA, 20 bp, Artificial Sequence
  Description of Artificial Sequence: Synthetic oligonucleotide
  Target: ATXN2; (+) strand; PAM type: NRG; PAM sequence: TGG
ttttgccatgttggccaggc

SEQ ID NO: 46078 - DNA, 20 bp, Artificial Sequence
  Description of Artificial Sequence: Synthetic oligonucleotide
  Target: ATXN2; (+) strand; PAM type: NRG; PAM sequence: CAG
tggtcttgaactcctgacct

SEQ ID NO: 46079 - DNA, 20 bp, Artificial Sequence
  Description of Artificial Sequence: Synthetic oligonucleotide
  Target: ATXN2; (+) strand; PAM type: NRG; PAM sequence: AGG
ggtcttgaactcctgacctc

SEQ ID NO: 46080 - DNA, 20 bp, Artificial Sequence
  Description of Artificial Sequence: Synthetic oligonucleotide
  Target: ATXN2; (+) strand; PAM type: NRG; PAM sequence: CAG
ctcaggtgatccatctgcct

SEQ ID NO: 46081 - DNA, 20 bp, Artificial Sequence
  Description of Artificial Sequence: Synthetic oligonucleotide
  Target: ATXN2; (+) strand; PAM type: NRG; PAM sequence: AAG
ccatctgcctcagcctccct

SEQ ID NO: 46082 - DNA, 20 bp, Artificial Sequence
  Description of Artificial Sequence: Synthetic oligonucleotide
  Target: ATXN2; (+) strand; PAM type: NRG; PAM sequence: TGG
gcctcagcctccctaagtgc

SEQ ID NO: 46083 - DNA, 20 bp, Artificial Sequence
  Description of Artificial Sequence: Synthetic oligonucleotide
  Target: ATXN2; (+) strand; PAM type: NRG; PAM sequence: CAG
ctccctaagtgctggaatta

SEQ ID NO: 46084 - DNA, 20 bp, Artificial Sequence
  Description of Artificial Sequence: Synthetic oligonucleotide
  Target: ATXN2; (+) strand; PAM type: NRG; PAM sequence: AGG
tccctaagtgctggaattac

SEQ ID NO: 46085 - DNA, 20 bp, Artificial Sequence
  Description of Artificial Sequence: Synthetic oligonucleotide
  Target: ATXN2; (+) strand; PAM type: NRG; PAM sequence: CAG
ggaattacaggtgtgaccca

SEQ ID NO: 46086 - DNA, 20 bp, Artificial Sequence
  Description of Artificial Sequence: Synthetic oligonucleotide
  Target: ATXN2; (+) strand; PAM type: NRG; PAM sequence: CAG
acaggtgtgacccacagccc

SEQ ID NO: 46087 - DNA, 20 bp, Artificial Sequence
  Description of Artificial Sequence: Synthetic oligonucleotide
  Target: ATXN2; (+) strand; PAM type: NRG; PAM sequence: TGG
agcgtatttcccatatattt

SEQ ID NO: 46088 - DNA, 20 bp, Artificial Sequence
  Description of Artificial Sequence: Synthetic oligonucleotide
  Target: ATXN2; (+) strand; PAM type: NRG; PAM sequence: TGG
tcccatatattttggatcca

SEQ ID NO: 46089 - DNA, 20 bp, Artificial Sequence
  Description of Artificial Sequence: Synthetic oligonucleotide
  Target: ATXN2; (+) strand; PAM type: NRG; PAM sequence: TGG
atatattttggatccatggt

SEQ ID NO: 46090 - DNA, 20 bp, Artificial Sequence
  Description of Artificial Sequence: Synthetic oligonucleotide
  Target: ATXN2; (+) strand; PAM type: NRG; PAM sequence: CAG
tccatggttggttgaattca

SEQ ID NO: 46091 - DNA, 20 bp, Artificial Sequence
  Description of Artificial Sequence: Synthetic oligonucleotide
  Target: ATXN2; (+) strand; PAM type: NRG; PAM sequence: TGG
attcacagctgtgtaaccca

SEQ ID NO: 46092 - DNA, 20 bp, Artificial Sequence
  Description of Artificial Sequence: Synthetic oligonucleotide
  Target: ATXN2; (+) strand; PAM type: NRG; PAM sequence: TAG
acagctgtgtaacccatgga

SEQ ID NO: 46093 - DNA, 20 bp, Artificial Sequence
  Description of Artificial Sequence: Synthetic oligonucleotide
  Target: ATXN2; (+) strand; PAM type: NRG; PAM sequence: GAG
agctgtgtaacccatggata

SEQ ID NO: 46094 - DNA, 20 bp, Artificial Sequence
  Description of Artificial Sequence: Synthetic oligonucleotide
  Target: ATXN2; (+) strand; PAM type: NRG; PAM sequence: GAG
ctgtgtaacccatggataga

SEQ ID NO: 46095 - DNA, 20 bp, Artificial Sequence
  Description of Artificial Sequence: Synthetic oligonucleotide
  Target: ATXN2; (+) strand; PAM type: NRG; PAM sequence: AGG
tgtgtaacccatggatagag

SEQ ID NO: 46096 - DNA, 20 bp, Artificial Sequence
  Description of Artificial Sequence: Synthetic oligonucleotide
  Target: ATXN2; (+) strand; PAM type: NRG; PAM sequence: GGG
gtgtaacccatggatagaga

SEQ ID NO: 46097 - DNA, 20 bp, Artificial Sequence
  Description of Artificial Sequence: Synthetic oligonucleotide
  Target: ATXN2; (+) strand; PAM type: NRG; PAM sequence: AAG
tatttgcaaactaacatttg

SEQ ID NO: 46098 - DNA, 20 bp, Artificial Sequence
  Description of Artificial Sequence: Synthetic oligonucleotide
  Target: ATXN2; (+) strand; PAM type: NRG; PAM sequence: CAG
aaactaacatttgaagacat

SEQ ID NO: 46099 - DNA, 20 bp, Artificial Sequence
  Description of Artificial Sequence: Synthetic oligonucleotide
  Target: ATXN2; (+) strand; PAM type: NRG; PAM sequence: CAG
atttgaagacatcagtgtcc

SEQ ID NO: 46100 - DNA, 20 bp, Artificial Sequence
  Description of Artificial Sequence: Synthetic oligonucleotide
  Target: ATXN2; (+) strand; PAM type: NRG; PAM sequence: AAG
agtgtcccagccacaaaact

SEQ ID NO: 46101 - DNA, 20 bp, Artificial Sequence
  Description of Artificial Sequence: Synthetic oligonucleotide
  Target: ATXN2; (+) strand; PAM type: NRG; PAM sequence: TGG
ccacaaaactaagaaatgaa

SEQ ID NO: 46102 - DNA, 20 bp, Artificial Sequence
  Description of Artificial Sequence: Synthetic oligonucleotide
  Target: ATXN2; (+) strand; PAM type: NRG; PAM sequence: TGG
acaattttaatcattgtcta

SEQ ID NO: 46103 - DNA, 20 bp, Artificial Sequence
  Description of Artificial Sequence: Synthetic oligonucleotide
  Target: ATXN2; (+) strand; PAM type: NRG; PAM sequence: AAG
ctatggtatcatgcctatgt

SEQ ID NO: 46104 - DNA, 20 bp, Artificial Sequence
  Description of Artificial Sequence: Synthetic oligonucleotide
  Target: ATXN2; (+) strand; PAM type: NRG; PAM sequence: GAG
atggtatcatgcctatgtaa

SEQ ID NO: 46105 - DNA, 20 bp, Artificial Sequence
  Description of Artificial Sequence: Synthetic oligonucleotide
  Target: ATXN2; (+) strand; PAM type: NRG; PAM sequence: CAG
ctatgtaagagaaaaaaaaa

SEQ ID NO: 46106 - DNA, 20 bp, Artificial Sequence
  Description of Artificial Sequence: Synthetic oligonucleotide
  Target: ATXN2; (+) strand; PAM type: NRG; PAM sequence: TGG
aaaaaaaaacagttattccc

SEQ ID NO: 46107 - DNA, 20 bp, Artificial Sequence
  Description of Artificial Sequence: Synthetic oligonucleotide
  Target: ATXN2; (+) strand; PAM type: NRG; PAM sequence: TAG
aaaacagttattccctggtt

SEQ ID NO: 46108 - DNA, 20 bp, Artificial Sequence
  Description of Artificial Sequence: Synthetic oligonucleotide
  Target: ATXN2; (+) strand; PAM type: NRG; PAM sequence: AGG
aaacagttattccctggttt

SEQ ID NO: 46109 - DNA, 20 bp, Artificial Sequence
  Description of Artificial Sequence: Synthetic oligonucleotide
  Target: ATXN2; (+) strand; PAM type: NRG; PAM sequence: GAG
acagttattccctggtttag

SEQ ID NO: 46110 - DNA, 20 bp, Artificial Sequence
  Description of Artificial Sequence: Synthetic oligonucleotide
  Target: ATXN2; (+) strand; PAM type: NRG; PAM sequence: TGG
ctggtttaggagtataaaat

SEQ ID NO: 46111 - DNA, 20 bp, Artificial Sequence
  Description of Artificial Sequence: Synthetic oligonucleotide
  Target: ATXN2; (+) strand; PAM type: NRG; PAM sequence: GGG
tggtttaggagtataaaatt

SEQ ID NO: 46112 - DNA, 20 bp, Artificial Sequence
  Description of Artificial Sequence: Synthetic oligonucleotide
  Target: ATXN2; (+) strand; PAM type: NRG; PAM sequence: TAG
taggagtataaaattgggtc

SEQ ID NO: 46113 - DNA, 20 bp, Artificial Sequence
  Description of Artificial Sequence: Synthetic oligonucleotide
  Target: ATXN2; (+) strand; PAM type: NRG; PAM sequence: GAG
agtataaaattgggtctagt

SEQ ID NO: 46114 - DNA, 20 bp, Artificial Sequence
  Description of Artificial Sequence: Synthetic oligonucleotide
  Target: ATXN2; (+) strand; PAM type: NRG; PAM sequence: AAG
ataataaatataaataaatt

SEQ ID NO: 46115 - DNA, 20 bp, Artificial Sequence
  Description of Artificial Sequence: Synthetic oligonucleotide
  Target: ATXN2; (+) strand; PAM type: NRG; PAM sequence: AAG
taaattaagtttaaaaatat

SEQ ID NO: 46116 - DNA, 20 bp, Artificial Sequence
  Description of Artificial Sequence: Synthetic oligonucleotide
  Target: ATXN2; (+) strand; PAM type: NRG; PAM sequence: CAG
gtttaaaaatataagtattt

SEQ ID NO: 46117 - DNA, 20 bp, Artificial Sequence
  Description of Artificial Sequence: Synthetic oligonucleotide
  Target: ATXN2; (+) strand; PAM type: NRG; PAM sequence: TGG
taaaaatataagtatttcag

SEQ ID NO: 46118 - DNA, 20 bp, Artificial Sequence
  Description of Artificial Sequence: Synthetic oligonucleotide
  Target: ATXN2; (+) strand; PAM type: NRG; PAM sequence: TGG
aaatataagtatttcagtgg

SEQ ID NO: 46119 - DNA, 20 bp, Artificial Sequence
  Description of Artificial Sequence: Synthetic oligonucleotide
  Target: ATXN2; (+) strand; PAM type: NRG; PAM sequence: TGG
tttcagtggtggctcacact

SEQ ID NO: 46120 - DNA, 20 bp, Artificial Sequence
  Description of Artificial Sequence: Synthetic oligonucleotide
  Target: ATXN2; (+) strand; PAM type: NRG; PAM sequence: GGG
ttcagtggtggctcacactt

SEQ ID NO: 46121 - DNA, 20 bp, Artificial Sequence
  Description of Artificial Sequence: Synthetic oligonucleotide
  Target: ATXN2; (+) strand; PAM type: NRG; PAM sequence: AAG
agtggtggctcacacttggg

SEQ ID NO: 46122 - DNA, 20 bp, Artificial Sequence
  Description of Artificial Sequence: Synthetic oligonucleotide
  Target: ATXN2; (+) strand; PAM type: NRG; PAM sequence: AAG
tggctcacacttgggaagcc

SEQ ID NO: 46123 - DNA, 20 bp, Artificial Sequence
  Description of Artificial Sequence: Synthetic oligonucleotide
  Target: ATXN2; (+) strand; PAM type: NRG; PAM sequence: AGG
ggctcacacttgggaagcca

SEQ ID NO: 46124 - DNA, 20 bp, Artificial Sequence
  Description of Artificial Sequence: Synthetic oligonucleotide
  Target: ATXN2; (+) strand; PAM type: NRG; PAM sequence: CAG
tcacacttgggaagccaagg

SEQ ID NO: 46125 - DNA, 20 bp, Artificial Sequence
  Description of Artificial Sequence: Synthetic oligonucleotide
  Target: ATXN2; (+) strand; PAM type: NRG; PAM sequence: AGG
cacacttgggaagccaaggc

SEQ ID NO: 46126 - DNA, 20 bp, Artificial Sequence
  Description of Artificial Sequence: Synthetic oligonucleotide
  Target: ATXN2; (+) strand; PAM type: NRG; PAM sequence: TGG
acttgggaagccaaggcagg

SEQ ID NO: 46127 - DNA, 20 bp, Artificial Sequence
  Description of Artificial Sequence: Synthetic oligonucleotide
  Target: ATXN2; (+) strand; PAM type: NRG; PAM sequence: GAG
ccaaggcaggtggactgcct

SEQ ID NO: 46128 - DNA, 20 bp, Artificial Sequence
  Description of Artificial Sequence: Synthetic oligonucleotide
  Target: ATXN2; (+) strand; PAM type: NRG; PAM sequence: CAG
gcaggtggactgcctgagct

SEQ ID NO: 46129 - DNA, 20 bp, Artificial Sequence
  Description of Artificial Sequence: Synthetic oligonucleotide
  Target: ATXN2; (+) strand; PAM type: NRG; PAM sequence: AGG
caggtggactgcctgagctc

SEQ ID NO: 46130 - DNA, 20 bp, Artificial Sequence
  Description of Artificial Sequence: Synthetic oligonucleotide
  Target: ATXN2; (+) strand; PAM type: NRG; PAM sequence: GAG
ggtggactgcctgagctcag

SEQ ID NO: 46131 - DNA, 20 bp, Artificial Sequence
  Description of Artificial Sequence: Synthetic oligonucleotide
  Target: ATXN2; (+) strand; PAM type: NRG; PAM sequence: TGG
tcaggagttcgaaaccaacc

SEQ ID NO: 46132 - DNA, 20 bp, Artificial Sequence
  Description of Artificial Sequence: Synthetic oligonucleotide
  Target: ATXN2; (+) strand; PAM type: NRG; PAM sequence: GGG
caggagttcgaaaccaacct

SEQ ID NO: 46133 - DNA, 20 bp, Artificial Sequence
  Description of Artificial Sequence: Synthetic oligonucleotide
  Target: ATXN2; (+) strand; PAM type: NRG; PAM sequence: CGG
cgaaaccaacctgggcaaca

SEQ ID NO: 46134 - DNA, 20 bp, Artificial Sequence
  Description of Artificial Sequence: Synthetic oligonucleotide
  Target: ATXN2; (+) strand; PAM type: NRG; PAM sequence: TAG
ctaccaaaaatataaaaaat

SEQ ID NO: 46135 - DNA, 20 bp, Artificial Sequence
  Description of Artificial Sequence: Synthetic oligonucleotide
  Target: ATXN2; (+) strand; PAM type: NRG; PAM sequence: CAG
caaaaatataaaaaattagc

SEQ ID NO: 46136 - DNA, 20 bp, Artificial Sequence
  Description of Artificial Sequence: Synthetic oligonucleotide
  Target: ATXN2; (+) strand; PAM type: NRG; PAM sequence: AGG
aaaaatataaaaaattagcc

SEQ ID NO: 46137 - DNA, 20 bp, Artificial Sequence
  Description of Artificial Sequence: Synthetic oligonucleotide
  Target: ATXN2; (+) strand; PAM type: NRG; PAM sequence: TGG
tataaaaaattagccaggca

SEQ ID NO: 46138 - DNA, 20 bp, Artificial Sequence
  Description of Artificial Sequence: Synthetic oligonucleotide
  Target: ATXN2; (+) strand; PAM type: NRG; PAM sequence: TGG
ggcatggtgatgcgcacctg

SEQ ID NO: 46139 - DNA, 20 bp, Artificial Sequence
  Description of Artificial Sequence: Synthetic oligonucleotide
  Target: ATXN2; (+) strand; PAM type: NRG; PAM sequence: CAG
gtgatgcgcacctgtggtcc

SEQ ID NO: 46140 - DNA, 20 bp, Artificial Sequence
  Description of Artificial Sequence: Synthetic oligonucleotide
  Target: ATXN2; (+) strand; PAM type: NRG; PAM sequence: AGG
tgatgcgcacctgtggtccc

SEQ ID NO: 46141 - DNA, 20 bp, Artificial Sequence
  Description of Artificial Sequence: Synthetic oligonucleotide
  Target: ATXN2; (+) strand; PAM type: NRG; PAM sequence: CGG
cacctgtggtcccaggtact

SEQ ID NO: 46142 - DNA, 20 bp, Artificial Sequence
  Description of Artificial Sequence: Synthetic oligonucleotide
  Target: ATXN2; (+) strand; PAM type: NRG; PAM sequence: GGG
acctgtggtcccaggtactc

SEQ ID NO: 46143 - DNA, 20 bp, Artificial Sequence
  Description of Artificial Sequence: Synthetic oligonucleotide
  Target: ATXN2; (+) strand; PAM type: NRG; PAM sequence: GAG
ctgtggtcccaggtactcgg

SEQ ID NO: 46144 - DNA, 20 bp, Artificial Sequence
  Description of Artificial Sequence: Synthetic oligonucleotide
  Target: ATXN2; (+) strand; PAM type: NRG; PAM sequence: AGG
tgtggtcccaggtactcggg

SEQ ID NO: 46145 - DNA, 20 bp, Artificial Sequence
  Description of Artificial Sequence: Synthetic oligonucleotide
  Target: ATXN2; (+) strand; PAM type: NRG; PAM sequence: GAG
tcccaggtactcgggaggct

SEQ ID NO: 46146 - DNA, 20 bp, Artificial Sequence
  Description of Artificial Sequence: Synthetic oligonucleotide
  Target: ATXN2; (+) strand; PAM type: NRG; PAM sequence: AGG
cccaggtactcgggaggctg

SEQ ID NO: 46147 - DNA, 20 bp, Artificial Sequence
  Description of Artificial Sequence: Synthetic oligonucleotide
  Target: ATXN2; (+) strand; PAM type: NRG; PAM sequence: TGG
aggtactcgggaggctgagg

SEQ ID NO: 46148 - DNA, 20 bp, Artificial Sequence
  Description of Artificial Sequence: Synthetic oligonucleotide
  Target: ATXN2; (+) strand; PAM type: NRG; PAM sequence: GGG
ggtactcgggaggctgaggt

SEQ ID NO: 46149 - DNA, 20 bp, Artificial Sequence
  Description of Artificial Sequence: Synthetic oligonucleotide
  Target: ATXN2; (+) strand; PAM type: NRG; PAM sequence: GAG
tactcgggaggctgaggtgg

SEQ ID NO: 46150 - DNA, 20 bp, Artificial Sequence
  Description of Artificial Sequence: Synthetic oligonucleotide
  Target: ATXN2; (+) strand; PAM type: NRG; PAM sequence: GAG
ctgaggtgggagaatcactt

SEQ ID NO: 46151 - DNA, 20 bp, Artificial Sequence
  Description of Artificial Sequence: Synthetic oligonucleotide
  Target: ATXN2; (+) strand; PAM type: NRG; PAM sequence: TGG
gtgggagaatcacttgagcc

SEQ ID NO: 46152 - DNA, 20 bp, Artificial Sequence
  Description of Artificial Sequence: Synthetic oligonucleotide
  Target: ATXN2; (+) strand; PAM type: NRG; PAM sequence: GGG
tgggagaatcacttgagcct

SEQ ID NO: 46153 - DNA, 20 bp, Artificial Sequence
  Description of Artificial Sequence: Synthetic oligonucleotide
  Target: ATXN2; (+) strand; PAM type: NRG; PAM sequence: GAG
ggagaatcacttgagcctgg

SEQ ID NO: 46154 - DNA, 20 bp, Artificial Sequence
  Description of Artificial Sequence: Synthetic oligonucleotide
  Target: ATXN2; (+) strand; PAM type: NRG; PAM sequence: AGG
gagaatcacttgagcctggg

SEQ ID NO: 46155 - DNA, 20 bp, Artificial Sequence
  Description of Artificial Sequence: Synthetic oligonucleotide
  Target: ATXN2; (+) strand; PAM type: NRG; PAM sequence: GAG
gaatcacttgagcctgggag

SEQ ID NO: 46156 - DNA, 20 bp, Artificial Sequence
  Description of Artificial Sequence: Synthetic oligonucleotide
  Target: ATXN2; (+) strand; PAM type: NRG; PAM sequence: AGG
aatcacttgagcctgggagg

SEQ ID NO: 46157 - DNA, 20 bp, Artificial Sequence
  Description of Artificial Sequence: Synthetic oligonucleotide
  Target: ATXN2; (+) strand; PAM type: NRG; PAM sequence: GAG
tcacttgagcctgggaggag

SEQ ID NO: 46158 - DNA, 20 bp, Artificial Sequence
  Description of Artificial Sequence: Synthetic oligonucleotide
  Target: ATXN2; (+) strand; PAM type: NRG; PAM sequence: AGG
cacttgagcctgggaggagg

SEQ ID NO: 46159 - DNA, 20 bp, Artificial Sequence
  Description of Artificial Sequence: Synthetic oligonucleotide
  Target: ATXN2; (+) strand; PAM type: NRG; PAM sequence: CGG
agcctgggaggaggaggttg

SEQ ID NO: 46160 - DNA, 20 bp, Artificial Sequence
  Description of Artificial Sequence: Synthetic oligonucleotide
  Target: ATXN2; (+) strand; PAM type: NRG; PAM sequence: GAG
tgggaggaggaggttgcggt

SEQ ID NO: 46161 - DNA, 20 bp, Artificial Sequence
  Description of Artificial Sequence: Synthetic oligonucleotide
  Target: ATXN2; (+) strand; PAM type: NRG; PAM sequence: AAG
ggaggaggttgcggtgagcc

SEQ ID NO: 46162 - DNA, 20 bp, Artificial Sequence
  Description of Artificial Sequence: Synthetic oligonucleotide
  Target: ATXN2; (+) strand; PAM type: NRG; PAM sequence: CAG
gcatcaccacactccaacct

SEQ ID NO: 46163 - DNA, 20 bp, Artificial Sequence
  Description of Artificial Sequence: Synthetic oligonucleotide
  Target: ATXN2; (+) strand; PAM type: NRG; PAM sequence: TAG
ccacactccaacctcagtga

SEQ ID NO: 46164 - DNA, 20 bp, Artificial Sequence
  Description of Artificial Sequence: Synthetic oligonucleotide
  Target: ATXN2; (+) strand; PAM type: NRG; PAM sequence: GAG
acactccaacctcagtgata

SEQ ID NO: 46165 - DNA, 20 bp, Artificial Sequence
  Description of Artificial Sequence: Synthetic oligonucleotide
  Target: ATXN2; (+) strand; PAM type: NRG; PAM sequence: GAG
tccaacctcagtgatagagt

SEQ ID NO: 46166 - DNA, 20 bp, Artificial Sequence
  Description of Artificial Sequence: Synthetic oligonucleotide
  Target: ATXN2; (+) strand; PAM type: NRG; PAM sequence: AAG
aacttttcaaaaatcaatca

SEQ ID NO: 46167 - DNA, 20 bp, Artificial Sequence
  Description of Artificial Sequence: Synthetic oligonucleotide
  Target: ATXN2; (+) strand; PAM type: NRG; PAM sequence: AGG
acttttcaaaaatcaatcaa

SEQ ID NO: 46168 - DNA, 20 bp, Artificial Sequence
  Description of Artificial Sequence: Synthetic oligonucleotide
  Target: ATXN2; (+) strand; PAM type: NRG; PAM sequence: AAG
gttgaacacctgttatctgt

SEQ ID NO: 46169 - DNA, 20 bp, Artificial Sequence
  Description of Artificial Sequence: Synthetic oligonucleotide
  Target: ATXN2; (+) strand; PAM type: NRG; PAM sequence: TAG
gtaagtcactgtatatatac

SEQ ID NO: 46170 - DNA, 20 bp, Artificial Sequence
  Description of Artificial Sequence: Synthetic oligonucleotide
  Target: ATXN2; (+) strand; PAM type: NRG; PAM sequence: TGG
tgtatatatactagacacca

SEQ ID NO: 46171 - DNA, 20 bp, Artificial Sequence
  Description of Artificial Sequence: Synthetic oligonucleotide
  Target: ATXN2; (+) strand; PAM type: NRG; PAM sequence: TGG
tatatactagacaccatggt

SEQ ID NO: 46172 - DNA, 20 bp, Artificial Sequence
  Description of Artificial Sequence: Synthetic oligonucleotide
  Target: ATXN2; (+) strand; PAM type: NRG; PAM sequence: GGG
atatactagacaccatggtt

SEQ ID NO: 46173 - DNA, 20 bp, Artificial Sequence
  Description of Artificial Sequence: Synthetic oligonucleotide
  Target: ATXN2; (+) strand; PAM type: NRG; PAM sequence: GGG
tatactagacaccatggttg

SEQ ID NO: 46174 - DNA, 20 bp, Artificial Sequence
  Description of Artificial Sequence: Synthetic oligonucleotide
  Target: ATXN2; (+) strand; PAM type: NRG; PAM sequence: GGG
atactagacaccatggttgg

SEQ ID NO: 46175 - DNA, 20 bp, Artificial Sequence
  Description of Artificial Sequence: Synthetic oligonucleotide
  Target: ATXN2; (+) strand; PAM type: NRG; PAM sequence: GGG
tactagacaccatggttggg

SEQ ID NO: 46176 - DNA, 20 bp, Artificial Sequence
  Description of Artificial Sequence: Synthetic oligonucleotide
  Target: ATXN2; (+) strand; PAM type: NRG; PAM sequence: GGG
actagacaccatggttgggg

SEQ ID NO: 46177 - DNA, 20 bp, Artificial Sequence
  Description of Artificial Sequence: Synthetic oligonucleotide
  Target: ATXN2; (+) strand; PAM type: NRG; PAM sequence: CAG
taaatttgttttctgaactc

SEQ ID NO: 46178 - DNA, 20 bp, Artificial Sequence
  Description of Artificial Sequence: Synthetic oligonucleotide
  Target: ATXN2; (+) strand; PAM type: NRG; PAM sequence: AAG
ttgttttctgaactccagaa

SEQ ID NO: 46179 - DNA, 20 bp, Artificial Sequence
  Description of Artificial Sequence: Synthetic oligonucleotide
  Target: ATXN2; (+) strand; PAM type: NRG; PAM sequence: TGG
tccagaaaagtttaatgcat

SEQ ID NO: 46180 - DNA, 20 bp, Artificial Sequence
  Description of Artificial Sequence: Synthetic oligonucleotide
  Target: ATXN2; (+) strand; PAM type: NRG; PAM sequence: GGG
ccagaaaagtttaatgcatt

SEQ ID NO: 46181 - DNA, 20 bp, Artificial Sequence
  Description of Artificial Sequence: Synthetic oligonucleotide
  Target: ATXN2; (+) strand; PAM type: NRG; PAM sequence: GAG
agaaaagtttaatgcattgg

SEQ ID NO: 46182 - DNA, 20 bp, Artificial Sequence
  Description of Artificial Sequence: Synthetic oligonucleotide
  Target: ATXN2; (+) strand; PAM type: NRG; PAM sequence: GAG
aaaagtttaatgcattggga

SEQ ID NO: 46183 - DNA, 20 bp, Artificial Sequence
  Description of Artificial Sequence: Synthetic oligonucleotide
  Target: ATXN2; (+) strand; PAM type: NRG; PAM sequence: GAG
aagtttaatgcattgggaga

SEQ ID NO: 46184 - DNA, 20 bp, Artificial Sequence
  Description of Artificial Sequence: Synthetic oligonucleotide
  Target: ATXN2; (+) strand; PAM type: NRG; PAM sequence: CGG
ttgggagagagaaaatatac

SEQ ID NO: 46185 - DNA, 20 bp, Artificial Sequence
  Description of Artificial Sequence: Synthetic oligonucleotide
  Target: ATXN2; (+) strand; PAM type: NRG; PAM sequence: AAG
gagaaaatataccggtaaaa

SEQ ID NO: 46186 - DNA, 20 bp, Artificial Sequence
  Description of Artificial Sequence: Synthetic oligonucleotide
  Target: ATXN2; (+) strand; PAM type: NRG; PAM sequence: AAG
acactacatactgcttcgtg

SEQ ID NO: 46187 - DNA, 20 bp, Artificial Sequence
  Description of Artificial Sequence: Synthetic oligonucleotide
  Target: ATXN2; (+) strand; PAM type: NRG; PAM sequence: GAG
acatactgcttcgtgaagat

SEQ ID NO: 46188 - DNA, 20 bp, Artificial Sequence
  Description of Artificial Sequence: Synthetic oligonucleotide
  Target: ATXN2; (+) strand; PAM type: NRG; PAM sequence: TGG
gcttcgtgaagatgagtgtt

SEQ ID NO: 46189 - DNA, 20 bp, Artificial Sequence
  Description of Artificial Sequence: Synthetic oligonucleotide
  Target: ATXN2; (+) strand; PAM type: NRG; PAM sequence: TGG
gatgagtgtttggtacatga

SEQ ID NO: 46190 - DNA, 20 bp, Artificial Sequence
  Description of Artificial Sequence: Synthetic oligonucleotide
  Target: ATXN2; (+) strand; PAM type: NRG; PAM sequence: GAG
tgagtgtttggtacatgatg

SEQ ID NO: 46191 - DNA, 20 bp, Artificial Sequence
  Description of Artificial Sequence: Synthetic oligonucleotide
  Target: ATXN2; (+) strand; PAM type: NRG; PAM sequence: TGG
tggtacatgatggagaccac

SEQ ID NO: 46192 - DNA, 20 bp, Artificial Sequence
  Description of Artificial Sequence: Synthetic oligonucleotide
  Target: ATXN2; (+) strand; PAM type: NRG; PAM sequence: CAG
atgacaccctatgatgtctt

SEQ ID NO: 46193 - DNA, 20 bp, Artificial Sequence
  Description of Artificial Sequence: Synthetic oligonucleotide
  Target: ATXN2; (+) strand; PAM type: NRG; PAM sequence: AGG
tgacaccctatgatgtcttc

SEQ ID NO: 46194 - DNA, 20 bp, Artificial Sequence
  Description of Artificial Sequence: Synthetic oligonucleotide
  Target: ATXN2; (+) strand; PAM type: NRG; PAM sequence: CAG
atgatgtcttcaggacaccc

SEQ ID NO: 46195 - DNA, 20 bp, Artificial Sequence
  Description of Artificial Sequence: Synthetic oligonucleotide
  Target: ATXN2; (+) strand; PAM type: NRG; PAM sequence: AAG
atgtcttcaggacaccccag

SEQ ID NO: 46196 - DNA, 20 bp, Artificial Sequence
  Description of Artificial Sequence: Synthetic oligonucleotide
  Target: ATXN2; (+) strand; PAM type: NRG; PAM sequence: AGG
tgtcttcaggacaccccaga

SEQ ID NO: 46197 - DNA, 20 bp, Artificial Sequence
  Description of Artificial Sequence: Synthetic oligonucleotide
  Target: ATXN2; (+) strand; PAM type: NRG; PAM sequence: AAG
ttcaggacaccccagaaggc

SEQ ID NO: 46198 - DNA, 20 bp, Artificial Sequence
  Description of Artificial Sequence: Synthetic oligonucleotide
  Target: ATXN2; (+) strand; PAM type: NRG; PAM sequence: AGG
tcaggacaccccagaaggca

SEQ ID NO: 46199 - DNA, 20 bp, Artificial Sequence
  Description of Artificial Sequence: Synthetic oligonucleotide
  Target: ATXN2; (+) strand; PAM type: NRG; PAM sequence: GGG
caggacaccccagaaggcaa

SEQ ID NO: 46200 - DNA, 20 bp, Artificial Sequence
  Description of Artificial Sequence: Synthetic oligonucleotide
  Target: ATXN2; (+) strand; PAM type: NRG; PAM sequence: AAG
acaccccagaaggcaaggga

SEQ ID NO: 46201 - DNA, 20 bp, Artificial Sequence
  Description of Artificial Sequence: Synthetic oligonucleotide
  Target: ATXN2; (+) strand; PAM type: NRG; PAM sequence: TGG
ccccagaaggcaagggaaag

SEQ ID NO: 46202 - DNA, 20 bp, Artificial Sequence
  Description of Artificial Sequence: Synthetic oligonucleotide
  Target: ATXN2; (+) strand; PAM type: NRG; PAM sequence: GAG
ccagaaggcaagggaaagtg

SEQ ID NO: 46203 - DNA, 20 bp, Artificial Sequence
  Description of Artificial Sequence: Synthetic oligonucleotide
  Target: ATXN2; (+) strand; PAM type: NRG; PAM sequence: AAG
aaggcaagggaaagtggagt

SEQ ID NO: 46204 - DNA, 20 bp, Artificial Sequence
  Description of Artificial Sequence: Synthetic oligonucleotide
  Target: ATXN2; (+) strand; PAM type: NRG; PAM sequence: TAG
gcaagggaaagtggagtaag

SEQ ID NO: 46205 - DNA, 20 bp, Artificial Sequence
  Description of Artificial Sequence: Synthetic oligonucleotide
  Target: ATXN2; (+) strand; PAM type: NRG; PAM sequence: AGG
caagggaaagtggagtaagt

SEQ ID NO: 46206 - DNA, 20 bp, Artificial Sequence
  Description of Artificial Sequence: Synthetic oligonucleotide
  Target: ATXN2; (+) strand; PAM type: NRG; PAM sequence: GGG
aagggaaagtggagtaagta

SEQ ID NO: 46207 - DNA, 20 bp, Artificial Sequence
  Description of Artificial Sequence: Synthetic oligonucleotide
  Target: ATXN2; (+) strand; PAM type: NRG; PAM sequence: GAG
gggaaagtggagtaagtagg

SEQ ID NO: 46208 - DNA, 20 bp, Artificial Sequence
  Description of Artificial Sequence: Synthetic oligonucleotide
  Target: ATXN2; (+) strand; PAM type: NRG; PAM sequence: TAG
aagtggagtaagtagggagc

SEQ ID NO: 46209 - DNA, 20 bp, Artificial Sequence
  Description of Artificial Sequence: Synthetic oligonucleotide
  Target: ATXN2; (+) strand; PAM type: NRG; PAM sequence: AGG
agtggagtaagtagggagct

SEQ ID NO: 46210 - DNA, 20 bp, Artificial Sequence
  Description of Artificial Sequence: Synthetic oligonucleotide
  Target: ATXN2; (+) strand; PAM type: NRG; PAM sequence: TAG
gtagggagctaggacatcac

SEQ ID NO: 46211 - DNA, 20 bp, Artificial Sequence
  Description of Artificial Sequence: Synthetic oligonucleotide
  Target: ATXN2; (+) strand; PAM type: NRG; PAM sequence: AAG
actagctcttcttccaacca

SEQ ID NO: 46212 - DNA, 20 bp, Artificial Sequence
  Description of Artificial Sequence: Synthetic oligonucleotide
  Target: ATXN2; (+) strand; PAM type: NRG; PAM sequence: AAG
accaaagccttgttttaact

SEQ ID NO: 46213 - DNA, 20 bp, Artificial Sequence
  Description of Artificial Sequence: Synthetic oligonucleotide
  Target: ATXN2; (+) strand; PAM type: NRG; PAM sequence: GAG
caaagccttgttttaactaa

SEQ ID NO: 46214 - DNA, 20 bp, Artificial Sequence
  Description of Artificial Sequence: Synthetic oligonucleotide
  Target: ATXN2; (+) strand; PAM type: NRG; PAM sequence: CAG
gccttgttttaactaagagt

SEQ ID NO: 46215 - DNA, 20 bp, Artificial Sequence
  Description of Artificial Sequence: Synthetic oligonucleotide
  Target: ATXN2; (+) strand; PAM type: NRG; PAM sequence: TGG
gttttaactaagagtcagca

SEQ ID NO: 46216 - DNA, 20 bp, Artificial Sequence
  Description of Artificial Sequence: Synthetic oligonucleotide
  Target: ATXN2; (+) strand; PAM type: NRG; PAM sequence: GGG
ttttaactaagagtcagcat

SEQ ID NO: 46217 - DNA, 20 bp, Artificial Sequence
  Description of Artificial Sequence: Synthetic oligonucleotide
  Target: ATXN2; (+) strand; PAM type: NRG; PAM sequence: CAG
gagtcagcatgggatctcat

SEQ ID NO: 46218 - DNA, 20 bp, Artificial Sequence
  Description of Artificial Sequence: Synthetic oligonucleotide
  Target: ATXN2; (+) strand; PAM type: NRG; PAM sequence: GAG
gtcagcatgggatctcatca

SEQ ID NO: 46219 - DNA, 20 bp, Artificial Sequence
  Description of Artificial Sequence: Synthetic oligonucleotide
  Target: ATXN2; (+) strand; PAM type: NRG; PAM sequence: AGG
tcagcatgggatctcatcag

SEQ ID NO: 46220 - DNA, 20 bp, Artificial Sequence
  Description of Artificial Sequence: Synthetic oligonucleotide
  Target: ATXN2; (+) strand; PAM type: NRG; PAM sequence: GGG
cagcatgggatctcatcaga

SEQ ID NO: 46221 - DNA, 20 bp, Artificial Sequence
  Description of Artificial Sequence: Synthetic oligonucleotide
  Target: ATXN2; (+) strand; PAM type: NRG; PAM sequence: AAG
ctgacctattctatactaaa

SEQ ID NO: 46222 - DNA, 20 bp, Artificial Sequence
  Description of Artificial Sequence: Synthetic oligonucleotide
  Target: ATXN2; (+) strand; PAM type: NRG; PAM sequence: AAG
atactaaaaagaaaatgtta

SEQ ID NO: 46223 - DNA, 20 bp, Artificial Sequence
  Description of Artificial Sequence: Synthetic oligonucleotide
  Target: ATXN2; (+) strand; PAM type: NRG; PAM sequence: TGG
aaaaagaaaatgttaaagtc

SEQ ID NO: 46224 - DNA, 20 bp, Artificial Sequence
  Description of Artificial Sequence: Synthetic oligonucleotide
  Target: ATXN2; (+) strand; PAM type: NRG; PAM sequence: GGG
aaaagaaaatgttaaagtct

SEQ ID NO: 46225 - DNA, 20 bp, Artificial Sequence
  Description of Artificial Sequence: Synthetic oligonucleotide
  Target: ATXN2; (+) strand; PAM type: NRG; PAM sequence: TGG
aaaatgttaaagtctgggca

SEQ ID NO: 46226 - DNA, 20 bp, Artificial Sequence
  Description of Artificial Sequence: Synthetic oligonucleotide
  Target: ATXN2; (+) strand; PAM type: NRG; PAM sequence: CAG
gtgactcacacctgtaatcc

SEQ ID NO: 46227 - DNA, 20 bp, Artificial Sequence
  Description of Artificial Sequence: Synthetic oligonucleotide
  Target: ATXN2; (+) strand; PAM type: NRG; PAM sequence: TGG
acacctgtaatcccagcact

SEQ ID NO: 46228 - DNA, 20 bp, Artificial Sequence
  Description of Artificial Sequence: Synthetic oligonucleotide
  Target: ATXN2; (+) strand; PAM type: NRG; PAM sequence: GGG
cacctgtaatcccagcactt

SEQ ID NO: 46229 - DNA, 20 bp, Artificial Sequence
  Description of Artificial Sequence: Synthetic oligonucleotide
  Target: ATXN2; (+) strand; PAM type: NRG; PAM sequence: GGG
acctgtaatcccagcacttg

SEQ ID NO: 46230 - DNA, 20 bp, Artificial Sequence
  Description of Artificial Sequence: Synthetic oligonucleotide
  Target: ATXN2; (+) strand; PAM type: NRG; PAM sequence: GAG
ctgtaatcccagcacttggg

SEQ ID NO: 46231 - DNA, 20 bp, Artificial Sequence
  Description of Artificial Sequence: Synthetic oligonucleotide
  Target: ATXN2; (+) strand; PAM type: NRG; PAM sequence: AGG
tgtaatcccagcacttgggg

SEQ ID NO: 46232 - DNA, 20 bp, Artificial Sequence
  Description of Artificial Sequence: Synthetic oligonucleotide
  Target: ATXN2; (+) strand; PAM type: NRG; PAM sequence: GAG
tcccagcacttggggaggct

SEQ ID NO: 46233 - DNA, 20 bp, Artificial Sequence
  Description of Artificial Sequence: Synthetic oligonucleotide
  Target: ATXN2; (+) strand; PAM type: NRG; PAM sequence: TGG
agcacttggggaggctgaga

SEQ ID NO: 46234 - DNA, 20 bp, Artificial Sequence
  Description of Artificial Sequence: Synthetic oligonucleotide
  Target: ATXN2; (+) strand; PAM type: NRG; PAM sequence: GGG
gcacttggggaggctgagat

SEQ ID NO: 46235 - DNA, 20 bp, Artificial Sequence
  Description of Artificial Sequence: Synthetic oligonucleotide
  Target: ATXN2; (+) strand; PAM type: NRG; PAM sequence: GAG
acttggggaggctgagatgg

SEQ ID NO: 46236 - DNA, 20 bp, Artificial Sequence
  Description of Artificial Sequence: Synthetic oligonucleotide
  Target: ATXN2; (+) strand; PAM type: NRG; PAM sequence: AGG
cttggggaggctgagatggg

SEQ ID NO: 46237 - DNA, 20 bp, Artificial Sequence
  Description of Artificial Sequence: Synthetic oligonucleotide
  Target: ATXN2; (+) strand; PAM type: NRG; PAM sequence: AAG
gaggctgagatgggaggatc

SEQ ID NO: 46238 - DNA, 20 bp, Artificial Sequence
  Description of Artificial Sequence: Synthetic oligonucleotide
  Target: ATXN2; (+) strand; PAM type: NRG; PAM sequence: GAG
ctgagatgggaggatcaagt

SEQ ID NO: 46239 - DNA, 20 bp, Artificial Sequence
  Description of Artificial Sequence: Synthetic oligonucleotide
  Target: ATXN2; (+) strand; PAM type: NRG; PAM sequence: CAG
atgggaggatcaagtgagcc

SEQ ID NO: 46240 - DNA, 20 bp, Artificial Sequence
  Description of Artificial Sequence: Synthetic oligonucleotide
  Target: ATXN2; (+) strand; PAM type: NRG; PAM sequence: AGG
tgggaggatcaagtgagccc

SEQ ID NO: 46241 - DNA, 20 bp, Artificial Sequence
  Description of Artificial Sequence: Synthetic oligonucleotide
  Target: ATXN2; (+) strand; PAM type: NRG; PAM sequence: GAG
ggaggatcaagtgagcccag

SEQ ID NO: 46242 - DNA, 20 bp, Artificial Sequence
  Description of Artificial Sequence: Synthetic oligonucleotide
  Target: ATXN2; (+) strand; PAM type: NRG; PAM sequence: AAG
tcaagtgagcccaggagttc

SEQ ID NO: 46243 - DNA, 20 bp, Artificial Sequence
  Description of Artificial Sequence: Synthetic oligonucleotide
  Target: ATXN2; (+) strand; PAM type: NRG; PAM sequence: CAG
tgagcccaggagttcaagat

SEQ ID NO: 46244 - DNA, 20 bp, Artificial Sequence
  Description of Artificial Sequence: Synthetic oligonucleotide
  Target: ATXN2; (+) strand; PAM type: NRG; PAM sequence: CAG
caagatcagcctgtgcaaca

SEQ ID NO: 46245 - DNA, 20 bp, Artificial Sequence
  Description of Artificial Sequence: Synthetic oligonucleotide
  Target: ATXN2; (+) strand; PAM type: NRG; PAM sequence: GAG
atcagcctgtgcaacacagt

SEQ ID NO: 46246 - DNA, 20 bp, Artificial Sequence
  Description of Artificial Sequence: Synthetic oligonucleotide
  Target: ATXN2; (+) strand; PAM type: NRG; PAM sequence: TAG
aaaaaaacaaacaaaaaaat

SEQ ID NO: 46247 - DNA, 20 bp, Artificial Sequence
  Description of Artificial Sequence: Synthetic oligonucleotide
  Target: ATXN2; (+) strand; PAM type: NRG; PAM sequence: CAG
aaacaaacaaaaaaattagc

SEQ ID NO: 46248 - DNA, 20 bp, Artificial Sequence
  Description of Artificial Sequence: Synthetic oligonucleotide
  Target: ATXN2; (+) strand; PAM type: NRG; PAM sequence: AGG
aacaaacaaaaaaattagcc

SEQ ID NO: 46249 - DNA, 20 bp, Artificial Sequence
  Description of Artificial Sequence: Synthetic oligonucleotide
  Target: ATXN2; (+) strand; PAM type: NRG; PAM sequence: TAG
aaacaaaaaaattagccagg

SEQ ID NO: 46250 - DNA, 20 bp, Artificial Sequence
  Description of Artificial Sequence: Synthetic oligonucleotide
  Target: ATXN2; (+) strand; PAM type: NRG; PAM sequence: AGG
aacaaaaaaattagccaggt

SEQ ID NO: 46251 - DNA, 20 bp, Artificial Sequence
  Description of Artificial Sequence: Synthetic oligonucleotide
  Target: ATXN2; (+) strand; PAM type: NRG; PAM sequence: GGG
acaaaaaaattagccaggta

SEQ ID NO: 46252 - DNA, 20 bp, Artificial Sequence
  Description of Artificial Sequence: Synthetic oligonucleotide
  Target: ATXN2; (+) strand; PAM type: NRG; PAM sequence: TGG
aaaaaattagccaggtaggg

SEQ ID NO: 46253 - DNA, 20 bp, Artificial Sequence
  Description of Artificial Sequence: Synthetic oligonucleotide
  Target: ATXN2; (+) strand; PAM type: NRG; PAM sequence: TGG
tagccaggtagggtggtgca

SEQ ID NO: 46254 - DNA, 20 bp, Artificial Sequence
  Description of Artificial Sequence: Synthetic oligonucleotide
  Target: ATXN2; (+) strand; PAM type: NRG; PAM sequence: GGG
agccaggtagggtggtgcat

SEQ ID NO: 46255 - DNA, 20 bp, Artificial Sequence
  Description of Artificial Sequence: Synthetic oligonucleotide
  Target: ATXN2; (+) strand; PAM type: NRG; PAM sequence: GGG
gccaggtagggtggtgcatg

SEQ ID NO: 46256 - DNA, 20 bp, Artificial Sequence
  Description of Artificial Sequence: Synthetic oligonucleotide
  Target: ATXN2; (+) strand; PAM type: NRG; PAM sequence: GAG
caggtagggtggtgcatggg

SEQ ID NO: 46257 - DNA, 20 bp, Artificial Sequence
  Description of Artificial Sequence: Synthetic oligonucleotide
  Target: ATXN2; (+) strand; PAM type: NRG; PAM sequence: AGG
aggtagggtggtgcatgggg

SEQ ID NO: 46258 - DNA, 20 bp, Artificial Sequence
  Description of Artificial Sequence: Synthetic oligonucleotide
  Target: ATXN2; (+) strand; PAM type: NRG; PAM sequence: TGG
ggtgcatggggaggctgaaa

SEQ ID NO: 46259 - DNA, 20 bp, Artificial Sequence
  Description of Artificial Sequence: Synthetic oligonucleotide
  Target: ATXN2; (+) strand; PAM type: NRG; PAM sequence: GGG
gtgcatggggaggctgaaat

SEQ ID NO: 46260 - DNA, 20 bp, Artificial Sequence
  Description of Artificial Sequence: Synthetic oligonucleotide
  Target: ATXN2; (+) strand; PAM type: NRG; PAM sequence: GAG
gcatggggaggctgaaatgg

SEQ ID NO: 46261 - DNA, 20 bp, Artificial Sequence
  Description of Artificial Sequence: Synthetic oligonucleotide
  Target: ATXN2; (+) strand; PAM type: NRG; PAM sequence: CAG
gggaggctgaaatgggagaa

SEQ ID NO: 46262 - DNA, 20 bp, Artificial Sequence
  Description of Artificial Sequence: Synthetic oligonucleotide
  Target: ATXN2; (+) strand; PAM type: NRG; PAM sequence: GAG
ctgaaatgggagaacagctt

SEQ ID NO: 46263 - DNA, 20 bp, Artificial Sequence
  Description of Artificial Sequence: Synthetic oligonucleotide
  Target: ATXN2; (+) strand; PAM type: NRG; PAM sequence: CAG
atgggagaacagcttgagcc

SEQ ID NO: 46264 - DNA, 20 bp, Artificial Sequence
  Description of Artificial Sequence: Synthetic oligonucleotide
  Target: ATXN2; (+) strand; PAM type: NRG; PAM sequence: AGG
tgggagaacagcttgagccc

SEQ ID NO: 46265 - DNA, 20 bp, Artificial Sequence
  Description of Artificial Sequence: Synthetic oligonucleotide
  Target: ATXN2; (+) strand; PAM type: NRG; PAM sequence: AAG
gagaacagcttgagcccagg

SEQ ID NO: 46266 - DNA, 20 bp, Artificial Sequence
  Description of Artificial Sequence: Synthetic oligonucleotide
  Target: ATXN2; (+) strand; PAM type: NRG; PAM sequence: CAG
aacagcttgagcccaggaag

SEQ ID NO: 46267 - DNA, 20 bp, Artificial Sequence
  Description of Artificial Sequence: Synthetic oligonucleotide
  Target: ATXN2; (+) strand; PAM type: NRG; PAM sequence: AAG
gcttgagcccaggaagcagt

SEQ ID NO: 46268 - DNA, 20 bp, Artificial Sequence
  Description of Artificial Sequence: Synthetic oligonucleotide
  Target: ATXN2; (+) strand; PAM type: NRG; PAM sequence: TGG
caggaagcagtaagccatga

SEQ ID NO: 46269 - DNA, 20 bp, Artificial Sequence
  Description of Artificial Sequence: Synthetic oligonucleotide
  Target: ATXN2; (+) strand; PAM type: NRG; PAM sequence: TAG
atgatggcgccactgcattc

SEQ ID NO: 46270 - DNA, 20 bp, Artificial Sequence
  Description of Artificial Sequence: Synthetic oligonucleotide
  Target: ATXN2; (+) strand; PAM type: NRG; PAM sequence: TAG
atggcgccactgcattctag

SEQ ID NO: 46271 - DNA, 20 bp, Artificial Sequence
  Description of Artificial Sequence: Synthetic oligonucleotide
  Target: ATXN2; (+) strand; PAM type: NRG; PAM sequence: AGG
tggcgccactgcattctagt

SEQ ID NO: 46272 - DNA, 20 bp, Artificial Sequence
  Description of Artificial Sequence: Synthetic oligonucleotide
  Target: ATXN2; (+) strand; PAM type: NRG; PAM sequence: GGG
ggcgccactgcattctagta

SEQ ID NO: 46273 - DNA, 20 bp, Artificial Sequence
  Description of Artificial Sequence: Synthetic oligonucleotide
  Target: ATXN2; (+) strand; PAM type: NRG; PAM sequence: GGG
gcgccactgcattctagtag

SEQ ID NO: 46274 - DNA, 20 bp, Artificial Sequence
  Description of Artificial Sequence: Synthetic oligonucleotide
  Target: ATXN2; (+) strand; PAM type: NRG; PAM sequence: CAG
ctgcattctagtaggggtga

SEQ ID NO: 46275 - DNA, 20 bp, Artificial Sequence
  Description of Artificial Sequence: Synthetic oligonucleotide
  Target: ATXN2; (+) strand; PAM type: NRG; PAM sequence: GAG
gcattctagtaggggtgaca

SEQ ID NO: 46276 - DNA, 20 bp, Artificial Sequence
  Description of Artificial Sequence: Synthetic oligonucleotide
  Target: ATXN2; (+) strand; PAM type: NRG; PAM sequence: GAG
attctagtaggggtgacaga

SEQ ID NO: 46277 - DNA, 20 bp, Artificial Sequence
  Description of Artificial Sequence: Synthetic oligonucleotide
  Target: ATXN2; (+) strand; PAM type: NRG; PAM sequence: GAG
tctagtaggggtgacagaga

SEQ ID NO: 46278 - DNA, 20 bp, Artificial Sequence
  Description of Artificial Sequence: Synthetic oligonucleotide
  Target: ATXN2; (+) strand; PAM type: NRG; PAM sequence: AAG
ataaattaatttaaaatgta

SEQ ID NO: 46279 - DNA, 20 bp, Artificial Sequence
  Description of Artificial Sequence: Synthetic oligonucleotide
  Target: ATXN2; (+) strand; PAM type: NRG; PAM sequence: CAG
atttaaaatgtaaagtttaa

SEQ ID NO: 46280 - DNA, 20 bp, Artificial Sequence
  Description of Artificial Sequence: Synthetic oligonucleotide
  Target: ATXN2; (+) strand; PAM type: NRG; PAM sequence: CAG
aagtttaacagccattgtta

SEQ ID NO: 46281 - DNA, 20 bp, Artificial Sequence
  Description of Artificial Sequence: Synthetic oligonucleotide
  Target: ATXN2; (+) strand; PAM type: NRG; PAM sequence: AGG
agtttaacagccattgttac

SEQ ID NO: 46282 - DNA, 20 bp, Artificial Sequence
  Description of Artificial Sequence: Synthetic oligonucleotide
  Target: ATXN2; (+) strand; PAM type: NRG; PAM sequence: GAG
caataaaaacaaaccacaat

SEQ ID NO: 46283 - DNA, 20 bp, Artificial Sequence
  Description of Artificial Sequence: Synthetic oligonucleotide
  Target: ATXN2; (+) strand; PAM type: NRG; PAM sequence: CAG
taaaaacaaaccacaatgag

SEQ ID NO: 46284 - DNA, 20 bp, Artificial Sequence
  Description of Artificial Sequence: Synthetic oligonucleotide
  Target: ATXN2; (+) strand; PAM type: NRG; PAM sequence: AGG
aaaaacaaaccacaatgagc

SEQ ID NO: 46285 - DNA, 20 bp, Artificial Sequence
  Description of Artificial Sequence: Synthetic oligonucleotide
  Target: ATXN2; (+) strand; PAM type: NRG; PAM sequence: GGG
aaaacaaaccacaatgagca

SEQ ID NO: 46286 - DNA, 20 bp, Artificial Sequence
  Description of Artificial Sequence: Synthetic oligonucleotide
  Target: ATXN2; (+) strand; PAM type: NRG; PAM sequence: AAG
acaaaccacaatgagcaggg

SEQ ID NO: 46287 - DNA, 20 bp, Artificial Sequence
  Description of Artificial Sequence: Synthetic oligonucleotide
  Target: ATXN2; (+) strand; PAM type: NRG; PAM sequence: AGG
caaaccacaatgagcaggga

SEQ ID NO: 46288 - DNA, 20 bp, Artificial Sequence
  Description of Artificial Sequence: Synthetic oligonucleotide
  Target: ATXN2; (+) strand; PAM type: NRG; PAM sequence: CAG
ccacaatgagcagggaaggt

SEQ ID NO: 46289 - DNA, 20 bp, Artificial Sequence
  Description of Artificial Sequence: Synthetic oligonucleotide
  Target: ATXN2; (+) strand; PAM type: NRG; PAM sequence: GAG
acaatgagcagggaaggtca

SEQ ID NO: 46290 - DNA, 20 bp, Artificial Sequence
  Description of Artificial Sequence: Synthetic oligonucleotide
  Target: ATXN2; (+) strand; PAM type: NRG; PAM sequence: AAG
atgagcagggaaggtcagag

SEQ ID NO: 46291 - DNA, 20 bp, Artificial Sequence
  Description of Artificial Sequence: Synthetic oligonucleotide
  Target: ATXN2; (+) strand; PAM type: NRG; PAM sequence: AAG
aggtcagagaagactctaaa

SEQ ID NO: 46292 - DNA, 20 bp, Artificial Sequence
  Description of Artificial Sequence: Synthetic oligonucleotide
  Target: ATXN2; (+) strand; PAM type: NRG; PAM sequence: AGG
ggtcagagaagactctaaaa

SEQ ID NO: 46293 - DNA, 20 bp, Artificial Sequence
  Description of Artificial Sequence: Synthetic oligonucleotide
  Target: ATXN2; (+) strand; PAM type: NRG; PAM sequence: CAG
agagaagactctaaaaagga

SEQ ID NO: 46294 - DNA, 20 bp, Artificial Sequence
  Description of Artificial Sequence: Synthetic oligonucleotide
  Target: ATXN2; (+) strand; PAM type: NRG; PAM sequence: TGG
gactctaaaaaggacagatg

SEQ ID NO: 46295 - DNA, 20 bp, Artificial Sequence
  Description of Artificial Sequence: Synthetic oligonucleotide
  Target: ATXN2; (+) strand; PAM type: NRG; PAM sequence: GGG
actctaaaaaggacagatgt

SEQ ID NO: 46296 - DNA, 20 bp, Artificial Sequence
  Description of Artificial Sequence: Synthetic oligonucleotide
  Target: ATXN2; (+) strand; PAM type: NRG; PAM sequence: TGG
aaaaaggacagatgtgggct

SEQ ID NO: 46297 - DNA, 20 bp, Artificial Sequence
  Description of Artificial Sequence: Synthetic oligonucleotide
  Target: ATXN2; (+) strand; PAM type: NRG; PAM sequence: AAG
atgtgggcttggttttgaaa

SEQ ID NO: 46298 - DNA, 20 bp, Artificial Sequence
  Description of Artificial Sequence: Synthetic oligonucleotide
  Target: ATXN2; (+) strand; PAM type: NRG; PAM sequence: TAG
tgaaaaagtatctaaaactc

SEQ ID NO: 46299 - DNA, 20 bp, Artificial Sequence
  Description of Artificial Sequence: Synthetic oligonucleotide
  Target: ATXN2; (+) strand; PAM type: NRG; PAM sequence: TAG
aaagtatctaaaactctagt

SEQ ID NO: 46300 - DNA, 20 bp, Artificial Sequence
  Description of Artificial Sequence: Synthetic oligonucleotide
  Target: ATXN2; (+) strand; PAM type: NRG; PAM sequence: AAG
tatctaaaactctagttagt

SEQ ID NO: 46301 - DNA, 20 bp, Artificial Sequence
  Description of Artificial Sequence: Synthetic oligonucleotide
  Target: ATXN2; (+) strand; PAM type: NRG; PAM sequence: AGG
atctaaaactctagttagta

SEQ ID NO: 46302 - DNA, 20 bp, Artificial Sequence
  Description of Artificial Sequence: Synthetic oligonucleotide
  Target: ATXN2; (+) strand; PAM type: NRG; PAM sequence: TAG
taaaactctagttagtaagg

SEQ ID NO: 46303 - DNA, 20 bp, Artificial Sequence
  Description of Artificial Sequence: Synthetic oligonucleotide
  Target: ATXN2; (+) strand; PAM type: NRG; PAM sequence: TGG
gtaaggtagattcttcacgt

SEQ ID NO: 46304 - DNA, 20 bp, Artificial Sequence
  Description of Artificial Sequence: Synthetic oligonucleotide
  Target: ATXN2; (+) strand; PAM type: NRG; PAM sequence: GGG
taaggtagattcttcacgtt

SEQ ID NO: 46305 - DNA, 20 bp, Artificial Sequence
  Description of Artificial Sequence: Synthetic oligonucleotide
  Target: ATXN2; (+) strand; PAM type: NRG; PAM sequence: CAG
cttcacgttgggattaaatc

SEQ ID NO: 46306 - DNA, 20 bp, Artificial Sequence
  Description of Artificial Sequence: Synthetic oligonucleotide
  Target: ATXN2; (+) strand; PAM type: NRG; PAM sequence: AGG
ttcacgttgggattaaatcc

SEQ ID NO: 46307 - DNA, 20 bp, Artificial Sequence
  Description of Artificial Sequence: Synthetic oligonucleotide
  Target: ATXN2; (+) strand; PAM type: NRG; PAM sequence: GAG
cacgttgggattaaatccag

SEQ ID NO: 46308 - DNA, 20 bp, Artificial Sequence
  Description of Artificial Sequence: Synthetic oligonucleotide
  Target: ATXN2; (+) strand; PAM type: NRG; PAM sequence: AAG
gggattaaatccaggagtaa

SEQ ID NO: 46309 - DNA, 20 bp, Artificial Sequence
  Description of Artificial Sequence: Synthetic oligonucleotide
  Target: ATXN2; (+) strand; PAM type: NRG; PAM sequence: AAG
attaaatccaggagtaaaag

SEQ ID NO: 46310 - DNA, 20 bp, Artificial Sequence
  Description of Artificial Sequence: Synthetic oligonucleotide
  Target: ATXN2; (+) strand; PAM type: NRG; PAM sequence: AAG
aaatccaggagtaaaagaag

SEQ ID NO: 46311 - DNA, 20 bp, Artificial Sequence
  Description of Artificial Sequence: Synthetic oligonucleotide
  Target: ATXN2; (+) strand; PAM type: NRG; PAM sequence: AGG
aatccaggagtaaaagaaga

SEQ ID NO: 46312 - DNA, 20 bp, Artificial Sequence
  Description of Artificial Sequence: Synthetic oligonucleotide
  Target: ATXN2; (+) strand; PAM type: NRG; PAM sequence: CAG
aggagtaaaagaagaaggca

SEQ ID NO: 46313 - DNA, 20 bp, Artificial Sequence
  Description of Artificial Sequence: Synthetic oligonucleotide
  Target: ATXN2; (+) strand; PAM type: NRG; PAM sequence: AGG
ggagtaaaagaagaaggcac

SEQ ID NO: 46314 - DNA, 20 bp, Artificial Sequence
  Description of Artificial Sequence: Synthetic oligonucleotide
  Target: ATXN2; (+) strand; PAM type: NRG; PAM sequence: GGG
gagtaaaagaagaaggcaca

SEQ ID NO: 46315 - DNA, 20 bp, Artificial Sequence
  Description of Artificial Sequence: Synthetic oligonucleotide
  Target: ATXN2; (+) strand; PAM type: NRG; PAM sequence: GGG
agtaaaagaagaaggcacag

SEQ ID NO: 46316 - DNA, 20 bp, Artificial Sequence
  Description of Artificial Sequence: Synthetic oligonucleotide
  Target: ATXN2; (+) strand; PAM type: NRG; PAM sequence: GGG
gtaaaagaagaaggcacagg

SEQ ID NO: 46317 - DNA, 20 bp, Artificial Sequence
  Description of Artificial Sequence: Synthetic oligonucleotide
  Target: ATXN2; (+) strand; PAM type: NRG; PAM sequence: CGG
gaagaaggcacagggggccg

SEQ ID NO: 46318 - DNA, 20 bp, Artificial Sequence
  Description of Artificial Sequence: Synthetic oligonucleotide
  Target: ATXN2; (+) strand; PAM type: NRG; PAM sequence: TGG
gaaggcacagggggccgcgg

SEQ ID NO: 46319 - DNA, 20 bp, Artificial Sequence
  Description of Artificial Sequence: Synthetic oligonucleotide
  Target: ATXN2; (+) strand; PAM type: NRG; PAM sequence: CAG
gtggctcacgcctgtaatcc

SEQ ID NO: 46320 - DNA, 20 bp, Artificial Sequence
  Description of Artificial Sequence: Synthetic oligonucleotide
  Target: ATXN2; (+) strand; PAM type: NRG; PAM sequence: TGG
cgcctgtaatcccagcaatt

SEQ ID NO: 46321 - DNA, 20 bp, Artificial Sequence
  Description of Artificial Sequence: Synthetic oligonucleotide
  Target: ATXN2; (+) strand; PAM type: NRG; PAM sequence: GGG
gcctgtaatcccagcaattt

SEQ ID NO: 46322 - DNA, 20 bp, Artificial Sequence
  Description of Artificial Sequence: Synthetic oligonucleotide
  Target: ATXN2; (+) strand; PAM type: NRG; PAM sequence: GAG
ctgtaatcccagcaatttgg

SEQ ID NO: 46323 - DNA, 20 bp, Artificial Sequence
  Description of Artificial Sequence: Synthetic oligonucleotide
  Target: ATXN2; (+) strand; PAM type: NRG; PAM sequence: AAG
tcccagcaatttgggagccc

SEQ ID NO: 46324 - DNA, 20 bp, Artificial Sequence
  Description of Artificial Sequence: Synthetic oligonucleotide
  Target: ATXN2; (+) strand; PAM type: NRG; PAM sequence: AGG
cccagcaatttgggagccca

SEQ ID NO: 46325 - DNA, 20 bp, Artificial Sequence
  Description of Artificial Sequence: Synthetic oligonucleotide
  Target: ATXN2; (+) strand; PAM type: NRG; PAM sequence: CAG
agcaatttgggagcccaagg

SEQ ID NO: 46326 - DNA, 20 bp, Artificial Sequence
  Description of Artificial Sequence: Synthetic oligonucleotide
  Target: ATXN2; (+) strand; PAM type: NRG; PAM sequence: AGG
gcaatttgggagcccaaggc

SEQ ID NO: 46327 - DNA, 20 bp, Artificial Sequence
  Description of Artificial Sequence: Synthetic oligonucleotide
  Target: ATXN2; (+) strand; PAM type: NRG; PAM sequence: TGG
atttgggagcccaaggcagg

SEQ ID NO: 46328 - DNA, 20 bp, Artificial Sequence
  Description of Artificial Sequence: Synthetic oligonucleotide
  Target: ATXN2; (+) strand; PAM type: NRG; PAM sequence: AAG
gcccaaggcaggtggatcac

SEQ ID NO: 46329 - DNA, 20 bp, Artificial Sequence
  Description of Artificial Sequence: Synthetic oligonucleotide
  Target: ATXN2; (+) strand; PAM type: NRG; PAM sequence: AGG
cccaaggcaggtggatcaca

SEQ ID NO: 46330 - DNA, 20 bp, Artificial Sequence
  Description of Artificial Sequence: Synthetic oligonucleotide
  Target: ATXN2; (+) strand; PAM type: NRG; PAM sequence: CAG
aggcaggtggatcacaaggt

SEQ ID NO: 46331 - DNA, 20 bp, Artificial Sequence
  Description of Artificial Sequence: Synthetic oligonucleotide
  Target: ATXN2; (+) strand; PAM type: NRG; PAM sequence: AGG
ggcaggtggatcacaaggtc

SEQ ID NO: 46332 - DNA, 20 bp, Artificial Sequence
  Description of Artificial Sequence: Synthetic oligonucleotide
  Target: ATXN2; (+) strand; PAM type: NRG; PAM sequence: GAG
caggtggatcacaaggtcag

SEQ ID NO: 46333 - DNA, 20 bp, Artificial Sequence
  Description of Artificial Sequence: Synthetic oligonucleotide
  Target: ATXN2; (+) strand; PAM type: NRG; PAM sequence: GAG
gatcacaaggtcaggagttc

SEQ ID NO: 46334 - DNA, 20 bp, Artificial Sequence
  Description of Artificial Sequence: Synthetic oligonucleotide
  Target: ATXN2; (+) strand; PAM type: NRG; PAM sequence: CAG
caaggtcaggagttcgagac

SEQ ID NO: 46335 - DNA, 20 bp, Artificial Sequence
  Description of Artificial Sequence: Synthetic oligonucleotide
  Target: ATXN2; (+) strand; PAM type: NRG; PAM sequence: TGG
tcaggagttcgagaccagcc

SEQ ID NO: 46336 - DNA, 20 bp, Artificial Sequence
  Description of Artificial Sequence: Synthetic oligonucleotide
  Target: ATXN2; (+) strand; PAM type: NRG; PAM sequence: GGG
caggagttcgagaccagcct

SEQ ID NO: 46337 - DNA, 20 bp, Artificial Sequence
  Description of Artificial Sequence: Synthetic oligonucleotide
  Target: ATXN2; (+) strand; PAM type: NRG; PAM sequence: CAG
cgagaccagcctgggaaaca

SEQ ID NO: 46338 - DNA, 20 bp, Artificial Sequence
  Description of Artificial Sequence: Synthetic oligonucleotide
  Target: ATXN2; (+) strand; PAM type: NRG; PAM sequence: AAG
catctctactaaaaatacaa

SEQ ID NO: 46339 - DNA, 20 bp, Artificial Sequence
  Description of Artificial Sequence: Synthetic oligonucleotide
  Target: ATXN2; (+) strand; PAM type: NRG; PAM sequence: TAG
tctactaaaaatacaaaagt

SEQ ID NO: 46340 - DNA, 20 bp, Artificial Sequence
  Description of Artificial Sequence: Synthetic oligonucleotide
  Target: ATXN2; (+) strand; PAM type: NRG; PAM sequence: CAG
actaaaaatacaaaagttag

SEQ ID NO: 46341 - DNA, 20 bp, Artificial Sequence
  Description of Artificial Sequence: Synthetic oligonucleotide
  Target: ATXN2; (+) strand; PAM type: NRG; PAM sequence: AGG
ctaaaaatacaaaagttagc

SEQ ID NO: 46342 - DNA, 20 bp, Artificial Sequence
  Description of Artificial Sequence: Synthetic oligonucleotide
  Target: ATXN2; (+) strand; PAM type: NRG; PAM sequence: GGG
taaaaatacaaaagttagca

SEQ ID NO: 46343 - DNA, 20 bp, Artificial Sequence
  Description of Artificial Sequence: Synthetic oligonucleotide
  Target: ATXN2; (+) strand; PAM type: NRG; PAM sequence: TGG
atacaaaagttagcagggca

SEQ ID NO: 46344 - DNA, 20 bp, Artificial Sequence
  Description of Artificial Sequence: Synthetic oligonucleotide
  Target: ATXN2; (+) strand; PAM type: NRG; PAM sequence: TGG
caaaagttagcagggcatgg

SEQ ID NO: 46345 - DNA, 20 bp, Artificial Sequence
  Description of Artificial Sequence: Synthetic oligonucleotide
  Target: ATXN2; (+) strand; PAM type: NRG; PAM sequence: CAG
gtggcgcgcgcctgtcgtct

SEQ ID NO: 46346 - DNA, 20 bp, Artificial Sequence
  Description of Artificial Sequence: Synthetic oligonucleotide
  Target: ATXN2; (+) strand; PAM type: NRG; PAM sequence: CGG
cgcctgtcgtctcagcttct

SEQ ID NO: 46347 - DNA, 20 bp, Artificial Sequence
  Description of Artificial Sequence: Synthetic oligonucleotide
  Target: ATXN2; (+) strand; PAM type: NRG; PAM sequence: GGG
gcctgtcgtctcagcttctc

SEQ ID NO: 46348 - DNA, 20 bp, Artificial Sequence
  Description of Artificial Sequence: Synthetic oligonucleotide
  Target: ATXN2; (+) strand; PAM type: NRG; PAM sequence: GAG
ctgtcgtctcagcttctcgg

SEQ ID NO: 46349 - DNA, 20 bp, Artificial Sequence
  Description of Artificial Sequence: Synthetic oligonucleotide
  Target: ATXN2; (+) strand; PAM type: NRG; PAM sequence: AGG
tgtcgtctcagcttctcggg

SEQ ID NO: 46350 - DNA, 20 bp, Artificial Sequence
  Description of Artificial Sequence: Synthetic oligonucleotide
  Target: ATXN2; (+) strand; PAM type: NRG; PAM sequence: CAG
tctcagcttctcgggaggct

SEQ ID NO: 46351 - DNA, 20 bp, Artificial Sequence
  Description of Artificial Sequence: Synthetic oligonucleotide
  Target: ATXN2; (+) strand; PAM type: NRG; PAM sequence: AGG
ctcagcttctcgggaggctc

SEQ ID NO: 46352 - DNA, 20 bp, Artificial Sequence
  Description of Artificial Sequence: Synthetic oligonucleotide
  Target: ATXN2; (+) strand; PAM type: NRG; PAM sequence: CAG
agcttctcgggaggctcagg

SEQ ID NO: 46353 - DNA, 20 bp, Artificial Sequence
  Description of Artificial Sequence: Synthetic oligonucleotide
  Target: ATXN2; (+) strand; PAM type: NRG; PAM sequence: AGG
gcttctcgggaggctcaggc

SEQ ID NO: 46354 - DNA, 20 bp, Artificial Sequence
  Description of Artificial Sequence: Synthetic oligonucleotide
  Target: ATXN2; (+) strand; PAM type: NRG; PAM sequence: GAG
ttctcgggaggctcaggcag

SEQ ID NO: 46355 - DNA, 20 bp, Artificial Sequence
  Description of Artificial Sequence: Synthetic oligonucleotide
  Target: ATXN2; (+) strand; PAM type: NRG; PAM sequence: TGG
ggctcaggcaggagaatcac

SEQ ID NO: 46356 - DNA, 20 bp, Artificial Sequence
  Description of Artificial Sequence: Synthetic oligonucleotide
  Target: ATXN2; (+) strand; PAM type: NRG; PAM sequence: CGG
gcaggagaatcactggaacc

SEQ ID NO: 46357 - DNA, 20 bp, Artificial Sequence
  Description of Artificial Sequence: Synthetic oligonucleotide
  Target: ATXN2; (+) strand; PAM type: NRG; PAM sequence: GGG
caggagaatcactggaaccc

SEQ ID NO: 46358 - DNA, 20 bp, Artificial Sequence
  Description of Artificial Sequence: Synthetic oligonucleotide
  Target: ATXN2; (+) strand; PAM type: NRG; PAM sequence: GAG
ggagaatcactggaacccgg

SEQ ID NO: 46359 - DNA, 20 bp, Artificial Sequence
  Description of Artificial Sequence: Synthetic oligonucleotide
  Target: ATXN2; (+) strand; PAM type: NRG; PAM sequence: AGG
gagaatcactggaacccggg

SEQ ID NO: 46360 - DNA, 20 bp, Artificial Sequence
  Description of Artificial Sequence: Synthetic oligonucleotide
  Target: ATXN2; (+) strand; PAM type: NRG; PAM sequence: CAG
aatcactggaacccgggagg

SEQ ID NO: 46361 - DNA, 20 bp, Artificial Sequence
  Description of Artificial Sequence: Synthetic oligonucleotide
  Target: ATXN2; (+) strand; PAM type: NRG; PAM sequence: GAG
tcactggaacccgggaggca

SEQ ID NO: 46362 - DNA, 20 bp, Artificial Sequence
  Description of Artificial Sequence: Synthetic oligonucleotide
  Target: ATXN2; (+) strand; PAM type: NRG; PAM sequence: AGG
cactggaacccgggaggcag

SEQ ID NO: 46363 - DNA, 20 bp, Artificial Sequence
  Description of Artificial Sequence: Synthetic oligonucleotide
  Target: ATXN2; (+) strand; PAM type: NRG; PAM sequence: TGG
aacccgggaggcagaggttg

SEQ ID NO: 46364 - DNA, 20 bp, Artificial Sequence
  Description of Artificial Sequence: Synthetic oligonucleotide
  Target: ATXN2; (+) strand; PAM type: NRG; PAM sequence: GAG
cgggaggcagaggttgtggt

SEQ ID NO: 46365 - DNA, 20 bp, Artificial Sequence
  Description of Artificial Sequence: Synthetic oligonucleotide
  Target: ATXN2; (+) strand; PAM type: NRG; PAM sequence: AAG
ggcagaggttgtggtgagcc

SEQ ID NO: 46366 - DNA, 20 bp, Artificial Sequence
  Description of Artificial Sequence: Synthetic oligonucleotide
  Target: ATXN2; (+) strand; PAM type: NRG; PAM sequence: TGG
cgcgccactgcactccaacc

SEQ ID NO: 46367 - DNA, 20 bp, Artificial Sequence
  Description of Artificial Sequence: Synthetic oligonucleotide
  Target: ATXN2; (+) strand; PAM type: NRG; PAM sequence: GGG
gcgccactgcactccaacct

SEQ ID NO: 46368 - DNA, 20 bp, Artificial Sequence
  Description of Artificial Sequence: Synthetic oligonucleotide
  Target: ATXN2; (+) strand; PAM type: NRG; PAM sequence: CAG
ctgcactccaacctgggcaa

SEQ ID NO: 46369 - DNA, 20 bp, Artificial Sequence
  Description of Artificial Sequence: Synthetic oligonucleotide
  Target: ATXN2; (+) strand; PAM type: NRG; PAM sequence: GAG
gcactccaacctgggcaaca

SEQ ID NO: 46370 - DNA, 20 bp, Artificial Sequence
  Description of Artificial Sequence: Synthetic oligonucleotide
  Target: ATXN2; (+) strand; PAM type: NRG; PAM sequence: GAG
tccaacctgggcaacagagt

SEQ ID NO: 46371 - DNA, 20 bp, Artificial Sequence
  Description of Artificial Sequence: Synthetic oligonucleotide
  Target: ATXN2; (+) strand; PAM type: NRG; PAM sequence: AAG
aactcaaaaacaaacaaaaa

SEQ ID NO: 46372 - DNA, 20 bp, Artificial Sequence
  Description of Artificial Sequence: Synthetic oligonucleotide
  Target: ATXN2; (+) strand; PAM type: NRG; PAM sequence: AAG
tcaaaaacaaacaaaaaaag

SEQ ID NO: 46373 - DNA, 20 bp, Artificial Sequence
  Description of Artificial Sequence: Synthetic oligonucleotide
  Target: ATXN2; (+) strand; PAM type: NRG; PAM sequence: AGG
caaaaacaaacaaaaaaaga

SEQ ID NO: 46374 - DNA, 20 bp, Artificial Sequence
  Description of Artificial Sequence: Synthetic oligonucleotide
  Target: ATXN2; (+) strand; PAM type: NRG; PAM sequence: AAG
aaacaaaaaaagaaggcaca

SEQ ID NO: 46375 - DNA, 20 bp, Artificial Sequence
  Description of Artificial Sequence: Synthetic oligonucleotide
  Target: ATXN2; (+) strand; PAM type: NRG; PAM sequence: TGG
aaaaaaagaaggcacaaagt

SEQ ID NO: 46376 - DNA, 20 bp, Artificial Sequence
  Description of Artificial Sequence: Synthetic oligonucleotide
  Target: ATXN2; (+) strand; PAM type: NRG; PAM sequence: CAG
agttggtgatgtctaacaca

SEQ ID NO: 46377 - DNA, 20 bp, Artificial Sequence
  Description of Artificial Sequence: Synthetic oligonucleotide
  Target: ATXN2; (+) strand; PAM type: NRG; PAM sequence: CAG
gtctaacacacagaacatgc

SEQ ID NO: 46378 - DNA, 20 bp, Artificial Sequence
  Description of Artificial Sequence: Synthetic oligonucleotide
  Target: ATXN2; (+) strand; PAM type: NRG; PAM sequence: TAG
acacacagaacatgccagct

SEQ ID NO: 46379 - DNA, 20 bp, Artificial Sequence
  Description of Artificial Sequence: Synthetic oligonucleotide
  Target: ATXN2; (+) strand; PAM type: NRG; PAM sequence: TAG
cacagaacatgccagcttag

SEQ ID NO: 46380 - DNA, 20 bp, Artificial Sequence
  Description of Artificial Sequence: Synthetic oligonucleotide
  Target: ATXN2; (+) strand; PAM type: NRG; PAM sequence: AGG
acagaacatgccagcttagt

SEQ ID NO: 46381 - DNA, 20 bp, Artificial Sequence
  Description of Artificial Sequence: Synthetic oligonucleotide
  Target: ATXN2; (+) strand; PAM type: NRG; PAM sequence: AAG
tgccagcttagtaggtcaat

SEQ ID NO: 46382 - DNA, 20 bp, Artificial Sequence
  Description of Artificial Sequence: Synthetic oligonucleotide
  Target: ATXN2; (+) strand; PAM type: NRG; PAM sequence: TAG
cagcttagtaggtcaataag

SEQ ID NO: 46383 - DNA, 20 bp, Artificial Sequence
  Description of Artificial Sequence: Synthetic oligonucleotide
  Target: ATXN2; (+) strand; PAM type: NRG; PAM sequence: TGG
gtcaataagtagattaacat

SEQ ID NO: 46384 - DNA, 20 bp, Artificial Sequence
  Description of Artificial Sequence: Synthetic oligonucleotide
  Target: ATXN2; (+) strand; PAM type: NRG; PAM sequence: GGG
tcaataagtagattaacatt

SEQ ID NO: 46385 - DNA, 20 bp, Artificial Sequence
  Description of Artificial Sequence: Synthetic oligonucleotide
  Target: ATXN2; (+) strand; PAM type: NRG; PAM sequence: TAG
agtagattaacattgggaaa

SEQ ID NO: 46386 - DNA, 20 bp, Artificial Sequence
  Description of Artificial Sequence: Synthetic oligonucleotide
  Target: ATXN2; (+) strand; PAM type: NRG; PAM sequence: AGG
gtagattaacattgggaaat

SEQ ID NO: 46387 - DNA, 20 bp, Artificial Sequence
  Description of Artificial Sequence: Synthetic oligonucleotide
  Target: ATXN2; (+) strand; PAM type: NRG; PAM sequence: CGG
attaacattgggaaataggc

SEQ ID NO: 46388 - DNA, 20 bp, Artificial Sequence
  Description of Artificial Sequence: Synthetic oligonucleotide
  Target: ATXN2; (+) strand; PAM type: NRG; PAM sequence: GGG
ttaacattgggaaataggcc

SEQ ID NO: 46389 - DNA, 20 bp, Artificial Sequence
  Description of Artificial Sequence: Synthetic oligonucleotide
  Target: ATXN2; (+) strand; PAM type: NRG; PAM sequence: CGG
attgggaaataggccgggcg

SEQ ID NO: 46390 - DNA, 20 bp, Artificial Sequence
  Description of Artificial Sequence: Synthetic oligonucleotide
  Target: ATXN2; (+) strand; PAM type: NRG; PAM sequence: TGG
gggaaataggccgggcgcgg

SEQ ID NO: 46391 - DNA, 20 bp, Artificial Sequence
  Description of Artificial Sequence: Synthetic oligonucleotide
  Target: ATXN2; (+) strand; PAM type: NRG; PAM sequence: CAG
gtggctcacgcctgtaatcc

SEQ ID NO: 46392 - DNA, 20 bp, Artificial Sequence
  Description of Artificial Sequence: Synthetic oligonucleotide
  Target: ATXN2; (+) strand; PAM type: NRG; PAM sequence: TGG
cgcctgtaatcccagcactt

SEQ ID NO: 46393 - DNA, 20 bp, Artificial Sequence
  Description of Artificial Sequence: Synthetic oligonucleotide
  Target: ATXN2; (+) strand; PAM type: NRG; PAM sequence: GGG
gcctgtaatcccagcacttt

SEQ ID NO: 46394 - DNA, 20 bp, Artificial Sequence
  Description of Artificial Sequence: Synthetic oligonucleotide
  Target: ATXN2; (+) strand; PAM type: NRG; PAM sequence: GAG
ctgtaatcccagcactttgg

SEQ ID NO: 46395 - DNA, 20 bp, Artificial Sequence
  Description of Artificial Sequence: Synthetic oligonucleotide
  Target: ATXN2; (+) strand; PAM type: NRG; PAM sequence: AGG
tgtaatcccagcactttggg

SEQ ID NO: 46396 - DNA, 20 bp, Artificial Sequence
  Description of Artificial Sequence: Synthetic oligonucleotide
  Target: ATXN2; (+) strand; PAM type: NRG; PAM sequence: GAG
tcccagcactttgggaggcc

SEQ ID NO: 46397 - DNA, 20 bp, Artificial Sequence
  Description of Artificial Sequence: Synthetic oligonucleotide
  Target: ATXN2; (+) strand; PAM type: NRG; PAM sequence: AGG
cccagcactttgggaggccg

SEQ ID NO: 46398 - DNA, 20 bp, Artificial Sequence
  Description of Artificial Sequence: Synthetic oligonucleotide
  Target: ATXN2; (+) strand; PAM type: NRG; PAM sequence: TGG
agcactttgggaggccgagg

SEQ ID NO: 46399 - DNA, 20 bp, Artificial Sequence
  Description of Artificial Sequence: Synthetic oligonucleotide
  Target: ATXN2; (+) strand; PAM type: NRG; PAM sequence: GGG
gcactttgggaggccgaggt

SEQ ID NO: 46400 - DNA, 20 bp, Artificial Sequence
  Description of Artificial Sequence: Synthetic oligonucleotide
  Target: ATXN2; (+) strand; PAM type: NRG; PAM sequence: CGG
ctttgggaggccgaggtggg

SEQ ID NO: 46401 - DNA, 20 bp, Artificial Sequence
  Description of Artificial Sequence: Synthetic oligonucleotide
  Target: ATXN2; (+) strand; PAM type: NRG; PAM sequence: GAG
ggccgaggtgggcggatcac

SEQ ID NO: 46402 - DNA, 20 bp, Artificial Sequence
  Description of Artificial Sequence: Synthetic oligonucleotide
  Target: ATXN2; (+) strand; PAM type: NRG; PAM sequence: AGG
gccgaggtgggcggatcacg

SEQ ID NO: 46403 - DNA, 20 bp, Artificial Sequence
  Description of Artificial Sequence: Synthetic oligonucleotide
  Target: ATXN2; (+) strand; PAM type: NRG; PAM sequence: CAG
aggtgggcggatcacgaggt

SEQ ID NO: 46404 - DNA, 20 bp, Artificial Sequence
  Description of Artificial Sequence: Synthetic oligonucleotide
  Target: ATXN2; (+) strand; PAM type: NRG; PAM sequence: AGG
ggtgggcggatcacgaggtc

SEQ ID NO: 46405 - DNA, 20 bp, Artificial Sequence
  Description of Artificial Sequence: Synthetic oligonucleotide
  Target: ATXN2; (+) strand; PAM type: NRG; PAM sequence: GAG
tgggcggatcacgaggtcag

SEQ ID NO: 46406 - DNA, 20 bp, Artificial Sequence
  Description of Artificial Sequence: Synthetic oligonucleotide
  Target: ATXN2; (+) strand; PAM type: NRG; PAM sequence: GAG
gatcacgaggtcaggagatc

SEQ ID NO: 46407 - DNA, 20 bp, Artificial Sequence
  Description of Artificial Sequence: Synthetic oligonucleotide
  Target: ATXN2; (+) strand; PAM type: NRG; PAM sequence: CGG
tcaggagatcgagaccatcc

SEQ ID NO: 46408 - DNA, 20 bp, Artificial Sequence
  Description of Artificial Sequence: Synthetic oligonucleotide
  Target: ATXN2; (+) strand; PAM type: NRG; PAM sequence: CGG
cgagaccatcccggctaaaa

SEQ ID NO: 46409 - DNA, 20 bp, Artificial Sequence
  Description of Artificial Sequence: Synthetic oligonucleotide
  Target: ATXN2; (+) strand; PAM type: NRG; PAM sequence: TAG
ctactaaaaatacaaaaaat

SEQ ID NO: 46410 - DNA, 20 bp, Artificial Sequence
  Description of Artificial Sequence: Synthetic oligonucleotide
  Target: ATXN2; (+) strand; PAM type: NRG; PAM sequence: CGG
taaaaatacaaaaaattagc

SEQ ID NO: 46411 - DNA, 20 bp, Artificial Sequence
  Description of Artificial Sequence: Synthetic oligonucleotide
  Target: ATXN2; (+) strand; PAM type: NRG; PAM sequence: GGG
aaaaatacaaaaaattagcc

SEQ ID NO: 46412 - DNA, 20 bp, Artificial Sequence
  Description of Artificial Sequence: Synthetic oligonucleotide
  Target: ATXN2; (+) strand; PAM type: NRG; PAM sequence: TAG
tacaaaaaattagccgggcg

SEQ ID NO: 46413 - DNA, 20 bp, Artificial Sequence
  Description of Artificial Sequence: Synthetic oligonucleotide
  Target: ATXN2; (+) strand; PAM type: NRG; PAM sequence: TGG
aaaaaattagccgggcgtag

SEQ ID NO: 46414 - DNA, 20 bp, Artificial Sequence
  Description of Artificial Sequence: Synthetic oligonucleotide
  Target: ATXN2; (+) strand; PAM type: NRG; PAM sequence: CGG
aaattagccgggcgtagtgg

SEQ ID NO: 46415 - DNA, 20 bp, Artificial Sequence
  Description of Artificial Sequence: Synthetic oligonucleotide
  Target: ATXN2; (+) strand; PAM type: NRG; PAM sequence: GGG
aattagccgggcgtagtggc

SEQ ID NO: 46416 - DNA, 20 bp, Artificial Sequence
  Description of Artificial Sequence: Synthetic oligonucleotide
  Target: ATXN2; (+) strand; PAM type: NRG; PAM sequence: TAG
ggcgtagtggcgggcgcctg

SEQ ID NO: 46417 - DNA, 20 bp, Artificial Sequence
  Description of Artificial Sequence: Synthetic oligonucleotide
  Target: ATXN2; (+) strand; PAM type: NRG; PAM sequence: CAG
gtggcgggcgcctgtagtcc

SEQ ID NO: 46418 - DNA, 20 bp, Artificial Sequence
  Description of Artificial Sequence: Synthetic oligonucleotide
  Target: ATXN2; (+) strand; PAM type: NRG; PAM sequence: TGG
cgcctgtagtcccagctact

SEQ ID NO: 46419 - DNA, 20 bp, Artificial Sequence
  Description of Artificial Sequence: Synthetic oligonucleotide
  Target: ATXN2; (+) strand; PAM type: NRG; PAM sequence: GGG
gcctgtagtcccagctactt

SEQ ID NO: 46420 - DNA, 20 bp, Artificial Sequence
  Description of Artificial Sequence: Synthetic oligonucleotide
  Target: ATXN2; (+) strand; PAM type: NRG; PAM sequence: GAG
ctgtagtcccagctacttgg

SEQ ID NO: 46421 - DNA, 20 bp, Artificial Sequence
  Description of Artificial Sequence: Synthetic oligonucleotide
  Target: ATXN2; (+) strand; PAM type: NRG; PAM sequence: AGG
tgtagtcccagctacttggg

SEQ ID NO: 46422 - DNA, 20 bp, Artificial Sequence
  Description of Artificial Sequence: Synthetic oligonucleotide
  Target: ATXN2; (+) strand; PAM type: NRG; PAM sequence: GAG
tcccagctacttgggaggct

SEQ ID NO: 46423 - DNA, 20 bp, Artificial Sequence
  Description of Artificial Sequence: Synthetic oligonucleotide
  Target: ATXN2; (+) strand; PAM type: NRG; PAM sequence: AGG
cccagctacttgggaggctg

SEQ ID NO: 46424 - DNA, 20 bp, Artificial Sequence
  Description of Artificial Sequence: Synthetic oligonucleotide
  Target: ATXN2; (+) strand; PAM type: NRG; PAM sequence: CAG
agctacttgggaggctgagg

SEQ ID NO: 46425 - DNA, 20 bp, Artificial Sequence
  Description of Artificial Sequence: Synthetic oligonucleotide
  Target: ATXN2; (+) strand; PAM type: NRG; PAM sequence: AGG
gctacttgggaggctgaggc

SEQ ID NO: 46426 - DNA, 20 bp, Artificial Sequence
  Description of Artificial Sequence: Synthetic oligonucleotide
  Target: ATXN2; (+) strand; PAM type: NRG; PAM sequence: GAG
tacttgggaggctgaggcag

SEQ ID NO: 46427 - DNA, 20 bp, Artificial Sequence
  Description of Artificial Sequence: Synthetic oligonucleotide
  Target: ATXN2; (+) strand; PAM type: NRG; PAM sequence: TGG
gggaggctgaggcaggagaa

SEQ ID NO: 46428 - DNA, 20 bp, Artificial Sequence
  Description of Artificial Sequence: Synthetic oligonucleotide
  Target: ATXN2; (+) strand; PAM type: NRG; PAM sequence: CAG
gcaggagaatggcgtgaacc

SEQ ID NO: 46429 - DNA, 20 bp, Artificial Sequence
  Description of Artificial Sequence: Synthetic oligonucleotide
  Target: ATXN2; (+) strand; PAM type: NRG; PAM sequence: AGG
caggagaatggcgtgaaccc

SEQ ID NO: 46430 - DNA, 20 bp, Artificial Sequence
  Description of Artificial Sequence: Synthetic oligonucleotide
  Target: ATXN2; (+) strand; PAM type: NRG; PAM sequence: GAG
ggagaatggcgtgaacccag

SEQ ID NO: 46431 - DNA, 20 bp, Artificial Sequence
  Description of Artificial Sequence: Synthetic oligonucleotide
  Target: ATXN2; (+) strand; PAM type: NRG; PAM sequence: AGG
gagaatggcgtgaacccagg

SEQ ID NO: 46432 - DNA, 20 bp, Artificial Sequence
  Description of Artificial Sequence: Synthetic oligonucleotide
  Target: ATXN2; (+) strand; PAM type: NRG; PAM sequence: CGG
aatggcgtgaacccaggagg

SEQ ID NO: 46433 - DNA, 20 bp, Artificial Sequence
  Description of Artificial Sequence: Synthetic oligonucleotide
  Target: ATXN2; (+) strand; PAM type: NRG; PAM sequence: GAG
tggcgtgaacccaggaggcg

SEQ ID NO: 46434 - DNA, 20 bp, Artificial Sequence
  Description of Artificial Sequence: Synthetic oligonucleotide
  Target: ATXN2; (+) strand; PAM type: NRG; PAM sequence: CAG
aacccaggaggcggagcttg

SEQ ID NO: 46435 - DNA, 20 bp, Artificial Sequence
  Description of Artificial Sequence: Synthetic oligonucleotide
  Target: ATXN2; (+) strand; PAM type: NRG; PAM sequence: GAG
caggaggcggagcttgcagt

SEQ ID NO: 46436 - DNA, 20 bp, Artificial Sequence
  Description of Artificial Sequence: Synthetic oligonucleotide
  Target: ATXN2; (+) strand; PAM type: NRG; PAM sequence: GAG
ggcggagcttgcagtgagcc

SEQ ID NO: 46437 - DNA, 20 bp, Artificial Sequence
  Description of Artificial Sequence: Synthetic oligonucleotide
  Target: ATXN2; (+) strand; PAM type: NRG; PAM sequence: CAG
gagatcccgccactgcactc

SEQ ID NO: 46438 - DNA, 20 bp, Artificial Sequence
  Description of Artificial Sequence: Synthetic oligonucleotide
  Target: ATXN2; (+) strand; PAM type: NRG; PAM sequence: TGG
cccgccactgcactccagcc

SEQ ID NO: 46439 - DNA, 20 bp, Artificial Sequence
  Description of Artificial Sequence: Synthetic oligonucleotide
  Target: ATXN2; (+) strand; PAM type: NRG; PAM sequence: GGG
ccgccactgcactccagcct

SEQ ID NO: 46440 - DNA, 20 bp, Artificial Sequence
  Description of Artificial Sequence: Synthetic oligonucleotide
  Target: ATXN2; (+) strand; PAM type: NRG; PAM sequence: CAG
ctgcactccagcctgggcga

SEQ ID NO: 46441 - DNA, 20 bp, Artificial Sequence
  Description of Artificial Sequence: Synthetic oligonucleotide
  Target: ATXN2; (+) strand; PAM type: NRG; PAM sequence: GAG
gcactccagcctgggcgaca

SEQ ID NO: 46442 - DNA, 20 bp, Artificial Sequence
  Description of Artificial Sequence: Synthetic oligonucleotide
  Target: ATXN2; (+) strand; PAM type: NRG; PAM sequence: GAG
tccagcctgggcgacagagc

SEQ ID NO: 46443 - DNA, 20 bp, Artificial Sequence
  Description of Artificial Sequence: Synthetic oligonucleotide
  Target: ATXN2; (+) strand; PAM type: NRG; PAM sequence: TGG
aaaaaaaaaaaaaaaaacat

SEQ ID NO: 46444 - DNA, 20 bp, Artificial Sequence
  Description of Artificial Sequence: Synthetic oligonucleotide
  Target: ATXN2; (+) strand; PAM type: NRG; PAM sequence: GGG
aaaaaaaaaaaaaaaacatt

SEQ ID NO: 46445 - DNA, 20 bp, Artificial Sequence
  Description of Artificial Sequence: Synthetic oligonucleotide
  Target: ATXN2; (+) strand; PAM type: NRG; PAM sequence: GAG
aaaaaacattgggaaataat

SEQ ID NO: 46446 - DNA, 20 bp, Artificial Sequence
  Description of Artificial Sequence: Synthetic oligonucleotide
  Target: ATXN2; (+) strand; PAM type: NRG; PAM sequence: GAG
aaaacattgggaaataatga

SEQ ID NO: 46447 - DNA, 20 bp, Artificial Sequence
  Description of Artificial Sequence: Synthetic oligonucleotide
  Target: ATXN2; (+) strand; PAM type: NRG; PAM sequence: AAG
attgggaaataatgagagat

SEQ ID NO: 46448 - DNA, 20 bp, Artificial Sequence
  Description of Artificial Sequence: Synthetic oligonucleotide
  Target: ATXN2; (+) strand; PAM type: NRG; PAM sequence: AGG
ttgggaaataatgagagata

SEQ ID NO: 46449 - DNA, 20 bp, Artificial Sequence
  Description of Artificial Sequence: Synthetic oligonucleotide
  Target: ATXN2; (+) strand; PAM type: NRG; PAM sequence: AAG
aatgagagataaggttgaaa

SEQ ID NO: 46450 - DNA, 20 bp, Artificial Sequence
  Description of Artificial Sequence: Synthetic oligonucleotide
  Target: ATXN2; (+) strand; PAM type: NRG; PAM sequence: GAG
tgagagataaggttgaaaaa

SEQ ID NO: 46451 - DNA, 20 bp, Artificial Sequence
  Description of Artificial Sequence: Synthetic oligonucleotide
  Target: ATXN2; (+) strand; PAM type: NRG; PAM sequence: AAG
gagataaggttgaaaaagag

SEQ ID NO: 46452 - DNA, 20 bp, Artificial Sequence
  Description of Artificial Sequence: Synthetic oligonucleotide
  Target: ATXN2; (+) strand; PAM type: NRG; PAM sequence: TGG
ttgaaaaagagaagttccac

SEQ ID NO: 46453 - DNA, 20 bp, Artificial Sequence
  Description of Artificial Sequence: Synthetic oligonucleotide
  Target: ATXN2; (+) strand; PAM type: NRG; PAM sequence: GGG
tgaaaaagagaagttccact

SEQ ID NO: 46454 - DNA, 20 bp, Artificial Sequence
  Description of Artificial Sequence: Synthetic oligonucleotide
  Target: ATXN2; (+) strand; PAM type: NRG; PAM sequence: AAG
aaaagagaagttccactggg

SEQ ID NO: 46455 - DNA, 20 bp, Artificial Sequence
  Description of Artificial Sequence: Synthetic oligonucleotide
  Target: ATXN2; (+) strand; PAM type: NRG; PAM sequence: AGG
aaagagaagttccactggga

SEQ ID NO: 46456 - DNA, 20 bp, Artificial Sequence
  Description of Artificial Sequence: Synthetic oligonucleotide
  Target: ATXN2; (+) strand; PAM type: NRG; PAM sequence: GGG
aagagaagttccactgggaa

SEQ ID NO: 46457 - DNA, 20 bp, Artificial Sequence
  Description of Artificial Sequence: Synthetic oligonucleotide
  Target: ATXN2; (+) strand; PAM type: NRG; PAM sequence: TAG
ccactgggaagggccctgta

SEQ ID NO: 46458 - DNA, 20 bp, Artificial Sequence
  Description of Artificial Sequence: Synthetic oligonucleotide
  Target: ATXN2; (+) strand; PAM type: NRG; PAM sequence: CAG
caactttattctgtaaacaa

SEQ ID NO: 46459 - DNA, 20 bp, Artificial Sequence
  Description of Artificial Sequence: Synthetic oligonucleotide
  Target: ATXN2; (+) strand; PAM type: NRG; PAM sequence: TGG
ctttattctgtaaacaacag

SEQ ID NO: 46460 - DNA, 20 bp, Artificial Sequence
  Description of Artificial Sequence: Synthetic oligonucleotide
  Target: ATXN2; (+) strand; PAM type: NRG; PAM sequence: AAG
gtaaacaacagtggccactg

SEQ ID NO: 46461 - DNA, 20 bp, Artificial Sequence
  Description of Artificial Sequence: Synthetic oligonucleotide
  Target: ATXN2; (+) strand; PAM type: NRG; PAM sequence: GAG
cagtggccactgaagatttt

SEQ ID NO: 46462 - DNA, 20 bp, Artificial Sequence
  Description of Artificial Sequence: Synthetic oligonucleotide
  Target: ATXN2; (+) strand; PAM type: NRG; PAM sequence: AAG
ggccactgaagattttgagc

SEQ ID NO: 46463 - DNA, 20 bp, Artificial Sequence
  Description of Artificial Sequence: Synthetic oligonucleotide
  Target: ATXN2; (+) strand; PAM type: NRG; PAM sequence: AGG
gccactgaagattttgagca

SEQ ID NO: 46464 - DNA, 20 bp, Artificial Sequence
  Description of Artificial Sequence: Synthetic oligonucleotide
  Target: ATXN2; (+) strand; PAM type: NRG; PAM sequence: GGG
ccactgaagattttgagcaa

SEQ ID NO: 46465 - DNA, 20 bp, Artificial Sequence
  Description of Artificial Sequence: Synthetic oligonucleotide
  Target: ATXN2; (+) strand; PAM type: NRG; PAM sequence: GAG
gaagattttgagcaagggat

SEQ ID NO: 46466 - DNA, 20 bp, Artificial Sequence
  Description of Artificial Sequence: Synthetic oligonucleotide
  Target: ATXN2; (+) strand; PAM type: NRG; PAM sequence: AAG
gggatgagatgatctaataa

SEQ ID NO: 46467 - DNA, 20 bp, Artificial Sequence
  Description of Artificial Sequence: Synthetic oligonucleotide
  Target: ATXN2; (+) strand; PAM type: NRG; PAM sequence: AAG
atctaataaaagcaatgtct

SEQ ID NO: 46468 - DNA, 20 bp, Artificial Sequence
  Description of Artificial Sequence: Synthetic oligonucleotide
  Target: ATXN2; (+) strand; PAM type: NRG; PAM sequence: AAG
atttctttatgtcaatgccc

SEQ ID NO: 46469 - DNA, 20 bp, Artificial Sequence
  Description of Artificial Sequence: Synthetic oligonucleotide
  Target: ATXN2; (+) strand; PAM type: NRG; PAM sequence: GAG
gcccaagattgactgaaaat

SEQ ID NO: 46470 - DNA, 20 bp, Artificial Sequence
  Description of Artificial Sequence: Synthetic oligonucleotide
  Target: ATXN2; (+) strand; PAM type: NRG; PAM sequence: TGG
ttgactgaaaatgagaaatc

SEQ ID NO: 46471 - DNA, 20 bp, Artificial Sequence
  Description of Artificial Sequence: Synthetic oligonucleotide
  Target: ATXN2; (+) strand; PAM type: NRG; PAM sequence: AAG
actgaaaatgagaaatctgg

SEQ ID NO: 46472 - DNA, 20 bp, Artificial Sequence
  Description of Artificial Sequence: Synthetic oligonucleotide
  Target: ATXN2; (+) strand; PAM type: NRG; PAM sequence: AAG
aaatgagaaatctggaagac

SEQ ID NO: 46473 - DNA, 20 bp, Artificial Sequence
  Description of Artificial Sequence: Synthetic oligonucleotide
  Target: ATXN2; (+) strand; PAM type: NRG; PAM sequence: TAG
aatctggaagacaagttgtt

SEQ ID NO: 46474 - DNA, 20 bp, Artificial Sequence
  Description of Artificial Sequence: Synthetic oligonucleotide
  Target: ATXN2; (+) strand; PAM type: NRG; PAM sequence: AGG
atctggaagacaagttgttt

SEQ ID NO: 46475 - DNA, 20 bp, Artificial Sequence
  Description of Artificial Sequence: Synthetic oligonucleotide
  Target: ATXN2; (+) strand; PAM type: NRG; PAM sequence: GAG
ctggaagacaagttgtttag

SEQ ID NO: 46476 - DNA, 20 bp, Artificial Sequence
  Description of Artificial Sequence: Synthetic oligonucleotide
  Target: ATXN2; (+) strand; PAM type: NRG; PAM sequence: TGG
gattataacaatatttgcct

SEQ ID NO: 46477 - DNA, 20 bp, Artificial Sequence
  Description of Artificial Sequence: Synthetic oligonucleotide
  Target: ATXN2; (+) strand; PAM type: NRG; PAM sequence: TGG
tataacaatatttgccttgg

SEQ ID NO: 46478 - DNA, 20 bp, Artificial Sequence
  Description of Artificial Sequence: Synthetic oligonucleotide
  Target: ATXN2; (+) strand; PAM type: NRG; PAM sequence: AAG
aacaatatttgccttggtgg

SEQ ID NO: 46479 - DNA, 20 bp, Artificial Sequence
  Description of Artificial Sequence: Synthetic oligonucleotide
  Target: ATXN2; (+) strand; PAM type: NRG; PAM sequence: AAG
ttgccttggtggaagaaaac

SEQ ID NO: 46480 - DNA, 20 bp, Artificial Sequence
  Description of Artificial Sequence: Synthetic oligonucleotide
  Target: ATXN2; (+) strand; PAM type: NRG; PAM sequence: AGG
tgccttggtggaagaaaaca

SEQ ID NO: 46481 - DNA, 20 bp, Artificial Sequence
  Description of Artificial Sequence: Synthetic oligonucleotide
  Target: ATXN2; (+) strand; PAM type: NRG; PAM sequence: TGG
attttcactgttaaatcttt

SEQ ID NO: 46482 - DNA, 20 bp, Artificial Sequence
  Description of Artificial Sequence: Synthetic oligonucleotide
  Target: ATXN2; (+) strand; PAM type: NRG; PAM sequence: AAG
gtgtgcatatataattttta

SEQ ID NO: 46483 - DNA, 20 bp, Artificial Sequence
  Description of Artificial Sequence: Synthetic oligonucleotide
  Target: ATXN2; (+) strand; PAM type: NRG; PAM sequence: AAG
catatataatttttaaagta

SEQ ID NO: 46484 - DNA, 20 bp, Artificial Sequence
  Description of Artificial Sequence: Synthetic oligonucleotide
  Target: ATXN2; (+) strand; PAM type: NRG; PAM sequence: CAG
ttttaaagtaaagttgtaaa

SEQ ID NO: 46485 - DNA, 20 bp, Artificial Sequence
  Description of Artificial Sequence: Synthetic oligonucleotide
  Target: ATXN2; (+) strand; PAM type: NRG; PAM sequence: CAG
aaacagaaaaaaaaaatcta

SEQ ID NO: 46486 - DNA, 20 bp, Artificial Sequence
  Description of Artificial Sequence: Synthetic oligonucleotide
  Target: ATXN2; (+) strand; PAM type: NRG; PAM sequence: GAG
agaaaaaaaaaatctacagt

SEQ ID NO: 46487 - DNA, 20 bp, Artificial Sequence
  Description of Artificial Sequence: Synthetic oligonucleotide
  Target: ATXN2; (+) strand; PAM type: NRG; PAM sequence: TAG
actacttcttactctcccac

SEQ ID NO: 46488 - DNA, 20 bp, Artificial Sequence
  Description of Artificial Sequence: Synthetic oligonucleotide
  Target: ATXN2; (+) strand; PAM type: NRG; PAM sequence: AGG
ctacttcttactctcccact

SEQ ID NO: 46489 - DNA, 20 bp, Artificial Sequence
  Description of Artificial Sequence: Synthetic oligonucleotide
  Target: ATXN2; (+) strand; PAM type: NRG; PAM sequence: TGG
ttcttactctcccactagga

SEQ ID NO: 46490 - DNA, 20 bp, Artificial Sequence
  Description of Artificial Sequence: Synthetic oligonucleotide
  Target: ATXN2; (+) strand; PAM type: NRG; PAM sequence: GGG
tcttactctcccactaggat

SEQ ID NO: 46491 - DNA, 20 bp, Artificial Sequence
  Description of Artificial Sequence: Synthetic oligonucleotide
  Target: ATXN2; (+) strand; PAM type: NRG; PAM sequence: AAG
cactaggatgggtataatca

SEQ ID NO: 46492 - DNA, 20 bp, Artificial Sequence
  Description of Artificial Sequence: Synthetic oligonucleotide
  Target: ATXN2; (+) strand; PAM type: NRG; PAM sequence: GAG
ctaggatgggtataatcaaa

SEQ ID NO: 46493 - DNA, 20 bp, Artificial Sequence
  Description of Artificial Sequence: Synthetic oligonucleotide
  Target: ATXN2; (+) strand; PAM type: NRG; PAM sequence: CAG
gatgggtataatcaaagaga

SEQ ID NO: 46494 - DNA, 20 bp, Artificial Sequence
  Description of Artificial Sequence: Synthetic oligonucleotide
  Target: ATXN2; (+) strand; PAM type: NRG; PAM sequence: TGG
agacagacaataacaaatgc

SEQ ID NO: 46495 - DNA, 20 bp, Artificial Sequence
  Description of Artificial Sequence: Synthetic oligonucleotide
  Target: ATXN2; (+) strand; PAM type: NRG; PAM sequence: GAG
agacaataacaaatgctggt

SEQ ID NO: 46496 - DNA, 20 bp, Artificial Sequence
  Description of Artificial Sequence: Synthetic oligonucleotide
  Target: ATXN2; (+) strand; PAM type: NRG; PAM sequence: AGG
gacaataacaaatgctggtg

SEQ ID NO: 46497 - DNA, 20 bp, Artificial Sequence
  Description of Artificial Sequence: Synthetic oligonucleotide
  Target: ATXN2; (+) strand; PAM type: NRG; PAM sequence: AAG
ggtgaggatgtgaaaaacat

SEQ ID NO: 46498 - DNA, 20 bp, Artificial Sequence
  Description of Artificial Sequence: Synthetic oligonucleotide
  Target: ATXN2; (+) strand; PAM type: NRG; PAM sequence: CAG
gtgaaaaacataagaaacct

SEQ ID NO: 46499 - DNA, 20 bp, Artificial Sequence
  Description of Artificial Sequence: Synthetic oligonucleotide
  Target: ATXN2; (+) strand; PAM type: NRG; PAM sequence: TAG
taagaaacctcagacactgc

SEQ ID NO: 46500 - DNA, 20 bp, Artificial Sequence
  Description of Artificial Sequence: Synthetic oligonucleotide
  Target: ATXN2; (+) strand; PAM type: NRG; PAM sequence: TAG
gaaacctcagacactgctag

SEQ ID NO: 46501 - DNA, 20 bp, Artificial Sequence
  Description of Artificial Sequence: Synthetic oligonucleotide
  Target: ATXN2; (+) strand; PAM type: NRG; PAM sequence: AGG
aaacctcagacactgctagt

SEQ ID NO: 46502 - DNA, 20 bp, Artificial Sequence
  Description of Artificial Sequence: Synthetic oligonucleotide
  Target: ATXN2; (+) strand; PAM type: NRG; PAM sequence: CAG
agtaggattgtaaaatgata

SEQ ID NO: 46503 - DNA, 20 bp, Artificial Sequence
  Description of Artificial Sequence: Synthetic oligonucleotide
  Target: ATXN2; (+) strand; PAM type: NRG; PAM sequence: TGG
gtaaaatgatacagctacgt

SEQ ID NO: 46504 - DNA, 20 bp, Artificial Sequence
  Description of Artificial Sequence: Synthetic oligonucleotide
  Target: ATXN2; (+) strand; PAM type: NRG; PAM sequence: CAG
tgatacagctacgttggaaa

SEQ ID NO: 46505 - DNA, 20 bp, Artificial Sequence
  Description of Artificial Sequence: Synthetic oligonucleotide
  Target: ATXN2; (+) strand; PAM type: NRG; PAM sequence: TAG
ctacgttggaaacagctatg

SEQ ID NO: 46506 - DNA, 20 bp, Artificial Sequence
  Description of Artificial Sequence: Synthetic oligonucleotide
  Target: ATXN2; (+) strand; PAM type: NRG; PAM sequence: AGG
tacgttggaaacagctatgt

SEQ ID NO: 46507 - DNA, 20 bp, Artificial Sequence
  Description of Artificial Sequence: Synthetic oligonucleotide
  Target: ATXN2; (+) strand; PAM type: NRG; PAM sequence: CAG
tgtaggattgtaaaatgata

SEQ ID NO: 46508 - DNA, 20 bp, Artificial Sequence
  Description of Artificial Sequence: Synthetic oligonucleotide
  Target: ATXN2; (+) strand; PAM type: NRG; PAM sequence: CAG
aatgatacagccactatgcc

SEQ ID NO: 46509 - DNA, 20 bp, Artificial Sequence
  Description of Artificial Sequence: Synthetic oligonucleotide
  Target: ATXN2; (+) strand; PAM type: NRG; PAM sequence: AGG
atgatacagccactatgccc

SEQ ID NO: 46510 - DNA, 20 bp, Artificial Sequence
  Description of Artificial Sequence: Synthetic oligonucleotide
  Target: ATXN2; (+) strand; PAM type: NRG; PAM sequence: CAG
agccactatgcccaggaaat

SEQ ID NO: 46511 - DNA, 20 bp, Artificial Sequence
  Description of Artificial Sequence: Synthetic oligonucleotide
  Target: ATXN2; (+) strand; PAM type: NRG; PAM sequence: CAG
caggaaatcagcctgtgcaa

SEQ ID NO: 46512 - DNA, 20 bp, Artificial Sequence
  Description of Artificial Sequence: Synthetic oligonucleotide
  Target: ATXN2; (+) strand; PAM type: NRG; PAM sequence: GAG
aaatcagcctgtgcaacagt

SEQ ID NO: 46513 - DNA, 20 bp, Artificial Sequence
  Description of Artificial Sequence: Synthetic oligonucleotide
  Target: ATXN2; (+) strand; PAM type: NRG; PAM sequence: AAG
tattttcaaaaaataataaa

SEQ ID NO: 46514 - DNA, 20 bp, Artificial Sequence
  Description of Artificial Sequence: Synthetic oligonucleotide
  Target: ATXN2; (+) strand; PAM type: NRG; PAM sequence: CAG
ataataaaaagaaaacaaaa

SEQ ID NO: 46515 - DNA, 20 bp, Artificial Sequence
  Description of Artificial Sequence: Synthetic oligonucleotide
  Target: ATXN2; (+) strand; PAM type: NRG; PAM sequence: CAG
aagaaaacaaaacagcccaa

SEQ ID NO: 46516 - DNA, 20 bp, Artificial Sequence
  Description of Artificial Sequence: Synthetic oligonucleotide
  Target: ATXN2; (+) strand; PAM type: NRG; PAM sequence: AAG
acagcccaacagttatgtaa

SEQ ID NO: 46517 - DNA, 20 bp, Artificial Sequence
  Description of Artificial Sequence: Synthetic oligonucleotide
  Target: ATXN2; (+) strand; PAM type: NRG; PAM sequence: AGG
cagcccaacagttatgtaaa

SEQ ID NO: 46518 - DNA, 20 bp, Artificial Sequence
  Description of Artificial Sequence: Synthetic oligonucleotide
  Target: ATXN2; (+) strand; PAM type: NRG; PAM sequence: TAG
gttatgtaaaaggttcaaca

SEQ ID NO: 46519 - DNA, 20 bp, Artificial Sequence
  Description of Artificial Sequence: Synthetic oligonucleotide
  Target: ATXN2; (+) strand; PAM type: NRG; PAM sequence: TAG
taaaaggttcaacatagatt

SEQ ID NO: 46520 - DNA, 20 bp, Artificial Sequence
  Description of Artificial Sequence: Synthetic oligonucleotide
  Target: ATXN2; (+) strand; PAM type: NRG; PAM sequence: GAG
tcaacatagatttagcatac

SEQ ID NO: 46521 - DNA, 20 bp, Artificial Sequence
  Description of Artificial Sequence: Synthetic oligonucleotide
  Target: ATXN2; (+) strand; PAM type: NRG; PAM sequence: CAG
catagatttagcatacgagc

SEQ ID NO: 46522 - DNA, 20 bp, Artificial Sequence
  Description of Artificial Sequence: Synthetic oligonucleotide
  Target: ATXN2; (+) strand; PAM type: NRG; PAM sequence: CAG
acgagccagcaattatcttg

SEQ ID NO: 46523 - DNA, 20 bp, Artificial Sequence
  Description of Artificial Sequence: Synthetic oligonucleotide
  Target: ATXN2; (+) strand; PAM type: NRG; PAM sequence: AGG
cgagccagcaattatcttgc

SEQ ID NO: 46524 - DNA, 20 bp, Artificial Sequence
  Description of Artificial Sequence: Synthetic oligonucleotide
  Target: ATXN2; (+) strand; PAM type: NRG; PAM sequence: GAG
aggtatgtgtatgtatgtat

SEQ ID NO: 46525 - DNA, 20 bp, Artificial Sequence
  Description of Artificial Sequence: Synthetic oligonucleotide
  Target: ATXN2; (+) strand; PAM type: NRG; PAM sequence: GAG
gcatacacacacacccccat

SEQ ID NO: 46526 - DNA, 20 bp, Artificial Sequence
  Description of Artificial Sequence: Synthetic oligonucleotide
  Target: ATXN2; (+) strand; PAM type: NRG; PAM sequence: CAG
tgaaaacctatgtccacacg

SEQ ID NO: 46527 - DNA, 20 bp, Artificial Sequence
  Description of Artificial Sequence: Synthetic oligonucleotide
  Target: ATXN2; (+) strand; PAM type: NRG; PAM sequence: GAG
tttttttttttttttttttt

SEQ ID NO: 46528 - DNA, 20 bp, Artificial Sequence
  Description of Artificial Sequence: Synthetic oligonucleotide
  Target: ATXN2; (+) strand; PAM type: NRG; PAM sequence: AAG
ttttttttttttttgagatg

SEQ ID NO: 46529 - DNA, 20 bp, Artificial Sequence
  Description of Artificial Sequence: Synthetic oligonucleotide
  Target: ATXN2; (+) strand; PAM type: NRG; PAM sequence: CAG
tgaagtttcactctgtcacc

SEQ ID NO: 46530 - DNA, 20 bp, Artificial Sequence
  Description of Artificial Sequence: Synthetic oligonucleotide
  Target: ATXN2; (+) strand; PAM type: NRG; PAM sequence: AGG
gaagtttcactctgtcaccc

SEQ ID NO: 46531 - DNA, 20 bp, Artificial Sequence
  Description of Artificial Sequence: Synthetic oligonucleotide
  Target: ATXN2; (+) strand; PAM type: NRG; PAM sequence: TGG
tttcactctgtcacccaggc

SEQ ID NO: 46532 - DNA, 20 bp, Artificial Sequence
  Description of Artificial Sequence: Synthetic oligonucleotide
  Target: ATXN2; (+) strand; PAM type: NRG; PAM sequence: GAG
tcactctgtcacccaggctg

SEQ ID NO: 46533 - DNA, 20 bp, Artificial Sequence
  Description of Artificial Sequence: Synthetic oligonucleotide
  Target: ATXN2; (+) strand; PAM type: NRG; PAM sequence: CAG
ctgtcacccaggctggagtg

SEQ ID NO: 46534 - DNA, 20 bp, Artificial Sequence
  Description of Artificial Sequence: Synthetic oligonucleotide
  Target: ATXN2; (+) strand; PAM type: NRG; PAM sequence: TGG
tcacccaggctggagtgcag

SEQ ID NO: 46535 - DNA, 20 bp, Artificial Sequence
  Description of Artificial Sequence: Synthetic oligonucleotide
  Target: ATXN2; (+) strand; PAM type: NRG; PAM sequence: CGG
ggagtgcagtggcgtgatct

SEQ ID NO: 46536 - DNA, 20 bp, Artificial Sequence
  Description of Artificial Sequence: Synthetic oligonucleotide
  Target: ATXN2; (+) strand; PAM type: NRG; PAM sequence: TAG
ggcgtgatctcggctcactg

SEQ ID NO: 46537 - DNA, 20 bp, Artificial Sequence
  Description of Artificial Sequence: Synthetic oligonucleotide
  Target: ATXN2; (+) strand; PAM type: NRG; PAM sequence: CGG
atctcggctcactgtagcct

SEQ ID NO: 46538 - DNA, 20 bp, Artificial Sequence
  Description of Artificial Sequence: Synthetic oligonucleotide
  Target: ATXN2; (+) strand; PAM type: NRG; PAM sequence: CAG
tcactgtagcctcggcttcc

SEQ ID NO: 46539 - DNA, 20 bp, Artificial Sequence
  Description of Artificial Sequence: Synthetic oligonucleotide
  Target: ATXN2; (+) strand; PAM type: NRG; PAM sequence: AAG
agcctcggcttcccagcttc

SEQ ID NO: 46540 - DNA, 20 bp, Artificial Sequence
  Description of Artificial Sequence: Synthetic oligonucleotide
  Target: ATXN2; (+) strand; PAM type: NRG; PAM sequence: CAG
cttcaagtgattctctgcct

SEQ ID NO: 46541 - DNA, 20 bp, Artificial Sequence
  Description of Artificial Sequence: Synthetic oligonucleotide
  Target: ATXN2; (+) strand; PAM type: NRG; PAM sequence: TAG
attctctgcctcagcctccc

SEQ ID NO: 46542 - DNA, 20 bp, Artificial Sequence
  Description of Artificial Sequence: Synthetic oligonucleotide
  Target: ATXN2; (+) strand; PAM type: NRG; PAM sequence: TAG
ctctgcctcagcctccctag

SEQ ID NO: 46543 - DNA, 20 bp, Artificial Sequence
  Description of Artificial Sequence: Synthetic oligonucleotide
  Target: ATXN2; (+) strand; PAM type: NRG; PAM sequence: GAG
cctcagcctccctagtagct

SEQ ID NO: 46544 - DNA, 20 bp, Artificial Sequence
  Description of Artificial Sequence: Synthetic oligonucleotide
  Target: ATXN2; (+) strand; PAM type: NRG; PAM sequence: CAG
ctccctagtagctgagatta

SEQ ID NO: 46545 - DNA, 20 bp, Artificial Sequence
  Description of Artificial Sequence: Synthetic oligonucleotide
  Target: ATXN2; (+) strand; PAM type: NRG; PAM sequence: AGG
tccctagtagctgagattac

SEQ ID NO: 46546 - DNA, 20 bp, Artificial Sequence
  Description of Artificial Sequence: Synthetic oligonucleotide
  Target: ATXN2; (+) strand; PAM type: NRG; PAM sequence: CAG
caggtgcacgccaccacacc

SEQ ID NO: 46547 - DNA, 20 bp, Artificial Sequence
  Description of Artificial Sequence: Synthetic oligonucleotide
  Target: ATXN2; (+) strand; PAM type: NRG; PAM sequence: TAG
ccagctcatttttgtatttt

SEQ ID NO: 46548 - DNA, 20 bp, Artificial Sequence
  Description of Artificial Sequence: Synthetic oligonucleotide
  Target: ATXN2; (+) strand; PAM type: NRG; PAM sequence: TAG
gctcatttttgtatttttag

SEQ ID NO: 46549 - DNA, 20 bp, Artificial Sequence
  Description of Artificial Sequence: Synthetic oligonucleotide
  Target: ATXN2; (+) strand; PAM type: NRG; PAM sequence: GAG
tcatttttgtatttttagta

SEQ ID NO: 46550 - DNA, 20 bp, Artificial Sequence
  Description of Artificial Sequence: Synthetic oligonucleotide
  Target: ATXN2; (+) strand; PAM type: NRG; PAM sequence: CAG
ttttgtatttttagtagaga

SEQ ID NO: 46551 - DNA, 20 bp, Artificial Sequence
  Description of Artificial Sequence: Synthetic oligonucleotide
  Target: ATXN2; (+) strand; PAM type: NRG; PAM sequence: AGG
tttgtatttttagtagagac

SEQ ID NO: 46552 - DNA, 20 bp, Artificial Sequence
  Description of Artificial Sequence: Synthetic oligonucleotide
  Target: ATXN2; (+) strand; PAM type: NRG; PAM sequence: GGG
ttgtatttttagtagagaca

SEQ ID NO: 46553 - DNA, 20 bp, Artificial Sequence
  Description of Artificial Sequence: Synthetic oligonucleotide
  Target: ATXN2; (+) strand; PAM type: NRG; PAM sequence: TGG
gagacagggtttcaccatgt

SEQ ID NO: 46554 - DNA, 20 bp, Artificial Sequence
  Description of Artificial Sequence: Synthetic oligonucleotide
  Target: ATXN2; (+) strand; PAM type: NRG; PAM sequence: GGG
agacagggtttcaccatgtt

SEQ ID NO: 46555 - DNA, 20 bp, Artificial Sequence
  Description of Artificial Sequence: Synthetic oligonucleotide
  Target: ATXN2; (+) strand; PAM type: NRG; PAM sequence: CAG
cagggtttcaccatgttggg

SEQ ID NO: 46556 - DNA, 20 bp, Artificial Sequence
  Description of Artificial Sequence: Synthetic oligonucleotide
  Target: ATXN2; (+) strand; PAM type: NRG; PAM sequence: AGG
agggtttcaccatgttgggc

SEQ ID NO: 46557 - DNA, 20 bp, Artificial Sequence
  Description of Artificial Sequence: Synthetic oligonucleotide
  Target: ATXN2; (+) strand; PAM type: NRG; PAM sequence: TGG
tttcaccatgttgggcaggc

SEQ ID NO: 46558 - DNA, 20 bp, Artificial Sequence
  Description of Artificial Sequence: Synthetic oligonucleotide
  Target: ATXN2; (+) strand; PAM type: NRG; PAM sequence: CGG
gcaggctggtctcgaactcc

SEQ ID NO: 46559 - DNA, 20 bp, Artificial Sequence
  Description of Artificial Sequence: Synthetic oligonucleotide
  Target: ATXN2; (+) strand; PAM type: NRG; PAM sequence: CAG
cccggcctcaaatgatctgc

SEQ ID NO: 46560 - DNA, 20 bp, Artificial Sequence
  Description of Artificial Sequence: Synthetic oligonucleotide
  Target: ATXN2; (+) strand; PAM type: NRG; PAM sequence: CAG
ctcaaatgatctgccagccc

SEQ ID NO: 46561 - DNA, 20 bp, Artificial Sequence
  Description of Artificial Sequence: Synthetic oligonucleotide
  Target: ATXN2; (+) strand; PAM type: NRG; PAM sequence: AAG
ctgccagccccagcctccca

SEQ ID NO: 46562 - DNA, 20 bp, Artificial Sequence
  Description of Artificial Sequence: Synthetic oligonucleotide
  Target: ATXN2; (+) strand; PAM type: NRG; PAM sequence: TGG
gccccagcctcccaaagtgc

SEQ ID NO: 46563 - DNA, 20 bp, Artificial Sequence
  Description of Artificial Sequence: Synthetic oligonucleotide
  Target: ATXN2; (+) strand; PAM type: NRG; PAM sequence: GGG
ccccagcctcccaaagtgct

SEQ ID NO: 46564 - DNA, 20 bp, Artificial Sequence
  Description of Artificial Sequence: Synthetic oligonucleotide
  Target: ATXN2; (+) strand; PAM type: NRG; PAM sequence: CAG
ctcccaaagtgctgggatta

SEQ ID NO: 46565 - DNA, 20 bp, Artificial Sequence
  Description of Artificial Sequence: Synthetic oligonucleotide
  Target: ATXN2; (+) strand; PAM type: NRG; PAM sequence: GAG
cccaaagtgctgggattaca

SEQ ID NO: 46566 - DNA, 20 bp, Artificial Sequence
  Description of Artificial Sequence: Synthetic oligonucleotide
  Target: ATXN2; (+) strand; PAM type: NRG; PAM sequence: AGG
ccaaagtgctgggattacag

SEQ ID NO: 46567 - DNA, 20 bp, Artificial Sequence
  Description of Artificial Sequence: Synthetic oligonucleotide
  Target: ATXN2; (+) strand; PAM type: NRG; PAM sequence: GAG
tgctgggattacagaggcat

SEQ ID NO: 46568 - DNA, 20 bp, Artificial Sequence
  Description of Artificial Sequence: Synthetic oligonucleotide
  Target: ATXN2; (+) strand; PAM type: NRG; PAM sequence: CGG
gaggcatgagccaccacacc

SEQ ID NO: 46569 - DNA, 20 bp, Artificial Sequence
  Description of Artificial Sequence: Synthetic oligonucleotide
  Target: ATXN2; (+) strand; PAM type: NRG; PAM sequence: AAG
ggcccacacaaaaactttaa

SEQ ID NO: 46570 - DNA, 20 bp, Artificial Sequence
  Description of Artificial Sequence: Synthetic oligonucleotide
  Target: ATXN2; (+) strand; PAM type: NRG; PAM sequence: CAG
actttaaaagtcactgttcg

SEQ ID NO: 46571 - DNA, 20 bp, Artificial Sequence
  Description of Artificial Sequence: Synthetic oligonucleotide
  Target: ATXN2; (+) strand; PAM type: NRG; PAM sequence: CAG
ttaaaagtcactgttcgcag

SEQ ID NO: 46572 - DNA, 20 bp, Artificial Sequence
  Description of Artificial Sequence: Synthetic oligonucleotide
  Target: ATXN2; (+) strand; PAM type: NRG; PAM sequence: AGG
taaaagtcactgttcgcagc

SEQ ID NO: 46573 - DNA, 20 bp, Artificial Sequence
  Description of Artificial Sequence: Synthetic oligonucleotide
  Target: ATXN2; (+) strand; PAM type: NRG; PAM sequence: AAG
caggattatgtataaatcaa

SEQ ID NO: 46574 - DNA, 20 bp, Artificial Sequence
  Description of Artificial Sequence: Synthetic oligonucleotide
  Target: ATXN2; (+) strand; PAM type: NRG; PAM sequence: AGG
aggattatgtataaatcaaa

SEQ ID NO: 46575 - DNA, 20 bp, Artificial Sequence
  Description of Artificial Sequence: Synthetic oligonucleotide
  Target: ATXN2; (+) strand; PAM type: NRG; PAM sequence: TGG
attatgtataaatcaaaagg

SEQ ID NO: 46576 - DNA, 20 bp, Artificial Sequence
  Description of Artificial Sequence: Synthetic oligonucleotide
  Target: ATXN2; (+) strand; PAM type: NRG; PAM sequence: TAG
actgatgaataaacaaaatg

SEQ ID NO: 46577 - DNA, 20 bp, Artificial Sequence
  Description of Artificial Sequence: Synthetic oligonucleotide
  Target: ATXN2; (+) strand; PAM type: NRG; PAM sequence: TGG
gtacctgtgtaactgtataa

SEQ ID NO: 46578 - DNA, 20 bp, Artificial Sequence
  Description of Artificial Sequence: Synthetic oligonucleotide
  Target: ATXN2; (+) strand; PAM type: NRG; PAM sequence: TGG
taactgtataatggaatatt

SEQ ID NO: 46579 - DNA, 20 bp, Artificial Sequence
  Description of Artificial Sequence: Synthetic oligonucleotide
  Target: ATXN2; (+) strand; PAM type: NRG; PAM sequence: AAG
tggaatatttggccatgaaa

SEQ ID NO: 46580 - DNA, 20 bp, Artificial Sequence
  Description of Artificial Sequence: Synthetic oligonucleotide
  Target: ATXN2; (+) strand; PAM type: NRG; PAM sequence: AAG
atatttggccatgaaaaaga

SEQ ID NO: 46581 - DNA, 20 bp, Artificial Sequence
  Description of Artificial Sequence: Synthetic oligonucleotide
  Target: ATXN2; (+) strand; PAM type: NRG; PAM sequence: AAG
tttggccatgaaaaagaaag

SEQ ID NO: 46582 - DNA, 20 bp, Artificial Sequence
  Description of Artificial Sequence: Synthetic oligonucleotide
  Target: ATXN2; (+) strand; PAM type: NRG; PAM sequence: CAG
agaagtactaatacatgcta

SEQ ID NO: 46583 - DNA, 20 bp, Artificial Sequence
  Description of Artificial Sequence: Synthetic oligonucleotide
  Target: ATXN2; (+) strand; PAM type: NRG; PAM sequence: TGG
tactaatacatgctacagca

SEQ ID NO: 46584 - DNA, 20 bp, Artificial Sequence
  Description of Artificial Sequence: Synthetic oligonucleotide
  Target: ATXN2; (+) strand; PAM type: NRG; PAM sequence: AAG
taatacatgctacagcatgg

SEQ ID NO: 46585 - DNA, 20 bp, Artificial Sequence
  Description of Artificial Sequence: Synthetic oligonucleotide
  Target: ATXN2; (+) strand; PAM type: NRG; PAM sequence: AAG
cagcatggaagaaacatact

SEQ ID NO: 46586 - DNA, 20 bp, Artificial Sequence
  Description of Artificial Sequence: Synthetic oligonucleotide
  Target: ATXN2; (+) strand; PAM type: NRG; PAM sequence: AAG
agaaacatactaagtgaaac

SEQ ID NO: 46587 - DNA, 20 bp, Artificial Sequence
  Description of Artificial Sequence: Synthetic oligonucleotide
  Target: ATXN2; (+) strand; PAM type: NRG; PAM sequence: TGG
caagcctatcataatatata

SEQ ID NO: 46588 - DNA, 20 bp, Artificial Sequence
  Description of Artificial Sequence: Synthetic oligonucleotide
  Target: ATXN2; (+) strand; PAM type: NRG; PAM sequence: CAG
cctatcataatatatatggc

SEQ ID NO: 46589 - DNA, 20 bp, Artificial Sequence
  Description of Artificial Sequence: Synthetic oligonucleotide
  Target: ATXN2; (+) strand; PAM type: NRG; PAM sequence: CGG
ataatatatatggccagatg

SEQ ID NO: 46590 - DNA, 20 bp, Artificial Sequence
  Description of Artificial Sequence: Synthetic oligonucleotide
  Target: ATXN2; (+) strand; PAM type: NRG; PAM sequence: TGG
atatatatggccagatgcgg

SEQ ID NO: 46591 - DNA, 20 bp, Artificial Sequence
  Description of Artificial Sequence: Synthetic oligonucleotide
  Target: ATXN2; (+) strand; PAM type: NRG; PAM sequence: TGG
tggccagatgcggtggctca

SEQ ID NO: 46592 - DNA, 20 bp, Artificial Sequence
  Description of Artificial Sequence: Synthetic oligonucleotide
  Target: ATXN2; (+) strand; PAM type: NRG; PAM sequence: CAG
gtggctcatggctgcaatcc

SEQ ID NO: 46593 - DNA, 20 bp, Artificial Sequence
  Description of Artificial Sequence: Synthetic oligonucleotide
  Target: ATXN2; (+) strand; PAM type: NRG; PAM sequence: TGG
tggctgcaatcccagcactt

SEQ ID NO: 46594 - DNA, 20 bp, Artificial Sequence
  Description of Artificial Sequence: Synthetic oligonucleotide
  Target: ATXN2; (+) strand; PAM type: NRG; PAM sequence: GGG
ggctgcaatcccagcacttt

SEQ ID NO: 46595 - DNA, 20 bp, Artificial Sequence
  Description of Artificial Sequence: Synthetic oligonucleotide
  Target: ATXN2; (+) strand; PAM type: NRG; PAM sequence: GAG
ctgcaatcccagcactttgg

SEQ ID NO: 46596 - DNA, 20 bp, Artificial Sequence
  Description of Artificial Sequence: Synthetic oligonucleotide
  Target: ATXN2; (+) strand; PAM type: NRG; PAM sequence: GAG
tcccagcactttgggagtcc

SEQ ID NO: 46597 - DNA, 20 bp, Artificial Sequence
  Description of Artificial Sequence: Synthetic oligonucleotide
  Target: ATXN2; (+) strand; PAM type: NRG; PAM sequence: AGG
cccagcactttgggagtccg

SEQ ID NO: 46598 - DNA, 20 bp, Artificial Sequence
  Description of Artificial Sequence: Synthetic oligonucleotide
  Target: ATXN2; (+) strand; PAM type: NRG; PAM sequence: TGG
agcactttgggagtccgagg

SEQ ID NO: 46599 - DNA, 20 bp, Artificial Sequence
  Description of Artificial Sequence: Synthetic oligonucleotide
  Target: ATXN2; (+) strand; PAM type: NRG; PAM sequence: GGG
gcactttgggagtccgaggt

SEQ ID NO: 46600 - DNA, 20 bp, Artificial Sequence
  Description of Artificial Sequence: Synthetic oligonucleotide
  Target: ATXN2; (+) strand; PAM type: NRG; PAM sequence: CAG
ctttgggagtccgaggtggg

SEQ ID NO: 46601 - DNA, 20 bp, Artificial Sequence
  Description of Artificial Sequence: Synthetic oligonucleotide
  Target: ATXN2; (+) strand; PAM type: NRG; PAM sequence: GAG
ccgaggtgggcagatcactt

SEQ ID NO: 46602 - DNA, 20 bp, Artificial Sequence
  Description of Artificial Sequence: Synthetic oligonucleotide
  Target: ATXN2; (+) strand; PAM type: NRG; PAM sequence: AGG
cgaggtgggcagatcacttg

SEQ ID NO: 46603 - DNA, 20 bp, Artificial Sequence
  Description of Artificial Sequence: Synthetic oligonucleotide
  Target: ATXN2; (+) strand; PAM type: NRG; PAM sequence: CAG
gtgggcagatcacttgaggt

SEQ ID NO: 46604 - DNA, 20 bp, Artificial Sequence
  Description of Artificial Sequence: Synthetic oligonucleotide
  Target: ATXN2; (+) strand; PAM type: NRG; PAM sequence: AGG
tgggcagatcacttgaggtc

SEQ ID NO: 46605 - DNA, 20 bp, Artificial Sequence
  Description of Artificial Sequence: Synthetic oligonucleotide
  Target: ATXN2; (+) strand; PAM type: NRG; PAM sequence: GAG
tcacttgaggtcaggaattc

SEQ ID NO: 46606 - DNA, 20 bp, Artificial Sequence
  Description of Artificial Sequence: Synthetic oligonucleotide
  Target: ATXN2; (+) strand; PAM type: NRG; PAM sequence: CAG
tgaggtcaggaattcgagac

SEQ ID NO: 46607 - DNA, 20 bp, Artificial Sequence
  Description of Artificial Sequence: Synthetic oligonucleotide
  Target: ATXN2; (+) strand; PAM type: NRG; PAM sequence: TGG
tcaggaattcgagaccagcc

SEQ ID NO: 46608 - DNA, 20 bp, Artificial Sequence
  Description of Artificial Sequence: Synthetic oligonucleotide
  Target: ATXN2; (+) strand; PAM type: NRG; PAM sequence: TGG
cgagaccagcctggccaaca

SEQ ID NO: 46609 - DNA, 20 bp, Artificial Sequence
  Description of Artificial Sequence: Synthetic oligonucleotide
  Target: ATXN2; (+) strand; PAM type: NRG; PAM sequence: TAG
ctttactaaaaatataaaat

SEQ ID NO: 46610 - DNA, 20 bp, Artificial Sequence
  Description of Artificial Sequence: Synthetic oligonucleotide
  Target: ATXN2; (+) strand; PAM type: NRG; PAM sequence: TAG
tactaaaaatataaaattag

SEQ ID NO: 46611 - DNA, 20 bp, Artificial Sequence
  Description of Artificial Sequence: Synthetic oligonucleotide
  Target: ATXN2; (+) strand; PAM type: NRG; PAM sequence: AGG
actaaaaatataaaattagt

SEQ ID NO: 46612 - DNA, 20 bp, Artificial Sequence
  Description of Artificial Sequence: Synthetic oligonucleotide
  Target: ATXN2; (+) strand; PAM type: NRG; PAM sequence: TGG
aaatataaaattagtaggtg

SEQ ID NO: 46613 - DNA, 20 bp, Artificial Sequence
  Description of Artificial Sequence: Synthetic oligonucleotide
  Target: ATXN2; (+) strand; PAM type: NRG; PAM sequence: TGG
tataaaattagtaggtgtgg

SEQ ID NO: 46614 - DNA, 20 bp, Artificial Sequence
  Description of Artificial Sequence: Synthetic oligonucleotide
  Target: ATXN2; (+) strand; PAM type: NRG; PAM sequence: CAG
aaaattagtaggtgtggtgg

SEQ ID NO: 46615 - DNA, 20 bp, Artificial Sequence
  Description of Artificial Sequence: Synthetic oligonucleotide
  Target: ATXN2; (+) strand; PAM type: NRG; PAM sequence: AGG
aaattagtaggtgtggtggc

SEQ ID NO: 46616 - DNA, 20 bp, Artificial Sequence
  Description of Artificial Sequence: Synthetic oligonucleotide
  Target: ATXN2; (+) strand; PAM type: NRG; PAM sequence: TAG
ggtgtggtggcaggcgccta

SEQ ID NO: 46617 - DNA, 20 bp, Artificial Sequence
  Description of Artificial Sequence: Synthetic oligonucleotide
  Target: ATXN2; (+) strand; PAM type: NRG; PAM sequence: CAG
gtggcaggcgcctatagtcc

SEQ ID NO: 46618 - DNA, 20 bp, Artificial Sequence
  Description of Artificial Sequence: Synthetic oligonucleotide
  Target: ATXN2; (+) strand; PAM type: NRG; PAM sequence: AAG
gcctatagtcccagctactc

SEQ ID NO: 46619 - DNA, 20 bp, Artificial Sequence
  Description of Artificial Sequence: Synthetic oligonucleotide
  Target: ATXN2; (+) strand; PAM type: NRG; PAM sequence: GAG
ctatagtcccagctactcaa

SEQ ID NO: 46620 - DNA, 20 bp, Artificial Sequence
  Description of Artificial Sequence: Synthetic oligonucleotide
  Target: ATXN2; (+) strand; PAM type: NRG; PAM sequence: AGG
tatagtcccagctactcaag

SEQ ID NO: 46621 - DNA, 20 bp, Artificial Sequence
  Description of Artificial Sequence: Synthetic oligonucleotide
  Target: ATXN2; (+) strand; PAM type: NRG; PAM sequence: GAG
tcccagctactcaagaggct

SEQ ID NO: 46622 - DNA, 20 bp, Artificial Sequence
  Description of Artificial Sequence: Synthetic oligonucleotide
  Target: ATXN2; (+) strand; PAM type: NRG; PAM sequence: AGG
cccagctactcaagaggctg

SEQ ID NO: 46623 - DNA, 20 bp, Artificial Sequence
  Description of Artificial Sequence: Synthetic oligonucleotide
  Target: ATXN2; (+) strand; PAM type: NRG; PAM sequence: CAG
agctactcaagaggctgagg

SEQ ID NO: 46624 - DNA, 20 bp, Artificial Sequence
  Description of Artificial Sequence: Synthetic oligonucleotide
  Target: ATXN2; (+) strand; PAM type: NRG; PAM sequence: AGG
gctactcaagaggctgaggc

SEQ ID NO: 46625 - DNA, 20 bp, Artificial Sequence
  Description of Artificial Sequence: Synthetic oligonucleotide
  Target: ATXN2; (+) strand; PAM type: NRG; PAM sequence: GAG
tactcaagaggctgaggcag

SEQ ID NO: 46626 - DNA, 20 bp, Artificial Sequence
  Description of Artificial Sequence: Synthetic oligonucleotide
  Target: ATXN2; (+) strand; PAM type: NRG; PAM sequence: TGG
gcaggagaatcgcttcaacc

SEQ ID NO: 46627 - DNA, 20 bp, Artificial Sequence
  Description of Artificial Sequence: Synthetic oligonucleotide
  Target: ATXN2; (+) strand; PAM type: NRG; PAM sequence: GGG
caggagaatcgcttcaacct

SEQ ID NO: 46628 - DNA, 20 bp, Artificial Sequence
  Description of Artificial Sequence: Synthetic oligonucleotide
  Target: ATXN2; (+) strand; PAM type: NRG; PAM sequence: GAG
ggagaatcgcttcaacctgg

SEQ ID NO: 46629 - DNA, 20 bp, Artificial Sequence
  Description of Artificial Sequence: Synthetic oligonucleotide
  Target: ATXN2; (+) strand; PAM type: NRG; PAM sequence: AGG
gagaatcgcttcaacctggg

SEQ ID NO: 46630 - DNA, 20 bp, Artificial Sequence
  Description of Artificial Sequence: Synthetic oligonucleotide
  Target: ATXN2; (+) strand; PAM type: NRG; PAM sequence: CAG
aatcgcttcaacctgggagg

SEQ ID NO: 46631 - DNA, 20 bp, Artificial Sequence
  Description of Artificial Sequence: Synthetic oligonucleotide
  Target: ATXN2; (+) strand; PAM type: NRG; PAM sequence: GAG
tcgcttcaacctgggaggca

SEQ ID NO: 46632 - DNA, 20 bp, Artificial Sequence
  Description of Artificial Sequence: Synthetic oligonucleotide
  Target: ATXN2; (+) strand; PAM type: NRG; PAM sequence: AGG
cgcttcaacctgggaggcag

SEQ ID NO: 46633 - DNA, 20 bp, Artificial Sequence
  Description of Artificial Sequence: Synthetic oligonucleotide
  Target: ATXN2; (+) strand; PAM type: NRG; PAM sequence: CAG
aacctgggaggcagaggatg

SEQ ID NO: 46634 - DNA, 20 bp, Artificial Sequence
  Description of Artificial Sequence: Synthetic oligonucleotide
  Target: ATXN2; (+) strand; PAM type: NRG; PAM sequence: GAG
tgggaggcagaggatgcagt

SEQ ID NO: 46635 - DNA, 20 bp, Artificial Sequence
  Description of Artificial Sequence: Synthetic oligonucleotide
  Target: ATXN2; (+) strand; PAM type: NRG; PAM sequence: CAG
gcaatcatgccactgcgctc

SEQ ID NO: 46636 - DNA, 20 bp, Artificial Sequence
  Description of Artificial Sequence: Synthetic oligonucleotide
  Target: ATXN2; (+) strand; PAM type: NRG; PAM sequence: TGG
catgccactgcgctccagcc

SEQ ID NO: 46637 - DNA, 20 bp, Artificial Sequence
  Description of Artificial Sequence: Synthetic oligonucleotide
  Target: ATXN2; (+) strand; PAM type: NRG; PAM sequence: GGG
atgccactgcgctccagcct

SEQ ID NO: 46638 - DNA, 20 bp, Artificial Sequence
  Description of Artificial Sequence: Synthetic oligonucleotide
  Target: ATXN2; (+) strand; PAM type: NRG; PAM sequence: CAG
gcgctccagcctgggcgaca

SEQ ID NO: 46639 - DNA, 20 bp, Artificial Sequence
  Description of Artificial Sequence: Synthetic oligonucleotide
  Target: ATXN2; (+) strand; PAM type: NRG; PAM sequence: GAG
tccagcctgggcgacacagt

SEQ ID NO: 46640 - DNA, 20 bp, Artificial Sequence
  Description of Artificial Sequence: Synthetic oligonucleotide
  Target: ATXN2; (+) strand; PAM type: NRG; PAM sequence: AAG
actctgtttcaaaaaaaaaa

SEQ ID NO: 46641 - DNA, 20 bp, Artificial Sequence
  Description of Artificial Sequence: Synthetic oligonucleotide
  Target: ATXN2; (+) strand; PAM type: NRG; PAM sequence: AAG
aaaaaaaaaaaagaaaaaaa

SEQ ID NO: 46642 - DNA, 20 bp, Artificial Sequence
  Description of Artificial Sequence: Synthetic oligonucleotide
  Target: ATXN2; (+) strand; PAM type: NRG; PAM sequence: AGG
aaaaaaaaaaagaaaaaaaa

SEQ ID NO: 46643 - DNA, 20 bp, Artificial Sequence
  Description of Artificial Sequence: Synthetic oligonucleotide
  Target: ATXN2; (+) strand; PAM type: NRG; PAM sequence: CAG
ttccattaatacgcaatgtc

SEQ ID NO: 46644 - DNA, 20 bp, Artificial Sequence
  Description of Artificial Sequence: Synthetic oligonucleotide
  Target: ATXN2; (+) strand; PAM type: NRG; PAM sequence: TGG
ttaatacgcaatgtccagaa

SEQ ID NO: 46645 - DNA, 20 bp, Artificial Sequence
  Description of Artificial Sequence: Synthetic oligonucleotide
  Target: ATXN2; (+) strand; PAM type: NRG; PAM sequence: GGG
taatacgcaatgtccagaat

SEQ ID NO: 46646 - DNA, 20 bp, Artificial Sequence
  Description of Artificial Sequence: Synthetic oligonucleotide
  Target: ATXN2; (+) strand; PAM type: NRG; PAM sequence: AAG
ccagaatgggcaaacctatg

SEQ ID NO: 46647 - DNA, 20 bp, Artificial Sequence
  Description of Artificial Sequence: Synthetic oligonucleotide
  Target: ATXN2; (+) strand; PAM type: NRG; PAM sequence: TAG
ctatgaagacaataaatcaa

SEQ ID NO: 46648 - DNA, 20 bp, Artificial Sequence
  Description of Artificial Sequence: Synthetic oligonucleotide
  Target: ATXN2; (+) strand; PAM type: NRG; PAM sequence: TGG
acaataaatcaatagttgcc

SEQ ID NO: 46649 - DNA, 20 bp, Artificial Sequence
  Description of Artificial Sequence: Synthetic oligonucleotide
  Target: ATXN2; (+) strand; PAM type: NRG; PAM sequence: GAG
aataaatcaatagttgcctg

SEQ ID NO: 46650 - DNA, 20 bp, Artificial Sequence
  Description of Artificial Sequence: Synthetic oligonucleotide
  Target: ATXN2; (+) strand; PAM type: NRG; PAM sequence: TGG
aatcaatagttgcctggagc

SEQ ID NO: 46651 - DNA, 20 bp, Artificial Sequence
  Description of Artificial Sequence: Synthetic oligonucleotide
  Target: ATXN2; (+) strand; PAM type: NRG; PAM sequence: GGG
atcaatagttgcctggagct

SEQ ID NO: 46652 - DNA, 20 bp, Artificial Sequence
  Description of Artificial Sequence: Synthetic oligonucleotide
  Target: ATXN2; (+) strand; PAM type: NRG; PAM sequence: GGG
tcaatagttgcctggagctg

SEQ ID NO: 46653 - DNA, 20 bp, Artificial Sequence
  Description of Artificial Sequence: Synthetic oligonucleotide
  Target: ATXN2; (+) strand; PAM type: NRG; PAM sequence: CAG
ctggggaaaattgaaacaaa

SEQ ID NO: 46654 - DNA, 20 bp, Artificial Sequence
  Description of Artificial Sequence: Synthetic oligonucleotide
  Target: ATXN2; (+) strand; PAM type: NRG; PAM sequence: GAG
ggggaaaattgaaacaaaca

SEQ ID NO: 46655 - DNA, 20 bp, Artificial Sequence
  Description of Artificial Sequence: Synthetic oligonucleotide
  Target: ATXN2; (+) strand; PAM type: NRG; PAM sequence: GAG
ggaaaattgaaacaaacaga

SEQ ID NO: 46656 - DNA, 20 bp, Artificial Sequence
  Description of Artificial Sequence: Synthetic oligonucleotide
  Target: ATXN2; (+) strand; PAM type: NRG; PAM sequence: AGG
gaaaattgaaacaaacagag

SEQ ID NO: 46657 - DNA, 20 bp, Artificial Sequence
  Description of Artificial Sequence: Synthetic oligonucleotide
  Target: ATXN2; (+) strand; PAM type: NRG; PAM sequence: AAG
acaaacagagaggaactgct

SEQ ID NO: 46658 - DNA, 20 bp, Artificial Sequence
  Description of Artificial Sequence: Synthetic oligonucleotide
  Target: ATXN2; (+) strand; PAM type: NRG; PAM sequence: AGG
caaacagagaggaactgcta

SEQ ID NO: 46659 - DNA, 20 bp, Artificial Sequence
  Description of Artificial Sequence: Synthetic oligonucleotide
  Target: ATXN2; (+) strand; PAM type: NRG; PAM sequence: GGG
aaacagagaggaactgctaa

SEQ ID NO: 46660 - DNA, 20 bp, Artificial Sequence
  Description of Artificial Sequence: Synthetic oligonucleotide
  Target: ATXN2; (+) strand; PAM type: NRG; PAM sequence: GGG
aacagagaggaactgctaag

SEQ ID NO: 46661 - DNA, 20 bp, Artificial Sequence
  Description of Artificial Sequence: Synthetic oligonucleotide
  Target: ATXN2; (+) strand; PAM type: NRG; PAM sequence: CAG
agaggaactgctaaggggtt

SEQ ID NO: 46662 - DNA, 20 bp, Artificial Sequence
  Description of Artificial Sequence: Synthetic oligonucleotide
  Target: ATXN2; (+) strand; PAM type: NRG; PAM sequence: GAG
aggaactgctaaggggttca

SEQ ID NO: 46663 - DNA, 20 bp, Artificial Sequence
  Description of Artificial Sequence: Synthetic oligonucleotide
  Target: ATXN2; (+) strand; PAM type: NRG; PAM sequence: CAG
aggggttcagagtttctttt

SEQ ID NO: 46664 - DNA, 20 bp, Artificial Sequence
  Description of Artificial Sequence: Synthetic oligonucleotide
  Target: ATXN2; (+) strand; PAM type: NRG; PAM sequence: AGG
ggggttcagagtttcttttc

SEQ ID NO: 46665 - DNA, 20 bp, Artificial Sequence
  Description of Artificial Sequence: Synthetic oligonucleotide
  Target: ATXN2; (+) strand; PAM type: NRG; PAM sequence: GGG
gggttcagagtttcttttca

SEQ ID NO: 46666 - DNA, 20 bp, Artificial Sequence
  Description of Artificial Sequence: Synthetic oligonucleotide
  Target: ATXN2; (+) strand; PAM type: NRG; PAM sequence: TAG
atgaaaatgtaaattgattg

SEQ ID NO: 46667 - DNA, 20 bp, Artificial Sequence
  Description of Artificial Sequence: Synthetic oligonucleotide
  Target: ATXN2; (+) strand; PAM type: NRG; PAM sequence: TGG
atgtaaattgattgtagtga

SEQ ID NO: 46668 - DNA, 20 bp, Artificial Sequence
  Description of Artificial Sequence: Synthetic oligonucleotide
  Target: ATXN2; (+) strand; PAM type: NRG; PAM sequence: TGG
tgtgaatatattttaaaaaa

SEQ ID NO: 46669 - DNA, 20 bp, Artificial Sequence
  Description of Artificial Sequence: Synthetic oligonucleotide
  Target: ATXN2; (+) strand; PAM type: NRG; PAM sequence: GGG
gtgaatatattttaaaaaat

SEQ ID NO: 46670 - DNA, 20 bp, Artificial Sequence
  Description of Artificial Sequence: Synthetic oligonucleotide
  Target: ATXN2; (+) strand; PAM type: NRG; PAM sequence: TGG
atatattttaaaaaatgggc

SEQ ID NO: 46671 - DNA, 20 bp, Artificial Sequence
  Description of Artificial Sequence: Synthetic oligonucleotide
  Target: ATXN2; (+) strand; PAM type: NRG; PAM sequence: GGG
tatattttaaaaaatgggct

SEQ ID NO: 46672 - DNA, 20 bp, Artificial Sequence
  Description of Artificial Sequence: Synthetic oligonucleotide
  Target: ATXN2; (+) strand; PAM type: NRG; PAM sequence: GAG
tattttaaaaaatgggctgg

SEQ ID NO: 46673 - DNA, 20 bp, Artificial Sequence
  Description of Artificial Sequence: Synthetic oligonucleotide
  Target: ATXN2; (+) strand; PAM type: NRG; PAM sequence: CAG
tttaaaaaatgggctgggag

SEQ ID NO: 46674 - DNA, 20 bp, Artificial Sequence
  Description of Artificial Sequence: Synthetic oligonucleotide
  Target: ATXN2; (+) strand; PAM type: NRG; PAM sequence: GAG
taaaaaatgggctgggagca

SEQ ID NO: 46675 - DNA, 20 bp, Artificial Sequence
  Description of Artificial Sequence: Synthetic oligonucleotide
  Target: ATXN2; (+) strand; PAM type: NRG; PAM sequence: AGG
aaaaaatgggctgggagcag

SEQ ID NO: 46676 - DNA, 20 bp, Artificial Sequence
  Description of Artificial Sequence: Synthetic oligonucleotide
  Target: ATXN2; (+) strand; PAM type: NRG; PAM sequence: CAG
gaggttcatgcctgtaatcc

SEQ ID NO: 46677 - DNA, 20 bp, Artificial Sequence
  Description of Artificial Sequence: Synthetic oligonucleotide
  Target: ATXN2; (+) strand; PAM type: NRG; PAM sequence: TGG
tgcctgtaatcccagcactt

SEQ ID NO: 46678 - DNA, 20 bp, Artificial Sequence
  Description of Artificial Sequence: Synthetic oligonucleotide
  Target: ATXN2; (+) strand; PAM type: NRG; PAM sequence: GGG
gcctgtaatcccagcacttt

SEQ ID NO: 46679 - DNA, 20 bp, Artificial Sequence
  Description of Artificial Sequence: Synthetic oligonucleotide
  Target: ATXN2; (+) strand; PAM type: NRG; PAM sequence: GAG
ctgtaatcccagcactttgg

SEQ ID NO: 46680 - DNA, 20 bp, Artificial Sequence
  Description of Artificial Sequence: Synthetic oligonucleotide
  Target: ATXN2; (+) strand; PAM type: NRG; PAM sequence: AGG
tgtaatcccagcactttggg

SEQ ID NO: 46681 - DNA, 20 bp, Artificial Sequence
  Description of Artificial Sequence: Synthetic oligonucleotide
  Target: ATXN2; (+) strand; PAM type: NRG; PAM sequence: TGG
atcccagcactttgggaggc

SEQ ID NO: 46682 - DNA, 20 bp, Artificial Sequence
  Description of Artificial Sequence: Synthetic oligonucleotide
  Target: ATXN2; (+) strand; PAM type: NRG; PAM sequence: GGG
tcccagcactttgggaggct

SEQ ID NO: 46683 - DNA, 20 bp, Artificial Sequence
  Description of Artificial Sequence: Synthetic oligonucleotide
  Target: ATXN2; (+) strand; PAM type: NRG; PAM sequence: GGG
cccagcactttgggaggctg

SEQ ID NO: 46684 - DNA, 20 bp, Artificial Sequence
  Description of Artificial Sequence: Synthetic oligonucleotide
  Target: ATXN2; (+) strand; PAM type: NRG; PAM sequence: CAG
agcactttgggaggctgggg

SEQ ID NO: 46685 - DNA, 20 bp, Artificial Sequence
  Description of Artificial Sequence: Synthetic oligonucleotide
  Target: ATXN2; (+) strand; PAM type: NRG; PAM sequence: AGG
gcactttgggaggctggggc

SEQ ID NO: 46686 - DNA, 20 bp, Artificial Sequence
  Description of Artificial Sequence: Synthetic oligonucleotide
  Target: ATXN2; (+) strand; PAM type: NRG; PAM sequence: GAG
actttgggaggctggggcag

SEQ ID NO: 46687 - DNA, 20 bp, Artificial Sequence
  Description of Artificial Sequence: Synthetic oligonucleotide
  Target: ATXN2; (+) strand; PAM type: NRG; PAM sequence: AGG
ctttgggaggctggggcagg

SEQ ID NO: 46688 - DNA, 20 bp, Artificial Sequence
  Description of Artificial Sequence: Synthetic oligonucleotide
  Target: ATXN2; (+) strand; PAM type: NRG; PAM sequence: GAG
ctggggcaggaggatcattt

SEQ ID NO: 46689 - DNA, 20 bp, Artificial Sequence
  Description of Artificial Sequence: Synthetic oligonucleotide
  Target: ATXN2; (+) strand; PAM type: NRG; PAM sequence: AGG
tggggcaggaggatcatttg

SEQ ID NO: 46690 - DNA, 20 bp, Artificial Sequence
  Description of Artificial Sequence: Synthetic oligonucleotide
  Target: ATXN2; (+) strand; PAM type: NRG; PAM sequence: CAG
caggaggatcatttgaggcc

SEQ ID NO: 46691 - DNA, 20 bp, Artificial Sequence
  Description of Artificial Sequence: Synthetic oligonucleotide
  Target: ATXN2; (+) strand; PAM type: NRG; PAM sequence: GAG
ggaggatcatttgaggccca

SEQ ID NO: 46692 - DNA, 20 bp, Artificial Sequence
  Description of Artificial Sequence: Synthetic oligonucleotide
  Target: ATXN2; (+) strand; PAM type: NRG; PAM sequence: GAG
tcatttgaggcccagagttt

SEQ ID NO: 46693 - DNA, 20 bp, Artificial Sequence
  Description of Artificial Sequence: Synthetic oligonucleotide
  Target: ATXN2; (+) strand; PAM type: NRG; PAM sequence: CAG
tgaggcccagagtttgagac

SEQ ID NO: 46694 - DNA, 20 bp, Artificial Sequence
  Description of Artificial Sequence: Synthetic oligonucleotide
  Target: ATXN2; (+) strand; PAM type: NRG; PAM sequence: TGG
cccagagtttgagaccagcc

SEQ ID NO: 46695 - DNA, 20 bp, Artificial Sequence
  Description of Artificial Sequence: Synthetic oligonucleotide
  Target: ATXN2; (+) strand; PAM type: NRG; PAM sequence: GGG
ccagagtttgagaccagcct

SEQ ID NO: 46696 - DNA, 20 bp, Artificial Sequence
  Description of Artificial Sequence: Synthetic oligonucleotide
  Target: ATXN2; (+) strand; PAM type: NRG; PAM sequence: GAG
accagcctgggcaacataat

SEQ ID NO: 46697 - DNA, 20 bp, Artificial Sequence
  Description of Artificial Sequence: Synthetic oligonucleotide
  Target: ATXN2; (+) strand; PAM type: NRG; PAM sequence: TAG
caaaaaataacaacaaaaat

SEQ ID NO: 46698 - DNA, 20 bp, Artificial Sequence
  Description of Artificial Sequence: Synthetic oligonucleotide
  Target: ATXN2; (+) strand; PAM type: NRG; PAM sequence: CAG
aaataacaacaaaaattagc

SEQ ID NO: 46699 - DNA, 20 bp, Artificial Sequence
  Description of Artificial Sequence: Synthetic oligonucleotide
  Target: ATXN2; (+) strand; PAM type: NRG; PAM sequence: AGG
aataacaacaaaaattagcc

SEQ ID NO: 46700 - DNA, 20 bp, Artificial Sequence
  Description of Artificial Sequence: Synthetic oligonucleotide
  Target: ATXN2; (+) strand; PAM type: NRG; PAM sequence: GAG
taacaacaaaaattagccag

SEQ ID NO: 46701 - DNA, 20 bp, Artificial Sequence
  Description of Artificial Sequence: Synthetic oligonucleotide
  Target: ATXN2; (+) strand; PAM type: NRG; PAM sequence: TGG
caacaaaaattagccaggag

SEQ ID NO: 46702 - DNA, 20 bp, Artificial Sequence
  Description of Artificial Sequence: Synthetic oligonucleotide
  Target: ATXN2; (+) strand; PAM type: NRG; PAM sequence: CAG
ggagtggtgatacacatctg

SEQ ID NO: 46703 - DNA, 20 bp, Artificial Sequence
  Description of Artificial Sequence: Synthetic oligonucleotide
  Target: ATXN2; (+) strand; PAM type: NRG; PAM sequence: CAG
gtgatacacatctgcagtcc

SEQ ID NO: 46704 - DNA, 20 bp, Artificial Sequence
  Description of Artificial Sequence: Synthetic oligonucleotide
  Target: ATXN2; (+) strand; PAM type: NRG; PAM sequence: CAG
atctgcagtcccagcttaat

SEQ ID NO: 46705 - DNA, 20 bp, Artificial Sequence
  Description of Artificial Sequence: Synthetic oligonucleotide
  Target: ATXN2; (+) strand; PAM type: NRG; PAM sequence: AGG
tctgcagtcccagcttaatc

SEQ ID NO: 46706 - DNA, 20 bp, Artificial Sequence
  Description of Artificial Sequence: Synthetic oligonucleotide
  Target: ATXN2; (+) strand; PAM type: NRG; PAM sequence: GAG
tgcagtcccagcttaatcag

SEQ ID NO: 46707 - DNA, 20 bp, Artificial Sequence
  Description of Artificial Sequence: Synthetic oligonucleotide
  Target: ATXN2; (+) strand; PAM type: NRG; PAM sequence: AGG
gcagtcccagcttaatcagg

SEQ ID NO: 46708 - DNA, 20 bp, Artificial Sequence
  Description of Artificial Sequence: Synthetic oligonucleotide
  Target: ATXN2; (+) strand; PAM type: NRG; PAM sequence: AAG
cccagcttaatcaggaggct

SEQ ID NO: 46709 - DNA, 20 bp, Artificial Sequence
  Description of Artificial Sequence: Synthetic oligonucleotide
  Target: ATXN2; (+) strand; PAM type: NRG; PAM sequence: AGG
ccagcttaatcaggaggcta

SEQ ID NO: 46710 - DNA, 20 bp, Artificial Sequence
  Description of Artificial Sequence: Synthetic oligonucleotide
  Target: ATXN2; (+) strand; PAM type: NRG; PAM sequence: GAG
ggtgaatcacctgaacccat

SEQ ID NO: 46711 - DNA, 20 bp, Artificial Sequence
  Description of Artificial Sequence: Synthetic oligonucleotide
  Target: ATXN2; (+) strand; PAM type: NRG; PAM sequence: GAG
tcacctgaacccatgagttt

SEQ ID NO: 46712 - DNA, 20 bp, Artificial Sequence
  Description of Artificial Sequence: Synthetic oligonucleotide
  Target: ATXN2; (+) strand; PAM type: NRG; PAM sequence: AGG
cacctgaacccatgagtttg

SEQ ID NO: 46713 - DNA, 20 bp, Artificial Sequence
  Description of Artificial Sequence: Synthetic oligonucleotide
  Target: ATXN2; (+) strand; PAM type: NRG; PAM sequence: TGG
aacccatgagtttgaggtta

SEQ ID NO: 46714 - DNA, 20 bp, Artificial Sequence
  Description of Artificial Sequence: Synthetic oligonucleotide
  Target: ATXN2; (+) strand; PAM type: NRG; PAM sequence: GAG
catgagtttgaggttatggt

SEQ ID NO: 46715 - DNA, 20 bp, Artificial Sequence
  Description of Artificial Sequence: Synthetic oligonucleotide
  Target: ATXN2; (+) strand; PAM type: NRG; PAM sequence: TGG
gaggttatggtgagctacga

SEQ ID NO: 46716 - DNA, 20 bp, Artificial Sequence
  Description of Artificial Sequence: Synthetic oligonucleotide
  Target: ATXN2; (+) strand; PAM type: NRG; PAM sequence: CAG
acgatggcgccactgcactc

SEQ ID NO: 46717 - DNA, 20 bp, Artificial Sequence
  Description of Artificial Sequence: Synthetic oligonucleotide
  Target: ATXN2; (+) strand; PAM type: NRG; PAM sequence: TGG
ggcgccactgcactccagcc

SEQ ID NO: 46718 - DNA, 20 bp, Artificial Sequence
  Description of Artificial Sequence: Synthetic oligonucleotide
  Target: ATXN2; (+) strand; PAM type: NRG; PAM sequence: GAG
tccagcctggacaacaaaat

SEQ ID NO: 46719 - DNA, 20 bp, Artificial Sequence
  Description of Artificial Sequence: Synthetic oligonucleotide
  Target: ATXN2; (+) strand; PAM type: NRG; PAM sequence: TAG
aatgagaccctgtctcaaaa

SEQ ID NO: 46720 - DNA, 20 bp, Artificial Sequence
  Description of Artificial Sequence: Synthetic oligonucleotide
  Target: ATXN2; (+) strand; PAM type: NRG; PAM sequence: AAG
gagaccctgtctcaaaatag

SEQ ID NO: 46721 - DNA, 20 bp, Artificial Sequence
  Description of Artificial Sequence: Synthetic oligonucleotide
  Target: ATXN2; (+) strand; PAM type: NRG; PAM sequence: TAG
aaatgaatgattaaattttc

SEQ ID NO: 46722 - DNA, 20 bp, Artificial Sequence
  Description of Artificial Sequence: Synthetic oligonucleotide
  Target: ATXN2; (+) strand; PAM type: NRG; PAM sequence: AAG
aattttctagcactacgata

SEQ ID NO: 46723 - DNA, 20 bp, Artificial Sequence
  Description of Artificial Sequence: Synthetic oligonucleotide
  Target: ATXN2; (+) strand; PAM type: NRG; PAM sequence: GAG
ttctagcactacgataaagt

SEQ ID NO: 46724 - DNA, 20 bp, Artificial Sequence
  Description of Artificial Sequence: Synthetic oligonucleotide
  Target: ATXN2; (+) strand; PAM type: NRG; PAM sequence: TAG
tacgataaagtgagataaaa

SEQ ID NO: 46725 - DNA, 20 bp, Artificial Sequence
  Description of Artificial Sequence: Synthetic oligonucleotide
  Target: ATXN2; (+) strand; PAM type: NRG; PAM sequence: AAG
aaaatagaaaaaaaatccct

SEQ ID NO: 46726 - DNA, 20 bp, Artificial Sequence
  Description of Artificial Sequence: Synthetic oligonucleotide
  Target: ATXN2; (+) strand; PAM type: NRG; PAM sequence: GAG
aatagaaaaaaaatccctaa

SEQ ID NO: 46727 - DNA, 20 bp, Artificial Sequence
  Description of Artificial Sequence: Synthetic oligonucleotide
  Target: ATXN2; (+) strand; PAM type: NRG; PAM sequence: AAG
gagaaaaatatatcctattt

SEQ ID NO: 46728 - DNA, 20 bp, Artificial Sequence
  Description of Artificial Sequence: Synthetic oligonucleotide
  Target: ATXN2; (+) strand; PAM type: NRG; PAM sequence: AAG
tatcctatttaagtaataaa

SEQ ID NO: 46729 - DNA, 20 bp, Artificial Sequence
  Description of Artificial Sequence: Synthetic oligonucleotide
  Target: ATXN2; (+) strand; PAM type: NRG; PAM sequence: CAG
cctatttaagtaataaaaag

SEQ ID NO: 46730 - DNA, 20 bp, Artificial Sequence
  Description of Artificial Sequence: Synthetic oligonucleotide
  Target: ATXN2; (+) strand; PAM type: NRG; PAM sequence: GAG
tactaatacattctgtttgt

SEQ ID NO: 46731 - DNA, 20 bp, Artificial Sequence
  Description of Artificial Sequence: Synthetic oligonucleotide
  Target: ATXN2; (+) strand; PAM type: NRG; PAM sequence: GAG
ctaatacattctgtttgtga

SEQ ID NO: 46732 - DNA, 20 bp, Artificial Sequence
  Description of Artificial Sequence: Synthetic oligonucleotide
  Target: ATXN2; (+) strand; PAM type: NRG; PAM sequence: AGG
taatacattctgtttgtgag

SEQ ID NO: 46733 - DNA, 20 bp, Artificial Sequence
  Description of Artificial Sequence: Synthetic oligonucleotide
  Target: ATXN2; (+) strand; PAM type: NRG; PAM sequence: TGG
tgtttgtgagaggtacaaat

SEQ ID NO: 46734 - DNA, 20 bp, Artificial Sequence
  Description of Artificial Sequence: Synthetic oligonucleotide
  Target: ATXN2; (+) strand; PAM type: NRG; PAM sequence: CAG
gaggtacaaattggattctt

SEQ ID NO: 46735 - DNA, 20 bp, Artificial Sequence
  Description of Artificial Sequence: Synthetic oligonucleotide
  Target: ATXN2; (+) strand; PAM type: NRG; PAM sequence: AAG
ggattcttcagttaaaattc

SEQ ID NO: 46736 - DNA, 20 bp, Artificial Sequence
  Description of Artificial Sequence: Synthetic oligonucleotide
  Target: ATXN2; (+) strand; PAM type: NRG; PAM sequence: AGG
gattcttcagttaaaattca

SEQ ID NO: 46737 - DNA, 20 bp, Artificial Sequence
  Description of Artificial Sequence: Synthetic oligonucleotide
  Target: ATXN2; (+) strand; PAM type: NRG; PAM sequence: GGG
attcttcagttaaaattcaa

SEQ ID NO: 46738 - DNA, 20 bp, Artificial Sequence
  Description of Artificial Sequence: Synthetic oligonucleotide
  Target: ATXN2; (+) strand; PAM type: NRG; PAM sequence: AAG
attcaagggaaaacatttat

SEQ ID NO: 46739 - DNA, 20 bp, Artificial Sequence
  Description of Artificial Sequence: Synthetic oligonucleotide
  Target: ATXN2; (+) strand; PAM type: NRG; PAM sequence: TAG
taagataaaatacatcatct

SEQ ID NO: 46740 - DNA, 20 bp, Artificial Sequence
  Description of Artificial Sequence: Synthetic oligonucleotide
  Target: ATXN2; (+) strand; PAM type: NRG; PAM sequence: AAG
tacatcatcttagtttgact

SEQ ID NO: 46741 - DNA, 20 bp, Artificial Sequence
  Description of Artificial Sequence: Synthetic oligonucleotide
  Target: ATXN2; (+) strand; PAM type: NRG; PAM sequence: AAG
tttgactaagcccattaaat

SEQ ID NO: 46742 - DNA, 20 bp, Artificial Sequence
  Description of Artificial Sequence: Synthetic oligonucleotide
  Target: ATXN2; (+) strand; PAM type: NRG; PAM sequence: AAG
aagcccattaaataagataa

SEQ ID NO: 46743 - DNA, 20 bp, Artificial Sequence
  Description of Artificial Sequence: Synthetic oligonucleotide
  Target: ATXN2; (+) strand; PAM type: NRG; PAM sequence: AGG
agcccattaaataagataaa

SEQ ID NO: 46744 - DNA, 20 bp, Artificial Sequence
  Description of Artificial Sequence: Synthetic oligonucleotide
  Target: ATXN2; (+) strand; PAM type: NRG; PAM sequence: TAG
aagataaaaggcactgcaat

SEQ ID NO: 46745 - DNA, 20 bp, Artificial Sequence
  Description of Artificial Sequence: Synthetic oligonucleotide
  Target: ATXN2; (+) strand; PAM type: NRG; PAM sequence: CAG
aacctttttttttttgaaac

SEQ ID NO: 46746 - DNA, 20 bp, Artificial Sequence
  Description of Artificial Sequence: Synthetic oligonucleotide
  Target: ATXN2; (+) strand; PAM type: NRG; PAM sequence: AGG
acctttttttttttgaaacc

SEQ ID NO: 46747 - DNA, 20 bp, Artificial Sequence
  Description of Artificial Sequence: Synthetic oligonucleotide
  Target: ATXN2; (+) strand; PAM type: NRG; PAM sequence: GGG
cctttttttttttgaaacca

SEQ ID NO: 46748 - DNA, 20 bp, Artificial Sequence
  Description of Artificial Sequence: Synthetic oligonucleotide
  Target: ATXN2; (+) strand; PAM type: NRG; PAM sequence: TGG
tttgaaaccagggtctcact

SEQ ID NO: 46749 - DNA, 20 bp, Artificial Sequence
  Description of Artificial Sequence: Synthetic oligonucleotide
  Target: ATXN2; (+) strand; PAM type: NRG; PAM sequence: CAG
gggtctcacttggctcactg

SEQ ID NO: 46750 - DNA, 20 bp, Artificial Sequence
  Description of Artificial Sequence: Synthetic oligonucleotide
  Target: ATXN2; (+) strand; PAM type: NRG; PAM sequence: CAG
agcctcaatctccctgcgct

SEQ ID NO: 46751 - DNA, 20 bp, Artificial Sequence
  Description of Artificial Sequence: Synthetic oligonucleotide
  Target: ATXN2; (+) strand; PAM type: NRG; PAM sequence: TAG
tctcacctctgccacccgaa

SEQ ID NO: 46752 - DNA, 20 bp, Artificial Sequence
  Description of Artificial Sequence: Synthetic oligonucleotide
  Target: ATXN2; (+) strand; PAM type: NRG; PAM sequence: TGG
acctctgccacccgaatagc

SEQ ID NO: 46753 - DNA, 20 bp, Artificial Sequence
  Description of Artificial Sequence: Synthetic oligonucleotide
  Target: ATXN2; (+) strand; PAM type: NRG; PAM sequence: GGG
cctctgccacccgaatagct

SEQ ID NO: 46754 - DNA, 20 bp, Artificial Sequence
  Description of Artificial Sequence: Synthetic oligonucleotide
  Target: ATXN2; (+) strand; PAM type: NRG; PAM sequence: CAG
cacccgaatagctgggacta

SEQ ID NO: 46755 - DNA, 20 bp, Artificial Sequence
  Description of Artificial Sequence: Synthetic oligonucleotide
  Target: ATXN2; (+) strand; PAM type: NRG; PAM sequence: AGG
acccgaatagctgggactac

SEQ ID NO: 46756 - DNA, 20 bp, Artificial Sequence
  Description of Artificial Sequence: Synthetic oligonucleotide
  Target: ATXN2; (+) strand; PAM type: NRG; PAM sequence: TGG
caggtacataccaccgtgtc

SEQ ID NO: 46757 - DNA, 20 bp, Artificial Sequence
  Description of Artificial Sequence: Synthetic oligonucleotide
  Target: ATXN2; (+) strand; PAM type: NRG; PAM sequence: TAG
tactttttgtattttttttg

SEQ ID NO: 46758 - DNA, 20 bp, Artificial Sequence
  Description of Artificial Sequence: Synthetic oligonucleotide
  Target: ATXN2; (+) strand; PAM type: NRG; PAM sequence: CGG
ttgtattttttttgtagaaa

SEQ ID NO: 46759 - DNA, 20 bp, Artificial Sequence
  Description of Artificial Sequence: Synthetic oligonucleotide
  Target: ATXN2; (+) strand; PAM type: NRG; PAM sequence: GGG
tgtattttttttgtagaaac

SEQ ID NO: 46760 - DNA, 20 bp, Artificial Sequence
  Description of Artificial Sequence: Synthetic oligonucleotide
  Target: ATXN2; (+) strand; PAM type: NRG; PAM sequence: GGG
gtattttttttgtagaaacg

SEQ ID NO: 46761 - DNA, 20 bp, Artificial Sequence
  Description of Artificial Sequence: Synthetic oligonucleotide
  Target: ATXN2; (+) strand; PAM type: NRG; PAM sequence: CAG
cggggttccaccatattgcc

SEQ ID NO: 46762 - DNA, 20 bp, Artificial Sequence
  Description of Artificial Sequence: Synthetic oligonucleotide
  Target: ATXN2; (+) strand; PAM type: NRG; PAM sequence: AGG
ggggttccaccatattgccc

SEQ ID NO: 46763 - DNA, 20 bp, Artificial Sequence
  Description of Artificial Sequence: Synthetic oligonucleotide
  Target: ATXN2; (+) strand; PAM type: NRG; PAM sequence: TGG
ttccaccatattgcccaggc

SEQ ID NO: 46764 - DNA, 20 bp, Artificial Sequence
  Description of Artificial Sequence: Synthetic oligonucleotide
  Target: ATXN2; (+) strand; PAM type: NRG; PAM sequence: TGG
ccaggctggtcttgaactac

SEQ ID NO: 46765 - DNA, 20 bp, Artificial Sequence
  Description of Artificial Sequence: Synthetic oligonucleotide
  Target: ATXN2; (+) strand; PAM type: NRG; PAM sequence: GGG
caggctggtcttgaactact

SEQ ID NO: 46766 - DNA, 20 bp, Artificial Sequence
  Description of Artificial Sequence: Synthetic oligonucleotide
  Target: ATXN2; (+) strand; PAM type: NRG; PAM sequence: AAG
ggtcttgaactactgggctc

SEQ ID NO: 46767 - DNA, 20 bp, Artificial Sequence
  Description of Artificial Sequence: Synthetic oligonucleotide
  Target: ATXN2; (+) strand; PAM type: NRG; PAM sequence: TGG
ctcaagcaattcatctgcct

SEQ ID NO: 46768 - DNA, 20 bp, Artificial Sequence
  Description of Artificial Sequence: Synthetic oligonucleotide
  Target: ATXN2; (+) strand; PAM type: NRG; PAM sequence: AAG
tcatctgccttggcctccca

SEQ ID NO: 46769 - DNA, 20 bp, Artificial Sequence
  Description of Artificial Sequence: Synthetic oligonucleotide
  Target: ATXN2; (+) strand; PAM type: NRG; PAM sequence: GAG
ccttggcctcccaaagtgct

SEQ ID NO: 46770 - DNA, 20 bp, Artificial Sequence
  Description of Artificial Sequence: Synthetic oligonucleotide
  Target: ATXN2; (+) strand; PAM type: NRG; PAM sequence: CAG
ctcccaaagtgctgagatta

SEQ ID NO: 46771 - DNA, 20 bp, Artificial Sequence
  Description of Artificial Sequence: Synthetic oligonucleotide
  Target: ATXN2; (+) strand; PAM type: NRG; PAM sequence: AGG
tcccaaagtgctgagattac

SEQ ID NO: 46772 - DNA, 20 bp, Artificial Sequence
  Description of Artificial Sequence: Synthetic oligonucleotide
  Target: ATXN2; (+) strand; PAM type: NRG; PAM sequence: GAG
agtgctgagattacaggaat

SEQ ID NO: 46773 - DNA, 20 bp, Artificial Sequence
  Description of Artificial Sequence: Synthetic oligonucleotide
  Target: ATXN2; (+) strand; PAM type: NRG; PAM sequence: CAG
caggaatgagccactgtacc

SEQ ID NO: 46774 - DNA, 20 bp, Artificial Sequence
  Description of Artificial Sequence: Synthetic oligonucleotide
  Target: ATXN2; (+) strand; PAM type: NRG; PAM sequence: CAG
aatgagccactgtacccagc

SEQ ID NO: 46775 - DNA, 20 bp, Artificial Sequence
  Description of Artificial Sequence: Synthetic oligonucleotide
  Target: ATXN2; (+) strand; PAM type: NRG; PAM sequence: AAG
ccagtaattttatgttttta

SEQ ID NO: 46776 - DNA, 20 bp, Artificial Sequence
  Description of Artificial Sequence: Synthetic oligonucleotide
  Target: ATXN2; (+) strand; PAM type: NRG; PAM sequence: AAG
gtttttaaagcaattttctt

SEQ ID NO: 46777 - DNA, 20 bp, Artificial Sequence
  Description of Artificial Sequence: Synthetic oligonucleotide
  Target: ATXN2; (+) strand; PAM type: NRG; PAM sequence: TAG
aattttcttaagctctaaat

SEQ ID NO: 46778 - DNA, 20 bp, Artificial Sequence
  Description of Artificial Sequence: Synthetic oligonucleotide
  Target: ATXN2; (+) strand; PAM type: NRG; PAM sequence: TAG
aatttgaactgaaaattgtt

SEQ ID NO: 46779 - DNA, 20 bp, Artificial Sequence
  Description of Artificial Sequence: Synthetic oligonucleotide
  Target: ATXN2; (+) strand; PAM type: NRG; PAM sequence: TGG
aactgaaaattgtttagaaa

SEQ ID NO: 46780 - DNA, 20 bp, Artificial Sequence
  Description of Artificial Sequence: Synthetic oligonucleotide
  Target: ATXN2; (+) strand; PAM type: NRG; PAM sequence: CAG
aaattgtttagaaatggtat

SEQ ID NO: 46781 - DNA, 20 bp, Artificial Sequence
  Description of Artificial Sequence: Synthetic oligonucleotide
  Target: ATXN2; (+) strand; PAM type: NRG; PAM sequence: TGG
agaaatggtatcagttaaaa

SEQ ID NO: 46782 - DNA, 20 bp, Artificial Sequence
  Description of Artificial Sequence: Synthetic oligonucleotide
  Target: ATXN2; (+) strand; PAM type: NRG; PAM sequence: CAG
aaaaactcaaacttactaat

SEQ ID NO: 46783 - DNA, 20 bp, Artificial Sequence
  Description of Artificial Sequence: Synthetic oligonucleotide
  Target: ATXN2; (+) strand; PAM type: NRG; PAM sequence: AAG
tactaatcagattcctctga

SEQ ID NO: 46784 - DNA, 20 bp, Artificial Sequence
  Description of Artificial Sequence: Synthetic oligonucleotide
  Target: ATXN2; (+) strand; PAM type: NRG; PAM sequence: GAG
atcagattcctctgaaagct

SEQ ID NO: 46785 - DNA, 20 bp, Artificial Sequence
  Description of Artificial Sequence: Synthetic oligonucleotide
  Target: ATXN2; (+) strand; PAM type: NRG; PAM sequence: AAG
attcctctgaaagctgagtg

SEQ ID NO: 46786 - DNA, 20 bp, Artificial Sequence
  Description of Artificial Sequence: Synthetic oligonucleotide
  Target: ATXN2; (+) strand; PAM type: NRG; PAM sequence: TAG
gaaagctgagtgaagatcaa

SEQ ID NO: 46787 - DNA, 20 bp, Artificial Sequence
  Description of Artificial Sequence: Synthetic oligonucleotide
  Target: ATXN2; (+) strand; PAM type: NRG; PAM sequence: CAG
gatcaatagcccatgctcta

SEQ ID NO: 46788 - DNA, 20 bp, Artificial Sequence
  Description of Artificial Sequence: Synthetic oligonucleotide
  Target: ATXN2; (+) strand; PAM type: NRG; PAM sequence: CAG
caaatatacatcaaattcta

SEQ ID NO: 46789 - DNA, 20 bp, Artificial Sequence
  Description of Artificial Sequence: Synthetic oligonucleotide
  Target: ATXN2; (+) strand; PAM type: NRG; PAM sequence: AAG
atacatcaaattctacagca

SEQ ID NO: 46790 - DNA, 20 bp, Artificial Sequence
  Description of Artificial Sequence: Synthetic oligonucleotide
  Target: ATXN2; (+) strand; PAM type: NRG; PAM sequence: GAG
caaattctacagcaaagcct

SEQ ID NO: 46791 - DNA, 20 bp, Artificial Sequence
  Description of Artificial Sequence: Synthetic oligonucleotide
  Target: ATXN2; (+) strand; PAM type: NRG; PAM sequence: TGG
attctacagcaaagcctgag

SEQ ID NO: 46792 - DNA, 20 bp, Artificial Sequence
  Description of Artificial Sequence: Synthetic oligonucleotide
  Target: ATXN2; (+) strand; PAM type: NRG; PAM sequence: AAG
ctgagtggtgcaaaactaac

SEQ ID NO: 46793 - DNA, 20 bp, Artificial Sequence
  Description of Artificial Sequence: Synthetic oligonucleotide
  Target: ATXN2; (+) strand; PAM type: NRG; PAM sequence: AAG
ggtgcaaaactaacaagaac

SEQ ID NO: 46794 - DNA, 20 bp, Artificial Sequence
  Description of Artificial Sequence: Synthetic oligonucleotide
  Target: ATXN2; (+) strand; PAM type: NRG; PAM sequence: TGG
aacaagaacaagaaaaaata

SEQ ID NO: 46795 - DNA, 20 bp, Artificial Sequence
  Description of Artificial Sequence: Synthetic oligonucleotide
  Target: ATXN2; (+) strand; PAM type: NRG; PAM sequence: GAG
aatatggaaattcacttcat

SEQ ID NO: 46796 - DNA, 20 bp, Artificial Sequence
  Description of Artificial Sequence: Synthetic oligonucleotide
  Target: ATXN2; (+) strand; PAM type: NRG; PAM sequence: AGG
atatggaaattcacttcatg

SEQ ID NO: 46797 - DNA, 20 bp, Artificial Sequence
  Description of Artificial Sequence: Synthetic oligonucleotide
  Target: ATXN2; (+) strand; PAM type: NRG; PAM sequence: AAG
tttgctgtatttaaaaaaac

SEQ ID NO: 46798 - DNA, 20 bp, Artificial Sequence
  Description of Artificial Sequence: Synthetic oligonucleotide
  Target: ATXN2; (+) strand; PAM type: NRG; PAM sequence: AGG
ttgctgtatttaaaaaaaca

SEQ ID NO: 46799 - DNA, 20 bp, Artificial Sequence
  Description of Artificial Sequence: Synthetic oligonucleotide
  Target: ATXN2; (+) strand; PAM type: NRG; PAM sequence: CAG
tatttaaaaaaacaaggtga

SEQ ID NO: 46800 - DNA, 20 bp, Artificial Sequence
  Description of Artificial Sequence: Synthetic oligonucleotide
  Target: ATXN2; (+) strand; PAM type: NRG; PAM sequence: TAG
agattccacgtacgtaatac

SEQ ID NO: 46801 - DNA, 20 bp, Artificial Sequence
  Description of Artificial Sequence: Synthetic oligonucleotide
  Target: ATXN2; (+) strand; PAM type: NRG; PAM sequence: AAG
ttcccacactatctcctaaa

SEQ ID NO: 46802 - DNA, 20 bp, Artificial Sequence
  Description of Artificial Sequence: Synthetic oligonucleotide
  Target: ATXN2; (+) strand; PAM type: NRG; PAM sequence: AAG
ctatctcctaaaaagatcaa

SEQ ID NO: 46803 - DNA, 20 bp, Artificial Sequence
  Description of Artificial Sequence: Synthetic oligonucleotide
  Target: ATXN2; (+) strand; PAM type: NRG; PAM sequence: AAG
tctcctaaaaagatcaaaag

SEQ ID NO: 46804 - DNA, 20 bp, Artificial Sequence
  Description of Artificial Sequence: Synthetic oligonucleotide
  Target: ATXN2; (+) strand; PAM type: NRG; PAM sequence: TAG
aaaaagatcaaaagaagttt

SEQ ID NO: 46805 - DNA, 20 bp, Artificial Sequence
  Description of Artificial Sequence: Synthetic oligonucleotide
  Target: ATXN2; (+) strand; PAM type: NRG; PAM sequence: AAG
gatcaaaagaagttttagaa

SEQ ID NO: 46806 - DNA, 20 bp, Artificial Sequence
  Description of Artificial Sequence: Synthetic oligonucleotide
  Target: ATXN2; (+) strand; PAM type: NRG; PAM sequence: AAG
ttagaaaagattccaataca

SEQ ID NO: 46807 - DNA, 20 bp, Artificial Sequence
  Description of Artificial Sequence: Synthetic oligonucleotide
  Target: ATXN2; (+) strand; PAM type: NRG; PAM sequence: TGG
caatacaaagatactgttta

SEQ ID NO: 46808 - DNA, 20 bp, Artificial Sequence
  Description of Artificial Sequence: Synthetic oligonucleotide
  Target: ATXN2; (+) strand; PAM type: NRG; PAM sequence: GGG
aatacaaagatactgtttat

SEQ ID NO: 46809 - DNA, 20 bp, Artificial Sequence
  Description of Artificial Sequence: Synthetic oligonucleotide
  Target: ATXN2; (+) strand; PAM type: NRG; PAM sequence: TAG
tctgttttcattttctccat

SEQ ID NO: 46810 - DNA, 20 bp, Artificial Sequence
  Description of Artificial Sequence: Synthetic oligonucleotide
  Target: ATXN2; (+) strand; PAM type: NRG; PAM sequence: AGG
ctgttttcattttctccatt

SEQ ID NO: 46811 - DNA, 20 bp, Artificial Sequence
  Description of Artificial Sequence: Synthetic oligonucleotide
  Target: ATXN2; (+) strand; PAM type: NRG; PAM sequence: TGG
cattttctccattaggcttc

SEQ ID NO: 46812 - DNA, 20 bp, Artificial Sequence
  Description of Artificial Sequence: Synthetic oligonucleotide
  Target: ATXN2; (+) strand; PAM type: NRG; PAM sequence: CAG
tctccattaggcttctggat

SEQ ID NO: 46813 - DNA, 20 bp, Artificial Sequence
  Description of Artificial Sequence: Synthetic oligonucleotide
  Target: ATXN2; (+) strand; PAM type: NRG; PAM sequence: AGG
ctccattaggcttctggatc

SEQ ID NO: 46814 - DNA, 20 bp, Artificial Sequence
  Description of Artificial Sequence: Synthetic oligonucleotide
  Target: ATXN2; (+) strand; PAM type: NRG; PAM sequence: AAG
tctggatcaggatctatttt

SEQ ID NO: 46815 - DNA, 20 bp, Artificial Sequence
  Description of Artificial Sequence: Synthetic oligonucleotide
  Target: ATXN2; (+) strand; PAM type: NRG; PAM sequence: TGG
ggatcaggatctattttaag

SEQ ID NO: 46816 - DNA, 20 bp, Artificial Sequence
  Description of Artificial Sequence: Synthetic oligonucleotide
  Target: ATXN2; (+) strand; PAM type: NRG; PAM sequence: GGG
gatcaggatctattttaagt

SEQ ID NO: 46817 - DNA, 20 bp, Artificial Sequence
  Description of Artificial Sequence: Synthetic oligonucleotide
  Target: ATXN2; (+) strand; PAM type: NRG; PAM sequence: GGG
atcaggatctattttaagtg

SEQ ID NO: 46818 - DNA, 20 bp, Artificial Sequence
  Description of Artificial Sequence: Synthetic oligonucleotide
  Target: ATXN2; (+) strand; PAM type: NRG; PAM sequence: GAG
caggatctattttaagtggg

SEQ ID NO: 46819 - DNA, 20 bp, Artificial Sequence
  Description of Artificial Sequence: Synthetic oligonucleotide
  Target: ATXN2; (+) strand; PAM type: NRG; PAM sequence: AGG
aggatctattttaagtgggg

SEQ ID NO: 46820 - DNA, 20 bp, Artificial Sequence
  Description of Artificial Sequence: Synthetic oligonucleotide
  Target: ATXN2; (+) strand; PAM type: NRG; PAM sequence: GAG
gatctattttaagtggggag

SEQ ID NO: 46821 - DNA, 20 bp, Artificial Sequence
  Description of Artificial Sequence: Synthetic oligonucleotide
  Target: ATXN2; (+) strand; PAM type: NRG; PAM sequence: AGG
atctattttaagtggggagg

SEQ ID NO: 46822 - DNA, 20 bp, Artificial Sequence
  Description of Artificial Sequence: Synthetic oligonucleotide
  Target: ATXN2; (+) strand; PAM type: NRG; PAM sequence: GAG
ctattttaagtggggaggag

SEQ ID NO: 46823 - DNA, 20 bp, Artificial Sequence
  Description of Artificial Sequence: Synthetic oligonucleotide
  Target: ATXN2; (+) strand; PAM type: NRG; PAM sequence: AGG
tattttaagtggggaggagg

SEQ ID NO: 46824 - DNA, 20 bp, Artificial Sequence
  Description of Artificial Sequence: Synthetic oligonucleotide
  Target: ATXN2; (+) strand; PAM type: NRG; PAM sequence: AAG
taagtggggaggaggaggaa

SEQ ID NO: 46825 - DNA, 20 bp, Artificial Sequence
  Description of Artificial Sequence: Synthetic oligonucleotide
  Target: ATXN2; (+) strand; PAM type: NRG; PAM sequence: TAG
tggggaggaggaggaaaagc

SEQ ID NO: 46826 - DNA, 20 bp, Artificial Sequence
  Description of Artificial Sequence: Synthetic oligonucleotide
  Target: ATXN2; (+) strand; PAM type: NRG; PAM sequence: AAG
aggaaaagctagctacctga

SEQ ID NO: 46827 - DNA, 20 bp, Artificial Sequence
  Description of Artificial Sequence: Synthetic oligonucleotide
  Target: ATXN2; (+) strand; PAM type: NRG; PAM sequence: TAG
gccatctcaaaatatgaaat

SEQ ID NO: 46828 - DNA, 20 bp, Artificial Sequence
  Description of Artificial Sequence: Synthetic oligonucleotide
  Target: ATXN2; (+) strand; PAM type: NRG; PAM sequence: TAG
ctcaaaatatgaaattagcc

SEQ ID NO: 46829 - DNA, 20 bp, Artificial Sequence
  Description of Artificial Sequence: Synthetic oligonucleotide
  Target: ATXN2; (+) strand; PAM type: NRG; PAM sequence: AGG
tcaaaatatgaaattagcct

SEQ ID NO: 46830 - DNA, 20 bp, Artificial Sequence
  Description of Artificial Sequence: Synthetic oligonucleotide
  Target: ATXN2; (+) strand; PAM type: NRG; PAM sequence: TGG
atatgaaattagcctaggcc

SEQ ID NO: 46831 - DNA, 20 bp, Artificial Sequence
  Description of Artificial Sequence: Synthetic oligonucleotide
  Target: ATXN2; (+) strand; PAM type: NRG; PAM sequence: TAG
ttagcctaggcctggtgtga

SEQ ID NO: 46832 - DNA, 20 bp, Artificial Sequence
  Description of Artificial Sequence: Synthetic oligonucleotide
  Target: ATXN2; (+) strand; PAM type: NRG; PAM sequence: AAG
taggcctggtgtgatagctt

SEQ ID NO: 46833 - DNA, 20 bp, Artificial Sequence
  Description of Artificial Sequence: Synthetic oligonucleotide
  Target: ATXN2; (+) strand; PAM type: NRG; PAM sequence: GAG
atagcttaagcctgtaatcc

SEQ ID NO: 46834 - DNA, 20 bp, Artificial Sequence
  Description of Artificial Sequence: Synthetic oligonucleotide
  Target: ATXN2; (+) strand; PAM type: NRG; PAM sequence: TGG
agcctgtaatccgagcactt

SEQ ID NO: 46835 - DNA, 20 bp, Artificial Sequence
  Description of Artificial Sequence: Synthetic oligonucleotide
  Target: ATXN2; (+) strand; PAM type: NRG; PAM sequence: GGG
gcctgtaatccgagcacttt

SEQ ID NO: 46836 - DNA, 20 bp, Artificial Sequence
  Description of Artificial Sequence: Synthetic oligonucleotide
  Target: ATXN2; (+) strand; PAM type: NRG; PAM sequence: GAG
ctgtaatccgagcactttgg

SEQ ID NO: 46837 - DNA, 20 bp, Artificial Sequence
  Description of Artificial Sequence: Synthetic oligonucleotide
  Target: ATXN2; (+) strand; PAM type: NRG; PAM sequence: AGG
tgtaatccgagcactttggg

SEQ ID NO: 46838 - DNA, 20 bp, Artificial Sequence
  Description of Artificial Sequence: Synthetic oligonucleotide
  Target: ATXN2; (+) strand; PAM type: NRG; PAM sequence: GAG
tccgagcactttgggaggct

SEQ ID NO: 46839 - DNA, 20 bp, Artificial Sequence
  Description of Artificial Sequence: Synthetic oligonucleotide
  Target: ATXN2; (+) strand; PAM type: NRG; PAM sequence: AGG
ccgagcactttgggaggctg

SEQ ID NO: 46840 - DNA, 20 bp, Artificial Sequence
  Description of Artificial Sequence: Synthetic oligonucleotide
  Target: ATXN2; (+) strand; PAM type: NRG; PAM sequence: AAG
cactttgggaggctgaggca

SEQ ID NO: 46841 - DNA, 20 bp, Artificial Sequence
  Description of Artificial Sequence: Synthetic oligonucleotide
  Target: ATXN2; (+) strand; PAM type: NRG; PAM sequence: GAG
ctttgggaggctgaggcaaa

SEQ ID NO: 46842 - DNA, 20 bp, Artificial Sequence
  Description of Artificial Sequence: Synthetic oligonucleotide
  Target: ATXN2; (+) strand; PAM type: NRG; PAM sequence: AGG
tttgggaggctgaggcaaag

SEQ ID NO: 46843 - DNA, 20 bp, Artificial Sequence
  Description of Artificial Sequence: Synthetic oligonucleotide
  Target: ATXN2; (+) strand; PAM type: NRG; PAM sequence: TGG
ctgaggcaaagaggattgct

SEQ ID NO: 46844 - DNA, 20 bp, Artificial Sequence
  Description of Artificial Sequence: Synthetic oligonucleotide
  Target: ATXN2; (+) strand; PAM type: NRG; PAM sequence: GGG
tgaggcaaagaggattgctt

SEQ ID NO: 46845 - DNA, 20 bp, Artificial Sequence
  Description of Artificial Sequence: Synthetic oligonucleotide
  Target: ATXN2; (+) strand; PAM type: NRG; PAM sequence: CAG
caaagaggattgcttgggct

SEQ ID NO: 46846 - DNA, 20 bp, Artificial Sequence
  Description of Artificial Sequence: Synthetic oligonucleotide
  Target: ATXN2; (+) strand; PAM type: NRG; PAM sequence: AGG
aaagaggattgcttgggctc

SEQ ID NO: 46847 - DNA, 20 bp, Artificial Sequence
  Description of Artificial Sequence: Synthetic oligonucleotide
  Target: ATXN2; (+) strand; PAM type: NRG; PAM sequence: GAG
agaggattgcttgggctcag

SEQ ID NO: 46848 - DNA, 20 bp, Artificial Sequence
  Description of Artificial Sequence: Synthetic oligonucleotide
  Target: ATXN2; (+) strand; PAM type: NRG; PAM sequence: AAG
ttgcttgggctcaggagttc

SEQ ID NO: 46849 - DNA, 20 bp, Artificial Sequence
  Description of Artificial Sequence: Synthetic oligonucleotide
  Target: ATXN2; (+) strand; PAM type: NRG; PAM sequence: CAG
ttgggctcaggagttcaaga

SEQ ID NO: 46850 - DNA, 20 bp, Artificial Sequence
  Description of Artificial Sequence: Synthetic oligonucleotide
  Target: ATXN2; (+) strand; PAM type: NRG; PAM sequence: TGG
ctcaggagttcaagacagcc

SEQ ID NO: 46851 - DNA, 20 bp, Artificial Sequence
  Description of Artificial Sequence: Synthetic oligonucleotide
  Target: ATXN2; (+) strand; PAM type: NRG; PAM sequence: GGG
tcaggagttcaagacagcct

SEQ ID NO: 46852 - DNA, 20 bp, Artificial Sequence
  Description of Artificial Sequence: Synthetic oligonucleotide
  Target: ATXN2; (+) strand; PAM type: NRG; PAM sequence: TAG
tcaagacagcctgggcaaca

SEQ ID NO: 46853 - DNA, 20 bp, Artificial Sequence
  Description of Artificial Sequence: Synthetic oligonucleotide
  Target: ATXN2; (+) strand; PAM type: NRG; PAM sequence: TGG
agacagcctgggcaacatag

SEQ ID NO: 46854 - DNA, 20 bp, Artificial Sequence
  Description of Artificial Sequence: Synthetic oligonucleotide
  Target: ATXN2; (+) strand; PAM type: NRG; PAM sequence: GGG
gacagcctgggcaacatagt

SEQ ID NO: 46855 - DNA, 20 bp, Artificial Sequence
  Description of Artificial Sequence: Synthetic oligonucleotide
  Target: ATXN2; (+) strand; PAM type: NRG; PAM sequence: AAG
gacctcgtctctacttaaaa

SEQ ID NO: 46856 - DNA, 20 bp, Artificial Sequence
  Description of Artificial Sequence: Synthetic oligonucleotide
  Target: ATXN2; (+) strand; PAM type: NRG; PAM sequence: AAG
taaaaaagaaaaattctaaa

SEQ ID NO: 46857 - DNA, 20 bp, Artificial Sequence
  Description of Artificial Sequence: Synthetic oligonucleotide
  Target: ATXN2; (+) strand; PAM type: NRG; PAM sequence: GAG
aaaaagaaaaattctaaaaa

SEQ ID NO: 46858 - DNA, 20 bp, Artificial Sequence
  Description of Artificial Sequence: Synthetic oligonucleotide
  Target: ATXN2; (+) strand; PAM type: NRG; PAM sequence: GAG
aaagaaaaattctaaaaaga

SEQ ID NO: 46859 - DNA, 20 bp, Artificial Sequence
  Description of Artificial Sequence: Synthetic oligonucleotide
  Target: ATXN2; (+) strand; PAM type: NRG; PAM sequence: AAG
aaattctaaaaagagagtga

SEQ ID NO: 46860 - DNA, 20 bp, Artificial Sequence
  Description of Artificial Sequence: Synthetic oligonucleotide
  Target: ATXN2; (+) strand; PAM type: NRG; PAM sequence: GAG
attctaaaaagagagtgaaa

SEQ ID NO: 46861 - DNA, 20 bp, Artificial Sequence
  Description of Artificial Sequence: Synthetic oligonucleotide
  Target: ATXN2; (+) strand; PAM type: NRG; PAM sequence: CAG
taaaaagagagtgaaagaga

SEQ ID NO: 46862 - DNA, 20 bp, Artificial Sequence
  Description of Artificial Sequence: Synthetic oligonucleotide
  Target: ATXN2; (+) strand; PAM type: NRG; PAM sequence: GAG
aaaagagagtgaaagagaca

SEQ ID NO: 46863 - DNA, 20 bp, Artificial Sequence
  Description of Artificial Sequence: Synthetic oligonucleotide
  Target: ATXN2; (+) strand; PAM type: NRG; PAM sequence: GAG
aagagagtgaaagagacaga

SEQ ID NO: 46864 - DNA, 20 bp, Artificial Sequence
  Description of Artificial Sequence: Synthetic oligonucleotide
  Target: ATXN2; (+) strand; PAM type: NRG; PAM sequence: AAG
gagtgaaagagacagagaga

SEQ ID NO: 46865 - DNA, 20 bp, Artificial Sequence
  Description of Artificial Sequence: Synthetic oligonucleotide
  Target: ATXN2; (+) strand; PAM type: NRG; PAM sequence: GAG
gtgaaagagacagagagaaa

SEQ ID NO: 46866 - DNA, 20 bp, Artificial Sequence
  Description of Artificial Sequence: Synthetic oligonucleotide
  Target: ATXN2; (+) strand; PAM type: NRG; PAM sequence: GAG
gaaagagacagagagaaaga

SEQ ID NO: 46867 - DNA, 20 bp, Artificial Sequence
  Description of Artificial Sequence: Synthetic oligonucleotide
  Target: ATXN2; (+) strand; PAM type: NRG; PAM sequence: AAG
acagagagaaagagagaaat

SEQ ID NO: 46868 - DNA, 20 bp, Artificial Sequence
  Description of Artificial Sequence: Synthetic oligonucleotide
  Target: ATXN2; (+) strand; PAM type: NRG; PAM sequence: AGG
cagagagaaagagagaaata

SEQ ID NO: 46869 - DNA, 20 bp, Artificial Sequence
  Description of Artificial Sequence: Synthetic oligonucleotide
  Target: ATXN2; (+) strand; PAM type: NRG; PAM sequence: GAG
gagagaaagagagaaataag

SEQ ID NO: 46870 - DNA, 20 bp, Artificial Sequence
  Description of Artificial Sequence: Synthetic oligonucleotide
  Target: ATXN2; (+) strand; PAM type: NRG; PAM sequence: CAG
agagagaaataaggagaaat

SEQ ID NO: 46871 - DNA, 20 bp, Artificial Sequence
  Description of Artificial Sequence: Synthetic oligonucleotide
  Target: ATXN2; (+) strand; PAM type: NRG; PAM sequence: GAG
aatcagtccaatcatcgttt

SEQ ID NO: 46872 - DNA, 20 bp, Artificial Sequence
  Description of Artificial Sequence: Synthetic oligonucleotide
  Target: ATXN2; (+) strand; PAM type: NRG; PAM sequence: AAG
gtttgagcacttctttataa

SEQ ID NO: 46873 - DNA, 20 bp, Artificial Sequence
  Description of Artificial Sequence: Synthetic oligonucleotide
  Target: ATXN2; (+) strand; PAM type: NRG; PAM sequence: AGG
tttgagcacttctttataaa

SEQ ID NO: 46874 - DNA, 20 bp, Artificial Sequence
  Description of Artificial Sequence: Synthetic oligonucleotide
  Target: ATXN2; (+) strand; PAM type: NRG; PAM sequence: CAG
tttataaaaggtactatttt

SEQ ID NO: 46875 - DNA, 20 bp, Artificial Sequence
  Description of Artificial Sequence: Synthetic oligonucleotide
  Target: ATXN2; (+) strand; PAM type: NRG; PAM sequence: CAG
aaaaggtactattttcagct

SEQ ID NO: 46876 - DNA, 20 bp, Artificial Sequence
  Description of Artificial Sequence: Synthetic oligonucleotide
  Target: ATXN2; (+) strand; PAM type: NRG; PAM sequence: AAG
aggtactattttcagctcag

SEQ ID NO: 46877 - DNA, 20 bp, Artificial Sequence
  Description of Artificial Sequence: Synthetic oligonucleotide
  Target: ATXN2; (+) strand; PAM type: NRG; PAM sequence: AAG
tattttcagctcagaagtta

SEQ ID NO: 46878 - DNA, 20 bp, Artificial Sequence
  Description of Artificial Sequence: Synthetic oligonucleotide
  Target: ATXN2; (+) strand; PAM type: NRG; PAM sequence: GAG
ttttcagctcagaagttaaa

SEQ ID NO: 46879 - DNA, 20 bp, Artificial Sequence
  Description of Artificial Sequence: Synthetic oligonucleotide
  Target: ATXN2; (+) strand; PAM type: NRG; PAM sequence: AAG
cagctcagaagttaaagaga

SEQ ID NO: 46880 - DNA, 20 bp, Artificial Sequence
  Description of Artificial Sequence: Synthetic oligonucleotide
  Target: ATXN2; (+) strand; PAM type: NRG; PAM sequence: AAG
aagttaaagagaaagaaaaa

SEQ ID NO: 46881 - DNA, 20 bp, Artificial Sequence
  Description of Artificial Sequence: Synthetic oligonucleotide
  Target: ATXN2; (+) strand; PAM type: NRG; PAM sequence: AAG
ttaaagagaaagaaaaaaag

SEQ ID NO: 46882 - DNA, 20 bp, Artificial Sequence
  Description of Artificial Sequence: Synthetic oligonucleotide
  Target: ATXN2; (+) strand; PAM type: NRG; PAM sequence: AGG
taaagagaaagaaaaaaaga

SEQ ID NO: 46883 - DNA, 20 bp, Artificial Sequence
  Description of Artificial Sequence: Synthetic oligonucleotide
  Target: ATXN2; (+) strand; PAM type: NRG; PAM sequence: CGG
gagaaagaaaaaaagaaggc

SEQ ID NO: 46884 - DNA, 20 bp, Artificial Sequence
  Description of Artificial Sequence: Synthetic oligonucleotide
  Target: ATXN2; (+) strand; PAM type: NRG; PAM sequence: GGG
agaaagaaaaaaagaaggcc

SEQ ID NO: 46885 - DNA, 20 bp, Artificial Sequence
  Description of Artificial Sequence: Synthetic oligonucleotide
  Target: ATXN2; (+) strand; PAM type: NRG; PAM sequence: TGG
aaaaagaaggccgggtgcga

SEQ ID NO: 46886 - DNA, 20 bp, Artificial Sequence
  Description of Artificial Sequence: Synthetic oligonucleotide
  Target: ATXN2; (+) strand; PAM type: NRG; PAM sequence: CAG
atggctcatgcctgtaatcc

SEQ ID NO: 46887 - DNA, 20 bp, Artificial Sequence
  Description of Artificial Sequence: Synthetic oligonucleotide
  Target: ATXN2; (+) strand; PAM type: NRG; PAM sequence: TGG
tgcctgtaatcccagcactt

SEQ ID NO: 46888 - DNA, 20 bp, Artificial Sequence
  Description of Artificial Sequence: Synthetic oligonucleotide
  Target: ATXN2; (+) strand; PAM type: NRG; PAM sequence: GGG
gcctgtaatcccagcacttt

SEQ ID NO: 46889 - DNA, 20 bp, Artificial Sequence
  Description of Artificial Sequence: Synthetic oligonucleotide
  Target: ATXN2; (+) strand; PAM type: NRG; PAM sequence: GAG
ctgtaatcccagcactttgg

SEQ ID NO: 46890 - DNA, 20 bp, Artificial Sequence
  Description of Artificial Sequence: Synthetic oligonucleotide
  Target: ATXN2; (+) strand; PAM type: NRG; PAM sequence: AGG
tgtaatcccagcactttggg

SEQ ID NO: 46891 - DNA, 20 bp, Artificial Sequence
  Description of Artificial Sequence: Synthetic oligonucleotide
  Target: ATXN2; (+) strand; PAM type: NRG; PAM sequence: GAG
tcccagcactttgggaggcc

SEQ ID NO: 46892 - DNA, 20 bp, Artificial Sequence
  Description of Artificial Sequence: Synthetic oligonucleotide
  Target: ATXN2; (+) strand; PAM type: NRG; PAM sequence: AGG
cccagcactttgggaggccg

SEQ ID NO: 46893 - DNA, 20 bp, Artificial Sequence
  Description of Artificial Sequence: Synthetic oligonucleotide
  Target: ATXN2; (+) strand; PAM type: NRG; PAM sequence: CGG
agcactttgggaggccgagg

SEQ ID NO: 46894 - DNA, 20 bp, Artificial Sequence
  Description of Artificial Sequence: Synthetic oligonucleotide
  Target: ATXN2; (+) strand; PAM type: NRG; PAM sequence: TGG
ctttgggaggccgaggcgga

SEQ ID NO: 46895 - DNA, 20 bp, Artificial Sequence
  Description of Artificial Sequence: Synthetic oligonucleotide
  Target: ATXN2; (+) strand; PAM type: NRG; PAM sequence: GAG
ggccgaggcggatggatcac

SEQ ID NO: 46896 - DNA, 20 bp, Artificial Sequence
  Description of Artificial Sequence: Synthetic oligonucleotide
  Target: ATXN2; (+) strand; PAM type: NRG; PAM sequence: AGG
gccgaggcggatggatcacg

SEQ ID NO: 46897 - DNA, 20 bp, Artificial Sequence
  Description of Artificial Sequence: Synthetic oligonucleotide
  Target: ATXN2; (+) strand; PAM type: NRG; PAM sequence: CAG
aggcggatggatcacgaggt

SEQ ID NO: 46898 - DNA, 20 bp, Artificial Sequence
  Description of Artificial Sequence: Synthetic oligonucleotide
  Target: ATXN2; (+) strand; PAM type: NRG; PAM sequence: AGG
ggcggatggatcacgaggtc

SEQ ID NO: 46899 - DNA, 20 bp, Artificial Sequence
  Description of Artificial Sequence: Synthetic oligonucleotide
  Target: ATXN2; (+) strand; PAM type: NRG; PAM sequence: GAG
cggatggatcacgaggtcag

SEQ ID NO: 46900 - DNA, 20 bp, Artificial Sequence
  Description of Artificial Sequence: Synthetic oligonucleotide
  Target: ATXN2; (+) strand; PAM type: NRG; PAM sequence: GAG
gatcacgaggtcaggagatt

SEQ ID NO: 46901 - DNA, 20 bp, Artificial Sequence
  Description of Artificial Sequence: Synthetic oligonucleotide
  Target: ATXN2; (+) strand; PAM type: NRG; PAM sequence: TGG
tcaggagattgagaccacct

SEQ ID NO: 46902 - DNA, 20 bp, Artificial Sequence
  Description of Artificial Sequence: Synthetic oligonucleotide
  Target: ATXN2; (+) strand; PAM type: NRG; PAM sequence: CGG
tgagaccaccttggctaaca

SEQ ID NO: 46903 - DNA, 20 bp, Artificial Sequence
  Description of Artificial Sequence: Synthetic oligonucleotide
  Target: ATXN2; (+) strand; PAM type: NRG; PAM sequence: TAG
ctactaaaaatacaaaaaat

SEQ ID NO: 46904 - DNA, 20 bp, Artificial Sequence
  Description of Artificial Sequence: Synthetic oligonucleotide
  Target: ATXN2; (+) strand; PAM type: NRG; PAM sequence: CGG
taaaaatacaaaaaattagc

SEQ ID NO: 46905 - DNA, 20 bp, Artificial Sequence
  Description of Artificial Sequence: Synthetic oligonucleotide
  Target: ATXN2; (+) strand; PAM type: NRG; PAM sequence: GGG
aaaaatacaaaaaattagcc

SEQ ID NO: 46906 - DNA, 20 bp, Artificial Sequence
  Description of Artificial Sequence: Synthetic oligonucleotide
  Target: ATXN2; (+) strand; PAM type: NRG; PAM sequence: TGG
aaaaaattagccgggcgctg

SEQ ID NO: 46907 - DNA, 20 bp, Artificial Sequence
  Description of Artificial Sequence: Synthetic oligonucleotide
  Target: ATXN2; (+) strand; PAM type: NRG; PAM sequence: CGG
aaattagccgggcgctgtgg

SEQ ID NO: 46908 - DNA, 20 bp, Artificial Sequence
  Description of Artificial Sequence: Synthetic oligonucleotide
  Target: ATXN2; (+) strand; PAM type: NRG; PAM sequence: GGG
aattagccgggcgctgtggc

SEQ ID NO: 46909 - DNA, 20 bp, Artificial Sequence
  Description of Artificial Sequence: Synthetic oligonucleotide
  Target: ATXN2; (+) strand; PAM type: NRG; PAM sequence: TAG
ggcgctgtggcgggtacctc

SEQ ID NO: 46910 - DNA, 20 bp, Artificial Sequence
  Description of Artificial Sequence: Synthetic oligonucleotide
  Target: ATXN2; (+) strand; PAM type: NRG; PAM sequence: CAG
gtggcgggtacctctagtcc

SEQ ID NO: 46911 - DNA, 20 bp, Artificial Sequence
  Description of Artificial Sequence: Synthetic oligonucleotide
  Target: ATXN2; (+) strand; PAM type: NRG; PAM sequence: CGG
tacctctagtcccagctacc

SEQ ID NO: 46912 - DNA, 20 bp, Artificial Sequence
  Description of Artificial Sequence: Synthetic oligonucleotide
  Target: ATXN2; (+) strand; PAM type: NRG; PAM sequence: GGG
acctctagtcccagctaccc

SEQ ID NO: 46913 - DNA, 20 bp, Artificial Sequence
  Description of Artificial Sequence: Synthetic oligonucleotide
  Target: ATXN2; (+) strand; PAM type: NRG; PAM sequence: GAG
ctctagtcccagctacccgg

SEQ ID NO: 46914 - DNA, 20 bp, Artificial Sequence
  Description of Artificial Sequence: Synthetic oligonucleotide
  Target: ATXN2; (+) strand; PAM type: NRG; PAM sequence: AGG
tctagtcccagctacccggg

SEQ ID NO: 46915 - DNA, 20 bp, Artificial Sequence
  Description of Artificial Sequence: Synthetic oligonucleotide
  Target: ATXN2; (+) strand; PAM type: NRG; PAM sequence: GAG
tcccagctacccgggaggct

SEQ ID NO: 46916 - DNA, 20 bp, Artificial Sequence
  Description of Artificial Sequence: Synthetic oligonucleotide
  Target: ATXN2; (+) strand; PAM type: NRG; PAM sequence: AGG
cccagctacccgggaggctg

SEQ ID NO: 46917 - DNA, 20 bp, Artificial Sequence
  Description of Artificial Sequence: Synthetic oligonucleotide
  Target: ATXN2; (+) strand; PAM type: NRG; PAM sequence: CAG
agctacccgggaggctgagg

SEQ ID NO: 46918 - DNA, 20 bp, Artificial Sequence
  Description of Artificial Sequence: Synthetic oligonucleotide
  Target: ATXN2; (+) strand; PAM type: NRG; PAM sequence: AGG
gctacccgggaggctgaggc

SEQ ID NO: 46919 - DNA, 20 bp, Artificial Sequence
  Description of Artificial Sequence: Synthetic oligonucleotide
  Target: ATXN2; (+) strand; PAM type: NRG; PAM sequence: GAG
tacccgggaggctgaggcag

SEQ ID NO: 46920 - DNA, 20 bp, Artificial Sequence
  Description of Artificial Sequence: Synthetic oligonucleotide
  Target: ATXN2; (+) strand; PAM type: NRG; PAM sequence: TGG
gaggctgaggcaggagaaaa

SEQ ID NO: 46921 - DNA, 20 bp, Artificial Sequence
  Description of Artificial Sequence: Synthetic oligonucleotide
  Target: ATXN2; (+) strand; PAM type: NRG; PAM sequence: CGG
aggagaaaatggcatgaacc

SEQ ID NO: 46922 - DNA, 20 bp, Artificial Sequence
  Description of Artificial Sequence: Synthetic oligonucleotide
  Target: ATXN2; (+) strand; PAM type: NRG; PAM sequence: GGG
ggagaaaatggcatgaaccc

SEQ ID NO: 46923 - DNA, 20 bp, Artificial Sequence
  Description of Artificial Sequence: Synthetic oligonucleotide
  Target: ATXN2; (+) strand; PAM type: NRG; PAM sequence: GAG
agaaaatggcatgaacccgg

SEQ ID NO: 46924 - DNA, 20 bp, Artificial Sequence
  Description of Artificial Sequence: Synthetic oligonucleotide
  Target: ATXN2; (+) strand; PAM type: NRG; PAM sequence: AGG
gaaaatggcatgaacccggg

SEQ ID NO: 46925 - DNA, 20 bp, Artificial Sequence
  Description of Artificial Sequence: Synthetic oligonucleotide
  Target: ATXN2; (+) strand; PAM type: NRG; PAM sequence: CGG
aatggcatgaacccgggagg

SEQ ID NO: 46926 - DNA, 20 bp, Artificial Sequence
  Description of Artificial Sequence: Synthetic oligonucleotide
  Target: ATXN2; (+) strand; PAM type: NRG; PAM sequence: GAG
tggcatgaacccgggaggcg

SEQ ID NO: 46927 - DNA, 20 bp, Artificial Sequence
  Description of Artificial Sequence: Synthetic oligonucleotide
  Target: ATXN2; (+) strand; PAM type: NRG; PAM sequence: CAG
aacccgggaggcggagcttg

SEQ ID NO: 46928 - DNA, 20 bp, Artificial Sequence
  Description of Artificial Sequence: Synthetic oligonucleotide
  Target: ATXN2; (+) strand; PAM type: NRG; PAM sequence: GAG
cgggaggcggagcttgcagt

SEQ ID NO: 46929 - DNA, 20 bp, Artificial Sequence
  Description of Artificial Sequence: Synthetic oligonucleotide
  Target: ATXN2; (+) strand; PAM type: NRG; PAM sequence: GAG
ggcggagcttgcagtgagcc

SEQ ID NO: 46930 - DNA, 20 bp, Artificial Sequence
  Description of Artificial Sequence: Synthetic oligonucleotide
  Target: ATXN2; (+) strand; PAM type: NRG; PAM sequence: CAG
gagatcgcgctactgcactc

SEQ ID NO: 46931 - DNA, 20 bp, Artificial Sequence
  Description of Artificial Sequence: Synthetic oligonucleotide
  Target: ATXN2; (+) strand; PAM type: NRG; PAM sequence: TGG
cgcgctactgcactccagcc

SEQ ID NO: 46932 - DNA, 20 bp, Artificial Sequence
  Description of Artificial Sequence: Synthetic oligonucleotide
  Target: ATXN2; (+) strand; PAM type: NRG; PAM sequence: GGG
gcgctactgcactccagcct

SEQ ID NO: 46933 - DNA, 20 bp, Artificial Sequence
  Description of Artificial Sequence: Synthetic oligonucleotide
  Target: ATXN2; (+) strand; PAM type: NRG; PAM sequence: CAG
ctgcactccagcctgggcaa

SEQ ID NO: 46934 - DNA, 20 bp, Artificial Sequence
  Description of Artificial Sequence: Synthetic oligonucleotide
  Target: ATXN2; (+) strand; PAM type: NRG; PAM sequence: GAG
gcactccagcctgggcaaca

SEQ ID NO: 46935 - DNA, 20 bp, Artificial Sequence
  Description of Artificial Sequence: Synthetic oligonucleotide
  Target: ATXN2; (+) strand; PAM type: NRG; PAM sequence: AAG
tccagcctgggcaacagagc

SEQ ID NO: 46936 - DNA, 20 bp, Artificial Sequence
  Description of Artificial Sequence: Synthetic oligonucleotide
  Target: ATXN2; (+) strand; PAM type: NRG; PAM sequence: AAG
ataaaaaataaaaataaaaa

SEQ ID NO: 46937 - DNA, 20 bp, Artificial Sequence
  Description of Artificial Sequence: Synthetic oligonucleotide
  Target: ATXN2; (+) strand; PAM type: NRG; PAM sequence: AAG
ataaaaataaaaaaagaaaa

SEQ ID NO: 46938 - DNA, 20 bp, Artificial Sequence
  Description of Artificial Sequence: Synthetic oligonucleotide
  Target: ATXN2; (+) strand; PAM type: NRG; PAM sequence: AAG
aaaataaaaaaagaaaaaag

SEQ ID NO: 46939 - DNA, 20 bp, Artificial Sequence
  Description of Artificial Sequence: Synthetic oligonucleotide
  Target: ATXN2; (+) strand; PAM type: NRG; PAM sequence: TAG
aaaagaagaaaatgattctg

SEQ ID NO: 46940 - DNA, 20 bp, Artificial Sequence
  Description of Artificial Sequence: Synthetic oligonucleotide
  Target: ATXN2; (+) strand; PAM type: NRG; PAM sequence: AAG
agaagaaaatgattctgtag

SEQ ID NO: 46941 - DNA, 20 bp, Artificial Sequence
  Description of Artificial Sequence: Synthetic oligonucleotide
  Target: ATXN2; (+) strand; PAM type: NRG; PAM sequence: AAG
aatgattctgtagaagaact

SEQ ID NO: 46942 - DNA, 20 bp, Artificial Sequence
  Description of Artificial Sequence: Synthetic oligonucleotide
  Target: ATXN2; (+) strand; PAM type: NRG; PAM sequence: AAG
tagaagaactaagacaaaaa

SEQ ID NO: 46943 - DNA, 20 bp, Artificial Sequence
  Description of Artificial Sequence: Synthetic oligonucleotide
  Target: ATXN2; (+) strand; PAM type: NRG; PAM sequence: CAG
taagacaaaaaaagtaaatt

SEQ ID NO: 46944 - DNA, 20 bp, Artificial Sequence
  Description of Artificial Sequence: Synthetic oligonucleotide
  Target: ATXN2; (+) strand; PAM type: NRG; PAM sequence: AAG
aagtaaattcagaaatgttc

SEQ ID NO: 46945 - DNA, 20 bp, Artificial Sequence
  Description of Artificial Sequence: Synthetic oligonucleotide
  Target: ATXN2; (+) strand; PAM type: NRG; PAM sequence: CAG
aatgttcaagaatcaaaaaa

SEQ ID NO: 46946 - DNA, 20 bp, Artificial Sequence
  Description of Artificial Sequence: Synthetic oligonucleotide
  Target: ATXN2; (+) strand; PAM type: NRG; PAM sequence: TAG
aagaatcaaaaaacagaatt

SEQ ID NO: 46947 - DNA, 20 bp, Artificial Sequence
  Description of Artificial Sequence: Synthetic oligonucleotide
  Target: ATXN2; (+) strand; PAM type: NRG; PAM sequence: AGG
agaatcaaaaaacagaattt

SEQ ID NO: 46948 - DNA, 20 bp, Artificial Sequence
  Description of Artificial Sequence: Synthetic oligonucleotide
  Target: ATXN2; (+) strand; PAM type: NRG; PAM sequence: TAG
aattgaaatgccaatactat

SEQ ID NO: 46949 - DNA, 20 bp, Artificial Sequence
  Description of Artificial Sequence: Synthetic oligonucleotide
  Target: ATXN2; (+) strand; PAM type: NRG; PAM sequence: AAG
aaatgccaatactattagtg

SEQ ID NO: 46950 - DNA, 20 bp, Artificial Sequence
  Description of Artificial Sequence: Synthetic oligonucleotide
  Target: ATXN2; (+) strand; PAM type: NRG; PAM sequence: TAG
ccaatactattagtgaagaa

SEQ ID NO: 46951 - DNA, 20 bp, Artificial Sequence
  Description of Artificial Sequence: Synthetic oligonucleotide
  Target: ATXN2; (+) strand; PAM type: NRG; PAM sequence: TAG
atactattagtgaagaatag

SEQ ID NO: 46952 - DNA, 20 bp, Artificial Sequence
  Description of Artificial Sequence: Synthetic oligonucleotide
  Target: ATXN2; (+) strand; PAM type: NRG; PAM sequence: TGG
acaacttattctcaaaccta

SEQ ID NO: 46953 - DNA, 20 bp, Artificial Sequence
  Description of Artificial Sequence: Synthetic oligonucleotide
  Target: ATXN2; (+) strand; PAM type: NRG; PAM sequence: AAG
tattctcaaacctatggcaa

SEQ ID NO: 46954 - DNA, 20 bp, Artificial Sequence
  Description of Artificial Sequence: Synthetic oligonucleotide
  Target: ATXN2; (+) strand; PAM type: NRG; PAM sequence: CAG
aaacctatggcaaaagtgtt

SEQ ID NO: 46955 - DNA, 20 bp, Artificial Sequence
  Description of Artificial Sequence: Synthetic oligonucleotide
  Target: ATXN2; (+) strand; PAM type: NRG; PAM sequence: TAG
atggcaaaagtgttcagaat

SEQ ID NO: 46956 - DNA, 20 bp, Artificial Sequence
  Description of Artificial Sequence: Synthetic oligonucleotide
  Target: ATXN2; (+) strand; PAM type: NRG; PAM sequence: AGG
tggcaaaagtgttcagaatt

SEQ ID NO: 46957 - DNA, 20 bp, Artificial Sequence
  Description of Artificial Sequence: Synthetic oligonucleotide
  Target: ATXN2; (+) strand; PAM type: NRG; PAM sequence: AAG
aaagtgttcagaattaggtt

SEQ ID NO: 46958 - DNA, 20 bp, Artificial Sequence
  Description of Artificial Sequence: Synthetic oligonucleotide
  Target: ATXN2; (+) strand; PAM type: NRG; PAM sequence: AGG
aagtgttcagaattaggtta

SEQ ID NO: 46959 - DNA, 20 bp, Artificial Sequence
  Description of Artificial Sequence: Synthetic oligonucleotide
  Target: ATXN2; (+) strand; PAM type: NRG; PAM sequence: AAG
ttcagaattaggttaaggaa

SEQ ID NO: 46960 - DNA, 20 bp, Artificial Sequence
  Description of Artificial Sequence: Synthetic oligonucleotide
  Target: ATXN2; (+) strand; PAM type: NRG; PAM sequence: CAG
gaattaggttaaggaaaagt

SEQ ID NO: 46961 - DNA, 20 bp, Artificial Sequence
  Description of Artificial Sequence: Synthetic oligonucleotide
  Target: ATXN2; (+) strand; PAM type: NRG; PAM sequence: CAG
gaaattaattccaattctta

SEQ ID NO: 46962 - DNA, 20 bp, Artificial Sequence
  Description of Artificial Sequence: Synthetic oligonucleotide
  Target: ATXN2; (+) strand; PAM type: NRG; PAM sequence: TGG
aaatatcttttctgtttccc

SEQ ID NO: 46963 - DNA, 20 bp, Artificial Sequence
  Description of Artificial Sequence: Synthetic oligonucleotide
  Target: ATXN2; (+) strand; PAM type: NRG; PAM sequence: TAG
caaatatgtaaaacatttta

SEQ ID NO: 46964 - DNA, 20 bp, Artificial Sequence
  Description of Artificial Sequence: Synthetic oligonucleotide
  Target: ATXN2; (+) strand; PAM type: NRG; PAM sequence: CGG
tgtaaaacattttatagatt

SEQ ID NO: 46965 - DNA, 20 bp, Artificial Sequence
  Description of Artificial Sequence: Synthetic oligonucleotide
  Target: ATXN2; (+) strand; PAM type: NRG; PAM sequence: CAG
gattcttttctaataaaaaa

SEQ ID NO: 46966 - DNA, 20 bp, Artificial Sequence
  Description of Artificial Sequence: Synthetic oligonucleotide
  Target: ATXN2; (+) strand; PAM type: NRG; PAM sequence: AAG
aaaaaacagaacaactgttc

SEQ ID NO: 46967 - DNA, 20 bp, Artificial Sequence
  Description of Artificial Sequence: Synthetic oligonucleotide
  Target: ATXN2; (+) strand; PAM type: NRG; PAM sequence: CAG
gcccacttaatattctttcc

SEQ ID NO: 46968 - DNA, 20 bp, Artificial Sequence
  Description of Artificial Sequence: Synthetic oligonucleotide
  Target: ATXN2; (+) strand; PAM type: NRG; PAM sequence: AGG
cccacttaatattctttccc

SEQ ID NO: 46969 - DNA, 20 bp, Artificial Sequence
  Description of Artificial Sequence: Synthetic oligonucleotide
  Target: ATXN2; (+) strand; PAM type: NRG; PAM sequence: GAG
cacttaatattctttcccag

SEQ ID NO: 46970 - DNA, 20 bp, Artificial Sequence
  Description of Artificial Sequence: Synthetic oligonucleotide
  Target: ATXN2; (+) strand; PAM type: NRG; PAM sequence: TAG
tctttcccaggagtatgaaa

SEQ ID NO: 46971 - DNA, 20 bp, Artificial Sequence
  Description of Artificial Sequence: Synthetic oligonucleotide
  Target: ATXN2; (+) strand; PAM type: NRG; PAM sequence: TAG
ccaggagtatgaaatagaaa

SEQ ID NO: 46972 - DNA, 20 bp, Artificial Sequence
  Description of Artificial Sequence: Synthetic oligonucleotide
  Target: ATXN2; (+) strand; PAM type: NRG; PAM sequence: TAG
gaaatagaaatagaacaaaa

SEQ ID NO: 46973 - DNA, 20 bp, Artificial Sequence
  Description of Artificial Sequence: Synthetic oligonucleotide
  Target: ATXN2; (+) strand; PAM type: NRG; PAM sequence: TAG
aaatagaacaaaatagaaat

SEQ ID NO: 46974 - DNA, 20 bp, Artificial Sequence
  Description of Artificial Sequence: Synthetic oligonucleotide
  Target: ATXN2; (+) strand; PAM type: NRG; PAM sequence: GAG
atagaacaaaatagaaatta

SEQ ID NO: 46975 - DNA, 20 bp, Artificial Sequence
  Description of Artificial Sequence: Synthetic oligonucleotide
  Target: ATXN2; (+) strand; PAM type: NRG; PAM sequence: TAG
tccttctcttgctttattac

SEQ ID NO: 46976 - DNA, 20 bp, Artificial Sequence
  Description of Artificial Sequence: Synthetic oligonucleotide
  Target: ATXN2; (+) strand; PAM type: NRG; PAM sequence: AAG
tttaatatatctgcatgcat

SEQ ID NO: 46977 - DNA, 20 bp, Artificial Sequence
  Description of Artificial Sequence: Synthetic oligonucleotide
  Target: ATXN2; (+) strand; PAM type: NRG; PAM sequence: AAG
agactccattgaaaccatcc

SEQ ID NO: 46978 - DNA, 20 bp, Artificial Sequence
  Description of Artificial Sequence: Synthetic oligonucleotide
  Target: ATXN2; (+) strand; PAM type: NRG; PAM sequence: AAG
ccattgaaaccatccaagac

SEQ ID NO: 46979 - DNA, 20 bp, Artificial Sequence
  Description of Artificial Sequence: Synthetic oligonucleotide
  Target: ATXN2; (+) strand; PAM type: NRG; PAM sequence: GAG
attgaaaccatccaagacaa

SEQ ID NO: 46980 - DNA, 20 bp, Artificial Sequence
  Description of Artificial Sequence: Synthetic oligonucleotide
  Target: ATXN2; (+) strand; PAM type: NRG; PAM sequence: TAG
gaaaaaaataatactaaaac

SEQ ID NO: 46981 - DNA, 20 bp, Artificial Sequence
  Description of Artificial Sequence: Synthetic oligonucleotide
  Target: ATXN2; (+) strand; PAM type: NRG; PAM sequence: TAG
aaaataatactaaaactaga

SEQ ID NO: 46982 - DNA, 20 bp, Artificial Sequence
  Description of Artificial Sequence: Synthetic oligonucleotide
  Target: ATXN2; (+) strand; PAM type: NRG; PAM sequence: AAG
taatactaaaactagatagt

SEQ ID NO: 46983 - DNA, 20 bp, Artificial Sequence
  Description of Artificial Sequence: Synthetic oligonucleotide
  Target: ATXN2; (+) strand; PAM type: NRG; PAM sequence: TAG
aaactagatagtaagtatat

SEQ ID NO: 46984 - DNA, 20 bp, Artificial Sequence
  Description of Artificial Sequence: Synthetic oligonucleotide
  Target: ATXN2; (+) strand; PAM type: NRG; PAM sequence: CAG
ttagcattacacaaccctat

SEQ ID NO: 46985 - DNA, 20 bp, Artificial Sequence
  Description of Artificial Sequence: Synthetic oligonucleotide
  Target: ATXN2; (+) strand; PAM type: NRG; PAM sequence: CAG
tacacaaccctatcagtaaa

SEQ ID NO: 46986 - DNA, 20 bp, Artificial Sequence
  Description of Artificial Sequence: Synthetic oligonucleotide
  Target: ATXN2; (+) strand; PAM type: NRG; PAM sequence: TGG
cagtcttactgaaaatgtcc

SEQ ID NO: 46987 - DNA, 20 bp, Artificial Sequence
  Description of Artificial Sequence: Synthetic oligonucleotide
  Target: ATXN2; (+) strand; PAM type: NRG; PAM sequence: TAG
cttacctattctttacctaa

SEQ ID NO: 46988 - DNA, 20 bp, Artificial Sequence
  Description of Artificial Sequence: Synthetic oligonucleotide
  Target: ATXN2; (+) strand; PAM type: NRG; PAM sequence: GAG
tacctattctttacctaata

SEQ ID NO: 46989 - DNA, 20 bp, Artificial Sequence
  Description of Artificial Sequence: Synthetic oligonucleotide
  Target: ATXN2; (+) strand; PAM type: NRG; PAM sequence: GAG
cctattctttacctaataga

SEQ ID NO: 46990 - DNA, 20 bp, Artificial Sequence
  Description of Artificial Sequence: Synthetic oligonucleotide
  Target: ATXN2; (+) strand; PAM type: NRG; PAM sequence: AAG
ctttacctaatagagagttt

SEQ ID NO: 46991 - DNA, 20 bp, Artificial Sequence
  Description of Artificial Sequence: Synthetic oligonucleotide
  Target: ATXN2; (+) strand; PAM type: NRG; PAM sequence: TAG
ttttacttaaaccatcccac

SEQ ID NO: 46992 - DNA, 20 bp, Artificial Sequence
  Description of Artificial Sequence: Synthetic oligonucleotide
  Target: ATXN2; (+) strand; PAM type: NRG; PAM sequence: CAG
tacttaaaccatcccactag

SEQ ID NO: 46993 - DNA, 20 bp, Artificial Sequence
  Description of Artificial Sequence: Synthetic oligonucleotide
  Target: ATXN2; (+) strand; PAM type: NRG; PAM sequence: AAG
accatcccactagcagtgtt

SEQ ID NO: 46994 - DNA, 20 bp, Artificial Sequence
  Description of Artificial Sequence: Synthetic oligonucleotide
  Target: ATXN2; (+) strand; PAM type: NRG; PAM sequence: CAG
taagtgttttgcaactccct

SEQ ID NO: 46995 - DNA, 20 bp, Artificial Sequence
  Description of Artificial Sequence: Synthetic oligonucleotide
  Target: ATXN2; (+) strand; PAM type: NRG; PAM sequence: AAG
gcaactccctcagtaccact

SEQ ID NO: 46996 - DNA, 20 bp, Artificial Sequence
  Description of Artificial Sequence: Synthetic oligonucleotide
  Target: ATXN2; (+) strand; PAM type: NRG; PAM sequence: TAG
actccctcagtaccactaag

SEQ ID NO: 46997 - DNA, 20 bp, Artificial Sequence
  Description of Artificial Sequence: Synthetic oligonucleotide
  Target: ATXN2; (+) strand; PAM type: NRG; PAM sequence: TAG
ccctcagtaccactaagtag

SEQ ID NO: 46998 - DNA, 20 bp, Artificial Sequence
  Description of Artificial Sequence: Synthetic oligonucleotide
  Target: ATXN2; (+) strand; PAM type: NRG; PAM sequence: CAG
tctttctcacatttaccatt

SEQ ID NO: 46999 - DNA, 20 bp, Artificial Sequence
  Description of Artificial Sequence: Synthetic oligonucleotide
  Target: ATXN2; (+) strand; PAM type: NRG; PAM sequence: AAG
tcacatttaccattcagcgc

SEQ ID NO: 47000 - DNA, 20 bp, Artificial Sequence
  Description of Artificial Sequence: Synthetic oligonucleotide
  Target: ATXN2; (+) strand; PAM type: NRG; PAM sequence: TAG
taccattcagcgcaagctga

SEQ ID NO: 47001 - DNA, 20 bp, Artificial Sequence
  Description of Artificial Sequence: Synthetic oligonucleotide
  Target: ATXN2; (+) strand; PAM type: NRG; PAM sequence: AAG
tgcatttcttaaatcattac

SEQ ID NO: 47002 - DNA, 20 bp, Artificial Sequence
  Description of Artificial Sequence: Synthetic oligonucleotide
  Target: ATXN2; (+) strand; PAM type: NRG; PAM sequence: GAG
tttcttaaatcattacaagt

SEQ ID NO: 47003 - DNA, 20 bp, Artificial Sequence
  Description of Artificial Sequence: Synthetic oligonucleotide
  Target: ATXN2; (+) strand; PAM type: NRG; PAM sequence: AGG
ttcttaaatcattacaagtg

SEQ ID NO: 47004 - DNA, 20 bp, Artificial Sequence
  Description of Artificial Sequence: Synthetic oligonucleotide
  Target: ATXN2; (+) strand; PAM type: NRG; PAM sequence: GAG
cttaaatcattacaagtgag

SEQ ID NO: 47005 - DNA, 20 bp, Artificial Sequence
  Description of Artificial Sequence: Synthetic oligonucleotide
  Target: ATXN2; (+) strand; PAM type: NRG; PAM sequence: AGG
ttaaatcattacaagtgagg

SEQ ID NO: 47006 - DNA, 20 bp, Artificial Sequence
  Description of Artificial Sequence: Synthetic oligonucleotide
  Target: ATXN2; (+) strand; PAM type: NRG; PAM sequence: GGG
taaatcattacaagtgagga

SEQ ID NO: 47007 - DNA, 20 bp, Artificial Sequence
  Description of Artificial Sequence: Synthetic oligonucleotide
  Target: ATXN2; (+) strand; PAM type: NRG; PAM sequence: TGG
ccaccttttcatacattcac

SEQ ID NO: 47008 - DNA, 20 bp, Artificial Sequence
  Description of Artificial Sequence: Synthetic oligonucleotide
  Target: ATXN2; (+) strand; PAM type: NRG; PAM sequence: CAG
aactatttttctacttttcc

SEQ ID NO: 47009 - DNA, 20 bp, Artificial Sequence
  Description of Artificial Sequence: Synthetic oligonucleotide
  Target: ATXN2; (+) strand; PAM type: NRG; PAM sequence: TGG
tttctacttttcccagtttg

SEQ ID NO: 47010 - DNA, 20 bp, Artificial Sequence
  Description of Artificial Sequence: Synthetic oligonucleotide
  Target: ATXN2; (+) strand; PAM type: NRG; PAM sequence: TGG
ggcatgtctttttaaatgta

SEQ ID NO: 47011 - DNA, 20 bp, Artificial Sequence
  Description of Artificial Sequence: Synthetic oligonucleotide
  Target: ATXN2; (+) strand; PAM type: NRG; PAM sequence: TGG
ttttaaatgtatggtacttt

SEQ ID NO: 47012 - DNA, 20 bp, Artificial Sequence
  Description of Artificial Sequence: Synthetic oligonucleotide
  Target: ATXN2; (+) strand; PAM type: NRG; PAM sequence: AAG
tggtacttttggacacgtct

SEQ ID NO: 47013 - DNA, 20 bp, Artificial Sequence
  Description of Artificial Sequence: Synthetic oligonucleotide
  Target: ATXN2; (+) strand; PAM type: NRG; PAM sequence: GAG
tctttttttttttttttttt

SEQ ID NO: 47014 - DNA, 20 bp, Artificial Sequence
  Description of Artificial Sequence: Synthetic oligonucleotide
  Target: ATXN2; (+) strand; PAM type: NRG; PAM sequence: TGG
ttttttttttttttttgaga

SEQ ID NO: 47015 - DNA, 20 bp, Artificial Sequence
  Description of Artificial Sequence: Synthetic oligonucleotide
  Target: ATXN2; (+) strand; PAM type: NRG; PAM sequence: GAG
ttttttttttttttgagatg

SEQ ID NO: 47016 - DNA, 20 bp, Artificial Sequence
  Description of Artificial Sequence: Synthetic oligonucleotide
  Target: ATXN2; (+) strand; PAM type: NRG; PAM sequence: AAG
atggagtcactctgtcgccc

SEQ ID NO: 47017 - DNA, 20 bp, Artificial Sequence
  Description of Artificial Sequence: Synthetic oligonucleotide
  Target: ATXN2; (+) strand; PAM type: NRG; PAM sequence: TGG
agtcactctgtcgcccaagc

SEQ ID NO: 47018 - DNA, 20 bp, Artificial Sequence
  Description of Artificial Sequence: Synthetic oligonucleotide
  Target: ATXN2; (+) strand; PAM type: NRG; PAM sequence: GAG
tcactctgtcgcccaagctg

SEQ ID NO: 47019 - DNA, 20 bp, Artificial Sequence
  Description of Artificial Sequence: Synthetic oligonucleotide
  Target: ATXN2; (+) strand; PAM type: NRG; PAM sequence: TGG
tcgcccaagctggagtgatg

SEQ ID NO: 47020 - DNA, 20 bp, Artificial Sequence
  Description of Artificial Sequence: Synthetic oligonucleotide
  Target: ATXN2; (+) strand; PAM type: NRG; PAM sequence: CGG
ggagtgatgtggcacaatct

SEQ ID NO: 47021 - DNA, 20 bp, Artificial Sequence
  Description of Artificial Sequence: Synthetic oligonucleotide
  Target: ATXN2; (+) strand; PAM type: NRG; PAM sequence: AAG
aacctccacttcccaaattc

SEQ ID NO: 47022 - DNA, 20 bp, Artificial Sequence
  Description of Artificial Sequence: Synthetic oligonucleotide
  Target: ATXN2; (+) strand; PAM type: NRG; PAM sequence: TAG
ttcaagcaattctcctgcct

SEQ ID NO: 47023 - DNA, 20 bp, Artificial Sequence
  Description of Artificial Sequence: Synthetic oligonucleotide
  Target: ATXN2; (+) strand; PAM type: NRG; PAM sequence: GAG
ttctcctgccttagcctcct

SEQ ID NO: 47024 - DNA, 20 bp, Artificial Sequence
  Description of Artificial Sequence: Synthetic oligonucleotide
  Target: ATXN2; (+) strand; PAM type: NRG; PAM sequence: TAG
tcctgccttagcctcctgag

SEQ ID NO: 47025 - DNA, 20 bp, Artificial Sequence
  Description of Artificial Sequence: Synthetic oligonucleotide
  Target: ATXN2; (+) strand; PAM type: NRG; PAM sequence: TGG
gccttagcctcctgagtagc

SEQ ID NO: 47026 - DNA, 20 bp, Artificial Sequence
  Description of Artificial Sequence: Synthetic oligonucleotide
  Target: ATXN2; (+) strand; PAM type: NRG; PAM sequence: GGG
ccttagcctcctgagtagct

SEQ ID NO: 47027 - DNA, 20 bp, Artificial Sequence
  Description of Artificial Sequence: Synthetic oligonucleotide
  Target: ATXN2; (+) strand; PAM type: NRG; PAM sequence: CAG
ctcctgagtagctgggatta

SEQ ID NO: 47028 - DNA, 20 bp, Artificial Sequence
  Description of Artificial Sequence: Synthetic oligonucleotide
  Target: ATXN2; (+) strand; PAM type: NRG; PAM sequence: AGG
tcctgagtagctgggattac

SEQ ID NO: 47029 - DNA, 20 bp, Artificial Sequence
  Description of Artificial Sequence: Synthetic oligonucleotide
  Target: ATXN2; (+) strand; PAM type: NRG; PAM sequence: TAG
gactaatttttttgtatttt

SEQ ID NO: 47030 - DNA, 20 bp, Artificial Sequence
  Description of Artificial Sequence: Synthetic oligonucleotide
  Target: ATXN2; (+) strand; PAM type: NRG; PAM sequence: TAG
taatttttttgtatttttag

SEQ ID NO: 47031 - DNA, 20 bp, Artificial Sequence
  Description of Artificial Sequence: Synthetic oligonucleotide
  Target: ATXN2; (+) strand; PAM type: NRG; PAM sequence: GAG
atttttttgtatttttagta

SEQ ID NO: 47032 - DNA, 20 bp, Artificial Sequence
  Description of Artificial Sequence: Synthetic oligonucleotide
  Target: ATXN2; (+) strand; PAM type: NRG; PAM sequence: TGG
ttttgtatttttagtagaga

SEQ ID NO: 47033 - DNA, 20 bp, Artificial Sequence
  Description of Artificial Sequence: Synthetic oligonucleotide
  Target: ATXN2; (+) strand; PAM type: NRG; PAM sequence: GGG
tttgtatttttagtagagat

SEQ ID NO: 47034 - DNA, 20 bp, Artificial Sequence
  Description of Artificial Sequence: Synthetic oligonucleotide
  Target: ATXN2; (+) strand; PAM type: NRG; PAM sequence: GGG
ttgtatttttagtagagatg

SEQ ID NO: 47035 - DNA, 20 bp, Artificial Sequence
  Description of Artificial Sequence: Synthetic oligonucleotide
  Target: ATXN2; (+) strand; PAM type: NRG; PAM sequence: CAG
tagtagagatggggtttcac

SEQ ID NO: 47036 - DNA, 20 bp, Artificial Sequence
  Description of Artificial Sequence: Synthetic oligonucleotide
  Target: ATXN2; (+) strand; PAM type: NRG; PAM sequence: AGG
agtagagatggggtttcacc

SEQ ID NO: 47037 - DNA, 20 bp, Artificial Sequence
  Description of Artificial Sequence: Synthetic oligonucleotide
  Target: ATXN2; (+) strand; PAM type: NRG; PAM sequence: CAG
tggggtttcaccaggttgac

SEQ ID NO: 47038 - DNA, 20 bp, Artificial Sequence
  Description of Artificial Sequence: Synthetic oligonucleotide
  Target: ATXN2; (+) strand; PAM type: NRG; PAM sequence: AGG
ggggtttcaccaggttgacc

SEQ ID NO: 47039 - DNA, 20 bp, Artificial Sequence
  Description of Artificial Sequence: Synthetic oligonucleotide
  Target: ATXN2; (+) strand; PAM type: NRG; PAM sequence: TGG
tttcaccaggttgaccaggt

SEQ ID NO: 47040 - DNA, 20 bp, Artificial Sequence
  Description of Artificial Sequence: Synthetic oligonucleotide
  Target: ATXN2; (+) strand; PAM type: NRG; PAM sequence: AAG
ggtctcaaactcctgacctc

SEQ ID NO: 47041 - DNA, 20 bp, Artificial Sequence
  Description of Artificial Sequence: Synthetic oligonucleotide
  Target: ATXN2; (+) strand; PAM type: NRG; PAM sequence: TGG
ctcaagtgatccacccgctt

SEQ ID NO: 47042 - DNA, 20 bp, Artificial Sequence
  Description of Artificial Sequence: Synthetic oligonucleotide
  Target: ATXN2; (+) strand; PAM type: NRG; PAM sequence: AAG
ccacccgctttggcctccca

SEQ ID NO: 47043 - DNA, 20 bp, Artificial Sequence
  Description of Artificial Sequence: Synthetic oligonucleotide
  Target: ATXN2; (+) strand; PAM type: NRG; PAM sequence: TGG
gctttggcctcccaaagtgc

SEQ ID NO: 47044 - DNA, 20 bp, Artificial Sequence
  Description of Artificial Sequence: Synthetic oligonucleotide
  Target: ATXN2; (+) strand; PAM type: NRG; PAM sequence: GGG
ctttggcctcccaaagtgct

SEQ ID NO: 47045 - DNA, 20 bp, Artificial Sequence
  Description of Artificial Sequence: Synthetic oligonucleotide
  Target: ATXN2; (+) strand; PAM type: NRG; PAM sequence: AAG
tcccaaagtgctgggattac

SEQ ID NO: 47046 - DNA, 20 bp, Artificial Sequence
  Description of Artificial Sequence: Synthetic oligonucleotide
  Target: ATXN2; (+) strand; PAM type: NRG; PAM sequence: GAG
agtgctgggattacaagcgt

SEQ ID NO: 47047 - DNA, 20 bp, Artificial Sequence
  Description of Artificial Sequence: Synthetic oligonucleotide
  Target: ATXN2; (+) strand; PAM type: NRG; PAM sequence: CGG
acaagcgtgagcaccacacc

SEQ ID NO: 47048 - DNA, 20 bp, Artificial Sequence
  Description of Artificial Sequence: Synthetic oligonucleotide
  Target: ATXN2; (+) strand; PAM type: NRG; PAM sequence: AAG
ctttaatctctttataatca

SEQ ID NO: 47049 - DNA, 20 bp, Artificial Sequence
  Description of Artificial Sequence: Synthetic oligonucleotide
  Target: ATXN2; (+) strand; PAM type: NRG; PAM sequence: AGG
tttaatctctttataatcaa

SEQ ID NO: 47050 - DNA, 20 bp, Artificial Sequence
  Description of Artificial Sequence: Synthetic oligonucleotide
  Target: ATXN2; (+) strand; PAM type: NRG; PAM sequence: TGG
acttcatgatttttttgctc

SEQ ID NO: 47051 - DNA, 20 bp, Artificial Sequence
  Description of Artificial Sequence: Synthetic oligonucleotide
  Target: ATXN2; (+) strand; PAM type: NRG; PAM sequence: TAG
tcatgatttttttgctctgg

SEQ ID NO: 47052 - DNA, 20 bp, Artificial Sequence
  Description of Artificial Sequence: Synthetic oligonucleotide
  Target: ATXN2; (+) strand; PAM type: NRG; PAM sequence: AAG
ctctggtagtcatgcttata

SEQ ID NO: 47053 - DNA, 20 bp, Artificial Sequence
  Description of Artificial Sequence: Synthetic oligonucleotide
  Target: ATXN2; (+) strand; PAM type: NRG; PAM sequence: CAG
ctcaaaattaaacaaattca

SEQ ID NO: 47054 - DNA, 20 bp, Artificial Sequence
  Description of Artificial Sequence: Synthetic oligonucleotide
  Target: ATXN2; (+) strand; PAM type: NRG; PAM sequence: CAG
acaaattcacagatttgctc

SEQ ID NO: 47055 - DNA, 20 bp, Artificial Sequence
  Description of Artificial Sequence: Synthetic oligonucleotide
  Target: ATXN2; (+) strand; PAM type: NRG; PAM sequence: TAG
ttcacagatttgctccagtg

SEQ ID NO: 47056 - DNA, 20 bp, Artificial Sequence
  Description of Artificial Sequence: Synthetic oligonucleotide
  Target: ATXN2; (+) strand; PAM type: NRG; PAM sequence: TGG
agatttgctccagtgtagtc

SEQ ID NO: 47057 - DNA, 20 bp, Artificial Sequence
  Description of Artificial Sequence: Synthetic oligonucleotide
  Target: ATXN2; (+) strand; PAM type: NRG; PAM sequence: GGG
gatttgctccagtgtagtct

SEQ ID NO: 47058 - DNA, 20 bp, Artificial Sequence
  Description of Artificial Sequence: Synthetic oligonucleotide
  Target: ATXN2; (+) strand; PAM type: NRG; PAM sequence: CAG
ggtgttgttttgtttaatca

SEQ ID NO: 47059 - DNA, 20 bp, Artificial Sequence
  Description of Artificial Sequence: Synthetic oligonucleotide
  Target: ATXN2; (+) strand; PAM type: NRG; PAM sequence: TGG
agttttctcattaatctatt

SEQ ID NO: 47060 - DNA, 20 bp, Artificial Sequence
  Description of Artificial Sequence: Synthetic oligonucleotide
  Target: ATXN2; (+) strand; PAM type: NRG; PAM sequence: CAG
atctatttggttttatttat

SEQ ID NO: 47061 - DNA, 20 bp, Artificial Sequence
  Description of Artificial Sequence: Synthetic oligonucleotide
  Target: ATXN2; (+) strand; PAM type: NRG; PAM sequence: AAG
tggttttatttatcagtgtg

SEQ ID NO: 47062 - DNA, 20 bp, Artificial Sequence
  Description of Artificial Sequence: Synthetic oligonucleotide
  Target: ATXN2; (+) strand; PAM type: NRG; PAM sequence: TAG
ttttatttatcagtgtgaag

SEQ ID NO: 47063 - DNA, 20 bp, Artificial Sequence
  Description of Artificial Sequence: Synthetic oligonucleotide
  Target: ATXN2; (+) strand; PAM type: NRG; PAM sequence: AGG
tttatttatcagtgtgaagt

SEQ ID NO: 47064 - DNA, 20 bp, Artificial Sequence
  Description of Artificial Sequence: Synthetic oligonucleotide
  Target: ATXN2; (+) strand; PAM type: NRG; PAM sequence: CAG
ctaatttgtccccaatgtcc

SEQ ID NO: 47065 - DNA, 20 bp, Artificial Sequence
  Description of Artificial Sequence: Synthetic oligonucleotide
  Target: ATXN2; (+) strand; PAM type: NRG; PAM sequence: CAG
tgaataatccacctttcctc

SEQ ID NO: 47066 - DNA, 20 bp, Artificial Sequence
  Description of Artificial Sequence: Synthetic oligonucleotide
  Target: ATXN2; (+) strand; PAM type: NRG; PAM sequence: AAG
ccacctttcctccagaatta

SEQ ID NO: 47067 - DNA, 20 bp, Artificial Sequence
  Description of Artificial Sequence: Synthetic oligonucleotide
  Target: ATXN2; (+) strand; PAM type: NRG; PAM sequence: CAG
ataaaatacccacataaatt

SEQ ID NO: 47068 - DNA, 20 bp, Artificial Sequence
  Description of Artificial Sequence: Synthetic oligonucleotide
  Target: ATXN2; (+) strand; PAM type: NRG; PAM sequence: TGG
tacccacataaattcagttt

SEQ ID NO: 47069 - DNA, 20 bp, Artificial Sequence
  Description of Artificial Sequence: Synthetic oligonucleotide
  Target: ATXN2; (+) strand; PAM type: NRG; PAM sequence: TAG
agttttggatgctccatacg

SEQ ID NO: 47070 - DNA, 20 bp, Artificial Sequence
  Description of Artificial Sequence: Synthetic oligonucleotide
  Target: ATXN2; (+) strand; PAM type: NRG; PAM sequence: CAG
tccatacgtagccactgtga

SEQ ID NO: 47071 - DNA, 20 bp, Artificial Sequence
  Description of Artificial Sequence: Synthetic oligonucleotide
  Target: ATXN2; (+) strand; PAM type: NRG; PAM sequence: CAG
ttttttttttttttttgaaa

SEQ ID NO: 47072 - DNA, 20 bp, Artificial Sequence
  Description of Artificial Sequence: Synthetic oligonucleotide
  Target: ATXN2; (+) strand; PAM type: NRG; PAM sequence: GAG
ttttttttttttttgaaaca

SEQ ID NO: 47073 - DNA, 20 bp, Artificial Sequence
  Description of Artificial Sequence: Synthetic oligonucleotide
  Target: ATXN2; (+) strand; PAM type: NRG; PAM sequence: CAG
agagttttactcttgttgcc

SEQ ID NO: 47074 - DNA, 20 bp, Artificial Sequence
  Description of Artificial Sequence: Synthetic oligonucleotide
  Target: ATXN2; (+) strand; PAM type: NRG; PAM sequence: AGG
gagttttactcttgttgccc

SEQ ID NO: 47075 - DNA, 20 bp, Artificial Sequence
  Description of Artificial Sequence: Synthetic oligonucleotide
  Target: ATXN2; (+) strand; PAM type: NRG; PAM sequence: TGG
tttactcttgttgcccaggc

SEQ ID NO: 47076 - DNA, 20 bp, Artificial Sequence
  Description of Artificial Sequence: Synthetic oligonucleotide
  Target: ATXN2; (+) strand; PAM type: NRG; PAM sequence: GAG
tactcttgttgcccaggctg

SEQ ID NO: 47077 - DNA, 20 bp, Artificial Sequence
  Description of Artificial Sequence: Synthetic oligonucleotide
  Target: ATXN2; (+) strand; PAM type: NRG; PAM sequence: TGG
ttgcccaggctggagtgcaa

SEQ ID NO: 47078 - DNA, 20 bp, Artificial Sequence
  Description of Artificial Sequence: Synthetic oligonucleotide
  Target: ATXN2; (+) strand; PAM type: NRG; PAM sequence: CGG
ggagtgcaatggcgcgatct

SEQ ID NO: 47079 - DNA, 20 bp, Artificial Sequence
  Description of Artificial Sequence: Synthetic oligonucleotide
  Target: ATXN2; (+) strand; PAM type: NRG; PAM sequence: GAG
cactgcaacctccacctccc

SEQ ID NO: 47080 - DNA, 20 bp, Artificial Sequence
  Description of Artificial Sequence: Synthetic oligonucleotide
  Target: ATXN2; (+) strand; PAM type: NRG; PAM sequence: AAG
aacctccacctcccgagttc

SEQ ID NO: 47081 - DNA, 20 bp, Artificial Sequence
  Description of Artificial Sequence: Synthetic oligonucleotide
  Target: ATXN2; (+) strand; PAM type: NRG; PAM sequence: CAG
ttcaagcgattctcctgcct

SEQ ID NO: 47082 - DNA, 20 bp, Artificial Sequence
  Description of Artificial Sequence: Synthetic oligonucleotide
  Target: ATXN2; (+) strand; PAM type: NRG; PAM sequence: GAG
ttctcctgcctcagcctccc

SEQ ID NO: 47083 - DNA, 20 bp, Artificial Sequence
  Description of Artificial Sequence: Synthetic oligonucleotide
  Target: ATXN2; (+) strand; PAM type: NRG; PAM sequence: TAG
tcctgcctcagcctcccgag

SEQ ID NO: 47084 - DNA, 20 bp, Artificial Sequence
  Description of Artificial Sequence: Synthetic oligonucleotide
  Target: ATXN2; (+) strand; PAM type: NRG; PAM sequence: TGG
gcctcagcctcccgagtagc

SEQ ID NO: 47085 - DNA, 20 bp, Artificial Sequence
  Description of Artificial Sequence: Synthetic oligonucleotide
  Target: ATXN2; (+) strand; PAM type: NRG; PAM sequence: GGG
cctcagcctcccgagtagct

SEQ ID NO: 47086 - DNA, 20 bp, Artificial Sequence
  Description of Artificial Sequence: Synthetic oligonucleotide
  Target: ATXN2; (+) strand; PAM type: NRG; PAM sequence: CAG
ctcccgagtagctgggacta

SEQ ID NO: 47087 - DNA, 20 bp, Artificial Sequence
  Description of Artificial Sequence: Synthetic oligonucleotide
  Target: ATXN2; (+) strand; PAM type: NRG; PAM sequence: AGG
tcccgagtagctgggactac

SEQ ID NO: 47088 - DNA, 20 bp, Artificial Sequence
  Description of Artificial Sequence: Synthetic oligonucleotide
  Target: ATXN2; (+) strand; PAM type: NRG; PAM sequence: CGG
caggtatgcgccaccatgac

SEQ ID NO: 47089 - DNA, 20 bp, Artificial Sequence
  Description of Artificial Sequence: Synthetic oligonucleotide
  Target: ATXN2; (+) strand; PAM type: NRG; PAM sequence: TAG
accggctaattttgtatttt

SEQ ID NO: 47090 - DNA, 20 bp, Artificial Sequence
  Description of Artificial Sequence: Synthetic oligonucleotide
  Target: ATXN2; (+) strand; PAM type: NRG; PAM sequence: TAG
ggctaattttgtatttttag

SEQ ID NO: 47091 - DNA, 20 bp, Artificial Sequence
  Description of Artificial Sequence: Synthetic oligonucleotide
  Target: ATXN2; (+) strand; PAM type: NRG; PAM sequence: GAG
ctaattttgtatttttagta

SEQ ID NO: 47092 - DNA, 20 bp, Artificial Sequence
  Description of Artificial Sequence: Synthetic oligonucleotide
  Target: ATXN2; (+) strand; PAM type: NRG; PAM sequence: CGG
ttttgtatttttagtagaga

SEQ ID NO: 47093 - DNA, 20 bp, Artificial Sequence
  Description of Artificial Sequence: Synthetic oligonucleotide
  Target: ATXN2; (+) strand; PAM type: NRG; PAM sequence: GGG
tttgtatttttagtagagac

SEQ ID NO: 47094 - DNA, 20 bp, Artificial Sequence
  Description of Artificial Sequence: Synthetic oligonucleotide
  Target: ATXN2; (+) strand; PAM type: NRG; PAM sequence: GGG
ttgtatttttagtagagacg

SEQ ID NO: 47095 - DNA, 20 bp, Artificial Sequence
  Description of Artificial Sequence: Synthetic oligonucleotide
  Target: ATXN2; (+) strand; PAM type: NRG; PAM sequence: TGG
gagacggggtttctccatgt

SEQ ID NO: 47096 - DNA, 20 bp, Artificial Sequence
  Description of Artificial Sequence: Synthetic oligonucleotide
  Target: ATXN2; (+) strand; PAM type: NRG; PAM sequence: CAG
cggggtttctccatgttggt

SEQ ID NO: 47097 - DNA, 20 bp, Artificial Sequence
  Description of Artificial Sequence: Synthetic oligonucleotide
  Target: ATXN2; (+) strand; PAM type: NRG; PAM sequence: AGG
ggggtttctccatgttggtc

SEQ ID NO: 47098 - DNA, 20 bp, Artificial Sequence
  Description of Artificial Sequence: Synthetic oligonucleotide
  Target: ATXN2; (+) strand; PAM type: NRG; PAM sequence: TGG
tttctccatgttggtcaggc

SEQ ID NO: 47099 - DNA, 20 bp, Artificial Sequence
  Description of Artificial Sequence: Synthetic oligonucleotide
  Target: ATXN2; (+) strand; PAM type: NRG; PAM sequence: CAG
tggtcatgatctgcctgcct

SEQ ID NO: 47100 - DNA, 20 bp, Artificial Sequence
  Description of Artificial Sequence: Synthetic oligonucleotide
  Target: ATXN2; (+) strand; PAM type: NRG; PAM sequence: AAG
ctgcctgcctcagcctccca

SEQ ID NO: 47101 - DNA, 20 bp, Artificial Sequence
  Description of Artificial Sequence: Synthetic oligonucleotide
  Target: ATXN2; (+) strand; PAM type: NRG; PAM sequence: TGG
gcctcagcctcccaaagtgc

SEQ ID NO: 47102 - DNA, 20 bp, Artificial Sequence
  Description of Artificial Sequence: Synthetic oligonucleotide
  Target: ATXN2; (+) strand; PAM type: NRG; PAM sequence: TAG
ctcccaaagtgctggaatta

SEQ ID NO: 47103 - DNA, 20 bp, Artificial Sequence
  Description of Artificial Sequence: Synthetic oligonucleotide
  Target: ATXN2; (+) strand; PAM type: NRG; PAM sequence: AGG
tcccaaagtgctggaattat

SEQ ID NO: 47104 - DNA, 20 bp, Artificial Sequence
  Description of Artificial Sequence: Synthetic oligonucleotide
  Target: ATXN2; (+) strand; PAM type: NRG; PAM sequence: GAG
agtgctggaattataggcgt

SEQ ID NO: 47105 - DNA, 20 bp, Artificial Sequence
  Description of Artificial Sequence: Synthetic oligonucleotide
  Target: ATXN2; (+) strand; PAM type: NRG; PAM sequence: CAG
taggcgtgagccaccgcacc

SEQ ID NO: 47106 - DNA, 20 bp, Artificial Sequence
  Description of Artificial Sequence: Synthetic oligonucleotide
  Target: ATXN2; (+) strand; PAM type: NRG; PAM sequence: AAG
agccaccgcacccagctgac

SEQ ID NO: 47107 - DNA, 20 bp, Artificial Sequence
  Description of Artificial Sequence: Synthetic oligonucleotide
  Target: ATXN2; (+) strand; PAM type: NRG; PAM sequence: TAG
tttaattctgacatattttg

SEQ ID NO: 47108 - DNA, 20 bp, Artificial Sequence
  Description of Artificial Sequence: Synthetic oligonucleotide
  Target: ATXN2; (+) strand; PAM type: NRG; PAM sequence: AGG
ttaattctgacatattttgt

SEQ ID NO: 47109 - DNA, 20 bp, Artificial Sequence
  Description of Artificial Sequence: Synthetic oligonucleotide
  Target: ATXN2; (+) strand; PAM type: NRG; PAM sequence: GGG
taattctgacatattttgta

SEQ ID NO: 47110 - DNA, 20 bp, Artificial Sequence
  Description of Artificial Sequence: Synthetic oligonucleotide
  Target: ATXN2; (+) strand; PAM type: NRG; PAM sequence: AAG
tctgacatattttgtagggc

SEQ ID NO: 47111 - DNA, 20 bp, Artificial Sequence
  Description of Artificial Sequence: Synthetic oligonucleotide
  Target: ATXN2; (+) strand; PAM type: NRG; PAM sequence: TGG
gtcctcctttatgactcttg

SEQ ID NO: 47112 - DNA, 20 bp, Artificial Sequence
  Description of Artificial Sequence: Synthetic oligonucleotide
  Target: ATXN2; (+) strand; PAM type: NRG; PAM sequence: AAG
cttgtggaaaaaaatttcca

SEQ ID NO: 47113 - DNA, 20 bp, Artificial Sequence
  Description of Artificial Sequence: Synthetic oligonucleotide
  Target: ATXN2; (+) strand; PAM type: NRG; PAM sequence: AAG
gttaatacacataatctaat

SEQ ID NO: 47114 - DNA, 20 bp, Artificial Sequence
  Description of Artificial Sequence: Synthetic oligonucleotide
  Target: ATXN2; (+) strand; PAM type: NRG; PAM sequence: TAG
acacataatctaataagctt

SEQ ID NO: 47115 - DNA, 20 bp, Artificial Sequence
  Description of Artificial Sequence: Synthetic oligonucleotide
  Target: ATXN2; (+) strand; PAM type: NRG; PAM sequence: CGG
tttgtcaatttctacaaaaa

SEQ ID NO: 47116 - DNA, 20 bp, Artificial Sequence
  Description of Artificial Sequence: Synthetic oligonucleotide
  Target: ATXN2; (+) strand; PAM type: NRG; PAM sequence: GAG
ataaaaattttttttttttt

SEQ ID NO: 47117 - DNA, 20 bp, Artificial Sequence
  Description of Artificial Sequence: Synthetic oligonucleotide
  Target: ATXN2; (+) strand; PAM type: NRG; PAM sequence: TGG
aaatttttttttttttgaga

SEQ ID NO: 47118 - DNA, 20 bp, Artificial Sequence
  Description of Artificial Sequence: Synthetic oligonucleotide
  Target: ATXN2; (+) strand; PAM type: NRG; PAM sequence: GAG
atttttttttttttgagatg

SEQ ID NO: 47119 - DNA, 20 bp, Artificial Sequence
  Description of Artificial Sequence: Synthetic oligonucleotide
  Target: ATXN2; (+) strand; PAM type: NRG; PAM sequence: CGG
ttttttgagatggagtcacc

SEQ ID NO: 47120 - DNA, 20 bp, Artificial Sequence
  Description of Artificial Sequence: Synthetic oligonucleotide
  Target: ATXN2; (+) strand; PAM type: NRG; PAM sequence: TGG
ttgagatggagtcacccggc

SEQ ID NO: 47121 - DNA, 20 bp, Artificial Sequence
  Description of Artificial Sequence: Synthetic oligonucleotide
  Target: ATXN2; (+) strand; PAM type: NRG; PAM sequence: GAG
gagatggagtcacccggctg

SEQ ID NO: 47122 - DNA, 20 bp, Artificial Sequence
  Description of Artificial Sequence: Synthetic oligonucleotide
  Target: ATXN2; (+) strand; PAM type: NRG; PAM sequence: CAG
acccggctggagtgcaatct

SEQ ID NO: 47123 - DNA, 20 bp, Artificial Sequence
  Description of Artificial Sequence: Synthetic oligonucleotide
  Target: ATXN2; (+) strand; PAM type: NRG; PAM sequence: CGG
ctcactgcaacctccaccta

SEQ ID NO: 47124 - DNA, 20 bp, Artificial Sequence
  Description of Artificial Sequence: Synthetic oligonucleotide
  Target: ATXN2; (+) strand; PAM type: NRG; PAM sequence: GGG
tcactgcaacctccacctac

SEQ ID NO: 47125 - DNA, 20 bp, Artificial Sequence
  Description of Artificial Sequence: Synthetic oligonucleotide
  Target: ATXN2; (+) strand; PAM type: NRG; PAM sequence: GGG
cactgcaacctccacctacg

SEQ ID NO: 47126 - DNA, 20 bp, Artificial Sequence
  Description of Artificial Sequence: Synthetic oligonucleotide
  Target: ATXN2; (+) strand; PAM type: NRG; PAM sequence: GAG
aacctccacctacggggttc

SEQ ID NO: 47127 - DNA, 20 bp, Artificial Sequence
  Description of Artificial Sequence: Synthetic oligonucleotide
  Target: ATXN2; (+) strand; PAM type: NRG; PAM sequence: CAG
ttcgagtaattctcctgcct

SEQ ID NO: 47128 - DNA, 20 bp, Artificial Sequence
  Description of Artificial Sequence: Synthetic oligonucleotide
  Target: ATXN2; (+) strand; PAM type: NRG; PAM sequence: AAG
ttctcctgcctcagcttccc

SEQ ID NO: 47129 - DNA, 20 bp, Artificial Sequence
  Description of Artificial Sequence: Synthetic oligonucleotide
  Target: ATXN2; (+) strand; PAM type: NRG; PAM sequence: TAG
tcctgcctcagcttcccaag

SEQ ID NO: 47130 - DNA, 20 bp, Artificial Sequence
  Description of Artificial Sequence: Synthetic oligonucleotide
  Target: ATXN2; (+) strand; PAM type: NRG; PAM sequence: TGG
gcctcagcttcccaagtagc

SEQ ID NO: 47131 - DNA, 20 bp, Artificial Sequence
  Description of Artificial Sequence: Synthetic oligonucleotide
  Target: ATXN2; (+) strand; PAM type: NRG; PAM sequence: CAG
ctggtacctgccaccatgtc

SEQ ID NO: 47132 - DNA, 20 bp, Artificial Sequence
  Description of Artificial Sequence: Synthetic oligonucleotide
  Target: ATXN2; (+) strand; PAM type: NRG; PAM sequence: TAG
ccagatgatttttgtatttt

SEQ ID NO: 47133 - DNA, 20 bp, Artificial Sequence
  Description of Artificial Sequence: Synthetic oligonucleotide
  Target: ATXN2; (+) strand; PAM type: NRG; PAM sequence: TAG
gatgatttttgtatttttag

SEQ ID NO: 47134 - DNA, 20 bp, Artificial Sequence
  Description of Artificial Sequence: Synthetic oligonucleotide
  Target: ATXN2; (+) strand; PAM type: NRG; PAM sequence: GAG
tgatttttgtatttttagta

SEQ ID NO: 47135 - DNA, 20 bp, Artificial Sequence
  Description of Artificial Sequence: Synthetic oligonucleotide
  Target: ATXN2; (+) strand; PAM type: NRG; PAM sequence: CAG
ttttgtatttttagtagaga

SEQ ID NO: 47136 - DNA, 20 bp, Artificial Sequence
  Description of Artificial Sequence: Synthetic oligonucleotide
  Target: ATXN2; (+) strand; PAM type: NRG; PAM sequence: AGG
tttgtatttttagtagagac

SEQ ID NO: 47137 - DNA, 20 bp, Artificial Sequence
  Description of Artificial Sequence: Synthetic oligonucleotide
  Target: ATXN2; (+) strand; PAM type: NRG; PAM sequence: GGG
ttgtatttttagtagagaca

SEQ ID NO: 47138 - DNA, 20 bp, Artificial Sequence
  Description of Artificial Sequence: Synthetic oligonucleotide
  Target: ATXN2; (+) strand; PAM type: NRG; PAM sequence: TGG
gagacagggtttcaccatgt

SEQ ID NO: 47139 - DNA, 20 bp, Artificial Sequence
  Description of Artificial Sequence: Synthetic oligonucleotide
  Target: ATXN2; (+) strand; PAM type: NRG; PAM sequence: CAG
cagggtttcaccatgttggc

SEQ ID NO: 47140 - DNA, 20 bp, Artificial Sequence
  Description of Artificial Sequence: Synthetic oligonucleotide
  Target: ATXN2; (+) strand; PAM type: NRG; PAM sequence: AGG
agggtttcaccatgttggcc

SEQ ID NO: 47141 - DNA, 20 bp, Artificial Sequence
  Description of Artificial Sequence: Synthetic oligonucleotide
  Target: ATXN2; (+) strand; PAM type: NRG; PAM sequence: TGG
tttcaccatgttggccaggc

SEQ ID NO: 47142 - DNA, 20 bp, Artificial Sequence
  Description of Artificial Sequence: Synthetic oligonucleotide
  Target: ATXN2; (+) strand; PAM type: NRG; PAM sequence: AAG
ggtctcaaactcccgtcctc

SEQ ID NO: 47143 - DNA, 20 bp, Artificial Sequence
  Description of Artificial Sequence: Synthetic oligonucleotide
  Target: ATXN2; (+) strand; PAM type: NRG; PAM sequence: CGG
aactcccgtcctcaagtgat

SEQ ID NO: 47144 - DNA, 20 bp, Artificial Sequence
  Description of Artificial Sequence: Synthetic oligonucleotide
  Target: ATXN2; (+) strand; PAM type: NRG; PAM sequence: CAG
ctcaagtgatcggcccacct

SEQ ID NO: 47145 - DNA, 20 bp, Artificial Sequence
  Description of Artificial Sequence: Synthetic oligonucleotide
  Target: ATXN2; (+) strand; PAM type: NRG; PAM sequence: AAG
cggcccacctcagccttcca

SEQ ID NO: 47146 - DNA, 20 bp, Artificial Sequence
  Description of Artificial Sequence: Synthetic oligonucleotide
  Target: ATXN2; (+) strand; PAM type: NRG; PAM sequence: TGG
acctcagccttccaaagtgc

SEQ ID NO: 47147 - DNA, 20 bp, Artificial Sequence
  Description of Artificial Sequence: Synthetic oligonucleotide
  Target: ATXN2; (+) strand; PAM type: NRG; PAM sequence: GGG
cctcagccttccaaagtgct

SEQ ID NO: 47148 - DNA, 20 bp, Artificial Sequence
  Description of Artificial Sequence: Synthetic oligonucleotide
  Target: ATXN2; (+) strand; PAM type: NRG; PAM sequence: CAG
cttccaaagtgctgggatta

SEQ ID NO: 47149 - DNA, 20 bp, Artificial Sequence
  Description of Artificial Sequence: Synthetic oligonucleotide
  Target: ATXN2; (+) strand; PAM type: NRG; PAM sequence: AGG
ttccaaagtgctgggattac

SEQ ID NO: 47150 - DNA, 20 bp, Artificial Sequence
  Description of Artificial Sequence: Synthetic oligonucleotide
  Target: ATXN2; (+) strand; PAM type: NRG; PAM sequence: GAG
agtgctgggattacaggcgt

SEQ ID NO: 47151 - DNA, 20 bp, Artificial Sequence
  Description of Artificial Sequence: Synthetic oligonucleotide
  Target: ATXN2; (+) strand; PAM type: NRG; PAM sequence: CGG
caggcgtgagccaacgtgcc

SEQ ID NO: 47152 - DNA, 20 bp, Artificial Sequence
  Description of Artificial Sequence: Synthetic oligonucleotide
  Target: ATXN2; (+) strand; PAM type: NRG; PAM sequence: TAG
aaaactgaatatattatctt

SEQ ID NO: 47153 - DNA, 20 bp, Artificial Sequence
  Description of Artificial Sequence: Synthetic oligonucleotide
  Target: ATXN2; (+) strand; PAM type: NRG; PAM sequence: GAG
aactgaatatattatcttta

SEQ ID NO: 47154 - DNA, 20 bp, Artificial Sequence
  Description of Artificial Sequence: Synthetic oligonucleotide
  Target: ATXN2; (+) strand; PAM type: NRG; PAM sequence: GAG
ttatctttagagatttattt

SEQ ID NO: 47155 - DNA, 20 bp, Artificial Sequence
  Description of Artificial Sequence: Synthetic oligonucleotide
  Target: ATXN2; (+) strand; PAM type: NRG; PAM sequence: AGG
tatctttagagatttatttg

SEQ ID NO: 47156 - DNA, 20 bp, Artificial Sequence
  Description of Artificial Sequence: Synthetic oligonucleotide
  Target: ATXN2; (+) strand; PAM type: NRG; PAM sequence: TAG
gaggaaaattgacaacgttg

SEQ ID NO: 47157 - DNA, 20 bp, Artificial Sequence
  Description of Artificial Sequence: Synthetic oligonucleotide
  Target: ATXN2; (+) strand; PAM type: NRG; PAM sequence: AAG
gtattaaataattccattca

SEQ ID NO: 47158 - DNA, 20 bp, Artificial Sequence
  Description of Artificial Sequence: Synthetic oligonucleotide
  Target: ATXN2; (+) strand; PAM type: NRG; PAM sequence: TGG
aaataattccattcaaagta

SEQ ID NO: 47159 - DNA, 20 bp, Artificial Sequence
  Description of Artificial Sequence: Synthetic oligonucleotide
  Target: ATXN2; (+) strand; PAM type: NRG; PAM sequence: TAG
aagtatggcatgtttccatt

SEQ ID NO: 47160 - DNA, 20 bp, Artificial Sequence
  Description of Artificial Sequence: Synthetic oligonucleotide
  Target: ATXN2; (+) strand; PAM type: NRG; PAM sequence: CAG
atctacttttatgtctcctt

SEQ ID NO: 47161 - DNA, 20 bp, Artificial Sequence
  Description of Artificial Sequence: Synthetic oligonucleotide
  Target: ATXN2; (+) strand; PAM type: NRG; PAM sequence: GAG
ctatgcttatttttgttttt

SEQ ID NO: 47162 - DNA, 20 bp, Artificial Sequence
  Description of Artificial Sequence: Synthetic oligonucleotide
  Target: ATXN2; (+) strand; PAM type: NRG; PAM sequence: CAG
gcttatttttgtttttgaga

SEQ ID NO: 47163 - DNA, 20 bp, Artificial Sequence
  Description of Artificial Sequence: Synthetic oligonucleotide
  Target: ATXN2; (+) strand; PAM type: NRG; PAM sequence: GAG
ttatttttgtttttgagaca

SEQ ID NO: 47164 - DNA, 20 bp, Artificial Sequence
  Description of Artificial Sequence: Synthetic oligonucleotide
  Target: ATXN2; (+) strand; PAM type: NRG; PAM sequence: TGG
tttgtttttgagacagagtc

SEQ ID NO: 47165 - DNA, 20 bp, Artificial Sequence
  Description of Artificial Sequence: Synthetic oligonucleotide
  Target: ATXN2; (+) strand; PAM type: NRG; PAM sequence: CAG
cagagtctggctctgtcacc

SEQ ID NO: 47166 - DNA, 20 bp, Artificial Sequence
  Description of Artificial Sequence: Synthetic oligonucleotide
  Target: ATXN2; (+) strand; PAM type: NRG; PAM sequence: AGG
agagtctggctctgtcaccc

SEQ ID NO: 47167 - DNA, 20 bp, Artificial Sequence
  Description of Artificial Sequence: Synthetic oligonucleotide
  Target: ATXN2; (+) strand; PAM type: NRG; PAM sequence: TGG
tctggctctgtcacccaggc

SEQ ID NO: 47168 - DNA, 20 bp, Artificial Sequence
  Description of Artificial Sequence: Synthetic oligonucleotide
  Target: ATXN2; (+) strand; PAM type: NRG; PAM sequence: GAG
tggctctgtcacccaggctg

SEQ ID NO: 47169 - DNA, 20 bp, Artificial Sequence
  Description of Artificial Sequence: Synthetic oligonucleotide
  Target: ATXN2; (+) strand; PAM type: NRG; PAM sequence: CAG
ctgtcacccaggctggagtg

SEQ ID NO: 47170 - DNA, 20 bp, Artificial Sequence
  Description of Artificial Sequence: Synthetic oligonucleotide
  Target: ATXN2; (+) strand; PAM type: NRG; PAM sequence: CGG
ggagtgcagcaccaccatct

SEQ ID NO: 47171 - DNA, 20 bp, Artificial Sequence
  Description of Artificial Sequence: Synthetic oligonucleotide
  Target: ATXN2; (+) strand; PAM type: NRG; PAM sequence: TGG
tcattgcaaactccgtctcc

SEQ ID NO: 47172 - DNA, 20 bp, Artificial Sequence
  Description of Artificial Sequence: Synthetic oligonucleotide
  Target: ATXN2; (+) strand; PAM type: NRG; PAM sequence: AAG
aaactccgtctcctggattc

SEQ ID NO: 47173 - DNA, 20 bp, Artificial Sequence
  Description of Artificial Sequence: Synthetic oligonucleotide
  Target: ATXN2; (+) strand; PAM type: NRG; PAM sequence: CAG
ttcaagcgattctcctgcct

SEQ ID NO: 47174 - DNA, 20 bp, Artificial Sequence
  Description of Artificial Sequence: Synthetic oligonucleotide
  Target: ATXN2; (+) strand; PAM type: NRG; PAM sequence: AAG
ttctcctgcctcagcctccc

SEQ ID NO: 47175 - DNA, 20 bp, Artificial Sequence
  Description of Artificial Sequence: Synthetic oligonucleotide
  Target: ATXN2; (+) strand; PAM type: NRG; PAM sequence: TAG
tcctgcctcagcctcccaag

SEQ ID NO: 47176 - DNA, 20 bp, Artificial Sequence
  Description of Artificial Sequence: Synthetic oligonucleotide
  Target: ATXN2; (+) strand; PAM type: NRG; PAM sequence: TGG
gcctcagcctcccaagtagc

SEQ ID NO: 47177 - DNA, 20 bp, Artificial Sequence
  Description of Artificial Sequence: Synthetic oligonucleotide
  Target: ATXN2; (+) strand; PAM type: NRG; PAM sequence: GGG
cctcagcctcccaagtagct

SEQ ID NO: 47178 - DNA, 20 bp, Artificial Sequence
  Description of Artificial Sequence: Synthetic oligonucleotide
  Target: ATXN2; (+) strand; PAM type: NRG; PAM sequence: CAG
ctcccaagtagctgggatta

SEQ ID NO: 47179 - DNA, 20 bp, Artificial Sequence
  Description of Artificial Sequence: Synthetic oligonucleotide
  Target: ATXN2; (+) strand; PAM type: NRG; PAM sequence: AGG
tcccaagtagctgggattac

SEQ ID NO: 47180 - DNA, 20 bp, Artificial Sequence
  Description of Artificial Sequence: Synthetic oligonucleotide
  Target: ATXN2; (+) strand; PAM type: NRG; PAM sequence: CAG
caggtgcccgtcacctcgcc

SEQ ID NO: 47181 - DNA, 20 bp, Artificial Sequence
  Description of Artificial Sequence: Synthetic oligonucleotide
  Target: ATXN2; (+) strand; PAM type: NRG; PAM sequence: TAG
ccagctaatttttgtatttt

SEQ ID NO: 47182 - DNA, 20 bp, Artificial Sequence
  Description of Artificial Sequence: Synthetic oligonucleotide
  Target: ATXN2; (+) strand; PAM type: NRG; PAM sequence: TAG
gctaatttttgtatttttag

SEQ ID NO: 47183 - DNA, 20 bp, Artificial Sequence
  Description of Artificial Sequence: Synthetic oligonucleotide
  Target: ATXN2; (+) strand; PAM type: NRG; PAM sequence: GAG
taatttttgtatttttagta

SEQ ID NO: 47184 - DNA, 20 bp, Artificial Sequence
  Description of Artificial Sequence: Synthetic oligonucleotide
  Target: ATXN2; (+) strand; PAM type: NRG; PAM sequence: CGG
tatttttagtagagccatgt

SEQ ID NO: 47185 - DNA, 20 bp, Artificial Sequence
  Description of Artificial Sequence: Synthetic oligonucleotide
  Target: ATXN2; (+) strand; PAM type: NRG; PAM sequence: CAG
tttagtagagccatgtcggc

SEQ ID NO: 47186 - DNA, 20 bp, Artificial Sequence
  Description of Artificial Sequence: Synthetic oligonucleotide
  Target: ATXN2; (+) strand; PAM type: NRG; PAM sequence: AGG
ttagtagagccatgtcggcc

SEQ ID NO: 47187 - DNA, 20 bp, Artificial Sequence
  Description of Artificial Sequence: Synthetic oligonucleotide
  Target: ATXN2; (+) strand; PAM type: NRG; PAM sequence: TGG
tagagccatgtcggccaggc

SEQ ID NO: 47188 - DNA, 20 bp, Artificial Sequence
  Description of Artificial Sequence: Synthetic oligonucleotide
  Target: ATXN2; (+) strand; PAM type: NRG; PAM sequence: CAG
tggtctccaactccttacct

SEQ ID NO: 47189 - DNA, 20 bp, Artificial Sequence
  Description of Artificial Sequence: Synthetic oligonucleotide
  Target: ATXN2; (+) strand; PAM type: NRG; PAM sequence: AGG
ggtctccaactccttacctc

SEQ ID NO: 47190 - DNA, 20 bp, Artificial Sequence
  Description of Artificial Sequence: Synthetic oligonucleotide
  Target: ATXN2; (+) strand; PAM type: NRG; PAM sequence: TGG
ctcaggtgatccgccacgcc

SEQ ID NO: 47191 - DNA, 20 bp, Artificial Sequence
  Description of Artificial Sequence: Synthetic oligonucleotide
  Target: ATXN2; (+) strand; PAM type: NRG; PAM sequence: TGG
ggtgatccgccacgcctggc

SEQ ID NO: 47192 - DNA, 20 bp, Artificial Sequence
  Description of Artificial Sequence: Synthetic oligonucleotide
  Target: ATXN2; (+) strand; PAM type: NRG; PAM sequence: GAG
cgcctggctggtttgttttt

SEQ ID NO: 47193 - DNA, 20 bp, Artificial Sequence
  Description of Artificial Sequence: Synthetic oligonucleotide
  Target: ATXN2; (+) strand; PAM type: NRG; PAM sequence: AAG
ggctggtttgtttttgagac

SEQ ID NO: 47194 - DNA, 20 bp, Artificial Sequence
  Description of Artificial Sequence: Synthetic oligonucleotide
  Target: ATXN2; (+) strand; PAM type: NRG; PAM sequence: AGG
gctggtttgtttttgagaca

SEQ ID NO: 47195 - DNA, 20 bp, Artificial Sequence
  Description of Artificial Sequence: Synthetic oligonucleotide
  Target: ATXN2; (+) strand; PAM type: NRG; PAM sequence: CAG
acaaggtcttgcttgtcacc

SEQ ID NO: 47196 - DNA, 20 bp, Artificial Sequence
  Description of Artificial Sequence: Synthetic oligonucleotide
  Target: ATXN2; (+) strand; PAM type: NRG; PAM sequence: TGG
ggtcttgcttgtcacccagc

SEQ ID NO: 47197 - DNA, 20 bp, Artificial Sequence
  Description of Artificial Sequence: Synthetic oligonucleotide
  Target: ATXN2; (+) strand; PAM type: NRG; PAM sequence: GAG
tcttgcttgtcacccagctg

SEQ ID NO: 47198 - DNA, 20 bp, Artificial Sequence
  Description of Artificial Sequence: Synthetic oligonucleotide
  Target: ATXN2; (+) strand; PAM type: NRG; PAM sequence: TGG
gtcacccagctggagtgccg

SEQ ID NO: 47199 - DNA, 20 bp, Artificial Sequence
  Description of Artificial Sequence: Synthetic oligonucleotide
  Target: ATXN2; (+) strand; PAM type: NRG; PAM sequence: CAG
ggagtgccgtggcataacca

SEQ ID NO: 47200 - DNA, 20 bp, Artificial Sequence
  Description of Artificial Sequence: Synthetic oligonucleotide
  Target: ATXN2; (+) strand; PAM type: NRG; PAM sequence: CAG
ggcataaccacagctcactg

SEQ ID NO: 47201 - DNA, 20 bp, Artificial Sequence
  Description of Artificial Sequence: Synthetic oligonucleotide
  Target: ATXN2; (+) strand; PAM type: NRG; PAM sequence: TGG
tcactgcagccttgacttac

SEQ ID NO: 47202 - DNA, 20 bp, Artificial Sequence
  Description of Artificial Sequence: Synthetic oligonucleotide
  Target: ATXN2; (+) strand; PAM type: NRG; PAM sequence: AAG
agccttgacttactggctgc

SEQ ID NO: 47203 - DNA, 20 bp, Artificial Sequence
  Description of Artificial Sequence: Synthetic oligonucleotide
  Target: ATXN2; (+) strand; PAM type: NRG; PAM sequence: CAG
tgcaagtgaacctctcacct

SEQ ID NO: 47204 - DNA, 20 bp, Artificial Sequence
  Description of Artificial Sequence: Synthetic oligonucleotide
  Target: ATXN2; (+) strand; PAM type: NRG; PAM sequence: AAG
acctctcacctcagcccacc

SEQ ID NO: 47205 - DNA, 20 bp, Artificial Sequence
  Description of Artificial Sequence: Synthetic oligonucleotide
  Target: ATXN2; (+) strand; PAM type: NRG; PAM sequence: TAG
tctcacctcagcccaccaag

SEQ ID NO: 47206 - DNA, 20 bp, Artificial Sequence
  Description of Artificial Sequence: Synthetic oligonucleotide
  Target: ATXN2; (+) strand; PAM type: NRG; PAM sequence: TGG
acctcagcccaccaagtagc

SEQ ID NO: 47207 - DNA, 20 bp, Artificial Sequence
  Description of Artificial Sequence: Synthetic oligonucleotide
  Target: ATXN2; (+) strand; PAM type: NRG; PAM sequence: GGG
cctcagcccaccaagtagct

SEQ ID NO: 47208 - DNA, 20 bp, Artificial Sequence
  Description of Artificial Sequence: Synthetic oligonucleotide
  Target: ATXN2; (+) strand; PAM type: NRG; PAM sequence: CAG
ccaccaagtagctgggttta

SEQ ID NO: 47209 - DNA, 20 bp, Artificial Sequence
  Description of Artificial Sequence: Synthetic oligonucleotide
  Target: ATXN2; (+) strand; PAM type: NRG; PAM sequence: AGG
caccaagtagctgggtttac

SEQ ID NO: 47210 - DNA, 20 bp, Artificial Sequence
  Description of Artificial Sequence: Synthetic oligonucleotide
  Target: ATXN2; (+) strand; PAM type: NRG; PAM sequence: GAG
ccaagtagctgggtttacag

SEQ ID NO: 47211 - DNA, 20 bp, Artificial Sequence
  Description of Artificial Sequence: Synthetic oligonucleotide
  Target: ATXN2; (+) strand; PAM type: NRG; PAM sequence: CGG
caggagtacaccaccacacc

SEQ ID NO: 47212 - DNA, 20 bp, Artificial Sequence
  Description of Artificial Sequence: Synthetic oligonucleotide
  Target: ATXN2; (+) strand; PAM type: NRG; PAM sequence: TAG
gctaatttttgtactttttg

SEQ ID NO: 47213 - DNA, 20 bp, Artificial Sequence
  Description of Artificial Sequence: Synthetic oligonucleotide
  Target: ATXN2; (+) strand; PAM type: NRG; PAM sequence: GAG
taatttttgtactttttgta

SEQ ID NO: 47214 - DNA, 20 bp, Artificial Sequence
  Description of Artificial Sequence: Synthetic oligonucleotide
  Target: ATXN2; (+) strand; PAM type: NRG; PAM sequence: TGG
ttttgtactttttgtagaga

SEQ ID NO: 47215 - DNA, 20 bp, Artificial Sequence
  Description of Artificial Sequence: Synthetic oligonucleotide
  Target: ATXN2; (+) strand; PAM type: NRG; PAM sequence: GGG
tttgtactttttgtagagat

SEQ ID NO: 47216 - DNA, 20 bp, Artificial Sequence
  Description of Artificial Sequence: Synthetic oligonucleotide
  Target: ATXN2; (+) strand; PAM type: NRG; PAM sequence: GGG
ttgtactttttgtagagatg

SEQ ID NO: 47217 - DNA, 20 bp, Artificial Sequence
  Description of Artificial Sequence: Synthetic oligonucleotide
  Target: ATXN2; (+) strand; PAM type: NRG; PAM sequence: AAG
tgtagagatggggttttgcc

SEQ ID NO: 47218 - DNA, 20 bp, Artificial Sequence
  Description of Artificial Sequence: Synthetic oligonucleotide
  Target: ATXN2; (+) strand; PAM type: NRG; PAM sequence: AAG
tggggttttgccaagttgcc

SEQ ID NO: 47219 - DNA, 20 bp, Artificial Sequence
  Description of Artificial Sequence: Synthetic oligonucleotide
  Target: ATXN2; (+) strand; PAM type: NRG; PAM sequence: AGG
ggggttttgccaagttgcca

SEQ ID NO: 47220 - DNA, 20 bp, Artificial Sequence
  Description of Artificial Sequence: Synthetic oligonucleotide
  Target: ATXN2; (+) strand; PAM type: NRG; PAM sequence: GAG
ttttgccaagttgccaaggc

SEQ ID NO: 47221 - DNA, 20 bp, Artificial Sequence
  Description of Artificial Sequence: Synthetic oligonucleotide
  Target: ATXN2; (+) strand; PAM type: NRG; PAM sequence: CAG
ctgaactcatcctcccgcct

SEQ ID NO: 47222 - DNA, 20 bp, Artificial Sequence
  Description of Artificial Sequence: Synthetic oligonucleotide
  Target: ATXN2; (+) strand; PAM type: NRG; PAM sequence: AAG
cctcccgcctcagcctccaa

SEQ ID NO: 47223 - DNA, 20 bp, Artificial Sequence
  Description of Artificial Sequence: Synthetic oligonucleotide
  Target: ATXN2; (+) strand; PAM type: NRG; PAM sequence: CAG
ctccaaaagtgttgaaatta

SEQ ID NO: 47224 - DNA, 20 bp, Artificial Sequence
  Description of Artificial Sequence: Synthetic oligonucleotide
  Target: ATXN2; (+) strand; PAM type: NRG; PAM sequence: AGG
tccaaaagtgttgaaattac

SEQ ID NO: 47225 - DNA, 20 bp, Artificial Sequence
  Description of Artificial Sequence: Synthetic oligonucleotide
  Target: ATXN2; (+) strand; PAM type: NRG; PAM sequence: GAG
agtgttgaaattacaggcat

SEQ ID NO: 47226 - DNA, 20 bp, Artificial Sequence
  Description of Artificial Sequence: Synthetic oligonucleotide
  Target: ATXN2; (+) strand; PAM type: NRG; PAM sequence: TGG
caggcatgagccactgcacc

SEQ ID NO: 47227 - DNA, 20 bp, Artificial Sequence
  Description of Artificial Sequence: Synthetic oligonucleotide
  Target: ATXN2; (+) strand; PAM type: NRG; PAM sequence: TGG
cctggcctatttctacactt

SEQ ID NO: 47228 - DNA, 20 bp, Artificial Sequence
  Description of Artificial Sequence: Synthetic oligonucleotide
  Target: ATXN2; (+) strand; PAM type: NRG; PAM sequence: TAG
tgaatcaaccttactcttac

SEQ ID NO: 47229 - DNA, 20 bp, Artificial Sequence
  Description of Artificial Sequence: Synthetic oligonucleotide
  Target: ATXN2; (+) strand; PAM type: NRG; PAM sequence: CAG
ttactcttactagtaccaca

SEQ ID NO: 47230 - DNA, 20 bp, Artificial Sequence
  Description of Artificial Sequence: Synthetic oligonucleotide
  Target: ATXN2; (+) strand; PAM type: NRG; PAM sequence: TAG
aataaaattctattttatgc

SEQ ID NO: 47231 - DNA, 20 bp, Artificial Sequence
  Description of Artificial Sequence: Synthetic oligonucleotide
  Target: ATXN2; (+) strand; PAM type: NRG; PAM sequence: GAG
taaaattctattttatgcta

SEQ ID NO: 47232 - DNA, 20 bp, Artificial Sequence
  Description of Artificial Sequence: Synthetic oligonucleotide
  Target: ATXN2; (+) strand; PAM type: NRG; PAM sequence: AGG
aaaattctattttatgctag

SEQ ID NO: 47233 - DNA, 20 bp, Artificial Sequence
  Description of Artificial Sequence: Synthetic oligonucleotide
  Target: ATXN2; (+) strand; PAM type: NRG; PAM sequence: AAG
ttttttatatttaataaatg

SEQ ID NO: 47234 - DNA, 20 bp, Artificial Sequence
  Description of Artificial Sequence: Synthetic oligonucleotide
  Target: ATXN2; (+) strand; PAM type: NRG; PAM sequence: TGG
tgaagttattgttctgactt

SEQ ID NO: 47235 - DNA, 20 bp, Artificial Sequence
  Description of Artificial Sequence: Synthetic oligonucleotide
  Target: ATXN2; (+) strand; PAM type: NRG; PAM sequence: TAG
tctgactttggcaaacatga

SEQ ID NO: 47236 - DNA, 20 bp, Artificial Sequence
  Description of Artificial Sequence: Synthetic oligonucleotide
  Target: ATXN2; (+) strand; PAM type: NRG; PAM sequence: AGG
ctgactttggcaaacatgat

SEQ ID NO: 47237 - DNA, 20 bp, Artificial Sequence
  Description of Artificial Sequence: Synthetic oligonucleotide
  Target: ATXN2; (+) strand; PAM type: NRG; PAM sequence: GGG
tgactttggcaaacatgata

SEQ ID NO: 47238 - DNA, 20 bp, Artificial Sequence
  Description of Artificial Sequence: Synthetic oligonucleotide
  Target: ATXN2; (+) strand; PAM type: NRG; PAM sequence: TAG
ctttggcaaacatgataggg

SEQ ID NO: 47239 - DNA, 20 bp, Artificial Sequence
  Description of Artificial Sequence: Synthetic oligonucleotide
  Target: ATXN2; (+) strand; PAM type: NRG; PAM sequence: GAG
ttggcaaacatgatagggta

SEQ ID NO: 47240 - DNA, 20 bp, Artificial Sequence
  Description of Artificial Sequence: Synthetic oligonucleotide
  Target: ATXN2; (+) strand; PAM type: NRG; PAM sequence: TGG
aaacatgtaactttaataaa

SEQ ID NO: 47241 - DNA, 20 bp, Artificial Sequence
  Description of Artificial Sequence: Synthetic oligonucleotide
  Target: ATXN2; (+) strand; PAM type: NRG; PAM sequence: AAG
catgtaactttaataaatgg

SEQ ID NO: 47242 - DNA, 20 bp, Artificial Sequence
  Description of Artificial Sequence: Synthetic oligonucleotide
  Target: ATXN2; (+) strand; PAM type: NRG; PAM sequence: TAG
gtaccacgaactattctgtt

SEQ ID NO: 47243 - DNA, 20 bp, Artificial Sequence
  Description of Artificial Sequence: Synthetic oligonucleotide
  Target: ATXN2; (+) strand; PAM type: NRG; PAM sequence: TAG
ctgtttagctttccattaca

SEQ ID NO: 47244 - DNA, 20 bp, Artificial Sequence
  Description of Artificial Sequence: Synthetic oligonucleotide
  Target: ATXN2; (+) strand; PAM type: NRG; PAM sequence: TGG
tctctgtactgcctccatac

SEQ ID NO: 47245 - DNA, 20 bp, Artificial Sequence
  Description of Artificial Sequence: Synthetic oligonucleotide
  Target: ATXN2; (+) strand; PAM type: NRG; PAM sequence: AAG
gcctccatactggcctcaat

SEQ ID NO: 47246 - DNA, 20 bp, Artificial Sequence
  Description of Artificial Sequence: Synthetic oligonucleotide
  Target: ATXN2; (+) strand; PAM type: NRG; PAM sequence: CAG
cctcaataagtgccactctc

SEQ ID NO: 47247 - DNA, 20 bp, Artificial Sequence
  Description of Artificial Sequence: Synthetic oligonucleotide
  Target: ATXN2; (+) strand; PAM type: NRG; PAM sequence: TGG
gccactctccagttactgct

SEQ ID NO: 47248 - DNA, 20 bp, Artificial Sequence
  Description of Artificial Sequence: Synthetic oligonucleotide
  Target: ATXN2; (+) strand; PAM type: NRG; PAM sequence: CAG
ctccagttactgcttggccc

SEQ ID NO: 47249 - DNA, 20 bp, Artificial Sequence
  Description of Artificial Sequence: Synthetic oligonucleotide
  Target: ATXN2; (+) strand; PAM type: NRG; PAM sequence: CAG
atctgtgtcttaataaacca

SEQ ID NO: 47250 - DNA, 20 bp, Artificial Sequence
  Description of Artificial Sequence: Synthetic oligonucleotide
  Target: ATXN2; (+) strand; PAM type: NRG; PAM sequence: AAG
tgtcttaataaaccacagca

SEQ ID NO: 47251 - DNA, 20 bp, Artificial Sequence
  Description of Artificial Sequence: Synthetic oligonucleotide
  Target: ATXN2; (+) strand; PAM type: NRG; PAM sequence: GAG
taataaaccacagcaaagtt

SEQ ID NO: 47252 - DNA, 20 bp, Artificial Sequence
  Description of Artificial Sequence: Synthetic oligonucleotide
  Target: ATXN2; (+) strand; PAM type: NRG; PAM sequence: AGG
aataaaccacagcaaagttg

SEQ ID NO: 47253 - DNA, 20 bp, Artificial Sequence
  Description of Artificial Sequence: Synthetic oligonucleotide
  Target: ATXN2; (+) strand; PAM type: NRG; PAM sequence: CAG
agcaaagttgaggccgtaaa

SEQ ID NO: 47254 - DNA, 20 bp, Artificial Sequence
  Description of Artificial Sequence: Synthetic oligonucleotide
  Target: ATXN2; (+) strand; PAM type: NRG; PAM sequence: CAG
ttttctaatgtcacgccgtt

SEQ ID NO: 47255 - DNA, 20 bp, Artificial Sequence
  Description of Artificial Sequence: Synthetic oligonucleotide
  Target: ATXN2; (+) strand; PAM type: NRG; PAM sequence: AAG
tctaatgtcacgccgttcag

SEQ ID NO: 47256 - DNA, 20 bp, Artificial Sequence
  Description of Artificial Sequence: Synthetic oligonucleotide
  Target: ATXN2; (+) strand; PAM type: NRG; PAM sequence: GAG
taatgtcacgccgttcagaa

SEQ ID NO: 47257 - DNA, 20 bp, Artificial Sequence
  Description of Artificial Sequence: Synthetic oligonucleotide
  Target: ATXN2; (+) strand; PAM type: NRG; PAM sequence: AAG
tctgttactgatacactatc

SEQ ID NO: 47258 - DNA, 20 bp, Artificial Sequence
  Description of Artificial Sequence: Synthetic oligonucleotide
  Target: ATXN2; (+) strand; PAM type: NRG; PAM sequence: AAG
gatacactatcaagaccaaa

SEQ ID NO: 47259 - DNA, 20 bp, Artificial Sequence
  Description of Artificial Sequence: Synthetic oligonucleotide
  Target: ATXN2; (+) strand; PAM type: NRG; PAM sequence: GAG
gaccaaaaagacaaccatat

SEQ ID NO: 47260 - DNA, 20 bp, Artificial Sequence
  Description of Artificial Sequence: Synthetic oligonucleotide
  Target: ATXN2; (+) strand; PAM type: NRG; PAM sequence: CAG
acaaccatatgagaacacaa

SEQ ID NO: 47261 - DNA, 20 bp, Artificial Sequence
  Description of Artificial Sequence: Synthetic oligonucleotide
  Target: ATXN2; (+) strand; PAM type: NRG; PAM sequence: CAG
atgagaacacaacagcacac

SEQ ID NO: 47262 - DNA, 20 bp, Artificial Sequence
  Description of Artificial Sequence: Synthetic oligonucleotide
  Target: ATXN2; (+) strand; PAM type: NRG; PAM sequence: TAG
caccagaataaaacaatctg

SEQ ID NO: 47263 - DNA, 20 bp, Artificial Sequence
  Description of Artificial Sequence: Synthetic oligonucleotide
  Target: ATXN2; (+) strand; PAM type: NRG; PAM sequence: GAG
ttcttttattttttattttt

SEQ ID NO: 47264 - DNA, 20 bp, Artificial Sequence
  Description of Artificial Sequence: Synthetic oligonucleotide
  Target: ATXN2; (+) strand; PAM type: NRG; PAM sequence: TGG
tttattttttatttttgaga

SEQ ID NO: 47265 - DNA, 20 bp, Artificial Sequence
  Description of Artificial Sequence: Synthetic oligonucleotide
  Target: ATXN2; (+) strand; PAM type: NRG; PAM sequence: GAG
tattttttatttttgagatg

SEQ ID NO: 47266 - DNA, 20 bp, Artificial Sequence
  Description of Artificial Sequence: Synthetic oligonucleotide
  Target: ATXN2; (+) strand; PAM type: NRG; PAM sequence: CAG
tggagtctcgctctgtcact

SEQ ID NO: 47267 - DNA, 20 bp, Artificial Sequence
  Description of Artificial Sequence: Synthetic oligonucleotide
  Target: ATXN2; (+) strand; PAM type: NRG; PAM sequence: AGG
ggagtctcgctctgtcactc

SEQ ID NO: 47268 - DNA, 20 bp, Artificial Sequence
  Description of Artificial Sequence: Synthetic oligonucleotide
  Target: ATXN2; (+) strand; PAM type: NRG; PAM sequence: TGG
tctcgctctgtcactcaggc

SEQ ID NO: 47269 - DNA, 20 bp, Artificial Sequence
  Description of Artificial Sequence: Synthetic oligonucleotide
  Target: ATXN2; (+) strand; PAM type: NRG; PAM sequence: GAG
tcgctctgtcactcaggctg

SEQ ID NO: 47270 - DNA, 20 bp, Artificial Sequence
  Description of Artificial Sequence: Synthetic oligonucleotide
  Target: ATXN2; (+) strand; PAM type: NRG; PAM sequence: CAG
ctgtcactcaggctggagtg

SEQ ID NO: 47271 - DNA, 20 bp, Artificial Sequence
  Description of Artificial Sequence: Synthetic oligonucleotide
  Target: ATXN2; (+) strand; PAM type: NRG; PAM sequence: TGG
tcactcaggctggagtgcag

SEQ ID NO: 47272 - DNA, 20 bp, Artificial Sequence
  Description of Artificial Sequence: Synthetic oligonucleotide
  Target: ATXN2; (+) strand; PAM type: NRG; PAM sequence: CAG
ggagtgcagtggtacgatct

SEQ ID NO: 47273 - DNA, 20 bp, Artificial Sequence
  Description of Artificial Sequence: Synthetic oligonucleotide
  Target: ATXN2; (+) strand; PAM type: NRG; PAM sequence: TGG
tcattgcaacctccaccttc

SEQ ID NO: 47274 - DNA, 20 bp, Artificial Sequence
  Description of Artificial Sequence: Synthetic oligonucleotide
  Target: ATXN2; (+) strand; PAM type: NRG; PAM sequence: GGG
cattgcaacctccaccttct

SEQ ID NO: 47275 - DNA, 20 bp, Artificial Sequence
  Description of Artificial Sequence: Synthetic oligonucleotide
  Target: ATXN2; (+) strand; PAM type: NRG; PAM sequence: CAG
ttcaaatgattctcctgtct

SEQ ID NO: 47276 - DNA, 20 bp, Artificial Sequence
  Description of Artificial Sequence: Synthetic oligonucleotide
  Target: ATXN2; (+) strand; PAM type: NRG; PAM sequence: GAG
ttctcctgtctcagcctccc

SEQ ID NO: 47277 - DNA, 20 bp, Artificial Sequence
  Description of Artificial Sequence: Synthetic oligonucleotide
  Target: ATXN2; (+) strand; PAM type: NRG; PAM sequence: TAG
tcctgtctcagcctcccgag

SEQ ID NO: 47278 - DNA, 20 bp, Artificial Sequence
  Description of Artificial Sequence: Synthetic oligonucleotide
  Target: ATXN2; (+) strand; PAM type: NRG; PAM sequence: TGG
gtctcagcctcccgagtagc

SEQ ID NO: 47279 - DNA, 20 bp, Artificial Sequence
  Description of Artificial Sequence: Synthetic oligonucleotide
  Target: ATXN2; (+) strand; PAM type: NRG; PAM sequence: GGG
tctcagcctcccgagtagct

SEQ ID NO: 47280 - DNA, 20 bp, Artificial Sequence
  Description of Artificial Sequence: Synthetic oligonucleotide
  Target: ATXN2; (+) strand; PAM type: NRG; PAM sequence: TAG
gcctcccgagtagctgggat

SEQ ID NO: 47281 - DNA, 20 bp, Artificial Sequence
  Description of Artificial Sequence: Synthetic oligonucleotide
  Target: ATXN2; (+) strand; PAM type: NRG; PAM sequence: GAG
ctcccgagtagctgggatta

SEQ ID NO: 47282 - DNA, 20 bp, Artificial Sequence
  Description of Artificial Sequence: Synthetic oligonucleotide
  Target: ATXN2; (+) strand; PAM type: NRG; PAM sequence: AGG
tcccgagtagctgggattag

SEQ ID NO: 47283 - DNA, 20 bp, Artificial Sequence
  Description of Artificial Sequence: Synthetic oligonucleotide
  Target: ATXN2; (+) strand; PAM type: NRG; PAM sequence: CAG
ctgggattagaggcgcacac

SEQ ID NO: 47284 - DNA, 20 bp, Artificial Sequence
  Description of Artificial Sequence: Synthetic oligonucleotide
  Target: ATXN2; (+) strand; PAM type: NRG; PAM sequence: CAG
agaggcgcacaccagcacac

SEQ ID NO: 47285 - DNA, 20 bp, Artificial Sequence
  Description of Artificial Sequence: Synthetic oligonucleotide
  Target: ATXN2; (+) strand; PAM type: NRG; PAM sequence: AGG
gaggcgcacaccagcacacc

SEQ ID NO: 47286 - DNA, 20 bp, Artificial Sequence
  Description of Artificial Sequence: Synthetic oligonucleotide
  Target: ATXN2; (+) strand; PAM type: NRG; PAM sequence: TAG
ctaattttttttgtaaaatc

SEQ ID NO: 47287 - DNA, 20 bp, Artificial Sequence
  Description of Artificial Sequence: Synthetic oligonucleotide
  Target: ATXN2; (+) strand; PAM type: NRG; PAM sequence: CAG
atttgatattcaatgtcatg

SEQ ID NO: 47288 - DNA, 20 bp, Artificial Sequence
  Description of Artificial Sequence: Synthetic oligonucleotide
  Target: ATXN2; (+) strand; PAM type: NRG; PAM sequence: TAG
tctctaactctaaaaatgct

SEQ ID NO: 47289 - DNA, 20 bp, Artificial Sequence
  Description of Artificial Sequence: Synthetic oligonucleotide
  Target: ATXN2; (+) strand; PAM type: NRG; PAM sequence: TAG
aactctaaaaatgcttagaa

SEQ ID NO: 47290 - DNA, 20 bp, Artificial Sequence
  Description of Artificial Sequence: Synthetic oligonucleotide
  Target: ATXN2; (+) strand; PAM type: NRG; PAM sequence: GAG
ctctaaaaatgcttagaata

SEQ ID NO: 47291 - DNA, 20 bp, Artificial Sequence
  Description of Artificial Sequence: Synthetic oligonucleotide
  Target: ATXN2; (+) strand; PAM type: NRG; PAM sequence: TGG
aatgcttagaatagagtaca

SEQ ID NO: 47292 - DNA, 20 bp, Artificial Sequence
  Description of Artificial Sequence: Synthetic oligonucleotide
  Target: ATXN2; (+) strand; PAM type: NRG; PAM sequence: AAG
tggcgtatatgaactccctg

SEQ ID NO: 47293 - DNA, 20 bp, Artificial Sequence
  Description of Artificial Sequence: Synthetic oligonucleotide
  Target: ATXN2; (+) strand; PAM type: NRG; PAM sequence: TAG
tgaacaccatgaaattacat

SEQ ID NO: 47294 - DNA, 20 bp, Artificial Sequence
  Description of Artificial Sequence: Synthetic oligonucleotide
  Target: ATXN2; (+) strand; PAM type: NRG; PAM sequence: TGG
accatgaaattacattagcg

SEQ ID NO: 47295 - DNA, 20 bp, Artificial Sequence
  Description of Artificial Sequence: Synthetic oligonucleotide
  Target: ATXN2; (+) strand; PAM type: NRG; PAM sequence: GGG
ccatgaaattacattagcgt

SEQ ID NO: 47296 - DNA, 20 bp, Artificial Sequence
  Description of Artificial Sequence: Synthetic oligonucleotide
  Target: ATXN2; (+) strand; PAM type: NRG; PAM sequence: CAG
aaattacattagcgtgggca

SEQ ID NO: 47297 - DNA, 20 bp, Artificial Sequence
  Description of Artificial Sequence: Synthetic oligonucleotide
  Target: ATXN2; (+) strand; PAM type: NRG; PAM sequence: TGG
ttacattagcgtgggcacag

SEQ ID NO: 47298 - DNA, 20 bp, Artificial Sequence
  Description of Artificial Sequence: Synthetic oligonucleotide
  Target: ATXN2; (+) strand; PAM type: NRG; PAM sequence: AAG
ctataatcccatcacttttg

SEQ ID NO: 47299 - DNA, 20 bp, Artificial Sequence
  Description of Artificial Sequence: Synthetic oligonucleotide
  Target: ATXN2; (+) strand; PAM type: NRG; PAM sequence: AGG
tataatcccatcacttttga

SEQ ID NO: 47300 - DNA, 20 bp, Artificial Sequence
  Description of Artificial Sequence: Synthetic oligonucleotide
  Target: ATXN2; (+) strand; PAM type: NRG; PAM sequence: AAG
tcccatcacttttgaaggcc

SEQ ID NO: 47301 - DNA, 20 bp, Artificial Sequence
  Description of Artificial Sequence: Synthetic oligonucleotide
  Target: ATXN2; (+) strand; PAM type: NRG; PAM sequence: AGG
cccatcacttttgaaggcca

SEQ ID NO: 47302 - DNA, 20 bp, Artificial Sequence
  Description of Artificial Sequence: Synthetic oligonucleotide
  Target: ATXN2; (+) strand; PAM type: NRG; PAM sequence: TAG
atcacttttgaaggccaagg

SEQ ID NO: 47303 - DNA, 20 bp, Artificial Sequence
  Description of Artificial Sequence: Synthetic oligonucleotide
  Target: ATXN2; (+) strand; PAM type: NRG; PAM sequence: GAG
cacttttgaaggccaaggta

SEQ ID NO: 47304 - DNA, 20 bp, Artificial Sequence
  Description of Artificial Sequence: Synthetic oligonucleotide
  Target: ATXN2; (+) strand; PAM type: NRG; PAM sequence: AGG
acttttgaaggccaaggtag

SEQ ID NO: 47305 - DNA, 20 bp, Artificial Sequence
  Description of Artificial Sequence: Synthetic oligonucleotide
  Target: ATXN2; (+) strand; PAM type: NRG; PAM sequence: CAG
ggtagaggattgcttgaacc

SEQ ID NO: 47306 - DNA, 20 bp, Artificial Sequence
  Description of Artificial Sequence: Synthetic oligonucleotide
  Target: ATXN2; (+) strand; PAM type: NRG; PAM sequence: AGG
gtagaggattgcttgaaccc

SEQ ID NO: 47307 - DNA, 20 bp, Artificial Sequence
  Description of Artificial Sequence: Synthetic oligonucleotide
  Target: ATXN2; (+) strand; PAM type: NRG; PAM sequence: GAG
agaggattgcttgaacccag

SEQ ID NO: 47308 - DNA, 20 bp, Artificial Sequence
  Description of Artificial Sequence: Synthetic oligonucleotide
  Target: ATXN2; (+) strand; PAM type: NRG; PAM sequence: AGG
gaggattgcttgaacccagg

SEQ ID NO: 47309 - DNA, 20 bp, Artificial Sequence
  Description of Artificial Sequence: Synthetic oligonucleotide
  Target: ATXN2; (+) strand; PAM type: NRG; PAM sequence: AAG
ttgcttgaacccaggaggta

SEQ ID NO: 47310 - DNA, 20 bp, Artificial Sequence
  Description of Artificial Sequence: Synthetic oligonucleotide
  Target: ATXN2; (+) strand; PAM type: NRG; PAM sequence: AGG
tgcttgaacccaggaggtaa

SEQ ID NO: 47311 - DNA, 20 bp, Artificial Sequence
  Description of Artificial Sequence: Synthetic oligonucleotide
  Target: ATXN2; (+) strand; PAM type: NRG; PAM sequence: CAG
tgaacccaggaggtaaaggc

SEQ ID NO: 47312 - DNA, 20 bp, Artificial Sequence
  Description of Artificial Sequence: Synthetic oligonucleotide
  Target: ATXN2; (+) strand; PAM type: NRG; PAM sequence: TGG
ccaggaggtaaaggccagcc

SEQ ID NO: 47313 - DNA, 20 bp, Artificial Sequence
  Description of Artificial Sequence: Synthetic oligonucleotide
  Target: ATXN2; (+) strand; PAM type: NRG; PAM sequence: GGG
caggaggtaaaggccagcct

SEQ ID NO: 47314 - DNA, 20 bp, Artificial Sequence
  Description of Artificial Sequence: Synthetic oligonucleotide
  Target: ATXN2; (+) strand; PAM type: NRG; PAM sequence: TAG
aaaggccagcctgggaaaca

SEQ ID NO: 47315 - DNA, 20 bp, Artificial Sequence
  Description of Artificial Sequence: Synthetic oligonucleotide
  Target: ATXN2; (+) strand; PAM type: NRG; PAM sequence: GAG
gccagcctgggaaacatagt

SEQ ID NO: 47316 - DNA, 20 bp, Artificial Sequence
  Description of Artificial Sequence: Synthetic oligonucleotide
  Target: ATXN2; (+) strand; PAM type: NRG; PAM sequence: CAG
ctgggaaacatagtgagaac

SEQ ID NO: 47317 - DNA, 20 bp, Artificial Sequence
  Description of Artificial Sequence: Synthetic oligonucleotide
  Target: ATXN2; (+) strand; PAM type: NRG; PAM sequence: TAG
tataaaatatttttaaaaat

SEQ ID NO: 47318 - DNA, 20 bp, Artificial Sequence
  Description of Artificial Sequence: Synthetic oligonucleotide
  Target: ATXN2; (+) strand; PAM type: NRG; PAM sequence: CGG
aaatatttttaaaaattagc

SEQ ID NO: 47319 - DNA, 20 bp, Artificial Sequence
  Description of Artificial Sequence: Synthetic oligonucleotide
  Target: ATXN2; (+) strand; PAM type: NRG; PAM sequence: GGG
aatatttttaaaaattagcc

SEQ ID NO: 47320 - DNA, 20 bp, Artificial Sequence
  Description of Artificial Sequence: Synthetic oligonucleotide
  Target: ATXN2; (+) strand; PAM type: NRG; PAM sequence: TAG
ttttaaaaattagccgggca

SEQ ID NO: 47321 - DNA, 20 bp, Artificial Sequence
  Description of Artificial Sequence: Synthetic oligonucleotide
  Target: ATXN2; (+) strand; PAM type: NRG; PAM sequence: CGG
taaaaattagccgggcatag

SEQ ID NO: 47322 - DNA, 20 bp, Artificial Sequence
  Description of Artificial Sequence: Synthetic oligonucleotide
  Target: ATXN2; (+) strand; PAM type: NRG; PAM sequence: TAG
ggcatagcggcgtgcacctg

SEQ ID NO: 47323 - DNA, 20 bp, Artificial Sequence
  Description of Artificial Sequence: Synthetic oligonucleotide
  Target: ATXN2; (+) strand; PAM type: NRG; PAM sequence: CAG
gcggcgtgcacctgtagccc

SEQ ID NO: 47324 - DNA, 20 bp, Artificial Sequence
  Description of Artificial Sequence: Synthetic oligonucleotide
  Target: ATXN2; (+) strand; PAM type: NRG; PAM sequence: TGG
cacctgtagccccagctact

SEQ ID NO: 47325 - DNA, 20 bp, Artificial Sequence
  Description of Artificial Sequence: Synthetic oligonucleotide
  Target: ATXN2; (+) strand; PAM type: NRG; PAM sequence: GGG
acctgtagccccagctactt

SEQ ID NO: 47326 - DNA, 20 bp, Artificial Sequence
  Description of Artificial Sequence: Synthetic oligonucleotide
  Target: ATXN2; (+) strand; PAM type: NRG; PAM sequence: GAG
ctgtagccccagctacttgg

SEQ ID NO: 47327 - DNA, 20 bp, Artificial Sequence
  Description of Artificial Sequence: Synthetic oligonucleotide
  Target: ATXN2; (+) strand; PAM type: NRG; PAM sequence: AGG
tgtagccccagctacttggg

SEQ ID NO: 47328 - DNA, 20 bp, Artificial Sequence
  Description of Artificial Sequence: Synthetic oligonucleotide
  Target: ATXN2; (+) strand; PAM type: NRG; PAM sequence: GAG
ccccagctacttgggaggct

SEQ ID NO: 47329 - DNA, 20 bp, Artificial Sequence
  Description of Artificial Sequence: Synthetic oligonucleotide
  Target: ATXN2; (+) strand; PAM type: NRG; PAM sequence: AGG
cccagctacttgggaggctg

SEQ ID NO: 47330 - DNA, 20 bp, Artificial Sequence
  Description of Artificial Sequence: Synthetic oligonucleotide
  Target: ATXN2; (+) strand; PAM type: NRG; PAM sequence: TGG
agctacttgggaggctgagg

SEQ ID NO: 47331 - DNA, 20 bp, Artificial Sequence
  Description of Artificial Sequence: Synthetic oligonucleotide
  Target: ATXN2; (+) strand; PAM type: NRG; PAM sequence: GGG
gctacttgggaggctgaggt

SEQ ID NO: 47332 - DNA, 20 bp, Artificial Sequence
  Description of Artificial Sequence: Synthetic oligonucleotide
  Target: ATXN2; (+) strand; PAM type: NRG; PAM sequence: GAG
tacttgggaggctgaggtgg

SEQ ID NO: 47333 - DNA, 20 bp, Artificial Sequence
  Description of Artificial Sequence: Synthetic oligonucleotide
  Target: ATXN2; (+) strand; PAM type: NRG; PAM sequence: GAG
cttgggaggctgaggtggga

SEQ ID NO: 47334 - DNA, 20 bp, Artificial Sequence
  Description of Artificial Sequence: Synthetic oligonucleotide
  Target: ATXN2; (+) strand; PAM type: NRG; PAM sequence: GAG
ctgaggtgggagagtcgctt

SEQ ID NO: 47335 - DNA, 20 bp, Artificial Sequence
  Description of Artificial Sequence: Synthetic oligonucleotide
  Target: ATXN2; (+) strand; PAM type: NRG; PAM sequence: CAG
ggtgggagagtcgcttgagc

SEQ ID NO: 47336 - DNA, 20 bp, Artificial Sequence
  Description of Artificial Sequence: Synthetic oligonucleotide
  Target: ATXN2; (+) strand; PAM type: NRG; PAM sequence: AGG
gtgggagagtcgcttgagcc

SEQ ID NO: 47337 - DNA, 20 bp, Artificial Sequence
  Description of Artificial Sequence: Synthetic oligonucleotide
  Target: ATXN2; (+) strand; PAM type: NRG; PAM sequence: GAG
gggagagtcgcttgagccag

SEQ ID NO: 47338 - DNA, 20 bp, Artificial Sequence
  Description of Artificial Sequence: Synthetic oligonucleotide
  Target: ATXN2; (+) strand; PAM type: NRG; PAM sequence: AGG
ggagagtcgcttgagccagg

SEQ ID NO: 47339 - DNA, 20 bp, Artificial Sequence
  Description of Artificial Sequence: Synthetic oligonucleotide
  Target: ATXN2; (+) strand; PAM type: NRG; PAM sequence: GAG
gtcgcttgagccaggaggtc

SEQ ID NO: 47340 - DNA, 20 bp, Artificial Sequence
  Description of Artificial Sequence: Synthetic oligonucleotide
  Target: ATXN2; (+) strand; PAM type: NRG; PAM sequence: AGG
tcgcttgagccaggaggtcg

SEQ ID NO: 47341 - DNA, 20 bp, Artificial Sequence
  Description of Artificial Sequence: Synthetic oligonucleotide
  Target: ATXN2; (+) strand; PAM type: NRG; PAM sequence: CAG
gagccaggaggtcgaggcta

SEQ ID NO: 47342 - DNA, 20 bp, Artificial Sequence
  Description of Artificial Sequence: Synthetic oligonucleotide
  Target: ATXN2; (+) strand; PAM type: NRG; PAM sequence: AAG
caggaggtcgaggctacagt

SEQ ID NO: 47343 - DNA, 20 bp, Artificial Sequence
  Description of Artificial Sequence: Synthetic oligonucleotide
  Target: ATXN2; (+) strand; PAM type: NRG; PAM sequence: CAG
atgatcacaccactgcattc

SEQ ID NO: 47344 - DNA, 20 bp, Artificial Sequence
  Description of Artificial Sequence: Synthetic oligonucleotide
  Target: ATXN2; (+) strand; PAM type: NRG; PAM sequence: GAG
acaccactgcattccagcct

SEQ ID NO: 47345 - DNA, 20 bp, Artificial Sequence
  Description of Artificial Sequence: Synthetic oligonucleotide
  Target: ATXN2; (+) strand; PAM type: NRG; PAM sequence: CAG
ctgcattccagcctgagtga

SEQ ID NO: 47346 - DNA, 20 bp, Artificial Sequence
  Description of Artificial Sequence: Synthetic oligonucleotide
  Target: ATXN2; (+) strand; PAM type: NRG; PAM sequence: GAG
gcattccagcctgagtgaca

SEQ ID NO: 47347 - DNA, 20 bp, Artificial Sequence
  Description of Artificial Sequence: Synthetic oligonucleotide
  Target: ATXN2; (+) strand; PAM type: NRG; PAM sequence: AAG
gaccctgtttctttaaaaaa

SEQ ID NO: 47348 - DNA, 20 bp, Artificial Sequence
  Description of Artificial Sequence: Synthetic oligonucleotide
  Target: ATXN2; (+) strand; PAM type: NRG; PAM sequence: AAG
gaaaaaaaattaatttttaa

SEQ ID NO: 47349 - DNA, 20 bp, Artificial Sequence
  Description of Artificial Sequence: Synthetic oligonucleotide
  Target: ATXN2; (+) strand; PAM type: NRG; PAM sequence: TAG
tacatgtgtgtaaatttttc

SEQ ID NO: 47350 - DNA, 20 bp, Artificial Sequence
  Description of Artificial Sequence: Synthetic oligonucleotide
  Target: ATXN2; (+) strand; PAM type: NRG; PAM sequence: AGG
acatgtgtgtaaatttttct

SEQ ID NO: 47351 - DNA, 20 bp, Artificial Sequence
  Description of Artificial Sequence: Synthetic oligonucleotide
  Target: ATXN2; (+) strand; PAM type: NRG; PAM sequence: GGG
catgtgtgtaaatttttcta

SEQ ID NO: 47352 - DNA, 20 bp, Artificial Sequence
  Description of Artificial Sequence: Synthetic oligonucleotide
  Target: ATXN2; (+) strand; PAM type: NRG; PAM sequence: GAG
tgtgtaaatttttctagggt

SEQ ID NO: 47353 - DNA, 20 bp, Artificial Sequence
  Description of Artificial Sequence: Synthetic oligonucleotide
  Target: ATXN2; (+) strand; PAM type: NRG; PAM sequence: AGG
gtgtaaatttttctagggtg

SEQ ID NO: 47354 - DNA, 20 bp, Artificial Sequence
  Description of Artificial Sequence: Synthetic oligonucleotide
  Target: ATXN2; (+) strand; PAM type: NRG; PAM sequence: GGG
tgtaaatttttctagggtga

SEQ ID NO: 47355 - DNA, 20 bp, Artificial Sequence
  Description of Artificial Sequence: Synthetic oligonucleotide
  Target: ATXN2; (+) strand; PAM type: NRG; PAM sequence: CAG
ttttctagggtgagggtata

SEQ ID NO: 47356 - DNA, 20 bp, Artificial Sequence
  Description of Artificial Sequence: Synthetic oligonucleotide
  Target: ATXN2; (+) strand; PAM type: NRG; PAM sequence: TAG
gtgagggtatacagtttcac

SEQ ID NO: 47357 - DNA, 20 bp, Artificial Sequence
  Description of Artificial Sequence: Synthetic oligonucleotide
  Target: ATXN2; (+) strand; PAM type: NRG; PAM sequence: AGG
tgagggtatacagtttcact

SEQ ID NO: 47358 - DNA, 20 bp, Artificial Sequence
  Description of Artificial Sequence: Synthetic oligonucleotide
  Target: ATXN2; (+) strand; PAM type: NRG; PAM sequence: CAG
atacagtttcactaggtaca

SEQ ID NO: 47359 - DNA, 20 bp, Artificial Sequence
  Description of Artificial Sequence: Synthetic oligonucleotide
  Target: ATXN2; (+) strand; PAM type: NRG; PAM sequence: TAG
cactaggtacacagtttcac

SEQ ID NO: 47360 - DNA, 20 bp, Artificial Sequence
  Description of Artificial Sequence: Synthetic oligonucleotide
  Target: ATXN2; (+) strand; PAM type: NRG; PAM sequence: AGG
actaggtacacagtttcact

SEQ ID NO: 47361 - DNA, 20 bp, Artificial Sequence
  Description of Artificial Sequence: Synthetic oligonucleotide
  Target: ATXN2; (+) strand; PAM type: NRG; PAM sequence: AAG
cagtttcactaggttctcaa

SEQ ID NO: 47362 - DNA, 20 bp, Artificial Sequence
  Description of Artificial Sequence: Synthetic oligonucleotide
  Target: ATXN2; (+) strand; PAM type: NRG; PAM sequence: AGG
agtttcactaggttctcaaa

SEQ ID NO: 47363 - DNA, 20 bp, Artificial Sequence
  Description of Artificial Sequence: Synthetic oligonucleotide
  Target: ATXN2; (+) strand; PAM type: NRG; PAM sequence: GGG
gtttcactaggttctcaaaa

SEQ ID NO: 47364 - DNA, 20 bp, Artificial Sequence
  Description of Artificial Sequence: Synthetic oligonucleotide
  Target: ATXN2; (+) strand; PAM type: NRG; PAM sequence: TAG
ttctcaaaagggacccaaaa

SEQ ID NO: 47365 - DNA, 20 bp, Artificial Sequence
  Description of Artificial Sequence: Synthetic oligonucleotide
  Target: ATXN2; (+) strand; PAM type: NRG; PAM sequence: TAG
gtatttctccgtactgtcca

SEQ ID NO: 47366 - DNA, 20 bp, Artificial Sequence
  Description of Artificial Sequence: Synthetic oligonucleotide
  Target: ATXN2; (+) strand; PAM type: NRG; PAM sequence: AAG
tccgtactgtccatagcaac

SEQ ID NO: 47367 - DNA, 20 bp, Artificial Sequence
  Description of Artificial Sequence: Synthetic oligonucleotide
  Target: ATXN2; (+) strand; PAM type: NRG; PAM sequence: CAG
actgtccatagcaacaagca

SEQ ID NO: 47368 - DNA, 20 bp, Artificial Sequence
  Description of Artificial Sequence: Synthetic oligonucleotide
  Target: ATXN2; (+) strand; PAM type: NRG; PAM sequence: AAG
tccatagcaacaagcacagc

SEQ ID NO: 47369 - DNA, 20 bp, Artificial Sequence
  Description of Artificial Sequence: Synthetic oligonucleotide
  Target: ATXN2; (+) strand; PAM type: NRG; PAM sequence: AGG
ccatagcaacaagcacagca

SEQ ID NO: 47370 - DNA, 20 bp, Artificial Sequence
  Description of Artificial Sequence: Synthetic oligonucleotide
  Target: ATXN2; (+) strand; PAM type: NRG; PAM sequence: CAG
gcacagcaaggaacacatcc

SEQ ID NO: 47371 - DNA, 20 bp, Artificial Sequence
  Description of Artificial Sequence: Synthetic oligonucleotide
  Target: ATXN2; (+) strand; PAM type: NRG; PAM sequence: GAG
acagcaaggaacacatccca

SEQ ID NO: 47372 - DNA, 20 bp, Artificial Sequence
  Description of Artificial Sequence: Synthetic oligonucleotide
  Target: ATXN2; (+) strand; PAM type: NRG; PAM sequence: AAG
aacacatcccagagctctct

SEQ ID NO: 47373 - DNA, 20 bp, Artificial Sequence
  Description of Artificial Sequence: Synthetic oligonucleotide
  Target: ATXN2; (+) strand; PAM type: NRG; PAM sequence: TGG
agagctctctaagtatctgc

SEQ ID NO: 47374 - DNA, 20 bp, Artificial Sequence
  Description of Artificial Sequence: Synthetic oligonucleotide
  Target: ATXN2; (+) strand; PAM type: NRG; PAM sequence: AAG
tgctggatgactatatatgt

SEQ ID NO: 47375 - DNA, 20 bp, Artificial Sequence
  Description of Artificial Sequence: Synthetic oligonucleotide
  Target: ATXN2; (+) strand; PAM type: NRG; PAM sequence: CAG
tatatatgtaagaccactta

SEQ ID NO: 47376 - DNA, 20 bp, Artificial Sequence
  Description of Artificial Sequence: Synthetic oligonucleotide
  Target: ATXN2; (+) strand; PAM type: NRG; PAM sequence: AAG
ataaaataatgcttctacaa

SEQ ID NO: 47377 - DNA, 20 bp, Artificial Sequence
  Description of Artificial Sequence: Synthetic oligonucleotide
  Target: ATXN2; (+) strand; PAM type: NRG; PAM sequence: AAG
tgcttctacaaaagtgtatt

SEQ ID NO: 47378 - DNA, 20 bp, Artificial Sequence
  Description of Artificial Sequence: Synthetic oligonucleotide
  Target: ATXN2; (+) strand; PAM type: NRG; PAM sequence: AGG
gcttctacaaaagtgtatta

SEQ ID NO: 47379 - DNA, 20 bp, Artificial Sequence
  Description of Artificial Sequence: Synthetic oligonucleotide
  Target: ATXN2; (+) strand; PAM type: NRG; PAM sequence: GAG
tattcaaacacatttatatt

SEQ ID NO: 47380 - DNA, 20 bp, Artificial Sequence
  Description of Artificial Sequence: Synthetic oligonucleotide
  Target: ATXN2; (+) strand; PAM type: NRG; PAM sequence: AAG
tgagcctgtactatgtgcca

SEQ ID NO: 47381 - DNA, 20 bp, Artificial Sequence
  Description of Artificial Sequence: Synthetic oligonucleotide
  Target: ATXN2; (+) strand; PAM type: NRG; PAM sequence: TAG
tatgtgccaaagcactatac

SEQ ID NO: 47382 - DNA, 20 bp, Artificial Sequence
  Description of Artificial Sequence: Synthetic oligonucleotide
  Target: ATXN2; (+) strand; PAM type: NRG; PAM sequence: GAG
aaagcactatactagaccat

SEQ ID NO: 47383 - DNA, 20 bp, Artificial Sequence
  Description of Artificial Sequence: Synthetic oligonucleotide
  Target: ATXN2; (+) strand; PAM type: NRG; PAM sequence: AAG
gaccatgagaataaataata

SEQ ID NO: 47384 - DNA, 20 bp, Artificial Sequence
  Description of Artificial Sequence: Synthetic oligonucleotide
  Target: ATXN2; (+) strand; PAM type: NRG; PAM sequence: CAG
atgagaataaataataaaga

SEQ ID NO: 47385 - DNA, 20 bp, Artificial Sequence
  Description of Artificial Sequence: Synthetic oligonucleotide
  Target: ATXN2; (+) strand; PAM type: NRG; PAM sequence: TGG
acagtatcactgtctttact

SEQ ID NO: 47386 - DNA, 20 bp, Artificial Sequence
  Description of Artificial Sequence: Synthetic oligonucleotide
  Target: ATXN2; (+) strand; PAM type: NRG; PAM sequence: GAG
agtatcactgtctttacttg

SEQ ID NO: 47387 - DNA, 20 bp, Artificial Sequence
  Description of Artificial Sequence: Synthetic oligonucleotide
  Target: ATXN2; (+) strand; PAM type: NRG; PAM sequence: AAG
ctgtctttacttggagcaca

SEQ ID NO: 47388 - DNA, 20 bp, Artificial Sequence
  Description of Artificial Sequence: Synthetic oligonucleotide
  Target: ATXN2; (+) strand; PAM type: NRG; PAM sequence: GAG
gtctttacttggagcacaaa

SEQ ID NO: 47389 - DNA, 20 bp, Artificial Sequence
  Description of Artificial Sequence: Synthetic oligonucleotide
  Target: ATXN2; (+) strand; PAM type: NRG; PAM sequence: CAG
acaaagagctcaaactgtaa

SEQ ID NO: 47390 - DNA, 20 bp, Artificial Sequence
  Description of Artificial Sequence: Synthetic oligonucleotide
  Target: ATXN2; (+) strand; PAM type: NRG; PAM sequence: AGG
caaagagctcaaactgtaac

SEQ ID NO: 47391 - DNA, 20 bp, Artificial Sequence
  Description of Artificial Sequence: Synthetic oligonucleotide
  Target: ATXN2; (+) strand; PAM type: NRG; PAM sequence: GGG
aaagagctcaaactgtaaca

SEQ ID NO: 47392 - DNA, 20 bp, Artificial Sequence
  Description of Artificial Sequence: Synthetic oligonucleotide
  Target: ATXN2; (+) strand; PAM type: NRG; PAM sequence: GGG
aagagctcaaactgtaacag

SEQ ID NO: 47393 - DNA, 20 bp, Artificial Sequence
  Description of Artificial Sequence: Synthetic oligonucleotide
  Target: ATXN2; (+) strand; PAM type: NRG; PAM sequence: GAG
gagctcaaactgtaacaggg

SEQ ID NO: 47394 - DNA, 20 bp, Artificial Sequence
  Description of Artificial Sequence: Synthetic oligonucleotide
  Target: ATXN2; (+) strand; PAM type: NRG; PAM sequence: AAG
caaactgtaacaggggagac

SEQ ID NO: 47395 - DNA, 20 bp, Artificial Sequence
  Description of Artificial Sequence: Synthetic oligonucleotide
  Target: ATXN2; (+) strand; PAM type: NRG; PAM sequence: TGG
catataattttaatacaaca

SEQ ID NO: 47396 - DNA, 20 bp, Artificial Sequence
  Description of Artificial Sequence: Synthetic oligonucleotide
  Target: ATXN2; (+) strand; PAM type: NRG; PAM sequence: AAG
attttaatacaacatggtat

SEQ ID NO: 47397 - DNA, 20 bp, Artificial Sequence
  Description of Artificial Sequence: Synthetic oligonucleotide
  Target: ATXN2; (+) strand; PAM type: NRG; PAM sequence: AGG
ttttaatacaacatggtata

SEQ ID NO: 47398 - DNA, 20 bp, Artificial Sequence
  Description of Artificial Sequence: Synthetic oligonucleotide
  Target: ATXN2; (+) strand; PAM type: NRG; PAM sequence: GGG
tttaatacaacatggtataa

SEQ ID NO: 47399 - DNA, 20 bp, Artificial Sequence
  Description of Artificial Sequence: Synthetic oligonucleotide
  Target: ATXN2; (+) strand; PAM type: NRG; PAM sequence: TAG
gggcaatgatacacacatga

SEQ ID NO: 47400 - DNA, 20 bp, Artificial Sequence
  Description of Artificial Sequence: Synthetic oligonucleotide
  Target: ATXN2; (+) strand; PAM type: NRG; PAM sequence: AGG
ggcaatgatacacacatgat

SEQ ID NO: 47401 - DNA, 20 bp, Artificial Sequence
  Description of Artificial Sequence: Synthetic oligonucleotide
  Target: ATXN2; (+) strand; PAM type: NRG; PAM sequence: GAG
caatgatacacacatgatag

SEQ ID NO: 47402 - DNA, 20 bp, Artificial Sequence
  Description of Artificial Sequence: Synthetic oligonucleotide
  Target: ATXN2; (+) strand; PAM type: NRG; PAM sequence: AGG
aatgatacacacatgatagg

SEQ ID NO: 47403 - DNA, 20 bp, Artificial Sequence
  Description of Artificial Sequence: Synthetic oligonucleotide
  Target: ATXN2; (+) strand; PAM type: NRG; PAM sequence: GGG
atgatacacacatgatagga

SEQ ID NO: 47404 - DNA, 20 bp, Artificial Sequence
  Description of Artificial Sequence: Synthetic oligonucleotide
  Target: ATXN2; (+) strand; PAM type: NRG; PAM sequence: TGG
gataggagggaacttgtgtg

SEQ ID NO: 47405 - DNA, 20 bp, Artificial Sequence
  Description of Artificial Sequence: Synthetic oligonucleotide
  Target: ATXN2; (+) strand; PAM type: NRG; PAM sequence: TAG
aggagggaacttgtgtgtgg

SEQ ID NO: 47406 - DNA, 20 bp, Artificial Sequence
  Description of Artificial Sequence: Synthetic oligonucleotide
  Target: ATXN2; (+) strand; PAM type: NRG; PAM sequence: TGG
gggaacttgtgtgtggtagc

SEQ ID NO: 47407 - DNA, 20 bp, Artificial Sequence
  Description of Artificial Sequence: Synthetic oligonucleotide
  Target: ATXN2; (+) strand; PAM type: NRG; PAM sequence: CAG
aacttgtgtgtggtagctgg

SEQ ID NO: 47408 - DNA, 20 bp, Artificial Sequence
  Description of Artificial Sequence: Synthetic oligonucleotide
  Target: ATXN2; (+) strand; PAM type: NRG; PAM sequence: TGG
agctggcagtgtgtgtcatg

SEQ ID NO: 47409 - DNA, 20 bp, Artificial Sequence
  Description of Artificial Sequence: Synthetic oligonucleotide
  Target: ATXN2; (+) strand; PAM type: NRG; PAM sequence: AAG
ggcagtgtgtgtcatgtggc

SEQ ID NO: 47410 - DNA, 20 bp, Artificial Sequence
  Description of Artificial Sequence: Synthetic oligonucleotide
  Target: ATXN2; (+) strand; PAM type: NRG; PAM sequence: GAG
cagtgtgtgtcatgtggcaa

SEQ ID NO: 47411 - DNA, 20 bp, Artificial Sequence
  Description of Artificial Sequence: Synthetic oligonucleotide
  Target: ATXN2; (+) strand; PAM type: NRG; PAM sequence: CAG
tgtgtgtcatgtggcaagag

SEQ ID NO: 47412 - DNA, 20 bp, Artificial Sequence
  Description of Artificial Sequence: Synthetic oligonucleotide
  Target: ATXN2; (+) strand; PAM type: NRG; PAM sequence: CAG
gtgtcatgtggcaagagcag

SEQ ID NO: 47413 - DNA, 20 bp, Artificial Sequence
  Description of Artificial Sequence: Synthetic oligonucleotide
  Target: ATXN2; (+) strand; PAM type: NRG; PAM sequence: AGG
tgtcatgtggcaagagcagc

SEQ ID NO: 47414 - DNA, 20 bp, Artificial Sequence
  Description of Artificial Sequence: Synthetic oligonucleotide
  Target: ATXN2; (+) strand; PAM type: NRG; PAM sequence: AAG
tgtggcaagagcagcaggca

SEQ ID NO: 47415 - DNA, 20 bp, Artificial Sequence
  Description of Artificial Sequence: Synthetic oligonucleotide
  Target: ATXN2; (+) strand; PAM type: NRG; PAM sequence: TGG
gcaggcaaagaaacaaacac

SEQ ID NO: 47416 - DNA, 20 bp, Artificial Sequence
  Description of Artificial Sequence: Synthetic oligonucleotide
  Target: ATXN2; (+) strand; PAM type: NRG; PAM sequence: GGG
caggcaaagaaacaaacact

SEQ ID NO: 47417 - DNA, 20 bp, Artificial Sequence
  Description of Artificial Sequence: Synthetic oligonucleotide
  Target: ATXN2; (+) strand; PAM type: NRG; PAM sequence: GGG
aggcaaagaaacaaacactg

SEQ ID NO: 47418 - DNA, 20 bp, Artificial Sequence
  Description of Artificial Sequence: Synthetic oligonucleotide
  Target: ATXN2; (+) strand; PAM type: NRG; PAM sequence: AAG
aacactggggacacacatct

SEQ ID NO: 47419 - DNA, 20 bp, Artificial Sequence
  Description of Artificial Sequence: Synthetic oligonucleotide
  Target: ATXN2; (+) strand; PAM type: NRG; PAM sequence: AGG
acactggggacacacatcta

SEQ ID NO: 47420 - DNA, 20 bp, Artificial Sequence
  Description of Artificial Sequence: Synthetic oligonucleotide
  Target: ATXN2; (+) strand; PAM type: NRG; PAM sequence: GGG
cactggggacacacatctaa

SEQ ID NO: 47421 - DNA, 20 bp, Artificial Sequence
  Description of Artificial Sequence: Synthetic oligonucleotide
  Target: ATXN2; (+) strand; PAM type: NRG; PAM sequence: GGG
actggggacacacatctaag

SEQ ID NO: 47422 - DNA, 20 bp, Artificial Sequence
  Description of Artificial Sequence: Synthetic oligonucleotide
  Target: ATXN2; (+) strand; PAM type: NRG; PAM sequence: AAG
acacatctaaggggtgtgtg

SEQ ID NO: 47423 - DNA, 20 bp, Artificial Sequence
  Description of Artificial Sequence: Synthetic oligonucleotide
  Target: ATXN2; (+) strand; PAM type: NRG; PAM sequence: AGG
cacatctaaggggtgtgtga

SEQ ID NO: 47424 - DNA, 20 bp, Artificial Sequence
  Description of Artificial Sequence: Synthetic oligonucleotide
  Target: ATXN2; (+) strand; PAM type: NRG; PAM sequence: AAG
ctaaggggtgtgtgaaggaa

SEQ ID NO: 47425 - DNA, 20 bp, Artificial Sequence
  Description of Artificial Sequence: Synthetic oligonucleotide
  Target: ATXN2; (+) strand; PAM type: NRG; PAM sequence: AAG
aggggtgtgtgaaggaaaag

SEQ ID NO: 47426 - DNA, 20 bp, Artificial Sequence
  Description of Artificial Sequence: Synthetic oligonucleotide
  Target: ATXN2; (+) strand; PAM type: NRG; PAM sequence: CAG
tgtgtgaaggaaaagaagcc

SEQ ID NO: 47427 - DNA, 20 bp, Artificial Sequence
  Description of Artificial Sequence: Synthetic oligonucleotide
  Target: ATXN2; (+) strand; PAM type: NRG; PAM sequence: AGG
gtgtgaaggaaaagaagccc

SEQ ID NO: 47428 - DNA, 20 bp, Artificial Sequence
  Description of Artificial Sequence: Synthetic oligonucleotide
  Target: ATXN2; (+) strand; PAM type: NRG; PAM sequence: GAG
aggaaaagaagcccaggaat

SEQ ID NO: 47429 - DNA, 20 bp, Artificial Sequence
  Description of Artificial Sequence: Synthetic oligonucleotide
  Target: ATXN2; (+) strand; PAM type: NRG; PAM sequence: AGG
ggaaaagaagcccaggaatg

SEQ ID NO: 47430 - DNA, 20 bp, Artificial Sequence
  Description of Artificial Sequence: Synthetic oligonucleotide
  Target: ATXN2; (+) strand; PAM type: NRG; PAM sequence: CAG
aaagaagcccaggaatgagg

SEQ ID NO: 47431 - DNA, 20 bp, Artificial Sequence
  Description of Artificial Sequence: Synthetic oligonucleotide
  Target: ATXN2; (+) strand; PAM type: NRG; PAM sequence: AGG
aagaagcccaggaatgaggc

SEQ ID NO: 47432 - DNA, 20 bp, Artificial Sequence
  Description of Artificial Sequence: Synthetic oligonucleotide
  Target: ATXN2; (+) strand; PAM type: NRG; PAM sequence: GGG
agaagcccaggaatgaggca

SEQ ID NO: 47433 - DNA, 20 bp, Artificial Sequence
  Description of Artificial Sequence: Synthetic oligonucleotide
  Target: ATXN2; (+) strand; PAM type: NRG; PAM sequence: AAG
agcccaggaatgaggcaggg

SEQ ID NO: 47434 - DNA, 20 bp, Artificial Sequence
  Description of Artificial Sequence: Synthetic oligonucleotide
  Target: ATXN2; (+) strand; PAM type: NRG; PAM sequence: AGG
gcccaggaatgaggcaggga

SEQ ID NO: 47435 - DNA, 20 bp, Artificial Sequence
  Description of Artificial Sequence: Synthetic oligonucleotide
  Target: ATXN2; (+) strand; PAM type: NRG; PAM sequence: CAG
atcaataaacataaaaaata

SEQ ID NO: 47436 - DNA, 20 bp, Artificial Sequence
  Description of Artificial Sequence: Synthetic oligonucleotide
  Target: ATXN2; (+) strand; PAM type: NRG; PAM sequence: AAG
aataaacataaaaaatacag

SEQ ID NO: 47437 - DNA, 20 bp, Artificial Sequence
  Description of Artificial Sequence: Synthetic oligonucleotide
  Target: ATXN2; (+) strand; PAM type: NRG; PAM sequence: GAG
taaacataaaaaatacagaa

SEQ ID NO: 47438 - DNA, 20 bp, Artificial Sequence
  Description of Artificial Sequence: Synthetic oligonucleotide
  Target: ATXN2; (+) strand; PAM type: NRG; PAM sequence: AGG
aaacataaaaaatacagaag

SEQ ID NO: 47439 - DNA, 20 bp, Artificial Sequence
  Description of Artificial Sequence: Synthetic oligonucleotide
  Target: ATXN2; (+) strand; PAM type: NRG; PAM sequence: AAG
atacagaagaggaaattctg

SEQ ID NO: 47440 - DNA, 20 bp, Artificial Sequence
  Description of Artificial Sequence: Synthetic oligonucleotide
  Target: ATXN2; (+) strand; PAM type: NRG; PAM sequence: AGG
tacagaagaggaaattctga

SEQ ID NO: 47441 - DNA, 20 bp, Artificial Sequence
  Description of Artificial Sequence: Synthetic oligonucleotide
  Target: ATXN2; (+) strand; PAM type: NRG; PAM sequence: GAG
cagaagaggaaattctgaag

SEQ ID NO: 47442 - DNA, 20 bp, Artificial Sequence
  Description of Artificial Sequence: Synthetic oligonucleotide
  Target: ATXN2; (+) strand; PAM type: NRG; PAM sequence: AGG
agaagaggaaattctgaagg

SEQ ID NO: 47443 - DNA, 20 bp, Artificial Sequence
  Description of Artificial Sequence: Synthetic oligonucleotide
  Target: ATXN2; (+) strand; PAM type: NRG; PAM sequence: GGG
gaagaggaaattctgaagga

SEQ ID NO: 47444 - DNA, 20 bp, Artificial Sequence
  Description of Artificial Sequence: Synthetic oligonucleotide
  Target: ATXN2; (+) strand; PAM type: NRG; PAM sequence: AAG
ggagggtgaaaccaacattc

SEQ ID NO: 47445 - DNA, 20 bp, Artificial Sequence
  Description of Artificial Sequence: Synthetic oligonucleotide
  Target: ATXN2; (+) strand; PAM type: NRG; PAM sequence: CAG
gtgaaaccaacattcaagtg

SEQ ID NO: 47446 - DNA, 20 bp, Artificial Sequence
  Description of Artificial Sequence: Synthetic oligonucleotide
  Target: ATXN2; (+) strand; PAM type: NRG; PAM sequence: AAG
aacattcaagtgcagcaata

SEQ ID NO: 47447 - DNA, 20 bp, Artificial Sequence
  Description of Artificial Sequence: Synthetic oligonucleotide
  Target: ATXN2; (+) strand; PAM type: NRG; PAM sequence: CAG
ttcaagtgcagcaataaaga

SEQ ID NO: 47448 - DNA, 20 bp, Artificial Sequence
  Description of Artificial Sequence: Synthetic oligonucleotide
  Target: ATXN2; (+) strand; PAM type: NRG; PAM sequence: AAG
tgcagcaataaagacagaaa

SEQ ID NO: 47449 - DNA, 20 bp, Artificial Sequence
  Description of Artificial Sequence: Synthetic oligonucleotide
  Target: ATXN2; (+) strand; PAM type: NRG; PAM sequence: AAG
aaagacagaaaaagattcca

SEQ ID NO: 47450 - DNA, 20 bp, Artificial Sequence
  Description of Artificial Sequence: Synthetic oligonucleotide
  Target: ATXN2; (+) strand; PAM type: NRG; PAM sequence: AGG
aagacagaaaaagattccaa

SEQ ID NO: 47451 - DNA, 20 bp, Artificial Sequence
  Description of Artificial Sequence: Synthetic oligonucleotide
  Target: ATXN2; (+) strand; PAM type: NRG; PAM sequence: TGG
gaaaaagattccaaaggacc

SEQ ID NO: 47452 - DNA, 20 bp, Artificial Sequence
  Description of Artificial Sequence: Synthetic oligonucleotide
  Target: ATXN2; (+) strand; PAM type: NRG; PAM sequence: CAG
aaagattccaaaggacctgg

SEQ ID NO: 47453 - DNA, 20 bp, Artificial Sequence
  Description of Artificial Sequence: Synthetic oligonucleotide
  Target: ATXN2; (+) strand; PAM type: NRG; PAM sequence: TAG
attccaaaggacctggcagt

SEQ ID NO: 47454 - DNA, 20 bp, Artificial Sequence
  Description of Artificial Sequence: Synthetic oligonucleotide
  Target: ATXN2; (+) strand; PAM type: NRG; PAM sequence: GAG
tccaaaggacctggcagtta

SEQ ID NO: 47455 - DNA, 20 bp, Artificial Sequence
  Description of Artificial Sequence: Synthetic oligonucleotide
  Target: ATXN2; (+) strand; PAM type: NRG; PAM sequence: AGG
ccaaaggacctggcagttag

SEQ ID NO: 47456 - DNA, 20 bp, Artificial Sequence
  Description of Artificial Sequence: Synthetic oligonucleotide
  Target: ATXN2; (+) strand; PAM type: NRG; PAM sequence: TAG
tggcagttagaggttaatcg

SEQ ID NO: 47457 - DNA, 20 bp, Artificial Sequence
  Description of Artificial Sequence: Synthetic oligonucleotide
  Target: ATXN2; (+) strand; PAM type: NRG; PAM sequence: TAG
ttagaggttaatcgtagcct

SEQ ID NO: 47458 - DNA, 20 bp, Artificial Sequence
  Description of Artificial Sequence: Synthetic oligonucleotide
  Target: ATXN2; (+) strand; PAM type: NRG; PAM sequence: AGG
tagaggttaatcgtagcctt

SEQ ID NO: 47459 - DNA, 20 bp, Artificial Sequence
  Description of Artificial Sequence: Synthetic oligonucleotide
  Target: ATXN2; (+) strand; PAM type: NRG; PAM sequence: CAG
aggttaatcgtagccttagg

SEQ ID NO: 47460 - DNA, 20 bp, Artificial Sequence
  Description of Artificial Sequence: Synthetic oligonucleotide
  Target: ATXN2; (+) strand; PAM type: NRG; PAM sequence: AGG
ggttaatcgtagccttaggc

SEQ ID NO: 47461 - DNA, 20 bp, Artificial Sequence
  Description of Artificial Sequence: Synthetic oligonucleotide
  Target: ATXN2; (+) strand; PAM type: NRG; PAM sequence: TGG
cgtagccttaggcaggataa

SEQ ID NO: 47462 - DNA, 20 bp, Artificial Sequence
  Description of Artificial Sequence: Synthetic oligonucleotide
  Target: ATXN2; (+) strand; PAM type: NRG; PAM sequence: TAG
gccttaggcaggataatggc

SEQ ID NO: 47463 - DNA, 20 bp, Artificial Sequence
  Description of Artificial Sequence: Synthetic oligonucleotide
  Target: ATXN2; (+) strand; PAM type: NRG; PAM sequence: AAG
ttaggcaggataatggctag

SEQ ID NO: 47464 - DNA, 20 bp, Artificial Sequence
  Description of Artificial Sequence: Synthetic oligonucleotide
  Target: ATXN2; (+) strand; PAM type: NRG; PAM sequence: CAG
ggataatggctagaagaatt

SEQ ID NO: 47465 - DNA, 20 bp, Artificial Sequence
  Description of Artificial Sequence: Synthetic oligonucleotide
  Target: ATXN2; (+) strand; PAM type: NRG; PAM sequence: AGG
gataatggctagaagaattc

SEQ ID NO: 47466 - DNA, 20 bp, Artificial Sequence
  Description of Artificial Sequence: Synthetic oligonucleotide
  Target: ATXN2; (+) strand; PAM type: NRG; PAM sequence: AAG
tagaagaattcaggattaaa

SEQ ID NO: 47467 - DNA, 20 bp, Artificial Sequence
  Description of Artificial Sequence: Synthetic oligonucleotide
  Target: ATXN2; (+) strand; PAM type: NRG; PAM sequence: TGG
aggattaaaaagaatccttt

SEQ ID NO: 47468 - DNA, 20 bp, Artificial Sequence
  Description of Artificial Sequence: Synthetic oligonucleotide
  Target: ATXN2; (+) strand; PAM type: NRG; PAM sequence: GGG
ggattaaaaagaatcctttt

SEQ ID NO: 47469 - DNA, 20 bp, Artificial Sequence
  Description of Artificial Sequence: Synthetic oligonucleotide
  Target: ATXN2; (+) strand; PAM type: NRG; PAM sequence: CAG
aaaaagaatccttttgggcc

SEQ ID NO: 47470 - DNA, 20 bp, Artificial Sequence
  Description of Artificial Sequence: Synthetic oligonucleotide
  Target: ATXN2; (+) strand; PAM type: NRG; PAM sequence: CGG
gaatccttttgggcccagtg

SEQ ID NO: 47471 - DNA, 20 bp, Artificial Sequence
  Description of Artificial Sequence: Synthetic oligonucleotide
  Target: ATXN2; (+) strand; PAM type: NRG; PAM sequence: TGG
tccttttgggcccagtgcgg

SEQ ID NO: 47472 - DNA, 20 bp, Artificial Sequence
  Description of Artificial Sequence: Synthetic oligonucleotide
  Target: ATXN2; (+) strand; PAM type: NRG; PAM sequence: CAG
gtggctcatgcctgtaatcc

SEQ ID NO: 47473 - DNA, 20 bp, Artificial Sequence
  Description of Artificial Sequence: Synthetic oligonucleotide
  Target: ATXN2; (+) strand; PAM type: NRG; PAM sequence: TGG
tgcctgtaatcccagcactt

SEQ ID NO: 47474 - DNA, 20 bp, Artificial Sequence
  Description of Artificial Sequence: Synthetic oligonucleotide
  Target: ATXN2; (+) strand; PAM type: NRG; PAM sequence: GGG
gcctgtaatcccagcacttt

SEQ ID NO: 47475 - DNA, 20 bp, Artificial Sequence
  Description of Artificial Sequence: Synthetic oligonucleotide
  Target: ATXN2; (+) strand; PAM type: NRG; PAM sequence: GAG
ctgtaatcccagcactttgg

SEQ ID NO: 47476 - DNA, 20 bp, Artificial Sequence
  Description of Artificial Sequence: Synthetic oligonucleotide
  Target: ATXN2; (+) strand; PAM type: NRG; PAM sequence: AGG
tgtaatcccagcactttggg

SEQ ID NO: 47477 - DNA, 20 bp, Artificial Sequence
  Description of Artificial Sequence: Synthetic oligonucleotide
  Target: ATXN2; (+) strand; PAM type: NRG; PAM sequence: GAG
tcccagcactttgggaggcc

SEQ ID NO: 47478 - DNA, 20 bp, Artificial Sequence
  Description of Artificial Sequence: Synthetic oligonucleotide
  Target: ATXN2; (+) strand; PAM type: NRG; PAM sequence: AGG
cccagcactttgggaggccg

SEQ ID NO: 47479 - DNA, 20 bp, Artificial Sequence
  Description of Artificial Sequence: Synthetic oligonucleotide
  Target: ATXN2; (+) strand; PAM type: NRG; PAM sequence: CAG
agcactttgggaggccgagg

SEQ ID NO: 47480 - DNA, 20 bp, Artificial Sequence
  Description of Artificial Sequence: Synthetic oligonucleotide
  Target: ATXN2; (+) strand; PAM type: NRG; PAM sequence: TGG
ctttgggaggccgaggcaga

SEQ ID NO: 47481 - DNA, 20 bp, Artificial Sequence
  Description of Artificial Sequence: Synthetic oligonucleotide
  Target: ATXN2; (+) strand; PAM type: NRG; PAM sequence: AAG
ggccgaggcagatggatcac

SEQ ID NO: 47482 - DNA, 20 bp, Artificial Sequence
  Description of Artificial Sequence: Synthetic oligonucleotide
  Target: ATXN2; (+) strand; PAM type: NRG; PAM sequence: AGG
gccgaggcagatggatcaca

SEQ ID NO: 47483 - DNA, 20 bp, Artificial Sequence
  Description of Artificial Sequence: Synthetic oligonucleotide
  Target: ATXN2; (+) strand; PAM type: NRG; PAM sequence: CAG
aggcagatggatcacaaggt

SEQ ID NO: 47484 - DNA, 20 bp, Artificial Sequence
  Description of Artificial Sequence: Synthetic oligonucleotide
  Target: ATXN2; (+) strand; PAM type: NRG; PAM sequence: AGG
ggcagatggatcacaaggtc

SEQ ID NO: 47485 - DNA, 20 bp, Artificial Sequence
  Description of Artificial Sequence: Synthetic oligonucleotide
  Target: ATXN2; (+) strand; PAM type: NRG; PAM sequence: GAG
cagatggatcacaaggtcag

SEQ ID NO: 47486 - DNA, 20 bp, Artificial Sequence
  Description of Artificial Sequence: Synthetic oligonucleotide
  Target: ATXN2; (+) strand; PAM type: NRG; PAM sequence: GAG
gatcacaaggtcaggagatc

SEQ ID NO: 47487 - DNA, 20 bp, Artificial Sequence
  Description of Artificial Sequence: Synthetic oligonucleotide
  Target: ATXN2; (+) strand; PAM type: NRG; PAM sequence: TAG
tcaggagatcgagaccatcc

SEQ ID NO: 47488 - DNA, 20 bp, Artificial Sequence
  Description of Artificial Sequence: Synthetic oligonucleotide
  Target: ATXN2; (+) strand; PAM type: NRG; PAM sequence: CGG
cgagaccatcctagctaaca

SEQ ID NO: 47489 - DNA, 20 bp, Artificial Sequence
  Description of Artificial Sequence: Synthetic oligonucleotide
  Target: ATXN2; (+) strand; PAM type: NRG; PAM sequence: TAG
ctactaaaaatacaaaaatt

SEQ ID NO: 47490 - DNA, 20 bp, Artificial Sequence
  Description of Artificial Sequence: Synthetic oligonucleotide
  Target: ATXN2; (+) strand; PAM type: NRG; PAM sequence: TGG
taaaaatacaaaaatttagc

SEQ ID NO: 47491 - DNA, 20 bp, Artificial Sequence
  Description of Artificial Sequence: Synthetic oligonucleotide
  Target: ATXN2; (+) strand; PAM type: NRG; PAM sequence: GGG
aaaaatacaaaaatttagct

SEQ ID NO: 47492 - DNA, 20 bp, Artificial Sequence
  Description of Artificial Sequence: Synthetic oligonucleotide
  Target: ATXN2; (+) strand; PAM type: NRG; PAM sequence: TGG
tacaaaaatttagctgggcg

SEQ ID NO: 47493 - DNA, 20 bp, Artificial Sequence
  Description of Artificial Sequence: Synthetic oligonucleotide
  Target: ATXN2; (+) strand; PAM type: NRG; PAM sequence: TGG
aaaaatttagctgggcgtgg

SEQ ID NO: 47494 - DNA, 20 bp, Artificial Sequence
  Description of Artificial Sequence: Synthetic oligonucleotide
  Target: ATXN2; (+) strand; PAM type: NRG; PAM sequence: CAG
aatttagctgggcgtggtgg

SEQ ID NO: 47495 - DNA, 20 bp, Artificial Sequence
  Description of Artificial Sequence: Synthetic oligonucleotide
  Target: ATXN2; (+) strand; PAM type: NRG; PAM sequence: AGG
atttagctgggcgtggtggc

SEQ ID NO: 47496 - DNA, 20 bp, Artificial Sequence
  Description of Artificial Sequence: Synthetic oligonucleotide
  Target: ATXN2; (+) strand; PAM type: NRG; PAM sequence: TAG
ggcgtggtggcaggtgcctg

SEQ ID NO: 47497 - DNA, 20 bp, Artificial Sequence
  Description of Artificial Sequence: Synthetic oligonucleotide
  Target: ATXN2; (+) strand; PAM type: NRG; PAM sequence: CAG
gtggcaggtgcctgtagtcc

SEQ ID NO: 47498 - DNA, 20 bp, Artificial Sequence
  Description of Artificial Sequence: Synthetic oligonucleotide
  Target: ATXN2; (+) strand; PAM type: NRG; PAM sequence: CGG
tgcctgtagtcccagctact

SEQ ID NO: 47499 - DNA, 20 bp, Artificial Sequence
  Description of Artificial Sequence: Synthetic oligonucleotide
  Target: ATXN2; (+) strand; PAM type: NRG; PAM sequence: GGG
gcctgtagtcccagctactc

SEQ ID NO: 47500 - DNA, 20 bp, Artificial Sequence
  Description of Artificial Sequence: Synthetic oligonucleotide
  Target: ATXN2; (+) strand; PAM type: NRG; PAM sequence: GAG
ctgtagtcccagctactcgg

SEQ ID NO: 47501 - DNA, 20 bp, Artificial Sequence
  Description of Artificial Sequence: Synthetic oligonucleotide
  Target: ATXN2; (+) strand; PAM type: NRG; PAM sequence: AGG
tgtagtcccagctactcggg

SEQ ID NO: 47502 - DNA, 20 bp, Artificial Sequence
  Description of Artificial Sequence: Synthetic oligonucleotide
  Target: ATXN2; (+) strand; PAM type: NRG; PAM sequence: GAG
tcccagctactcgggaggct

SEQ ID NO: 47503 - DNA, 20 bp, Artificial Sequence
  Description of Artificial Sequence: Synthetic oligonucleotide
  Target: ATXN2; (+) strand; PAM type: NRG; PAM sequence: AGG
cccagctactcgggaggctg

SEQ ID NO: 47504 - DNA, 20 bp, Artificial Sequence
  Description of Artificial Sequence: Synthetic oligonucleotide
  Target: ATXN2; (+) strand; PAM type: NRG; PAM sequence: CAG
agctactcgggaggctgagg

SEQ ID NO: 47505 - DNA, 20 bp, Artificial Sequence
  Description of Artificial Sequence: Synthetic oligonucleotide
  Target: ATXN2; (+) strand; PAM type: NRG; PAM sequence: AGG
gctactcgggaggctgaggc

SEQ ID NO: 47506 - DNA, 20 bp, Artificial Sequence
  Description of Artificial Sequence: Synthetic oligonucleotide
  Target: ATXN2; (+) strand; PAM type: NRG; PAM sequence: GAG
tactcgggaggctgaggcag

SEQ ID NO: 47507 - DNA, 20 bp, Artificial Sequence
  Description of Artificial Sequence: Synthetic oligonucleotide
  Target: ATXN2; (+) strand; PAM type: NRG; PAM sequence: TGG
gggaggctgaggcaggagaa

SEQ ID NO: 47508 - DNA, 20 bp, Artificial Sequence
  Description of Artificial Sequence: Synthetic oligonucleotide
  Target: ATXN2; (+) strand; PAM type: NRG; PAM sequence: CGG
gcaggagaatggcgtgaacc

SEQ ID NO: 47509 - DNA, 20 bp, Artificial Sequence
  Description of Artificial Sequence: Synthetic oligonucleotide
  Target: ATXN2; (+) strand; PAM type: NRG; PAM sequence: GGG
caggagaatggcgtgaaccc

SEQ ID NO: 47510 - DNA, 20 bp, Artificial Sequence
  Description of Artificial Sequence: Synthetic oligonucleotide
  Target: ATXN2; (+) strand; PAM type: NRG; PAM sequence: GAG
ggagaatggcgtgaacccgg

SEQ ID NO: 47511 - DNA, 20 bp, Artificial Sequence
  Description of Artificial Sequence: Synthetic oligonucleotide
  Target: ATXN2; (+) strand; PAM type: NRG; PAM sequence: AGG
gagaatggcgtgaacccggg

SEQ ID NO: 47512 - DNA, 20 bp, Artificial Sequence
  Description of Artificial Sequence: Synthetic oligonucleotide
  Target: ATXN2; (+) strand; PAM type: NRG; PAM sequence: CGG
aatggcgtgaacccgggagg

SEQ ID NO: 47513 - DNA, 20 bp, Artificial Sequence
  Description of Artificial Sequence: Synthetic oligonucleotide
  Target: ATXN2; (+) strand; PAM type: NRG; PAM sequence: GAG
tggcgtgaacccgggaggcg

SEQ ID NO: 47514 - DNA, 20 bp, Artificial Sequence
  Description of Artificial Sequence: Synthetic oligonucleotide
  Target: ATXN2; (+) strand; PAM type: NRG; PAM sequence: CAG
aacccgggaggcggagcttg

SEQ ID NO: 47515 - DNA, 20 bp, Artificial Sequence
  Description of Artificial Sequence: Synthetic oligonucleotide
  Target: ATXN2; (+) strand; PAM type: NRG; PAM sequence: GAG
cgggaggcggagcttgcagt

SEQ ID NO: 47516 - DNA, 20 bp, Artificial Sequence
  Description of Artificial Sequence: Synthetic oligonucleotide
  Target: ATXN2; (+) strand; PAM type: NRG; PAM sequence: AAG
ggcggagcttgcagtgagcc

SEQ ID NO: 47517 - DNA, 20 bp, Artificial Sequence
  Description of Artificial Sequence: Synthetic oligonucleotide
  Target: ATXN2; (+) strand; PAM type: NRG; PAM sequence: TAG
gagcttgcagtgagccaaga

SEQ ID NO: 47518 - DNA, 20 bp, Artificial Sequence
  Description of Artificial Sequence: Synthetic oligonucleotide
  Target: ATXN2; (+) strand; PAM type: NRG; PAM sequence: CAG
aagatagtgccactgcactc

SEQ ID NO: 47519 - DNA, 20 bp, Artificial Sequence
  Description of Artificial Sequence: Synthetic oligonucleotide
  Target: ATXN2; (+) strand; PAM type: NRG; PAM sequence: TGG
agtgccactgcactccagcc

SEQ ID NO: 47520 - DNA, 20 bp, Artificial Sequence
  Description of Artificial Sequence: Synthetic oligonucleotide
  Target: ATXN2; (+) strand; PAM type: NRG; PAM sequence: GGG
gtgccactgcactccagcct

SEQ ID NO: 47521 - DNA, 20 bp, Artificial Sequence
  Description of Artificial Sequence: Synthetic oligonucleotide
  Target: ATXN2; (+) strand; PAM type: NRG; PAM sequence: AAG
cactgcactccagcctgggc

SEQ ID NO: 47522 - DNA, 20 bp, Artificial Sequence
  Description of Artificial Sequence: Synthetic oligonucleotide
  Target: ATXN2; (+) strand; PAM type: NRG; PAM sequence: GAG
ctgcactccagcctgggcaa

SEQ ID NO: 47523 - DNA, 20 bp, Artificial Sequence
  Description of Artificial Sequence: Synthetic oligonucleotide
  Target: ATXN2; (+) strand; PAM type: NRG; PAM sequence: GAG
actccagcctgggcaagagc

SEQ ID NO: 47524 - DNA, 20 bp, Artificial Sequence
  Description of Artificial Sequence: Synthetic oligonucleotide
  Target: ATXN2; (+) strand; PAM type: NRG; PAM sequence: AAG
aaaaacaaaacaaaacaaaa

SEQ ID NO: 47525 - DNA, 20 bp, Artificial Sequence
  Description of Artificial Sequence: Synthetic oligonucleotide
  Target: ATXN2; (+) strand; PAM type: NRG; PAM sequence: TAG
aaacaaaaaagaatcctttt

SEQ ID NO: 47526 - DNA, 20 bp, Artificial Sequence
  Description of Artificial Sequence: Synthetic oligonucleotide
  Target: ATXN2; (+) strand; PAM type: NRG; PAM sequence: AGG
aacaaaaaagaatccttttt

SEQ ID NO: 47527 - DNA, 20 bp, Artificial Sequence
  Description of Artificial Sequence: Synthetic oligonucleotide
  Target: ATXN2; (+) strand; PAM type: NRG; PAM sequence: GAG
aaaagaatcctttttaggat

SEQ ID NO: 47528 - DNA, 20 bp, Artificial Sequence
  Description of Artificial Sequence: Synthetic oligonucleotide
  Target: ATXN2; (+) strand; PAM type: NRG; PAM sequence: CAG
agaatcctttttaggatgag

SEQ ID NO: 47529 - DNA, 20 bp, Artificial Sequence
  Description of Artificial Sequence: Synthetic oligonucleotide
  Target: ATXN2; (+) strand; PAM type: NRG; PAM sequence: AGG
gaatcctttttaggatgagc

SEQ ID NO: 47530 - DNA, 20 bp, Artificial Sequence
  Description of Artificial Sequence: Synthetic oligonucleotide
  Target: ATXN2; (+) strand; PAM type: NRG; PAM sequence: AAG
tcctttttaggatgagcagg

SEQ ID NO: 47531 - DNA, 20 bp, Artificial Sequence
  Description of Artificial Sequence: Synthetic oligonucleotide
  Target: ATXN2; (+) strand; PAM type: NRG; PAM sequence: TAG
taggatgagcaggaagtgaa

SEQ ID NO: 47532 - DNA, 20 bp, Artificial Sequence
  Description of Artificial Sequence: Synthetic oligonucleotide
  Target: ATXN2; (+) strand; PAM type: NRG; PAM sequence: AGG
aggatgagcaggaagtgaat

SEQ ID NO: 47533 - DNA, 20 bp, Artificial Sequence
  Description of Artificial Sequence: Synthetic oligonucleotide
  Target: ATXN2; (+) strand; PAM type: NRG; PAM sequence: AAG
gtgaataggttttcatgcta

SEQ ID NO: 47534 - DNA, 20 bp, Artificial Sequence
  Description of Artificial Sequence: Synthetic oligonucleotide
  Target: ATXN2; (+) strand; PAM type: NRG; PAM sequence: AGG
tgaataggttttcatgctaa

SEQ ID NO: 47535 - DNA, 20 bp, Artificial Sequence
  Description of Artificial Sequence: Synthetic oligonucleotide
  Target: ATXN2; (+) strand; PAM type: NRG; PAM sequence: GGG
gaataggttttcatgctaaa

SEQ ID NO: 47536 - DNA, 20 bp, Artificial Sequence
  Description of Artificial Sequence: Synthetic oligonucleotide
  Target: ATXN2; (+) strand; PAM type: NRG; PAM sequence: AAG
aggttttcatgctaaaggga

SEQ ID NO: 47537 - DNA, 20 bp, Artificial Sequence
  Description of Artificial Sequence: Synthetic oligonucleotide
  Target: ATXN2; (+) strand; PAM type: NRG; PAM sequence: TAG
tgctaaagggaaagattaac

SEQ ID NO: 47538 - DNA, 20 bp, Artificial Sequence
  Description of Artificial Sequence: Synthetic oligonucleotide
  Target: ATXN2; (+) strand; PAM type: NRG; PAM sequence: AAG
aaagggaaagattaactaga

SEQ ID NO: 47539 - DNA, 20 bp, Artificial Sequence
  Description of Artificial Sequence: Synthetic oligonucleotide
  Target: ATXN2; (+) strand; PAM type: NRG; PAM sequence: AGG
aagggaaagattaactagaa

SEQ ID NO: 47540 - DNA, 20 bp, Artificial Sequence
  Description of Artificial Sequence: Synthetic oligonucleotide
  Target: ATXN2; (+) strand; PAM type: NRG; PAM sequence: CAG
ggaaagattaactagaaagg

SEQ ID NO: 47541 - DNA, 20 bp, Artificial Sequence
  Description of Artificial Sequence: Synthetic oligonucleotide
  Target: ATXN2; (+) strand; PAM type: NRG; PAM sequence: AAG
aactagaaaggcagatgttg

SEQ ID NO: 47542 - DNA, 20 bp, Artificial Sequence
  Description of Artificial Sequence: Synthetic oligonucleotide
  Target: ATXN2; (+) strand; PAM type: NRG; PAM sequence: GAG
ctagaaaggcagatgttgaa

SEQ ID NO: 47543 - DNA, 20 bp, Artificial Sequence
  Description of Artificial Sequence: Synthetic oligonucleotide
  Target: ATXN2; (+) strand; PAM type: NRG; PAM sequence: CAG
aaggcagatgttgaagagcc

SEQ ID NO: 47544 - DNA, 20 bp, Artificial Sequence
  Description of Artificial Sequence: Synthetic oligonucleotide
  Target: ATXN2; (+) strand; PAM type: NRG; PAM sequence: CAG
gatgttgaagagcccagaaa

SEQ ID NO: 47545 - DNA, 20 bp, Artificial Sequence
  Description of Artificial Sequence: Synthetic oligonucleotide
  Target: ATXN2; (+) strand; PAM type: NRG; PAM sequence: GAG
tgttgaagagcccagaaaca

SEQ ID NO: 47546 - DNA, 20 bp, Artificial Sequence
  Description of Artificial Sequence: Synthetic oligonucleotide
  Target: ATXN2; (+) strand; PAM type: NRG; PAM sequence: AAG
tgaagagcccagaaacagag

SEQ ID NO: 47547 - DNA, 20 bp, Artificial Sequence
  Description of Artificial Sequence: Synthetic oligonucleotide
  Target: ATXN2; (+) strand; PAM type: NRG; PAM sequence: TGG
agagcccagaaacagagaag

SEQ ID NO: 47548 - DNA, 20 bp, Artificial Sequence
  Description of Artificial Sequence: Synthetic oligonucleotide
  Target: ATXN2; (+) strand; PAM type: NRG; PAM sequence: AAG
gaaacagagaagtggtataa

SEQ ID NO: 47549 - DNA, 20 bp, Artificial Sequence
  Description of Artificial Sequence: Synthetic oligonucleotide
  Target: ATXN2; (+) strand; PAM type: NRG; PAM sequence: GAG
aacagagaagtggtataaaa

SEQ ID NO: 47550 - DNA, 20 bp, Artificial Sequence
  Description of Artificial Sequence: Synthetic oligonucleotide
  Target: ATXN2; (+) strand; PAM type: NRG; PAM sequence: AAG
gagaagtggtataaaagagc

SEQ ID NO: 47551 - DNA, 20 bp, Artificial Sequence
  Description of Artificial Sequence: Synthetic oligonucleotide
  Target: ATXN2; (+) strand; PAM type: NRG; PAM sequence: AGG
agaagtggtataaaagagca

SEQ ID NO: 47552 - DNA, 20 bp, Artificial Sequence
  Description of Artificial Sequence: Synthetic oligonucleotide
  Target: ATXN2; (+) strand; PAM type: NRG; PAM sequence: GAG
aagtggtataaaagagcaag

SEQ ID NO: 47553 - DNA, 20 bp, Artificial Sequence
  Description of Artificial Sequence: Synthetic oligonucleotide
  Target: ATXN2; (+) strand; PAM type: NRG; PAM sequence: AAG
aaagagcaaggagaaaaaaa

SEQ ID NO: 47554 - DNA, 20 bp, Artificial Sequence
  Description of Artificial Sequence: Synthetic oligonucleotide
  Target: ATXN2; (+) strand; PAM type: NRG; PAM sequence: TGG
agcaaggagaaaaaaaaaga

SEQ ID NO: 47555 - DNA, 20 bp, Artificial Sequence
  Description of Artificial Sequence: Synthetic oligonucleotide
  Target: ATXN2; (+) strand; PAM type: NRG; PAM sequence: CAG
aggagaaaaaaaaagatggc

SEQ ID NO: 47556 - DNA, 20 bp, Artificial Sequence
  Description of Artificial Sequence: Synthetic oligonucleotide
  Target: ATXN2; (+) strand; PAM type: NRG; PAM sequence: AGG
ggagaaaaaaaaagatggcc

SEQ ID NO: 47557 - DNA, 20 bp, Artificial Sequence
  Description of Artificial Sequence: Synthetic oligonucleotide
  Target: ATXN2; (+) strand; PAM type: NRG; PAM sequence: TGG
aaaaaaaagatggccaggcg

SEQ ID NO: 47558 - DNA, 20 bp, Artificial Sequence
  Description of Artificial Sequence: Synthetic oligonucleotide
  Target: ATXN2; (+) strand; PAM type: NRG; PAM sequence: TGG
aaaaagatggccaggcgtgg

SEQ ID NO: 47559 - DNA, 20 bp, Artificial Sequence
  Description of Artificial Sequence: Synthetic oligonucleotide
  Target: ATXN2; (+) strand; PAM type: NRG; PAM sequence: CAG
gtggctcacgcctgtaatcc

SEQ ID NO: 47560 - DNA, 20 bp, Artificial Sequence
  Description of Artificial Sequence: Synthetic oligonucleotide
  Target: ATXN2; (+) strand; PAM type: NRG; PAM sequence: TGG
cgcctgtaatcccagcactt

SEQ ID NO: 47561 - DNA, 20 bp, Artificial Sequence
  Description of Artificial Sequence: Synthetic oligonucleotide
  Target: ATXN2; (+) strand; PAM type: NRG; PAM sequence: GGG
gcctgtaatcccagcacttt

SEQ ID NO: 47562 - DNA, 20 bp, Artificial Sequence
  Description of Artificial Sequence: Synthetic oligonucleotide
  Target: ATXN2; (+) strand; PAM type: NRG; PAM sequence: GAG
ctgtaatcccagcactttgg

SEQ ID NO: 47563 - DNA, 20 bp, Artificial Sequence
  Description of Artificial Sequence: Synthetic oligonucleotide
  Target: ATXN2; (+) strand; PAM type: NRG; PAM sequence: AGG
tgtaatcccagcactttggg

SEQ ID NO: 47564 - DNA, 20 bp, Artificial Sequence
  Description of Artificial Sequence: Synthetic oligonucleotide
  Target: ATXN2; (+) strand; PAM type: NRG; PAM sequence: GAG
tcccagcactttgggaggct

SEQ ID NO: 47565 - DNA, 20 bp, Artificial Sequence
  Description of Artificial Sequence: Synthetic oligonucleotide
  Target: ATXN2; (+) strand; PAM type: NRG; PAM sequence: AGG
cccagcactttgggaggctg

SEQ ID NO: 47566 - DNA, 20 bp, Artificial Sequence
  Description of Artificial Sequence: Synthetic oligonucleotide
  Target: ATXN2; (+) strand; PAM type: NRG; PAM sequence: CAG
agcactttgggaggctgagg

SEQ ID NO: 47567 - DNA, 20 bp, Artificial Sequence
  Description of Artificial Sequence: Synthetic oligonucleotide
  Target: ATXN2; (+) strand; PAM type: NRG; PAM sequence: AGG
gcactttgggaggctgaggc

SEQ ID NO: 47568 - DNA, 20 bp, Artificial Sequence
  Description of Artificial Sequence: Synthetic oligonucleotide
  Target: ATXN2; (+) strand; PAM type: NRG; PAM sequence: GAG
gctgaggcaggtgatcactt

SEQ ID NO: 47569 - DNA, 20 bp, Artificial Sequence
  Description of Artificial Sequence: Synthetic oligonucleotide
  Target: ATXN2; (+) strand; PAM type: NRG; PAM sequence: AGG
ctgaggcaggtgatcacttg

SEQ ID NO: 47570 - DNA, 20 bp, Artificial Sequence
  Description of Artificial Sequence: Synthetic oligonucleotide
  Target: ATXN2; (+) strand; PAM type: NRG; PAM sequence: CAG
ggcaggtgatcacttgaggt

SEQ ID NO: 47571 - DNA, 20 bp, Artificial Sequence
  Description of Artificial Sequence: Synthetic oligonucleotide
  Target: ATXN2; (+) strand; PAM type: NRG; PAM sequence: AGG
gcaggtgatcacttgaggtc

SEQ ID NO: 47572 - DNA, 20 bp, Artificial Sequence
  Description of Artificial Sequence: Synthetic oligonucleotide
  Target: ATXN2; (+) strand; PAM type: NRG; PAM sequence: GAG
aggtgatcacttgaggtcag

SEQ ID NO: 47573 - DNA, 20 bp, Artificial Sequence
  Description of Artificial Sequence: Synthetic oligonucleotide
  Target: ATXN2; (+) strand; PAM type: NRG; PAM sequence: GAG
tcacttgaggtcaggagttc

SEQ ID NO: 47574 - DNA, 20 bp, Artificial Sequence
  Description of Artificial Sequence: Synthetic oligonucleotide
  Target: ATXN2; (+) strand; PAM type: NRG; PAM sequence: CAG
tgaggtcaggagttcgagac

SEQ ID NO: 47575 - DNA, 20 bp, Artificial Sequence
  Description of Artificial Sequence: Synthetic oligonucleotide
  Target: ATXN2; (+) strand; PAM type: NRG; PAM sequence: TGG
tcaggagttcgagaccagcc

SEQ ID NO: 47576 - DNA, 20 bp, Artificial Sequence
  Description of Artificial Sequence: Synthetic oligonucleotide
  Target: ATXN2; (+) strand; PAM type: NRG; PAM sequence: TGG
cgagaccagcctggccaaca

SEQ ID NO: 47577 - DNA, 20 bp, Artificial Sequence
  Description of Artificial Sequence: Synthetic oligonucleotide
  Target: ATXN2; (+) strand; PAM type: NRG; PAM sequence: TAG
tctactaaaaatacaaaaat

SEQ ID NO: 47578 - DNA, 20 bp, Artificial Sequence
  Description of Artificial Sequence: Synthetic oligonucleotide
  Target: ATXN2; (+) strand; PAM type: NRG; PAM sequence: CGG
ctaaaaatacaaaaattagc

SEQ ID NO: 47579 - DNA, 20 bp, Artificial Sequence
  Description of Artificial Sequence: Synthetic oligonucleotide
  Target: ATXN2; (+) strand; PAM type: NRG; PAM sequence: GGG
taaaaatacaaaaattagcc

SEQ ID NO: 47580 - DNA, 20 bp, Artificial Sequence
  Description of Artificial Sequence: Synthetic oligonucleotide
  Target: ATXN2; (+) strand; PAM type: NRG; PAM sequence: TGG
atacaaaaattagccgggcg

SEQ ID NO: 47581 - DNA, 20 bp, Artificial Sequence
  Description of Artificial Sequence: Synthetic oligonucleotide
  Target: ATXN2; (+) strand; PAM type: NRG; PAM sequence: TGG
caaaaattagccgggcgtgg

SEQ ID NO: 47582 - DNA, 20 bp, Artificial Sequence
  Description of Artificial Sequence: Synthetic oligonucleotide
  Target: ATXN2; (+) strand; PAM type: NRG; PAM sequence: CAG
aaattagccgggcgtggtgg

SEQ ID NO: 47583 - DNA, 20 bp, Artificial Sequence
  Description of Artificial Sequence: Synthetic oligonucleotide
  Target: ATXN2; (+) strand; PAM type: NRG; PAM sequence: AGG
aattagccgggcgtggtggc

SEQ ID NO: 47584 - DNA, 20 bp, Artificial Sequence
  Description of Artificial Sequence: Synthetic oligonucleotide
  Target: ATXN2; (+) strand; PAM type: NRG; PAM sequence: TAG
ggcgtggtggcaggcaccta

SEQ ID NO: 47585 - DNA, 20 bp, Artificial Sequence
  Description of Artificial Sequence: Synthetic oligonucleotide
  Target: ATXN2; (+) strand; PAM type: NRG; PAM sequence: CAG
gtggcaggcacctatagccc

SEQ ID NO: 47586 - DNA, 20 bp, Artificial Sequence
  Description of Artificial Sequence: Synthetic oligonucleotide
  Target: ATXN2; (+) strand; PAM type: NRG; PAM sequence: CAG
cacctatagccccagctact

SEQ ID NO: 47587 - DNA, 20 bp, Artificial Sequence
  Description of Artificial Sequence: Synthetic oligonucleotide
  Target: ATXN2; (+) strand; PAM type: NRG; PAM sequence: AGG
acctatagccccagctactc

SEQ ID NO: 47588 - DNA, 20 bp, Artificial Sequence
  Description of Artificial Sequence: Synthetic oligonucleotide
  Target: ATXN2; (+) strand; PAM type: NRG; PAM sequence: GAG
ctatagccccagctactcag

SEQ ID NO: 47589 - DNA, 20 bp, Artificial Sequence
  Description of Artificial Sequence: Synthetic oligonucleotide
  Target: ATXN2; (+) strand; PAM type: NRG; PAM sequence: AGG
tatagccccagctactcagg

SEQ ID NO: 47590 - DNA, 20 bp, Artificial Sequence
  Description of Artificial Sequence: Synthetic oligonucleotide
  Target: ATXN2; (+) strand; PAM type: NRG; PAM sequence: GAG
ccccagctactcaggaggct

SEQ ID NO: 47591 - DNA, 20 bp, Artificial Sequence
  Description of Artificial Sequence: Synthetic oligonucleotide
  Target: ATXN2; (+) strand; PAM type: NRG; PAM sequence: AGG
cccagctactcaggaggctg

SEQ ID NO: 47592 - DNA, 20 bp, Artificial Sequence
  Description of Artificial Sequence: Synthetic oligonucleotide
  Target: ATXN2; (+) strand; PAM type: NRG; PAM sequence: CAG
tactcaggaggctgaggctg

SEQ ID NO: 47593 - DNA, 20 bp, Artificial Sequence
  Description of Artificial Sequence: Synthetic oligonucleotide
  Target: ATXN2; (+) strand; PAM type: NRG; PAM sequence: GAG
caggaggctgaggctgcagt

SEQ ID NO: 47594 - DNA, 20 bp, Artificial Sequence
  Description of Artificial Sequence: Synthetic oligonucleotide
  Target: ATXN2; (+) strand; PAM type: NRG; PAM sequence: CAG
gaaatcacgccactgcactt

SEQ ID NO: 47595 - DNA, 20 bp, Artificial Sequence
  Description of Artificial Sequence: Synthetic oligonucleotide
  Target: ATXN2; (+) strand; PAM type: NRG; PAM sequence: TGG
cacgccactgcacttcagcc

SEQ ID NO: 47596 - DNA, 20 bp, Artificial Sequence
  Description of Artificial Sequence: Synthetic oligonucleotide
  Target: ATXN2; (+) strand; PAM type: NRG; PAM sequence: GGG
acgccactgcacttcagcct

SEQ ID NO: 47597 - DNA, 20 bp, Artificial Sequence
  Description of Artificial Sequence: Synthetic oligonucleotide
  Target: ATXN2; (+) strand; PAM type: NRG; PAM sequence: CAG
ctgcacttcagcctgggtga

SEQ ID NO: 47598 - DNA, 20 bp, Artificial Sequence
  Description of Artificial Sequence: Synthetic oligonucleotide
  Target: ATXN2; (+) strand; PAM type: NRG; PAM sequence: GAG
ttcagcctgggtgacagacc

SEQ ID NO: 47599 - DNA, 20 bp, Artificial Sequence
  Description of Artificial Sequence: Synthetic oligonucleotide
  Target: ATXN2; (+) strand; PAM type: NRG; PAM sequence: AAG
cgagactccatctaaaaaaa

SEQ ID NO: 47600 - DNA, 20 bp, Artificial Sequence
  Description of Artificial Sequence: Synthetic oligonucleotide
  Target: ATXN2; (+) strand; PAM type: NRG; PAM sequence: AAG
tccatctaaaaaaaaagaaa

SEQ ID NO: 47601 - DNA, 20 bp, Artificial Sequence
  Description of Artificial Sequence: Synthetic oligonucleotide
  Target: ATXN2; (+) strand; PAM type: NRG; PAM sequence: AAG
taaaaaaaaagaaaaagaaa

SEQ ID NO: 47602 - DNA, 20 bp, Artificial Sequence
  Description of Artificial Sequence: Synthetic oligonucleotide
  Target: ATXN2; (+) strand; PAM type: NRG; PAM sequence: GAG
aaaaaaaagaaaaagaaaaa

SEQ ID NO: 47603 - DNA, 20 bp, Artificial Sequence
  Description of Artificial Sequence: Synthetic oligonucleotide
  Target: ATXN2; (+) strand; PAM type: NRG; PAM sequence: AAG
aagaaaaagaaaaagagaac

SEQ ID NO: 47604 - DNA, 20 bp, Artificial Sequence
  Description of Artificial Sequence: Synthetic oligonucleotide
  Target: ATXN2; (+) strand; PAM type: NRG; PAM sequence: AGG
agaaaaagaaaaagagaaca

SEQ ID NO: 47605 - DNA, 20 bp, Artificial Sequence
  Description of Artificial Sequence: Synthetic oligonucleotide
  Target: ATXN2; (+) strand; PAM type: NRG; PAM sequence: GAG
aaaaagaaaaagagaacaag

SEQ ID NO: 47606 - DNA, 20 bp, Artificial Sequence
  Description of Artificial Sequence: Synthetic oligonucleotide
  Target: ATXN2; (+) strand; PAM type: NRG; PAM sequence: AGG
aaaagaaaaagagaacaagg

SEQ ID NO: 47607 - DNA, 20 bp, Artificial Sequence
  Description of Artificial Sequence: Synthetic oligonucleotide
  Target: ATXN2; (+) strand; PAM type: NRG; PAM sequence: AAG
gaaaaagagaacaaggaggt

SEQ ID NO: 47608 - DNA, 20 bp, Artificial Sequence
  Description of Artificial Sequence: Synthetic oligonucleotide
  Target: ATXN2; (+) strand; PAM type: NRG; PAM sequence: TAG
aaagagaacaaggaggtaag

SEQ ID NO: 47609 - DNA, 20 bp, Artificial Sequence
  Description of Artificial Sequence: Synthetic oligonucleotide
  Target: ATXN2; (+) strand; PAM type: NRG; PAM sequence: AAG
gagaacaaggaggtaagtag

SEQ ID NO: 47610 - DNA, 20 bp, Artificial Sequence
  Description of Artificial Sequence: Synthetic oligonucleotide
  Target: ATXN2; (+) strand; PAM type: NRG; PAM sequence: AGG
agaacaaggaggtaagtaga

SEQ ID NO: 47611 - DNA, 20 bp, Artificial Sequence
  Description of Artificial Sequence: Synthetic oligonucleotide
  Target: ATXN2; (+) strand; PAM type: NRG; PAM sequence: GGG
gaacaaggaggtaagtagaa

SEQ ID NO: 47612 - DNA, 20 bp, Artificial Sequence
  Description of Artificial Sequence: Synthetic oligonucleotide
  Target: ATXN2; (+) strand; PAM type: NRG; PAM sequence: GAG
acaaggaggtaagtagaagg

SEQ ID NO: 47613 - DNA, 20 bp, Artificial Sequence
  Description of Artificial Sequence: Synthetic oligonucleotide
  Target: ATXN2; (+) strand; PAM type: NRG; PAM sequence: GAG
aaggaggtaagtagaaggga

SEQ ID NO: 47614 - DNA, 20 bp, Artificial Sequence
  Description of Artificial Sequence: Synthetic oligonucleotide
  Target: ATXN2; (+) strand; PAM type: NRG; PAM sequence: GAG
ggaggtaagtagaagggaga

SEQ ID NO: 47615 - DNA, 20 bp, Artificial Sequence
  Description of Artificial Sequence: Synthetic oligonucleotide
  Target: ATXN2; (+) strand; PAM type: NRG; PAM sequence: AAG
taagtagaagggagagagtc

SEQ ID NO: 47616 - DNA, 20 bp, Artificial Sequence
  Description of Artificial Sequence: Synthetic oligonucleotide
  Target: ATXN2; (+) strand; PAM type: NRG; PAM sequence: AGG
aagtagaagggagagagtca

SEQ ID NO: 47617 - DNA, 20 bp, Artificial Sequence
  Description of Artificial Sequence: Synthetic oligonucleotide
  Target: ATXN2; (+) strand; PAM type: NRG; PAM sequence: GGG
agtagaagggagagagtcaa

SEQ ID NO: 47618 - DNA, 20 bp, Artificial Sequence
  Description of Artificial Sequence: Synthetic oligonucleotide
  Target: ATXN2; (+) strand; PAM type: NRG; PAM sequence: AAG
gagagtcaagggcatgattg

SEQ ID NO: 47619 - DNA, 20 bp, Artificial Sequence
  Description of Artificial Sequence: Synthetic oligonucleotide
  Target: ATXN2; (+) strand; PAM type: NRG; PAM sequence: TGG
gtcaagggcatgattgaagt

SEQ ID NO: 47620 - DNA, 20 bp, Artificial Sequence
  Description of Artificial Sequence: Synthetic oligonucleotide
  Target: ATXN2; (+) strand; PAM type: NRG; PAM sequence: CAG
aaaatcctctctactaaaac

SEQ ID NO: 47621 - DNA, 20 bp, Artificial Sequence
  Description of Artificial Sequence: Synthetic oligonucleotide
  Target: ATXN2; (+) strand; PAM type: NRG; PAM sequence: GAG
aatcctctctactaaaacca

SEQ ID NO: 47622 - DNA, 20 bp, Artificial Sequence
  Description of Artificial Sequence: Synthetic oligonucleotide
  Target: ATXN2; (+) strand; PAM type: NRG; PAM sequence: AGG
atcctctctactaaaaccag

SEQ ID NO: 47623 - DNA, 20 bp, Artificial Sequence
  Description of Artificial Sequence: Synthetic oligonucleotide
  Target: ATXN2; (+) strand; PAM type: NRG; PAM sequence: GAG
accagaggaaaaataataat

SEQ ID NO: 47624 - DNA, 20 bp, Artificial Sequence
  Description of Artificial Sequence: Synthetic oligonucleotide
  Target: ATXN2; (+) strand; PAM type: NRG; PAM sequence: AGG
ccagaggaaaaataataatg

SEQ ID NO: 47625 - DNA, 20 bp, Artificial Sequence
  Description of Artificial Sequence: Synthetic oligonucleotide
  Target: ATXN2; (+) strand; PAM type: NRG; PAM sequence: CGG
aggaaaaataataatgaggc

SEQ ID NO: 47626 - DNA, 20 bp, Artificial Sequence
  Description of Artificial Sequence: Synthetic oligonucleotide
  Target: ATXN2; (+) strand; PAM type: NRG; PAM sequence: GGG
ggaaaaataataatgaggcc

SEQ ID NO: 47627 - DNA, 20 bp, Artificial Sequence
  Description of Artificial Sequence: Synthetic oligonucleotide
  Target: ATXN2; (+) strand; PAM type: NRG; PAM sequence: CGG
aataataatgaggccgggtg

SEQ ID NO: 47628 - DNA, 20 bp, Artificial Sequence
  Description of Artificial Sequence: Synthetic oligonucleotide
  Target: ATXN2; (+) strand; PAM type: NRG; PAM sequence: CAG
tgcggtgactcatgtaatcc

SEQ ID NO: 47629 - DNA, 20 bp, Artificial Sequence
  Description of Artificial Sequence: Synthetic oligonucleotide
  Target: ATXN2; (+) strand; PAM type: NRG; PAM sequence: AGG
gcggtgactcatgtaatccc

SEQ ID NO: 47630 - DNA, 20 bp, Artificial Sequence
  Description of Artificial Sequence: Synthetic oligonucleotide
  Target: ATXN2; (+) strand; PAM type: NRG; PAM sequence: TGG
ctcatgtaatcccaggactt

SEQ ID NO: 47631 - DNA, 20 bp, Artificial Sequence
  Description of Artificial Sequence: Synthetic oligonucleotide
  Target: ATXN2; (+) strand; PAM type: NRG; PAM sequence: GGG
tcatgtaatcccaggacttt

SEQ ID NO: 47632 - DNA, 20 bp, Artificial Sequence
  Description of Artificial Sequence: Synthetic oligonucleotide
  Target: ATXN2; (+) strand; PAM type: NRG; PAM sequence: GAG
atgtaatcccaggactttgg

SEQ ID NO: 47633 - DNA, 20 bp, Artificial Sequence
  Description of Artificial Sequence: Synthetic oligonucleotide
  Target: ATXN2; (+) strand; PAM type: NRG; PAM sequence: AGG
tgtaatcccaggactttggg

SEQ ID NO: 47634 - DNA, 20 bp, Artificial Sequence
  Description of Artificial Sequence: Synthetic oligonucleotide
  Target: ATXN2; (+) strand; PAM type: NRG; PAM sequence: AAG
tcccaggactttgggaggcc

SEQ ID NO: 47635 - DNA, 20 bp, Artificial Sequence
  Description of Artificial Sequence: Synthetic oligonucleotide
  Target: ATXN2; (+) strand; PAM type: NRG; PAM sequence: AGG
cccaggactttgggaggcca

SEQ ID NO: 47636 - DNA, 20 bp, Artificial Sequence
  Description of Artificial Sequence: Synthetic oligonucleotide
  Target: ATXN2; (+) strand; PAM type: NRG; PAM sequence: TGG
aggactttgggaggccaagg

SEQ ID NO: 47637 - DNA, 20 bp, Artificial Sequence
  Description of Artificial Sequence: Synthetic oligonucleotide
  Target: ATXN2; (+) strand; PAM type: NRG; PAM sequence: GGG
ggactttgggaggccaaggt

SEQ ID NO: 47638 - DNA, 20 bp, Artificial Sequence
  Description of Artificial Sequence: Synthetic oligonucleotide
  Target: ATXN2; (+) strand; PAM type: NRG; PAM sequence: AAG
ctttgggaggccaaggtggg

SEQ ID NO: 47639 - DNA, 20 bp, Artificial Sequence
  Description of Artificial Sequence: Synthetic oligonucleotide
  Target: ATXN2; (+) strand; PAM type: NRG; PAM sequence: TAG
ggccaaggtgggaagactct

SEQ ID NO: 47640 - DNA, 20 bp, Artificial Sequence
  Description of Artificial Sequence: Synthetic oligonucleotide
  Target: ATXN2; (+) strand; PAM type: NRG; PAM sequence: AGG
gccaaggtgggaagactctt

SEQ ID NO: 47641 - DNA, 20 bp, Artificial Sequence
  Description of Artificial Sequence: Synthetic oligonucleotide
  Target: ATXN2; (+) strand; PAM type: NRG; PAM sequence: CAG
ggtgggaagactcttaggcc

SEQ ID NO: 47642 - DNA, 20 bp, Artificial Sequence
  Description of Artificial Sequence: Synthetic oligonucleotide
  Target: ATXN2; (+) strand; PAM type: NRG; PAM sequence: CAG
gggaagactcttaggcccag

SEQ ID NO: 47643 - DNA, 20 bp, Artificial Sequence
  Description of Artificial Sequence: Synthetic oligonucleotide
  Target: ATXN2; (+) strand; PAM type: NRG; PAM sequence: GAG
actcttaggcccagcagttt

SEQ ID NO: 47644 - DNA, 20 bp, Artificial Sequence
  Description of Artificial Sequence: Synthetic oligonucleotide
  Target: ATXN2; (+) strand; PAM type: NRG; PAM sequence: CAG
taggcccagcagtttgagac

SEQ ID NO: 47645 - DNA, 20 bp, Artificial Sequence
  Description of Artificial Sequence: Synthetic oligonucleotide
  Target: ATXN2; (+) strand; PAM type: NRG; PAM sequence: CAG
tgagaccagcctgtgcaata

SEQ ID NO: 47646 - DNA, 20 bp, Artificial Sequence
  Description of Artificial Sequence: Synthetic oligonucleotide
  Target: ATXN2; (+) strand; PAM type: NRG; PAM sequence: AGG
gagaccagcctgtgcaatac

SEQ ID NO: 47647 - DNA, 20 bp, Artificial Sequence
  Description of Artificial Sequence: Synthetic oligonucleotide
  Target: ATXN2; (+) strand; PAM type: NRG; PAM sequence: GGG
agaccagcctgtgcaataca

SEQ ID NO: 47648 - DNA, 20 bp, Artificial Sequence
  Description of Artificial Sequence: Synthetic oligonucleotide
  Target: ATXN2; (+) strand; PAM type: NRG; PAM sequence: TAG
aaaatataaatataaaaaat

SEQ ID NO: 47649 - DNA, 20 bp, Artificial Sequence
  Description of Artificial Sequence: Synthetic oligonucleotide
  Target: ATXN2; (+) strand; PAM type: NRG; PAM sequence: CAG
tataaatataaaaaattagt

SEQ ID NO: 47650 - DNA, 20 bp, Artificial Sequence
  Description of Artificial Sequence: Synthetic oligonucleotide
  Target: ATXN2; (+) strand; PAM type: NRG; PAM sequence: AGG
ataaatataaaaaattagtc

SEQ ID NO: 47651 - DNA, 20 bp, Artificial Sequence
  Description of Artificial Sequence: Synthetic oligonucleotide
  Target: ATXN2; (+) strand; PAM type: NRG; PAM sequence: TAG
tataaaaaattagtcaggca

SEQ ID NO: 47652 - DNA, 20 bp, Artificial Sequence
  Description of Artificial Sequence: Synthetic oligonucleotide
  Target: ATXN2; (+) strand; PAM type: NRG; PAM sequence: CAG
ggcatagtgatgtgcacata

SEQ ID NO: 47653 - DNA, 20 bp, Artificial Sequence
  Description of Artificial Sequence: Synthetic oligonucleotide
  Target: ATXN2; (+) strand; PAM type: NRG; PAM sequence: CAG
gtgatgtgcacatacagtcc

SEQ ID NO: 47654 - DNA, 20 bp, Artificial Sequence
  Description of Artificial Sequence: Synthetic oligonucleotide
  Target: ATXN2; (+) strand; PAM type: NRG; PAM sequence: TAG
cacatacagtcccagttatg

SEQ ID NO: 47655 - DNA, 20 bp, Artificial Sequence
  Description of Artificial Sequence: Synthetic oligonucleotide
  Target: ATXN2; (+) strand; PAM type: NRG; PAM sequence: AGG
acatacagtcccagttatgt

SEQ ID NO: 47656 - DNA, 20 bp, Artificial Sequence
  Description of Artificial Sequence: Synthetic oligonucleotide
  Target: ATXN2; (+) strand; PAM type: NRG; PAM sequence: GAG
atacagtcccagttatgtag

SEQ ID NO: 47657 - DNA, 20 bp, Artificial Sequence
  Description of Artificial Sequence: Synthetic oligonucleotide
  Target: ATXN2; (+) strand; PAM type: NRG; PAM sequence: AGG
tacagtcccagttatgtagg

SEQ ID NO: 47658 - DNA, 20 bp, Artificial Sequence
  Description of Artificial Sequence: Synthetic oligonucleotide
  Target: ATXN2; (+) strand; PAM type: NRG; PAM sequence: GAG
tcccagttatgtaggaggtt

SEQ ID NO: 47659 - DNA, 20 bp, Artificial Sequence
  Description of Artificial Sequence: Synthetic oligonucleotide
  Target: ATXN2; (+) strand; PAM type: NRG; PAM sequence: AGG
cccagttatgtaggaggttg

SEQ ID NO: 47660 - DNA, 20 bp, Artificial Sequence
  Description of Artificial Sequence: Synthetic oligonucleotide
  Target: ATXN2; (+) strand; PAM type: NRG; PAM sequence: GAG
gttatgtaggaggttgaggt

SEQ ID NO: 47661 - DNA, 20 bp, Artificial Sequence
  Description of Artificial Sequence: Synthetic oligonucleotide
  Target: ATXN2; (+) strand; PAM type: NRG; PAM sequence: GAG
tatgtaggaggttgaggtga

SEQ ID NO: 47662 - DNA, 20 bp, Artificial Sequence
  Description of Artificial Sequence: Synthetic oligonucleotide
  Target: ATXN2; (+) strand; PAM type: NRG; PAM sequence: AGG
atgtaggaggttgaggtgag

SEQ ID NO: 47663 - DNA, 20 bp, Artificial Sequence
  Description of Artificial Sequence: Synthetic oligonucleotide
  Target: ATXN2; (+) strand; PAM type: NRG; PAM sequence: GAG
ttgaggtgagaggatcacct

SEQ ID NO: 47664 - DNA, 20 bp, Artificial Sequence
  Description of Artificial Sequence: Synthetic oligonucleotide
  Target: ATXN2; (+) strand; PAM type: NRG; PAM sequence: TGG
gtgagaggatcacctgagcc

SEQ ID NO: 47665 - DNA, 20 bp, Artificial Sequence
  Description of Artificial Sequence: Synthetic oligonucleotide
  Target: ATXN2; (+) strand; PAM type: NRG; PAM sequence: GGG
tgagaggatcacctgagcct

SEQ ID NO: 47666 - DNA, 20 bp, Artificial Sequence
  Description of Artificial Sequence: Synthetic oligonucleotide
  Target: ATXN2; (+) strand; PAM type: NRG; PAM sequence: AAG
gaggatcacctgagcctggg

SEQ ID NO: 47667 - DNA, 20 bp, Artificial Sequence
  Description of Artificial Sequence: Synthetic oligonucleotide
  Target: ATXN2; (+) strand; PAM type: NRG; PAM sequence: GAG
tcacctgagcctgggaagtc

SEQ ID NO: 47668 - DNA, 20 bp, Artificial Sequence
  Description of Artificial Sequence: Synthetic oligonucleotide
  Target: ATXN2; (+) strand; PAM type: NRG; PAM sequence: AGG
cacctgagcctgggaagtcg

SEQ ID NO: 47669 - DNA, 20 bp, Artificial Sequence
  Description of Artificial Sequence: Synthetic oligonucleotide
  Target: ATXN2; (+) strand; PAM type: NRG; PAM sequence: CAG
agcctgggaagtcgaggctg

SEQ ID NO: 47670 - DNA, 20 bp, Artificial Sequence
  Description of Artificial Sequence: Synthetic oligonucleotide
  Target: ATXN2; (+) strand; PAM type: NRG; PAM sequence: GAG
tgggaagtcgaggctgcagt

SEQ ID NO: 47671 - DNA, 20 bp, Artificial Sequence
  Description of Artificial Sequence: Synthetic oligonucleotide
  Target: ATXN2; (+) strand; PAM type: NRG; PAM sequence: CAG
gtgattgcatcactgcactc

SEQ ID NO: 47672 - DNA, 20 bp, Artificial Sequence
  Description of Artificial Sequence: Synthetic oligonucleotide
  Target: ATXN2; (+) strand; PAM type: NRG; PAM sequence: TGG
tgcatcactgcactccagcc

SEQ ID NO: 47673 - DNA, 20 bp, Artificial Sequence
  Description of Artificial Sequence: Synthetic oligonucleotide
  Target: ATXN2; (+) strand; PAM type: NRG; PAM sequence: GGG
gcatcactgcactccagcct

SEQ ID NO: 47674 - DNA, 20 bp, Artificial Sequence
  Description of Artificial Sequence: Synthetic oligonucleotide
  Target: ATXN2; (+) strand; PAM type: NRG; PAM sequence: CAG
ctgcactccagcctgggcaa

SEQ ID NO: 47675 - DNA, 20 bp, Artificial Sequence
  Description of Artificial Sequence: Synthetic oligonucleotide
  Target: ATXN2; (+) strand; PAM type: NRG; PAM sequence: GAG
gcactccagcctgggcaaca

SEQ ID NO: 47676 - DNA, 20 bp, Artificial Sequence
  Description of Artificial Sequence: Synthetic oligonucleotide
  Target: ATXN2; (+) strand; PAM type: NRG; PAM sequence: AAG
tccagcctgggcaacagagc

SEQ ID NO: 47677 - DNA, 20 bp, Artificial Sequence
  Description of Artificial Sequence: Synthetic oligonucleotide
  Target: ATXN2; (+) strand; PAM type: NRG; PAM sequence: AAG
atctgaaaaaaaaaaaaaaa

SEQ ID NO: 47678 - DNA, 20 bp, Artificial Sequence
  Description of Artificial Sequence: Synthetic oligonucleotide
  Target: ATXN2; (+) strand; PAM type: NRG; PAM sequence: TGG
gaaaaaaaaaaaaaaaaaga

SEQ ID NO: 47679 - DNA, 20 bp, Artificial Sequence
  Description of Artificial Sequence: Synthetic oligonucleotide
  Target: ATXN2; (+) strand; PAM type: NRG; PAM sequence: CGG
aaaaaaaaaaaaagatggca

SEQ ID NO: 47680 - DNA, 20 bp, Artificial Sequence
  Description of Artificial Sequence: Synthetic oligonucleotide
  Target: ATXN2; (+) strand; PAM type: NRG; PAM sequence: GAG
aaaaaaaaaaagatggcacg

SEQ ID NO: 47681 - DNA, 20 bp, Artificial Sequence
  Description of Artificial Sequence: Synthetic oligonucleotide
  Target: ATXN2; (+) strand; PAM type: NRG; PAM sequence: AGG
aaaaaaaaaagatggcacgg

SEQ ID NO: 47682 - DNA, 20 bp, Artificial Sequence
  Description of Artificial Sequence: Synthetic oligonucleotide
  Target: ATXN2; (+) strand; PAM type: NRG; PAM sequence: AAG
aaaaaaagatggcacggagg

SEQ ID NO: 47683 - DNA, 20 bp, Artificial Sequence
  Description of Artificial Sequence: Synthetic oligonucleotide
  Target: ATXN2; (+) strand; PAM type: NRG; PAM sequence: AAG
aaaagatggcacggaggaag

SEQ ID NO: 47684 - DNA, 20 bp, Artificial Sequence
  Description of Artificial Sequence: Synthetic oligonucleotide
  Target: ATXN2; (+) strand; PAM type: NRG; PAM sequence: TAG
ggaggaagaagataaatttg

SEQ ID NO: 47685 - DNA, 20 bp, Artificial Sequence
  Description of Artificial Sequence: Synthetic oligonucleotide
  Target: ATXN2; (+) strand; PAM type: NRG; PAM sequence: AAG
aagaagataaatttgtagat

SEQ ID NO: 47686 - DNA, 20 bp, Artificial Sequence
  Description of Artificial Sequence: Synthetic oligonucleotide
  Target: ATXN2; (+) strand; PAM type: NRG; PAM sequence: AGG
agaagataaatttgtagata

SEQ ID NO: 47687 - DNA, 20 bp, Artificial Sequence
  Description of Artificial Sequence: Synthetic oligonucleotide
  Target: ATXN2; (+) strand; PAM type: NRG; PAM sequence: AAG
agataaatttgtagataagg

SEQ ID NO: 47688 - DNA, 20 bp, Artificial Sequence
  Description of Artificial Sequence: Synthetic oligonucleotide
  Target: ATXN2; (+) strand; PAM type: NRG; PAM sequence: AGG
gataaatttgtagataagga

SEQ ID NO: 47689 - DNA, 20 bp, Artificial Sequence
  Description of Artificial Sequence: Synthetic oligonucleotide
  Target: ATXN2; (+) strand; PAM type: NRG; PAM sequence: TAG
aaatttgtagataaggaagg

SEQ ID NO: 47690 - DNA, 20 bp, Artificial Sequence
  Description of Artificial Sequence: Synthetic oligonucleotide
  Target: ATXN2; (+) strand; PAM type: NRG; PAM sequence: TGG
tttgtagataaggaaggtag

SEQ ID NO: 47691 - DNA, 20 bp, Artificial Sequence
  Description of Artificial Sequence: Synthetic oligonucleotide
  Target: ATXN2; (+) strand; PAM type: NRG; PAM sequence: TAG
tagataaggaaggtagtggt

SEQ ID NO: 47692 - DNA, 20 bp, Artificial Sequence
  Description of Artificial Sequence: Synthetic oligonucleotide
  Target: ATXN2; (+) strand; PAM type: NRG; PAM sequence: TGG
ggaaggtagtggttagttga

SEQ ID NO: 47693 - DNA, 20 bp, Artificial Sequence
  Description of Artificial Sequence: Synthetic oligonucleotide
  Target: ATXN2; (+) strand; PAM type: NRG; PAM sequence: GAG
aaggtagtggttagttgatg

SEQ ID NO: 47694 - DNA, 20 bp, Artificial Sequence
  Description of Artificial Sequence: Synthetic oligonucleotide
  Target: ATXN2; (+) strand; PAM type: NRG; PAM sequence: AAG
atttttcactaaatgtgaca

SEQ ID NO: 47695 - DNA, 20 bp, Artificial Sequence
  Description of Artificial Sequence: Synthetic oligonucleotide
  Target: ATXN2; (+) strand; PAM type: NRG; PAM sequence: AAG
aatgtgacaaagaatctgtt

SEQ ID NO: 47696 - DNA, 20 bp, Artificial Sequence
  Description of Artificial Sequence: Synthetic oligonucleotide
  Target: ATXN2; (+) strand; PAM type: NRG; PAM sequence: AAG
acaaagaatctgttaagcaa

SEQ ID NO: 47697 - DNA, 20 bp, Artificial Sequence
  Description of Artificial Sequence: Synthetic oligonucleotide
  Target: ATXN2; (+) strand; PAM type: NRG; PAM sequence: CAG
gttaagcaaaagtaattctt

SEQ ID NO: 47698 - DNA, 20 bp, Artificial Sequence
  Description of Artificial Sequence: Synthetic oligonucleotide
  Target: ATXN2; (+) strand; PAM type: NRG; PAM sequence: TAG
ttcttcagactaaatccaat

SEQ ID NO: 47699 - DNA, 20 bp, Artificial Sequence
  Description of Artificial Sequence: Synthetic oligonucleotide
  Target: ATXN2; (+) strand; PAM type: NRG; PAM sequence: TGG
cagactaaatccaattagaa

SEQ ID NO: 47700 - DNA, 20 bp, Artificial Sequence
  Description of Artificial Sequence: Synthetic oligonucleotide
  Target: ATXN2; (+) strand; PAM type: NRG; PAM sequence: AAG
caattagaatggtcatgaat

SEQ ID NO: 47701 - DNA, 20 bp, Artificial Sequence
  Description of Artificial Sequence: Synthetic oligonucleotide
  Target: ATXN2; (+) strand; PAM type: NRG; PAM sequence: CAG
atggtcatgaataagaatcg

SEQ ID NO: 47702 - DNA, 20 bp, Artificial Sequence
  Description of Artificial Sequence: Synthetic oligonucleotide
  Target: ATXN2; (+) strand; PAM type: NRG; PAM sequence: AGG
tggtcatgaataagaatcgc

SEQ ID NO: 47703 - DNA, 20 bp, Artificial Sequence
  Description of Artificial Sequence: Synthetic oligonucleotide
  Target: ATXN2; (+) strand; PAM type: NRG; PAM sequence: CAG
aagaatcgcaggatattata

SEQ ID NO: 47704 - DNA, 20 bp, Artificial Sequence
  Description of Artificial Sequence: Synthetic oligonucleotide
  Target: ATXN2; (+) strand; PAM type: NRG; PAM sequence: TAG
cgcaggatattatacagtat

SEQ ID NO: 47705 - DNA, 20 bp, Artificial Sequence
  Description of Artificial Sequence: Synthetic oligonucleotide
  Target: ATXN2; (+) strand; PAM type: NRG; PAM sequence: AAG
attatacagtattagaatca

SEQ ID NO: 47706 - DNA, 20 bp, Artificial Sequence
  Description of Artificial Sequence: Synthetic oligonucleotide
  Target: ATXN2; (+) strand; PAM type: NRG; PAM sequence: TAG
ttagaatcaaagcatgcaat

SEQ ID NO: 47707 - DNA, 20 bp, Artificial Sequence
  Description of Artificial Sequence: Synthetic oligonucleotide
  Target: ATXN2; (+) strand; PAM type: NRG; PAM sequence: AAG
caaagcatgcaattagttgt

SEQ ID NO: 47708 - DNA, 20 bp, Artificial Sequence
  Description of Artificial Sequence: Synthetic oligonucleotide
  Target: ATXN2; (+) strand; PAM type: NRG; PAM sequence: AAG
tgcaattagttgtaagttta

SEQ ID NO: 47709 - DNA, 20 bp, Artificial Sequence
  Description of Artificial Sequence: Synthetic oligonucleotide
  Target: ATXN2; (+) strand; PAM type: NRG; PAM sequence: AGG
gcaattagttgtaagtttaa

SEQ ID NO: 47710 - DNA, 20 bp, Artificial Sequence
  Description of Artificial Sequence: Synthetic oligonucleotide
  Target: ATXN2; (+) strand; PAM type: NRG; PAM sequence: CAG
ttagttgtaagtttaaagga

SEQ ID NO: 47711 - DNA, 20 bp, Artificial Sequence
  Description of Artificial Sequence: Synthetic oligonucleotide
  Target: ATXN2; (+) strand; PAM type: NRG; PAM sequence: GAG
agttgtaagtttaaaggaca

SEQ ID NO: 47712 - DNA, 20 bp, Artificial Sequence
  Description of Artificial Sequence: Synthetic oligonucleotide
  Target: ATXN2; (+) strand; PAM type: NRG; PAM sequence: AAG
cacattctgttacttcacca

SEQ ID NO: 47713 - DNA, 20 bp, Artificial Sequence
  Description of Artificial Sequence: Synthetic oligonucleotide
  Target: ATXN2; (+) strand; PAM type: NRG; PAM sequence: CAG
ttctgttacttcaccaaagc

SEQ ID NO: 47714 - DNA, 20 bp, Artificial Sequence
  Description of Artificial Sequence: Synthetic oligonucleotide
  Target: ATXN2; (+) strand; PAM type: NRG; PAM sequence: TAG
ttacttcaccaaagccagta

SEQ ID NO: 47715 - DNA, 20 bp, Artificial Sequence
  Description of Artificial Sequence: Synthetic oligonucleotide
  Target: ATXN2; (+) strand; PAM type: NRG; PAM sequence: CAG
gtatagcatgtatttttgat

SEQ ID NO: 47716 - DNA, 20 bp, Artificial Sequence
  Description of Artificial Sequence: Synthetic oligonucleotide
  Target: ATXN2; (+) strand; PAM type: NRG; PAM sequence: AAG
tatttttgatcagtcctaaa

SEQ ID NO: 47717 - DNA, 20 bp, Artificial Sequence
  Description of Artificial Sequence: Synthetic oligonucleotide
  Target: ATXN2; (+) strand; PAM type: NRG; PAM sequence: CAG
gtcctaaaaagccctaaatg

SEQ ID NO: 47718 - DNA, 20 bp, Artificial Sequence
  Description of Artificial Sequence: Synthetic oligonucleotide
  Target: ATXN2; (+) strand; PAM type: NRG; PAM sequence: CGG
ctaaaaagccctaaatgcag

SEQ ID NO: 47719 - DNA, 20 bp, Artificial Sequence
  Description of Artificial Sequence: Synthetic oligonucleotide
  Target: ATXN2; (+) strand; PAM type: NRG; PAM sequence: TAG
atgcagcggaaaatatgatt

SEQ ID NO: 47720 - DNA, 20 bp, Artificial Sequence
  Description of Artificial Sequence: Synthetic oligonucleotide
  Target: ATXN2; (+) strand; PAM type: NRG; PAM sequence: AGG
tgcagcggaaaatatgattt

SEQ ID NO: 47721 - DNA, 20 bp, Artificial Sequence
  Description of Artificial Sequence: Synthetic oligonucleotide
  Target: ATXN2; (+) strand; PAM type: NRG; PAM sequence: AAG
cggaaaatatgatttaggcc

SEQ ID NO: 47722 - DNA, 20 bp, Artificial Sequence
  Description of Artificial Sequence: Synthetic oligonucleotide
  Target: ATXN2; (+) strand; PAM type: NRG; PAM sequence: GAG
gaaaatatgatttaggccaa

SEQ ID NO: 47723 - DNA, 20 bp, Artificial Sequence
  Description of Artificial Sequence: Synthetic oligonucleotide
  Target: ATXN2; (+) strand; PAM type: NRG; PAM sequence: TGG
atatgatttaggccaagagc

SEQ ID NO: 47724 - DNA, 20 bp, Artificial Sequence
  Description of Artificial Sequence: Synthetic oligonucleotide
  Target: ATXN2; (+) strand; PAM type: NRG; PAM sequence: AAG
agctggcaaacttttctgta

SEQ ID NO: 47725 - DNA, 20 bp, Artificial Sequence
  Description of Artificial Sequence: Synthetic oligonucleotide
  Target: ATXN2; (+) strand; PAM type: NRG; PAM sequence: GAG
ctggcaaacttttctgtaaa

SEQ ID NO: 47726 - DNA, 20 bp, Artificial Sequence
  Description of Artificial Sequence: Synthetic oligonucleotide
  Target: ATXN2; (+) strand; PAM type: NRG; PAM sequence: CAG
caaacttttctgtaaagaga

SEQ ID NO: 47727 - DNA, 20 bp, Artificial Sequence
  Description of Artificial Sequence: Synthetic oligonucleotide
  Target: ATXN2; (+) strand; PAM type: NRG; PAM sequence: TGG
aaagagacagtcaaattttc

SEQ ID NO: 47728 - DNA, 20 bp, Artificial Sequence
  Description of Artificial Sequence: Synthetic oligonucleotide
  Target: ATXN2; (+) strand; PAM type: NRG; PAM sequence: AAG
gtcaaattttctggctttgc

SEQ ID NO: 47729 - DNA, 20 bp, Artificial Sequence
  Description of Artificial Sequence: Synthetic oligonucleotide
  Target: ATXN2; (+) strand; PAM type: NRG; PAM sequence: CAG
ttctggctttgcaagtccta

SEQ ID NO: 47730 - DNA, 20 bp, Artificial Sequence
  Description of Artificial Sequence: Synthetic oligonucleotide
  Target: ATXN2; (+) strand; PAM type: NRG; PAM sequence: CAG
ggctttgcaagtcctacagt

SEQ ID NO: 47731 - DNA, 20 bp, Artificial Sequence
  Description of Artificial Sequence: Synthetic oligonucleotide
  Target: ATXN2; (+) strand; PAM type: NRG; PAM sequence: TGG
gctacaactactcaactcta

SEQ ID NO: 47732 - DNA, 20 bp, Artificial Sequence
  Description of Artificial Sequence: Synthetic oligonucleotide
  Target: ATXN2; (+) strand; PAM type: NRG; PAM sequence: CAG
actactcaactctatggcta

SEQ ID NO: 47733 - DNA, 20 bp, Artificial Sequence
  Description of Artificial Sequence: Synthetic oligonucleotide
  Target: ATXN2; (+) strand; PAM type: NRG; PAM sequence: CAG
tatggctacagccatcaaaa

SEQ ID NO: 47734 - DNA, 20 bp, Artificial Sequence
  Description of Artificial Sequence: Synthetic oligonucleotide
  Target: ATXN2; (+) strand; PAM type: NRG; PAM sequence: TAG
tacagccatcaaaacagcca

SEQ ID NO: 47735 - DNA, 20 bp, Artificial Sequence
  Description of Artificial Sequence: Synthetic oligonucleotide
  Target: ATXN2; (+) strand; PAM type: NRG; PAM sequence: TGG
atagacaatgcacaaacgca

SEQ ID NO: 47736 - DNA, 20 bp, Artificial Sequence
  Description of Artificial Sequence: Synthetic oligonucleotide
  Target: ATXN2; (+) strand; PAM type: NRG; PAM sequence: GGG
tagacaatgcacaaacgcat

SEQ ID NO: 47737 - DNA, 20 bp, Artificial Sequence
  Description of Artificial Sequence: Synthetic oligonucleotide
  Target: ATXN2; (+) strand; PAM type: NRG; PAM sequence: TAG
aatgcacaaacgcatgggca

SEQ ID NO: 47738 - DNA, 20 bp, Artificial Sequence
  Description of Artificial Sequence: Synthetic oligonucleotide
  Target: ATXN2; (+) strand; PAM type: NRG; PAM sequence: GAG
aataaaatttatttactgat

SEQ ID NO: 47739 - DNA, 20 bp, Artificial Sequence
  Description of Artificial Sequence: Synthetic oligonucleotide
  Target: ATXN2; (+) strand; PAM type: NRG; PAM sequence: CAG
aaaatttatttactgatgag

SEQ ID NO: 47740 - DNA, 20 bp, Artificial Sequence
  Description of Artificial Sequence: Synthetic oligonucleotide
  Target: ATXN2; (+) strand; PAM type: NRG; PAM sequence: TAG
atttgctgacccctatcatc

SEQ ID NO: 47741 - DNA, 20 bp, Artificial Sequence
  Description of Artificial Sequence: Synthetic oligonucleotide
  Target: ATXN2; (+) strand; PAM type: NRG; PAM sequence: AGG
tttgctgacccctatcatct

SEQ ID NO: 47742 - DNA, 20 bp, Artificial Sequence
  Description of Artificial Sequence: Synthetic oligonucleotide
  Target: ATXN2; (+) strand; PAM type: NRG; PAM sequence: GAG
tgacccctatcatctaggct

SEQ ID NO: 47743 - DNA, 20 bp, Artificial Sequence
  Description of Artificial Sequence: Synthetic oligonucleotide
  Target: ATXN2; (+) strand; PAM type: NRG; PAM sequence: AAG
tctaggctgagaatactgca

SEQ ID NO: 47744 - DNA, 20 bp, Artificial Sequence
  Description of Artificial Sequence: Synthetic oligonucleotide
  Target: ATXN2; (+) strand; PAM type: NRG; PAM sequence: AAG
agaatactgcaaagaaaatg

SEQ ID NO: 47745 - DNA, 20 bp, Artificial Sequence
  Description of Artificial Sequence: Synthetic oligonucleotide
  Target: ATXN2; (+) strand; PAM type: NRG; PAM sequence: CAG
atactgcaaagaaaatgaag

SEQ ID NO: 47746 - DNA, 20 bp, Artificial Sequence
  Description of Artificial Sequence: Synthetic oligonucleotide
  Target: ATXN2; (+) strand; PAM type: NRG; PAM sequence: TAG
ctgcaaagaaaatgaagcag

SEQ ID NO: 47747 - DNA, 20 bp, Artificial Sequence
  Description of Artificial Sequence: Synthetic oligonucleotide
  Target: ATXN2; (+) strand; PAM type: NRG; PAM sequence: AGG
tgcaaagaaaatgaagcagt

SEQ ID NO: 47748 - DNA, 20 bp, Artificial Sequence
  Description of Artificial Sequence: Synthetic oligonucleotide
  Target: ATXN2; (+) strand; PAM type: NRG; PAM sequence: AAG
gaaaatgaagcagtaggaaa

SEQ ID NO: 47749 - DNA, 20 bp, Artificial Sequence
  Description of Artificial Sequence: Synthetic oligonucleotide
  Target: ATXN2; (+) strand; PAM type: NRG; PAM sequence: GAG
gaagcagtaggaaaaagtat

SEQ ID NO: 47750 - DNA, 20 bp, Artificial Sequence
  Description of Artificial Sequence: Synthetic oligonucleotide
  Target: ATXN2; (+) strand; PAM type: NRG; PAM sequence: AGG
aagcagtaggaaaaagtatg

SEQ ID NO: 47751 - DNA, 20 bp, Artificial Sequence
  Description of Artificial Sequence: Synthetic oligonucleotide
  Target: ATXN2; (+) strand; PAM type: NRG; PAM sequence: TGG
ggaaaaagtatgaggaacaa

SEQ ID NO: 47752 - DNA, 20 bp, Artificial Sequence
  Description of Artificial Sequence: Synthetic oligonucleotide
  Target: ATXN2; (+) strand; PAM type: NRG; PAM sequence: AAG
agtatgaggaacaatggaat

SEQ ID NO: 47753 - DNA, 20 bp, Artificial Sequence
  Description of Artificial Sequence: Synthetic oligonucleotide
  Target: ATXN2; (+) strand; PAM type: NRG; PAM sequence: AGG
gtatgaggaacaatggaata

SEQ ID NO: 47754 - DNA, 20 bp, Artificial Sequence
  Description of Artificial Sequence: Synthetic oligonucleotide
  Target: ATXN2; (+) strand; PAM type: NRG; PAM sequence: CAG
ggaacaatggaataaggaaa

SEQ ID NO: 47755 - DNA, 20 bp, Artificial Sequence
  Description of Artificial Sequence: Synthetic oligonucleotide
  Target: ATXN2; (+) strand; PAM type: NRG; PAM sequence: AAG
acaatggaataaggaaacag

SEQ ID NO: 47756 - DNA, 20 bp, Artificial Sequence
  Description of Artificial Sequence: Synthetic oligonucleotide
  Target: ATXN2; (+) strand; PAM type: NRG; PAM sequence: AAG
ggaataaggaaacagaagta

SEQ ID NO: 47757 - DNA, 20 bp, Artificial Sequence
  Description of Artificial Sequence: Synthetic oligonucleotide
  Target: ATXN2; (+) strand; PAM type: NRG; PAM sequence: TAG
aggaaacagaagtaaagcca

SEQ ID NO: 47758 - DNA, 20 bp, Artificial Sequence
  Description of Artificial Sequence: Synthetic oligonucleotide
  Target: ATXN2; (+) strand; PAM type: NRG; PAM sequence: GAG
acagaagtaaagccatagtt

SEQ ID NO: 47759 - DNA, 20 bp, Artificial Sequence
  Description of Artificial Sequence: Synthetic oligonucleotide
  Target: ATXN2; (+) strand; PAM type: NRG; PAM sequence: TGG
aagtaaagccatagttgagt

SEQ ID NO: 47760 - DNA, 20 bp, Artificial Sequence
  Description of Artificial Sequence: Synthetic oligonucleotide
  Target: ATXN2; (+) strand; PAM type: NRG; PAM sequence: GAG
gtaaagccatagttgagttg

SEQ ID NO: 47761 - DNA, 20 bp, Artificial Sequence
  Description of Artificial Sequence: Synthetic oligonucleotide
  Target: ATXN2; (+) strand; PAM type: NRG; PAM sequence: AAG
gccatagttgagttggagta

SEQ ID NO: 47762 - DNA, 20 bp, Artificial Sequence
  Description of Artificial Sequence: Synthetic oligonucleotide
  Target: ATXN2; (+) strand; PAM type: NRG; PAM sequence: GAG
catagttgagttggagtaaa

SEQ ID NO: 47763 - DNA, 20 bp, Artificial Sequence
  Description of Artificial Sequence: Synthetic oligonucleotide
  Target: ATXN2; (+) strand; PAM type: NRG; PAM sequence: AGG
atagttgagttggagtaaag

SEQ ID NO: 47764 - DNA, 20 bp, Artificial Sequence
  Description of Artificial Sequence: Synthetic oligonucleotide
  Target: ATXN2; (+) strand; PAM type: NRG; PAM sequence: TGG
aaagaggaaaacatgaataa

SEQ ID NO: 47765 - DNA, 20 bp, Artificial Sequence
  Description of Artificial Sequence: Synthetic oligonucleotide
  Target: ATXN2; (+) strand; PAM type: NRG; PAM sequence: CAG
aaacatgaataatggcgcaa

SEQ ID NO: 47766 - DNA, 20 bp, Artificial Sequence
  Description of Artificial Sequence: Synthetic oligonucleotide
  Target: ATXN2; (+) strand; PAM type: NRG; PAM sequence: AGG
aacatgaataatggcgcaac

SEQ ID NO: 47767 - DNA, 20 bp, Artificial Sequence
  Description of Artificial Sequence: Synthetic oligonucleotide
  Target: ATXN2; (+) strand; PAM type: NRG; PAM sequence: AAG
atgaataatggcgcaacagg

SEQ ID NO: 47768 - DNA, 20 bp, Artificial Sequence
  Description of Artificial Sequence: Synthetic oligonucleotide
  Target: ATXN2; (+) strand; PAM type: NRG; PAM sequence: GAG
gaataatggcgcaacaggaa

SEQ ID NO: 47769 - DNA, 20 bp, Artificial Sequence
  Description of Artificial Sequence: Synthetic oligonucleotide
  Target: ATXN2; (+) strand; PAM type: NRG; PAM sequence: CAG
taatggcgcaacaggaagag

SEQ ID NO: 47770 - DNA, 20 bp, Artificial Sequence
  Description of Artificial Sequence: Synthetic oligonucleotide
  Target: ATXN2; (+) strand; PAM type: NRG; PAM sequence: AAG
ggcgcaacaggaagagcaga

SEQ ID NO: 47771 - DNA, 20 bp, Artificial Sequence
  Description of Artificial Sequence: Synthetic oligonucleotide
  Target: ATXN2; (+) strand; PAM type: NRG; PAM sequence: AAG
ggaagagcagaaagaaaatg

SEQ ID NO: 47772 - DNA, 20 bp, Artificial Sequence
  Description of Artificial Sequence: Synthetic oligonucleotide
  Target: ATXN2; (+) strand; PAM type: NRG; PAM sequence: AGG
gaagagcagaaagaaaatga

SEQ ID NO: 47773 - DNA, 20 bp, Artificial Sequence
  Description of Artificial Sequence: Synthetic oligonucleotide
  Target: ATXN2; (+) strand; PAM type: NRG; PAM sequence: TAG
aagaaaatgaaggaaaaaaa

SEQ ID NO: 47774 - DNA, 20 bp, Artificial Sequence
  Description of Artificial Sequence: Synthetic oligonucleotide
  Target: ATXN2; (+) strand; PAM type: NRG; PAM sequence: GAG
gaaaatgaaggaaaaaaata

SEQ ID NO: 47775 - DNA, 20 bp, Artificial Sequence
  Description of Artificial Sequence: Synthetic oligonucleotide
  Target: ATXN2; (+) strand; PAM type: NRG; PAM sequence: AGG
aaaatgaaggaaaaaaatag

SEQ ID NO: 47776 - DNA, 20 bp, Artificial Sequence
  Description of Artificial Sequence: Synthetic oligonucleotide
  Target: ATXN2; (+) strand; PAM type: NRG; PAM sequence: GAG
aatgaaggaaaaaaatagag

SEQ ID NO: 47777 - DNA, 20 bp, Artificial Sequence
  Description of Artificial Sequence: Synthetic oligonucleotide
  Target: ATXN2; (+) strand; PAM type: NRG; PAM sequence: AAG
aaggaaaaaaatagaggaga

SEQ ID NO: 47778 - DNA, 20 bp, Artificial Sequence
  Description of Artificial Sequence: Synthetic oligonucleotide
  Target: ATXN2; (+) strand; PAM type: NRG; PAM sequence: AGG
aggaaaaaaatagaggagaa

SEQ ID NO: 47779 - DNA, 20 bp, Artificial Sequence
  Description of Artificial Sequence: Synthetic oligonucleotide
  Target: ATXN2; (+) strand; PAM type: NRG; PAM sequence: TGG
aatagaggagaaaggaatac

SEQ ID NO: 47780 - DNA, 20 bp, Artificial Sequence
  Description of Artificial Sequence: Synthetic oligonucleotide
  Target: ATXN2; (+) strand; PAM type: NRG; PAM sequence: TGG
ggagaaaggaatactggaaa

SEQ ID NO: 47781 - DNA, 20 bp, Artificial Sequence
  Description of Artificial Sequence: Synthetic oligonucleotide
  Target: ATXN2; (+) strand; PAM type: NRG; PAM sequence: TGG
aaaggaatactggaaatgga

SEQ ID NO: 47782 - DNA, 20 bp, Artificial Sequence
  Description of Artificial Sequence: Synthetic oligonucleotide
  Target: ATXN2; (+) strand; PAM type: NRG; PAM sequence: AAG
ctggaaatggatggaaaatc

SEQ ID NO: 47783 - DNA, 20 bp, Artificial Sequence
  Description of Artificial Sequence: Synthetic oligonucleotide
  Target: ATXN2; (+) strand; PAM type: NRG; PAM sequence: AAG
tggaaaatcaagtaaaaaac

SEQ ID NO: 47784 - DNA, 20 bp, Artificial Sequence
  Description of Artificial Sequence: Synthetic oligonucleotide
  Target: ATXN2; (+) strand; PAM type: NRG; PAM sequence: CAG
aaaatcaagtaaaaaacaag

SEQ ID NO: 47785 - DNA, 20 bp, Artificial Sequence
  Description of Artificial Sequence: Synthetic oligonucleotide
  Target: ATXN2; (+) strand; PAM type: NRG; PAM sequence: GAG
aatcaagtaaaaaacaagca

SEQ ID NO: 47786 - DNA, 20 bp, Artificial Sequence
  Description of Artificial Sequence: Synthetic oligonucleotide
  Target: ATXN2; (+) strand; PAM type: NRG; PAM sequence: CAG
taaaaaacaagcagagataa

SEQ ID NO: 47787 - DNA, 20 bp, Artificial Sequence
  Description of Artificial Sequence: Synthetic oligonucleotide
  Target: ATXN2; (+) strand; PAM type: NRG; PAM sequence: AGG
aaaaaacaagcagagataac

SEQ ID NO: 47788 - DNA, 20 bp, Artificial Sequence
  Description of Artificial Sequence: Synthetic oligonucleotide
  Target: ATXN2; (+) strand; PAM type: NRG; PAM sequence: AAG
gagataacaggacaattcca

SEQ ID NO: 47789 - DNA, 20 bp, Artificial Sequence
  Description of Artificial Sequence: Synthetic oligonucleotide
  Target: ATXN2; (+) strand; PAM type: NRG; PAM sequence: CAG
attccaaagatacacgaata

SEQ ID NO: 47790 - DNA, 20 bp, Artificial Sequence
  Description of Artificial Sequence: Synthetic oligonucleotide
  Target: ATXN2; (+) strand; PAM type: NRG; PAM sequence: GAG
tccaaagatacacgaataca

SEQ ID NO: 47791 - DNA, 20 bp, Artificial Sequence
  Description of Artificial Sequence: Synthetic oligonucleotide
  Target: ATXN2; (+) strand; PAM type: NRG; PAM sequence: AAG
atacacgaatacagagccaa

SEQ ID NO: 47792 - DNA, 20 bp, Artificial Sequence
  Description of Artificial Sequence: Synthetic oligonucleotide
  Target: ATXN2; (+) strand; PAM type: NRG; PAM sequence: AAG
tacagagccaaaagcgactg

SEQ ID NO: 47793 - DNA, 20 bp, Artificial Sequence
  Description of Artificial Sequence: Synthetic oligonucleotide
  Target: ATXN2; (+) strand; PAM type: NRG; PAM sequence: AGG
acagagccaaaagcgactga

SEQ ID NO: 47794 - DNA, 20 bp, Artificial Sequence
  Description of Artificial Sequence: Synthetic oligonucleotide
  Target: ATXN2; (+) strand; PAM type: NRG; PAM sequence: AAG
caaaagcgactgaaggccct

SEQ ID NO: 47795 - DNA, 20 bp, Artificial Sequence
  Description of Artificial Sequence: Synthetic oligonucleotide
  Target: ATXN2; (+) strand; PAM type: NRG; PAM sequence: AAG
aagcgactgaaggccctaag

SEQ ID NO: 47796 - DNA, 20 bp, Artificial Sequence
  Description of Artificial Sequence: Synthetic oligonucleotide
  Target: ATXN2; (+) strand; PAM type: NRG; PAM sequence: TAG
ctgaaggccctaagaagttt

SEQ ID NO: 47797 - DNA, 20 bp, Artificial Sequence
  Description of Artificial Sequence: Synthetic oligonucleotide
  Target: ATXN2; (+) strand; PAM type: NRG; PAM sequence: AAG
taagaagttttagcaaaatg

SEQ ID NO: 47798 - DNA, 20 bp, Artificial Sequence
  Description of Artificial Sequence: Synthetic oligonucleotide
  Target: ATXN2; (+) strand; PAM type: NRG; PAM sequence: GAG
agaagttttagcaaaatgaa

SEQ ID NO: 47799 - DNA, 20 bp, Artificial Sequence
  Description of Artificial Sequence: Synthetic oligonucleotide
  Target: ATXN2; (+) strand; PAM type: NRG; PAM sequence: CAG
tagcaaaatgaagagaacct

SEQ ID NO: 47800 - DNA, 20 bp, Artificial Sequence
  Description of Artificial Sequence: Synthetic oligonucleotide
  Target: ATXN2; (+) strand; PAM type: NRG; PAM sequence: TGG
aacctcagatctgtctgcac

SEQ ID NO: 47801 - DNA, 20 bp, Artificial Sequence
  Description of Artificial Sequence: Synthetic oligonucleotide
  Target: ATXN2; (+) strand; PAM type: NRG; PAM sequence: AAG
tctgcactggaattcaaata

SEQ ID NO: 47802 - DNA, 20 bp, Artificial Sequence
  Description of Artificial Sequence: Synthetic oligonucleotide
  Target: ATXN2; (+) strand; PAM type: NRG; PAM sequence: AGG
ctgcactggaattcaaataa

SEQ ID NO: 47803 - DNA, 20 bp, Artificial Sequence
  Description of Artificial Sequence: Synthetic oligonucleotide
  Target: ATXN2; (+) strand; PAM type: NRG; PAM sequence: TGG
attttccaatgataatctga

SEQ ID NO: 47804 - DNA, 20 bp, Artificial Sequence
  Description of Artificial Sequence: Synthetic oligonucleotide
  Target: ATXN2; (+) strand; PAM type: NRG; PAM sequence: AAG
cttctaattatgaatgtgcc

SEQ ID NO: 47805 - DNA, 20 bp, Artificial Sequence
  Description of Artificial Sequence: Synthetic oligonucleotide
  Target: ATXN2; (+) strand; PAM type: NRG; PAM sequence: AGG
ttctaattatgaatgtgcca

SEQ ID NO: 47806 - DNA, 20 bp, Artificial Sequence
  Description of Artificial Sequence: Synthetic oligonucleotide
  Target: ATXN2; (+) strand; PAM type: NRG; PAM sequence: CAG
gaatgtgccaaggtgactca

SEQ ID NO: 47807 - DNA, 20 bp, Artificial Sequence
  Description of Artificial Sequence: Synthetic oligonucleotide
  Target: ATXN2; (+) strand; PAM type: NRG; PAM sequence: AAG
ctcacagctcatatgacgta

SEQ ID NO: 47808 - DNA, 20 bp, Artificial Sequence
  Description of Artificial Sequence: Synthetic oligonucleotide
  Target: ATXN2; (+) strand; PAM type: NRG; PAM sequence: AGG
tcacagctcatatgacgtaa

SEQ ID NO: 47809 - DNA, 20 bp, Artificial Sequence
  Description of Artificial Sequence: Synthetic oligonucleotide
  Target: ATXN2; (+) strand; PAM type: NRG; PAM sequence: CAG
atatgacgtaaaggtacttt

SEQ ID NO: 47810 - DNA, 20 bp, Artificial Sequence
  Description of Artificial Sequence: Synthetic oligonucleotide
  Target: ATXN2; (+) strand; PAM type: NRG; PAM sequence: CAG
taaaggtactttcagtttct

SEQ ID NO: 47811 - DNA, 20 bp, Artificial Sequence
  Description of Artificial Sequence: Synthetic oligonucleotide
  Target: ATXN2; (+) strand; PAM type: NRG; PAM sequence: TGG
agtttctcagtaaatcaaac

SEQ ID NO: 47812 - DNA, 20 bp, Artificial Sequence
  Description of Artificial Sequence: Synthetic oligonucleotide
  Target: ATXN2; (+) strand; PAM type: NRG; PAM sequence: AAG
ctggaacatgtataacattc

SEQ ID NO: 47813 - DNA, 20 bp, Artificial Sequence
  Description of Artificial Sequence: Synthetic oligonucleotide
  Target: ATXN2; (+) strand; PAM type: NRG; PAM sequence: GAG
ggaacatgtataacattcaa

SEQ ID NO: 47814 - DNA, 20 bp, Artificial Sequence
  Description of Artificial Sequence: Synthetic oligonucleotide
  Target: ATXN2; (+) strand; PAM type: NRG; PAM sequence: AAG
gtataacattcaagagacca

SEQ ID NO: 47815 - DNA, 20 bp, Artificial Sequence
  Description of Artificial Sequence: Synthetic oligonucleotide
  Target: ATXN2; (+) strand; PAM type: NRG; PAM sequence: AGG
tataacattcaagagaccaa

SEQ ID NO: 47816 - DNA, 20 bp, Artificial Sequence
  Description of Artificial Sequence: Synthetic oligonucleotide
  Target: ATXN2; (+) strand; PAM type: NRG; PAM sequence: AAG
aaacttattcactgtaccgt

SEQ ID NO: 47817 - DNA, 20 bp, Artificial Sequence
  Description of Artificial Sequence: Synthetic oligonucleotide
  Target: ATXN2; (+) strand; PAM type: NRG; PAM sequence: AAG
cttattcactgtaccgtaag

SEQ ID NO: 47818 - DNA, 20 bp, Artificial Sequence
  Description of Artificial Sequence: Synthetic oligonucleotide
  Target: ATXN2; (+) strand; PAM type: NRG; PAM sequence: AAG
cgtaagaagtcactatttca

SEQ ID NO: 47819 - DNA, 20 bp, Artificial Sequence
  Description of Artificial Sequence: Synthetic oligonucleotide
  Target: ATXN2; (+) strand; PAM type: NRG; PAM sequence: TAG
tttattgaaatcaatgatgt

SEQ ID NO: 47820 - DNA, 20 bp, Artificial Sequence
  Description of Artificial Sequence: Synthetic oligonucleotide
  Target: ATXN2; (+) strand; PAM type: NRG; PAM sequence: AAG
aaatcaatgatgttagcatc

SEQ ID NO: 47821 - DNA, 20 bp, Artificial Sequence
  Description of Artificial Sequence: Synthetic oligonucleotide
  Target: ATXN2; (+) strand; PAM type: NRG; PAM sequence: AAG
tgttagcatcaagaacttaa

SEQ ID NO: 47822 - DNA, 20 bp, Artificial Sequence
  Description of Artificial Sequence: Synthetic oligonucleotide
  Target: ATXN2; (+) strand; PAM type: NRG; PAM sequence: AAG
actgaccttactcatgttaa

SEQ ID NO: 47823 - DNA, 20 bp, Artificial Sequence
  Description of Artificial Sequence: Synthetic oligonucleotide
  Target: ATXN2; (+) strand; PAM type: NRG; PAM sequence: AGG
ctgaccttactcatgttaaa

SEQ ID NO: 47824 - DNA, 20 bp, Artificial Sequence
  Description of Artificial Sequence: Synthetic oligonucleotide
  Target: ATXN2; (+) strand; PAM type: NRG; PAM sequence: CAG
ctcatgttaaaaggtttccc

SEQ ID NO: 47825 - DNA, 20 bp, Artificial Sequence
  Description of Artificial Sequence: Synthetic oligonucleotide
  Target: ATXN2; (+) strand; PAM type: NRG; PAM sequence: CAG
atgttaaaaggtttccccag

SEQ ID NO: 47826 - DNA, 20 bp, Artificial Sequence
  Description of Artificial Sequence: Synthetic oligonucleotide
  Target: ATXN2; (+) strand; PAM type: NRG; PAM sequence: GAG
aaaaggtttccccagcagcc

SEQ ID NO: 47827 - DNA, 20 bp, Artificial Sequence
  Description of Artificial Sequence: Synthetic oligonucleotide
  Target: ATXN2; (+) strand; PAM type: NRG; PAM sequence: TGG
gtttccccagcagccgagtg

SEQ ID NO: 47828 - DNA, 20 bp, Artificial Sequence
  Description of Artificial Sequence: Synthetic oligonucleotide
  Target: ATXN2; (+) strand; PAM type: NRG; PAM sequence: TGG
tccccagcagccgagtgtgg

SEQ ID NO: 47829 - DNA, 20 bp, Artificial Sequence
  Description of Artificial Sequence: Synthetic oligonucleotide
  Target: ATXN2; (+) strand; PAM type: NRG; PAM sequence: TAG
gtggctcacgcctgtaatcc

SEQ ID NO: 47830 - DNA, 20 bp, Artificial Sequence
  Description of Artificial Sequence: Synthetic oligonucleotide
  Target: ATXN2; (+) strand; PAM type: NRG; PAM sequence: TGG
cgcctgtaatcctagcactt

SEQ ID NO: 47831 - DNA, 20 bp, Artificial Sequence
  Description of Artificial Sequence: Synthetic oligonucleotide
  Target: ATXN2; (+) strand; PAM type: NRG; PAM sequence: GGG
gcctgtaatcctagcacttt

SEQ ID NO: 47832 - DNA, 20 bp, Artificial Sequence
  Description of Artificial Sequence: Synthetic oligonucleotide
  Target: ATXN2; (+) strand; PAM type: NRG; PAM sequence: GAG
ctgtaatcctagcactttgg

SEQ ID NO: 47833 - DNA, 20 bp, Artificial Sequence
  Description of Artificial Sequence: Synthetic oligonucleotide
  Target: ATXN2; (+) strand; PAM type: NRG; PAM sequence: AGG
tgtaatcctagcactttggg

SEQ ID NO: 47834 - DNA, 20 bp, Artificial Sequence
  Description of Artificial Sequence: Synthetic oligonucleotide
  Target: ATXN2; (+) strand; PAM type: NRG; PAM sequence: AAG
tcctagcactttgggaggcc

SEQ ID NO: 47835 - DNA, 20 bp, Artificial Sequence
  Description of Artificial Sequence: Synthetic oligonucleotide
  Target: ATXN2; (+) strand; PAM type: NRG; PAM sequence: AGG
cctagcactttgggaggcca

SEQ ID NO: 47836 - DNA, 20 bp, Artificial Sequence
  Description of Artificial Sequence: Synthetic oligonucleotide
  Target: ATXN2; (+) strand; PAM type: NRG; PAM sequence: TGG
agcactttgggaggccaagg

SEQ ID NO: 47837 - DNA, 20 bp, Artificial Sequence
  Description of Artificial Sequence: Synthetic oligonucleotide
  Target: ATXN2; (+) strand; PAM type: NRG; PAM sequence: GGG
gcactttgggaggccaaggt

SEQ ID NO: 47838 - DNA, 20 bp, Artificial Sequence
  Description of Artificial Sequence: Synthetic oligonucleotide
  Target: ATXN2; (+) strand; PAM type: NRG; PAM sequence: TGG
ctttgggaggccaaggtggg

SEQ ID NO: 47839 - DNA, 20 bp, Artificial Sequence
  Description of Artificial Sequence: Synthetic oligonucleotide
  Target: ATXN2; (+) strand; PAM type: NRG; PAM sequence: GAG
ggccaaggtgggtggatcat

SEQ ID NO: 47840 - DNA, 20 bp, Artificial Sequence
  Description of Artificial Sequence: Synthetic oligonucleotide
  Target: ATXN2; (+) strand; PAM type: NRG; PAM sequence: AGG
gccaaggtgggtggatcatg

SEQ ID NO: 47841 - DNA, 20 bp, Artificial Sequence
  Description of Artificial Sequence: Synthetic oligonucleotide
  Target: ATXN2; (+) strand; PAM type: NRG; PAM sequence: CAG
aggtgggtggatcatgaggt

SEQ ID NO: 47842 - DNA, 20 bp, Artificial Sequence
  Description of Artificial Sequence: Synthetic oligonucleotide
  Target: ATXN2; (+) strand; PAM type: NRG; PAM sequence: AGG
ggtgggtggatcatgaggtc

SEQ ID NO: 47843 - DNA, 20 bp, Artificial Sequence
  Description of Artificial Sequence: Synthetic oligonucleotide
  Target: ATXN2; (+) strand; PAM type: NRG; PAM sequence: GAG
gatcatgaggtcaggaattt

SEQ ID NO: 47844 - DNA, 20 bp, Artificial Sequence
  Description of Artificial Sequence: Synthetic oligonucleotide
  Target: ATXN2; (+) strand; PAM type: NRG; PAM sequence: AAG
catgaggtcaggaatttgag

SEQ ID NO: 47845 - DNA, 20 bp, Artificial Sequence
  Description of Artificial Sequence: Synthetic oligonucleotide
  Target: ATXN2; (+) strand; PAM type: NRG; PAM sequence: GAG
tgaggtcaggaatttgagaa

SEQ ID NO: 47846 - DNA, 20 bp, Artificial Sequence
  Description of Artificial Sequence: Synthetic oligonucleotide
  Target: ATXN2; (+) strand; PAM type: NRG; PAM sequence: TGG
tcaggaatttgagaagagcc

SEQ ID NO: 47847 - DNA, 20 bp, Artificial Sequence
  Description of Artificial Sequence: Synthetic oligonucleotide
  Target: ATXN2; (+) strand; PAM type: NRG; PAM sequence: TGG
tgagaagagcctggccaata

SEQ ID NO: 47848 - DNA, 20 bp, Artificial Sequence
  Description of Artificial Sequence: Synthetic oligonucleotide
  Target: ATXN2; (+) strand; PAM type: NRG; PAM sequence: TAG
tctactaaaaatataaaaat

SEQ ID NO: 47849 - DNA, 20 bp, Artificial Sequence
  Description of Artificial Sequence: Synthetic oligonucleotide
  Target: ATXN2; (+) strand; PAM type: NRG; PAM sequence: TGG
ctaaaaatataaaaattagc

SEQ ID NO: 47850 - DNA, 20 bp, Artificial Sequence
  Description of Artificial Sequence: Synthetic oligonucleotide
  Target: ATXN2; (+) strand; PAM type: NRG; PAM sequence: GGG
taaaaatataaaaattagct

SEQ ID NO: 47851 - DNA, 20 bp, Artificial Sequence
  Description of Artificial Sequence: Synthetic oligonucleotide
  Target: ATXN2; (+) strand; PAM type: NRG; PAM sequence: TGG
atataaaaattagctgggca

SEQ ID NO: 47852 - DNA, 20 bp, Artificial Sequence
  Description of Artificial Sequence: Synthetic oligonucleotide
  Target: ATXN2; (+) strand; PAM type: NRG; PAM sequence: TGG
taaaaattagctgggcatgg

SEQ ID NO: 47853 - DNA, 20 bp, Artificial Sequence
  Description of Artificial Sequence: Synthetic oligonucleotide
  Target: ATXN2; (+) strand; PAM type: NRG; PAM sequence: CAG
aaattagctgggcatggtgg

SEQ ID NO: 47854 - DNA, 20 bp, Artificial Sequence
  Description of Artificial Sequence: Synthetic oligonucleotide
  Target: ATXN2; (+) strand; PAM type: NRG; PAM sequence: CAG
gtggcagacgcctataatcc

SEQ ID NO: 47855 - DNA, 20 bp, Artificial Sequence
  Description of Artificial Sequence: Synthetic oligonucleotide
  Target: ATXN2; (+) strand; PAM type: NRG; PAM sequence: CGG
cgcctataatcccagctcct

SEQ ID NO: 47856 - DNA, 20 bp, Artificial Sequence
  Description of Artificial Sequence: Synthetic oligonucleotide
  Target: ATXN2; (+) strand; PAM type: NRG; PAM sequence: GGG
gcctataatcccagctcctc

SEQ ID NO: 47857 - DNA, 20 bp, Artificial Sequence
  Description of Artificial Sequence: Synthetic oligonucleotide
  Target: ATXN2; (+) strand; PAM type: NRG; PAM sequence: GAG
ctataatcccagctcctcgg

SEQ ID NO: 47858 - DNA, 20 bp, Artificial Sequence
  Description of Artificial Sequence: Synthetic oligonucleotide
  Target: ATXN2; (+) strand; PAM type: NRG; PAM sequence: AGG
tataatcccagctcctcggg

SEQ ID NO: 47859 - DNA, 20 bp, Artificial Sequence
  Description of Artificial Sequence: Synthetic oligonucleotide
  Target: ATXN2; (+) strand; PAM type: NRG; PAM sequence: TAG
tcccagctcctcgggaggct

SEQ ID NO: 47860 - DNA, 20 bp, Artificial Sequence
  Description of Artificial Sequence: Synthetic oligonucleotide
  Target: ATXN2; (+) strand; PAM type: NRG; PAM sequence: AGG
cccagctcctcgggaggctt

SEQ ID NO: 47861 - DNA, 20 bp, Artificial Sequence
  Description of Artificial Sequence: Synthetic oligonucleotide
  Target: ATXN2; (+) strand; PAM type: NRG; PAM sequence: CAG
agctcctcgggaggcttagg

SEQ ID NO: 47862 - DNA, 20 bp, Artificial Sequence
  Description of Artificial Sequence: Synthetic oligonucleotide
  Target: ATXN2; (+) strand; PAM type: NRG; PAM sequence: AAG
tcctcgggaggcttaggcag

SEQ ID NO: 47863 - DNA, 20 bp, Artificial Sequence
  Description of Artificial Sequence: Synthetic oligonucleotide
  Target: ATXN2; (+) strand; PAM type: NRG; PAM sequence: TAG
gcagaagaattgcttgaacc

SEQ ID NO: 47864 - DNA, 20 bp, Artificial Sequence
  Description of Artificial Sequence: Synthetic oligonucleotide
  Target: ATXN2; (+) strand; PAM type: NRG; PAM sequence: AGG
cagaagaattgcttgaacct

SEQ ID NO: 47865 - DNA, 20 bp, Artificial Sequence
  Description of Artificial Sequence: Synthetic oligonucleotide
  Target: ATXN2; (+) strand; PAM type: NRG; PAM sequence: AAG
aagaattgcttgaacctagg

SEQ ID NO: 47866 - DNA, 20 bp, Artificial Sequence
  Description of Artificial Sequence: Synthetic oligonucleotide
  Target: ATXN2; (+) strand; PAM type: NRG; PAM sequence: CAG
aattgcttgaacctaggaag

SEQ ID NO: 47867 - DNA, 20 bp, Artificial Sequence
  Description of Artificial Sequence: Synthetic oligonucleotide
  Target: ATXN2; (+) strand; PAM type: NRG; PAM sequence: GAG
ttgcttgaacctaggaagca

SEQ ID NO: 47868 - DNA, 20 bp, Artificial Sequence
  Description of Artificial Sequence: Synthetic oligonucleotide
  Target: ATXN2; (+) strand; PAM type: NRG; PAM sequence: AGG
tgcttgaacctaggaagcag

SEQ ID NO: 47869 - DNA, 20 bp, Artificial Sequence
  Description of Artificial Sequence: Synthetic oligonucleotide
  Target: ATXN2; (+) strand; PAM type: NRG; PAM sequence: CAG
aacctaggaagcagaggttg

SEQ ID NO: 47870 - DNA, 20 bp, Artificial Sequence
  Description of Artificial Sequence: Synthetic oligonucleotide
  Target: ATXN2; (+) strand; PAM type: NRG; PAM sequence: GAG
taggaagcagaggttgcagt

SEQ ID NO: 47871 - DNA, 20 bp, Artificial Sequence
  Description of Artificial Sequence: Synthetic oligonucleotide
  Target: ATXN2; (+) strand; PAM type: NRG; PAM sequence: GAG
agcagaggttgcagtgagct

SEQ ID NO: 47872 - DNA, 20 bp, Artificial Sequence
  Description of Artificial Sequence: Synthetic oligonucleotide
  Target: ATXN2; (+) strand; PAM type: NRG; PAM sequence: CAG
gagatcacgccactgcactc

SEQ ID NO: 47873 - DNA, 20 bp, Artificial Sequence
  Description of Artificial Sequence: Synthetic oligonucleotide
  Target: ATXN2; (+) strand; PAM type: NRG; PAM sequence: TGG
cacgccactgcactccagcc

SEQ ID NO: 47874 - DNA, 20 bp, Artificial Sequence
  Description of Artificial Sequence: Synthetic oligonucleotide
  Target: ATXN2; (+) strand; PAM type: NRG; PAM sequence: GGG
acgccactgcactccagcct

SEQ ID NO: 47875 - DNA, 20 bp, Artificial Sequence
  Description of Artificial Sequence: Synthetic oligonucleotide
  Target: ATXN2; (+) strand; PAM type: NRG; PAM sequence: CAG
ctgcactccagcctgggtga

SEQ ID NO: 47876 - DNA, 20 bp, Artificial Sequence
  Description of Artificial Sequence: Synthetic oligonucleotide
  Target: ATXN2; (+) strand; PAM type: NRG; PAM sequence: GAG
gcactccagcctgggtgaca

SEQ ID NO: 47877 - DNA, 20 bp, Artificial Sequence
  Description of Artificial Sequence: Synthetic oligonucleotide
  Target: ATXN2; (+) strand; PAM type: NRG; PAM sequence: GAG
tccagcctgggtgacagagc

SEQ ID NO: 47878 - DNA, 20 bp, Artificial Sequence
  Description of Artificial Sequence: Synthetic oligonucleotide
  Target: ATXN2; (+) strand; PAM type: NRG; PAM sequence: AAG
cgagactccgcctcaaaata

SEQ ID NO: 47879 - DNA, 20 bp, Artificial Sequence
  Description of Artificial Sequence: Synthetic oligonucleotide
  Target: ATXN2; (+) strand; PAM type: NRG; PAM sequence: AGG
gagactccgcctcaaaataa

SEQ ID NO: 47880 - DNA, 20 bp, Artificial Sequence
  Description of Artificial Sequence: Synthetic oligonucleotide
  Target: ATXN2; (+) strand; PAM type: NRG; PAM sequence: TGG
cctcaaaataaaggtttccc

SEQ ID NO: 47881 - DNA, 20 bp, Artificial Sequence
  Description of Artificial Sequence: Synthetic oligonucleotide
  Target: ATXN2; (+) strand; PAM type: NRG; PAM sequence: TGG
aaaataaaggtttccctggc

SEQ ID NO: 47882 - DNA, 20 bp, Artificial Sequence
  Description of Artificial Sequence: Synthetic oligonucleotide
  Target: ATXN2; (+) strand; PAM type: NRG; PAM sequence: GGG
aaataaaggtttccctggct

SEQ ID NO: 47883 - DNA, 20 bp, Artificial Sequence
  Description of Artificial Sequence: Synthetic oligonucleotide
  Target: ATXN2; (+) strand; PAM type: NRG; PAM sequence: CGG
aaggtttccctggctgggcg

SEQ ID NO: 47884 - DNA, 20 bp, Artificial Sequence
  Description of Artificial Sequence: Synthetic oligonucleotide
  Target: ATXN2; (+) strand; PAM type: NRG; PAM sequence: TGG
gtttccctggctgggcgcgg

SEQ ID NO: 47885 - DNA, 20 bp, Artificial Sequence
  Description of Artificial Sequence: Synthetic oligonucleotide
  Target: ATXN2; (+) strand; PAM type: NRG; PAM sequence: CAG
gtggctcacgcttgtgatcc

SEQ ID NO: 47886 - DNA, 20 bp, Artificial Sequence
  Description of Artificial Sequence: Synthetic oligonucleotide
  Target: ATXN2; (+) strand; PAM type: NRG; PAM sequence: TGG
cgcttgtgatcccagcactt

SEQ ID NO: 47887 - DNA, 20 bp, Artificial Sequence
  Description of Artificial Sequence: Synthetic oligonucleotide
  Target: ATXN2; (+) strand; PAM type: NRG; PAM sequence: GGG
gcttgtgatcccagcacttt

SEQ ID NO: 47888 - DNA, 20 bp, Artificial Sequence
  Description of Artificial Sequence: Synthetic oligonucleotide
  Target: ATXN2; (+) strand; PAM type: NRG; PAM sequence: GAG
ttgtgatcccagcactttgg

SEQ ID NO: 47889 - DNA, 20 bp, Artificial Sequence
  Description of Artificial Sequence: Synthetic oligonucleotide
  Target: ATXN2; (+) strand; PAM type: NRG; PAM sequence: AGG
tgtgatcccagcactttggg

SEQ ID NO: 47890 - DNA, 20 bp, Artificial Sequence
  Description of Artificial Sequence: Synthetic oligonucleotide
  Target: ATXN2; (+) strand; PAM type: NRG; PAM sequence: TAG
tcccagcactttgggaggcc

SEQ ID NO: 47891 - DNA, 20 bp, Artificial Sequence
  Description of Artificial Sequence: Synthetic oligonucleotide
  Target: ATXN2; (+) strand; PAM type: NRG; PAM sequence: AGG
cccagcactttgggaggcct

SEQ ID NO: 47892 - DNA, 20 bp, Artificial Sequence
  Description of Artificial Sequence: Synthetic oligonucleotide
  Target: ATXN2; (+) strand; PAM type: NRG; PAM sequence: CAG
agcactttgggaggcctagg

SEQ ID NO: 47893 - DNA, 20 bp, Artificial Sequence
  Description of Artificial Sequence: Synthetic oligonucleotide
  Target: ATXN2; (+) strand; PAM type: NRG; PAM sequence: AGG
gcactttgggaggcctaggc

SEQ ID NO: 47894 - DNA, 20 bp, Artificial Sequence
  Description of Artificial Sequence: Synthetic oligonucleotide
  Target: ATXN2; (+) strand; PAM type: NRG; PAM sequence: TGG
ctttgggaggcctaggcagg

SEQ ID NO: 47895 - DNA, 20 bp, Artificial Sequence
  Description of Artificial Sequence: Synthetic oligonucleotide
  Target: ATXN2; (+) strand; PAM type: NRG; PAM sequence: GAG
cctaggcaggtggatcacct

SEQ ID NO: 47896 - DNA, 20 bp, Artificial Sequence
  Description of Artificial Sequence: Synthetic oligonucleotide
  Target: ATXN2; (+) strand; PAM type: NRG; PAM sequence: AGG
ctaggcaggtggatcacctg

SEQ ID NO: 47897 - DNA, 20 bp, Artificial Sequence
  Description of Artificial Sequence: Synthetic oligonucleotide
  Target: ATXN2; (+) strand; PAM type: NRG; PAM sequence: CAG
gcaggtggatcacctgaggt

SEQ ID NO: 47898 - DNA, 20 bp, Artificial Sequence
  Description of Artificial Sequence: Synthetic oligonucleotide
  Target: ATXN2; (+) strand; PAM type: NRG; PAM sequence: AGG
caggtggatcacctgaggtc

SEQ ID NO: 47899 - DNA, 20 bp, Artificial Sequence
  Description of Artificial Sequence: Synthetic oligonucleotide
  Target: ATXN2; (+) strand; PAM type: NRG; PAM sequence: GAG
ggtggatcacctgaggtcag

SEQ ID NO: 47900 - DNA, 20 bp, Artificial Sequence
  Description of Artificial Sequence: Synthetic oligonucleotide
  Target: ATXN2; (+) strand; PAM type: NRG; PAM sequence: AAG
tcacctgaggtcaggagttc

SEQ ID NO: 47901 - DNA, 20 bp, Artificial Sequence
  Description of Artificial Sequence: Synthetic oligonucleotide
  Target: ATXN2; (+) strand; PAM type: NRG; PAM sequence: CAG
tgaggtcaggagttcaagac

SEQ ID NO: 47902 - DNA, 20 bp, Artificial Sequence
  Description of Artificial Sequence: Synthetic oligonucleotide
  Target: ATXN2; (+) strand; PAM type: NRG; PAM sequence: TGG
caagaccagcctgaccaacg

SEQ ID NO: 47903 - DNA, 20 bp, Artificial Sequence
  Description of Artificial Sequence: Synthetic oligonucleotide
  Target: ATXN2; (+) strand; PAM type: NRG; PAM sequence: GAG
agaccagcctgaccaacgtg

SEQ ID NO: 47904 - DNA, 20 bp, Artificial Sequence
  Description of Artificial Sequence: Synthetic oligonucleotide
  Target: ATXN2; (+) strand; PAM type: NRG; PAM sequence: CAG
ctgaccaacgtggagaaacc

SEQ ID NO: 47905 - DNA, 20 bp, Artificial Sequence
  Description of Artificial Sequence: Synthetic oligonucleotide
  Target: ATXN2; (+) strand; PAM type: NRG; PAM sequence: AAG
cagtctctactaaaaataca

SEQ ID NO: 47906 - DNA, 20 bp, Artificial Sequence
  Description of Artificial Sequence: Synthetic oligonucleotide
  Target: ATXN2; (+) strand; PAM type: NRG; PAM sequence: TAG
ctctactaaaaatacaaagt

SEQ ID NO: 47907 - DNA, 20 bp, Artificial Sequence
  Description of Artificial Sequence: Synthetic oligonucleotide
  Target: ATXN2; (+) strand; PAM type: NRG; PAM sequence: CGG
actaaaaatacaaagttagc

SEQ ID NO: 47908 - DNA, 20 bp, Artificial Sequence
  Description of Artificial Sequence: Synthetic oligonucleotide
  Target: ATXN2; (+) strand; PAM type: NRG; PAM sequence: GGG
ctaaaaatacaaagttagcc

SEQ ID NO: 47909 - DNA, 20 bp, Artificial Sequence
  Description of Artificial Sequence: Synthetic oligonucleotide
  Target: ATXN2; (+) strand; PAM type: NRG; PAM sequence: TGG
aatacaaagttagccgggca

SEQ ID NO: 47910 - DNA, 20 bp, Artificial Sequence
  Description of Artificial Sequence: Synthetic oligonucleotide
  Target: ATXN2; (+) strand; PAM type: NRG; PAM sequence: TGG
acaaagttagccgggcatgg

SEQ ID NO: 47911 - DNA, 20 bp, Artificial Sequence
  Description of Artificial Sequence: Synthetic oligonucleotide
  Target: ATXN2; (+) strand; PAM type: NRG; PAM sequence: CAG
gtggcacatgcctgtaatcc

SEQ ID NO: 47912 - DNA, 20 bp, Artificial Sequence
  Description of Artificial Sequence: Synthetic oligonucleotide
  Target: ATXN2; (+) strand; PAM type: NRG; PAM sequence: CGG
tgcctgtaatcccagctact

SEQ ID NO: 47913 - DNA, 20 bp, Artificial Sequence
  Description of Artificial Sequence: Synthetic oligonucleotide
  Target: ATXN2; (+) strand; PAM type: NRG; PAM sequence: GGG
gcctgtaatcccagctactc

SEQ ID NO: 47914 - DNA, 20 bp, Artificial Sequence
  Description of Artificial Sequence: Synthetic oligonucleotide
  Target: ATXN2; (+) strand; PAM type: NRG; PAM sequence: GAG
ctgtaatcccagctactcgg

SEQ ID NO: 47915 - DNA, 20 bp, Artificial Sequence
  Description of Artificial Sequence: Synthetic oligonucleotide
  Target: ATXN2; (+) strand; PAM type: NRG; PAM sequence: AGG
tgtaatcccagctactcggg

SEQ ID NO: 47916 - DNA, 20 bp, Artificial Sequence
  Description of Artificial Sequence: Synthetic oligonucleotide
  Target: ATXN2; (+) strand; PAM type: NRG; PAM sequence: GAG
tcccagctactcgggaggct

SEQ ID NO: 47917 - DNA, 20 bp, Artificial Sequence
  Description of Artificial Sequence: Synthetic oligonucleotide
  Target: ATXN2; (+) strand; PAM type: NRG; PAM sequence: TAG
agctactcgggaggctgaga

SEQ ID NO: 47918 - DNA, 20 bp, Artificial Sequence
  Description of Artificial Sequence: Synthetic oligonucleotide
  Target: ATXN2; (+) strand; PAM type: NRG; PAM sequence: AGG
gctactcgggaggctgagat

SEQ ID NO: 47919 - DNA, 20 bp, Artificial Sequence
  Description of Artificial Sequence: Synthetic oligonucleotide
  Target: ATXN2; (+) strand; PAM type: NRG; PAM sequence: GAG
tactcgggaggctgagatag

SEQ ID NO: 47920 - DNA, 20 bp, Artificial Sequence
  Description of Artificial Sequence: Synthetic oligonucleotide
  Target: ATXN2; (+) strand; PAM type: NRG; PAM sequence: CAG
ataggagaatcgcttgaacc

SEQ ID NO: 47921 - DNA, 20 bp, Artificial Sequence
  Description of Artificial Sequence: Synthetic oligonucleotide
  Target: ATXN2; (+) strand; PAM type: NRG; PAM sequence: AAG
ggagaatcgcttgaacccag

SEQ ID NO: 47922 - DNA, 20 bp, Artificial Sequence
  Description of Artificial Sequence: Synthetic oligonucleotide
  Target: ATXN2; (+) strand; PAM type: NRG; PAM sequence: AGG
gagaatcgcttgaacccaga

SEQ ID NO: 47923 - DNA, 20 bp, Artificial Sequence
  Description of Artificial Sequence: Synthetic oligonucleotide
  Target: ATXN2; (+) strand; PAM type: NRG; PAM sequence: CGG
aatcgcttgaacccagaagg

SEQ ID NO: 47924 - DNA, 20 bp, Artificial Sequence
  Description of Artificial Sequence: Synthetic oligonucleotide
  Target: ATXN2; (+) strand; PAM type: NRG; PAM sequence: GAG
tcgcttgaacccagaaggcg

SEQ ID NO: 47925 - DNA, 20 bp, Artificial Sequence
  Description of Artificial Sequence: Synthetic oligonucleotide
  Target: ATXN2; (+) strand; PAM type: NRG; PAM sequence: AGG
cgcttgaacccagaaggcgg

SEQ ID NO: 47926 - DNA, 20 bp, Artificial Sequence
  Description of Artificial Sequence: Synthetic oligonucleotide
  Target: ATXN2; (+) strand; PAM type: NRG; PAM sequence: CAG
aacccagaaggcggaggttg

SEQ ID NO: 47927 - DNA, 20 bp, Artificial Sequence
  Description of Artificial Sequence: Synthetic oligonucleotide
  Target: ATXN2; (+) strand; PAM type: NRG; PAM sequence: GAG
cagaaggcggaggttgcagt

SEQ ID NO: 47928 - DNA, 20 bp, Artificial Sequence
  Description of Artificial Sequence: Synthetic oligonucleotide
  Target: ATXN2; (+) strand; PAM type: NRG; PAM sequence: AAG
ggcggaggttgcagtgagcg

SEQ ID NO: 47929 - DNA, 20 bp, Artificial Sequence
  Description of Artificial Sequence: Synthetic oligonucleotide
  Target: ATXN2; (+) strand; PAM type: NRG; PAM sequence: CAG
aagattgcaccattgcactc

SEQ ID NO: 47930 - DNA, 20 bp, Artificial Sequence
  Description of Artificial Sequence: Synthetic oligonucleotide
  Target: ATXN2; (+) strand; PAM type: NRG; PAM sequence: TGG
tgcaccattgcactccagcc

SEQ ID NO: 47931 - DNA, 20 bp, Artificial Sequence
  Description of Artificial Sequence: Synthetic oligonucleotide
  Target: ATXN2; (+) strand; PAM type: NRG; PAM sequence: GGG
gcaccattgcactccagcct

SEQ ID NO: 47932 - DNA, 20 bp, Artificial Sequence
  Description of Artificial Sequence: Synthetic oligonucleotide
  Target: ATXN2; (+) strand; PAM type: NRG; PAM sequence: AAG
tgcactccagcctgggcgac

SEQ ID NO: 47933 - DNA, 20 bp, Artificial Sequence
  Description of Artificial Sequence: Synthetic oligonucleotide
  Target: ATXN2; (+) strand; PAM type: NRG; PAM sequence: GAG
cactccagcctgggcgacaa

SEQ ID NO: 47934 - DNA, 20 bp, Artificial Sequence
  Description of Artificial Sequence: Synthetic oligonucleotide
  Target: ATXN2; (+) strand; PAM type: NRG; PAM sequence: AAG
caagagcaaaactccgtccc

SEQ ID NO: 47935 - DNA, 20 bp, Artificial Sequence
  Description of Artificial Sequence: Synthetic oligonucleotide
  Target: ATXN2; (+) strand; PAM type: NRG; PAM sequence: AGG
aagagcaaaactccgtccca

SEQ ID NO: 47936 - DNA, 20 bp, Artificial Sequence
  Description of Artificial Sequence: Synthetic oligonucleotide
  Target: ATXN2; (+) strand; PAM type: NRG; PAM sequence: AAG
ccgtcccaaggaaaacaaaa

SEQ ID NO: 47937 - DNA, 20 bp, Artificial Sequence
  Description of Artificial Sequence: Synthetic oligonucleotide
  Target: ATXN2; (+) strand; PAM type: NRG; PAM sequence: AAG
ggaaaacaaaaaagaaaaaa

SEQ ID NO: 47938 - DNA, 20 bp, Artificial Sequence
  Description of Artificial Sequence: Synthetic oligonucleotide
  Target: ATXN2; (+) strand; PAM type: NRG; PAM sequence: AGG
gaaaacaaaaaagaaaaaaa

SEQ ID NO: 47939 - DNA, 20 bp, Artificial Sequence
  Description of Artificial Sequence: Synthetic oligonucleotide
  Target: ATXN2; (+) strand; PAM type: NRG; PAM sequence: AAG
aaaaggtttccccaaaaata

SEQ ID NO: 47940 - DNA, 20 bp, Artificial Sequence
  Description of Artificial Sequence: Synthetic oligonucleotide
  Target: ATXN2; (+) strand; PAM type: NRG; PAM sequence: AAG
tttccccaaaaataaagcca

SEQ ID NO: 47941 - DNA, 20 bp, Artificial Sequence
  Description of Artificial Sequence: Synthetic oligonucleotide
  Target: ATXN2; (+) strand; PAM type: NRG; PAM sequence: TAG
aaaaaacttgaacaacataa

SEQ ID NO: 47942 - DNA, 20 bp, Artificial Sequence
  Description of Artificial Sequence: Synthetic oligonucleotide
  Target: ATXN2; (+) strand; PAM type: NRG; PAM sequence: GAG
gtctgcatcttatattgctt

SEQ ID NO: 47943 - DNA, 20 bp, Artificial Sequence
  Description of Artificial Sequence: Synthetic oligonucleotide
  Target: ATXN2; (+) strand; PAM type: NRG; PAM sequence: TAG
tttttttttttttttacttt

SEQ ID NO: 47944 - DNA, 20 bp, Artificial Sequence
  Description of Artificial Sequence: Synthetic oligonucleotide
  Target: ATXN2; (+) strand; PAM type: NRG; PAM sequence: TGG
tttacttttagctttatttg

SEQ ID NO: 47945 - DNA, 20 bp, Artificial Sequence
  Description of Artificial Sequence: Synthetic oligonucleotide
  Target: ATXN2; (+) strand; PAM type: NRG; PAM sequence: GAG
tacttttagctttatttgtg

SEQ ID NO: 47946 - DNA, 20 bp, Artificial Sequence
  Description of Artificial Sequence: Synthetic oligonucleotide
  Target: ATXN2; (+) strand; PAM type: NRG; PAM sequence: TGG
gagaaatcctttaacaacca

SEQ ID NO: 47947 - DNA, 20 bp, Artificial Sequence
  Description of Artificial Sequence: Synthetic oligonucleotide
  Target: ATXN2; (+) strand; PAM type: NRG; PAM sequence: TGG
ttaacaaccatggaacttac

SEQ ID NO: 47948 - DNA, 20 bp, Artificial Sequence
  Description of Artificial Sequence: Synthetic oligonucleotide
  Target: ATXN2; (+) strand; PAM type: NRG; PAM sequence: TGG
caaccatggaacttactggc

SEQ ID NO: 47949 - DNA, 20 bp, Artificial Sequence
  Description of Artificial Sequence: Synthetic oligonucleotide
  Target: ATXN2; (+) strand; PAM type: NRG; PAM sequence: GGG
aaccatggaacttactggct

SEQ ID NO: 47950 - DNA, 20 bp, Artificial Sequence
  Description of Artificial Sequence: Synthetic oligonucleotide
  Target: ATXN2; (+) strand; PAM type: NRG; PAM sequence: CAG
tggaacttactggctgggca

SEQ ID NO: 47951 - DNA, 20 bp, Artificial Sequence
  Description of Artificial Sequence: Synthetic oligonucleotide
  Target: ATXN2; (+) strand; PAM type: NRG; PAM sequence: TGG
aacttactggctgggcacag

SEQ ID NO: 47952 - DNA, 20 bp, Artificial Sequence
  Description of Artificial Sequence: Synthetic oligonucleotide
  Target: ATXN2; (+) strand; PAM type: NRG; PAM sequence: CAG
gtggttcatgcctacaatcc

SEQ ID NO: 47953 - DNA, 20 bp, Artificial Sequence
  Description of Artificial Sequence: Synthetic oligonucleotide
  Target: ATXN2; (+) strand; PAM type: NRG; PAM sequence: TGG
tgcctacaatcccagcaatt

SEQ ID NO: 47954 - DNA, 20 bp, Artificial Sequence
  Description of Artificial Sequence: Synthetic oligonucleotide
  Target: ATXN2; (+) strand; PAM type: NRG; PAM sequence: GGG
gcctacaatcccagcaattt

SEQ ID NO: 47955 - DNA, 20 bp, Artificial Sequence
  Description of Artificial Sequence: Synthetic oligonucleotide
  Target: ATXN2; (+) strand; PAM type: NRG; PAM sequence: GAG
ctacaatcccagcaatttgg

SEQ ID NO: 47956 - DNA, 20 bp, Artificial Sequence
  Description of Artificial Sequence: Synthetic oligonucleotide
  Target: ATXN2; (+) strand; PAM type: NRG; PAM sequence: AGG
tacaatcccagcaatttggg

SEQ ID NO: 47957 - DNA, 20 bp, Artificial Sequence
  Description of Artificial Sequence: Synthetic oligonucleotide
  Target: ATXN2; (+) strand; PAM type: NRG; PAM sequence: CAG
tcccagcaatttgggaggcc

SEQ ID NO: 47958 - DNA, 20 bp, Artificial Sequence
  Description of Artificial Sequence: Synthetic oligonucleotide
  Target: ATXN2; (+) strand; PAM type: NRG; PAM sequence: AGG
cccagcaatttgggaggccc

SEQ ID NO: 47959 - DNA, 20 bp, Artificial Sequence
  Description of Artificial Sequence: Synthetic oligonucleotide
  Target: ATXN2; (+) strand; PAM type: NRG; PAM sequence: TGG
agcaatttgggaggcccagg

SEQ ID NO: 47960 - DNA, 20 bp, Artificial Sequence
  Description of Artificial Sequence: Synthetic oligonucleotide
  Target: ATXN2; (+) strand; PAM type: NRG; PAM sequence: GGG
gcaatttgggaggcccaggt

SEQ ID NO: 47961 - DNA, 20 bp, Artificial Sequence
  Description of Artificial Sequence: Synthetic oligonucleotide
  Target: ATXN2; (+) strand; PAM type: NRG; PAM sequence: TGG
atttgggaggcccaggtggg

SEQ ID NO: 47962 - DNA, 20 bp, Artificial Sequence
  Description of Artificial Sequence: Synthetic oligonucleotide
  Target: ATXN2; (+) strand; PAM type: NRG; PAM sequence: AAG
cccaggtgggtggatcacct

SEQ ID NO: 47963 - DNA, 20 bp, Artificial Sequence
  Description of Artificial Sequence: Synthetic oligonucleotide
  Target: ATXN2; (+) strand; PAM type: NRG; PAM sequence: AGG
ccaggtgggtggatcaccta

SEQ ID NO: 47964 - DNA, 20 bp, Artificial Sequence
  Description of Artificial Sequence: Synthetic oligonucleotide
  Target: ATXN2; (+) strand; PAM type: NRG; PAM sequence: CAG
gtgggtggatcacctaaggt

SEQ ID NO: 47965 - DNA, 20 bp, Artificial Sequence
  Description of Artificial Sequence: Synthetic oligonucleotide
  Target: ATXN2; (+) strand; PAM type: NRG; PAM sequence: AGG
tgggtggatcacctaaggtc

SEQ ID NO: 47966 - DNA, 20 bp, Artificial Sequence
  Description of Artificial Sequence: Synthetic oligonucleotide
  Target: ATXN2; (+) strand; PAM type: NRG; PAM sequence: GAG
ggtggatcacctaaggtcag

SEQ ID NO: 47967 - DNA, 20 bp, Artificial Sequence
  Description of Artificial Sequence: Synthetic oligonucleotide
  Target: ATXN2; (+) strand; PAM type: NRG; PAM sequence: CAG
taaggtcaggagcttgaaat

SEQ ID NO: 47968 - DNA, 20 bp, Artificial Sequence
  Description of Artificial Sequence: Synthetic oligonucleotide
  Target: ATXN2; (+) strand; PAM type: NRG; PAM sequence: TGG
tcaggagcttgaaatcagcc

SEQ ID NO: 47969 - DNA, 20 bp, Artificial Sequence
  Description of Artificial Sequence: Synthetic oligonucleotide
  Target: ATXN2; (+) strand; PAM type: NRG; PAM sequence: TGG
tgaaatcagcctggccaaca

SEQ ID NO: 47970 - DNA, 20 bp, Artificial Sequence
  Description of Artificial Sequence: Synthetic oligonucleotide
  Target: ATXN2; (+) strand; PAM type: NRG; PAM sequence: CGG
ctaaaaatacaaaaattacc

SEQ ID NO: 47971 - DNA, 20 bp, Artificial Sequence
  Description of Artificial Sequence: Synthetic oligonucleotide
  Target: ATXN2; (+) strand; PAM type: NRG; PAM sequence: GGG
taaaaatacaaaaattaccc

SEQ ID NO: 47972 - DNA, 20 bp, Artificial Sequence
  Description of Artificial Sequence: Synthetic oligonucleotide
  Target: ATXN2; (+) strand; PAM type: NRG; PAM sequence: TGG
atacaaaaattacccgggtg

SEQ ID NO: 47973 - DNA, 20 bp, Artificial Sequence
  Description of Artificial Sequence: Synthetic oligonucleotide
  Target: ATXN2; (+) strand; PAM type: NRG; PAM sequence: TGG
caaaaattacccgggtgtgg

SEQ ID NO: 47974 - DNA, 20 bp, Artificial Sequence
  Description of Artificial Sequence: Synthetic oligonucleotide
  Target: ATXN2; (+) strand; PAM type: NRG; PAM sequence: CAG
gtggtacgtgcctgtaatcc

SEQ ID NO: 47975 - DNA, 20 bp, Artificial Sequence
  Description of Artificial Sequence: Synthetic oligonucleotide
  Target: ATXN2; (+) strand; PAM type: NRG; PAM sequence: TAG
gtgcctgtaatcccagttat

SEQ ID NO: 47976 - DNA, 20 bp, Artificial Sequence
  Description of Artificial Sequence: Synthetic oligonucleotide
  Target: ATXN2; (+) strand; PAM type: NRG; PAM sequence: AGG
tgcctgtaatcccagttatt

SEQ ID NO: 47977 - DNA, 20 bp, Artificial Sequence
  Description of Artificial Sequence: Synthetic oligonucleotide
  Target: ATXN2; (+) strand; PAM type: NRG; PAM sequence: GGG
gcctgtaatcccagttatta

SEQ ID NO: 47978 - DNA, 20 bp, Artificial Sequence
  Description of Artificial Sequence: Synthetic oligonucleotide
  Target: ATXN2; (+) strand; PAM type: NRG; PAM sequence: GAG
ctgtaatcccagttattagg

SEQ ID NO: 47979 - DNA, 20 bp, Artificial Sequence
  Description of Artificial Sequence: Synthetic oligonucleotide
  Target: ATXN2; (+) strand; PAM type: NRG; PAM sequence: AGG
tgtaatcccagttattaggg

SEQ ID NO: 47980 - DNA, 20 bp, Artificial Sequence
  Description of Artificial Sequence: Synthetic oligonucleotide
  Target: ATXN2; (+) strand; PAM type: NRG; PAM sequence: AAG
cccagttattagggaggctg

SEQ ID NO: 47981 - DNA, 20 bp, Artificial Sequence
  Description of Artificial Sequence: Synthetic oligonucleotide
  Target: ATXN2; (+) strand; PAM type: NRG; PAM sequence: AAG
gttattagggaggctgaagc

SEQ ID NO: 47982 - DNA, 20 bp, Artificial Sequence
  Description of Artificial Sequence: Synthetic oligonucleotide
  Target: ATXN2; (+) strand; PAM type: NRG; PAM sequence: CAG
gcaagataactgcttgaacc

SEQ ID NO: 47983 - DNA, 20 bp, Artificial Sequence
  Description of Artificial Sequence: Synthetic oligonucleotide
  Target: ATXN2; (+) strand; PAM type: NRG; PAM sequence: AGG
caagataactgcttgaaccc

SEQ ID NO: 47984 - DNA, 20 bp, Artificial Sequence
  Description of Artificial Sequence: Synthetic oligonucleotide
  Target: ATXN2; (+) strand; PAM type: NRG; PAM sequence: GAG
agataactgcttgaacccag

SEQ ID NO: 47985 - DNA, 20 bp, Artificial Sequence
  Description of Artificial Sequence: Synthetic oligonucleotide
  Target: ATXN2; (+) strand; PAM type: NRG; PAM sequence: AGG
gataactgcttgaacccagg

SEQ ID NO: 47986 - DNA, 20 bp, Artificial Sequence
  Description of Artificial Sequence: Synthetic oligonucleotide
  Target: ATXN2; (+) strand; PAM type: NRG; PAM sequence: TGG
aactgcttgaacccaggagg

SEQ ID NO: 47987 - DNA, 20 bp, Artificial Sequence
  Description of Artificial Sequence: Synthetic oligonucleotide
  Target: ATXN2; (+) strand; PAM type: NRG; PAM sequence: GAG
ctgcttgaacccaggaggtg

SEQ ID NO: 47988 - DNA, 20 bp, Artificial Sequence
  Description of Artificial Sequence: Synthetic oligonucleotide
  Target: ATXN2; (+) strand; PAM type: NRG; PAM sequence: AGG
tgcttgaacccaggaggtgg

SEQ ID NO: 47989 - DNA, 20 bp, Artificial Sequence
  Description of Artificial Sequence: Synthetic oligonucleotide
  Target: ATXN2; (+) strand; PAM type: NRG; PAM sequence: CAG
aacccaggaggtggaggttg

SEQ ID NO: 47990 - DNA, 20 bp, Artificial Sequence
  Description of Artificial Sequence: Synthetic oligonucleotide
  Target: ATXN2; (+) strand; PAM type: NRG; PAM sequence: AAG
ggtggaggttgcagtgcgcc

SEQ ID NO: 47991 - DNA, 20 bp, Artificial Sequence
  Description of Artificial Sequence: Synthetic oligonucleotide
  Target: ATXN2; (+) strand; PAM type: NRG; PAM sequence: CAG
caagatcacgccactgtacc

SEQ ID NO: 47992 - DNA, 20 bp, Artificial Sequence
  Description of Artificial Sequence: Synthetic oligonucleotide
  Target: ATXN2; (+) strand; PAM type: NRG; PAM sequence: TGG
tcacgccactgtacccagcc

SEQ ID NO: 47993 - DNA, 20 bp, Artificial Sequence
  Description of Artificial Sequence: Synthetic oligonucleotide
  Target: ATXN2; (+) strand; PAM type: NRG; PAM sequence: GGG
cacgccactgtacccagcct

SEQ ID NO: 47994 - DNA, 20 bp, Artificial Sequence
  Description of Artificial Sequence: Synthetic oligonucleotide
  Target: ATXN2; (+) strand; PAM type: NRG; PAM sequence: CAG
actgtacccagcctgggcga

SEQ ID NO: 47995 - DNA, 20 bp, Artificial Sequence
  Description of Artificial Sequence: Synthetic oligonucleotide
  Target: ATXN2; (+) strand; PAM type: NRG; PAM sequence: GAG
tgtacccagcctgggcgaca

SEQ ID NO: 47996 - DNA, 20 bp, Artificial Sequence
  Description of Artificial Sequence: Synthetic oligonucleotide
  Target: ATXN2; (+) strand; PAM type: NRG; PAM sequence: AAG
cccagcctgggcgacagagc

SEQ ID NO: 47997 - DNA, 20 bp, Artificial Sequence
  Description of Artificial Sequence: Synthetic oligonucleotide
  Target: ATXN2; (+) strand; PAM type: NRG; PAM sequence: GAG
taattcgacttatgacaact

SEQ ID NO: 47998 - DNA, 20 bp, Artificial Sequence
  Description of Artificial Sequence: Synthetic oligonucleotide
  Target: ATXN2; (+) strand; PAM type: NRG; PAM sequence: CAG
ccacataatttatgtcactg

SEQ ID NO: 47999 - DNA, 20 bp, Artificial Sequence
  Description of Artificial Sequence: Synthetic oligonucleotide
  Target: ATXN2; (+) strand; PAM type: NRG; PAM sequence: AAG
tgtcactgcagtataatgtt

SEQ ID NO: 48000 - DNA, 20 bp, Artificial Sequence
  Description of Artificial Sequence: Synthetic oligonucleotide
  Target: ATXN2; (+) strand; PAM type: NRG; PAM sequence: GAG
cagtataatgttaagaacat

SEQ ID NO: 48001 - DNA, 20 bp, Artificial Sequence
  Description of Artificial Sequence: Synthetic oligonucleotide
  Target: ATXN2; (+) strand; PAM type: NRG; PAM sequence: TAG
ataatgttaagaacatgagt

SEQ ID NO: 48002 - DNA, 20 bp, Artificial Sequence
  Description of Artificial Sequence: Synthetic oligonucleotide
  Target: ATXN2; (+) strand; PAM type: NRG; PAM sequence: GAG
aatgttaagaacatgagtta

SEQ ID NO: 48003 - DNA, 20 bp, Artificial Sequence
  Description of Artificial Sequence: Synthetic oligonucleotide
  Target: ATXN2; (+) strand; PAM type: NRG; PAM sequence: TAG
gttaagaacatgagttagag

SEQ ID NO: 48004 - DNA, 20 bp, Artificial Sequence
  Description of Artificial Sequence: Synthetic oligonucleotide
  Target: ATXN2; (+) strand; PAM type: NRG; PAM sequence: AAG
gaacatgagttagagtagaa

SEQ ID NO: 48005 - DNA, 20 bp, Artificial Sequence
  Description of Artificial Sequence: Synthetic oligonucleotide
  Target: ATXN2; (+) strand; PAM type: NRG; PAM sequence: TAG
atgagttagagtagaaaagc

SEQ ID NO: 48006 - DNA, 20 bp, Artificial Sequence
  Description of Artificial Sequence: Synthetic oligonucleotide
  Target: ATXN2; (+) strand; PAM type: NRG; PAM sequence: TAG
ctagatttgtgtcctcactt

SEQ ID NO: 48007 - DNA, 20 bp, Artificial Sequence
  Description of Artificial Sequence: Synthetic oligonucleotide
  Target: ATXN2; (+) strand; PAM type: NRG; PAM sequence: AAG
atttgtgtcctcactttagc

SEQ ID NO: 48008 - DNA, 20 bp, Artificial Sequence
  Description of Artificial Sequence: Synthetic oligonucleotide
  Target: ATXN2; (+) strand; PAM type: NRG; PAM sequence: TGG
ctgtttcctcatctatgacg

SEQ ID NO: 48009 - DNA, 20 bp, Artificial Sequence
  Description of Artificial Sequence: Synthetic oligonucleotide
  Target: ATXN2; (+) strand; PAM type: NRG; PAM sequence: TAG
ctcatctatgacgtggataa

SEQ ID NO: 48010 - DNA, 20 bp, Artificial Sequence
  Description of Artificial Sequence: Synthetic oligonucleotide
  Target: ATXN2; (+) strand; PAM type: NRG; PAM sequence: CAG
gataatagctgtatctacta

SEQ ID NO: 48011 - DNA, 20 bp, Artificial Sequence
  Description of Artificial Sequence: Synthetic oligonucleotide
  Target: ATXN2; (+) strand; PAM type: NRG; PAM sequence: TAG
gatgattatgtgaacaaatg

SEQ ID NO: 48012 - DNA, 20 bp, Artificial Sequence
  Description of Artificial Sequence: Synthetic oligonucleotide
  Target: ATXN2; (+) strand; PAM type: NRG; PAM sequence: AGG
atgattatgtgaacaaatgt

SEQ ID NO: 48013 - DNA, 20 bp, Artificial Sequence
  Description of Artificial Sequence: Synthetic oligonucleotide
  Target: ATXN2; (+) strand; PAM type: NRG; PAM sequence: TAG
acaaatgtaggtaaatctgt

SEQ ID NO: 48014 - DNA, 20 bp, Artificial Sequence
  Description of Artificial Sequence: Synthetic oligonucleotide
  Target: ATXN2; (+) strand; PAM type: NRG; PAM sequence: CAG
tgtaggtaaatctgttagca

SEQ ID NO: 48015 - DNA, 20 bp, Artificial Sequence
  Description of Artificial Sequence: Synthetic oligonucleotide
  Target: ATXN2; (+) strand; PAM type: NRG; PAM sequence: GAG
taggtaaatctgttagcaca

SEQ ID NO: 48016 - DNA, 20 bp, Artificial Sequence
  Description of Artificial Sequence: Synthetic oligonucleotide
  Target: ATXN2; (+) strand; PAM type: NRG; PAM sequence: TGG
aaatctgttagcacagagtc

SEQ ID NO: 48017 - DNA, 20 bp, Artificial Sequence
  Description of Artificial Sequence: Synthetic oligonucleotide
  Target: ATXN2; (+) strand; PAM type: NRG; PAM sequence: TAG
ttagcacagagtctggcaca

SEQ ID NO: 48018 - DNA, 20 bp, Artificial Sequence
  Description of Artificial Sequence: Synthetic oligonucleotide
  Target: ATXN2; (+) strand; PAM type: NRG; PAM sequence: TAG
tagaatatgcactcaaattt

SEQ ID NO: 48019 - DNA, 20 bp, Artificial Sequence
  Description of Artificial Sequence: Synthetic oligonucleotide
  Target: ATXN2; (+) strand; PAM type: NRG; PAM sequence: CAG
tatcaaccttaataatttga

SEQ ID NO: 48020 - DNA, 20 bp, Artificial Sequence
  Description of Artificial Sequence: Synthetic oligonucleotide
  Target: ATXN2; (+) strand; PAM type: NRG; PAM sequence: CAG
aataatttgacagactatta

SEQ ID NO: 48021 - DNA, 20 bp, Artificial Sequence
  Description of Artificial Sequence: Synthetic oligonucleotide
  Target: ATXN2; (+) strand; PAM type: NRG; PAM sequence: AAG
aatttgacagactattacag

SEQ ID NO: 48022 - DNA, 20 bp, Artificial Sequence
  Description of Artificial Sequence: Synthetic oligonucleotide
  Target: ATXN2; (+) strand; PAM type: NRG; PAM sequence: GAG
tttgacagactattacagaa

SEQ ID NO: 48023 - DNA, 20 bp, Artificial Sequence
  Description of Artificial Sequence: Synthetic oligonucleotide
  Target: ATXN2; (+) strand; PAM type: NRG; PAM sequence: AAG
attacagaagagaattataa

SEQ ID NO: 48024 - DNA, 20 bp, Artificial Sequence
  Description of Artificial Sequence: Synthetic oligonucleotide
  Target: ATXN2; (+) strand; PAM type: NRG; PAM sequence: CAG
agaagagaattataaaagct

SEQ ID NO: 48025 - DNA, 20 bp, Artificial Sequence
  Description of Artificial Sequence: Synthetic oligonucleotide
  Target: ATXN2; (+) strand; PAM type: NRG; PAM sequence: TAG
tgaaatcaattcatatcttt

SEQ ID NO: 48026 - DNA, 20 bp, Artificial Sequence
  Description of Artificial Sequence: Synthetic oligonucleotide
  Target: ATXN2; (+) strand; PAM type: NRG; PAM sequence: AGG
gaaatcaattcatatctttt

SEQ ID NO: 48027 - DNA, 20 bp, Artificial Sequence
  Description of Artificial Sequence: Synthetic oligonucleotide
  Target: ATXN2; (+) strand; PAM type: NRG; PAM sequence: TAG
aggaaaatacaatgtcatat

SEQ ID NO: 48028 - DNA, 20 bp, Artificial Sequence
  Description of Artificial Sequence: Synthetic oligonucleotide
  Target: ATXN2; (+) strand; PAM type: NRG; PAM sequence: AAG
aacactctatctatccattc

SEQ ID NO: 48029 - DNA, 20 bp, Artificial Sequence
  Description of Artificial Sequence: Synthetic oligonucleotide
  Target: ATXN2; (+) strand; PAM type: NRG; PAM sequence: TGG
ctatctatccattcaagatg

SEQ ID NO: 48030 - DNA, 20 bp, Artificial Sequence
  Description of Artificial Sequence: Synthetic oligonucleotide
  Target: ATXN2; (+) strand; PAM type: NRG; PAM sequence: AAG
tatccattcaagatgtggaa

SEQ ID NO: 48031 - DNA, 20 bp, Artificial Sequence
  Description of Artificial Sequence: Synthetic oligonucleotide
  Target: ATXN2; (+) strand; PAM type: NRG; PAM sequence: CAG
aaagtactatcaaatgataa

SEQ ID NO: 48032 - DNA, 20 bp, Artificial Sequence
  Description of Artificial Sequence: Synthetic oligonucleotide
  Target: ATXN2; (+) strand; PAM type: NRG; PAM sequence: CAG
gtactatcaaatgataacag

SEQ ID NO: 48033 - DNA, 20 bp, Artificial Sequence
  Description of Artificial Sequence: Synthetic oligonucleotide
  Target: ATXN2; (+) strand; PAM type: NRG; PAM sequence: GAG
actatcaaatgataacagca

SEQ ID NO: 48034 - DNA, 20 bp, Artificial Sequence
  Description of Artificial Sequence: Synthetic oligonucleotide
  Target: ATXN2; (+) strand; PAM type: NRG; PAM sequence: CAG
gataacagcagagactattt

SEQ ID NO: 48035 - DNA, 20 bp, Artificial Sequence
  Description of Artificial Sequence: Synthetic oligonucleotide
  Target: ATXN2; (+) strand; PAM type: NRG; PAM sequence: AGG
ataacagcagagactatttc

SEQ ID NO: 48036 - DNA, 20 bp, Artificial Sequence
  Description of Artificial Sequence: Synthetic oligonucleotide
  Target: ATXN2; (+) strand; PAM type: NRG; PAM sequence: CAG
acagcagagactatttcagg

SEQ ID NO: 48037 - DNA, 20 bp, Artificial Sequence
  Description of Artificial Sequence: Synthetic oligonucleotide
  Target: ATXN2; (+) strand; PAM type: NRG; PAM sequence: GAG
ttcaggcagttgccaattct

SEQ ID NO: 48038 - DNA, 20 bp, Artificial Sequence
  Description of Artificial Sequence: Synthetic oligonucleotide
  Target: ATXN2; (+) strand; PAM type: NRG; PAM sequence: CAG
ggcagttgccaattctgaga

SEQ ID NO: 48039 - DNA, 20 bp, Artificial Sequence
  Description of Artificial Sequence: Synthetic oligonucleotide
  Target: ATXN2; (+) strand; PAM type: NRG; PAM sequence: AAG
gttgccaattctgagacaga

SEQ ID NO: 48040 - DNA, 20 bp, Artificial Sequence
  Description of Artificial Sequence: Synthetic oligonucleotide
  Target: ATXN2; (+) strand; PAM type: NRG; PAM sequence: AGG
ttgccaattctgagacagaa

SEQ ID NO: 48041 - DNA, 20 bp, Artificial Sequence
  Description of Artificial Sequence: Synthetic oligonucleotide
  Target: ATXN2; (+) strand; PAM type: NRG; PAM sequence: GGG
tgccaattctgagacagaaa

SEQ ID NO: 48042 - DNA, 20 bp, Artificial Sequence
  Description of Artificial Sequence: Synthetic oligonucleotide
  Target: ATXN2; (+) strand; PAM type: NRG; PAM sequence: GGG
gccaattctgagacagaaag

SEQ ID NO: 48043 - DNA, 20 bp, Artificial Sequence
  Description of Artificial Sequence: Synthetic oligonucleotide
  Target: ATXN2; (+) strand; PAM type: NRG; PAM sequence: GAG
tgagacagaaaggggactgt

SEQ ID NO: 48044 - DNA, 20 bp, Artificial Sequence
  Description of Artificial Sequence: Synthetic oligonucleotide
  Target: ATXN2; (+) strand; PAM type: NRG; PAM sequence: AGG
gagacagaaaggggactgtg

SEQ ID NO: 48045 - DNA, 20 bp, Artificial Sequence
  Description of Artificial Sequence: Synthetic oligonucleotide
  Target: ATXN2; (+) strand; PAM type: NRG; PAM sequence: AAG
cagaaaggggactgtgaggc

SEQ ID NO: 48046 - DNA, 20 bp, Artificial Sequence
  Description of Artificial Sequence: Synthetic oligonucleotide
  Target: ATXN2; (+) strand; PAM type: NRG; PAM sequence: AAG
gactgtgaggcaagaaaata

SEQ ID NO: 48047 - DNA, 20 bp, Artificial Sequence
  Description of Artificial Sequence: Synthetic oligonucleotide
  Target: ATXN2; (+) strand; PAM type: NRG; PAM sequence: CAG
tctttttttattctgttgcc

SEQ ID NO: 48048 - DNA, 20 bp, Artificial Sequence
  Description of Artificial Sequence: Synthetic oligonucleotide
  Target: ATXN2; (+) strand; PAM type: NRG; PAM sequence: AGG
ctttttttattctgttgccc

SEQ ID NO: 48049 - DNA, 20 bp, Artificial Sequence
  Description of Artificial Sequence: Synthetic oligonucleotide
  Target: ATXN2; (+) strand; PAM type: NRG; PAM sequence: TGG
ttttattctgttgcccaggc

SEQ ID NO: 48050 - DNA, 20 bp, Artificial Sequence
  Description of Artificial Sequence: Synthetic oligonucleotide
  Target: ATXN2; (+) strand; PAM type: NRG; PAM sequence: GAG
ttattctgttgcccaggctg

SEQ ID NO: 48051 - DNA, 20 bp, Artificial Sequence
  Description of Artificial Sequence: Synthetic oligonucleotide
  Target: ATXN2; (+) strand; PAM type: NRG; PAM sequence: CAG
ctgttgcccaggctggagtg

SEQ ID NO: 48052 - DNA, 20 bp, Artificial Sequence
  Description of Artificial Sequence: Synthetic oligonucleotide
  Target: ATXN2; (+) strand; PAM type: NRG; PAM sequence: TGG
ttgcccaggctggagtgcag

SEQ ID NO: 48053 - DNA, 20 bp, Artificial Sequence
  Description of Artificial Sequence: Synthetic oligonucleotide
  Target: ATXN2; (+) strand; PAM type: NRG; PAM sequence: CGG
atctcgcaatctctgcctcc

SEQ ID NO: 48054 - DNA, 20 bp, Artificial Sequence
  Description of Artificial Sequence: Synthetic oligonucleotide
  Target: ATXN2; (+) strand; PAM type: NRG; PAM sequence: GGG
tctcgcaatctctgcctccc

SEQ ID NO: 48055 - DNA, 20 bp, Artificial Sequence
  Description of Artificial Sequence: Synthetic oligonucleotide
  Target: ATXN2; (+) strand; PAM type: NRG; PAM sequence: AAG
aatctctgcctcccgggttc

SEQ ID NO: 48056 - DNA, 20 bp, Artificial Sequence
  Description of Artificial Sequence: Synthetic oligonucleotide
  Target: ATXN2; (+) strand; PAM type: NRG; PAM sequence: CAG
ttcaagcgattcttctgcct

SEQ ID NO: 48057 - DNA, 20 bp, Artificial Sequence
  Description of Artificial Sequence: Synthetic oligonucleotide
  Target: ATXN2; (+) strand; PAM type: NRG; PAM sequence: AAG
ttctgcctcagcctctcccc

SEQ ID NO: 48058 - DNA, 20 bp, Artificial Sequence
  Description of Artificial Sequence: Synthetic oligonucleotide
  Target: ATXN2; (+) strand; PAM type: NRG; PAM sequence: TAG
tgcctcagcctctccccaag

SEQ ID NO: 48059 - DNA, 20 bp, Artificial Sequence
  Description of Artificial Sequence: Synthetic oligonucleotide
  Target: ATXN2; (+) strand; PAM type: NRG; PAM sequence: TGG
tcagcctctccccaagtagc

SEQ ID NO: 48060 - DNA, 20 bp, Artificial Sequence
  Description of Artificial Sequence: Synthetic oligonucleotide
  Target: ATXN2; (+) strand; PAM type: NRG; PAM sequence: GGG
cagcctctccccaagtagct

SEQ ID NO: 48061 - DNA, 20 bp, Artificial Sequence
  Description of Artificial Sequence: Synthetic oligonucleotide
  Target: ATXN2; (+) strand; PAM type: NRG; PAM sequence: TAG
tccccaagtagctgggatta

SEQ ID NO: 48062 - DNA, 20 bp, Artificial Sequence
  Description of Artificial Sequence: Synthetic oligonucleotide
  Target: ATXN2; (+) strand; PAM type: NRG; PAM sequence: TAG
ccgctaattttttacttttt

SEQ ID NO: 48063 - DNA, 20 bp, Artificial Sequence
  Description of Artificial Sequence: Synthetic oligonucleotide
  Target: ATXN2; (+) strand; PAM type: NRG; PAM sequence: AAG
aattttttacttttttagta

SEQ ID NO: 48064 - DNA, 20 bp, Artificial Sequence
  Description of Artificial Sequence: Synthetic oligonucleotide
  Target: ATXN2; (+) strand; PAM type: NRG; PAM sequence: CGG
ttttacttttttagtaaaga

SEQ ID NO: 48065 - DNA, 20 bp, Artificial Sequence
  Description of Artificial Sequence: Synthetic oligonucleotide
  Target: ATXN2; (+) strand; PAM type: NRG; PAM sequence: GGG
tttacttttttagtaaagac

SEQ ID NO: 48066 - DNA, 20 bp, Artificial Sequence
  Description of Artificial Sequence: Synthetic oligonucleotide
  Target: ATXN2; (+) strand; PAM type: NRG; PAM sequence: GGG
ttacttttttagtaaagacg

SEQ ID NO: 48067 - DNA, 20 bp, Artificial Sequence
  Description of Artificial Sequence: Synthetic oligonucleotide
  Target: ATXN2; (+) strand; PAM type: NRG; PAM sequence: TGG
aagacggggtttcaacatgt

SEQ ID NO: 48068 - DNA, 20 bp, Artificial Sequence
  Description of Artificial Sequence: Synthetic oligonucleotide
  Target: ATXN2; (+) strand; PAM type: NRG; PAM sequence: CAG
cggggtttcaacatgttggc

SEQ ID NO: 48069 - DNA, 20 bp, Artificial Sequence
  Description of Artificial Sequence: Synthetic oligonucleotide
  Target: ATXN2; (+) strand; PAM type: NRG; PAM sequence: AGG
ggggtttcaacatgttggcc

SEQ ID NO: 48070 - DNA, 20 bp, Artificial Sequence
  Description of Artificial Sequence: Synthetic oligonucleotide
  Target: ATXN2; (+) strand; PAM type: NRG; PAM sequence: TGG
tttcaacatgttggccaggc

SEQ ID NO: 48071 - DNA, 20 bp, Artificial Sequence
  Description of Artificial Sequence: Synthetic oligonucleotide
  Target: ATXN2; (+) strand; PAM type: NRG; PAM sequence: TGG
ctcaaatgatctgcccacct

SEQ ID NO: 48072 - DNA, 20 bp, Artificial Sequence
  Description of Artificial Sequence: Synthetic oligonucleotide
  Target: ATXN2; (+) strand; PAM type: NRG; PAM sequence: AAG
ctgcccaccttggtctccca

SEQ ID NO: 48073 - DNA, 20 bp, Artificial Sequence
  Description of Artificial Sequence: Synthetic oligonucleotide
  Target: ATXN2; (+) strand; PAM type: NRG; PAM sequence: GAG
ccaccttggtctcccaaagt

SEQ ID NO: 48074 - DNA, 20 bp, Artificial Sequence
  Description of Artificial Sequence: Synthetic oligonucleotide
  Target: ATXN2; (+) strand; PAM type: NRG; PAM sequence: CAG
ggtctcccaaagtgagatta

SEQ ID NO: 48075 - DNA, 20 bp, Artificial Sequence
  Description of Artificial Sequence: Synthetic oligonucleotide
  Target: ATXN2; (+) strand; PAM type: NRG; PAM sequence: AGG
gtctcccaaagtgagattac

SEQ ID NO: 48076 - DNA, 20 bp, Artificial Sequence
  Description of Artificial Sequence: Synthetic oligonucleotide
  Target: ATXN2; (+) strand; PAM type: NRG; PAM sequence: GAG
ctcccaaagtgagattacag

SEQ ID NO: 48077 - DNA, 20 bp, Artificial Sequence
  Description of Artificial Sequence: Synthetic oligonucleotide
  Target: ATXN2; (+) strand; PAM type: NRG; PAM sequence: GAG
caaagtgagattacaggagt

SEQ ID NO: 48078 - DNA, 20 bp, Artificial Sequence
  Description of Artificial Sequence: Synthetic oligonucleotide
  Target: ATXN2; (+) strand; PAM type: NRG; PAM sequence: TGG
caggagtgagccaccgcacc

SEQ ID NO: 48079 - DNA, 20 bp, Artificial Sequence
  Description of Artificial Sequence: Synthetic oligonucleotide
  Target: ATXN2; (+) strand; PAM type: NRG; PAM sequence: TAG
gtgagccaccgcacctggcc

SEQ ID NO: 48080 - DNA, 20 bp, Artificial Sequence
  Description of Artificial Sequence: Synthetic oligonucleotide
  Target: ATXN2; (+) strand; PAM type: NRG; PAM sequence: AAG
gccaccgcacctggcctaga

SEQ ID NO: 48081 - DNA, 20 bp, Artificial Sequence
  Description of Artificial Sequence: Synthetic oligonucleotide
  Target: ATXN2; (+) strand; PAM type: NRG; PAM sequence: AAG
cctagaaagcacaaattctc

SEQ ID NO: 48082 - DNA, 20 bp, Artificial Sequence
  Description of Artificial Sequence: Synthetic oligonucleotide
  Target: ATXN2; (+) strand; PAM type: NRG; PAM sequence: AGG
ctagaaagcacaaattctca

SEQ ID NO: 48083 - DNA, 20 bp, Artificial Sequence
  Description of Artificial Sequence: Synthetic oligonucleotide
  Target: ATXN2; (+) strand; PAM type: NRG; PAM sequence: CAG
agcacaaattctcaaggcca

SEQ ID NO: 48084 - DNA, 20 bp, Artificial Sequence
  Description of Artificial Sequence: Synthetic oligonucleotide
  Target: ATXN2; (+) strand; PAM type: NRG; PAM sequence: CAG
aaattctcaaggccacagaa

SEQ ID NO: 48085 - DNA, 20 bp, Artificial Sequence
  Description of Artificial Sequence: Synthetic oligonucleotide
  Target: ATXN2; (+) strand; PAM type: NRG; PAM sequence: GAG
attctcaaggccacagaaca

SEQ ID NO: 48086 - DNA, 20 bp, Artificial Sequence
  Description of Artificial Sequence: Synthetic oligonucleotide
  Target: ATXN2; (+) strand; PAM type: NRG; PAM sequence: TGG
ccacagaacagagccactcc

SEQ ID NO: 48087 - DNA, 20 bp, Artificial Sequence
  Description of Artificial Sequence: Synthetic oligonucleotide
  Target: ATXN2; (+) strand; PAM type: NRG; PAM sequence: GGG
cacagaacagagccactcct

SEQ ID NO: 48088 - DNA, 20 bp, Artificial Sequence
  Description of Artificial Sequence: Synthetic oligonucleotide
  Target: ATXN2; (+) strand; PAM type: NRG; PAM sequence: TAG
atctcatcacatgaaaccca

SEQ ID NO: 48089 - DNA, 20 bp, Artificial Sequence
  Description of Artificial Sequence: Synthetic oligonucleotide
  Target: ATXN2; (+) strand; PAM type: NRG; PAM sequence: CAG
tagctcacaccctgactgtc

SEQ ID NO: 48090 - DNA, 20 bp, Artificial Sequence
  Description of Artificial Sequence: Synthetic oligonucleotide
  Target: ATXN2; (+) strand; PAM type: NRG; PAM sequence: GAG
gctcacaccctgactgtcca

SEQ ID NO: 48091 - DNA, 20 bp, Artificial Sequence
  Description of Artificial Sequence: Synthetic oligonucleotide
  Target: ATXN2; (+) strand; PAM type: NRG; PAM sequence: CAG
tgactgtccagagcctcacc

SEQ ID NO: 48092 - DNA, 20 bp, Artificial Sequence
  Description of Artificial Sequence: Synthetic oligonucleotide
  Target: ATXN2; (+) strand; PAM type: NRG; PAM sequence: AGG
gactgtccagagcctcaccc

SEQ ID NO: 48093 - DNA, 20 bp, Artificial Sequence
  Description of Artificial Sequence: Synthetic oligonucleotide
  Target: ATXN2; (+) strand; PAM type: NRG; PAM sequence: CAG
caggctaattataattaaac

SEQ ID NO: 48094 - DNA, 20 bp, Artificial Sequence
  Description of Artificial Sequence: Synthetic oligonucleotide
  Target: ATXN2; (+) strand; PAM type: NRG; PAM sequence: AGG
aggctaattataattaaacc

SEQ ID NO: 48095 - DNA, 20 bp, Artificial Sequence
  Description of Artificial Sequence: Synthetic oligonucleotide
  Target: ATXN2; (+) strand; PAM type: NRG; PAM sequence: TAG
tataattaaaccaggatccc

SEQ ID NO: 48096 - DNA, 20 bp, Artificial Sequence
  Description of Artificial Sequence: Synthetic oligonucleotide
  Target: ATXN2; (+) strand; PAM type: NRG; PAM sequence: AAG
aattaaaccaggatccctag

SEQ ID NO: 48097 - DNA, 20 bp, Artificial Sequence
  Description of Artificial Sequence: Synthetic oligonucleotide
  Target: ATXN2; (+) strand; PAM type: NRG; PAM sequence: GAG
aaaccaggatccctagaagt

SEQ ID NO: 48098 - DNA, 20 bp, Artificial Sequence
  Description of Artificial Sequence: Synthetic oligonucleotide
  Target: ATXN2; (+) strand; PAM type: NRG; PAM sequence: CAG
gaacatttttaaaaactccc

SEQ ID NO: 48099 - DNA, 20 bp, Artificial Sequence
  Description of Artificial Sequence: Synthetic oligonucleotide
  Target: ATXN2; (+) strand; PAM type: NRG; PAM sequence: AGG
aacatttttaaaaactcccc

SEQ ID NO: 48100 - DNA, 20 bp, Artificial Sequence
  Description of Artificial Sequence: Synthetic oligonucleotide
  Target: ATXN2; (+) strand; PAM type: NRG; PAM sequence: CAG
caggtgactaaacgtgaacc

SEQ ID NO: 48101 - DNA, 20 bp, Artificial Sequence
  Description of Artificial Sequence: Synthetic oligonucleotide
  Target: ATXN2; (+) strand; PAM type: NRG; PAM sequence: AAG
ctaaacgtgaacccagcatt

SEQ ID NO: 48102 - DNA, 20 bp, Artificial Sequence
  Description of Artificial Sequence: Synthetic oligonucleotide
  Target: ATXN2; (+) strand; PAM type: NRG; PAM sequence: AAG
aacgtgaacccagcattaag

SEQ ID NO: 48103 - DNA, 20 bp, Artificial Sequence
  Description of Artificial Sequence: Synthetic oligonucleotide
  Target: ATXN2; (+) strand; PAM type: NRG; PAM sequence: TGG
aaccataccttcctttactt

SEQ ID NO: 48104 - DNA, 20 bp, Artificial Sequence
  Description of Artificial Sequence: Synthetic oligonucleotide
  Target: ATXN2; (+) strand; PAM type: NRG; PAM sequence: GGG
accataccttcctttacttt

SEQ ID NO: 48105 - DNA, 20 bp, Artificial Sequence
  Description of Artificial Sequence: Synthetic oligonucleotide
  Target: ATXN2; (+) strand; PAM type: NRG; PAM sequence: GAG
cataccttcctttactttgg

SEQ ID NO: 48106 - DNA, 20 bp, Artificial Sequence
  Description of Artificial Sequence: Synthetic oligonucleotide
  Target: ATXN2; (+) strand; PAM type: NRG; PAM sequence: GAG
ctttactttgggagtaatct

SEQ ID NO: 48107 - DNA, 20 bp, Artificial Sequence
  Description of Artificial Sequence: Synthetic oligonucleotide
  Target: ATXN2; (+) strand; PAM type: NRG; PAM sequence: AAG
actttgggagtaatctgagt

SEQ ID NO: 48108 - DNA, 20 bp, Artificial Sequence
  Description of Artificial Sequence: Synthetic oligonucleotide
  Target: ATXN2; (+) strand; PAM type: NRG; PAM sequence: TAG
aataaaaaataaaaaaaatc

SEQ ID NO: 48109 - DNA, 20 bp, Artificial Sequence
  Description of Artificial Sequence: Synthetic oligonucleotide
  Target: ATXN2; (+) strand; PAM type: NRG; PAM sequence: CAG
aaataaaaaaaatctagatg

SEQ ID NO: 48110 - DNA, 20 bp, Artificial Sequence
  Description of Artificial Sequence: Synthetic oligonucleotide
  Target: ATXN2; (+) strand; PAM type: NRG; PAM sequence: AAG
aatgccttaattttgttatt

SEQ ID NO: 48111 - DNA, 20 bp, Artificial Sequence
  Description of Artificial Sequence: Synthetic oligonucleotide
  Target: ATXN2; (+) strand; PAM type: NRG; PAM sequence: AGG
atgccttaattttgttatta

SEQ ID NO: 48112 - DNA, 20 bp, Artificial Sequence
  Description of Artificial Sequence: Synthetic oligonucleotide
  Target: ATXN2; (+) strand; PAM type: NRG; PAM sequence: CGG
tgttattaaggaaaaccatg

SEQ ID NO: 48113 - DNA, 20 bp, Artificial Sequence
  Description of Artificial Sequence: Synthetic oligonucleotide
  Target: ATXN2; (+) strand; PAM type: NRG; PAM sequence: TGG
ttaaggaaaaccatgcggcc

SEQ ID NO: 48114 - DNA, 20 bp, Artificial Sequence
  Description of Artificial Sequence: Synthetic oligonucleotide
  Target: ATXN2; (+) strand; PAM type: NRG; PAM sequence: TGG
accatgcggcctggccaaca

SEQ ID NO: 48115 - DNA, 20 bp, Artificial Sequence
  Description of Artificial Sequence: Synthetic oligonucleotide
  Target: ATXN2; (+) strand; PAM type: NRG; PAM sequence: CAG
ctggccaacatggtgaaacc

SEQ ID NO: 48116 - DNA, 20 bp, Artificial Sequence
  Description of Artificial Sequence: Synthetic oligonucleotide
  Target: ATXN2; (+) strand; PAM type: NRG; PAM sequence: AAG
ggtgaaacccagtctgtact

SEQ ID NO: 48117 - DNA, 20 bp, Artificial Sequence
  Description of Artificial Sequence: Synthetic oligonucleotide
  Target: ATXN2; (+) strand; PAM type: NRG; PAM sequence: TAG
atacaaacaaaaaaaaaaat

SEQ ID NO: 48118 - DNA, 20 bp, Artificial Sequence
  Description of Artificial Sequence: Synthetic oligonucleotide
  Target: ATXN2; (+) strand; PAM type: NRG; PAM sequence: CAG
caaacaaaaaaaaaaattag

SEQ ID NO: 48119 - DNA, 20 bp, Artificial Sequence
  Description of Artificial Sequence: Synthetic oligonucleotide
  Target: ATXN2; (+) strand; PAM type: NRG; PAM sequence: AGG
aaacaaaaaaaaaaattagc

SEQ ID NO: 48120 - DNA, 20 bp, Artificial Sequence
  Description of Artificial Sequence: Synthetic oligonucleotide
  Target: ATXN2; (+) strand; PAM type: NRG; PAM sequence: GGG
aacaaaaaaaaaaattagca

SEQ ID NO: 48121 - DNA, 20 bp, Artificial Sequence
  Description of Artificial Sequence: Synthetic oligonucleotide
  Target: ATXN2; (+) strand; PAM type: NRG; PAM sequence: TGG
aaaaaaaaattagcagggca

SEQ ID NO: 48122 - DNA, 20 bp, Artificial Sequence
  Description of Artificial Sequence: Synthetic oligonucleotide
  Target: ATXN2; (+) strand; PAM type: NRG; PAM sequence: TGG
aaaaaattagcagggcatgg

SEQ ID NO: 48123 - DNA, 20 bp, Artificial Sequence
  Description of Artificial Sequence: Synthetic oligonucleotide
  Target: ATXN2; (+) strand; PAM type: NRG; PAM sequence: CAG
gtggtatgtgcctataatcc

SEQ ID NO: 48124 - DNA, 20 bp, Artificial Sequence
  Description of Artificial Sequence: Synthetic oligonucleotide
  Target: ATXN2; (+) strand; PAM type: NRG; PAM sequence: CGG
tgcctataatcccagctact

SEQ ID NO: 48125 - DNA, 20 bp, Artificial Sequence
  Description of Artificial Sequence: Synthetic oligonucleotide
  Target: ATXN2; (+) strand; PAM type: NRG; PAM sequence: GGG
gcctataatcccagctactc

SEQ ID NO: 48126 - DNA, 20 bp, Artificial Sequence
  Description of Artificial Sequence: Synthetic oligonucleotide
  Target: ATXN2; (+) strand; PAM type: NRG; PAM sequence: GAG
ctataatcccagctactcgg

SEQ ID NO: 48127 - DNA, 20 bp, Artificial Sequence
  Description of Artificial Sequence: Synthetic oligonucleotide
  Target: ATXN2; (+) strand; PAM type: NRG; PAM sequence: AGG
tataatcccagctactcggg

SEQ ID NO: 48128 - DNA, 20 bp, Artificial Sequence
  Description of Artificial Sequence: Synthetic oligonucleotide
  Target: ATXN2; (+) strand; PAM type: NRG; PAM sequence: GAG
tcccagctactcgggaggct

SEQ ID NO: 48129 - DNA, 20 bp, Artificial Sequence
  Description of Artificial Sequence: Synthetic oligonucleotide
  Target: ATXN2; (+) strand; PAM type: NRG; PAM sequence: AGG
cccagctactcgggaggctg

SEQ ID NO: 48130 - DNA, 20 bp, Artificial Sequence
  Description of Artificial Sequence: Synthetic oligonucleotide
  Target: ATXN2; (+) strand; PAM type: NRG; PAM sequence: CAG
agctactcgggaggctgagg

SEQ ID NO: 48131 - DNA, 20 bp, Artificial Sequence
  Description of Artificial Sequence: Synthetic oligonucleotide
  Target: ATXN2; (+) strand; PAM type: NRG; PAM sequence: AGG
gctactcgggaggctgaggc

SEQ ID NO: 48132 - DNA, 20 bp, Artificial Sequence
  Description of Artificial Sequence: Synthetic oligonucleotide
  Target: ATXN2; (+) strand; PAM type: NRG; PAM sequence: GAG
tactcgggaggctgaggcag

SEQ ID NO: 48133 - DNA, 20 bp, Artificial Sequence
  Description of Artificial Sequence: Synthetic oligonucleotide
  Target: ATXN2; (+) strand; PAM type: NRG; PAM sequence: CAG
gcaggagaatcgcttaaacc

SEQ ID NO: 48134 - DNA, 20 bp, Artificial Sequence
  Description of Artificial Sequence: Synthetic oligonucleotide
  Target: ATXN2; (+) strand; PAM type: NRG; PAM sequence: AGG
caggagaatcgcttaaaccc

SEQ ID NO: 48135 - DNA, 20 bp, Artificial Sequence
  Description of Artificial Sequence: Synthetic oligonucleotide
  Target: ATXN2; (+) strand; PAM type: NRG; PAM sequence: GAG
ggagaatcgcttaaacccag

SEQ ID NO: 48136 - DNA, 20 bp, Artificial Sequence
  Description of Artificial Sequence: Synthetic oligonucleotide
  Target: ATXN2; (+) strand; PAM type: NRG; PAM sequence: AGG
gagaatcgcttaaacccagg

SEQ ID NO: 48137 - DNA, 20 bp, Artificial Sequence
  Description of Artificial Sequence: Synthetic oligonucleotide
  Target: ATXN2; (+) strand; PAM type: NRG; PAM sequence: CAG
aatcgcttaaacccaggagg

SEQ ID NO: 48138 - DNA, 20 bp, Artificial Sequence
  Description of Artificial Sequence: Synthetic oligonucleotide
  Target: ATXN2; (+) strand; PAM type: NRG; PAM sequence: GAG
tcgcttaaacccaggaggca

SEQ ID NO: 48139 - DNA, 20 bp, Artificial Sequence
  Description of Artificial Sequence: Synthetic oligonucleotide
  Target: ATXN2; (+) strand; PAM type: NRG; PAM sequence: AGG
cgcttaaacccaggaggcag

SEQ ID NO: 48140 - DNA, 20 bp, Artificial Sequence
  Description of Artificial Sequence: Synthetic oligonucleotide
  Target: ATXN2; (+) strand; PAM type: NRG; PAM sequence: CAG
aacccaggaggcagaggttg

SEQ ID NO: 48141 - DNA, 20 bp, Artificial Sequence
  Description of Artificial Sequence: Synthetic oligonucleotide
  Target: ATXN2; (+) strand; PAM type: NRG; PAM sequence: GAG
caggaggcagaggttgcagt

SEQ ID NO: 48142 - DNA, 20 bp, Artificial Sequence
  Description of Artificial Sequence: Synthetic oligonucleotide
  Target: ATXN2; (+) strand; PAM type: NRG; PAM sequence: GAG
ggcagaggttgcagtgagcc

SEQ ID NO: 48143 - DNA, 20 bp, Artificial Sequence
  Description of Artificial Sequence: Synthetic oligonucleotide
  Target: ATXN2; (+) strand; PAM type: NRG; PAM sequence: CAG
gagatcgcaccactgcactc

SEQ ID NO: 48144 - DNA, 20 bp, Artificial Sequence
  Description of Artificial Sequence: Synthetic oligonucleotide
  Target: ATXN2; (+) strand; PAM type: NRG; PAM sequence: TGG
cgcaccactgcactccagcc

SEQ ID NO: 48145 - DNA, 20 bp, Artificial Sequence
  Description of Artificial Sequence: Synthetic oligonucleotide
  Target: ATXN2; (+) strand; PAM type: NRG; PAM sequence: GGG
gcaccactgcactccagcct

SEQ ID NO: 48146 - DNA, 20 bp, Artificial Sequence
  Description of Artificial Sequence: Synthetic oligonucleotide
  Target: ATXN2; (+) strand; PAM type: NRG; PAM sequence: TAG
ctgcactccagcctgggaaa

SEQ ID NO: 48147 - DNA, 20 bp, Artificial Sequence
  Description of Artificial Sequence: Synthetic oligonucleotide
  Target: ATXN2; (+) strand; PAM type: NRG; PAM sequence: GAG
gcactccagcctgggaaata

SEQ ID NO: 48148 - DNA, 20 bp, Artificial Sequence
  Description of Artificial Sequence: Synthetic oligonucleotide
  Target: ATXN2; (+) strand; PAM type: NRG; PAM sequence: GAG
tccagcctgggaaatagagt

SEQ ID NO: 48149 - DNA, 20 bp, Artificial Sequence
  Description of Artificial Sequence: Synthetic oligonucleotide
  Target: ATXN2; (+) strand; PAM type: NRG; PAM sequence: AAG
catctcgaaataaaaaaaaa

SEQ ID NO: 48150 - DNA, 20 bp, Artificial Sequence
  Description of Artificial Sequence: Synthetic oligonucleotide
  Target: ATXN2; (+) strand; PAM type: NRG; PAM sequence: AAG
ctcgaaataaaaaaaaaaag

SEQ ID NO: 48151 - DNA, 20 bp, Artificial Sequence
  Description of Artificial Sequence: Synthetic oligonucleotide
  Target: ATXN2; (+) strand; PAM type: NRG; PAM sequence: AGG
tcgaaataaaaaaaaaaaga

SEQ ID NO: 48152 - DNA, 20 bp, Artificial Sequence
  Description of Artificial Sequence: Synthetic oligonucleotide
  Target: ATXN2; (+) strand; PAM type: NRG; PAM sequence: TGG
gccaattaataattctaaaa

SEQ ID NO: 48153 - DNA, 20 bp, Artificial Sequence
  Description of Artificial Sequence: Synthetic oligonucleotide
  Target: ATXN2; (+) strand; PAM type: NRG; PAM sequence: TAG
aatggttttctccatactga

SEQ ID NO: 48154 - DNA, 20 bp, Artificial Sequence
  Description of Artificial Sequence: Synthetic oligonucleotide
  Target: ATXN2; (+) strand; PAM type: NRG; PAM sequence: TAG
ttaatacttttcttctttta

SEQ ID NO: 48155 - DNA, 20 bp, Artificial Sequence
  Description of Artificial Sequence: Synthetic oligonucleotide
  Target: ATXN2; (+) strand; PAM type: NRG; PAM sequence: AAG
atacttttcttcttttatag

SEQ ID NO: 48156 - DNA, 20 bp, Artificial Sequence
  Description of Artificial Sequence: Synthetic oligonucleotide
  Target: ATXN2; (+) strand; PAM type: NRG; PAM sequence: GAG
acttttcttcttttatagaa

SEQ ID NO: 48157 - DNA, 20 bp, Artificial Sequence
  Description of Artificial Sequence: Synthetic oligonucleotide
  Target: ATXN2; (+) strand; PAM type: NRG; PAM sequence: AGG
cttttcttcttttatagaag

SEQ ID NO: 48158 - DNA, 20 bp, Artificial Sequence
  Description of Artificial Sequence: Synthetic oligonucleotide
  Target: ATXN2; (+) strand; PAM type: NRG; PAM sequence: GGG
ttttcttcttttatagaaga

SEQ ID NO: 48159 - DNA, 20 bp, Artificial Sequence
  Description of Artificial Sequence: Synthetic oligonucleotide
  Target: ATXN2; (+) strand; PAM type: NRG; PAM sequence: TGG
agaagagggcaatttctgcc

SEQ ID NO: 48160 - DNA, 20 bp, Artificial Sequence
  Description of Artificial Sequence: Synthetic oligonucleotide
  Target: ATXN2; (+) strand; PAM type: NRG; PAM sequence: TAG
gagggcaatttctgcctgga

SEQ ID NO: 48161 - DNA, 20 bp, Artificial Sequence
  Description of Artificial Sequence: Synthetic oligonucleotide
  Target: ATXN2; (+) strand; PAM type: NRG; PAM sequence: TAG
aatttctgcctggatagtct

SEQ ID NO: 48162 - DNA, 20 bp, Artificial Sequence
  Description of Artificial Sequence: Synthetic oligonucleotide
  Target: ATXN2; (+) strand; PAM type: NRG; PAM sequence: AAG
tgcctggatagtcttagctt

SEQ ID NO: 48163 - DNA, 20 bp, Artificial Sequence
  Description of Artificial Sequence: Synthetic oligonucleotide
  Target: ATXN2; (+) strand; PAM type: NRG; PAM sequence: GAG
cctggatagtcttagcttaa

SEQ ID NO: 48164 - DNA, 20 bp, Artificial Sequence
  Description of Artificial Sequence: Synthetic oligonucleotide
  Target: ATXN2; (+) strand; PAM type: NRG; PAM sequence: CAG
acatgacttaatactatttt

SEQ ID NO: 48165 - DNA, 20 bp, Artificial Sequence
  Description of Artificial Sequence: Synthetic oligonucleotide
  Target: ATXN2; (+) strand; PAM type: NRG; PAM sequence: AGG
catgacttaatactattttc

SEQ ID NO: 48166 - DNA, 20 bp, Artificial Sequence
  Description of Artificial Sequence: Synthetic oligonucleotide
  Target: ATXN2; (+) strand; PAM type: NRG; PAM sequence: TGG
attttcaggatactacgcac

SEQ ID NO: 48167 - DNA, 20 bp, Artificial Sequence
  Description of Artificial Sequence: Synthetic oligonucleotide
  Target: ATXN2; (+) strand; PAM type: NRG; PAM sequence: AAG
ataattcactaaaccactgt

SEQ ID NO: 48168 - DNA, 20 bp, Artificial Sequence
  Description of Artificial Sequence: Synthetic oligonucleotide
  Target: ATXN2; (+) strand; PAM type: NRG; PAM sequence: AAG
accactgtaagttttgaaat

SEQ ID NO: 48169 - DNA, 20 bp, Artificial Sequence
  Description of Artificial Sequence: Synthetic oligonucleotide
  Target: ATXN2; (+) strand; PAM type: NRG; PAM sequence: CAG
tttgaaataagatacctgcc

SEQ ID NO: 48170 - DNA, 20 bp, Artificial Sequence
  Description of Artificial Sequence: Synthetic oligonucleotide
  Target: ATXN2; (+) strand; PAM type: NRG; PAM sequence: AGG
ttgaaataagatacctgccc

SEQ ID NO: 48171 - DNA, 20 bp, Artificial Sequence
  Description of Artificial Sequence: Synthetic oligonucleotide
  Target: ATXN2; (+) strand; PAM type: NRG; PAM sequence: TGG
ataagatacctgcccaggcg

SEQ ID NO: 48172 - DNA, 20 bp, Artificial Sequence
  Description of Artificial Sequence: Synthetic oligonucleotide
  Target: ATXN2; (+) strand; PAM type: NRG; PAM sequence: TGG
agatacctgcccaggcgtgg

SEQ ID NO: 48173 - DNA, 20 bp, Artificial Sequence
  Description of Artificial Sequence: Synthetic oligonucleotide
  Target: ATXN2; (+) strand; PAM type: NRG; PAM sequence: CAG
gtggctcacgcctataatcc

SEQ ID NO: 48174 - DNA, 20 bp, Artificial Sequence
  Description of Artificial Sequence: Synthetic oligonucleotide
  Target: ATXN2; (+) strand; PAM type: NRG; PAM sequence: TGG
cgcctataatcccagcactc

SEQ ID NO: 48175 - DNA, 20 bp, Artificial Sequence
  Description of Artificial Sequence: Synthetic oligonucleotide
  Target: ATXN2; (+) strand; PAM type: NRG; PAM sequence: GGG
gcctataatcccagcactct

SEQ ID NO: 48176 - DNA, 20 bp, Artificial Sequence
  Description of Artificial Sequence: Synthetic oligonucleotide
  Target: ATXN2; (+) strand; PAM type: NRG; PAM sequence: GAG
ctataatcccagcactctgg

SEQ ID NO: 48177 - DNA, 20 bp, Artificial Sequence
  Description of Artificial Sequence: Synthetic oligonucleotide
  Target: ATXN2; (+) strand; PAM type: NRG; PAM sequence: AGG
tataatcccagcactctggg

SEQ ID NO: 48178 - DNA, 20 bp, Artificial Sequence
  Description of Artificial Sequence: Synthetic oligonucleotide
  Target: ATXN2; (+) strand; PAM type: NRG; PAM sequence: AAG
tcccagcactctgggaggcc

SEQ ID NO: 48179 - DNA, 20 bp, Artificial Sequence
  Description of Artificial Sequence: Synthetic oligonucleotide
  Target: ATXN2; (+) strand; PAM type: NRG; PAM sequence: AGG
cccagcactctgggaggcca

SEQ ID NO: 48180 - DNA, 20 bp, Artificial Sequence
  Description of Artificial Sequence: Synthetic oligonucleotide
  Target: ATXN2; (+) strand; PAM type: NRG; PAM sequence: CAG
agcactctgggaggccaagg

SEQ ID NO: 48181 - DNA, 20 bp, Artificial Sequence
  Description of Artificial Sequence: Synthetic oligonucleotide
  Target: ATXN2; (+) strand; PAM type: NRG; PAM sequence: AGG
gcactctgggaggccaaggc

SEQ ID NO: 48182 - DNA, 20 bp, Artificial Sequence
  Description of Artificial Sequence: Synthetic oligonucleotide
  Target: ATXN2; (+) strand; PAM type: NRG; PAM sequence: GAG
actctgggaggccaaggcag

SEQ ID NO: 48183 - DNA, 20 bp, Artificial Sequence
  Description of Artificial Sequence: Synthetic oligonucleotide
  Target: ATXN2; (+) strand; PAM type: NRG; PAM sequence: AGG
ctctgggaggccaaggcagg

SEQ ID NO: 48184 - DNA, 20 bp, Artificial Sequence
  Description of Artificial Sequence: Synthetic oligonucleotide
  Target: ATXN2; (+) strand; PAM type: NRG; PAM sequence: AAG
ggccaaggcaggaggatcac

SEQ ID NO: 48185 - DNA, 20 bp, Artificial Sequence
  Description of Artificial Sequence: Synthetic oligonucleotide
  Target: ATXN2; (+) strand; PAM type: NRG; PAM sequence: AGG
gccaaggcaggaggatcaca

SEQ ID NO: 48186 - DNA, 20 bp, Artificial Sequence
  Description of Artificial Sequence: Synthetic oligonucleotide
  Target: ATXN2; (+) strand; PAM type: NRG; PAM sequence: CAG
aggcaggaggatcacaaggt

SEQ ID NO: 48187 - DNA, 20 bp, Artificial Sequence
  Description of Artificial Sequence: Synthetic oligonucleotide
  Target: ATXN2; (+) strand; PAM type: NRG; PAM sequence: AGG
ggcaggaggatcacaaggtc

SEQ ID NO: 48188 - DNA, 20 bp, Artificial Sequence
  Description of Artificial Sequence: Synthetic oligonucleotide
  Target: ATXN2; (+) strand; PAM type: NRG; PAM sequence: GAG
caggaggatcacaaggtcag

SEQ ID NO: 48189 - DNA, 20 bp, Artificial Sequence
  Description of Artificial Sequence: Synthetic oligonucleotide
  Target: ATXN2; (+) strand; PAM type: NRG; PAM sequence: AAG
gatcacaaggtcaggagttc

SEQ ID NO: 48190 - DNA, 20 bp, Artificial Sequence
  Description of Artificial Sequence: Synthetic oligonucleotide
  Target: ATXN2; (+) strand; PAM type: NRG; PAM sequence: CAG
caaggtcaggagttcaagac

SEQ ID NO: 48191 - DNA, 20 bp, Artificial Sequence
  Description of Artificial Sequence: Synthetic oligonucleotide
  Target: ATXN2; (+) strand; PAM type: NRG; PAM sequence: TGG
tcaggagttcaagaccagcc

SEQ ID NO: 48192 - DNA, 20 bp, Artificial Sequence
  Description of Artificial Sequence: Synthetic oligonucleotide
  Target: ATXN2; (+) strand; PAM type: NRG; PAM sequence: TAG
caagaccagcctggccaaca

SEQ ID NO: 48193 - DNA, 20 bp, Artificial Sequence
  Description of Artificial Sequence: Synthetic oligonucleotide
  Target: ATXN2; (+) strand; PAM type: NRG; PAM sequence: TAG
tctactaaaaatacaaaaat

SEQ ID NO: 48194 - DNA, 20 bp, Artificial Sequence
  Description of Artificial Sequence: Synthetic oligonucleotide
  Target: ATXN2; (+) strand; PAM type: NRG; PAM sequence: CGG
ctaaaaatacaaaaattagc

SEQ ID NO: 48195 - DNA, 20 bp, Artificial Sequence
  Description of Artificial Sequence: Synthetic oligonucleotide
  Target: ATXN2; (+) strand; PAM type: NRG; PAM sequence: GGG
taaaaatacaaaaattagcc

SEQ ID NO: 48196 - DNA, 20 bp, Artificial Sequence
  Description of Artificial Sequence: Synthetic oligonucleotide
  Target: ATXN2; (+) strand; PAM type: NRG; PAM sequence: TGG
atacaaaaattagccgggca

SEQ ID NO: 48197 - DNA, 20 bp, Artificial Sequence
  Description of Artificial Sequence: Synthetic oligonucleotide
  Target: ATXN2; (+) strand; PAM type: NRG; PAM sequence: TGG
caaaaattagccgggcatgg

SEQ ID NO: 48198 - DNA, 20 bp, Artificial Sequence
  Description of Artificial Sequence: Synthetic oligonucleotide
  Target: ATXN2; (+) strand; PAM type: NRG; PAM sequence: CAG
gggcatggtggcacatgcct

SEQ ID NO: 48199 - DNA, 20 bp, Artificial Sequence
  Description of Artificial Sequence: Synthetic oligonucleotide
  Target: ATXN2; (+) strand; PAM type: NRG; PAM sequence: CAG
gtggcacatgcctcagtaac

SEQ ID NO: 48200 - DNA, 20 bp, Artificial Sequence
  Description of Artificial Sequence: Synthetic oligonucleotide
  Target: ATXN2; (+) strand; PAM type: NRG; PAM sequence: CGG
tgcctcagtaaccagctact

SEQ ID NO: 48201 - DNA, 20 bp, Artificial Sequence
  Description of Artificial Sequence: Synthetic oligonucleotide
  Target: ATXN2; (+) strand; PAM type: NRG; PAM sequence: GGG
gcctcagtaaccagctactc

SEQ ID NO: 48202 - DNA, 20 bp, Artificial Sequence
  Description of Artificial Sequence: Synthetic oligonucleotide
  Target: ATXN2; (+) strand; PAM type: NRG; PAM sequence: GAG
ctcagtaaccagctactcgg

SEQ ID NO: 48203 - DNA, 20 bp, Artificial Sequence
  Description of Artificial Sequence: Synthetic oligonucleotide
  Target: ATXN2; (+) strand; PAM type: NRG; PAM sequence: AGG
tcagtaaccagctactcggg

SEQ ID NO: 48204 - DNA, 20 bp, Artificial Sequence
  Description of Artificial Sequence: Synthetic oligonucleotide
  Target: ATXN2; (+) strand; PAM type: NRG; PAM sequence: GAG
aaccagctactcgggaggct

SEQ ID NO: 48205 - DNA, 20 bp, Artificial Sequence
  Description of Artificial Sequence: Synthetic oligonucleotide
  Target: ATXN2; (+) strand; PAM type: NRG; PAM sequence: AGG
accagctactcgggaggctg

SEQ ID NO: 48206 - DNA, 20 bp, Artificial Sequence
  Description of Artificial Sequence: Synthetic oligonucleotide
  Target: ATXN2; (+) strand; PAM type: NRG; PAM sequence: AAG
gctactcgggaggctgaggc

SEQ ID NO: 48207 - DNA, 20 bp, Artificial Sequence
  Description of Artificial Sequence: Synthetic oligonucleotide
  Target: ATXN2; (+) strand; PAM type: NRG; PAM sequence: GAG
tactcgggaggctgaggcaa

SEQ ID NO: 48208 - DNA, 20 bp, Artificial Sequence
  Description of Artificial Sequence: Synthetic oligonucleotide
  Target: ATXN2; (+) strand; PAM type: NRG; PAM sequence: CAG
gcaagagaatcgcttgaacc

SEQ ID NO: 48209 - DNA, 20 bp, Artificial Sequence
  Description of Artificial Sequence: Synthetic oligonucleotide
  Target: ATXN2; (+) strand; PAM type: NRG; PAM sequence: AGG
caagagaatcgcttgaaccc

SEQ ID NO: 48210 - DNA, 20 bp, Artificial Sequence
  Description of Artificial Sequence: Synthetic oligonucleotide
  Target: ATXN2; (+) strand; PAM type: NRG; PAM sequence: GAG
agagaatcgcttgaacccag

SEQ ID NO: 48211 - DNA, 20 bp, Artificial Sequence
  Description of Artificial Sequence: Synthetic oligonucleotide
  Target: ATXN2; (+) strand; PAM type: NRG; PAM sequence: AGG
gagaatcgcttgaacccagg

SEQ ID NO: 48212 - DNA, 20 bp, Artificial Sequence
  Description of Artificial Sequence: Synthetic oligonucleotide
  Target: ATXN2; (+) strand; PAM type: NRG; PAM sequence: CAG
aatcgcttgaacccaggagg

SEQ ID NO: 48213 - DNA, 20 bp, Artificial Sequence
  Description of Artificial Sequence: Synthetic oligonucleotide
  Target: ATXN2; (+) strand; PAM type: NRG; PAM sequence: GAG
tcgcttgaacccaggaggca

SEQ ID NO: 48214 - DNA, 20 bp, Artificial Sequence
  Description of Artificial Sequence: Synthetic oligonucleotide
  Target: ATXN2; (+) strand; PAM type: NRG; PAM sequence: AGG
cgcttgaacccaggaggcag

SEQ ID NO: 48215 - DNA, 20 bp, Artificial Sequence
  Description of Artificial Sequence: Synthetic oligonucleotide
  Target: ATXN2; (+) strand; PAM type: NRG; PAM sequence: CGG
aacccaggaggcagaggttg

SEQ ID NO: 48216 - DNA, 20 bp, Artificial Sequence
  Description of Artificial Sequence: Synthetic oligonucleotide
  Target: ATXN2; (+) strand; PAM type: NRG; PAM sequence: GAG
caggaggcagaggttgcggt

SEQ ID NO: 48217 - DNA, 20 bp, Artificial Sequence
  Description of Artificial Sequence: Synthetic oligonucleotide
  Target: ATXN2; (+) strand; PAM type: NRG; PAM sequence: GAG
ggcagaggttgcggtgagcc

SEQ ID NO: 48218 - DNA, 20 bp, Artificial Sequence
  Description of Artificial Sequence: Synthetic oligonucleotide
  Target: ATXN2; (+) strand; PAM type: NRG; PAM sequence: CAG
aggttgcggtgagccgagat

SEQ ID NO: 48219 - DNA, 20 bp, Artificial Sequence
  Description of Artificial Sequence: Synthetic oligonucleotide
  Target: ATXN2; (+) strand; PAM type: NRG; PAM sequence: AGG
ggttgcggtgagccgagatc

SEQ ID NO: 48220 - DNA, 20 bp, Artificial Sequence
  Description of Artificial Sequence: Synthetic oligonucleotide
  Target: ATXN2; (+) strand; PAM type: NRG; PAM sequence: CAG
gagatcaggccactgcactc

SEQ ID NO: 48221 - DNA, 20 bp, Artificial Sequence
  Description of Artificial Sequence: Synthetic oligonucleotide
  Target: ATXN2; (+) strand; PAM type: NRG; PAM sequence: TGG
caggccactgcactccagcc

SEQ ID NO: 48222 - DNA, 20 bp, Artificial Sequence
  Description of Artificial Sequence: Synthetic oligonucleotide
  Target: ATXN2; (+) strand; PAM type: NRG; PAM sequence: GGG
aggccactgcactccagcct

SEQ ID NO: 48223 - DNA, 20 bp, Artificial Sequence
  Description of Artificial Sequence: Synthetic oligonucleotide
  Target: ATXN2; (+) strand; PAM type: NRG; PAM sequence: CAG
ctgcactccagcctgggcaa

SEQ ID NO: 48224 - DNA, 20 bp, Artificial Sequence
  Description of Artificial Sequence: Synthetic oligonucleotide
  Target: ATXN2; (+) strand; PAM type: NRG; PAM sequence: GAG
gcactccagcctgggcaaca

SEQ ID NO: 48225 - DNA, 20 bp, Artificial Sequence
  Description of Artificial Sequence: Synthetic oligonucleotide
  Target: ATXN2; (+) strand; PAM type: NRG; PAM sequence: AAG
tctccaaaaaaaaaaaaaaa

SEQ ID NO: 48226 - DNA, 20 bp, Artificial Sequence
  Description of Artificial Sequence: Synthetic oligonucleotide
  Target: ATXN2; (+) strand; PAM type: NRG; PAM sequence: GAG
tccaaaaaaaaaaaaaaaaa

SEQ ID NO: 48227 - DNA, 20 bp, Artificial Sequence
  Description of Artificial Sequence: Synthetic oligonucleotide
  Target: ATXN2; (+) strand; PAM type: NRG; PAM sequence: GAG
caaaaaaaaaaaaaaaaaga

SEQ ID NO: 48228 - DNA, 20 bp, Artificial Sequence
  Description of Artificial Sequence: Synthetic oligonucleotide
  Target: ATXN2; (+) strand; PAM type: NRG; PAM sequence: GAG
aaaaaaaaaaaaaaaagaga

SEQ ID NO: 48229 - DNA, 20 bp, Artificial Sequence
  Description of Artificial Sequence: Synthetic oligonucleotide
  Target: ATXN2; (+) strand; PAM type: NRG; PAM sequence: AAG
aaaaaaaaaaagagagagaa

SEQ ID NO: 48230 - DNA, 20 bp, Artificial Sequence
  Description of Artificial Sequence: Synthetic oligonucleotide
  Target: ATXN2; (+) strand; PAM type: NRG; PAM sequence: AAG
agagagagaaaagaaaaaat

SEQ ID NO: 48231 - DNA, 20 bp, Artificial Sequence
  Description of Artificial Sequence: Synthetic oligonucleotide
  Target: ATXN2; (+) strand; PAM type: NRG; PAM sequence: TAG
gatacctgaaattactccaa

SEQ ID NO: 48232 - DNA, 20 bp, Artificial Sequence
  Description of Artificial Sequence: Synthetic oligonucleotide
  Target: ATXN2; (+) strand; PAM type: NRG; PAM sequence: TGG
acctgaaattactccaatag

SEQ ID NO: 48233 - DNA, 20 bp, Artificial Sequence
  Description of Artificial Sequence: Synthetic oligonucleotide
  Target: ATXN2; (+) strand; PAM type: NRG; PAM sequence: AAG
caatagtggatgtcctcatc

SEQ ID NO: 48234 - DNA, 20 bp, Artificial Sequence
  Description of Artificial Sequence: Synthetic oligonucleotide
  Target: ATXN2; (+) strand; PAM type: NRG; PAM sequence: TAG
aaaactaattttgtaatata

SEQ ID NO: 48235 - DNA, 20 bp, Artificial Sequence
  Description of Artificial Sequence: Synthetic oligonucleotide
  Target: ATXN2; (+) strand; PAM type: NRG; PAM sequence: GAG
aaatacacccatccccttat

SEQ ID NO: 48236 - DNA, 20 bp, Artificial Sequence
  Description of Artificial Sequence: Synthetic oligonucleotide
  Target: ATXN2; (+) strand; PAM type: NRG; PAM sequence: TAG
tacacccatccccttatgag

SEQ ID NO: 48237 - DNA, 20 bp, Artificial Sequence
  Description of Artificial Sequence: Synthetic oligonucleotide
  Target: ATXN2; (+) strand; PAM type: NRG; PAM sequence: GAG
cacccatccccttatgagta

SEQ ID NO: 48238 - DNA, 20 bp, Artificial Sequence
  Description of Artificial Sequence: Synthetic oligonucleotide
  Target: ATXN2; (+) strand; PAM type: NRG; PAM sequence: GAG
catccccttatgagtagagt

SEQ ID NO: 48239 - DNA, 20 bp, Artificial Sequence
  Description of Artificial Sequence: Synthetic oligonucleotide
  Target: ATXN2; (+) strand; PAM type: NRG; PAM sequence: AAG
tgagtagagtgagattttca

SEQ ID NO: 48240 - DNA, 20 bp, Artificial Sequence
  Description of Artificial Sequence: Synthetic oligonucleotide
  Target: ATXN2; (+) strand; PAM type: NRG; PAM sequence: GAG
ataatgaactaaaattatct

SEQ ID NO: 48241 - DNA, 20 bp, Artificial Sequence
  Description of Artificial Sequence: Synthetic oligonucleotide
  Target: ATXN2; (+) strand; PAM type: NRG; PAM sequence: AAG
ctaaaattatctgagaaatg

SEQ ID NO: 48242 - DNA, 20 bp, Artificial Sequence
  Description of Artificial Sequence: Synthetic oligonucleotide
  Target: ATXN2; (+) strand; PAM type: NRG; PAM sequence: AAG
tgagaaatgaagatctaata

SEQ ID NO: 48243 - DNA, 20 bp, Artificial Sequence
  Description of Artificial Sequence: Synthetic oligonucleotide
  Target: ATXN2; (+) strand; PAM type: NRG; PAM sequence: AAG
atttaatgacattaattttg

SEQ ID NO: 48244 - DNA, 20 bp, Artificial Sequence
  Description of Artificial Sequence: Synthetic oligonucleotide
  Target: ATXN2; (+) strand; PAM type: NRG; PAM sequence: GAG
ttaatgacattaattttgaa

SEQ ID NO: 48245 - DNA, 20 bp, Artificial Sequence
  Description of Artificial Sequence: Synthetic oligonucleotide
  Target: ATXN2; (+) strand; PAM type: NRG; PAM sequence: AGG
taatgacattaattttgaag

SEQ ID NO: 48246 - DNA, 20 bp, Artificial Sequence
  Description of Artificial Sequence: Synthetic oligonucleotide
  Target: ATXN2; (+) strand; PAM type: NRG; PAM sequence: GAG
atgacattaattttgaagag

SEQ ID NO: 48247 - DNA, 20 bp, Artificial Sequence
  Description of Artificial Sequence: Synthetic oligonucleotide
  Target: ATXN2; (+) strand; PAM type: NRG; PAM sequence: AAG
cattaattttgaagaggagc

SEQ ID NO: 48248 - DNA, 20 bp, Artificial Sequence
  Description of Artificial Sequence: Synthetic oligonucleotide
  Target: ATXN2; (+) strand; PAM type: NRG; PAM sequence: AGG
attaattttgaagaggagca

SEQ ID NO: 48249 - DNA, 20 bp, Artificial Sequence
  Description of Artificial Sequence: Synthetic oligonucleotide
  Target: ATXN2; (+) strand; PAM type: NRG; PAM sequence: TGG
ttttgaagaggagcaaggaa

SEQ ID NO: 48250 - DNA, 20 bp, Artificial Sequence
  Description of Artificial Sequence: Synthetic oligonucleotide
  Target: ATXN2; (+) strand; PAM type: NRG; PAM sequence: AAG
ggactatcacaaacatctca

SEQ ID NO: 48251 - DNA, 20 bp, Artificial Sequence
  Description of Artificial Sequence: Synthetic oligonucleotide
  Target: ATXN2; (+) strand; PAM type: NRG; PAM sequence: TGG
aatattcactcttccacatt

SEQ ID NO: 48252 - DNA, 20 bp, Artificial Sequence
  Description of Artificial Sequence: Synthetic oligonucleotide
  Target: ATXN2; (+) strand; PAM type: NRG; PAM sequence: GGG
atattcactcttccacattt

SEQ ID NO: 48253 - DNA, 20 bp, Artificial Sequence
  Description of Artificial Sequence: Synthetic oligonucleotide
  Target: ATXN2; (+) strand; PAM type: NRG; PAM sequence: AAG
caattcatcataaaaacaaa

SEQ ID NO: 48254 - DNA, 20 bp, Artificial Sequence
  Description of Artificial Sequence: Synthetic oligonucleotide
  Target: ATXN2; (+) strand; PAM type: NRG; PAM sequence: TGG
aagacaatgcataccgtaaa

SEQ ID NO: 48255 - DNA, 20 bp, Artificial Sequence
  Description of Artificial Sequence: Synthetic oligonucleotide
  Target: ATXN2; (+) strand; PAM type: NRG; PAM sequence: TGG
taaatggctgttaaatgacc

SEQ ID NO: 48256 - DNA, 20 bp, Artificial Sequence
  Description of Artificial Sequence: Synthetic oligonucleotide
  Target: ATXN2; (+) strand; PAM type: NRG; PAM sequence: TAG
ttaaatgacctggtatccaa

SEQ ID NO: 48257 - DNA, 20 bp, Artificial Sequence
  Description of Artificial Sequence: Synthetic oligonucleotide
  Target: ATXN2; (+) strand; PAM type: NRG; PAM sequence: GAG
aaatgacctggtatccaata

SEQ ID NO: 48258 - DNA, 20 bp, Artificial Sequence
  Description of Artificial Sequence: Synthetic oligonucleotide
  Target: ATXN2; (+) strand; PAM type: NRG; PAM sequence: TAG
tgacctggtatccaatagag

SEQ ID NO: 48259 - DNA, 20 bp, Artificial Sequence
  Description of Artificial Sequence: Synthetic oligonucleotide
  Target: ATXN2; (+) strand; PAM type: NRG; PAM sequence: AGG
gacctggtatccaatagagt

SEQ ID NO: 48260 - DNA, 20 bp, Artificial Sequence
  Description of Artificial Sequence: Synthetic oligonucleotide
  Target: ATXN2; (+) strand; PAM type: NRG; PAM sequence: GGG
acctggtatccaatagagta

SEQ ID NO: 48261 - DNA, 20 bp, Artificial Sequence
  Description of Artificial Sequence: Synthetic oligonucleotide
  Target: ATXN2; (+) strand; PAM type: NRG; PAM sequence: TGG
gggaacctttttttttgttg

SEQ ID NO: 48262 - DNA, 20 bp, Artificial Sequence
  Description of Artificial Sequence: Synthetic oligonucleotide
  Target: ATXN2; (+) strand; PAM type: NRG; PAM sequence: CAG
gttgtggccaatactctttc

SEQ ID NO: 48263 - DNA, 20 bp, Artificial Sequence
  Description of Artificial Sequence: Synthetic oligonucleotide
  Target: ATXN2; (+) strand; PAM type: NRG; PAM sequence: GAG
tgtggccaatactctttcca

SEQ ID NO: 48264 - DNA, 20 bp, Artificial Sequence
  Description of Artificial Sequence: Synthetic oligonucleotide
  Target: ATXN2; (+) strand; PAM type: NRG; PAM sequence: AAG
aactaaaattttatcttcca

SEQ ID NO: 48265 - DNA, 20 bp, Artificial Sequence
  Description of Artificial Sequence: Synthetic oligonucleotide
  Target: ATXN2; (+) strand; PAM type: NRG; PAM sequence: CAG
gtcaatttttgaatttataa

SEQ ID NO: 48266 - DNA, 20 bp, Artificial Sequence
  Description of Artificial Sequence: Synthetic oligonucleotide
  Target: ATXN2; (+) strand; PAM type: NRG; PAM sequence: GAG
caatttttgaatttataaca

SEQ ID NO: 48267 - DNA, 20 bp, Artificial Sequence
  Description of Artificial Sequence: Synthetic oligonucleotide
  Target: ATXN2; (+) strand; PAM type: NRG; PAM sequence: AGG
aatttttgaatttataacag

SEQ ID NO: 48268 - DNA, 20 bp, Artificial Sequence
  Description of Artificial Sequence: Synthetic oligonucleotide
  Target: ATXN2; (+) strand; PAM type: NRG; PAM sequence: TAG
ataacagaggaatatttcaa

SEQ ID NO: 48269 - DNA, 20 bp, Artificial Sequence
  Description of Artificial Sequence: Synthetic oligonucleotide
  Target: ATXN2; (+) strand; PAM type: NRG; PAM sequence: AAG
gaggaatatttcaatagtat

SEQ ID NO: 48270 - DNA, 20 bp, Artificial Sequence
  Description of Artificial Sequence: Synthetic oligonucleotide
  Target: ATXN2; (+) strand; PAM type: NRG; PAM sequence: TAG
tagtataagtataaataatt

SEQ ID NO: 48271 - DNA, 20 bp, Artificial Sequence
  Description of Artificial Sequence: Synthetic oligonucleotide
  Target: ATXN2; (+) strand; PAM type: NRG; PAM sequence: TAG
tataaataatttagtgctcc

SEQ ID NO: 48272 - DNA, 20 bp, Artificial Sequence
  Description of Artificial Sequence: Synthetic oligonucleotide
  Target: ATXN2; (+) strand; PAM type: NRG; PAM sequence: AAG
cataaacaaaatcaactcca

SEQ ID NO: 48273 - DNA, 20 bp, Artificial Sequence
  Description of Artificial Sequence: Synthetic oligonucleotide
  Target: ATXN2; (+) strand; PAM type: NRG; PAM sequence: AGG
ataaacaaaatcaactccaa

SEQ ID NO: 48274 - DNA, 20 bp, Artificial Sequence
  Description of Artificial Sequence: Synthetic oligonucleotide
  Target: ATXN2; (+) strand; PAM type: NRG; PAM sequence: TAG
aacaaaatcaactccaaagg

SEQ ID NO: 48275 - DNA, 20 bp, Artificial Sequence
  Description of Artificial Sequence: Synthetic oligonucleotide
  Target: ATXN2; (+) strand; PAM type: NRG; PAM sequence: CAG
aaaatcaactccaaaggtag

SEQ ID NO: 48276 - DNA, 20 bp, Artificial Sequence
  Description of Artificial Sequence: Synthetic oligonucleotide
  Target: ATXN2; (+) strand; PAM type: NRG; PAM sequence: AAG
ccaaaggtagcagctaaaaa

SEQ ID NO: 48277 - DNA, 20 bp, Artificial Sequence
  Description of Artificial Sequence: Synthetic oligonucleotide
  Target: ATXN2; (+) strand; PAM type: NRG; PAM sequence: TGG
aaaagacttgtttccttgta

SEQ ID NO: 48278 - DNA, 20 bp, Artificial Sequence
  Description of Artificial Sequence: Synthetic oligonucleotide
  Target: ATXN2; (+) strand; PAM type: NRG; PAM sequence: GGG
aaagacttgtttccttgtat

SEQ ID NO: 48279 - DNA, 20 bp, Artificial Sequence
  Description of Artificial Sequence: Synthetic oligonucleotide
  Target: ATXN2; (+) strand; PAM type: NRG; PAM sequence: AAG
tttccttgtatgggatgctg

SEQ ID NO: 48280 - DNA, 20 bp, Artificial Sequence
  Description of Artificial Sequence: Synthetic oligonucleotide
  Target: ATXN2; (+) strand; PAM type: NRG; PAM sequence: AGG
ttccttgtatgggatgctga

SEQ ID NO: 48281 - DNA, 20 bp, Artificial Sequence
  Description of Artificial Sequence: Synthetic oligonucleotide
  Target: ATXN2; (+) strand; PAM type: NRG; PAM sequence: AAG
tgggatgctgaaggcctctt

SEQ ID NO: 48282 - DNA, 20 bp, Artificial Sequence
  Description of Artificial Sequence: Synthetic oligonucleotide
  Target: ATXN2; (+) strand; PAM type: NRG; PAM sequence: AAG
tgaaggcctcttaagacaaa

SEQ ID NO: 48283 - DNA, 20 bp, Artificial Sequence
  Description of Artificial Sequence: Synthetic oligonucleotide
  Target: ATXN2; (+) strand; PAM type: NRG; PAM sequence: AAG
agacaaaaagttgtgaatca

SEQ ID NO: 48284 - DNA, 20 bp, Artificial Sequence
  Description of Artificial Sequence: Synthetic oligonucleotide
  Target: ATXN2; (+) strand; PAM type: NRG; PAM sequence: AAG
aaaagttgtgaatcaaagac

SEQ ID NO: 48285 - DNA, 20 bp, Artificial Sequence
  Description of Artificial Sequence: Synthetic oligonucleotide
  Target: ATXN2; (+) strand; PAM type: NRG; PAM sequence: AGG
aaagttgtgaatcaaagaca

SEQ ID NO: 48286 - DNA, 20 bp, Artificial Sequence
  Description of Artificial Sequence: Synthetic oligonucleotide
  Target: ATXN2; (+) strand; PAM type: NRG; PAM sequence: GAG
aatcaaagacaaggacattt

SEQ ID NO: 48287 - DNA, 20 bp, Artificial Sequence
  Description of Artificial Sequence: Synthetic oligonucleotide
  Target: ATXN2; (+) strand; PAM type: NRG; PAM sequence: AAG
caaagacaaggacatttgag

SEQ ID NO: 48288 - DNA, 20 bp, Artificial Sequence
  Description of Artificial Sequence: Synthetic oligonucleotide
  Target: ATXN2; (+) strand; PAM type: NRG; PAM sequence: CAG
catttgagaagattcaaaaa

SEQ ID NO: 48289 - DNA, 20 bp, Artificial Sequence
  Description of Artificial Sequence: Synthetic oligonucleotide
  Target: ATXN2; (+) strand; PAM type: NRG; PAM sequence: CAG
acagaacactgtgctttcat

SEQ ID NO: 48290 - DNA, 20 bp, Artificial Sequence
  Description of Artificial Sequence: Synthetic oligonucleotide
  Target: ATXN2; (+) strand; PAM type: NRG; PAM sequence: AAG
tgtgctttcatcagcatatc

SEQ ID NO: 48291 - DNA, 20 bp, Artificial Sequence
  Description of Artificial Sequence: Synthetic oligonucleotide
  Target: ATXN2; (+) strand; PAM type: NRG; PAM sequence: CAG
ctttcatcagcatatcaaga

SEQ ID NO: 48292 - DNA, 20 bp, Artificial Sequence
  Description of Artificial Sequence: Synthetic oligonucleotide
  Target: ATXN2; (+) strand; PAM type: NRG; PAM sequence: AAG
tcagcatatcaagacagtta

SEQ ID NO: 48293 - DNA, 20 bp, Artificial Sequence
  Description of Artificial Sequence: Synthetic oligonucleotide
  Target: ATXN2; (+) strand; PAM type: NRG; PAM sequence: CAG
caagacagttaaagaatacc

SEQ ID NO: 48294 - DNA, 20 bp, Artificial Sequence
  Description of Artificial Sequence: Synthetic oligonucleotide
  Target: ATXN2; (+) strand; PAM type: NRG; PAM sequence: TAG
taaagaatacccagtactgt

SEQ ID NO: 48295 - DNA, 20 bp, Artificial Sequence
  Description of Artificial Sequence: Synthetic oligonucleotide
  Target: ATXN2; (+) strand; PAM type: NRG; PAM sequence: AAG
agtactgttagcctctgaaa

SEQ ID NO: 48296 - DNA, 20 bp, Artificial Sequence
  Description of Artificial Sequence: Synthetic oligonucleotide
  Target: ATXN2; (+) strand; PAM type: NRG; PAM sequence: AAG
ctgttagcctctgaaaaagc

SEQ ID NO: 48297 - DNA, 20 bp, Artificial Sequence
  Description of Artificial Sequence: Synthetic oligonucleotide
  Target: ATXN2; (+) strand; PAM type: NRG; PAM sequence: AAG
agcctctgaaaaagcaagca

SEQ ID NO: 48298 - DNA, 20 bp, Artificial Sequence
  Description of Artificial Sequence: Synthetic oligonucleotide
  Target: ATXN2; (+) strand; PAM type: NRG; PAM sequence: GAG
cctctgaaaaagcaagcaaa

SEQ ID NO: 48299 - DNA, 20 bp, Artificial Sequence
  Description of Artificial Sequence: Synthetic oligonucleotide
  Target: ATXN2; (+) strand; PAM type: NRG; PAM sequence: AAG
tgaaaaagcaagcaaagaga

SEQ ID NO: 48300 - DNA, 20 bp, Artificial Sequence
  Description of Artificial Sequence: Synthetic oligonucleotide
  Target: ATXN2; (+) strand; PAM type: NRG; PAM sequence: AAG
aagcaaagagaaagactcct

SEQ ID NO: 48301 - DNA, 20 bp, Artificial Sequence
  Description of Artificial Sequence: Synthetic oligonucleotide
  Target: ATXN2; (+) strand; PAM type: NRG; PAM sequence: AAG
agagaaagactcctaagtct

SEQ ID NO: 48302 - DNA, 20 bp, Artificial Sequence
  Description of Artificial Sequence: Synthetic oligonucleotide
  Target: ATXN2; (+) strand; PAM type: NRG; PAM sequence: GAG
agaaagactcctaagtctaa

SEQ ID NO: 48303 - DNA, 20 bp, Artificial Sequence
  Description of Artificial Sequence: Synthetic oligonucleotide
  Target: ATXN2; (+) strand; PAM type: NRG; PAM sequence: AAG
agactcctaagtctaagaga

SEQ ID NO: 48304 - DNA, 20 bp, Artificial Sequence
  Description of Artificial Sequence: Synthetic oligonucleotide
  Target: ATXN2; (+) strand; PAM type: NRG; PAM sequence: TGG
aagtctaagagaaagaatcc

SEQ ID NO: 48305 - DNA, 20 bp, Artificial Sequence
  Description of Artificial Sequence: Synthetic oligonucleotide
  Target: ATXN2; (+) strand; PAM type: NRG; PAM sequence: AAG
cctggtatattattatttcc

SEQ ID NO: 48306 - DNA, 20 bp, Artificial Sequence
  Description of Artificial Sequence: Synthetic oligonucleotide
  Target: ATXN2; (+) strand; PAM type: NRG; PAM sequence: CAG
atattattatttccaagtaa

SEQ ID NO: 48307 - DNA, 20 bp, Artificial Sequence
  Description of Artificial Sequence: Synthetic oligonucleotide
  Target: ATXN2; (+) strand; PAM type: NRG; PAM sequence: TAG
attatttccaagtaacagtg

SEQ ID NO: 48308 - DNA, 20 bp, Artificial Sequence
  Description of Artificial Sequence: Synthetic oligonucleotide
  Target: ATXN2; (+) strand; PAM type: NRG; PAM sequence: AAG
atttccaagtaacagtgtag

SEQ ID NO: 48309 - DNA, 20 bp, Artificial Sequence
  Description of Artificial Sequence: Synthetic oligonucleotide
  Target: ATXN2; (+) strand; PAM type: NRG; PAM sequence: CAG
aagtaacagtgtagaagaat

SEQ ID NO: 48310 - DNA, 20 bp, Artificial Sequence
  Description of Artificial Sequence: Synthetic oligonucleotide
  Target: ATXN2; (+) strand; PAM type: NRG; PAM sequence: CAG
aatcagcccaacaataaaaa

SEQ ID NO: 48311 - DNA, 20 bp, Artificial Sequence
  Description of Artificial Sequence: Synthetic oligonucleotide
  Target: ATXN2; (+) strand; PAM type: NRG; PAM sequence: TGG
ccaacaataaaaacagcttt

SEQ ID NO: 48312 - DNA, 20 bp, Artificial Sequence
  Description of Artificial Sequence: Synthetic oligonucleotide
  Target: ATXN2; (+) strand; PAM type: NRG; PAM sequence: TAG
aataaaaacagcttttggta

SEQ ID NO: 48313 - DNA, 20 bp, Artificial Sequence
  Description of Artificial Sequence: Synthetic oligonucleotide
  Target: ATXN2; (+) strand; PAM type: NRG; PAM sequence: TAG
gcttttggtatagatttgaa

SEQ ID NO: 48314 - DNA, 20 bp, Artificial Sequence
  Description of Artificial Sequence: Synthetic oligonucleotide
  Target: ATXN2; (+) strand; PAM type: NRG; PAM sequence: CAG
tactgaactacaatttacaa

SEQ ID NO: 48315 - DNA, 20 bp, Artificial Sequence
  Description of Artificial Sequence: Synthetic oligonucleotide
  Target: ATXN2; (+) strand; PAM type: NRG; PAM sequence: CAG
cagaattacgtatttcacta

SEQ ID NO: 48316 - DNA, 20 bp, Artificial Sequence
  Description of Artificial Sequence: Synthetic oligonucleotide
  Target: ATXN2; (+) strand; PAM type: NRG; PAM sequence: TGG
acgtatttcactacagaatt

SEQ ID NO: 48317 - DNA, 20 bp, Artificial Sequence
  Description of Artificial Sequence: Synthetic oligonucleotide
  Target: ATXN2; (+) strand; PAM type: NRG; PAM sequence: AAG
tggcatatacaaataaataa

SEQ ID NO: 48318 - DNA, 20 bp, Artificial Sequence
  Description of Artificial Sequence: Synthetic oligonucleotide
  Target: ATXN2; (+) strand; PAM type: NRG; PAM sequence: TAG
acaaataaataaaagaattt

SEQ ID NO: 48319 - DNA, 20 bp, Artificial Sequence
  Description of Artificial Sequence: Synthetic oligonucleotide
  Target: ATXN2; (+) strand; PAM type: NRG; PAM sequence: CGG
aaataaaagaattttagaac

SEQ ID NO: 48320 - DNA, 20 bp, Artificial Sequence
  Description of Artificial Sequence: Synthetic oligonucleotide
  Target: ATXN2; (+) strand; PAM type: NRG; PAM sequence: TGG
aaaagaattttagaaccggc

SEQ ID NO: 48321 - DNA, 20 bp, Artificial Sequence
  Description of Artificial Sequence: Synthetic oligonucleotide
  Target: ATXN2; (+) strand; PAM type: NRG; PAM sequence: GGG
aaagaattttagaaccggct

SEQ ID NO: 48322 - DNA, 20 bp, Artificial Sequence
  Description of Artificial Sequence: Synthetic oligonucleotide
  Target: ATXN2; (+) strand; PAM type: NRG; PAM sequence: CAG
attttagaaccggctgggtg

SEQ ID NO: 48323 - DNA, 20 bp, Artificial Sequence
  Description of Artificial Sequence: Synthetic oligonucleotide
  Target: ATXN2; (+) strand; PAM type: NRG; PAM sequence: TGG
ttagaaccggctgggtgcag

SEQ ID NO: 48324 - DNA, 20 bp, Artificial Sequence
  Description of Artificial Sequence: Synthetic oligonucleotide
  Target: ATXN2; (+) strand; PAM type: NRG; PAM sequence: CAG
gtggctcatgcctgtaattc

SEQ ID NO: 48325 - DNA, 20 bp, Artificial Sequence
  Description of Artificial Sequence: Synthetic oligonucleotide
  Target: ATXN2; (+) strand; PAM type: NRG; PAM sequence: TGG
tgcctgtaattccagcactt

SEQ ID NO: 48326 - DNA, 20 bp, Artificial Sequence
  Description of Artificial Sequence: Synthetic oligonucleotide
  Target: ATXN2; (+) strand; PAM type: NRG; PAM sequence: GGG
gcctgtaattccagcacttt

SEQ ID NO: 48327 - DNA, 20 bp, Artificial Sequence
  Description of Artificial Sequence: Synthetic oligonucleotide
  Target: ATXN2; (+) strand; PAM type: NRG; PAM sequence: GAG
ctgtaattccagcactttgg

SEQ ID NO: 48328 - DNA, 20 bp, Artificial Sequence
  Description of Artificial Sequence: Synthetic oligonucleotide
  Target: ATXN2; (+) strand; PAM type: NRG; PAM sequence: AGG
tgtaattccagcactttggg

SEQ ID NO: 48329 - DNA, 20 bp, Artificial Sequence
  Description of Artificial Sequence: Synthetic oligonucleotide
  Target: ATXN2; (+) strand; PAM type: NRG; PAM sequence: GAG
ttccagcactttgggaggcc

SEQ ID NO: 48330 - DNA, 20 bp, Artificial Sequence
  Description of Artificial Sequence: Synthetic oligonucleotide
  Target: ATXN2; (+) strand; PAM type: NRG; PAM sequence: AGG
tccagcactttgggaggccg

SEQ ID NO: 48331 - DNA, 20 bp, Artificial Sequence
  Description of Artificial Sequence: Synthetic oligonucleotide
  Target: ATXN2; (+) strand; PAM type: NRG; PAM sequence: CGG
agcactttgggaggccgagg

SEQ ID NO: 48332 - DNA, 20 bp, Artificial Sequence
  Description of Artificial Sequence: Synthetic oligonucleotide
  Target: ATXN2; (+) strand; PAM type: NRG; PAM sequence: GGG
gcactttgggaggccgaggc

SEQ ID NO: 48333 - DNA, 20 bp, Artificial Sequence
  Description of Artificial Sequence: Synthetic oligonucleotide
  Target: ATXN2; (+) strand; PAM type: NRG; PAM sequence: CGG
ctttgggaggccgaggcggg

SEQ ID NO: 48334 - DNA, 20 bp, Artificial Sequence
  Description of Artificial Sequence: Synthetic oligonucleotide
  Target: ATXN2; (+) strand; PAM type: NRG; PAM sequence: GAG
ggccgaggcgggcggatcac

SEQ ID NO: 48335 - DNA, 20 bp, Artificial Sequence
  Description of Artificial Sequence: Synthetic oligonucleotide
  Target: ATXN2; (+) strand; PAM type: NRG; PAM sequence: AGG
gccgaggcgggcggatcacg

SEQ ID NO: 48336 - DNA, 20 bp, Artificial Sequence
  Description of Artificial Sequence: Synthetic oligonucleotide
  Target: ATXN2; (+) strand; PAM type: NRG; PAM sequence: GAG
gatcacgaggtcaaacaatc

SEQ ID NO: 48337 - DNA, 20 bp, Artificial Sequence
  Description of Artificial Sequence: Synthetic oligonucleotide
  Target: ATXN2; (+) strand; PAM type: NRG; PAM sequence: TGG
tcaaacaatcgagaccatcc

SEQ ID NO: 48338 - DNA, 20 bp, Artificial Sequence
  Description of Artificial Sequence: Synthetic oligonucleotide
  Target: ATXN2; (+) strand; PAM type: NRG; PAM sequence: TGG
cgagaccatcctggccaaca

SEQ ID NO: 48339 - DNA, 20 bp, Artificial Sequence
  Description of Artificial Sequence: Synthetic oligonucleotide
  Target: ATXN2; (+) strand; PAM type: NRG; PAM sequence: TAG
tctacaaaaaatacaaaaat

SEQ ID NO: 48340 - DNA, 20 bp, Artificial Sequence
  Description of Artificial Sequence: Synthetic oligonucleotide
  Target: ATXN2; (+) strand; PAM type: NRG; PAM sequence: TGG
aaaaaatacaaaaattagct

SEQ ID NO: 48341 - DNA, 20 bp, Artificial Sequence
  Description of Artificial Sequence: Synthetic oligonucleotide
  Target: ATXN2; (+) strand; PAM type: NRG; PAM sequence: TGG
atacaaaaattagcttggtg

SEQ ID NO: 48342 - DNA, 20 bp, Artificial Sequence
  Description of Artificial Sequence: Synthetic oligonucleotide
  Target: ATXN2; (+) strand; PAM type: NRG; PAM sequence: TGG
caaaaattagcttggtgtgg

SEQ ID NO: 48343 - DNA, 20 bp, Artificial Sequence
  Description of Artificial Sequence: Synthetic oligonucleotide
  Target: ATXN2; (+) strand; PAM type: NRG; PAM sequence: TAG
ggtgtggtggcacacgcctg

SEQ ID NO: 48344 - DNA, 20 bp, Artificial Sequence
  Description of Artificial Sequence: Synthetic oligonucleotide
  Target: ATXN2; (+) strand; PAM type: NRG; PAM sequence: CAG
gtggcacacgcctgtagtcc

SEQ ID NO: 48345 - DNA, 20 bp, Artificial Sequence
  Description of Artificial Sequence: Synthetic oligonucleotide
  Target: ATXN2; (+) strand; PAM type: NRG; PAM sequence: CAG
cgcctgtagtcccagctact

SEQ ID NO: 48346 - DNA, 20 bp, Artificial Sequence
  Description of Artificial Sequence: Synthetic oligonucleotide
  Target: ATXN2; (+) strand; PAM type: NRG; PAM sequence: AGG
gcctgtagtcccagctactc

SEQ ID NO: 48347 - DNA, 20 bp, Artificial Sequence
  Description of Artificial Sequence: Synthetic oligonucleotide
  Target: ATXN2; (+) strand; PAM type: NRG; PAM sequence: GAG
ctgtagtcccagctactcag

SEQ ID NO: 48348 - DNA, 20 bp, Artificial Sequence
  Description of Artificial Sequence: Synthetic oligonucleotide
  Target: ATXN2; (+) strand; PAM type: NRG; PAM sequence: AGG
tgtagtcccagctactcagg

SEQ ID NO: 48349 - DNA, 20 bp, Artificial Sequence
  Description of Artificial Sequence: Synthetic oligonucleotide
  Target: ATXN2; (+) strand; PAM type: NRG; PAM sequence: GAG
tcccagctactcaggaggct

SEQ ID NO: 48350 - DNA, 20 bp, Artificial Sequence
  Description of Artificial Sequence: Synthetic oligonucleotide
  Target: ATXN2; (+) strand; PAM type: NRG; PAM sequence: AGG
cccagctactcaggaggctg

SEQ ID NO: 48351 - DNA, 20 bp, Artificial Sequence
  Description of Artificial Sequence: Synthetic oligonucleotide
  Target: ATXN2; (+) strand; PAM type: NRG; PAM sequence: CAG
agctactcaggaggctgagg

SEQ ID NO: 48352 - DNA, 20 bp, Artificial Sequence
  Description of Artificial Sequence: Synthetic oligonucleotide
  Target: ATXN2; (+) strand; PAM type: NRG; PAM sequence: AGG
gctactcaggaggctgaggc

SEQ ID NO: 48353 - DNA, 20 bp, Artificial Sequence
  Description of Artificial Sequence: Synthetic oligonucleotide
  Target: ATXN2; (+) strand; PAM type: NRG; PAM sequence: GAG
tactcaggaggctgaggcag

SEQ ID NO: 48354 - DNA, 20 bp, Artificial Sequence
  Description of Artificial Sequence: Synthetic oligonucleotide
  Target: ATXN2; (+) strand; PAM type: NRG; PAM sequence: TGG
gcaggagaatcgcttgaacc

SEQ ID NO: 48355 - DNA, 20 bp, Artificial Sequence
  Description of Artificial Sequence: Synthetic oligonucleotide
  Target: ATXN2; (+) strand; PAM type: NRG; PAM sequence: GGG
caggagaatcgcttgaacct

SEQ ID NO: 48356 - DNA, 20 bp, Artificial Sequence
  Description of Artificial Sequence: Synthetic oligonucleotide
  Target: ATXN2; (+) strand; PAM type: NRG; PAM sequence: GAG
ggagaatcgcttgaacctgg

SEQ ID NO: 48357 - DNA, 20 bp, Artificial Sequence
  Description of Artificial Sequence: Synthetic oligonucleotide
  Target: ATXN2; (+) strand; PAM type: NRG; PAM sequence: AGG
gagaatcgcttgaacctggg

SEQ ID NO: 48358 - DNA, 20 bp, Artificial Sequence
  Description of Artificial Sequence: Synthetic oligonucleotide
  Target: ATXN2; (+) strand; PAM type: NRG; PAM sequence: CAG
aatcgcttgaacctgggagg

SEQ ID NO: 48359 - DNA, 20 bp, Artificial Sequence
  Description of Artificial Sequence: Synthetic oligonucleotide
  Target: ATXN2; (+) strand; PAM type: NRG; PAM sequence: GAG
tcgcttgaacctgggaggca

SEQ ID NO: 48360 - DNA, 20 bp, Artificial Sequence
  Description of Artificial Sequence: Synthetic oligonucleotide
  Target: ATXN2; (+) strand; PAM type: NRG; PAM sequence: AGG
cgcttgaacctgggaggcag

SEQ ID NO: 48361 - DNA, 20 bp, Artificial Sequence
  Description of Artificial Sequence: Synthetic oligonucleotide
  Target: ATXN2; (+) strand; PAM type: NRG; PAM sequence: CAG
aacctgggaggcagaggctg

SEQ ID NO: 48362 - DNA, 20 bp, Artificial Sequence
  Description of Artificial Sequence: Synthetic oligonucleotide
  Target: ATXN2; (+) strand; PAM type: NRG; PAM sequence: GAG
tgggaggcagaggctgcagt

SEQ ID NO: 48363 - DNA, 20 bp, Artificial Sequence
  Description of Artificial Sequence: Synthetic oligonucleotide
  Target: ATXN2; (+) strand; PAM type: NRG; PAM sequence: GAG
ggcagaggctgcagtgagcc

SEQ ID NO: 48364 - DNA, 20 bp, Artificial Sequence
  Description of Artificial Sequence: Synthetic oligonucleotide
  Target: ATXN2; (+) strand; PAM type: NRG; PAM sequence: CAG
tcgtgccactgcactccacc

SEQ ID NO: 48365 - DNA, 20 bp, Artificial Sequence
  Description of Artificial Sequence: Synthetic oligonucleotide
  Target: ATXN2; (+) strand; PAM type: NRG; PAM sequence: AGG
cgtgccactgcactccaccc

SEQ ID NO: 48366 - DNA, 20 bp, Artificial Sequence
  Description of Artificial Sequence: Synthetic oligonucleotide
  Target: ATXN2; (+) strand; PAM type: NRG; PAM sequence: GGG
gtgccactgcactccaccca

SEQ ID NO: 48367 - DNA, 20 bp, Artificial Sequence
  Description of Artificial Sequence: Synthetic oligonucleotide
  Target: ATXN2; (+) strand; PAM type: NRG; PAM sequence: GGG
tgccactgcactccacccag

SEQ ID NO: 48368 - DNA, 20 bp, Artificial Sequence
  Description of Artificial Sequence: Synthetic oligonucleotide
  Target: ATXN2; (+) strand; PAM type: NRG; PAM sequence: CAG
actgcactccacccagggga

SEQ ID NO: 48369 - DNA, 20 bp, Artificial Sequence
  Description of Artificial Sequence: Synthetic oligonucleotide
  Target: ATXN2; (+) strand; PAM type: NRG; PAM sequence: AAG
ctccacccaggggacagaac

SEQ ID NO: 48370 - DNA, 20 bp, Artificial Sequence
  Description of Artificial Sequence: Synthetic oligonucleotide
  Target: ATXN2; (+) strand; PAM type: NRG; PAM sequence: AAG
gtctcaaaaaaaaaaaaaaa

SEQ ID NO: 48371 - DNA, 20 bp, Artificial Sequence
  Description of Artificial Sequence: Synthetic oligonucleotide
  Target: ATXN2; (+) strand; PAM type: NRG; PAM sequence: GAG
aaaaaaaaaaaaaagaattt

SEQ ID NO: 48372 - DNA, 20 bp, Artificial Sequence
  Description of Artificial Sequence: Synthetic oligonucleotide
  Target: ATXN2; (+) strand; PAM type: NRG; PAM sequence: AAG
aaaaaaagaatttgagaacc

SEQ ID NO: 48373 - DNA, 20 bp, Artificial Sequence
  Description of Artificial Sequence: Synthetic oligonucleotide
  Target: ATXN2; (+) strand; PAM type: NRG; PAM sequence: CAG
aagaatttgagaaccaagtt

SEQ ID NO: 48374 - DNA, 20 bp, Artificial Sequence
  Description of Artificial Sequence: Synthetic oligonucleotide
  Target: ATXN2; (+) strand; PAM type: NRG; PAM sequence: AGG
agaatttgagaaccaagttc

SEQ ID NO: 48375 - DNA, 20 bp, Artificial Sequence
  Description of Artificial Sequence: Synthetic oligonucleotide
  Target: ATXN2; (+) strand; PAM type: NRG; PAM sequence: CAG
gaaccaagttcaggattgcc

SEQ ID NO: 48376 - DNA, 20 bp, Artificial Sequence
  Description of Artificial Sequence: Synthetic oligonucleotide
  Target: ATXN2; (+) strand; PAM type: NRG; PAM sequence: AAG
ccaagttcaggattgcccag

SEQ ID NO: 48377 - DNA, 20 bp, Artificial Sequence
  Description of Artificial Sequence: Synthetic oligonucleotide
  Target: ATXN2; (+) strand; PAM type: NRG; PAM sequence: GAG
ctcaataatgccttgcaaat

SEQ ID NO: 48378 - DNA, 20 bp, Artificial Sequence
  Description of Artificial Sequence: Synthetic oligonucleotide
  Target: ATXN2; (+) strand; PAM type: NRG; PAM sequence: CAG
aatgccttgcaaatgagtaa

SEQ ID NO: 48379 - DNA, 20 bp, Artificial Sequence
  Description of Artificial Sequence: Synthetic oligonucleotide
  Target: ATXN2; (+) strand; PAM type: NRG; PAM sequence: AGG
atgccttgcaaatgagtaac

SEQ ID NO: 48380 - DNA, 20 bp, Artificial Sequence
  Description of Artificial Sequence: Synthetic oligonucleotide
  Target: ATXN2; (+) strand; PAM type: NRG; PAM sequence: TGG
attcccactttgttcatcaa

SEQ ID NO: 48381 - DNA, 20 bp, Artificial Sequence
  Description of Artificial Sequence: Synthetic oligonucleotide
  Target: ATXN2; (+) strand; PAM type: NRG; PAM sequence: AAG
ttcatcaatggacacttaaa

SEQ ID NO: 48382 - DNA, 20 bp, Artificial Sequence
  Description of Artificial Sequence: Synthetic oligonucleotide
  Target: ATXN2; (+) strand; PAM type: NRG; PAM sequence: GAG
catcaatggacacttaaaaa

SEQ ID NO: 48383 - DNA, 20 bp, Artificial Sequence
  Description of Artificial Sequence: Synthetic oligonucleotide
  Target: ATXN2; (+) strand; PAM type: NRG; PAM sequence: TAG
tcaccctttttcattttcat

SEQ ID NO: 48384 - DNA, 20 bp, Artificial Sequence
  Description of Artificial Sequence: Synthetic oligonucleotide
  Target: ATXN2; (+) strand; PAM type: NRG; PAM sequence: TAG
cgttctctacctttcttcct

SEQ ID NO: 48385 - DNA, 20 bp, Artificial Sequence
  Description of Artificial Sequence: Synthetic oligonucleotide
  Target: ATXN2; (+) strand; PAM type: NRG; PAM sequence: CAG
cttatactttgatttctttc

SEQ ID NO: 48386 - DNA, 20 bp, Artificial Sequence
  Description of Artificial Sequence: Synthetic oligonucleotide
  Target: ATXN2; (+) strand; PAM type: NRG; PAM sequence: AAG
acatgcccacttataaacta

SEQ ID NO: 48387 - DNA, 20 bp, Artificial Sequence
  Description of Artificial Sequence: Synthetic oligonucleotide
  Target: ATXN2; (+) strand; PAM type: NRG; PAM sequence: TAG
acttataaactaaagcattg

SEQ ID NO: 48388 - DNA, 20 bp, Artificial Sequence
  Description of Artificial Sequence: Synthetic oligonucleotide
  Target: ATXN2; (+) strand; PAM type: NRG; PAM sequence: AGG
cttataaactaaagcattgt

SEQ ID NO: 48389 - DNA, 20 bp, Artificial Sequence
  Description of Artificial Sequence: Synthetic oligonucleotide
  Target: ATXN2; (+) strand; PAM type: NRG; PAM sequence: TGG
ctaaagcattgtaggccaaa

SEQ ID NO: 48390 - DNA, 20 bp, Artificial Sequence
  Description of Artificial Sequence: Synthetic oligonucleotide
  Target: ATXN2; (+) strand; PAM type: NRG; PAM sequence: GGG
taaagcattgtaggccaaat

SEQ ID NO: 48391 - DNA, 20 bp, Artificial Sequence
  Description of Artificial Sequence: Synthetic oligonucleotide
  Target: ATXN2; (+) strand; PAM type: NRG; PAM sequence: AAG
cattgtaggccaaatgggac

SEQ ID NO: 48392 - DNA, 20 bp, Artificial Sequence
  Description of Artificial Sequence: Synthetic oligonucleotide
  Target: ATXN2; (+) strand; PAM type: NRG; PAM sequence: CAG
caaatgggacaagaaatttt

SEQ ID NO: 48393 - DNA, 20 bp, Artificial Sequence
  Description of Artificial Sequence: Synthetic oligonucleotide
  Target: ATXN2; (+) strand; PAM type: NRG; PAM sequence: CAG
aattttcagttgaatataat

SEQ ID NO: 48394 - DNA, 20 bp, Artificial Sequence
  Description of Artificial Sequence: Synthetic oligonucleotide
  Target: ATXN2; (+) strand; PAM type: NRG; PAM sequence: TAG
tttcagttgaatataatcag

SEQ ID NO: 48395 - DNA, 20 bp, Artificial Sequence
  Description of Artificial Sequence: Synthetic oligonucleotide
  Target: ATXN2; (+) strand; PAM type: NRG; PAM sequence: TAG
cattcttgaccacaaaactg

SEQ ID NO: 48396 - DNA, 20 bp, Artificial Sequence
  Description of Artificial Sequence: Synthetic oligonucleotide
  Target: ATXN2; (+) strand; PAM type: NRG; PAM sequence: AAG
gctttacaaactaatttttt

SEQ ID NO: 48397 - DNA, 20 bp, Artificial Sequence
  Description of Artificial Sequence: Synthetic oligonucleotide
  Target: ATXN2; (+) strand; PAM type: NRG; PAM sequence: GAG
tttacaaactaattttttaa

SEQ ID NO: 48398 - DNA, 20 bp, Artificial Sequence
  Description of Artificial Sequence: Synthetic oligonucleotide
  Target: ATXN2; (+) strand; PAM type: NRG; PAM sequence: AAG
ctctatttaatttttctcta

SEQ ID NO: 48399 - DNA, 20 bp, Artificial Sequence
  Description of Artificial Sequence: Synthetic oligonucleotide
  Target: ATXN2; (+) strand; PAM type: NRG; PAM sequence: TGG
ttctaaaaaattaccttact

SEQ ID NO: 48400 - DNA, 20 bp, Artificial Sequence
  Description of Artificial Sequence: Synthetic oligonucleotide
  Target: ATXN2; (+) strand; PAM type: NRG; PAM sequence: GGG
tctaaaaaattaccttactt

SEQ ID NO: 48401 - DNA, 20 bp, Artificial Sequence
  Description of Artificial Sequence: Synthetic oligonucleotide
  Target: ATXN2; (+) strand; PAM type: NRG; PAM sequence: TAG
ttaccttacttgggctattc

SEQ ID NO: 48402 - DNA, 20 bp, Artificial Sequence
  Description of Artificial Sequence: Synthetic oligonucleotide
  Target: ATXN2; (+) strand; PAM type: NRG; PAM sequence: AAG
cttacttgggctattctaga

SEQ ID NO: 48403 - DNA, 20 bp, Artificial Sequence
  Description of Artificial Sequence: Synthetic oligonucleotide
  Target: ATXN2; (+) strand; PAM type: NRG; PAM sequence: TAG
acttgggctattctagaaag

SEQ ID NO: 48404 - DNA, 20 bp, Artificial Sequence
  Description of Artificial Sequence: Synthetic oligonucleotide
  Target: ATXN2; (+) strand; PAM type: NRG; PAM sequence: CGG
ctttctttttttttttgaaa

SEQ ID NO: 48405 - DNA, 20 bp, Artificial Sequence
  Description of Artificial Sequence: Synthetic oligonucleotide
  Target: ATXN2; (+) strand; PAM type: NRG; PAM sequence: GAG
ttctttttttttttgaaacg

SEQ ID NO: 48406 - DNA, 20 bp, Artificial Sequence
  Description of Artificial Sequence: Synthetic oligonucleotide
  Target: ATXN2; (+) strand; PAM type: NRG; PAM sequence: CAG
cggagtcttgctctgtcacc

SEQ ID NO: 48407 - DNA, 20 bp, Artificial Sequence
  Description of Artificial Sequence: Synthetic oligonucleotide
  Target: ATXN2; (+) strand; PAM type: NRG; PAM sequence: AGG
ggagtcttgctctgtcaccc

SEQ ID NO: 48408 - DNA, 20 bp, Artificial Sequence
  Description of Artificial Sequence: Synthetic oligonucleotide
  Target: ATXN2; (+) strand; PAM type: NRG; PAM sequence: TGG
tcttgctctgtcacccaggc

SEQ ID NO: 48409 - DNA, 20 bp, Artificial Sequence
  Description of Artificial Sequence: Synthetic oligonucleotide
  Target: ATXN2; (+) strand; PAM type: NRG; PAM sequence: GAG
ttgctctgtcacccaggctg

SEQ ID NO: 48410 - DNA, 20 bp, Artificial Sequence
  Description of Artificial Sequence: Synthetic oligonucleotide
  Target: ATXN2; (+) strand; PAM type: NRG; PAM sequence: CAG
ctgtcacccaggctggagtg

SEQ ID NO: 48411 - DNA, 20 bp, Artificial Sequence
  Description of Artificial Sequence: Synthetic oligonucleotide
  Target: ATXN2; (+) strand; PAM type: NRG; PAM sequence: TGG
tcacccaggctggagtgcag

SEQ ID NO: 48412 - DNA, 20 bp, Artificial Sequence
  Description of Artificial Sequence: Synthetic oligonucleotide
  Target: ATXN2; (+) strand; PAM type: NRG; PAM sequence: CGG
caggctggagtgcagtggtg

SEQ ID NO: 48413 - DNA, 20 bp, Artificial Sequence
  Description of Artificial Sequence: Synthetic oligonucleotide
  Target: ATXN2; (+) strand; PAM type: NRG; PAM sequence: CAG
ggagtgcagtggtgcggtat

SEQ ID NO: 48414 - DNA, 20 bp, Artificial Sequence
  Description of Artificial Sequence: Synthetic oligonucleotide
  Target: ATXN2; (+) strand; PAM type: NRG; PAM sequence: TGG
tcactgcaacctctgcctcc

SEQ ID NO: 48415 - DNA, 20 bp, Artificial Sequence
  Description of Artificial Sequence: Synthetic oligonucleotide
  Target: ATXN2; (+) strand; PAM type: NRG; PAM sequence: GGG
cactgcaacctctgcctcct

SEQ ID NO: 48416 - DNA, 20 bp, Artificial Sequence
  Description of Artificial Sequence: Synthetic oligonucleotide
  Target: ATXN2; (+) strand; PAM type: NRG; PAM sequence: AAG
aacctctgcctcctgggttc

SEQ ID NO: 48417 - DNA, 20 bp, Artificial Sequence
  Description of Artificial Sequence: Synthetic oligonucleotide
  Target: ATXN2; (+) strand; PAM type: NRG; PAM sequence: CAG
gggttcaagcaattctgtct

SEQ ID NO: 48418 - DNA, 20 bp, Artificial Sequence
  Description of Artificial Sequence: Synthetic oligonucleotide
  Target: ATXN2; (+) strand; PAM type: NRG; PAM sequence: TAG
caattctgtctcagcctccc

SEQ ID NO: 48419 - DNA, 20 bp, Artificial Sequence
  Description of Artificial Sequence: Synthetic oligonucleotide
  Target: ATXN2; (+) strand; PAM type: NRG; PAM sequence: TAG
ttctgtctcagcctccctag

SEQ ID NO: 48420 - DNA, 20 bp, Artificial Sequence
  Description of Artificial Sequence: Synthetic oligonucleotide
  Target: ATXN2; (+) strand; PAM type: NRG; PAM sequence: TAG
gtctcagcctccctagtagc

SEQ ID NO: 48421 - DNA, 20 bp, Artificial Sequence
  Description of Artificial Sequence: Synthetic oligonucleotide
  Target: ATXN2; (+) strand; PAM type: NRG; PAM sequence: AGG
tctcagcctccctagtagct

SEQ ID NO: 48422 - DNA, 20 bp, Artificial Sequence
  Description of Artificial Sequence: Synthetic oligonucleotide
  Target: ATXN2; (+) strand; PAM type: NRG; PAM sequence: TAG
ctccctagtagctaggacta

SEQ ID NO: 48423 - DNA, 20 bp, Artificial Sequence
  Description of Artificial Sequence: Synthetic oligonucleotide
  Target: ATXN2; (+) strand; PAM type: NRG; PAM sequence: AGG
tccctagtagctaggactat

SEQ ID NO: 48424 - DNA, 20 bp, Artificial Sequence
  Description of Artificial Sequence: Synthetic oligonucleotide
  Target: ATXN2; (+) strand; PAM type: NRG; PAM sequence: TAG
aaaataaatttttgtatttt

SEQ ID NO: 48425 - DNA, 20 bp, Artificial Sequence
  Description of Artificial Sequence: Synthetic oligonucleotide
  Target: ATXN2; (+) strand; PAM type: NRG; PAM sequence: TAG
ataaatttttgtatttttag

SEQ ID NO: 48426 - DNA, 20 bp, Artificial Sequence
  Description of Artificial Sequence: Synthetic oligonucleotide
  Target: ATXN2; (+) strand; PAM type: NRG; PAM sequence: GAG
aaatttttgtatttttagta

SEQ ID NO: 48427 - DNA, 20 bp, Artificial Sequence
  Description of Artificial Sequence: Synthetic oligonucleotide
  Target: ATXN2; (+) strand; PAM type: NRG; PAM sequence: CGG
ttttgtatttttagtagaga

SEQ ID NO: 48428 - DNA, 20 bp, Artificial Sequence
  Description of Artificial Sequence: Synthetic oligonucleotide
  Target: ATXN2; (+) strand; PAM type: NRG; PAM sequence: GGG
tttgtatttttagtagagac

SEQ ID NO: 48429 - DNA, 20 bp, Artificial Sequence
  Description of Artificial Sequence: Synthetic oligonucleotide
  Target: ATXN2; (+) strand; PAM type: NRG; PAM sequence: GGG
ttgtatttttagtagagacg

SEQ ID NO: 48430 - DNA, 20 bp, Artificial Sequence
  Description of Artificial Sequence: Synthetic oligonucleotide
  Target: ATXN2; (+) strand; PAM type: NRG; PAM sequence: TGG
gagacggggtttcgccatgt

SEQ ID NO: 48431 - DNA, 20 bp, Artificial Sequence
  Description of Artificial Sequence: Synthetic oligonucleotide
  Target: ATXN2; (+) strand; PAM type: NRG; PAM sequence: CAG
cggggtttcgccatgttggc

SEQ ID NO: 48432 - DNA, 20 bp, Artificial Sequence
  Description of Artificial Sequence: Synthetic oligonucleotide
  Target: ATXN2; (+) strand; PAM type: NRG; PAM sequence: AGG
ggggtttcgccatgttggcc

SEQ ID NO: 48433 - DNA, 20 bp, Artificial Sequence
  Description of Artificial Sequence: Synthetic oligonucleotide
  Target: ATXN2; (+) strand; PAM type: NRG; PAM sequence: TGG
tttcgccatgttggccaggc

SEQ ID NO: 48434 - DNA, 20 bp, Artificial Sequence
  Description of Artificial Sequence: Synthetic oligonucleotide
  Target: ATXN2; (+) strand; PAM type: NRG; PAM sequence: CAG
tggtctcgaactcctgacct

SEQ ID NO: 48435 - DNA, 20 bp, Artificial Sequence
  Description of Artificial Sequence: Synthetic oligonucleotide
  Target: ATXN2; (+) strand; PAM type: NRG; PAM sequence: AGG
ggtctcgaactcctgacctc

SEQ ID NO: 48436 - DNA, 20 bp, Artificial Sequence
  Description of Artificial Sequence: Synthetic oligonucleotide
  Target: ATXN2; (+) strand; PAM type: NRG; PAM sequence: CAG
ctcaggtgatccacccgcct

SEQ ID NO: 48437 - DNA, 20 bp, Artificial Sequence
  Description of Artificial Sequence: Synthetic oligonucleotide
  Target: ATXN2; (+) strand; PAM type: NRG; PAM sequence: AAG
ccacccgcctcagcctccct

SEQ ID NO: 48438 - DNA, 20 bp, Artificial Sequence
  Description of Artificial Sequence: Synthetic oligonucleotide
  Target: ATXN2; (+) strand; PAM type: NRG; PAM sequence: AAG
cctcagcctccctaagtgct

SEQ ID NO: 48439 - DNA, 20 bp, Artificial Sequence
  Description of Artificial Sequence: Synthetic oligonucleotide
  Target: ATXN2; (+) strand; PAM type: NRG; PAM sequence: CAG
ctccctaagtgctaagatta

SEQ ID NO: 48440 - DNA, 20 bp, Artificial Sequence
  Description of Artificial Sequence: Synthetic oligonucleotide
  Target: ATXN2; (+) strand; PAM type: NRG; PAM sequence: AGG
tccctaagtgctaagattac

SEQ ID NO: 48441 - DNA, 20 bp, Artificial Sequence
  Description of Artificial Sequence: Synthetic oligonucleotide
  Target: ATXN2; (+) strand; PAM type: NRG; PAM sequence: GAG
agtgctaagattacaggaat

SEQ ID NO: 48442 - DNA, 20 bp, Artificial Sequence
  Description of Artificial Sequence: Synthetic oligonucleotide
  Target: ATXN2; (+) strand; PAM type: NRG; PAM sequence: CAG
caggaatgagccgccatacc

SEQ ID NO: 48443 - DNA, 20 bp, Artificial Sequence
  Description of Artificial Sequence: Synthetic oligonucleotide
  Target: ATXN2; (+) strand; PAM type: NRG; PAM sequence: CAG
atgagccgccatacccagcc

SEQ ID NO: 48444 - DNA, 20 bp, Artificial Sequence
  Description of Artificial Sequence: Synthetic oligonucleotide
  Target: ATXN2; (+) strand; PAM type: NRG; PAM sequence: AAG
cccagatatttctttaaaaa

SEQ ID NO: 48445 - DNA, 20 bp, Artificial Sequence
  Description of Artificial Sequence: Synthetic oligonucleotide
  Target: ATXN2; (+) strand; PAM type: NRG; PAM sequence: AAG
tttctttaaaaaaagtttgt

SEQ ID NO: 48446 - DNA, 20 bp, Artificial Sequence
  Description of Artificial Sequence: Synthetic oligonucleotide
  Target: ATXN2; (+) strand; PAM type: NRG; PAM sequence: GAG
gaataaatctaataaaccat

SEQ ID NO: 48447 - DNA, 20 bp, Artificial Sequence
  Description of Artificial Sequence: Synthetic oligonucleotide
  Target: ATXN2; (+) strand; PAM type: NRG; PAM sequence: AGG
aataaatctaataaaccatg

SEQ ID NO: 48448 - DNA, 20 bp, Artificial Sequence
  Description of Artificial Sequence: Synthetic oligonucleotide
  Target: ATXN2; (+) strand; PAM type: NRG; PAM sequence: TAG
aataaaccatgaggcatatt

SEQ ID NO: 48449 - DNA, 20 bp, Artificial Sequence
  Description of Artificial Sequence: Synthetic oligonucleotide
  Target: ATXN2; (+) strand; PAM type: NRG; PAM sequence: AGG
ataaaccatgaggcatattt

SEQ ID NO: 48450 - DNA, 20 bp, Artificial Sequence
  Description of Artificial Sequence: Synthetic oligonucleotide
  Target: ATXN2; (+) strand; PAM type: NRG; PAM sequence: TGG
cccacctctttttgcataac

SEQ ID NO: 48451 - DNA, 20 bp, Artificial Sequence
  Description of Artificial Sequence: Synthetic oligonucleotide
  Target: ATXN2; (+) strand; PAM type: NRG; PAM sequence: GAG
cacctctttttgcataactg

SEQ ID NO: 48452 - DNA, 20 bp, Artificial Sequence
  Description of Artificial Sequence: Synthetic oligonucleotide
  Target: ATXN2; (+) strand; PAM type: NRG; PAM sequence: AAG
ctttaaactgtaccacaaca

SEQ ID NO: 48453 - DNA, 20 bp, Artificial Sequence
  Description of Artificial Sequence: Synthetic oligonucleotide
  Target: ATXN2; (+) strand; PAM type: NRG; PAM sequence: CGG
tccattatttcttcacgttt

SEQ ID NO: 48454 - DNA, 20 bp, Artificial Sequence
  Description of Artificial Sequence: Synthetic oligonucleotide
  Target: ATXN2; (+) strand; PAM type: NRG; PAM sequence: TGG
ttcacgtttcggccccgaac

SEQ ID NO: 48455 - DNA, 20 bp, Artificial Sequence
  Description of Artificial Sequence: Synthetic oligonucleotide
  Target: ATXN2; (+) strand; PAM type: NRG; PAM sequence: CGG
ttctgtacttttctcatgtg

SEQ ID NO: 48456 - DNA, 20 bp, Artificial Sequence
  Description of Artificial Sequence: Synthetic oligonucleotide
  Target: ATXN2; (+) strand; PAM type: NRG; PAM sequence: AAG
cttttctcatgtgcggcatc

SEQ ID NO: 48457 - DNA, 20 bp, Artificial Sequence
  Description of Artificial Sequence: Synthetic oligonucleotide
  Target: ATXN2; (+) strand; PAM type: NRG; PAM sequence: AAG
cacactaaaatgaaaaacac

SEQ ID NO: 48458 - DNA, 20 bp, Artificial Sequence
  Description of Artificial Sequence: Synthetic oligonucleotide
  Target: ATXN2; (+) strand; PAM type: NRG; PAM sequence: AAG
ctaaaatgaaaaacacaagt

SEQ ID NO: 48459 - DNA, 20 bp, Artificial Sequence
  Description of Artificial Sequence: Synthetic oligonucleotide
  Target: ATXN2; (+) strand; PAM type: NRG; PAM sequence: TAG
ctttacaaaataaaatttgt

SEQ ID NO: 48460 - DNA, 20 bp, Artificial Sequence
  Description of Artificial Sequence: Synthetic oligonucleotide
  Target: ATXN2; (+) strand; PAM type: NRG; PAM sequence: AGG
tttacaaaataaaatttgtt

SEQ ID NO: 48461 - DNA, 20 bp, Artificial Sequence
  Description of Artificial Sequence: Synthetic oligonucleotide
  Target: ATXN2; (+) strand; PAM type: NRG; PAM sequence: TAG
aaaatttgttaggaattctt

SEQ ID NO: 48462 - DNA, 20 bp, Artificial Sequence
  Description of Artificial Sequence: Synthetic oligonucleotide
  Target: ATXN2; (+) strand; PAM type: NRG; PAM sequence: AAG
taggaattctttagctcatc

SEQ ID NO: 48463 - DNA, 20 bp, Artificial Sequence
  Description of Artificial Sequence: Synthetic oligonucleotide
  Target: ATXN2; (+) strand; PAM type: NRG; PAM sequence: AGG
aggaattctttagctcatca

SEQ ID NO: 48464 - DNA, 20 bp, Artificial Sequence
  Description of Artificial Sequence: Synthetic oligonucleotide
  Target: ATXN2; (+) strand; PAM type: NRG; PAM sequence: CAG
tctttagctcatcaaggtac

SEQ ID NO: 48465 - DNA, 20 bp, Artificial Sequence
  Description of Artificial Sequence: Synthetic oligonucleotide
  Target: ATXN2; (+) strand; PAM type: NRG; PAM sequence: AAG
cctttgacaaaaataatctc

SEQ ID NO: 48466 - DNA, 20 bp, Artificial Sequence
  Description of Artificial Sequence: Synthetic oligonucleotide
  Target: ATXN2; (+) strand; PAM type: NRG; PAM sequence: GAG
tttgacaaaaataatctcaa

SEQ ID NO: 48467 - DNA, 20 bp, Artificial Sequence
  Description of Artificial Sequence: Synthetic oligonucleotide
  Target: ATXN2; (+) strand; PAM type: NRG; PAM sequence: CAG
gagaatcataccctttttcc

SEQ ID NO: 48468 - DNA, 20 bp, Artificial Sequence
  Description of Artificial Sequence: Synthetic oligonucleotide
  Target: ATXN2; (+) strand; PAM type: NRG; PAM sequence: AGG
agaatcataccctttttccc

SEQ ID NO: 48469 - DNA, 20 bp, Artificial Sequence
  Description of Artificial Sequence: Synthetic oligonucleotide
  Target: ATXN2; (+) strand; PAM type: NRG; PAM sequence: TGG
ctaaatgttttttgtttcta

SEQ ID NO: 48470 - DNA, 20 bp, Artificial Sequence
  Description of Artificial Sequence: Synthetic oligonucleotide
  Target: ATXN2; (+) strand; PAM type: NRG; PAM sequence: AAG
ttgtttctatggtttgtctt

SEQ ID NO: 48471 - DNA, 20 bp, Artificial Sequence
  Description of Artificial Sequence: Synthetic oligonucleotide
  Target: ATXN2; (+) strand; PAM type: NRG; PAM sequence: AAG
gtacattaataataattttt

SEQ ID NO: 48472 - DNA, 20 bp, Artificial Sequence
  Description of Artificial Sequence: Synthetic oligonucleotide
  Target: ATXN2; (+) strand; PAM type: NRG; PAM sequence: GAG
acattaataataatttttaa

SEQ ID NO: 48473 - DNA, 20 bp, Artificial Sequence
  Description of Artificial Sequence: Synthetic oligonucleotide
  Target: ATXN2; (+) strand; PAM type: NRG; PAM sequence: AGG
cattaataataatttttaag

SEQ ID NO: 48474 - DNA, 20 bp, Artificial Sequence
  Description of Artificial Sequence: Synthetic oligonucleotide
  Target: ATXN2; (+) strand; PAM type: NRG; PAM sequence: TAG
aaaccaccacatccctctat

SEQ ID NO: 48475 - DNA, 20 bp, Artificial Sequence
  Description of Artificial Sequence: Synthetic oligonucleotide
  Target: ATXN2; (+) strand; PAM type: NRG; PAM sequence: TGG
tagctcacaatgcttaaaaa

SEQ ID NO: 48476 - DNA, 20 bp, Artificial Sequence
  Description of Artificial Sequence: Synthetic oligonucleotide
  Target: ATXN2; (+) strand; PAM type: NRG; PAM sequence: AAG
aatggttgaaatattttaat

SEQ ID NO: 48477 - DNA, 20 bp, Artificial Sequence
  Description of Artificial Sequence: Synthetic oligonucleotide
  Target: ATXN2; (+) strand; PAM type: NRG; PAM sequence: AAG
ttttaataagcacacacatc

SEQ ID NO: 48478 - DNA, 20 bp, Artificial Sequence
  Description of Artificial Sequence: Synthetic oligonucleotide
  Target: ATXN2; (+) strand; PAM type: NRG; PAM sequence: AAG
taataagcacacacatcaag

SEQ ID NO: 48479 - DNA, 20 bp, Artificial Sequence
  Description of Artificial Sequence: Synthetic oligonucleotide
  Target: ATXN2; (+) strand; PAM type: NRG; PAM sequence: CAG
gcctctctgattacacaaac

SEQ ID NO: 48480 - DNA, 20 bp, Artificial Sequence
  Description of Artificial Sequence: Synthetic oligonucleotide
  Target: ATXN2; (+) strand; PAM type: NRG; PAM sequence: CAG
aaaccagtctataaaataat

SEQ ID NO: 48481 - DNA, 20 bp, Artificial Sequence
  Description of Artificial Sequence: Synthetic oligonucleotide
  Target: ATXN2; (+) strand; PAM type: NRG; PAM sequence: GAG
aataatcagtatttgaaact

SEQ ID NO: 48482 - DNA, 20 bp, Artificial Sequence
  Description of Artificial Sequence: Synthetic oligonucleotide
  Target: ATXN2; (+) strand; PAM type: NRG; PAM sequence: AAG
aatcagtatttgaaactgag

SEQ ID NO: 48483 - DNA, 20 bp, Artificial Sequence
  Description of Artificial Sequence: Synthetic oligonucleotide
  Target: ATXN2; (+) strand; PAM type: NRG; PAM sequence: AAG
ctgagaagtaaaatcattca

SEQ ID NO: 48484 - DNA, 20 bp, Artificial Sequence
  Description of Artificial Sequence: Synthetic oligonucleotide
  Target: ATXN2; (+) strand; PAM type: NRG; PAM sequence: TGG
agaagtaaaatcattcaaag

SEQ ID NO: 48485 - DNA, 20 bp, Artificial Sequence
  Description of Artificial Sequence: Synthetic oligonucleotide
  Target: ATXN2; (+) strand; PAM type: NRG; PAM sequence: TAG
ttcaaagtggctttaaaaac

SEQ ID NO: 48486 - DNA, 20 bp, Artificial Sequence
  Description of Artificial Sequence: Synthetic oligonucleotide
  Target: ATXN2; (+) strand; PAM type: NRG; PAM sequence: AGG
tcaaagtggctttaaaaact

SEQ ID NO: 48487 - DNA, 20 bp, Artificial Sequence
  Description of Artificial Sequence: Synthetic oligonucleotide
  Target: ATXN2; (+) strand; PAM type: NRG; PAM sequence: AAG
aaaatgttcttttactttgt

SEQ ID NO: 48488 - DNA, 20 bp, Artificial Sequence
  Description of Artificial Sequence: Synthetic oligonucleotide
  Target: ATXN2; (+) strand; PAM type: NRG; PAM sequence: AAG
ttcttttactttgtaagaaa

SEQ ID NO: 48489 - DNA, 20 bp, Artificial Sequence
  Description of Artificial Sequence: Synthetic oligonucleotide
  Target: ATXN2; (+) strand; PAM type: NRG; PAM sequence: AAG
ctttgtaagaaaaagaaaaa

SEQ ID NO: 48490 - DNA, 20 bp, Artificial Sequence
  Description of Artificial Sequence: Synthetic oligonucleotide
  Target: ATXN2; (+) strand; PAM type: NRG; PAM sequence: CGG
aaaaaagtaaaaattacctt

SEQ ID NO: 48491 - DNA, 20 bp, Artificial Sequence
  Description of Artificial Sequence: Synthetic oligonucleotide
  Target: ATXN2; (+) strand; PAM type: NRG; PAM sequence: AAG
aaaaattaccttcggactgt

SEQ ID NO: 48492 - DNA, 20 bp, Artificial Sequence
  Description of Artificial Sequence: Synthetic oligonucleotide
  Target: ATXN2; (+) strand; PAM type: NRG; PAM sequence: TGG
tttcacttgtacttcacatt

SEQ ID NO: 48493 - DNA, 20 bp, Artificial Sequence
  Description of Artificial Sequence: Synthetic oligonucleotide
  Target: ATXN2; (+) strand; PAM type: NRG; PAM sequence: GAG
tcacttgtacttcacatttg

SEQ ID NO: 48494 - DNA, 20 bp, Artificial Sequence
  Description of Artificial Sequence: Synthetic oligonucleotide
  Target: ATXN2; (+) strand; PAM type: NRG; PAM sequence: AAG
aacatataatttatttatca

SEQ ID NO: 48495 - DNA, 20 bp, Artificial Sequence
  Description of Artificial Sequence: Synthetic oligonucleotide
  Target: ATXN2; (+) strand; PAM type: NRG; PAM sequence: CAG
taatttatttatcaaagaaa

SEQ ID NO: 48496 - DNA, 20 bp, Artificial Sequence
  Description of Artificial Sequence: Synthetic oligonucleotide
  Target: ATXN2; (+) strand; PAM type: NRG; PAM sequence: CGG
caaagaaacagtatactacc

SEQ ID NO: 48497 - DNA, 20 bp, Artificial Sequence
  Description of Artificial Sequence: Synthetic oligonucleotide
  Target: ATXN2; (+) strand; PAM type: NRG; PAM sequence: CAG
acagtatactacccggtcac

SEQ ID NO: 48498 - DNA, 20 bp, Artificial Sequence
  Description of Artificial Sequence: Synthetic oligonucleotide
  Target: ATXN2; (+) strand; PAM type: NRG; PAM sequence: AGG
cagtatactacccggtcacc

SEQ ID NO: 48499 - DNA, 20 bp, Artificial Sequence
  Description of Artificial Sequence: Synthetic oligonucleotide
  Target: ATXN2; (+) strand; PAM type: NRG; PAM sequence: GGG
agtatactacccggtcacca

SEQ ID NO: 48500 - DNA, 20 bp, Artificial Sequence
  Description of Artificial Sequence: Synthetic oligonucleotide
  Target: ATXN2; (+) strand; PAM type: NRG; PAM sequence: CAG
ttttactttttatacctcat

SEQ ID NO: 48501 - DNA, 20 bp, Artificial Sequence
  Description of Artificial Sequence: Synthetic oligonucleotide
  Target: ATXN2; (+) strand; PAM type: NRG; PAM sequence: AGG
tttactttttatacctcatc

SEQ ID NO: 48502 - DNA, 20 bp, Artificial Sequence
  Description of Artificial Sequence: Synthetic oligonucleotide
  Target: ATXN2; (+) strand; PAM type: NRG; PAM sequence: TAG
catcaggcttcattcaatat

SEQ ID NO: 48503 - DNA, 20 bp, Artificial Sequence
  Description of Artificial Sequence: Synthetic oligonucleotide
  Target: ATXN2; (+) strand; PAM type: NRG; PAM sequence: AGG
atcaggcttcattcaatatt

SEQ ID NO: 48504 - DNA, 20 bp, Artificial Sequence
  Description of Artificial Sequence: Synthetic oligonucleotide
  Target: ATXN2; (+) strand; PAM type: NRG; PAM sequence: CAG
actgaactcttgaaattctt

SEQ ID NO: 48505 - DNA, 20 bp, Artificial Sequence
  Description of Artificial Sequence: Synthetic oligonucleotide
  Target: ATXN2; (+) strand; PAM type: NRG; PAM sequence: AGG
ctgaactcttgaaattcttc

SEQ ID NO: 48506 - DNA, 20 bp, Artificial Sequence
  Description of Artificial Sequence: Synthetic oligonucleotide
  Target: ATXN2; (+) strand; PAM type: NRG; PAM sequence: GAG
gaactcttgaaattcttcag

SEQ ID NO: 48507 - DNA, 20 bp, Artificial Sequence
  Description of Artificial Sequence: Synthetic oligonucleotide
  Target: ATXN2; (+) strand; PAM type: NRG; PAM sequence: AGG
aactcttgaaattcttcagg

SEQ ID NO: 48508 - DNA, 20 bp, Artificial Sequence
  Description of Artificial Sequence: Synthetic oligonucleotide
  Target: ATXN2; (+) strand; PAM type: NRG; PAM sequence: CAG
attcttcaggaggctctact

SEQ ID NO: 48509 - DNA, 20 bp, Artificial Sequence
  Description of Artificial Sequence: Synthetic oligonucleotide
  Target: ATXN2; (+) strand; PAM type: NRG; PAM sequence: GAG
tcttcaggaggctctactca

SEQ ID NO: 48510 - DNA, 20 bp, Artificial Sequence
  Description of Artificial Sequence: Synthetic oligonucleotide
  Target: ATXN2; (+) strand; PAM type: NRG; PAM sequence: CAG
gaggctctactcagagtttg

SEQ ID NO: 48511 - DNA, 20 bp, Artificial Sequence
  Description of Artificial Sequence: Synthetic oligonucleotide
  Target: ATXN2; (+) strand; PAM type: NRG; PAM sequence: AAG
cagtacgaattttaatactg

SEQ ID NO: 48512 - DNA, 20 bp, Artificial Sequence
  Description of Artificial Sequence: Synthetic oligonucleotide
  Target: ATXN2; (+) strand; PAM type: NRG; PAM sequence: CAG
aagtcaaacatttctgaccc

SEQ ID NO: 48513 - DNA, 20 bp, Artificial Sequence
  Description of Artificial Sequence: Synthetic oligonucleotide
  Target: ATXN2; (+) strand; PAM type: NRG; PAM sequence: AAG
tttctgaccccagctatttt

SEQ ID NO: 48514 - DNA, 20 bp, Artificial Sequence
  Description of Artificial Sequence: Synthetic oligonucleotide
  Target: ATXN2; (+) strand; PAM type: NRG; PAM sequence: AAG
agtgacaaaataatgtacaa

SEQ ID NO: 48515 - DNA, 20 bp, Artificial Sequence
  Description of Artificial Sequence: Synthetic oligonucleotide
  Target: ATXN2; (+) strand; PAM type: NRG; PAM sequence: CAG
ctaacattattttacacaca

SEQ ID NO: 48516 - DNA, 20 bp, Artificial Sequence
  Description of Artificial Sequence: Synthetic oligonucleotide
  Target: ATXN2; (+) strand; PAM type: NRG; PAM sequence: CAG
acattattttacacacacag

SEQ ID NO: 48517 - DNA, 20 bp, Artificial Sequence
  Description of Artificial Sequence: Synthetic oligonucleotide
  Target: ATXN2; (+) strand; PAM type: NRG; PAM sequence: AGG
cattattttacacacacagc

SEQ ID NO: 48518 - DNA, 20 bp, Artificial Sequence
  Description of Artificial Sequence: Synthetic oligonucleotide
  Target: ATXN2; (+) strand; PAM type: NRG; PAM sequence: GGG
attattttacacacacagca

SEQ ID NO: 48519 - DNA, 20 bp, Artificial Sequence
  Description of Artificial Sequence: Synthetic oligonucleotide
  Target: ATXN2; (+) strand; PAM type: NRG; PAM sequence: AAG
acacacacagcagggttaac

SEQ ID NO: 48520 - DNA, 20 bp, Artificial Sequence
  Description of Artificial Sequence: Synthetic oligonucleotide
  Target: ATXN2; (+) strand; PAM type: NRG; PAM sequence: CAG
cagcagggttaacaagaata

SEQ ID NO: 48521 - DNA, 20 bp, Artificial Sequence
  Description of Artificial Sequence: Synthetic oligonucleotide
  Target: ATXN2; (+) strand; PAM type: NRG; PAM sequence: TGG
atacagctatctgttgttat

SEQ ID NO: 48522 - DNA, 20 bp, Artificial Sequence
  Description of Artificial Sequence: Synthetic oligonucleotide
  Target: ATXN2; (+) strand; PAM type: NRG; PAM sequence: TAG
cagctatctgttgttattgg

SEQ ID NO: 48523 - DNA, 20 bp, Artificial Sequence
  Description of Artificial Sequence: Synthetic oligonucleotide
  Target: ATXN2; (+) strand; PAM type: NRG; PAM sequence: AGG
agctatctgttgttattggt

SEQ ID NO: 48524 - DNA, 20 bp, Artificial Sequence
  Description of Artificial Sequence: Synthetic oligonucleotide
  Target: ATXN2; (+) strand; PAM type: NRG; PAM sequence: GGG
gctatctgttgttattggta

SEQ ID NO: 48525 - DNA, 20 bp, Artificial Sequence
  Description of Artificial Sequence: Synthetic oligonucleotide
  Target: ATXN2; (+) strand; PAM type: NRG; PAM sequence: GGG
ctatctgttgttattggtag

SEQ ID NO: 48526 - DNA, 20 bp, Artificial Sequence
  Description of Artificial Sequence: Synthetic oligonucleotide
  Target: ATXN2; (+) strand; PAM type: NRG; PAM sequence: TGG
tgttgttattggtaggggac

SEQ ID NO: 48527 - DNA, 20 bp, Artificial Sequence
  Description of Artificial Sequence: Synthetic oligonucleotide
  Target: ATXN2; (+) strand; PAM type: NRG; PAM sequence: CAG
tattggtaggggactggttc

SEQ ID NO: 48528 - DNA, 20 bp, Artificial Sequence
  Description of Artificial Sequence: Synthetic oligonucleotide
  Target: ATXN2; (+) strand; PAM type: NRG; PAM sequence: AGG
attggtaggggactggttcc

SEQ ID NO: 48529 - DNA, 20 bp, Artificial Sequence
  Description of Artificial Sequence: Synthetic oligonucleotide
  Target: ATXN2; (+) strand; PAM type: NRG; PAM sequence: CAG
actggttccaggacctcctt

SEQ ID NO: 48530 - DNA, 20 bp, Artificial Sequence
  Description of Artificial Sequence: Synthetic oligonucleotide
  Target: ATXN2; (+) strand; PAM type: NRG; PAM sequence: AAG
taccgaattacataatactt

SEQ ID NO: 48531 - DNA, 20 bp, Artificial Sequence
  Description of Artificial Sequence: Synthetic oligonucleotide
  Target: ATXN2; (+) strand; PAM type: NRG; PAM sequence: TAG
gtcacttacataaaatgtaa

SEQ ID NO: 48532 - DNA, 20 bp, Artificial Sequence
  Description of Artificial Sequence: Synthetic oligonucleotide
  Target: ATXN2; (+) strand; PAM type: NRG; PAM sequence: AAG
aatagtatttgcatataact

SEQ ID NO: 48533 - DNA, 20 bp, Artificial Sequence
  Description of Artificial Sequence: Synthetic oligonucleotide
  Target: ATXN2; (+) strand; PAM type: NRG; PAM sequence: TAG
attgtcatactgtattgttt

SEQ ID NO: 48534 - DNA, 20 bp, Artificial Sequence
  Description of Artificial Sequence: Synthetic oligonucleotide
  Target: ATXN2; (+) strand; PAM type: NRG; PAM sequence: AGG
ttgtcatactgtattgtttt

SEQ ID NO: 48535 - DNA, 20 bp, Artificial Sequence
  Description of Artificial Sequence: Synthetic oligonucleotide
  Target: ATXN2; (+) strand; PAM type: NRG; PAM sequence: AAG
attgttttaggaataatgac

SEQ ID NO: 48536 - DNA, 20 bp, Artificial Sequence
  Description of Artificial Sequence: Synthetic oligonucleotide
  Target: ATXN2; (+) strand; PAM type: NRG; PAM sequence: TGG
gaaaaacgtccgtacatctt

SEQ ID NO: 48537 - DNA, 20 bp, Artificial Sequence
  Description of Artificial Sequence: Synthetic oligonucleotide
  Target: ATXN2; (+) strand; PAM type: NRG; PAM sequence: CAG
acgtccgtacatctttggtt

SEQ ID NO: 48538 - DNA, 20 bp, Artificial Sequence
  Description of Artificial Sequence: Synthetic oligonucleotide
  Target: ATXN2; (+) strand; PAM type: NRG; PAM sequence: GAG
aaaaaaaaattttttttttt

SEQ ID NO: 48539 - DNA, 20 bp, Artificial Sequence
  Description of Artificial Sequence: Synthetic oligonucleotide
  Target: ATXN2; (+) strand; PAM type: NRG; PAM sequence: AAG
aaaaaatttttttttttgag

SEQ ID NO: 48540 - DNA, 20 bp, Artificial Sequence
  Description of Artificial Sequence: Synthetic oligonucleotide
  Target: ATXN2; (+) strand; PAM type: NRG; PAM sequence: AGG
aaaaatttttttttttgaga

SEQ ID NO: 48541 - DNA, 20 bp, Artificial Sequence
  Description of Artificial Sequence: Synthetic oligonucleotide
  Target: ATXN2; (+) strand; PAM type: NRG; PAM sequence: GGG
aaaatttttttttttgagaa

SEQ ID NO: 48542 - DNA, 20 bp, Artificial Sequence
  Description of Artificial Sequence: Synthetic oligonucleotide
  Target: ATXN2; (+) strand; PAM type: NRG; PAM sequence: GGG
aaatttttttttttgagaag

SEQ ID NO: 48543 - DNA, 20 bp, Artificial Sequence
  Description of Artificial Sequence: Synthetic oligonucleotide
  Target: ATXN2; (+) strand; PAM type: NRG; PAM sequence: TGG
tttttgagaaggggtctgtc

SEQ ID NO: 48544 - DNA, 20 bp, Artificial Sequence
  Description of Artificial Sequence: Synthetic oligonucleotide
  Target: ATXN2; (+) strand; PAM type: NRG; PAM sequence: CAG
gtctgtctggcactgttgac

SEQ ID NO: 48545 - DNA, 20 bp, Artificial Sequence
  Description of Artificial Sequence: Synthetic oligonucleotide
  Target: ATXN2; (+) strand; PAM type: NRG; PAM sequence: AGG
tctgtctggcactgttgacc

SEQ ID NO: 48546 - DNA, 20 bp, Artificial Sequence
  Description of Artificial Sequence: Synthetic oligonucleotide
  Target: ATXN2; (+) strand; PAM type: NRG; PAM sequence: GAG
ctggcactgttgaccaggct

SEQ ID NO: 48547 - DNA, 20 bp, Artificial Sequence
  Description of Artificial Sequence: Synthetic oligonucleotide
  Target: ATXN2; (+) strand; PAM type: NRG; PAM sequence: CAG
actgttgaccaggctgagtg

SEQ ID NO: 48548 - DNA, 20 bp, Artificial Sequence
  Description of Artificial Sequence: Synthetic oligonucleotide
  Target: ATXN2; (+) strand; PAM type: NRG; PAM sequence: AGG
ctgttgaccaggctgagtgc

SEQ ID NO: 48549 - DNA, 20 bp, Artificial Sequence
  Description of Artificial Sequence: Synthetic oligonucleotide
  Target: ATXN2; (+) strand; PAM type: NRG; PAM sequence: GGG
tgttgaccaggctgagtgca

SEQ ID NO: 48550 - DNA, 20 bp, Artificial Sequence
  Description of Artificial Sequence: Synthetic oligonucleotide
  Target: ATXN2; (+) strand; PAM type: NRG; PAM sequence: GGG
gttgaccaggctgagtgcag

SEQ ID NO: 48551 - DNA, 20 bp, Artificial Sequence
  Description of Artificial Sequence: Synthetic oligonucleotide
  Target: ATXN2; (+) strand; PAM type: NRG; PAM sequence: CAG
tgagtgcaggggcattatct

SEQ ID NO: 48552 - DNA, 20 bp, Artificial Sequence
  Description of Artificial Sequence: Synthetic oligonucleotide
  Target: ATXN2; (+) strand; PAM type: NRG; PAM sequence: CAG
gcaggggcattatctcagct

SEQ ID NO: 48553 - DNA, 20 bp, Artificial Sequence
  Description of Artificial Sequence: Synthetic oligonucleotide
  Target: ATXN2; (+) strand; PAM type: NRG; PAM sequence: CAG
tcagtgaaacctccacctcc

SEQ ID NO: 48554 - DNA, 20 bp, Artificial Sequence
  Description of Artificial Sequence: Synthetic oligonucleotide
  Target: ATXN2; (+) strand; PAM type: NRG; PAM sequence: AGG
cagtgaaacctccacctccc

SEQ ID NO: 48555 - DNA, 20 bp, Artificial Sequence
  Description of Artificial Sequence: Synthetic oligonucleotide
  Target: ATXN2; (+) strand; PAM type: NRG; PAM sequence: CAG
ctcaaacaatcctcccacgt

SEQ ID NO: 48556 - DNA, 20 bp, Artificial Sequence
  Description of Artificial Sequence: Synthetic oligonucleotide
  Target: ATXN2; (+) strand; PAM type: NRG; PAM sequence: AAG
tcctcccacgtcagcctccc

SEQ ID NO: 48557 - DNA, 20 bp, Artificial Sequence
  Description of Artificial Sequence: Synthetic oligonucleotide
  Target: ATXN2; (+) strand; PAM type: NRG; PAM sequence: TAG
acgtcagcctcccaagtcac

SEQ ID NO: 48558 - DNA, 20 bp, Artificial Sequence
  Description of Artificial Sequence: Synthetic oligonucleotide
  Target: ATXN2; (+) strand; PAM type: NRG; PAM sequence: AGG
cgtcagcctcccaagtcact

SEQ ID NO: 48559 - DNA, 20 bp, Artificial Sequence
  Description of Artificial Sequence: Synthetic oligonucleotide
  Target: ATXN2; (+) strand; PAM type: NRG; PAM sequence: CAG
ctcccaagtcactaggacta

SEQ ID NO: 48560 - DNA, 20 bp, Artificial Sequence
  Description of Artificial Sequence: Synthetic oligonucleotide
  Target: ATXN2; (+) strand; PAM type: NRG; PAM sequence: AGG
tcccaagtcactaggactac

SEQ ID NO: 48561 - DNA, 20 bp, Artificial Sequence
  Description of Artificial Sequence: Synthetic oligonucleotide
  Target: ATXN2; (+) strand; PAM type: NRG; PAM sequence: CGG
caggcacgtaccaccacgtt

SEQ ID NO: 48562 - DNA, 20 bp, Artificial Sequence
  Description of Artificial Sequence: Synthetic oligonucleotide
  Target: ATXN2; (+) strand; PAM type: NRG; PAM sequence: TAG
cacgtaccaccacgttcggc

SEQ ID NO: 48563 - DNA, 20 bp, Artificial Sequence
  Description of Artificial Sequence: Synthetic oligonucleotide
  Target: ATXN2; (+) strand; PAM type: NRG; PAM sequence: TAG
gctagtttttttactttttg

SEQ ID NO: 48564 - DNA, 20 bp, Artificial Sequence
  Description of Artificial Sequence: Synthetic oligonucleotide
  Target: ATXN2; (+) strand; PAM type: NRG; PAM sequence: GAG
tagtttttttactttttgta

SEQ ID NO: 48565 - DNA, 20 bp, Artificial Sequence
  Description of Artificial Sequence: Synthetic oligonucleotide
  Target: ATXN2; (+) strand; PAM type: NRG; PAM sequence: CGG
ttttttactttttgtagaga

SEQ ID NO: 48566 - DNA, 20 bp, Artificial Sequence
  Description of Artificial Sequence: Synthetic oligonucleotide
  Target: ATXN2; (+) strand; PAM type: NRG; PAM sequence: GAG
ttttactttttgtagagacg

SEQ ID NO: 48567 - DNA, 20 bp, Artificial Sequence
  Description of Artificial Sequence: Synthetic oligonucleotide
  Target: ATXN2; (+) strand; PAM type: NRG; PAM sequence: CAG
cggagttctgccatgttgcc

SEQ ID NO: 48568 - DNA, 20 bp, Artificial Sequence
  Description of Artificial Sequence: Synthetic oligonucleotide
  Target: ATXN2; (+) strand; PAM type: NRG; PAM sequence: AGG
ggagttctgccatgttgccc

SEQ ID NO: 48569 - DNA, 20 bp, Artificial Sequence
  Description of Artificial Sequence: Synthetic oligonucleotide
  Target: ATXN2; (+) strand; PAM type: NRG; PAM sequence: TGG
ttctgccatgttgcccaggc

SEQ ID NO: 48570 - DNA, 20 bp, Artificial Sequence
  Description of Artificial Sequence: Synthetic oligonucleotide
  Target: ATXN2; (+) strand; PAM type: NRG; PAM sequence: GAG
caggctggtcttaaacttgt

SEQ ID NO: 48571 - DNA, 20 bp, Artificial Sequence
  Description of Artificial Sequence: Synthetic oligonucleotide
  Target: ATXN2; (+) strand; PAM type: NRG; PAM sequence: AAG
ggtcttaaacttgtgagctc

SEQ ID NO: 48572 - DNA, 20 bp, Artificial Sequence
  Description of Artificial Sequence: Synthetic oligonucleotide
  Target: ATXN2; (+) strand; PAM type: NRG; PAM sequence: AAG
ctgcccacctcaaactccca

SEQ ID NO: 48573 - DNA, 20 bp, Artificial Sequence
  Description of Artificial Sequence: Synthetic oligonucleotide
  Target: ATXN2; (+) strand; PAM type: NRG; PAM sequence: TGG
acctcaaactcccaaagtgc

SEQ ID NO: 48574 - DNA, 20 bp, Artificial Sequence
  Description of Artificial Sequence: Synthetic oligonucleotide
  Target: ATXN2; (+) strand; PAM type: NRG; PAM sequence: GGG
cctcaaactcccaaagtgct

SEQ ID NO: 48575 - DNA, 20 bp, Artificial Sequence
  Description of Artificial Sequence: Synthetic oligonucleotide
  Target: ATXN2; (+) strand; PAM type: NRG; PAM sequence: CAG
ctcccaaagtgctgggatta

SEQ ID NO: 48576 - DNA, 20 bp, Artificial Sequence
  Description of Artificial Sequence: Synthetic oligonucleotide
  Target: ATXN2; (+) strand; PAM type: NRG; PAM sequence: AGG
tcccaaagtgctgggattac

SEQ ID NO: 48577 - DNA, 20 bp, Artificial Sequence
  Description of Artificial Sequence: Synthetic oligonucleotide
  Target: ATXN2; (+) strand; PAM type: NRG; PAM sequence: GAG
agtgctgggattacaggcgt

SEQ ID NO: 48578 - DNA, 20 bp, Artificial Sequence
  Description of Artificial Sequence: Synthetic oligonucleotide
  Target: ATXN2; (+) strand; PAM type: NRG; PAM sequence: TGG
caggcgtgagtcactgtgcc

SEQ ID NO: 48579 - DNA, 20 bp, Artificial Sequence
  Description of Artificial Sequence: Synthetic oligonucleotide
  Target: ATXN2; (+) strand; PAM type: NRG; PAM sequence: AAG
ttaacaaatatttttgatcc

SEQ ID NO: 48580 - DNA, 20 bp, Artificial Sequence
  Description of Artificial Sequence: Synthetic oligonucleotide
  Target: ATXN2; (+) strand; PAM type: NRG; PAM sequence: AGG
taacaaatatttttgatcca

SEQ ID NO: 48581 - DNA, 20 bp, Artificial Sequence
  Description of Artificial Sequence: Synthetic oligonucleotide
  Target: ATXN2; (+) strand; PAM type: NRG; PAM sequence: TGG
aaatatttttgatccaaggt

SEQ ID NO: 48582 - DNA, 20 bp, Artificial Sequence
  Description of Artificial Sequence: Synthetic oligonucleotide
  Target: ATXN2; (+) strand; PAM type: NRG; PAM sequence: TGG
gttggctgaatccatgaata

SEQ ID NO: 48583 - DNA, 20 bp, Artificial Sequence
  Description of Artificial Sequence: Synthetic oligonucleotide
  Target: ATXN2; (+) strand; PAM type: NRG; PAM sequence: CAG
atccatgaatatggaaccca

SEQ ID NO: 48584 - DNA, 20 bp, Artificial Sequence
  Description of Artificial Sequence: Synthetic oligonucleotide
  Target: ATXN2; (+) strand; PAM type: NRG; PAM sequence: CAG
gaatatggaacccacagatg

SEQ ID NO: 48585 - DNA, 20 bp, Artificial Sequence
  Description of Artificial Sequence: Synthetic oligonucleotide
  Target: ATXN2; (+) strand; PAM type: NRG; PAM sequence: GAG
atatggaacccacagatgca

SEQ ID NO: 48586 - DNA, 20 bp, Artificial Sequence
  Description of Artificial Sequence: Synthetic oligonucleotide
  Target: ATXN2; (+) strand; PAM type: NRG; PAM sequence: AGG
tatggaacccacagatgcag

SEQ ID NO: 48587 - DNA, 20 bp, Artificial Sequence
  Description of Artificial Sequence: Synthetic oligonucleotide
  Target: ATXN2; (+) strand; PAM type: NRG; PAM sequence: TAG
acttttacaatgaattatat

SEQ ID NO: 48588 - DNA, 20 bp, Artificial Sequence
  Description of Artificial Sequence: Synthetic oligonucleotide
  Target: ATXN2; (+) strand; PAM type: NRG; PAM sequence: TGG
tacaatgaattatattagac

SEQ ID NO: 48589 - DNA, 20 bp, Artificial Sequence
  Description of Artificial Sequence: Synthetic oligonucleotide
  Target: ATXN2; (+) strand; PAM type: NRG; PAM sequence: AAG
aattatattagactggataa

SEQ ID NO: 48590 - DNA, 20 bp, Artificial Sequence
  Description of Artificial Sequence: Synthetic oligonucleotide
  Target: ATXN2; (+) strand; PAM type: NRG; PAM sequence: AGG
attatattagactggataaa

SEQ ID NO: 48591 - DNA, 20 bp, Artificial Sequence
  Description of Artificial Sequence: Synthetic oligonucleotide
  Target: ATXN2; (+) strand; PAM type: NRG; PAM sequence: GAG
tatattagactggataaaag

SEQ ID NO: 48592 - DNA, 20 bp, Artificial Sequence
  Description of Artificial Sequence: Synthetic oligonucleotide
  Target: ATXN2; (+) strand; PAM type: NRG; PAM sequence: AAG
atcctgactaaacatgatct

SEQ ID NO: 48593 - DNA, 20 bp, Artificial Sequence
  Description of Artificial Sequence: Synthetic oligonucleotide
  Target: ATXN2; (+) strand; PAM type: NRG; PAM sequence: TGG
ttatccacattttaacttca

SEQ ID NO: 48594 - DNA, 20 bp, Artificial Sequence
  Description of Artificial Sequence: Synthetic oligonucleotide
  Target: ATXN2; (+) strand; PAM type: NRG; PAM sequence: AAG
aattactttattctaccccc

SEQ ID NO: 48595 - DNA, 20 bp, Artificial Sequence
  Description of Artificial Sequence: Synthetic oligonucleotide
  Target: ATXN2; (+) strand; PAM type: NRG; PAM sequence: AGG
attactttattctaccccca

SEQ ID NO: 48596 - DNA, 20 bp, Artificial Sequence
  Description of Artificial Sequence: Synthetic oligonucleotide
  Target: ATXN2; (+) strand; PAM type: NRG; PAM sequence: CAG
actttattctacccccaagg

SEQ ID NO: 48597 - DNA, 20 bp, Artificial Sequence
  Description of Artificial Sequence: Synthetic oligonucleotide
  Target: ATXN2; (+) strand; PAM type: NRG; PAM sequence: AAG
taacttacaacaactgatgt

SEQ ID NO: 48598 - DNA, 20 bp, Artificial Sequence
  Description of Artificial Sequence: Synthetic oligonucleotide
  Target: ATXN2; (+) strand; PAM type: NRG; PAM sequence: TAG
gaaccatcctcatatttgca

SEQ ID NO: 48599 - DNA, 20 bp, Artificial Sequence
  Description of Artificial Sequence: Synthetic oligonucleotide
  Target: ATXN2; (+) strand; PAM type: NRG; PAM sequence: AAG
atttgcatagattccatcaa

SEQ ID NO: 48600 - DNA, 20 bp, Artificial Sequence
  Description of Artificial Sequence: Synthetic oligonucleotide
  Target: ATXN2; (+) strand; PAM type: NRG; PAM sequence: TGG
agattccatcaaaagaaatc

SEQ ID NO: 48601 - DNA, 20 bp, Artificial Sequence
  Description of Artificial Sequence: Synthetic oligonucleotide
  Target: ATXN2; (+) strand; PAM type: NRG; PAM sequence: TAG
ttaaaaaaaaaaaaaactat

SEQ ID NO: 48602 - DNA, 20 bp, Artificial Sequence
  Description of Artificial Sequence: Synthetic oligonucleotide
  Target: ATXN2; (+) strand; PAM type: NRG; PAM sequence: TAG
aaaaaaaaactattagaaat

SEQ ID NO: 48603 - DNA, 20 bp, Artificial Sequence
  Description of Artificial Sequence: Synthetic oligonucleotide
  Target: ATXN2; (+) strand; PAM type: NRG; PAM sequence: TGG
tcttcctcatctaaaatgct

SEQ ID NO: 48604 - DNA, 20 bp, Artificial Sequence
  Description of Artificial Sequence: Synthetic oligonucleotide
  Target: ATXN2; (+) strand; PAM type: NRG; PAM sequence: GGG
cttcctcatctaaaatgctt

SEQ ID NO: 48605 - DNA, 20 bp, Artificial Sequence
  Description of Artificial Sequence: Synthetic oligonucleotide
  Target: ATXN2; (+) strand; PAM type: NRG; PAM sequence: CAG
tcatctaaaatgcttgggac

SEQ ID NO: 48606 - DNA, 20 bp, Artificial Sequence
  Description of Artificial Sequence: Synthetic oligonucleotide
  Target: ATXN2; (+) strand; PAM type: NRG; PAM sequence: AAG
tctaaaatgcttgggaccag

SEQ ID NO: 48607 - DNA, 20 bp, Artificial Sequence
  Description of Artificial Sequence: Synthetic oligonucleotide
  Target: ATXN2; (+) strand; PAM type: NRG; PAM sequence: TAG
gcttgggaccagaagtattt

SEQ ID NO: 48608 - DNA, 20 bp, Artificial Sequence
  Description of Artificial Sequence: Synthetic oligonucleotide
  Target: ATXN2; (+) strand; PAM type: NRG; PAM sequence: CGG
accagaagtattttagactg

SEQ ID NO: 48609 - DNA, 20 bp, Artificial Sequence
  Description of Artificial Sequence: Synthetic oligonucleotide
  Target: ATXN2; (+) strand; PAM type: NRG; PAM sequence: CGG
tttagactgcggattttttt

SEQ ID NO: 48610 - DNA, 20 bp, Artificial Sequence
  Description of Artificial Sequence: Synthetic oligonucleotide
  Target: ATXN2; (+) strand; PAM type: NRG; PAM sequence: TGG
ctgcggatttttttcggatt

SEQ ID NO: 48611 - DNA, 20 bp, Artificial Sequence
  Description of Artificial Sequence: Synthetic oligonucleotide
  Target: ATXN2; (+) strand; PAM type: NRG; PAM sequence: GGG
tgcggatttttttcggattt

SEQ ID NO: 48612 - DNA, 20 bp, Artificial Sequence
  Description of Artificial Sequence: Synthetic oligonucleotide
  Target: ATXN2; (+) strand; PAM type: NRG; PAM sequence: GGG
gcggatttttttcggatttg

SEQ ID NO: 48613 - DNA, 20 bp, Artificial Sequence
  Description of Artificial Sequence: Synthetic oligonucleotide
  Target: ATXN2; (+) strand; PAM type: NRG; PAM sequence: TAG
ggggatatttgcattatact

SEQ ID NO: 48614 - DNA, 20 bp, Artificial Sequence
  Description of Artificial Sequence: Synthetic oligonucleotide
  Target: ATXN2; (+) strand; PAM type: NRG; PAM sequence: TGG
taattcaaaatatgaaattt

SEQ ID NO: 48615 - DNA, 20 bp, Artificial Sequence
  Description of Artificial Sequence: Synthetic oligonucleotide
  Target: ATXN2; (+) strand; PAM type: NRG; PAM sequence: GAG
attcaaaatatgaaattttg

SEQ ID NO: 48616 - DNA, 20 bp, Artificial Sequence
  Description of Artificial Sequence: Synthetic oligonucleotide
  Target: ATXN2; (+) strand; PAM type: NRG; PAM sequence: TAG
aattttggagcatttccgat

SEQ ID NO: 48617 - DNA, 20 bp, Artificial Sequence
  Description of Artificial Sequence: Synthetic oligonucleotide
  Target: ATXN2; (+) strand; PAM type: NRG; PAM sequence: AGG
attttggagcatttccgatt

SEQ ID NO: 48618 - DNA, 20 bp, Artificial Sequence
  Description of Artificial Sequence: Synthetic oligonucleotide
  Target: ATXN2; (+) strand; PAM type: NRG; PAM sequence: GGG
ttttggagcatttccgatta

SEQ ID NO: 48619 - DNA, 20 bp, Artificial Sequence
  Description of Artificial Sequence: Synthetic oligonucleotide
  Target: ATXN2; (+) strand; PAM type: NRG; PAM sequence: CAG
catttccgattagggatgct

SEQ ID NO: 48620 - DNA, 20 bp, Artificial Sequence
  Description of Artificial Sequence: Synthetic oligonucleotide
  Target: ATXN2; (+) strand; PAM type: NRG; PAM sequence: AAG
tgtatttacatttgcatata

SEQ ID NO: 48621 - DNA, 20 bp, Artificial Sequence
  Description of Artificial Sequence: Synthetic oligonucleotide
  Target: ATXN2; (+) strand; PAM type: NRG; PAM sequence: TAG
attatttgttgcaaaatgtt

SEQ ID NO: 48622 - DNA, 20 bp, Artificial Sequence
  Description of Artificial Sequence: Synthetic oligonucleotide
  Target: ATXN2; (+) strand; PAM type: NRG; PAM sequence: TAG
tttgttgcaaaatgtttagt

SEQ ID NO: 48623 - DNA, 20 bp, Artificial Sequence
  Description of Artificial Sequence: Synthetic oligonucleotide
  Target: ATXN2; (+) strand; PAM type: NRG; PAM sequence: AGG
ttgttgcaaaatgtttagtt

SEQ ID NO: 48624 - DNA, 20 bp, Artificial Sequence
  Description of Artificial Sequence: Synthetic oligonucleotide
  Target: ATXN2; (+) strand; PAM type: NRG; PAM sequence: AAG
tatgatatcttacatgtatt

SEQ ID NO: 48625 - DNA, 20 bp, Artificial Sequence
  Description of Artificial Sequence: Synthetic oligonucleotide
  Target: ATXN2; (+) strand; PAM type: NRG; PAM sequence: AGG
atgatatcttacatgtatta

SEQ ID NO: 48626 - DNA, 20 bp, Artificial Sequence
  Description of Artificial Sequence: Synthetic oligonucleotide
  Target: ATXN2; (+) strand; PAM type: NRG; PAM sequence: GGG
tgatatcttacatgtattaa

SEQ ID NO: 48627 - DNA, 20 bp, Artificial Sequence
  Description of Artificial Sequence: Synthetic oligonucleotide
  Target: ATXN2; (+) strand; PAM type: NRG; PAM sequence: AAG
tatcttacatgtattaaggg

SEQ ID NO: 48628 - DNA, 20 bp, Artificial Sequence
  Description of Artificial Sequence: Synthetic oligonucleotide
  Target: ATXN2; (+) strand; PAM type: NRG; PAM sequence: TAG
tatttaatattttgcttcca

SEQ ID NO: 48629 - DNA, 20 bp, Artificial Sequence
  Description of Artificial Sequence: Synthetic oligonucleotide
  Target: ATXN2; (+) strand; PAM type: NRG; PAM sequence: GAG
tttaatattttgcttccata

SEQ ID NO: 48630 - DNA, 20 bp, Artificial Sequence
  Description of Artificial Sequence: Synthetic oligonucleotide
  Target: ATXN2; (+) strand; PAM type: NRG; PAM sequence: CAG
tattttgcttccatagagaa

SEQ ID NO: 48631 - DNA, 20 bp, Artificial Sequence
  Description of Artificial Sequence: Synthetic oligonucleotide
  Target: ATXN2; (+) strand; PAM type: NRG; PAM sequence: AAG
tttgcttccatagagaacag

SEQ ID NO: 48632 - DNA, 20 bp, Artificial Sequence
  Description of Artificial Sequence: Synthetic oligonucleotide
  Target: ATXN2; (+) strand; PAM type: NRG; PAM sequence: AGG
ttgcttccatagagaacaga

SEQ ID NO: 48633 - DNA, 20 bp, Artificial Sequence
  Description of Artificial Sequence: Synthetic oligonucleotide
  Target: ATXN2; (+) strand; PAM type: NRG; PAM sequence: CAG
tccatagagaacagaaggaa

SEQ ID NO: 48634 - DNA, 20 bp, Artificial Sequence
  Description of Artificial Sequence: Synthetic oligonucleotide
  Target: ATXN2; (+) strand; PAM type: NRG; PAM sequence: AAG
atagagaacagaaggaacag

SEQ ID NO: 48635 - DNA, 20 bp, Artificial Sequence
  Description of Artificial Sequence: Synthetic oligonucleotide
  Target: ATXN2; (+) strand; PAM type: NRG; PAM sequence: AGG
tagagaacagaaggaacaga

SEQ ID NO: 48636 - DNA, 20 bp, Artificial Sequence
  Description of Artificial Sequence: Synthetic oligonucleotide
  Target: ATXN2; (+) strand; PAM type: NRG; PAM sequence: CAG
gaacagaaggaacagaaggt

SEQ ID NO: 48637 - DNA, 20 bp, Artificial Sequence
  Description of Artificial Sequence: Synthetic oligonucleotide
  Target: ATXN2; (+) strand; PAM type: NRG; PAM sequence: AGG
aacagaaggaacagaaggtc

SEQ ID NO: 48638 - DNA, 20 bp, Artificial Sequence
  Description of Artificial Sequence: Synthetic oligonucleotide
  Target: ATXN2; (+) strand; PAM type: NRG; PAM sequence: AAG
gaacagaaggtcaggttttc

SEQ ID NO: 48639 - DNA, 20 bp, Artificial Sequence
  Description of Artificial Sequence: Synthetic oligonucleotide
  Target: ATXN2; (+) strand; PAM type: NRG; PAM sequence: CAG
gtcaggttttcaagtgttat

SEQ ID NO: 48640 - DNA, 20 bp, Artificial Sequence
  Description of Artificial Sequence: Synthetic oligonucleotide
  Target: ATXN2; (+) strand; PAM type: NRG; PAM sequence: TGG
ttatcagtcaaaccaactaa

SEQ ID NO: 48641 - DNA, 20 bp, Artificial Sequence
  Description of Artificial Sequence: Synthetic oligonucleotide
  Target: ATXN2; (+) strand; PAM type: NRG; PAM sequence: AAG
tgactaaacatgacataaaa

SEQ ID NO: 48642 - DNA, 20 bp, Artificial Sequence
  Description of Artificial Sequence: Synthetic oligonucleotide
  Target: ATXN2; (+) strand; PAM type: NRG; PAM sequence: AAG
taaacatgacataaaaaagc

SEQ ID NO: 48643 - DNA, 20 bp, Artificial Sequence
  Description of Artificial Sequence: Synthetic oligonucleotide
  Target: ATXN2; (+) strand; PAM type: NRG; PAM sequence: GAG
aacatgacataaaaaagcaa

SEQ ID NO: 48644 - DNA, 20 bp, Artificial Sequence
  Description of Artificial Sequence: Synthetic oligonucleotide
  Target: ATXN2; (+) strand; PAM type: NRG; PAM sequence: TAG
aaagcaagagtaaacttcca

SEQ ID NO: 48645 - DNA, 20 bp, Artificial Sequence
  Description of Artificial Sequence: Synthetic oligonucleotide
  Target: ATXN2; (+) strand; PAM type: NRG; PAM sequence: GAG
agcaagagtaaacttccata

SEQ ID NO: 48646 - DNA, 20 bp, Artificial Sequence
  Description of Artificial Sequence: Synthetic oligonucleotide
  Target: ATXN2; (+) strand; PAM type: NRG; PAM sequence: AGG
gcaagagtaaacttccatag

SEQ ID NO: 48647 - DNA, 20 bp, Artificial Sequence
  Description of Artificial Sequence: Synthetic oligonucleotide
  Target: ATXN2; (+) strand; PAM type: NRG; PAM sequence: GAG
aagagtaaacttccatagag

SEQ ID NO: 48648 - DNA, 20 bp, Artificial Sequence
  Description of Artificial Sequence: Synthetic oligonucleotide
  Target: ATXN2; (+) strand; PAM type: NRG; PAM sequence: AGG
agagtaaacttccatagagg

SEQ ID NO: 48649 - DNA, 20 bp, Artificial Sequence
  Description of Artificial Sequence: Synthetic oligonucleotide
  Target: ATXN2; (+) strand; PAM type: NRG; PAM sequence: AAG
gtaaacttccatagaggagg

SEQ ID NO: 48650 - DNA, 20 bp, Artificial Sequence
  Description of Artificial Sequence: Synthetic oligonucleotide
  Target: ATXN2; (+) strand; PAM type: NRG; PAM sequence: AGG
taaacttccatagaggagga

SEQ ID NO: 48651 - DNA, 20 bp, Artificial Sequence
  Description of Artificial Sequence: Synthetic oligonucleotide
  Target: ATXN2; (+) strand; PAM type: NRG; PAM sequence: AAG
ggaggaaggacacaaaccgt

SEQ ID NO: 48652 - DNA, 20 bp, Artificial Sequence
  Description of Artificial Sequence: Synthetic oligonucleotide
  Target: ATXN2; (+) strand; PAM type: NRG; PAM sequence: AGG
gaggaaggacacaaaccgta

SEQ ID NO: 48653 - DNA, 20 bp, Artificial Sequence
  Description of Artificial Sequence: Synthetic oligonucleotide
  Target: ATXN2; (+) strand; PAM type: NRG; PAM sequence: TGG
aaggacacaaaccgtaagga

SEQ ID NO: 48654 - DNA, 20 bp, Artificial Sequence
  Description of Artificial Sequence: Synthetic oligonucleotide
  Target: ATXN2; (+) strand; PAM type: NRG; PAM sequence: AAG
gacacaaaccgtaaggatgg

SEQ ID NO: 48655 - DNA, 20 bp, Artificial Sequence
  Description of Artificial Sequence: Synthetic oligonucleotide
  Target: ATXN2; (+) strand; PAM type: NRG; PAM sequence: TGG
aaggatggaagacaaatcaa

SEQ ID NO: 48656 - DNA, 20 bp, Artificial Sequence
  Description of Artificial Sequence: Synthetic oligonucleotide
  Target: ATXN2; (+) strand; PAM type: NRG; PAM sequence: TGG
atggaagacaaatcaatggt

SEQ ID NO: 48657 - DNA, 20 bp, Artificial Sequence
  Description of Artificial Sequence: Synthetic oligonucleotide
  Target: ATXN2; (+) strand; PAM type: NRG; PAM sequence: GAG
ggaagacaaatcaatggttg

SEQ ID NO: 48658 - DNA, 20 bp, Artificial Sequence
  Description of Artificial Sequence: Synthetic oligonucleotide
  Target: ATXN2; (+) strand; PAM type: NRG; PAM sequence: GAG
aagacaaatcaatggttgga

SEQ ID NO: 48659 - DNA, 20 bp, Artificial Sequence
  Description of Artificial Sequence: Synthetic oligonucleotide
  Target: ATXN2; (+) strand; PAM type: NRG; PAM sequence: GAG
gacaaatcaatggttggaga

SEQ ID NO: 48660 - DNA, 20 bp, Artificial Sequence
  Description of Artificial Sequence: Synthetic oligonucleotide
  Target: ATXN2; (+) strand; PAM type: NRG; PAM sequence: GAG
caaatcaatggttggagaga

SEQ ID NO: 48661 - DNA, 20 bp, Artificial Sequence
  Description of Artificial Sequence: Synthetic oligonucleotide
  Target: ATXN2; (+) strand; PAM type: NRG; PAM sequence: AGG
aaatcaatggttggagagag

SEQ ID NO: 48662 - DNA, 20 bp, Artificial Sequence
  Description of Artificial Sequence: Synthetic oligonucleotide
  Target: ATXN2; (+) strand; PAM type: NRG; PAM sequence: GAG
atcaatggttggagagagag

SEQ ID NO: 48663 - DNA, 20 bp, Artificial Sequence
  Description of Artificial Sequence: Synthetic oligonucleotide
  Target: ATXN2; (+) strand; PAM type: NRG; PAM sequence: AGG
tcaatggttggagagagagg

SEQ ID NO: 48664 - DNA, 20 bp, Artificial Sequence
  Description of Artificial Sequence: Synthetic oligonucleotide
  Target: ATXN2; (+) strand; PAM type: NRG; PAM sequence: GGG
caatggttggagagagagga

SEQ ID NO: 48665 - DNA, 20 bp, Artificial Sequence
  Description of Artificial Sequence: Synthetic oligonucleotide
  Target: ATXN2; (+) strand; PAM type: NRG; PAM sequence: AAG
agagaggagggttcactgaa

SEQ ID NO: 48666 - DNA, 20 bp, Artificial Sequence
  Description of Artificial Sequence: Synthetic oligonucleotide
  Target: ATXN2; (+) strand; PAM type: NRG; PAM sequence: GAG
ggttcactgaaaagtgattt

SEQ ID NO: 48667 - DNA, 20 bp, Artificial Sequence
  Description of Artificial Sequence: Synthetic oligonucleotide
  Target: ATXN2; (+) strand; PAM type: NRG; PAM sequence: AGG
gttcactgaaaagtgatttg

SEQ ID NO: 48668 - DNA, 20 bp, Artificial Sequence
  Description of Artificial Sequence: Synthetic oligonucleotide
  Target: ATXN2; (+) strand; PAM type: NRG; PAM sequence: GGG
ttcactgaaaagtgatttga

SEQ ID NO: 48669 - DNA, 20 bp, Artificial Sequence
  Description of Artificial Sequence: Synthetic oligonucleotide
  Target: ATXN2; (+) strand; PAM type: NRG; PAM sequence: TGG
aaaagtgatttgagggattt

SEQ ID NO: 48670 - DNA, 20 bp, Artificial Sequence
  Description of Artificial Sequence: Synthetic oligonucleotide
  Target: ATXN2; (+) strand; PAM type: NRG; PAM sequence: TGG
agtgatttgagggattttgg

SEQ ID NO: 48671 - DNA, 20 bp, Artificial Sequence
  Description of Artificial Sequence: Synthetic oligonucleotide
  Target: ATXN2; (+) strand; PAM type: NRG; PAM sequence: GGG
gtgatttgagggattttggt

SEQ ID NO: 48672 - DNA, 20 bp, Artificial Sequence
  Description of Artificial Sequence: Synthetic oligonucleotide
  Target: ATXN2; (+) strand; PAM type: NRG; PAM sequence: TGG
ctgttctattaacttgattg

SEQ ID NO: 48673 - DNA, 20 bp, Artificial Sequence
  Description of Artificial Sequence: Synthetic oligonucleotide
  Target: ATXN2; (+) strand; PAM type: NRG; PAM sequence: TGG
ttctattaacttgattgtgg

SEQ ID NO: 48674 - DNA, 20 bp, Artificial Sequence
  Description of Artificial Sequence: Synthetic oligonucleotide
  Target: ATXN2; (+) strand; PAM type: NRG; PAM sequence: TAG
tattaacttgattgtggtgg

SEQ ID NO: 48675 - DNA, 20 bp, Artificial Sequence
  Description of Artificial Sequence: Synthetic oligonucleotide
  Target: ATXN2; (+) strand; PAM type: NRG; PAM sequence: CAG
tatgcaattgttaaaactca

SEQ ID NO: 48676 - DNA, 20 bp, Artificial Sequence
  Description of Artificial Sequence: Synthetic oligonucleotide
  Target: ATXN2; (+) strand; PAM type: NRG; PAM sequence: AAG
aactcacagaaatgtaccct

SEQ ID NO: 48677 - DNA, 20 bp, Artificial Sequence
  Description of Artificial Sequence: Synthetic oligonucleotide
  Target: ATXN2; (+) strand; PAM type: NRG; PAM sequence: AAG
tcacagaaatgtaccctaag

SEQ ID NO: 48678 - DNA, 20 bp, Artificial Sequence
  Description of Artificial Sequence: Synthetic oligonucleotide
  Target: ATXN2; (+) strand; PAM type: NRG; PAM sequence: AGG
cacagaaatgtaccctaaga

SEQ ID NO: 48679 - DNA, 20 bp, Artificial Sequence
  Description of Artificial Sequence: Synthetic oligonucleotide
  Target: ATXN2; (+) strand; PAM type: NRG; PAM sequence: GGG
acagaaatgtaccctaagaa

SEQ ID NO: 48680 - DNA, 20 bp, Artificial Sequence
  Description of Artificial Sequence: Synthetic oligonucleotide
  Target: ATXN2; (+) strand; PAM type: NRG; PAM sequence: AAG
aatgtaccctaagaagggtg

SEQ ID NO: 48681 - DNA, 20 bp, Artificial Sequence
  Description of Artificial Sequence: Synthetic oligonucleotide
  Target: ATXN2; (+) strand; PAM type: NRG; PAM sequence: TGG
aagggtgaagtataaataaa

SEQ ID NO: 48682 - DNA, 20 bp, Artificial Sequence
  Description of Artificial Sequence: Synthetic oligonucleotide
  Target: ATXN2; (+) strand; PAM type: NRG; PAM sequence: GGG
agggtgaagtataaataaat

SEQ ID NO: 48683 - DNA, 20 bp, Artificial Sequence
  Description of Artificial Sequence: Synthetic oligonucleotide
  Target: ATXN2; (+) strand; PAM type: NRG; PAM sequence: GGG
gggtgaagtataaataaatg

SEQ ID NO: 48684 - DNA, 20 bp, Artificial Sequence
  Description of Artificial Sequence: Synthetic oligonucleotide
  Target: ATXN2; (+) strand; PAM type: NRG; PAM sequence: TAG
tgaagtataaataaatgggg

SEQ ID NO: 48685 - DNA, 20 bp, Artificial Sequence
  Description of Artificial Sequence: Synthetic oligonucleotide
  Target: ATXN2; (+) strand; PAM type: NRG; PAM sequence: AGG
gaagtataaataaatggggt

SEQ ID NO: 48686 - DNA, 20 bp, Artificial Sequence
  Description of Artificial Sequence: Synthetic oligonucleotide
  Target: ATXN2; (+) strand; PAM type: NRG; PAM sequence: AAG
gtataaataaatggggtagg

SEQ ID NO: 48687 - DNA, 20 bp, Artificial Sequence
  Description of Artificial Sequence: Synthetic oligonucleotide
  Target: ATXN2; (+) strand; PAM type: NRG; PAM sequence: CAG
aaataaatggggtaggaagc

SEQ ID NO: 48688 - DNA, 20 bp, Artificial Sequence
  Description of Artificial Sequence: Synthetic oligonucleotide
  Target: ATXN2; (+) strand; PAM type: NRG; PAM sequence: AGG
aataaatggggtaggaagcc

SEQ ID NO: 48689 - DNA, 20 bp, Artificial Sequence
  Description of Artificial Sequence: Synthetic oligonucleotide
  Target: ATXN2; (+) strand; PAM type: NRG; PAM sequence: TAG
gaagccaggtcataccttca

SEQ ID NO: 48690 - DNA, 20 bp, Artificial Sequence
  Description of Artificial Sequence: Synthetic oligonucleotide
  Target: ATXN2; (+) strand; PAM type: NRG; PAM sequence: AAG
gccaggtcataccttcatag

SEQ ID NO: 48691 - DNA, 20 bp, Artificial Sequence
  Description of Artificial Sequence: Synthetic oligonucleotide
  Target: ATXN2; (+) strand; PAM type: NRG; PAM sequence: TAG
cttcatagaagaaccctgac

SEQ ID NO: 48692 - DNA, 20 bp, Artificial Sequence
  Description of Artificial Sequence: Synthetic oligonucleotide
  Target: ATXN2; (+) strand; PAM type: NRG; PAM sequence: AGG
ttcatagaagaaccctgact

SEQ ID NO: 48693 - DNA, 20 bp, Artificial Sequence
  Description of Artificial Sequence: Synthetic oligonucleotide
  Target: ATXN2; (+) strand; PAM type: NRG; PAM sequence: CAG
gaaccctgactaggttctcc

SEQ ID NO: 48694 - DNA, 20 bp, Artificial Sequence
  Description of Artificial Sequence: Synthetic oligonucleotide
  Target: ATXN2; (+) strand; PAM type: NRG; PAM sequence: CAG
actaggttctcccagcatat

SEQ ID NO: 48695 - DNA, 20 bp, Artificial Sequence
  Description of Artificial Sequence: Synthetic oligonucleotide
  Target: ATXN2; (+) strand; PAM type: NRG; PAM sequence: CAG
ttctcccagcatatcagcat

SEQ ID NO: 48696 - DNA, 20 bp, Artificial Sequence
  Description of Artificial Sequence: Synthetic oligonucleotide
  Target: ATXN2; (+) strand; PAM type: NRG; PAM sequence: CAG
cagcatatcagcatcagtga

SEQ ID NO: 48697 - DNA, 20 bp, Artificial Sequence
  Description of Artificial Sequence: Synthetic oligonucleotide
  Target: ATXN2; (+) strand; PAM type: NRG; PAM sequence: AAG
cagcatcagtgacagtgctt

SEQ ID NO: 48698 - DNA, 20 bp, Artificial Sequence
  Description of Artificial Sequence: Synthetic oligonucleotide
  Target: ATXN2; (+) strand; PAM type: NRG; PAM sequence: AAG
tcttgtaaaacaatctaata

SEQ ID NO: 48699 - DNA, 20 bp, Artificial Sequence
  Description of Artificial Sequence: Synthetic oligonucleotide
  Target: ATXN2; (+) strand; PAM type: NRG; PAM sequence: AGG
cttgtaaaacaatctaataa

SEQ ID NO: 48700 - DNA, 20 bp, Artificial Sequence
  Description of Artificial Sequence: Synthetic oligonucleotide
  Target: ATXN2; (+) strand; PAM type: NRG; PAM sequence: AAG
aaaacaatctaataaaggca

SEQ ID NO: 48701 - DNA, 20 bp, Artificial Sequence
  Description of Artificial Sequence: Synthetic oligonucleotide
  Target: ATXN2; (+) strand; PAM type: NRG; PAM sequence: TAG
aaagtctcaaaaatttgtga

SEQ ID NO: 48702 - DNA, 20 bp, Artificial Sequence
  Description of Artificial Sequence: Synthetic oligonucleotide
  Target: ATXN2; (+) strand; PAM type: NRG; PAM sequence: TGG
catttatttcttccatcatg

SEQ ID NO: 48703 - DNA, 20 bp, Artificial Sequence
  Description of Artificial Sequence: Synthetic oligonucleotide
  Target: ATXN2; (+) strand; PAM type: NRG; PAM sequence: GGG
atttatttcttccatcatgt

SEQ ID NO: 48704 - DNA, 20 bp, Artificial Sequence
  Description of Artificial Sequence: Synthetic oligonucleotide
  Target: ATXN2; (+) strand; PAM type: NRG; PAM sequence: TAG
cttccatcatgtgggactta

SEQ ID NO: 48705 - DNA, 20 bp, Artificial Sequence
  Description of Artificial Sequence: Synthetic oligonucleotide
  Target: ATXN2; (+) strand; PAM type: NRG; PAM sequence: CGG
tagtttctgcccttcatgtc

SEQ ID NO: 48706 - DNA, 20 bp, Artificial Sequence
  Description of Artificial Sequence: Synthetic oligonucleotide
  Target: ATXN2; (+) strand; PAM type: NRG; PAM sequence: AAG
ttgataacattccaaaattt

SEQ ID NO: 48707 - DNA, 20 bp, Artificial Sequence
  Description of Artificial Sequence: Synthetic oligonucleotide
  Target: ATXN2; (+) strand; PAM type: NRG; PAM sequence: CAG
aacattccaaaatttaagac

SEQ ID NO: 48708 - DNA, 20 bp, Artificial Sequence
  Description of Artificial Sequence: Synthetic oligonucleotide
  Target: ATXN2; (+) strand; PAM type: NRG; PAM sequence: AAG
ttccaaaatttaagaccaga

SEQ ID NO: 48709 - DNA, 20 bp, Artificial Sequence
  Description of Artificial Sequence: Synthetic oligonucleotide
  Target: ATXN2; (+) strand; PAM type: NRG; PAM sequence: AAG
aatttaagaccagaaagcca

SEQ ID NO: 48710 - DNA, 20 bp, Artificial Sequence
  Description of Artificial Sequence: Synthetic oligonucleotide
  Target: ATXN2; (+) strand; PAM type: NRG; PAM sequence: AGG
atttaagaccagaaagccaa

SEQ ID NO: 48711 - DNA, 20 bp, Artificial Sequence
  Description of Artificial Sequence: Synthetic oligonucleotide
  Target: ATXN2; (+) strand; PAM type: NRG; PAM sequence: GAG
ttaagaccagaaagccaaag

SEQ ID NO: 48712 - DNA, 20 bp, Artificial Sequence
  Description of Artificial Sequence: Synthetic oligonucleotide
  Target: ATXN2; (+) strand; PAM type: NRG; PAM sequence: AAG
aagccaaaggagaaaaatga

SEQ ID NO: 48713 - DNA, 20 bp, Artificial Sequence
  Description of Artificial Sequence: Synthetic oligonucleotide
  Target: ATXN2; (+) strand; PAM type: NRG; PAM sequence: CAG
ccaaaggagaaaaatgaaag

SEQ ID NO: 48714 - DNA, 20 bp, Artificial Sequence
  Description of Artificial Sequence: Synthetic oligonucleotide
  Target: ATXN2; (+) strand; PAM type: NRG; PAM sequence: CAG
aaggagaaaaatgaaagcag

SEQ ID NO: 48715 - DNA, 20 bp, Artificial Sequence
  Description of Artificial Sequence: Synthetic oligonucleotide
  Target: ATXN2; (+) strand; PAM type: NRG; PAM sequence: AAG
aaatgaaagcagcagaaaaa

SEQ ID NO: 48716 - DNA, 20 bp, Artificial Sequence
  Description of Artificial Sequence: Synthetic oligonucleotide
  Target: ATXN2; (+) strand; PAM type: NRG; PAM sequence: AAG
gcacattaattcaaaataaa

SEQ ID NO: 48717 - DNA, 20 bp, Artificial Sequence
  Description of Artificial Sequence: Synthetic oligonucleotide
  Target: ATXN2; (+) strand; PAM type: NRG; PAM sequence: AAG
aattcaaaataaaaagcata

SEQ ID NO: 48718 - DNA, 20 bp, Artificial Sequence
  Description of Artificial Sequence: Synthetic oligonucleotide
  Target: ATXN2; (+) strand; PAM type: NRG; PAM sequence: CAG
aaaaagcataaagaactctg

SEQ ID NO: 48719 - DNA, 20 bp, Artificial Sequence
  Description of Artificial Sequence: Synthetic oligonucleotide
  Target: ATXN2; (+) strand; PAM type: NRG; PAM sequence: TGG
aactctgcagactccactct

SEQ ID NO: 48720 - DNA, 20 bp, Artificial Sequence
  Description of Artificial Sequence: Synthetic oligonucleotide
  Target: ATXN2; (+) strand; PAM type: NRG; PAM sequence: TGG
ttggtgttctacgtatcttt

SEQ ID NO: 48721 - DNA, 20 bp, Artificial Sequence
  Description of Artificial Sequence: Synthetic oligonucleotide
  Target: ATXN2; (+) strand; PAM type: NRG; PAM sequence: GAG
ggtgttctacgtatcttttg

SEQ ID NO: 48722 - DNA, 20 bp, Artificial Sequence
  Description of Artificial Sequence: Synthetic oligonucleotide
  Target: ATXN2; (+) strand; PAM type: NRG; PAM sequence: AGG
gtgttctacgtatcttttgg

SEQ ID NO: 48723 - DNA, 20 bp, Artificial Sequence
  Description of Artificial Sequence: Synthetic oligonucleotide
  Target: ATXN2; (+) strand; PAM type: NRG; PAM sequence: TAG
tcttttggaggtttttcact

SEQ ID NO: 48724 - DNA, 20 bp, Artificial Sequence
  Description of Artificial Sequence: Synthetic oligonucleotide
  Target: ATXN2; (+) strand; PAM type: NRG; PAM sequence: TAG
ttttcacttagatttgcact

SEQ ID NO: 48725 - DNA, 20 bp, Artificial Sequence
  Description of Artificial Sequence: Synthetic oligonucleotide
  Target: ATXN2; (+) strand; PAM type: NRG; PAM sequence: TAG
tagatttgcacttagtcatt

SEQ ID NO: 48726 - DNA, 20 bp, Artificial Sequence
  Description of Artificial Sequence: Synthetic oligonucleotide
  Target: ATXN2; (+) strand; PAM type: NRG; PAM sequence: AAG
ttgcacttagtcatttagaa

SEQ ID NO: 48727 - DNA, 20 bp, Artificial Sequence
  Description of Artificial Sequence: Synthetic oligonucleotide
  Target: ATXN2; (+) strand; PAM type: NRG; PAM sequence: AAG
ttagtcatttagaaaagaac

SEQ ID NO: 48728 - DNA, 20 bp, Artificial Sequence
  Description of Artificial Sequence: Synthetic oligonucleotide
  Target: ATXN2; (+) strand; PAM type: NRG; PAM sequence: TGG
aatactatttacaaatgata

SEQ ID NO: 48729 - DNA, 20 bp, Artificial Sequence
  Description of Artificial Sequence: Synthetic oligonucleotide
  Target: ATXN2; (+) strand; PAM type: NRG; PAM sequence: TGG
tatttacaaatgatatggtt

SEQ ID NO: 48730 - DNA, 20 bp, Artificial Sequence
  Description of Artificial Sequence: Synthetic oligonucleotide
  Target: ATXN2; (+) strand; PAM type: NRG; PAM sequence: AAG
tataataattctcgtgtgtc

SEQ ID NO: 48731 - DNA, 20 bp, Artificial Sequence
  Description of Artificial Sequence: Synthetic oligonucleotide
  Target: ATXN2; (+) strand; PAM type: NRG; PAM sequence: AGG
ataataattctcgtgtgtca

SEQ ID NO: 48732 - DNA, 20 bp, Artificial Sequence
  Description of Artificial Sequence: Synthetic oligonucleotide
  Target: ATXN2; (+) strand; PAM type: NRG; PAM sequence: GGG
taataattctcgtgtgtcaa

SEQ ID NO: 48733 - DNA, 20 bp, Artificial Sequence
  Description of Artificial Sequence: Synthetic oligonucleotide
  Target: ATXN2; (+) strand; PAM type: NRG; PAM sequence: AAG
aattctcgtgtgtcaagggc

SEQ ID NO: 48734 - DNA, 20 bp, Artificial Sequence
  Description of Artificial Sequence: Synthetic oligonucleotide
  Target: ATXN2; (+) strand; PAM type: NRG; PAM sequence: CAG
tcgtgtgtcaagggcaagac

SEQ ID NO: 48735 - DNA, 20 bp, Artificial Sequence
  Description of Artificial Sequence: Synthetic oligonucleotide
  Target: ATXN2; (+) strand; PAM type: NRG; PAM sequence: AGG
cgtgtgtcaagggcaagacc

SEQ ID NO: 48736 - DNA, 20 bp, Artificial Sequence
  Description of Artificial Sequence: Synthetic oligonucleotide
  Target: ATXN2; (+) strand; PAM type: NRG; PAM sequence: TGG
gtgtcaagggcaagaccagg

SEQ ID NO: 48737 - DNA, 20 bp, Artificial Sequence
  Description of Artificial Sequence: Synthetic oligonucleotide
  Target: ATXN2; (+) strand; PAM type: NRG; PAM sequence: GAG
gtcaagggcaagaccaggtg

SEQ ID NO: 48738 - DNA, 20 bp, Artificial Sequence
  Description of Artificial Sequence: Synthetic oligonucleotide
  Target: ATXN2; (+) strand; PAM type: NRG; PAM sequence: TGG
aggtggagataactgaatca

SEQ ID NO: 48739 - DNA, 20 bp, Artificial Sequence
  Description of Artificial Sequence: Synthetic oligonucleotide
  Target: ATXN2; (+) strand; PAM type: NRG; PAM sequence: GGG
ggtggagataactgaatcat

SEQ ID NO: 48740 - DNA, 20 bp, Artificial Sequence
  Description of Artificial Sequence: Synthetic oligonucleotide
  Target: ATXN2; (+) strand; PAM type: NRG; PAM sequence: GGG
gtggagataactgaatcatg

SEQ ID NO: 48741 - DNA, 20 bp, Artificial Sequence
  Description of Artificial Sequence: Synthetic oligonucleotide
  Target: ATXN2; (+) strand; PAM type: NRG; PAM sequence: GGG
tggagataactgaatcatgg

SEQ ID NO: 48742 - DNA, 20 bp, Artificial Sequence
  Description of Artificial Sequence: Synthetic oligonucleotide
  Target: ATXN2; (+) strand; PAM type: NRG; PAM sequence: CAG
agataactgaatcatggggg

SEQ ID NO: 48743 - DNA, 20 bp, Artificial Sequence
  Description of Artificial Sequence: Synthetic oligonucleotide
  Target: ATXN2; (+) strand; PAM type: NRG; PAM sequence: TAG
cccctacgctgctctcatga

SEQ ID NO: 48744 - DNA, 20 bp, Artificial Sequence
  Description of Artificial Sequence: Synthetic oligonucleotide
  Target: ATXN2; (+) strand; PAM type: NRG; PAM sequence: GAG
tacgctgctctcatgatagt

SEQ ID NO: 48745 - DNA, 20 bp, Artificial Sequence
  Description of Artificial Sequence: Synthetic oligonucleotide
  Target: ATXN2; (+) strand; PAM type: NRG; PAM sequence: GAG
ctgctctcatgatagtgagt

SEQ ID NO: 48746 - DNA, 20 bp, Artificial Sequence
  Description of Artificial Sequence: Synthetic oligonucleotide
  Target: ATXN2; (+) strand; PAM type: NRG; PAM sequence: CAG
catgatagtgagtgagttct

SEQ ID NO: 48747 - DNA, 20 bp, Artificial Sequence
  Description of Artificial Sequence: Synthetic oligonucleotide
  Target: ATXN2; (+) strand; PAM type: NRG; PAM sequence: AGG
atgatagtgagtgagttctc

SEQ ID NO: 48748 - DNA, 20 bp, Artificial Sequence
  Description of Artificial Sequence: Synthetic oligonucleotide
  Target: ATXN2; (+) strand; PAM type: NRG; PAM sequence: GAG
gatagtgagtgagttctcag

SEQ ID NO: 48749 - DNA, 20 bp, Artificial Sequence
  Description of Artificial Sequence: Synthetic oligonucleotide
  Target: ATXN2; (+) strand; PAM type: NRG; PAM sequence: TGG
tgagttctcaggagatctga

SEQ ID NO: 48750 - DNA, 20 bp, Artificial Sequence
  Description of Artificial Sequence: Synthetic oligonucleotide
  Target: ATXN2; (+) strand; PAM type: NRG; PAM sequence: AAG
aggagatctgatggttttat

SEQ ID NO: 48751 - DNA, 20 bp, Artificial Sequence
  Description of Artificial Sequence: Synthetic oligonucleotide
  Target: ATXN2; (+) strand; PAM type: NRG; PAM sequence: AGG
ggagatctgatggttttata

SEQ ID NO: 48752 - DNA, 20 bp, Artificial Sequence
  Description of Artificial Sequence: Synthetic oligonucleotide
  Target: ATXN2; (+) strand; PAM type: NRG; PAM sequence: GGG
gagatctgatggttttataa

SEQ ID NO: 48753 - DNA, 20 bp, Artificial Sequence
  Description of Artificial Sequence: Synthetic oligonucleotide
  Target: ATXN2; (+) strand; PAM type: NRG; PAM sequence: GGG
agatctgatggttttataag

SEQ ID NO: 48754 - DNA, 20 bp, Artificial Sequence
  Description of Artificial Sequence: Synthetic oligonucleotide
  Target: ATXN2; (+) strand; PAM type: NRG; PAM sequence: CAG
ggggctttccctgctttgct

SEQ ID NO: 48755 - DNA, 20 bp, Artificial Sequence
  Description of Artificial Sequence: Synthetic oligonucleotide
  Target: ATXN2; (+) strand; PAM type: NRG; PAM sequence: AAG
ctctctcctgtcgctatgtg

SEQ ID NO: 48756 - DNA, 20 bp, Artificial Sequence
  Description of Artificial Sequence: Synthetic oligonucleotide
  Target: ATXN2; (+) strand; PAM type: NRG; PAM sequence: AAG
tctcctgtcgctatgtgaag

SEQ ID NO: 48757 - DNA, 20 bp, Artificial Sequence
  Description of Artificial Sequence: Synthetic oligonucleotide
  Target: ATXN2; (+) strand; PAM type: NRG; PAM sequence: AGG
ctcctgtcgctatgtgaaga

SEQ ID NO: 48758 - DNA, 20 bp, Artificial Sequence
  Description of Artificial Sequence: Synthetic oligonucleotide
  Target: ATXN2; (+) strand; PAM type: NRG; PAM sequence: AAG
tccccttccaccatgattgt

SEQ ID NO: 48759 - DNA, 20 bp, Artificial Sequence
  Description of Artificial Sequence: Synthetic oligonucleotide
  Target: ATXN2; (+) strand; PAM type: NRG; PAM sequence: GAG
accatgattgtaagtttcct

SEQ ID NO: 48760 - DNA, 20 bp, Artificial Sequence
  Description of Artificial Sequence: Synthetic oligonucleotide
  Target: ATXN2; (+) strand; PAM type: NRG; PAM sequence: AGG
ccatgattgtaagtttcctg

SEQ ID NO: 48761 - DNA, 20 bp, Artificial Sequence
  Description of Artificial Sequence: Synthetic oligonucleotide
  Target: ATXN2; (+) strand; PAM type: NRG; PAM sequence: CAG
taagtttcctgaggcctccc

SEQ ID NO: 48762 - DNA, 20 bp, Artificial Sequence
  Description of Artificial Sequence: Synthetic oligonucleotide
  Target: ATXN2; (+) strand; PAM type: NRG; PAM sequence: CAG
ctgaggcctccccagcaatg

SEQ ID NO: 48763 - DNA, 20 bp, Artificial Sequence
  Description of Artificial Sequence: Synthetic oligonucleotide
  Target: ATXN2; (+) strand; PAM type: NRG; PAM sequence: GAG
gaggcctccccagcaatgca

SEQ ID NO: 48764 - DNA, 20 bp, Artificial Sequence
  Description of Artificial Sequence: Synthetic oligonucleotide
  Target: ATXN2; (+) strand; PAM type: NRG; PAM sequence: GAG
tccccagcaatgcagagcat

SEQ ID NO: 48765 - DNA, 20 bp, Artificial Sequence
  Description of Artificial Sequence: Synthetic oligonucleotide
  Target: ATXN2; (+) strand; PAM type: NRG; PAM sequence: CAG
tctttcctttataaattacc

SEQ ID NO: 48766 - DNA, 20 bp, Artificial Sequence
  Description of Artificial Sequence: Synthetic oligonucleotide
  Target: ATXN2; (+) strand; PAM type: NRG; PAM sequence: TAG
ctttataaattacccagtct

SEQ ID NO: 48767 - DNA, 20 bp, Artificial Sequence
  Description of Artificial Sequence: Synthetic oligonucleotide
  Target: ATXN2; (+) strand; PAM type: NRG; PAM sequence: AGG
tttataaattacccagtctt

SEQ ID NO: 48768 - DNA, 20 bp, Artificial Sequence
  Description of Artificial Sequence: Synthetic oligonucleotide
  Target: ATXN2; (+) strand; PAM type: NRG; PAM sequence: TAG
agtcttaggtatatctttat

SEQ ID NO: 48769 - DNA, 20 bp, Artificial Sequence
  Description of Artificial Sequence: Synthetic oligonucleotide
  Target: ATXN2; (+) strand; PAM type: NRG; PAM sequence: CAG
cttaggtatatctttattag

SEQ ID NO: 48770 - DNA, 20 bp, Artificial Sequence
  Description of Artificial Sequence: Synthetic oligonucleotide
  Target: ATXN2; (+) strand; PAM type: NRG; PAM sequence: AAG
tatatctttattagcagtgt

SEQ ID NO: 48771 - DNA, 20 bp, Artificial Sequence
  Description of Artificial Sequence: Synthetic oligonucleotide
  Target: ATXN2; (+) strand; PAM type: NRG; PAM sequence: TGG
ctttattagcagtgtaagaa

SEQ ID NO: 48772 - DNA, 20 bp, Artificial Sequence
  Description of Artificial Sequence: Synthetic oligonucleotide
  Target: ATXN2; (+) strand; PAM type: NRG; PAM sequence: AAG
taagaatggactaatacaac

SEQ ID NO: 48773 - DNA, 20 bp, Artificial Sequence
  Description of Artificial Sequence: Synthetic oligonucleotide
  Target: ATXN2; (+) strand; PAM type: NRG; PAM sequence: CAG
aagtaattgtacattttata

SEQ ID NO: 48774 - DNA, 20 bp, Artificial Sequence
  Description of Artificial Sequence: Synthetic oligonucleotide
  Target: ATXN2; (+) strand; PAM type: NRG; PAM sequence: GAG
gtaattgtacattttataca

SEQ ID NO: 48775 - DNA, 20 bp, Artificial Sequence
  Description of Artificial Sequence: Synthetic oligonucleotide
  Target: ATXN2; (+) strand; PAM type: NRG; PAM sequence: TAG
agtcattaaaaaaacacata

SEQ ID NO: 48776 - DNA, 20 bp, Artificial Sequence
  Description of Artificial Sequence: Synthetic oligonucleotide
  Target: ATXN2; (+) strand; PAM type: NRG; PAM sequence: AGG
gtcattaaaaaaacacatat

SEQ ID NO: 48777 - DNA, 20 bp, Artificial Sequence
  Description of Artificial Sequence: Synthetic oligonucleotide
  Target: ATXN2; (+) strand; PAM type: NRG; PAM sequence: CAG
aggctaataacatacttaaa

SEQ ID NO: 48778 - DNA, 20 bp, Artificial Sequence
  Description of Artificial Sequence: Synthetic oligonucleotide
  Target: ATXN2; (+) strand; PAM type: NRG; PAM sequence: AAG
aataacatacttaaacagtc

SEQ ID NO: 48779 - DNA, 20 bp, Artificial Sequence
  Description of Artificial Sequence: Synthetic oligonucleotide
  Target: ATXN2; (+) strand; PAM type: NRG; PAM sequence: AAG
ttatctatgacaaaattcaa

SEQ ID NO: 48780 - DNA, 20 bp, Artificial Sequence
  Description of Artificial Sequence: Synthetic oligonucleotide
  Target: ATXN2; (+) strand; PAM type: NRG; PAM sequence: AAG
tctatgacaaaattcaaaag

SEQ ID NO: 48781 - DNA, 20 bp, Artificial Sequence
  Description of Artificial Sequence: Synthetic oligonucleotide
  Target: ATXN2; (+) strand; PAM type: NRG; PAM sequence: AGG
ctatgacaaaattcaaaaga

SEQ ID NO: 48782 - DNA, 20 bp, Artificial Sequence
  Description of Artificial Sequence: Synthetic oligonucleotide
  Target: ATXN2; (+) strand; PAM type: NRG; PAM sequence: GGG
tatgacaaaattcaaaagaa

SEQ ID NO: 48783 - DNA, 20 bp, Artificial Sequence
  Description of Artificial Sequence: Synthetic oligonucleotide
  Target: ATXN2; (+) strand; PAM type: NRG; PAM sequence: TGG
aagaagggaatcttttgcct

SEQ ID NO: 48784 - DNA, 20 bp, Artificial Sequence
  Description of Artificial Sequence: Synthetic oligonucleotide
  Target: ATXN2; (+) strand; PAM type: NRG; PAM sequence: TGG
gaatcttttgccttggcatt

SEQ ID NO: 48785 - DNA, 20 bp, Artificial Sequence
  Description of Artificial Sequence: Synthetic oligonucleotide
  Target: ATXN2; (+) strand; PAM type: NRG; PAM sequence: TGG
ttgccttggcatttggtctg

SEQ ID NO: 48786 - DNA, 20 bp, Artificial Sequence
  Description of Artificial Sequence: Synthetic oligonucleotide
  Target: ATXN2; (+) strand; PAM type: NRG; PAM sequence: TAG
cttggcatttggtctgtggt

SEQ ID NO: 48787 - DNA, 20 bp, Artificial Sequence
  Description of Artificial Sequence: Synthetic oligonucleotide
  Target: ATXN2; (+) strand; PAM type: NRG; PAM sequence: GAG
tggcatttggtctgtggtta

SEQ ID NO: 48788 - DNA, 20 bp, Artificial Sequence
  Description of Artificial Sequence: Synthetic oligonucleotide
  Target: ATXN2; (+) strand; PAM type: NRG; PAM sequence: TAG
tgtggttagagatcatgttt

SEQ ID NO: 48789 - DNA, 20 bp, Artificial Sequence
  Description of Artificial Sequence: Synthetic oligonucleotide
  Target: ATXN2; (+) strand; PAM type: NRG; PAM sequence: AAG
agctactaattttccccaat

SEQ ID NO: 48790 - DNA, 20 bp, Artificial Sequence
  Description of Artificial Sequence: Synthetic oligonucleotide
  Target: ATXN2; (+) strand; PAM type: NRG; PAM sequence: AAG
ttccccaataagtaacatta

SEQ ID NO: 48791 - DNA, 20 bp, Artificial Sequence
  Description of Artificial Sequence: Synthetic oligonucleotide
  Target: ATXN2; (+) strand; PAM type: NRG; PAM sequence: TAG
aacattaaagttactcaccg

SEQ ID NO: 48792 - DNA, 20 bp, Artificial Sequence
  Description of Artificial Sequence: Synthetic oligonucleotide
  Target: ATXN2; (+) strand; PAM type: NRG; PAM sequence: GAG
aaagttactcaccgtagact

SEQ ID NO: 48793 - DNA, 20 bp, Artificial Sequence
  Description of Artificial Sequence: Synthetic oligonucleotide
  Target: ATXN2; (+) strand; PAM type: NRG; PAM sequence: AGG
aagttactcaccgtagactg

SEQ ID NO: 48794 - DNA, 20 bp, Artificial Sequence
  Description of Artificial Sequence: Synthetic oligonucleotide
  Target: ATXN2; (+) strand; PAM type: NRG; PAM sequence: CAG
ttactcaccgtagactgagg

SEQ ID NO: 48795 - DNA, 20 bp, Artificial Sequence
  Description of Artificial Sequence: Synthetic oligonucleotide
  Target: ATXN2; (+) strand; PAM type: NRG; PAM sequence: AAG
ttactgtttcgacctctgaa

SEQ ID NO: 48796 - DNA, 20 bp, Artificial Sequence
  Description of Artificial Sequence: Synthetic oligonucleotide
  Target: ATXN2; (+) strand; PAM type: NRG; PAM sequence: CAG
attatttttattaaattcaa

SEQ ID NO: 48797 - DNA, 20 bp, Artificial Sequence
  Description of Artificial Sequence: Synthetic oligonucleotide
  Target: ATXN2; (+) strand; PAM type: NRG; PAM sequence: AGG
ttatttttattaaattcaac

SEQ ID NO: 48798 - DNA, 20 bp, Artificial Sequence
  Description of Artificial Sequence: Synthetic oligonucleotide
  Target: ATXN2; (+) strand; PAM type: NRG; PAM sequence: AAG
ttaaattcaacaggctaaat

SEQ ID NO: 48799 - DNA, 20 bp, Artificial Sequence
  Description of Artificial Sequence: Synthetic oligonucleotide
  Target: ATXN2; (+) strand; PAM type: NRG; PAM sequence: AAG
aatataattccattcaaata

SEQ ID NO: 48800 - DNA, 20 bp, Artificial Sequence
  Description of Artificial Sequence: Synthetic oligonucleotide
  Target: ATXN2; (+) strand; PAM type: NRG; PAM sequence: AGG
atataattccattcaaataa

SEQ ID NO: 48801 - DNA, 20 bp, Artificial Sequence
  Description of Artificial Sequence: Synthetic oligonucleotide
  Target: ATXN2; (+) strand; PAM type: NRG; PAM sequence: GAG
ataattccattcaaataaag

SEQ ID NO: 48802 - DNA, 20 bp, Artificial Sequence
  Description of Artificial Sequence: Synthetic oligonucleotide
  Target: ATXN2; (+) strand; PAM type: NRG; PAM sequence: GAG
aattccattcaaataaagga

SEQ ID NO: 48803 - DNA, 20 bp, Artificial Sequence
  Description of Artificial Sequence: Synthetic oligonucleotide
  Target: ATXN2; (+) strand; PAM type: NRG; PAM sequence: AGG
attccattcaaataaaggag

SEQ ID NO: 48804 - DNA, 20 bp, Artificial Sequence
  Description of Artificial Sequence: Synthetic oligonucleotide
  Target: ATXN2; (+) strand; PAM type: NRG; PAM sequence: TGG
aataaaggagaggctatctg

SEQ ID NO: 48805 - DNA, 20 bp, Artificial Sequence
  Description of Artificial Sequence: Synthetic oligonucleotide
  Target: ATXN2; (+) strand; PAM type: NRG; PAM sequence: GGG
ataaaggagaggctatctgt

SEQ ID NO: 48806 - DNA, 20 bp, Artificial Sequence
  Description of Artificial Sequence: Synthetic oligonucleotide
  Target: ATXN2; (+) strand; PAM type: NRG; PAM sequence: GGG
taaaggagaggctatctgtg

SEQ ID NO: 48807 - DNA, 20 bp, Artificial Sequence
  Description of Artificial Sequence: Synthetic oligonucleotide
  Target: ATXN2; (+) strand; PAM type: NRG; PAM sequence: GAG
aaggagaggctatctgtggg

SEQ ID NO: 48808 - DNA, 20 bp, Artificial Sequence
  Description of Artificial Sequence: Synthetic oligonucleotide
  Target: ATXN2; (+) strand; PAM type: NRG; PAM sequence: GAG
ggagaggctatctgtgggga

SEQ ID NO: 48809 - DNA, 20 bp, Artificial Sequence
  Description of Artificial Sequence: Synthetic oligonucleotide
  Target: ATXN2; (+) strand; PAM type: NRG; PAM sequence: AAG
gggagagctcacctaatatt

SEQ ID NO: 48810 - DNA, 20 bp, Artificial Sequence
  Description of Artificial Sequence: Synthetic oligonucleotide
  Target: ATXN2; (+) strand; PAM type: NRG; PAM sequence: AAG
ctcacctaatattaagtcta

SEQ ID NO: 48811 - DNA, 20 bp, Artificial Sequence
  Description of Artificial Sequence: Synthetic oligonucleotide
  Target: ATXN2; (+) strand; PAM type: NRG; PAM sequence: AGG
tcacctaatattaagtctaa

SEQ ID NO: 48812 - DNA, 20 bp, Artificial Sequence
  Description of Artificial Sequence: Synthetic oligonucleotide
  Target: ATXN2; (+) strand; PAM type: NRG; PAM sequence: AAG
attaagtctaaaggctacct

SEQ ID NO: 48813 - DNA, 20 bp, Artificial Sequence
  Description of Artificial Sequence: Synthetic oligonucleotide
  Target: ATXN2; (+) strand; PAM type: NRG; PAM sequence: AGG
ttaagtctaaaggctaccta

SEQ ID NO: 48814 - DNA, 20 bp, Artificial Sequence
  Description of Artificial Sequence: Synthetic oligonucleotide
  Target: ATXN2; (+) strand; PAM type: NRG; PAM sequence: TGG
gtctaaaggctacctaagga

SEQ ID NO: 48815 - DNA, 20 bp, Artificial Sequence
  Description of Artificial Sequence: Synthetic oligonucleotide
  Target: ATXN2; (+) strand; PAM type: NRG; PAM sequence: TGG
ctacctatgcactgcttgcc

SEQ ID NO: 48816 - DNA, 20 bp, Artificial Sequence
  Description of Artificial Sequence: Synthetic oligonucleotide
  Target: ATXN2; (+) strand; PAM type: NRG; PAM sequence: GAG
acctatgcactgcttgcctg

SEQ ID NO: 48817 - DNA, 20 bp, Artificial Sequence
  Description of Artificial Sequence: Synthetic oligonucleotide
  Target: ATXN2; (+) strand; PAM type: NRG; PAM sequence: CAG
gcttgcctggagacccacaa

SEQ ID NO: 48818 - DNA, 20 bp, Artificial Sequence
  Description of Artificial Sequence: Synthetic oligonucleotide
  Target: ATXN2; (+) strand; PAM type: NRG; PAM sequence: AGG
cttgcctggagacccacaac

SEQ ID NO: 48819 - DNA, 20 bp, Artificial Sequence
  Description of Artificial Sequence: Synthetic oligonucleotide
  Target: ATXN2; (+) strand; PAM type: NRG; PAM sequence: TAG
gcctggagacccacaacagg

SEQ ID NO: 48820 - DNA, 20 bp, Artificial Sequence
  Description of Artificial Sequence: Synthetic oligonucleotide
  Target: ATXN2; (+) strand; PAM type: NRG; PAM sequence: AGG
cctggagacccacaacaggt

SEQ ID NO: 48821 - DNA, 20 bp, Artificial Sequence
  Description of Artificial Sequence: Synthetic oligonucleotide
  Target: ATXN2; (+) strand; PAM type: NRG; PAM sequence: GGG
ctggagacccacaacaggta

SEQ ID NO: 48822 - DNA, 20 bp, Artificial Sequence
  Description of Artificial Sequence: Synthetic oligonucleotide
  Target: ATXN2; (+) strand; PAM type: NRG; PAM sequence: GGG
tggagacccacaacaggtag

SEQ ID NO: 48823 - DNA, 20 bp, Artificial Sequence
  Description of Artificial Sequence: Synthetic oligonucleotide
  Target: ATXN2; (+) strand; PAM type: NRG; PAM sequence: TAG
cccacaacaggtaggggtca

SEQ ID NO: 48824 - DNA, 20 bp, Artificial Sequence
  Description of Artificial Sequence: Synthetic oligonucleotide
  Target: ATXN2; (+) strand; PAM type: NRG; PAM sequence: AAG
acaacaggtaggggtcatag

SEQ ID NO: 48825 - DNA, 20 bp, Artificial Sequence
  Description of Artificial Sequence: Synthetic oligonucleotide
  Target: ATXN2; (+) strand; PAM type: NRG; PAM sequence: AGG
caacaggtaggggtcataga

SEQ ID NO: 48826 - DNA, 20 bp, Artificial Sequence
  Description of Artificial Sequence: Synthetic oligonucleotide
  Target: ATXN2; (+) strand; PAM type: NRG; PAM sequence: AAG
caggtaggggtcatagaagg

SEQ ID NO: 48827 - DNA, 20 bp, Artificial Sequence
  Description of Artificial Sequence: Synthetic oligonucleotide
  Target: ATXN2; (+) strand; PAM type: NRG; PAM sequence: TAG
ggtcatagaaggaagcaaac

SEQ ID NO: 48828 - DNA, 20 bp, Artificial Sequence
  Description of Artificial Sequence: Synthetic oligonucleotide
  Target: ATXN2; (+) strand; PAM type: NRG; PAM sequence: AAG
tcatcaaaatcaaataaata

SEQ ID NO: 48829 - DNA, 20 bp, Artificial Sequence
  Description of Artificial Sequence: Synthetic oligonucleotide
  Target: ATXN2; (+) strand; PAM type: NRG; PAM sequence: TAG
atcaaataaataaagtaaaa

SEQ ID NO: 48830 - DNA, 20 bp, Artificial Sequence
  Description of Artificial Sequence: Synthetic oligonucleotide
  Target: ATXN2; (+) strand; PAM type: NRG; PAM sequence: TGG
aataaagtaaaatagcctac

SEQ ID NO: 48831 - DNA, 20 bp, Artificial Sequence
  Description of Artificial Sequence: Synthetic oligonucleotide
  Target: ATXN2; (+) strand; PAM type: NRG; PAM sequence: AAG
aaagtaaaatagcctactgg

SEQ ID NO: 48832 - DNA, 20 bp, Artificial Sequence
  Description of Artificial Sequence: Synthetic oligonucleotide
  Target: ATXN2; (+) strand; PAM type: NRG; PAM sequence: TAG
acgtaaattaataataatta

SEQ ID NO: 48833 - DNA, 20 bp, Artificial Sequence
  Description of Artificial Sequence: Synthetic oligonucleotide
  Target: ATXN2; (+) strand; PAM type: NRG; PAM sequence: CAG
aaattaataataattatagc

SEQ ID NO: 48834 - DNA, 20 bp, Artificial Sequence
  Description of Artificial Sequence: Synthetic oligonucleotide
  Target: ATXN2; (+) strand; PAM type: NRG; PAM sequence: AGG
aattaataataattatagcc

SEQ ID NO: 48835 - DNA, 20 bp, Artificial Sequence
  Description of Artificial Sequence: Synthetic oligonucleotide
  Target: ATXN2; (+) strand; PAM type: NRG; PAM sequence: TGG
aataattatagccaggcatg

SEQ ID NO: 48836 - DNA, 20 bp, Artificial Sequence
  Description of Artificial Sequence: Synthetic oligonucleotide
  Target: ATXN2; (+) strand; PAM type: NRG; PAM sequence: TAG
aggcatgtggcatgcacctc

SEQ ID NO: 48837 - DNA, 20 bp, Artificial Sequence
  Description of Artificial Sequence: Synthetic oligonucleotide
  Target: ATXN2; (+) strand; PAM type: NRG; PAM sequence: TAG
gtggcatgcacctctagtcc

SEQ ID NO: 48838 - DNA, 20 bp, Artificial Sequence
  Description of Artificial Sequence: Synthetic oligonucleotide
  Target: ATXN2; (+) strand; PAM type: NRG; PAM sequence: CAG
cacctctagtcctagctact

SEQ ID NO: 48839 - DNA, 20 bp, Artificial Sequence
  Description of Artificial Sequence: Synthetic oligonucleotide
  Target: ATXN2; (+) strand; PAM type: NRG; PAM sequence: AGG
acctctagtcctagctactc

SEQ ID NO: 48840 - DNA, 20 bp, Artificial Sequence
  Description of Artificial Sequence: Synthetic oligonucleotide
  Target: ATXN2; (+) strand; PAM type: NRG; PAM sequence: GAG
ctctagtcctagctactcag

SEQ ID NO: 48841 - DNA, 20 bp, Artificial Sequence
  Description of Artificial Sequence: Synthetic oligonucleotide
  Target: ATXN2; (+) strand; PAM type: NRG; PAM sequence: AGG
tctagtcctagctactcagg

SEQ ID NO: 48842 - DNA, 20 bp, Artificial Sequence
  Description of Artificial Sequence: Synthetic oligonucleotide
  Target: ATXN2; (+) strand; PAM type: NRG; PAM sequence: GAG
tcctagctactcaggaggct

SEQ ID NO: 48843 - DNA, 20 bp, Artificial Sequence
  Description of Artificial Sequence: Synthetic oligonucleotide
  Target: ATXN2; (+) strand; PAM type: NRG; PAM sequence: AGG
cctagctactcaggaggctg

SEQ ID NO: 48844 - DNA, 20 bp, Artificial Sequence
  Description of Artificial Sequence: Synthetic oligonucleotide
  Target: ATXN2; (+) strand; PAM type: NRG; PAM sequence: CAG
agctactcaggaggctgagg

SEQ ID NO: 48845 - DNA, 20 bp, Artificial Sequence
  Description of Artificial Sequence: Synthetic oligonucleotide
  Target: ATXN2; (+) strand; PAM type: NRG; PAM sequence: AGG
gctactcaggaggctgaggc

SEQ ID NO: 48846 - DNA, 20 bp, Artificial Sequence
  Description of Artificial Sequence: Synthetic oligonucleotide
  Target: ATXN2; (+) strand; PAM type: NRG; PAM sequence: CAG
ggaggctgaggcaggatcac

SEQ ID NO: 48847 - DNA, 20 bp, Artificial Sequence
  Description of Artificial Sequence: Synthetic oligonucleotide
  Target: ATXN2; (+) strand; PAM type: NRG; PAM sequence: GAG
aggctgaggcaggatcacca

SEQ ID NO: 48848 - DNA, 20 bp, Artificial Sequence
  Description of Artificial Sequence: Synthetic oligonucleotide
  Target: ATXN2; (+) strand; PAM type: NRG; PAM sequence: CAG
gaggcaggatcaccagagtc

SEQ ID NO: 48849 - DNA, 20 bp, Artificial Sequence
  Description of Artificial Sequence: Synthetic oligonucleotide
  Target: ATXN2; (+) strand; PAM type: NRG; PAM sequence: AGG
aggcaggatcaccagagtcc

SEQ ID NO: 48850 - DNA, 20 bp, Artificial Sequence
  Description of Artificial Sequence: Synthetic oligonucleotide
  Target: ATXN2; (+) strand; PAM type: NRG; PAM sequence: GAG
gcaggatcaccagagtccag

SEQ ID NO: 48851 - DNA, 20 bp, Artificial Sequence
  Description of Artificial Sequence: Synthetic oligonucleotide
  Target: ATXN2; (+) strand; PAM type: NRG; PAM sequence: GAG
tcaccagagtccaggagtct

SEQ ID NO: 48852 - DNA, 20 bp, Artificial Sequence
  Description of Artificial Sequence: Synthetic oligonucleotide
  Target: ATXN2; (+) strand; PAM type: NRG; PAM sequence: AGG
caccagagtccaggagtctg

SEQ ID NO: 48853 - DNA, 20 bp, Artificial Sequence
  Description of Artificial Sequence: Synthetic oligonucleotide
  Target: ATXN2; (+) strand; PAM type: NRG; PAM sequence: CAG
agtccaggagtctgaggctg

SEQ ID NO: 48854 - DNA, 20 bp, Artificial Sequence
  Description of Artificial Sequence: Synthetic oligonucleotide
  Target: ATXN2; (+) strand; PAM type: NRG; PAM sequence: TAG
ccaggagtctgaggctgcag

SEQ ID NO: 48855 - DNA, 20 bp, Artificial Sequence
  Description of Artificial Sequence: Synthetic oligonucleotide
  Target: ATXN2; (+) strand; PAM type: NRG; PAM sequence: AGG
caggagtctgaggctgcagt

SEQ ID NO: 48856 - DNA, 20 bp, Artificial Sequence
  Description of Artificial Sequence: Synthetic oligonucleotide
  Target: ATXN2; (+) strand; PAM type: NRG; PAM sequence: CAG
aggctacgatcattccactg

SEQ ID NO: 48857 - DNA, 20 bp, Artificial Sequence
  Description of Artificial Sequence: Synthetic oligonucleotide
  Target: ATXN2; (+) strand; PAM type: NRG; PAM sequence: TAG
acgatcattccactgcagtc

SEQ ID NO: 48858 - DNA, 20 bp, Artificial Sequence
  Description of Artificial Sequence: Synthetic oligonucleotide
  Target: ATXN2; (+) strand; PAM type: NRG; PAM sequence: TGG
cattccactgcagtctagcc

SEQ ID NO: 48859 - DNA, 20 bp, Artificial Sequence
  Description of Artificial Sequence: Synthetic oligonucleotide
  Target: ATXN2; (+) strand; PAM type: NRG; PAM sequence: GGG
attccactgcagtctagcct

SEQ ID NO: 48860 - DNA, 20 bp, Artificial Sequence
  Description of Artificial Sequence: Synthetic oligonucleotide
  Target: ATXN2; (+) strand; PAM type: NRG; PAM sequence: AAG
gcagtctagcctgggcgaca

SEQ ID NO: 48861 - DNA, 20 bp, Artificial Sequence
  Description of Artificial Sequence: Synthetic oligonucleotide
  Target: ATXN2; (+) strand; PAM type: NRG; PAM sequence: AAG
tctagcctgggcgacaaagc

SEQ ID NO: 48862 - DNA, 20 bp, Artificial Sequence
  Description of Artificial Sequence: Synthetic oligonucleotide
  Target: ATXN2; (+) strand; PAM type: NRG; PAM sequence: AAG
aataataatctttactccca

SEQ ID NO: 48863 - DNA, 20 bp, Artificial Sequence
  Description of Artificial Sequence: Synthetic oligonucleotide
  Target: ATXN2; (+) strand; PAM type: NRG; PAM sequence: AAG
agtaaccaatcactgttata

SEQ ID NO: 48864 - DNA, 20 bp, Artificial Sequence
  Description of Artificial Sequence: Synthetic oligonucleotide
  Target: ATXN2; (+) strand; PAM type: NRG; PAM sequence: GAG
taaccaatcactgttataaa

SEQ ID NO: 48865 - DNA, 20 bp, Artificial Sequence
  Description of Artificial Sequence: Synthetic oligonucleotide
  Target: ATXN2; (+) strand; PAM type: NRG; PAM sequence: CAG
cactgttataaagagctatt

SEQ ID NO: 48866 - DNA, 20 bp, Artificial Sequence
  Description of Artificial Sequence: Synthetic oligonucleotide
  Target: ATXN2; (+) strand; PAM type: NRG; PAM sequence: AAG
tgttataaagagctattcag

SEQ ID NO: 48867 - DNA, 20 bp, Artificial Sequence
  Description of Artificial Sequence: Synthetic oligonucleotide
  Target: ATXN2; (+) strand; PAM type: NRG; PAM sequence: CGG
agctattcagaagcaaaaca

SEQ ID NO: 48868 - DNA, 20 bp, Artificial Sequence
  Description of Artificial Sequence: Synthetic oligonucleotide
  Target: ATXN2; (+) strand; PAM type: NRG; PAM sequence: CAG
tattcttgatttaaccaaca

SEQ ID NO: 48869 - DNA, 20 bp, Artificial Sequence
  Description of Artificial Sequence: Synthetic oligonucleotide
  Target: ATXN2; (+) strand; PAM type: NRG; PAM sequence: AAG
caacacagatgactgacacc

SEQ ID NO: 48870 - DNA, 20 bp, Artificial Sequence
  Description of Artificial Sequence: Synthetic oligonucleotide
  Target: ATXN2; (+) strand; PAM type: NRG; PAM sequence: AAG
tatttctcccccatctataa

SEQ ID NO: 48871 - DNA, 20 bp, Artificial Sequence
  Description of Artificial Sequence: Synthetic oligonucleotide
  Target: ATXN2; (+) strand; PAM type: NRG; PAM sequence: CAG
ccccatctataaaagaaaaa

SEQ ID NO: 48872 - DNA, 20 bp, Artificial Sequence
  Description of Artificial Sequence: Synthetic oligonucleotide
  Target: ATXN2; (+) strand; PAM type: NRG; PAM sequence: AGG
cccatctataaaagaaaaac

SEQ ID NO: 48873 - DNA, 20 bp, Artificial Sequence
  Description of Artificial Sequence: Synthetic oligonucleotide
  Target: ATXN2; (+) strand; PAM type: NRG; PAM sequence: TGG
taaaagaaaaacaggtcata

SEQ ID NO: 48874 - DNA, 20 bp, Artificial Sequence
  Description of Artificial Sequence: Synthetic oligonucleotide
  Target: ATXN2; (+) strand; PAM type: NRG; PAM sequence: GGG
aaaagaaaaacaggtcatat

SEQ ID NO: 48875 - DNA, 20 bp, Artificial Sequence
  Description of Artificial Sequence: Synthetic oligonucleotide
  Target: ATXN2; (+) strand; PAM type: NRG; PAM sequence: CGG
gaaaaacaggtcatatgggc

SEQ ID NO: 48876 - DNA, 20 bp, Artificial Sequence
  Description of Artificial Sequence: Synthetic oligonucleotide
  Target: ATXN2; (+) strand; PAM type: NRG; PAM sequence: GGG
aaaaacaggtcatatgggcc

SEQ ID NO: 48877 - DNA, 20 bp, Artificial Sequence
  Description of Artificial Sequence: Synthetic oligonucleotide
  Target: ATXN2; (+) strand; PAM type: NRG; PAM sequence: CAG
caggtcatatgggccgggcg

SEQ ID NO: 48878 - DNA, 20 bp, Artificial Sequence
  Description of Artificial Sequence: Synthetic oligonucleotide
  Target: ATXN2; (+) strand; PAM type: NRG; PAM sequence: TGG
gtcatatgggccgggcgcag

SEQ ID NO: 48879 - DNA, 20 bp, Artificial Sequence
  Description of Artificial Sequence: Synthetic oligonucleotide
  Target: ATXN2; (+) strand; PAM type: NRG; PAM sequence: CAG
gtggctcatgcctgtaatcc

SEQ ID NO: 48880 - DNA, 20 bp, Artificial Sequence
  Description of Artificial Sequence: Synthetic oligonucleotide
  Target: ATXN2; (+) strand; PAM type: NRG; PAM sequence: TGG
tgcctgtaatcccagcactt

SEQ ID NO: 48881 - DNA, 20 bp, Artificial Sequence
  Description of Artificial Sequence: Synthetic oligonucleotide
  Target: ATXN2; (+) strand; PAM type: NRG; PAM sequence: GGG
gcctgtaatcccagcacttt

SEQ ID NO: 48882 - DNA, 20 bp, Artificial Sequence
  Description of Artificial Sequence: Synthetic oligonucleotide
  Target: ATXN2; (+) strand; PAM type: NRG; PAM sequence: GAG
ctgtaatcccagcactttgg

SEQ ID NO: 48883 - DNA, 20 bp, Artificial Sequence
  Description of Artificial Sequence: Synthetic oligonucleotide
  Target: ATXN2; (+) strand; PAM type: NRG; PAM sequence: AGG
tgtaatcccagcactttggg

SEQ ID NO: 48884 - DNA, 20 bp, Artificial Sequence
  Description of Artificial Sequence: Synthetic oligonucleotide
  Target: ATXN2; (+) strand; PAM type: NRG; PAM sequence: CAG
aatcccagcactttgggagg

SEQ ID NO: 48885 - DNA, 20 bp, Artificial Sequence
  Description of Artificial Sequence: Synthetic oligonucleotide
  Target: ATXN2; (+) strand; PAM type: NRG; PAM sequence: GAG
tcccagcactttgggaggca

SEQ ID NO: 48886 - DNA, 20 bp, Artificial Sequence
  Description of Artificial Sequence: Synthetic oligonucleotide
  Target: ATXN2; (+) strand; PAM type: NRG; PAM sequence: AGG
cccagcactttgggaggcag

SEQ ID NO: 48887 - DNA, 20 bp, Artificial Sequence
  Description of Artificial Sequence: Synthetic oligonucleotide
  Target: ATXN2; (+) strand; PAM type: NRG; PAM sequence: TGG
agcactttgggaggcagagg

SEQ ID NO: 48888 - DNA, 20 bp, Artificial Sequence
  Description of Artificial Sequence: Synthetic oligonucleotide
  Target: ATXN2; (+) strand; PAM type: NRG; PAM sequence: GGG
gcactttgggaggcagaggt

SEQ ID NO: 48889 - DNA, 20 bp, Artificial Sequence
  Description of Artificial Sequence: Synthetic oligonucleotide
  Target: ATXN2; (+) strand; PAM type: NRG; PAM sequence: CAG
ctttgggaggcagaggtggg

SEQ ID NO: 48890 - DNA, 20 bp, Artificial Sequence
  Description of Artificial Sequence: Synthetic oligonucleotide
  Target: ATXN2; (+) strand; PAM type: NRG; PAM sequence: AAG
ggcagaggtgggcagatcac

SEQ ID NO: 48891 - DNA, 20 bp, Artificial Sequence
  Description of Artificial Sequence: Synthetic oligonucleotide
  Target: ATXN2; (+) strand; PAM type: NRG; PAM sequence: AGG
gcagaggtgggcagatcaca

SEQ ID NO: 48892 - DNA, 20 bp, Artificial Sequence
  Description of Artificial Sequence: Synthetic oligonucleotide
  Target: ATXN2; (+) strand; PAM type: NRG; PAM sequence: CAG
aggtgggcagatcacaaggt

SEQ ID NO: 48893 - DNA, 20 bp, Artificial Sequence
  Description of Artificial Sequence: Synthetic oligonucleotide
  Target: ATXN2; (+) strand; PAM type: NRG; PAM sequence: AGG
ggtgggcagatcacaaggtc

SEQ ID NO: 48894 - DNA, 20 bp, Artificial Sequence
  Description of Artificial Sequence: Synthetic oligonucleotide
  Target: ATXN2; (+) strand; PAM type: NRG; PAM sequence: GAG
tgggcagatcacaaggtcag

SEQ ID NO: 48895 - DNA, 20 bp, Artificial Sequence
  Description of Artificial Sequence: Synthetic oligonucleotide
  Target: ATXN2; (+) strand; PAM type: NRG; PAM sequence: GAG
gatcacaaggtcaggagttc

SEQ ID NO: 48896 - DNA, 20 bp, Artificial Sequence
  Description of Artificial Sequence: Synthetic oligonucleotide
  Target: ATXN2; (+) strand; PAM type: NRG; PAM sequence: TGG
tcaggagttcgagaccatcc

SEQ ID NO: 48897 - DNA, 20 bp, Artificial Sequence
  Description of Artificial Sequence: Synthetic oligonucleotide
  Target: ATXN2; (+) strand; PAM type: NRG; PAM sequence: CAG
cgagaccatcctggctaaca

SEQ ID NO: 48898 - DNA, 20 bp, Artificial Sequence
  Description of Artificial Sequence: Synthetic oligonucleotide
  Target: ATXN2; (+) strand; PAM type: NRG; PAM sequence: AAG
agtgaaaccccatctctact

SEQ ID NO: 48899 - DNA, 20 bp, Artificial Sequence
  Description of Artificial Sequence: Synthetic oligonucleotide
  Target: ATXN2; (+) strand; PAM type: NRG; PAM sequence: TAG
tctactaagaataaaaaaat

SEQ ID NO: 48900 - DNA, 20 bp, Artificial Sequence
  Description of Artificial Sequence: Synthetic oligonucleotide
  Target: ATXN2; (+) strand; PAM type: NRG; PAM sequence: CAG
ctaagaataaaaaaattagc

SEQ ID NO: 48901 - DNA, 20 bp, Artificial Sequence
  Description of Artificial Sequence: Synthetic oligonucleotide
  Target: ATXN2; (+) strand; PAM type: NRG; PAM sequence: AGG
taagaataaaaaaattagcc

SEQ ID NO: 48902 - DNA, 20 bp, Artificial Sequence
  Description of Artificial Sequence: Synthetic oligonucleotide
  Target: ATXN2; (+) strand; PAM type: NRG; PAM sequence: TGG
ataaaaaaattagccaggtg

SEQ ID NO: 48903 - DNA, 20 bp, Artificial Sequence
  Description of Artificial Sequence: Synthetic oligonucleotide
  Target: ATXN2; (+) strand; PAM type: NRG; PAM sequence: TGG
aaaaaattagccaggtgtgg

SEQ ID NO: 48904 - DNA, 20 bp, Artificial Sequence
  Description of Artificial Sequence: Synthetic oligonucleotide
  Target: ATXN2; (+) strand; PAM type: NRG; PAM sequence: TAG
ggtgtggtggcatgcgcctg

SEQ ID NO: 48905 - DNA, 20 bp, Artificial Sequence
  Description of Artificial Sequence: Synthetic oligonucleotide
  Target: ATXN2; (+) strand; PAM type: NRG; PAM sequence: CAG
gtggcatgcgcctgtagtcc

SEQ ID NO: 48906 - DNA, 20 bp, Artificial Sequence
  Description of Artificial Sequence: Synthetic oligonucleotide
  Target: ATXN2; (+) strand; PAM type: NRG; PAM sequence: TAG
gcgcctgtagtcccagctac

SEQ ID NO: 48907 - DNA, 20 bp, Artificial Sequence
  Description of Artificial Sequence: Synthetic oligonucleotide
  Target: ATXN2; (+) strand; PAM type: NRG; PAM sequence: AGG
cgcctgtagtcccagctact

SEQ ID NO: 48908 - DNA, 20 bp, Artificial Sequence
  Description of Artificial Sequence: Synthetic oligonucleotide
  Target: ATXN2; (+) strand; PAM type: NRG; PAM sequence: GGG
gcctgtagtcccagctacta

SEQ ID NO: 48909 - DNA, 20 bp, Artificial Sequence
  Description of Artificial Sequence: Synthetic oligonucleotide
  Target: ATXN2; (+) strand; PAM type: NRG; PAM sequence: GAG
ctgtagtcccagctactagg

SEQ ID NO: 48910 - DNA, 20 bp, Artificial Sequence
  Description of Artificial Sequence: Synthetic oligonucleotide
  Target: ATXN2; (+) strand; PAM type: NRG; PAM sequence: AGG
tgtagtcccagctactaggg

SEQ ID NO: 48911 - DNA, 20 bp, Artificial Sequence
  Description of Artificial Sequence: Synthetic oligonucleotide
  Target: ATXN2; (+) strand; PAM type: NRG; PAM sequence: GAG
tcccagctactagggaggct

SEQ ID NO: 48912 - DNA, 20 bp, Artificial Sequence
  Description of Artificial Sequence: Synthetic oligonucleotide
  Target: ATXN2; (+) strand; PAM type: NRG; PAM sequence: AGG
cccagctactagggaggctg

SEQ ID NO: 48913 - DNA, 20 bp, Artificial Sequence
  Description of Artificial Sequence: Synthetic oligonucleotide
  Target: ATXN2; (+) strand; PAM type: NRG; PAM sequence: CAG
agctactagggaggctgagg

SEQ ID NO: 48914 - DNA, 20 bp, Artificial Sequence
  Description of Artificial Sequence: Synthetic oligonucleotide
  Target: ATXN2; (+) strand; PAM type: NRG; PAM sequence: AAG
tactagggaggctgaggcag

SEQ ID NO: 48915 - DNA, 20 bp, Artificial Sequence
  Description of Artificial Sequence: Synthetic oligonucleotide
  Target: ATXN2; (+) strand; PAM type: NRG; PAM sequence: TGG
gcagaagaatcgcctgaacc

SEQ ID NO: 48916 - DNA, 20 bp, Artificial Sequence
  Description of Artificial Sequence: Synthetic oligonucleotide
  Target: ATXN2; (+) strand; PAM type: NRG; PAM sequence: GGG
cagaagaatcgcctgaacct

SEQ ID NO: 48917 - DNA, 20 bp, Artificial Sequence
  Description of Artificial Sequence: Synthetic oligonucleotide
  Target: ATXN2; (+) strand; PAM type: NRG; PAM sequence: GAG
gaagaatcgcctgaacctgg

SEQ ID NO: 48918 - DNA, 20 bp, Artificial Sequence
  Description of Artificial Sequence: Synthetic oligonucleotide
  Target: ATXN2; (+) strand; PAM type: NRG; PAM sequence: AGG
aagaatcgcctgaacctggg

SEQ ID NO: 48919 - DNA, 20 bp, Artificial Sequence
  Description of Artificial Sequence: Synthetic oligonucleotide
  Target: ATXN2; (+) strand; PAM type: NRG; PAM sequence: TGG
aatcgcctgaacctgggagg

SEQ ID NO: 48920 - DNA, 20 bp, Artificial Sequence
  Description of Artificial Sequence: Synthetic oligonucleotide
  Target: ATXN2; (+) strand; PAM type: NRG; PAM sequence: GAG
tcgcctgaacctgggaggtg

SEQ ID NO: 48921 - DNA, 20 bp, Artificial Sequence
  Description of Artificial Sequence: Synthetic oligonucleotide
  Target: ATXN2; (+) strand; PAM type: NRG; PAM sequence: AGG
cgcctgaacctgggaggtgg

SEQ ID NO: 48922 - DNA, 20 bp, Artificial Sequence
  Description of Artificial Sequence: Synthetic oligonucleotide
  Target: ATXN2; (+) strand; PAM type: NRG; PAM sequence: CAG
aacctgggaggtggaggttg

SEQ ID NO: 48923 - DNA, 20 bp, Artificial Sequence
  Description of Artificial Sequence: Synthetic oligonucleotide
  Target: ATXN2; (+) strand; PAM type: NRG; PAM sequence: GAG
tgggaggtggaggttgcagt

SEQ ID NO: 48924 - DNA, 20 bp, Artificial Sequence
  Description of Artificial Sequence: Synthetic oligonucleotide
  Target: ATXN2; (+) strand; PAM type: NRG; PAM sequence: GAG
ggtggaggttgcagtgagct

SEQ ID NO: 48925 - DNA, 20 bp, Artificial Sequence
  Description of Artificial Sequence: Synthetic oligonucleotide
  Target: ATXN2; (+) strand; PAM type: NRG; PAM sequence: CAG
gagaccgccccattgtactc

SEQ ID NO: 48926 - DNA, 20 bp, Artificial Sequence
  Description of Artificial Sequence: Synthetic oligonucleotide
  Target: ATXN2; (+) strand; PAM type: NRG; PAM sequence: CGG
ccgccccattgtactccagc

SEQ ID NO: 48927 - DNA, 20 bp, Artificial Sequence
  Description of Artificial Sequence: Synthetic oligonucleotide
  Target: ATXN2; (+) strand; PAM type: NRG; PAM sequence: GGG
cgccccattgtactccagcc

SEQ ID NO: 48928 - DNA, 20 bp, Artificial Sequence
  Description of Artificial Sequence: Synthetic oligonucleotide
  Target: ATXN2; (+) strand; PAM type: NRG; PAM sequence: GGG
gccccattgtactccagccg

SEQ ID NO: 48929 - DNA, 20 bp, Artificial Sequence
  Description of Artificial Sequence: Synthetic oligonucleotide
  Target: ATXN2; (+) strand; PAM type: NRG; PAM sequence: CAG
ttgtactccagccggggtga

SEQ ID NO: 48930 - DNA, 20 bp, Artificial Sequence
  Description of Artificial Sequence: Synthetic oligonucleotide
  Target: ATXN2; (+) strand; PAM type: NRG; PAM sequence: GAG
gtactccagccggggtgaca

SEQ ID NO: 48931 - DNA, 20 bp, Artificial Sequence
  Description of Artificial Sequence: Synthetic oligonucleotide
  Target: ATXN2; (+) strand; PAM type: NRG; PAM sequence: AAG
tccagccggggtgacagagc

SEQ ID NO: 48932 - DNA, 20 bp, Artificial Sequence
  Description of Artificial Sequence: Synthetic oligonucleotide
  Target: ATXN2; (+) strand; PAM type: NRG; PAM sequence: AAG
ctctgtctcaaaaaaaaaaa

SEQ ID NO: 48933 - DNA, 20 bp, Artificial Sequence
  Description of Artificial Sequence: Synthetic oligonucleotide
  Target: ATXN2; (+) strand; PAM type: NRG; PAM sequence: AAG
gtctcaaaaaaaaaaaaaga

SEQ ID NO: 48934 - DNA, 20 bp, Artificial Sequence
  Description of Artificial Sequence: Synthetic oligonucleotide
  Target: ATXN2; (+) strand; PAM type: NRG; PAM sequence: CAG
aaaaaaaaaagaaagaaaaa

SEQ ID NO: 48935 - DNA, 20 bp, Artificial Sequence
  Description of Artificial Sequence: Synthetic oligonucleotide
  Target: ATXN2; (+) strand; PAM type: NRG; PAM sequence: AGG
aaaaaaaaagaaagaaaaac

SEQ ID NO: 48936 - DNA, 20 bp, Artificial Sequence
  Description of Artificial Sequence: Synthetic oligonucleotide
  Target: ATXN2; (+) strand; PAM type: NRG; PAM sequence: CAG
aggtcatatgattacaactg

SEQ ID NO: 48937 - DNA, 20 bp, Artificial Sequence
  Description of Artificial Sequence: Synthetic oligonucleotide
  Target: ATXN2; (+) strand; PAM type: NRG; PAM sequence: AAG
gaaaaaaaaaaactgaaaat

SEQ ID NO: 48938 - DNA, 20 bp, Artificial Sequence
  Description of Artificial Sequence: Synthetic oligonucleotide
  Target: ATXN2; (+) strand; PAM type: NRG; PAM sequence: AAG
aaaataagctaaatcattca

SEQ ID NO: 48939 - DNA, 20 bp, Artificial Sequence
  Description of Artificial Sequence: Synthetic oligonucleotide
  Target: ATXN2; (+) strand; PAM type: NRG; PAM sequence: TGG
ataatatgcgtctatatgtg

SEQ ID NO: 48940 - DNA, 20 bp, Artificial Sequence
  Description of Artificial Sequence: Synthetic oligonucleotide
  Target: ATXN2; (+) strand; PAM type: NRG; PAM sequence: AAG
tatgtgtggatcgttgtaac

SEQ ID NO: 48941 - DNA, 20 bp, Artificial Sequence
  Description of Artificial Sequence: Synthetic oligonucleotide
  Target: ATXN2; (+) strand; PAM type: NRG; PAM sequence: CAG
tccttgccaactctctccct

SEQ ID NO: 48942 - DNA, 20 bp, Artificial Sequence
  Description of Artificial Sequence: Synthetic oligonucleotide
  Target: ATXN2; (+) strand; PAM type: NRG; PAM sequence: AAG
gccaactctctccctcagaa

SEQ ID NO: 48943 - DNA, 20 bp, Artificial Sequence
  Description of Artificial Sequence: Synthetic oligonucleotide
  Target: ATXN2; (+) strand; PAM type: NRG; PAM sequence: CAG
tctctccctcagaaaagatg

SEQ ID NO: 48944 - DNA, 20 bp, Artificial Sequence
  Description of Artificial Sequence: Synthetic oligonucleotide
  Target: ATXN2; (+) strand; PAM type: NRG; PAM sequence: TGG
aagatgcagtacacaaaatt

SEQ ID NO: 48945 - DNA, 20 bp, Artificial Sequence
  Description of Artificial Sequence: Synthetic oligonucleotide
  Target: ATXN2; (+) strand; PAM type: NRG; PAM sequence: AAG
gtacacaaaatttggctgtc

SEQ ID NO: 48946 - DNA, 20 bp, Artificial Sequence
  Description of Artificial Sequence: Synthetic oligonucleotide
  Target: ATXN2; (+) strand; PAM type: NRG; PAM sequence: AAG
caaaatttggctgtcaagta

SEQ ID NO: 48947 - DNA, 20 bp, Artificial Sequence
  Description of Artificial Sequence: Synthetic oligonucleotide
  Target: ATXN2; (+) strand; PAM type: NRG; PAM sequence: AAG
taaagatgaattctattttc

SEQ ID NO: 48948 - DNA, 20 bp, Artificial Sequence
  Description of Artificial Sequence: Synthetic oligonucleotide
  Target: ATXN2; (+) strand; PAM type: NRG; PAM sequence: TAG
ttctattttcaagtgaatta

SEQ ID NO: 48949 - DNA, 20 bp, Artificial Sequence
  Description of Artificial Sequence: Synthetic oligonucleotide
  Target: ATXN2; (+) strand; PAM type: NRG; PAM sequence: AAG
atagaatataatacaaccta

SEQ ID NO: 48950 - DNA, 20 bp, Artificial Sequence
  Description of Artificial Sequence: Synthetic oligonucleotide
  Target: ATXN2; (+) strand; PAM type: NRG; PAM sequence: AAG
taaagcttattccactgaaa

SEQ ID NO: 48951 - DNA, 20 bp, Artificial Sequence
  Description of Artificial Sequence: Synthetic oligonucleotide
  Target: ATXN2; (+) strand; PAM type: NRG; PAM sequence: TAG
cttattccactgaaaaagat

SEQ ID NO: 48952 - DNA, 20 bp, Artificial Sequence
  Description of Artificial Sequence: Synthetic oligonucleotide
  Target: ATXN2; (+) strand; PAM type: NRG; PAM sequence: AGG
ttattccactgaaaaagatt

SEQ ID NO: 48953 - DNA, 20 bp, Artificial Sequence
  Description of Artificial Sequence: Synthetic oligonucleotide
  Target: ATXN2; (+) strand; PAM type: NRG; PAM sequence: TAG
ctgaaaaagattaggcccct

SEQ ID NO: 48954 - DNA, 20 bp, Artificial Sequence
  Description of Artificial Sequence: Synthetic oligonucleotide
  Target: ATXN2; (+) strand; PAM type: NRG; PAM sequence: AAG
ataattaaaaaacatcatta

SEQ ID NO: 48955 - DNA, 20 bp, Artificial Sequence
  Description of Artificial Sequence: Synthetic oligonucleotide
  Target: ATXN2; (+) strand; PAM type: NRG; PAM sequence: TAG
gttatatttctcataaacat

SEQ ID NO: 48956 - DNA, 20 bp, Artificial Sequence
  Description of Artificial Sequence: Synthetic oligonucleotide
  Target: ATXN2; (+) strand; PAM type: NRG; PAM sequence: TAG
ataaacattagtcatgacaa

SEQ ID NO: 48957 - DNA, 20 bp, Artificial Sequence
  Description of Artificial Sequence: Synthetic oligonucleotide
  Target: ATXN2; (+) strand; PAM type: NRG; PAM sequence: AGG
taaacattagtcatgacaat

SEQ ID NO: 48958 - DNA, 20 bp, Artificial Sequence
  Description of Artificial Sequence: Synthetic oligonucleotide
  Target: ATXN2; (+) strand; PAM type: NRG; PAM sequence: TGG
attagtcatgacaataggac

SEQ ID NO: 48959 - DNA, 20 bp, Artificial Sequence
  Description of Artificial Sequence: Synthetic oligonucleotide
  Target: ATXN2; (+) strand; PAM type: NRG; PAM sequence: AAG
ataaaataatcacaacactc

SEQ ID NO: 48960 - DNA, 20 bp, Artificial Sequence
  Description of Artificial Sequence: Synthetic oligonucleotide
  Target: ATXN2; (+) strand; PAM type: NRG; PAM sequence: AAG
agccaaaattcaaaacattc

SEQ ID NO: 48961 - DNA, 20 bp, Artificial Sequence
  Description of Artificial Sequence: Synthetic oligonucleotide
  Target: ATXN2; (+) strand; PAM type: NRG; PAM sequence: AGG
gccaaaattcaaaacattca

SEQ ID NO: 48962 - DNA, 20 bp, Artificial Sequence
  Description of Artificial Sequence: Synthetic oligonucleotide
  Target: ATXN2; (+) strand; PAM type: NRG; PAM sequence: AAG
aattcaaaacattcaaggaa

SEQ ID NO: 48963 - DNA, 20 bp, Artificial Sequence
  Description of Artificial Sequence: Synthetic oligonucleotide
  Target: ATXN2; (+) strand; PAM type: NRG; PAM sequence: CAG
attcaaggaaaagcacaatt

SEQ ID NO: 48964 - DNA, 20 bp, Artificial Sequence
  Description of Artificial Sequence: Synthetic oligonucleotide
  Target: ATXN2; (+) strand; PAM type: NRG; PAM sequence: AAG
aagcacaattcagatccaaa

SEQ ID NO: 48965 - DNA, 20 bp, Artificial Sequence
  Description of Artificial Sequence: Synthetic oligonucleotide
  Target: ATXN2; (+) strand; PAM type: NRG; PAM sequence: TAG
caattcagatccaaaaagtc

SEQ ID NO: 48966 - DNA, 20 bp, Artificial Sequence
  Description of Artificial Sequence: Synthetic oligonucleotide
  Target: ATXN2; (+) strand; PAM type: NRG; PAM sequence: TGG
aaaaagtctagtaacacgac

SEQ ID NO: 48967 - DNA, 20 bp, Artificial Sequence
  Description of Artificial Sequence: Synthetic oligonucleotide
  Target: ATXN2; (+) strand; PAM type: NRG; PAM sequence: TAG
taacacgactggtcgatccc

SEQ ID NO: 48968 - DNA, 20 bp, Artificial Sequence
  Description of Artificial Sequence: Synthetic oligonucleotide
  Target: ATXN2; (+) strand; PAM type: NRG; PAM sequence: AAG
cacgactggtcgatccctag

SEQ ID NO: 48969 - DNA, 20 bp, Artificial Sequence
  Description of Artificial Sequence: Synthetic oligonucleotide
  Target: ATXN2; (+) strand; PAM type: NRG; PAM sequence: GAG
cgactggtcgatccctagaa

SEQ ID NO: 48970 - DNA, 20 bp, Artificial Sequence
  Description of Artificial Sequence: Synthetic oligonucleotide
  Target: ATXN2; (+) strand; PAM type: NRG; PAM sequence: GAG
aagagtactcttaacattct

SEQ ID NO: 48971 - DNA, 20 bp, Artificial Sequence
  Description of Artificial Sequence: Synthetic oligonucleotide
  Target: ATXN2; (+) strand; PAM type: NRG; PAM sequence: AGG
agagtactcttaacattctg

SEQ ID NO: 48972 - DNA, 20 bp, Artificial Sequence
  Description of Artificial Sequence: Synthetic oligonucleotide
  Target: ATXN2; (+) strand; PAM type: NRG; PAM sequence: CAG
tactcttaacattctgaggc

SEQ ID NO: 48973 - DNA, 20 bp, Artificial Sequence
  Description of Artificial Sequence: Synthetic oligonucleotide
  Target: ATXN2; (+) strand; PAM type: NRG; PAM sequence: TAG
taacattctgaggccagtcc

SEQ ID NO: 48974 - DNA, 20 bp, Artificial Sequence
  Description of Artificial Sequence: Synthetic oligonucleotide
  Target: ATXN2; (+) strand; PAM type: NRG; PAM sequence: TGG
ttctgaggccagtcctagct

SEQ ID NO: 48975 - DNA, 20 bp, Artificial Sequence
  Description of Artificial Sequence: Synthetic oligonucleotide
  Target: ATXN2; (+) strand; PAM type: NRG; PAM sequence: CAG
cctcactttcttctctcatc

SEQ ID NO: 48976 - DNA, 20 bp, Artificial Sequence
  Description of Artificial Sequence: Synthetic oligonucleotide
  Target: ATXN2; (+) strand; PAM type: NRG; PAM sequence: TGG
ttctctcatccagaaaacaa

SEQ ID NO: 48977 - DNA, 20 bp, Artificial Sequence
  Description of Artificial Sequence: Synthetic oligonucleotide
  Target: ATXN2; (+) strand; PAM type: NRG; PAM sequence: TAG
gacttgaattaaatgacatc

SEQ ID NO: 48978 - DNA, 20 bp, Artificial Sequence
  Description of Artificial Sequence: Synthetic oligonucleotide
  Target: ATXN2; (+) strand; PAM type: NRG; PAM sequence: AGG
acttgaattaaatgacatct

SEQ ID NO: 48979 - DNA, 20 bp, Artificial Sequence
  Description of Artificial Sequence: Synthetic oligonucleotide
  Target: ATXN2; (+) strand; PAM type: NRG; PAM sequence: TGG
gtaactgtttgcctcaaaca

SEQ ID NO: 48980 - DNA, 20 bp, Artificial Sequence
  Description of Artificial Sequence: Synthetic oligonucleotide
  Target: ATXN2; (+) strand; PAM type: NRG; PAM sequence: CAG
tgtttgcctcaaacatggca

SEQ ID NO: 48981 - DNA, 20 bp, Artificial Sequence
  Description of Artificial Sequence: Synthetic oligonucleotide
  Target: ATXN2; (+) strand; PAM type: NRG; PAM sequence: GAG
tttgcctcaaacatggcaca

SEQ ID NO: 48982 - DNA, 20 bp, Artificial Sequence
  Description of Artificial Sequence: Synthetic oligonucleotide
  Target: ATXN2; (+) strand; PAM type: NRG; PAM sequence: AAG
ggcacagagataaattcctg

SEQ ID NO: 48983 - DNA, 20 bp, Artificial Sequence
  Description of Artificial Sequence: Synthetic oligonucleotide
  Target: ATXN2; (+) strand; PAM type: NRG; PAM sequence: AAG
gagataaattcctgaagtct

SEQ ID NO: 48984 - DNA, 20 bp, Artificial Sequence
  Description of Artificial Sequence: Synthetic oligonucleotide
  Target: ATXN2; (+) strand; PAM type: NRG; PAM sequence: AGG
agataaattcctgaagtcta

SEQ ID NO: 48985 - DNA, 20 bp, Artificial Sequence
  Description of Artificial Sequence: Synthetic oligonucleotide
  Target: ATXN2; (+) strand; PAM type: NRG; PAM sequence: TAG
gactaataatttatctttta

SEQ ID NO: 48986 - DNA, 20 bp, Artificial Sequence
  Description of Artificial Sequence: Synthetic oligonucleotide
  Target: ATXN2; (+) strand; PAM type: NRG; PAM sequence: CAG
tatagatcttactacaaaac

SEQ ID NO: 48987 - DNA, 20 bp, Artificial Sequence
  Description of Artificial Sequence: Synthetic oligonucleotide
  Target: ATXN2; (+) strand; PAM type: NRG; PAM sequence: AAG
acaaaaccagacaccatact

SEQ ID NO: 48988 - DNA, 20 bp, Artificial Sequence
  Description of Artificial Sequence: Synthetic oligonucleotide
  Target: ATXN2; (+) strand; PAM type: NRG; PAM sequence: CAG
aatctatcacctctacttta

SEQ ID NO: 48989 - DNA, 20 bp, Artificial Sequence
  Description of Artificial Sequence: Synthetic oligonucleotide
  Target: ATXN2; (+) strand; PAM type: NRG; PAM sequence: AGG
atctatcacctctactttac

SEQ ID NO: 48990 - DNA, 20 bp, Artificial Sequence
  Description of Artificial Sequence: Synthetic oligonucleotide
  Target: ATXN2; (+) strand; PAM type: NRG; PAM sequence: GAG
atcacctctactttacaggt

SEQ ID NO: 48991 - DNA, 20 bp, Artificial Sequence
  Description of Artificial Sequence: Synthetic oligonucleotide
  Target: ATXN2; (+) strand; PAM type: NRG; PAM sequence: AGG
tcacctctactttacaggtg

SEQ ID NO: 48992 - DNA, 20 bp, Artificial Sequence
  Description of Artificial Sequence: Synthetic oligonucleotide
  Target: ATXN2; (+) strand; PAM type: NRG; PAM sequence: CAG
caggtgaggaaactgaacct

SEQ ID NO: 48993 - DNA, 20 bp, Artificial Sequence
  Description of Artificial Sequence: Synthetic oligonucleotide
  Target: ATXN2; (+) strand; PAM type: NRG; PAM sequence: CAG
gtgaggaaactgaacctcag

SEQ ID NO: 48994 - DNA, 20 bp, Artificial Sequence
  Description of Artificial Sequence: Synthetic oligonucleotide
  Target: ATXN2; (+) strand; PAM type: NRG; PAM sequence: AAG
gaaactgaacctcagcagtc

SEQ ID NO: 48995 - DNA, 20 bp, Artificial Sequence
  Description of Artificial Sequence: Synthetic oligonucleotide
  Target: ATXN2; (+) strand; PAM type: NRG; PAM sequence: CAG
gtatcttgaccaaaatcatc

SEQ ID NO: 48996 - DNA, 20 bp, Artificial Sequence
  Description of Artificial Sequence: Synthetic oligonucleotide
  Target: ATXN2; (+) strand; PAM type: NRG; PAM sequence: GAG
accaaaatcatccagttcat

SEQ ID NO: 48997 - DNA, 20 bp, Artificial Sequence
  Description of Artificial Sequence: Synthetic oligonucleotide
  Target: ATXN2; (+) strand; PAM type: NRG; PAM sequence: CAG
aaaatcatccagttcatgag

SEQ ID NO: 48998 - DNA, 20 bp, Artificial Sequence
  Description of Artificial Sequence: Synthetic oligonucleotide
  Target: ATXN2; (+) strand; PAM type: NRG; PAM sequence: TAG
atcatccagttcatgagcag

SEQ ID NO: 48999 - DNA, 20 bp, Artificial Sequence
  Description of Artificial Sequence: Synthetic oligonucleotide
  Target: ATXN2; (+) strand; PAM type: NRG; PAM sequence: GAG
catccagttcatgagcagta

SEQ ID NO: 49000 - DNA, 20 bp, Artificial Sequence
  Description of Artificial Sequence: Synthetic oligonucleotide
  Target: ATXN2; (+) strand; PAM type: NRG; PAM sequence: TGG
cagttcatgagcagtagagc

SEQ ID NO: 49001 - DNA, 20 bp, Artificial Sequence
  Description of Artificial Sequence: Synthetic oligonucleotide
  Target: ATXN2; (+) strand; PAM type: NRG; PAM sequence: CAG
agtagagctggtatttaaac

SEQ ID NO: 49002 - DNA, 20 bp, Artificial Sequence
  Description of Artificial Sequence: Synthetic oligonucleotide
  Target: ATXN2; (+) strand; PAM type: NRG; PAM sequence: AGG
gtagagctggtatttaaacc

SEQ ID NO: 49003 - DNA, 20 bp, Artificial Sequence
  Description of Artificial Sequence: Synthetic oligonucleotide
  Target: ATXN2; (+) strand; PAM type: NRG; PAM sequence: AAG
gtgtatctgattccacgtct

SEQ ID NO: 49004 - DNA, 20 bp, Artificial Sequence
  Description of Artificial Sequence: Synthetic oligonucleotide
  Target: ATXN2; (+) strand; PAM type: NRG; PAM sequence: TAG
acgtctaagtttttcattcc

SEQ ID NO: 49005 - DNA, 20 bp, Artificial Sequence
  Description of Artificial Sequence: Synthetic oligonucleotide
  Target: ATXN2; (+) strand; PAM type: NRG; PAM sequence: AGG
cgtctaagtttttcattcct

SEQ ID NO: 49006 - DNA, 20 bp, Artificial Sequence
  Description of Artificial Sequence: Synthetic oligonucleotide
  Target: ATXN2; (+) strand; PAM type: NRG; PAM sequence: TGG
cctaggttatgctgcctctc

SEQ ID NO: 49007 - DNA, 20 bp, Artificial Sequence
  Description of Artificial Sequence: Synthetic oligonucleotide
  Target: ATXN2; (+) strand; PAM type: NRG; PAM sequence: AAG
cctctctggaactgtatcac

SEQ ID NO: 49008 - DNA, 20 bp, Artificial Sequence
  Description of Artificial Sequence: Synthetic oligonucleotide
  Target: ATXN2; (+) strand; PAM type: NRG; PAM sequence: AGG
ctctctggaactgtatcaca

SEQ ID NO: 49009 - DNA, 20 bp, Artificial Sequence
  Description of Artificial Sequence: Synthetic oligonucleotide
  Target: ATXN2; (+) strand; PAM type: NRG; PAM sequence: CAG
tcaaacatcatttgaattta

SEQ ID NO: 49010 - DNA, 20 bp, Artificial Sequence
  Description of Artificial Sequence: Synthetic oligonucleotide
  Target: ATXN2; (+) strand; PAM type: NRG; PAM sequence: TGG
atcatttgaatttacagttt

SEQ ID NO: 49011 - DNA, 20 bp, Artificial Sequence
  Description of Artificial Sequence: Synthetic oligonucleotide
  Target: ATXN2; (+) strand; PAM type: NRG; PAM sequence: TAG
atttgaatttacagttttgg

SEQ ID NO: 49012 - DNA, 20 bp, Artificial Sequence
  Description of Artificial Sequence: Synthetic oligonucleotide
  Target: ATXN2; (+) strand; PAM type: NRG; PAM sequence: AGG
tttgaatttacagttttggt

SEQ ID NO: 49013 - DNA, 20 bp, Artificial Sequence
  Description of Artificial Sequence: Synthetic oligonucleotide
  Target: ATXN2; (+) strand; PAM type: NRG; PAM sequence: GGG
ttgaatttacagttttggta

SEQ ID NO: 49014 - DNA, 20 bp, Artificial Sequence
  Description of Artificial Sequence: Synthetic oligonucleotide
  Target: ATXN2; (+) strand; PAM type: NRG; PAM sequence: GGG
tgaatttacagttttggtag

SEQ ID NO: 49015 - DNA, 20 bp, Artificial Sequence
  Description of Artificial Sequence: Synthetic oligonucleotide
  Target: ATXN2; (+) strand; PAM type: NRG; PAM sequence: TGG
ttacagttttggtaggggtg

SEQ ID NO: 49016 - DNA, 20 bp, Artificial Sequence
  Description of Artificial Sequence: Synthetic oligonucleotide
  Target: ATXN2; (+) strand; PAM type: NRG; PAM sequence: GGG
tacagttttggtaggggtgt

SEQ ID NO: 49017 - DNA, 20 bp, Artificial Sequence
  Description of Artificial Sequence: Synthetic oligonucleotide
  Target: ATXN2; (+) strand; PAM type: NRG; PAM sequence: GGG
acagttttggtaggggtgtg

SEQ ID NO: 49018 - DNA, 20 bp, Artificial Sequence
  Description of Artificial Sequence: Synthetic oligonucleotide
  Target: ATXN2; (+) strand; PAM type: NRG; PAM sequence: GGG
cagttttggtaggggtgtgg

SEQ ID NO: 49019 - DNA, 20 bp, Artificial Sequence
  Description of Artificial Sequence: Synthetic oligonucleotide
  Target: ATXN2; (+) strand; PAM type: NRG; PAM sequence: GGG
agttttggtaggggtgtggg

SEQ ID NO: 49020 - DNA, 20 bp, Artificial Sequence
  Description of Artificial Sequence: Synthetic oligonucleotide
  Target: ATXN2; (+) strand; PAM type: NRG; PAM sequence: GGG
gttttggtaggggtgtgggg

SEQ ID NO: 49021 - DNA, 20 bp, Artificial Sequence
  Description of Artificial Sequence: Synthetic oligonucleotide
  Target: ATXN2; (+) strand; PAM type: NRG; PAM sequence: TAG
ggtgtgggggggtgtactta

SEQ ID NO: 49022 - DNA, 20 bp, Artificial Sequence
  Description of Artificial Sequence: Synthetic oligonucleotide
  Target: ATXN2; (+) strand; PAM type: NRG; PAM sequence: AAG
gtacttatagtctgtacatg

SEQ ID NO: 49023 - DNA, 20 bp, Artificial Sequence
  Description of Artificial Sequence: Synthetic oligonucleotide
  Target: ATXN2; (+) strand; PAM type: NRG; PAM sequence: AGG
tacttatagtctgtacatga

SEQ ID NO: 49024 - DNA, 20 bp, Artificial Sequence
  Description of Artificial Sequence: Synthetic oligonucleotide
  Target: ATXN2; (+) strand; PAM type: NRG; PAM sequence: TAG
taaaatgcctaaatcttact

SEQ ID NO: 49025 - DNA, 20 bp, Artificial Sequence
  Description of Artificial Sequence: Synthetic oligonucleotide
  Target: ATXN2; (+) strand; PAM type: NRG; PAM sequence: TGG
tcttacttagaacgatgatc

SEQ ID NO: 49026 - DNA, 20 bp, Artificial Sequence
  Description of Artificial Sequence: Synthetic oligonucleotide
  Target: ATXN2; (+) strand; PAM type: NRG; PAM sequence: TGG
agaacgatgatctggtatcc

SEQ ID NO: 49027 - DNA, 20 bp, Artificial Sequence
  Description of Artificial Sequence: Synthetic oligonucleotide
  Target: ATXN2; (+) strand; PAM type: NRG; PAM sequence: TGG
acgatgatctggtatcctgg

SEQ ID NO: 49028 - DNA, 20 bp, Artificial Sequence
  Description of Artificial Sequence: Synthetic oligonucleotide
  Target: ATXN2; (+) strand; PAM type: NRG; PAM sequence: GAG
ctggtatcctggtggctgct

SEQ ID NO: 49029 - DNA, 20 bp, Artificial Sequence
  Description of Artificial Sequence: Synthetic oligonucleotide
  Target: ATXN2; (+) strand; PAM type: NRG; PAM sequence: AAG
ctggtggctgctgagatgcc

SEQ ID NO: 49030 - DNA, 20 bp, Artificial Sequence
  Description of Artificial Sequence: Synthetic oligonucleotide
  Target: ATXN2; (+) strand; PAM type: NRG; PAM sequence: TGG
gaactgtccttaaactcata

SEQ ID NO: 49031 - DNA, 20 bp, Artificial Sequence
  Description of Artificial Sequence: Synthetic oligonucleotide
  Target: ATXN2; (+) strand; PAM type: NRG; PAM sequence: AAG
actcatatggcctccctaca

SEQ ID NO: 49032 - DNA, 20 bp, Artificial Sequence
  Description of Artificial Sequence: Synthetic oligonucleotide
  Target: ATXN2; (+) strand; PAM type: NRG; PAM sequence: AAG
ctccctacaaagctatataa

SEQ ID NO: 49033 - DNA, 20 bp, Artificial Sequence
  Description of Artificial Sequence: Synthetic oligonucleotide
  Target: ATXN2; (+) strand; PAM type: NRG; PAM sequence: AAG
aaacataatcccctttaaat

SEQ ID NO: 49034 - DNA, 20 bp, Artificial Sequence
  Description of Artificial Sequence: Synthetic oligonucleotide
  Target: ATXN2; (+) strand; PAM type: NRG; PAM sequence: TAG
ataagtcacactgttctttt

SEQ ID NO: 49035 - DNA, 20 bp, Artificial Sequence
  Description of Artificial Sequence: Synthetic oligonucleotide
  Target: ATXN2; (+) strand; PAM type: NRG; PAM sequence: TGG
tgttctttttagtgattatg

SEQ ID NO: 49036 - DNA, 20 bp, Artificial Sequence
  Description of Artificial Sequence: Synthetic oligonucleotide
  Target: ATXN2; (+) strand; PAM type: NRG; PAM sequence: AAG
ttacatctttgactaataaa

SEQ ID NO: 49037 - DNA, 20 bp, Artificial Sequence
  Description of Artificial Sequence: Synthetic oligonucleotide
  Target: ATXN2; (+) strand; PAM type: NRG; PAM sequence: TGG
aaaaagtaattgtttgacca

SEQ ID NO: 49038 - DNA, 20 bp, Artificial Sequence
  Description of Artificial Sequence: Synthetic oligonucleotide
  Target: ATXN2; (+) strand; PAM type: NRG; PAM sequence: GAG
aaagtaattgtttgaccatg

SEQ ID NO: 49039 - DNA, 20 bp, Artificial Sequence
  Description of Artificial Sequence: Synthetic oligonucleotide
  Target: ATXN2; (+) strand; PAM type: NRG; PAM sequence: AAG
tgaccatggagtttactcaa

SEQ ID NO: 49040 - DNA, 20 bp, Artificial Sequence
  Description of Artificial Sequence: Synthetic oligonucleotide
  Target: ATXN2; (+) strand; PAM type: NRG; PAM sequence: CAG
aaaagaacgaatcattcaac

SEQ ID NO: 49041 - DNA, 20 bp, Artificial Sequence
  Description of Artificial Sequence: Synthetic oligonucleotide
  Target: ATXN2; (+) strand; PAM type: NRG; PAM sequence: AGG
aaagaacgaatcattcaacc

SEQ ID NO: 49042 - DNA, 20 bp, Artificial Sequence
  Description of Artificial Sequence: Synthetic oligonucleotide
  Target: ATXN2; (+) strand; PAM type: NRG; PAM sequence: CAG
aatattatcatataaaaaaa

SEQ ID NO: 49043 - DNA, 20 bp, Artificial Sequence
  Description of Artificial Sequence: Synthetic oligonucleotide
  Target: ATXN2; (+) strand; PAM type: NRG; PAM sequence: CAG
tatcatataaaaaaacagta

SEQ ID NO: 49044 - DNA, 20 bp, Artificial Sequence
  Description of Artificial Sequence: Synthetic oligonucleotide
  Target: ATXN2; (+) strand; PAM type: NRG; PAM sequence: AAG
tataaaaaaacagtacagta

SEQ ID NO: 49045 - DNA, 20 bp, Artificial Sequence
  Description of Artificial Sequence: Synthetic oligonucleotide
  Target: ATXN2; (+) strand; PAM type: NRG; PAM sequence: CAG
aaaaacagtacagtaaagtg

SEQ ID NO: 49046 - DNA, 20 bp, Artificial Sequence
  Description of Artificial Sequence: Synthetic oligonucleotide
  Target: ATXN2; (+) strand; PAM type: NRG; PAM sequence: CGG
atttccactgatctatgaca

SEQ ID NO: 49047 - DNA, 20 bp, Artificial Sequence
  Description of Artificial Sequence: Synthetic oligonucleotide
  Target: ATXN2; (+) strand; PAM type: NRG; PAM sequence: TGG
ccactgatctatgacacggt

SEQ ID NO: 49048 - DNA, 20 bp, Artificial Sequence
  Description of Artificial Sequence: Synthetic oligonucleotide
  Target: ATXN2; (+) strand; PAM type: NRG; PAM sequence: CAG
tgacacggttggacacccaa

SEQ ID NO: 49049 - DNA, 20 bp, Artificial Sequence
  Description of Artificial Sequence: Synthetic oligonucleotide
  Target: ATXN2; (+) strand; PAM type: NRG; PAM sequence: AGG
gacacggttggacacccaac

SEQ ID NO: 49050 - DNA, 20 bp, Artificial Sequence
  Description of Artificial Sequence: Synthetic oligonucleotide
  Target: ATXN2; (+) strand; PAM type: NRG; PAM sequence: TAG
tggacacccaacaggaatgt

SEQ ID NO: 49051 - DNA, 20 bp, Artificial Sequence
  Description of Artificial Sequence: Synthetic oligonucleotide
  Target: ATXN2; (+) strand; PAM type: NRG; PAM sequence: AAG
acaggaatgttagcatatcg

SEQ ID NO: 49052 - DNA, 20 bp, Artificial Sequence
  Description of Artificial Sequence: Synthetic oligonucleotide
  Target: ATXN2; (+) strand; PAM type: NRG; PAM sequence: CAG
ggaatgttagcatatcgaag

SEQ ID NO: 49053 - DNA, 20 bp, Artificial Sequence
  Description of Artificial Sequence: Synthetic oligonucleotide
  Target: ATXN2; (+) strand; PAM type: NRG; PAM sequence: AAG
gtattctctgaaatccactg

SEQ ID NO: 49054 - DNA, 20 bp, Artificial Sequence
  Description of Artificial Sequence: Synthetic oligonucleotide
  Target: ATXN2; (+) strand; PAM type: NRG; PAM sequence: AAG
gtttctttttgtatccattc

SEQ ID NO: 49055 - DNA, 20 bp, Artificial Sequence
  Description of Artificial Sequence: Synthetic oligonucleotide
  Target: ATXN2; (+) strand; PAM type: NRG; PAM sequence: TAG
tttacttttaatcttttcat

SEQ ID NO: 49056 - DNA, 20 bp, Artificial Sequence
  Description of Artificial Sequence: Synthetic oligonucleotide
  Target: ATXN2; (+) strand; PAM type: NRG; PAM sequence: TAG
aaatattttactatttaata

SEQ ID NO: 49057 - DNA, 20 bp, Artificial Sequence
  Description of Artificial Sequence: Synthetic oligonucleotide
  Target: ATXN2; (+) strand; PAM type: NRG; PAM sequence: AAG
atactgaaccgcaataaaca

SEQ ID NO: 49058 - DNA, 20 bp, Artificial Sequence
  Description of Artificial Sequence: Synthetic oligonucleotide
  Target: ATXN2; (+) strand; PAM type: NRG; PAM sequence: AGG
tactgaaccgcaataaacaa

SEQ ID NO: 49059 - DNA, 20 bp, Artificial Sequence
  Description of Artificial Sequence: Synthetic oligonucleotide
  Target: ATXN2; (+) strand; PAM type: NRG; PAM sequence: AAG
aaccgcaataaacaaaggcc

SEQ ID NO: 49060 - DNA, 20 bp, Artificial Sequence
  Description of Artificial Sequence: Synthetic oligonucleotide
  Target: ATXN2; (+) strand; PAM type: NRG; PAM sequence: GAG
ccgcaataaacaaaggccaa

SEQ ID NO: 49061 - DNA, 20 bp, Artificial Sequence
  Description of Artificial Sequence: Synthetic oligonucleotide
  Target: ATXN2; (+) strand; PAM type: NRG; PAM sequence: TAG
caaaggccaagagcatattt

SEQ ID NO: 49062 - DNA, 20 bp, Artificial Sequence
  Description of Artificial Sequence: Synthetic oligonucleotide
  Target: ATXN2; (+) strand; PAM type: NRG; PAM sequence: AAG
caagagcatattttagacct

SEQ ID NO: 49063 - DNA, 20 bp, Artificial Sequence
  Description of Artificial Sequence: Synthetic oligonucleotide
  Target: ATXN2; (+) strand; PAM type: NRG; PAM sequence: TAG
gacctaagtatatttatgat

SEQ ID NO: 49064 - DNA, 20 bp, Artificial Sequence
  Description of Artificial Sequence: Synthetic oligonucleotide
  Target: ATXN2; (+) strand; PAM type: NRG; PAM sequence: TAG
taagtatatttatgattaga

SEQ ID NO: 49065 - DNA, 20 bp, Artificial Sequence
  Description of Artificial Sequence: Synthetic oligonucleotide
  Target: ATXN2; (+) strand; PAM type: NRG; PAM sequence: CAG
atatttatgattagatagat

SEQ ID NO: 49066 - DNA, 20 bp, Artificial Sequence
  Description of Artificial Sequence: Synthetic oligonucleotide
  Target: ATXN2; (+) strand; PAM type: NRG; PAM sequence: AGG
tatttatgattagatagatc

SEQ ID NO: 49067 - DNA, 20 bp, Artificial Sequence
  Description of Artificial Sequence: Synthetic oligonucleotide
  Target: ATXN2; (+) strand; PAM type: NRG; PAM sequence: CAG
tttaacaaaacactaatatc

SEQ ID NO: 49068 - DNA, 20 bp, Artificial Sequence
  Description of Artificial Sequence: Synthetic oligonucleotide
  Target: ATXN2; (+) strand; PAM type: NRG; PAM sequence: AGG
ttaacaaaacactaatatcc

SEQ ID NO: 49069 - DNA, 20 bp, Artificial Sequence
  Description of Artificial Sequence: Synthetic oligonucleotide
  Target: ATXN2; (+) strand; PAM type: NRG; PAM sequence: TAG
ccaggactctatgcttttaa

SEQ ID NO: 49070 - DNA, 20 bp, Artificial Sequence
  Description of Artificial Sequence: Synthetic oligonucleotide
  Target: ATXN2; (+) strand; PAM type: NRG; PAM sequence: AAG
agttgccaaatatgaaattc

SEQ ID NO: 49071 - DNA, 20 bp, Artificial Sequence
  Description of Artificial Sequence: Synthetic oligonucleotide
  Target: ATXN2; (+) strand; PAM type: NRG; PAM sequence: CAG
tcaagtgtgacttaaaatgc

SEQ ID NO: 49072 - DNA, 20 bp, Artificial Sequence
  Description of Artificial Sequence: Synthetic oligonucleotide
  Target: ATXN2; (+) strand; PAM type: NRG; PAM sequence: AAG
atgccagtcaaattaatata

SEQ ID NO: 49073 - DNA, 20 bp, Artificial Sequence
  Description of Artificial Sequence: Synthetic oligonucleotide
  Target: ATXN2; (+) strand; PAM type: NRG; PAM sequence: TGG
agaaatttacatgctgaatg

SEQ ID NO: 49074 - DNA, 20 bp, Artificial Sequence
  Description of Artificial Sequence: Synthetic oligonucleotide
  Target: ATXN2; (+) strand; PAM type: NRG; PAM sequence: TAG
aatttacatgctgaatgtgg

SEQ ID NO: 49075 - DNA, 20 bp, Artificial Sequence
  Description of Artificial Sequence: Synthetic oligonucleotide
  Target: ATXN2; (+) strand; PAM type: NRG; PAM sequence: CAG
gtagctcatgcttgtaatcc

SEQ ID NO: 49076 - DNA, 20 bp, Artificial Sequence
  Description of Artificial Sequence: Synthetic oligonucleotide
  Target: ATXN2; (+) strand; PAM type: NRG; PAM sequence: TAG
tgcttgtaatcccagcactt

SEQ ID NO: 49077 - DNA, 20 bp, Artificial Sequence
  Description of Artificial Sequence: Synthetic oligonucleotide
  Target: ATXN2; (+) strand; PAM type: NRG; PAM sequence: AGG
gcttgtaatcccagcacttt

SEQ ID NO: 49078 - DNA, 20 bp, Artificial Sequence
  Description of Artificial Sequence: Synthetic oligonucleotide
  Target: ATXN2; (+) strand; PAM type: NRG; PAM sequence: GAG
ttgtaatcccagcactttag

SEQ ID NO: 49079 - DNA, 20 bp, Artificial Sequence
  Description of Artificial Sequence: Synthetic oligonucleotide
  Target: ATXN2; (+) strand; PAM type: NRG; PAM sequence: AGG
tgtaatcccagcactttagg

SEQ ID NO: 49080 - DNA, 20 bp, Artificial Sequence
  Description of Artificial Sequence: Synthetic oligonucleotide
  Target: ATXN2; (+) strand; PAM type: NRG; PAM sequence: GAG
tcccagcactttaggaggct

SEQ ID NO: 49081 - DNA, 20 bp, Artificial Sequence
  Description of Artificial Sequence: Synthetic oligonucleotide
  Target: ATXN2; (+) strand; PAM type: NRG; PAM sequence: AGG
cccagcactttaggaggctg

SEQ ID NO: 49082 - DNA, 20 bp, Artificial Sequence
  Description of Artificial Sequence: Synthetic oligonucleotide
  Target: ATXN2; (+) strand; PAM type: NRG; PAM sequence: CAG
agcactttaggaggctgagg

SEQ ID NO: 49083 - DNA, 20 bp, Artificial Sequence
  Description of Artificial Sequence: Synthetic oligonucleotide
  Target: ATXN2; (+) strand; PAM type: NRG; PAM sequence: AGG
gcactttaggaggctgaggc

SEQ ID NO: 49084 - DNA, 20 bp, Artificial Sequence
  Description of Artificial Sequence: Synthetic oligonucleotide
  Target: ATXN2; (+) strand; PAM type: NRG; PAM sequence: GAG
actttaggaggctgaggcag

SEQ ID NO: 49085 - DNA, 20 bp, Artificial Sequence
  Description of Artificial Sequence: Synthetic oligonucleotide
  Target: ATXN2; (+) strand; PAM type: NRG; PAM sequence: AGG
ctttaggaggctgaggcagg

SEQ ID NO: 49086 - DNA, 20 bp, Artificial Sequence
  Description of Artificial Sequence: Synthetic oligonucleotide
  Target: ATXN2; (+) strand; PAM type: NRG; PAM sequence: GAG
ctgaggcaggaggatcactt

SEQ ID NO: 49087 - DNA, 20 bp, Artificial Sequence
  Description of Artificial Sequence: Synthetic oligonucleotide
  Target: ATXN2; (+) strand; PAM type: NRG; PAM sequence: CGG
caggaggatcacttgagtgc

SEQ ID NO: 49088 - DNA, 20 bp, Artificial Sequence
  Description of Artificial Sequence: Synthetic oligonucleotide
  Target: ATXN2; (+) strand; PAM type: NRG; PAM sequence: GAG
ggaggatcacttgagtgccg

SEQ ID NO: 49089 - DNA, 20 bp, Artificial Sequence
  Description of Artificial Sequence: Synthetic oligonucleotide
  Target: ATXN2; (+) strand; PAM type: NRG; PAM sequence: GAG
tcacttgagtgccggagttt

SEQ ID NO: 49090 - DNA, 20 bp, Artificial Sequence
  Description of Artificial Sequence: Synthetic oligonucleotide
  Target: ATXN2; (+) strand; PAM type: NRG; PAM sequence: CAG
tgagtgccggagtttgagat

SEQ ID NO: 49091 - DNA, 20 bp, Artificial Sequence
  Description of Artificial Sequence: Synthetic oligonucleotide
  Target: ATXN2; (+) strand; PAM type: NRG; PAM sequence: TGG
gccggagtttgagatcagtc

SEQ ID NO: 49092 - DNA, 20 bp, Artificial Sequence
  Description of Artificial Sequence: Synthetic oligonucleotide
  Target: ATXN2; (+) strand; PAM type: NRG; PAM sequence: GGG
ccggagtttgagatcagtct

SEQ ID NO: 49093 - DNA, 20 bp, Artificial Sequence
  Description of Artificial Sequence: Synthetic oligonucleotide
  Target: ATXN2; (+) strand; PAM type: NRG; PAM sequence: AAG
tgagatcagtctgggcaaca

SEQ ID NO: 49094 - DNA, 20 bp, Artificial Sequence
  Description of Artificial Sequence: Synthetic oligonucleotide
  Target: ATXN2; (+) strand; PAM type: NRG; PAM sequence: TAG
ttctacaaaaaataaaaaac

SEQ ID NO: 49095 - DNA, 20 bp, Artificial Sequence
  Description of Artificial Sequence: Synthetic oligonucleotide
  Target: ATXN2; (+) strand; PAM type: NRG; PAM sequence: CAG
acaaaaaataaaaaactagc

SEQ ID NO: 49096 - DNA, 20 bp, Artificial Sequence
  Description of Artificial Sequence: Synthetic oligonucleotide
  Target: ATXN2; (+) strand; PAM type: NRG; PAM sequence: AGG
caaaaaataaaaaactagcc

SEQ ID NO: 49097 - DNA, 20 bp, Artificial Sequence
  Description of Artificial Sequence: Synthetic oligonucleotide
  Target: ATXN2; (+) strand; PAM type: NRG; PAM sequence: TGG
aataaaaaactagccaggca

SEQ ID NO: 49098 - DNA, 20 bp, Artificial Sequence
  Description of Artificial Sequence: Synthetic oligonucleotide
  Target: ATXN2; (+) strand; PAM type: NRG; PAM sequence: TGG
aaaaaactagccaggcatgg

SEQ ID NO: 49099 - DNA, 20 bp, Artificial Sequence
  Description of Artificial Sequence: Synthetic oligonucleotide
  Target: ATXN2; (+) strand; PAM type: NRG; PAM sequence: TGG
ggcatggtggcacacgcctg

SEQ ID NO: 49100 - DNA, 20 bp, Artificial Sequence
  Description of Artificial Sequence: Synthetic oligonucleotide
  Target: ATXN2; (+) strand; PAM type: NRG; PAM sequence: TGG
cgcctgtggtccccgctact

SEQ ID NO: 49101 - DNA, 20 bp, Artificial Sequence
  Description of Artificial Sequence: Synthetic oligonucleotide
  Target: ATXN2; (+) strand; PAM type: NRG; PAM sequence: TAG
ctgtggtccccgctacttgg

SEQ ID NO: 49102 - DNA, 20 bp, Artificial Sequence
  Description of Artificial Sequence: Synthetic oligonucleotide
  Target: ATXN2; (+) strand; PAM type: NRG; PAM sequence: AGG
tgtggtccccgctacttggt

SEQ ID NO: 49103 - DNA, 20 bp, Artificial Sequence
  Description of Artificial Sequence: Synthetic oligonucleotide
  Target: ATXN2; (+) strand; PAM type: NRG; PAM sequence: GGG
gtggtccccgctacttggta

SEQ ID NO: 49104 - DNA, 20 bp, Artificial Sequence
  Description of Artificial Sequence: Synthetic oligonucleotide
  Target: ATXN2; (+) strand; PAM type: NRG; PAM sequence: GAG
tccccgctacttggtagggt

SEQ ID NO: 49105 - DNA, 20 bp, Artificial Sequence
  Description of Artificial Sequence: Synthetic oligonucleotide
  Target: ATXN2; (+) strand; PAM type: NRG; PAM sequence: AGG
ccccgctacttggtagggtg

SEQ ID NO: 49106 - DNA, 20 bp, Artificial Sequence
  Description of Artificial Sequence: Synthetic oligonucleotide
  Target: ATXN2; (+) strand; PAM type: NRG; PAM sequence: TGG
cgctacttggtagggtgagg

SEQ ID NO: 49107 - DNA, 20 bp, Artificial Sequence
  Description of Artificial Sequence: Synthetic oligonucleotide
  Target: ATXN2; (+) strand; PAM type: NRG; PAM sequence: GGG
gctacttggtagggtgaggt

SEQ ID NO: 49108 - DNA, 20 bp, Artificial Sequence
  Description of Artificial Sequence: Synthetic oligonucleotide
  Target: ATXN2; (+) strand; PAM type: NRG; PAM sequence: GAG
tacttggtagggtgaggtgg

SEQ ID NO: 49109 - DNA, 20 bp, Artificial Sequence
  Description of Artificial Sequence: Synthetic oligonucleotide
  Target: ATXN2; (+) strand; PAM type: NRG; PAM sequence: AGG
acttggtagggtgaggtggg

SEQ ID NO: 49110 - DNA, 20 bp, Artificial Sequence
  Description of Artificial Sequence: Synthetic oligonucleotide
  Target: ATXN2; (+) strand; PAM type: NRG; PAM sequence: GAG
gtgaggtgggaggatcactt

SEQ ID NO: 49111 - DNA, 20 bp, Artificial Sequence
  Description of Artificial Sequence: Synthetic oligonucleotide
  Target: ATXN2; (+) strand; PAM type: NRG; PAM sequence: CAG
gtgggaggatcacttgagcc

SEQ ID NO: 49112 - DNA, 20 bp, Artificial Sequence
  Description of Artificial Sequence: Synthetic oligonucleotide
  Target: ATXN2; (+) strand; PAM type: NRG; PAM sequence: AGG
tgggaggatcacttgagccc

SEQ ID NO: 49113 - DNA, 20 bp, Artificial Sequence
  Description of Artificial Sequence: Synthetic oligonucleotide
  Target: ATXN2; (+) strand; PAM type: NRG; PAM sequence: GAG
ggaggatcacttgagcccag

SEQ ID NO: 49114 - DNA, 20 bp, Artificial Sequence
  Description of Artificial Sequence: Synthetic oligonucleotide
  Target: ATXN2; (+) strand; PAM type: NRG; PAM sequence: AGG
gaggatcacttgagcccagg

SEQ ID NO: 49115 - DNA, 20 bp, Artificial Sequence
  Description of Artificial Sequence: Synthetic oligonucleotide
  Target: ATXN2; (+) strand; PAM type: NRG; PAM sequence: AAG
tcacttgagcccaggaggtc

SEQ ID NO: 49116 - DNA, 20 bp, Artificial Sequence
  Description of Artificial Sequence: Synthetic oligonucleotide
  Target: ATXN2; (+) strand; PAM type: NRG; PAM sequence: CAG
ttgagcccaggaggtcaaga

SEQ ID NO: 49117 - DNA, 20 bp, Artificial Sequence
  Description of Artificial Sequence: Synthetic oligonucleotide
  Target: ATXN2; (+) strand; PAM type: NRG; PAM sequence: CAG
agcccaggaggtcaagacag

SEQ ID NO: 49118 - DNA, 20 bp, Artificial Sequence
  Description of Artificial Sequence: Synthetic oligonucleotide
  Target: ATXN2; (+) strand; PAM type: NRG; PAM sequence: GAG
caggaggtcaagacagcagt

SEQ ID NO: 49119 - DNA, 20 bp, Artificial Sequence
  Description of Artificial Sequence: Synthetic oligonucleotide
  Target: ATXN2; (+) strand; PAM type: NRG; PAM sequence: CAG
gtgattatgccactgcactc

SEQ ID NO: 49120 - DNA, 20 bp, Artificial Sequence
  Description of Artificial Sequence: Synthetic oligonucleotide
  Target: ATXN2; (+) strand; PAM type: NRG; PAM sequence: TGG
atgccactgcactccagcat

SEQ ID NO: 49121 - DNA, 20 bp, Artificial Sequence
  Description of Artificial Sequence: Synthetic oligonucleotide
  Target: ATXN2; (+) strand; PAM type: NRG; PAM sequence: CAG
ctgcactccagcattggtga

SEQ ID NO: 49122 - DNA, 20 bp, Artificial Sequence
  Description of Artificial Sequence: Synthetic oligonucleotide
  Target: ATXN2; (+) strand; PAM type: NRG; PAM sequence: GAG
gcactccagcattggtgaca

SEQ ID NO: 49123 - DNA, 20 bp, Artificial Sequence
  Description of Artificial Sequence: Synthetic oligonucleotide
  Target: ATXN2; (+) strand; PAM type: NRG; PAM sequence: CAG
ttaactaaataataataata

SEQ ID NO: 49124 - DNA, 20 bp, Artificial Sequence
  Description of Artificial Sequence: Synthetic oligonucleotide
  Target: ATXN2; (+) strand; PAM type: NRG; PAM sequence: AAG
actaaataataataatacag

SEQ ID NO: 49125 - DNA, 20 bp, Artificial Sequence
  Description of Artificial Sequence: Synthetic oligonucleotide
  Target: ATXN2; (+) strand; PAM type: NRG; PAM sequence: AGG
ctaaataataataatacaga

SEQ ID NO: 49126 - DNA, 20 bp, Artificial Sequence
  Description of Artificial Sequence: Synthetic oligonucleotide
  Target: ATXN2; (+) strand; PAM type: NRG; PAM sequence: GGG
taaataataataatacagaa

SEQ ID NO: 49127 - DNA, 20 bp, Artificial Sequence
  Description of Artificial Sequence: Synthetic oligonucleotide
  Target: ATXN2; (+) strand; PAM type: NRG; PAM sequence: GAG
aataataataatacagaagg

SEQ ID NO: 49128 - DNA, 20 bp, Artificial Sequence
  Description of Artificial Sequence: Synthetic oligonucleotide
  Target: ATXN2; (+) strand; PAM type: NRG; PAM sequence: TGG
atacagaagggagaaatgaa

SEQ ID NO: 49129 - DNA, 20 bp, Artificial Sequence
  Description of Artificial Sequence: Synthetic oligonucleotide
  Target: ATXN2; (+) strand; PAM type: NRG; PAM sequence: GGG
tacagaagggagaaatgaat

SEQ ID NO: 49130 - DNA, 20 bp, Artificial Sequence
  Description of Artificial Sequence: Synthetic oligonucleotide
  Target: ATXN2; (+) strand; PAM type: NRG; PAM sequence: GGG
acagaagggagaaatgaatg

SEQ ID NO: 49131 - DNA, 20 bp, Artificial Sequence
  Description of Artificial Sequence: Synthetic oligonucleotide
  Target: ATXN2; (+) strand; PAM type: NRG; PAM sequence: AAG
aatggggttgtaaatcaaac

SEQ ID NO: 49132 - DNA, 20 bp, Artificial Sequence
  Description of Artificial Sequence: Synthetic oligonucleotide
  Target: ATXN2; (+) strand; PAM type: NRG; PAM sequence: TGG
ggttgtaaatcaaacaagaa

SEQ ID NO: 49133 - DNA, 20 bp, Artificial Sequence
  Description of Artificial Sequence: Synthetic oligonucleotide
  Target: ATXN2; (+) strand; PAM type: NRG; PAM sequence: GAG
aaatcaaacaagaatggtat

SEQ ID NO: 49134 - DNA, 20 bp, Artificial Sequence
  Description of Artificial Sequence: Synthetic oligonucleotide
  Target: ATXN2; (+) strand; PAM type: NRG; PAM sequence: AAG
gtatgagctgataactatta

SEQ ID NO: 49135 - DNA, 20 bp, Artificial Sequence
  Description of Artificial Sequence: Synthetic oligonucleotide
  Target: ATXN2; (+) strand; PAM type: NRG; PAM sequence: TGG
gagctgataactattaaagc

SEQ ID NO: 49136 - DNA, 20 bp, Artificial Sequence
  Description of Artificial Sequence: Synthetic oligonucleotide
  Target: ATXN2; (+) strand; PAM type: NRG; PAM sequence: GGG
agctgataactattaaagct

SEQ ID NO: 49137 - DNA, 20 bp, Artificial Sequence
  Description of Artificial Sequence: Synthetic oligonucleotide
  Target: ATXN2; (+) strand; PAM type: NRG; PAM sequence: TAG
taactattaaagctgggtga

SEQ ID NO: 49138 - DNA, 20 bp, Artificial Sequence
  Description of Artificial Sequence: Synthetic oligonucleotide
  Target: ATXN2; (+) strand; PAM type: NRG; PAM sequence: AGG
aactattaaagctgggtgat

SEQ ID NO: 49139 - DNA, 20 bp, Artificial Sequence
  Description of Artificial Sequence: Synthetic oligonucleotide
  Target: ATXN2; (+) strand; PAM type: NRG; PAM sequence: CAG
aaagctgggtgataggtgtg

SEQ ID NO: 49140 - DNA, 20 bp, Artificial Sequence
  Description of Artificial Sequence: Synthetic oligonucleotide
  Target: ATXN2; (+) strand; PAM type: NRG; PAM sequence: AGG
aagctgggtgataggtgtgc

SEQ ID NO: 49141 - DNA, 20 bp, Artificial Sequence
  Description of Artificial Sequence: Synthetic oligonucleotide
  Target: ATXN2; (+) strand; PAM type: NRG; PAM sequence: GGG
agctgggtgataggtgtgca

SEQ ID NO: 49142 - DNA, 20 bp, Artificial Sequence
  Description of Artificial Sequence: Synthetic oligonucleotide
  Target: ATXN2; (+) strand; PAM type: NRG; PAM sequence: GGG
gctgggtgataggtgtgcag

SEQ ID NO: 49143 - DNA, 20 bp, Artificial Sequence
  Description of Artificial Sequence: Synthetic oligonucleotide
  Target: ATXN2; (+) strand; PAM type: NRG; PAM sequence: AAG
tttcccttaaaaaaaaaaaa

SEQ ID NO: 49144 - DNA, 20 bp, Artificial Sequence
  Description of Artificial Sequence: Synthetic oligonucleotide
  Target: ATXN2; (+) strand; PAM type: NRG; PAM sequence: TAG
ctgcttctgatgtgatacaa

SEQ ID NO: 49145 - DNA, 20 bp, Artificial Sequence
  Description of Artificial Sequence: Synthetic oligonucleotide
  Target: ATXN2; (+) strand; PAM type: NRG; PAM sequence: AGG
tgcttctgatgtgatacaat

SEQ ID NO: 49146 - DNA, 20 bp, Artificial Sequence
  Description of Artificial Sequence: Synthetic oligonucleotide
  Target: ATXN2; (+) strand; PAM type: NRG; PAM sequence: TAG
tctgatgtgatacaatagga

SEQ ID NO: 49147 - DNA, 20 bp, Artificial Sequence
  Description of Artificial Sequence: Synthetic oligonucleotide
  Target: ATXN2; (+) strand; PAM type: NRG; PAM sequence: AAG
acaataggatagacctaatc

SEQ ID NO: 49148 - DNA, 20 bp, Artificial Sequence
  Description of Artificial Sequence: Synthetic oligonucleotide
  Target: ATXN2; (+) strand; PAM type: NRG; PAM sequence: CAG
gatagacctaatcaagttta

SEQ ID NO: 49149 - DNA, 20 bp, Artificial Sequence
  Description of Artificial Sequence: Synthetic oligonucleotide
  Target: ATXN2; (+) strand; PAM type: NRG; PAM sequence: CAG
aatcaagtttacagatctac

SEQ ID NO: 49150 - DNA, 20 bp, Artificial Sequence
  Description of Artificial Sequence: Synthetic oligonucleotide
  Target: ATXN2; (+) strand; PAM type: NRG; PAM sequence: GAG
ttacagatctaccagtttac

SEQ ID NO: 49151 - DNA, 20 bp, Artificial Sequence
  Description of Artificial Sequence: Synthetic oligonucleotide
  Target: ATXN2; (+) strand; PAM type: NRG; PAM sequence: AAG
accagtttacgagaaacatt

SEQ ID NO: 49152 - DNA, 20 bp, Artificial Sequence
  Description of Artificial Sequence: Synthetic oligonucleotide
  Target: ATXN2; (+) strand; PAM type: NRG; PAM sequence: TGG
gtttacgagaaacattaaga

SEQ ID NO: 49153 - DNA, 20 bp, Artificial Sequence
  Description of Artificial Sequence: Synthetic oligonucleotide
  Target: ATXN2; (+) strand; PAM type: NRG; PAM sequence: AAG
tacgagaaacattaagatgg

SEQ ID NO: 49154 - DNA, 20 bp, Artificial Sequence
  Description of Artificial Sequence: Synthetic oligonucleotide
  Target: ATXN2; (+) strand; PAM type: NRG; PAM sequence: GAG
aatatattaactgataccat

SEQ ID NO: 49155 - DNA, 20 bp, Artificial Sequence
  Description of Artificial Sequence: Synthetic oligonucleotide
  Target: ATXN2; (+) strand; PAM type: NRG; PAM sequence: AGG
atatattaactgataccatg

SEQ ID NO: 49156 - DNA, 20 bp, Artificial Sequence
  Description of Artificial Sequence: Synthetic oligonucleotide
  Target: ATXN2; (+) strand; PAM type: NRG; PAM sequence: CAG
tgataccatgaggttcctca

SEQ ID NO: 49157 - DNA, 20 bp, Artificial Sequence
  Description of Artificial Sequence: Synthetic oligonucleotide
  Target: ATXN2; (+) strand; PAM type: NRG; PAM sequence: CAG
ggttcctcacagtttaaatc

SEQ ID NO: 49158 - DNA, 20 bp, Artificial Sequence
  Description of Artificial Sequence: Synthetic oligonucleotide
  Target: ATXN2; (+) strand; PAM type: NRG; PAM sequence: CAG
cacagtttaaatccagaatg

SEQ ID NO: 49159 - DNA, 20 bp, Artificial Sequence
  Description of Artificial Sequence: Synthetic oligonucleotide
  Target: ATXN2; (+) strand; PAM type: NRG; PAM sequence: CAG
aaatgcaacataaaaaatga

SEQ ID NO: 49160 - DNA, 20 bp, Artificial Sequence
  Description of Artificial Sequence: Synthetic oligonucleotide
  Target: ATXN2; (+) strand; PAM type: NRG; PAM sequence: GAG
ttttgtttttttttttttct

SEQ ID NO: 49161 - DNA, 20 bp, Artificial Sequence
  Description of Artificial Sequence: Synthetic oligonucleotide
  Target: ATXN2; (+) strand; PAM type: NRG; PAM sequence: CAG
gtttttttttttttctgaga

SEQ ID NO: 49162 - DNA, 20 bp, Artificial Sequence
  Description of Artificial Sequence: Synthetic oligonucleotide
  Target: ATXN2; (+) strand; PAM type: NRG; PAM sequence: GAG
ttttttttttttctgagaca

SEQ ID NO: 49163 - DNA, 20 bp, Artificial Sequence
  Description of Artificial Sequence: Synthetic oligonucleotide
  Target: ATXN2; (+) strand; PAM type: NRG; PAM sequence: CAG
acagagtctcactctgtcgc

SEQ ID NO: 49164 - DNA, 20 bp, Artificial Sequence
  Description of Artificial Sequence: Synthetic oligonucleotide
  Target: ATXN2; (+) strand; PAM type: NRG; PAM sequence: AGG
cagagtctcactctgtcgcc

SEQ ID NO: 49165 - DNA, 20 bp, Artificial Sequence
  Description of Artificial Sequence: Synthetic oligonucleotide
  Target: ATXN2; (+) strand; PAM type: NRG; PAM sequence: TGG
gtctcactctgtcgccaggc

SEQ ID NO: 49166 - DNA, 20 bp, Artificial Sequence
  Description of Artificial Sequence: Synthetic oligonucleotide
  Target: ATXN2; (+) strand; PAM type: NRG; PAM sequence: GAG
ctcactctgtcgccaggctg

SEQ ID NO: 49167 - DNA, 20 bp, Artificial Sequence
  Description of Artificial Sequence: Synthetic oligonucleotide
  Target: ATXN2; (+) strand; PAM type: NRG; PAM sequence: CAG
tctgtcgccaggctggagtg

SEQ ID NO: 49168 - DNA, 20 bp, Artificial Sequence
  Description of Artificial Sequence: Synthetic oligonucleotide
  Target: ATXN2; (+) strand; PAM type: NRG; PAM sequence: TGG
gtcgccaggctggagtgcag

SEQ ID NO: 49169 - DNA, 20 bp, Artificial Sequence
  Description of Artificial Sequence: Synthetic oligonucleotide
  Target: ATXN2; (+) strand; PAM type: NRG; PAM sequence: TGG
ggagtgcagtggcacgatct

SEQ ID NO: 49170 - DNA, 20 bp, Artificial Sequence
  Description of Artificial Sequence: Synthetic oligonucleotide
  Target: ATXN2; (+) strand; PAM type: NRG; PAM sequence: CAG
tcactgcaacctccgcctcc

SEQ ID NO: 49171 - DNA, 20 bp, Artificial Sequence
  Description of Artificial Sequence: Synthetic oligonucleotide
  Target: ATXN2; (+) strand; PAM type: NRG; PAM sequence: AGG
cactgcaacctccgcctccc

SEQ ID NO: 49172 - DNA, 20 bp, Artificial Sequence
  Description of Artificial Sequence: Synthetic oligonucleotide
  Target: ATXN2; (+) strand; PAM type: NRG; PAM sequence: TAG
tgcaacctccgcctcccagg

SEQ ID NO: 49173 - DNA, 20 bp, Artificial Sequence
  Description of Artificial Sequence: Synthetic oligonucleotide
  Target: ATXN2; (+) strand; PAM type: NRG; PAM sequence: TAG
acctccgcctcccaggtagc

SEQ ID NO: 49174 - DNA, 20 bp, Artificial Sequence
  Description of Artificial Sequence: Synthetic oligonucleotide
  Target: ATXN2; (+) strand; PAM type: NRG; PAM sequence: AGG
cctccgcctcccaggtagct

SEQ ID NO: 49175 - DNA, 20 bp, Artificial Sequence
  Description of Artificial Sequence: Synthetic oligonucleotide
  Target: ATXN2; (+) strand; PAM type: NRG; PAM sequence: CAG
ctcccaggtagctaggacta

SEQ ID NO: 49176 - DNA, 20 bp, Artificial Sequence
  Description of Artificial Sequence: Synthetic oligonucleotide
  Target: ATXN2; (+) strand; PAM type: NRG; PAM sequence: AGG
tcccaggtagctaggactac

SEQ ID NO: 49177 - DNA, 20 bp, Artificial Sequence
  Description of Artificial Sequence: Synthetic oligonucleotide
  Target: ATXN2; (+) strand; PAM type: NRG; PAM sequence: CAG
caggtacgcgtcaccatgcc

SEQ ID NO: 49178 - DNA, 20 bp, Artificial Sequence
  Description of Artificial Sequence: Synthetic oligonucleotide
  Target: ATXN2; (+) strand; PAM type: NRG; PAM sequence: TAG
ccagataatttttgtattct

SEQ ID NO: 49179 - DNA, 20 bp, Artificial Sequence
  Description of Artificial Sequence: Synthetic oligonucleotide
  Target: ATXN2; (+) strand; PAM type: NRG; PAM sequence: TAG
gataatttttgtattcttag

SEQ ID NO: 49180 - DNA, 20 bp, Artificial Sequence
  Description of Artificial Sequence: Synthetic oligonucleotide
  Target: ATXN2; (+) strand; PAM type: NRG; PAM sequence: GAG
taatttttgtattcttagta

SEQ ID NO: 49181 - DNA, 20 bp, Artificial Sequence
  Description of Artificial Sequence: Synthetic oligonucleotide
  Target: ATXN2; (+) strand; PAM type: NRG; PAM sequence: CGG
ttttgtattcttagtagaga

SEQ ID NO: 49182 - DNA, 20 bp, Artificial Sequence
  Description of Artificial Sequence: Synthetic oligonucleotide
  Target: ATXN2; (+) strand; PAM type: NRG; PAM sequence: GGG
tttgtattcttagtagagac

SEQ ID NO: 49183 - DNA, 20 bp, Artificial Sequence
  Description of Artificial Sequence: Synthetic oligonucleotide
  Target: ATXN2; (+) strand; PAM type: NRG; PAM sequence: GGG
ttgtattcttagtagagacg

SEQ ID NO: 49184 - DNA, 20 bp, Artificial Sequence
  Description of Artificial Sequence: Synthetic oligonucleotide
  Target: ATXN2; (+) strand; PAM type: NRG; PAM sequence: TGG
gagacggggtttcaccatgt

SEQ ID NO: 49185 - DNA, 20 bp, Artificial Sequence
  Description of Artificial Sequence: Synthetic oligonucleotide
  Target: ATXN2; (+) strand; PAM type: NRG; PAM sequence: CAG
cggggtttcaccatgttggc

SEQ ID NO: 49186 - DNA, 20 bp, Artificial Sequence
  Description of Artificial Sequence: Synthetic oligonucleotide
  Target: ATXN2; (+) strand; PAM type: NRG; PAM sequence: AGG
ggggtttcaccatgttggcc

SEQ ID NO: 49187 - DNA, 20 bp, Artificial Sequence
  Description of Artificial Sequence: Synthetic oligonucleotide
  Target: ATXN2; (+) strand; PAM type: NRG; PAM sequence: TGG
tttcaccatgttggccagga

SEQ ID NO: 49188 - DNA, 20 bp, Artificial Sequence
  Description of Artificial Sequence: Synthetic oligonucleotide
  Target: ATXN2; (+) strand; PAM type: NRG; PAM sequence: CAG
accttgtgatccacccacct

SEQ ID NO: 49189 - DNA, 20 bp, Artificial Sequence
  Description of Artificial Sequence: Synthetic oligonucleotide
  Target: ATXN2; (+) strand; PAM type: NRG; PAM sequence: AAG
ccacccacctcagcctccca

SEQ ID NO: 49190 - DNA, 20 bp, Artificial Sequence
  Description of Artificial Sequence: Synthetic oligonucleotide
  Target: ATXN2; (+) strand; PAM type: NRG; PAM sequence: TGG
acctcagcctcccaaagtgc

SEQ ID NO: 49191 - DNA, 20 bp, Artificial Sequence
  Description of Artificial Sequence: Synthetic oligonucleotide
  Target: ATXN2; (+) strand; PAM type: NRG; PAM sequence: GGG
cctcagcctcccaaagtgct

SEQ ID NO: 49192 - DNA, 20 bp, Artificial Sequence
  Description of Artificial Sequence: Synthetic oligonucleotide
  Target: ATXN2; (+) strand; PAM type: NRG; PAM sequence: CAG
ctcccaaagtgctgggatta

SEQ ID NO: 49193 - DNA, 20 bp, Artificial Sequence
  Description of Artificial Sequence: Synthetic oligonucleotide
  Target: ATXN2; (+) strand; PAM type: NRG; PAM sequence: AGG
tcccaaagtgctgggattac

SEQ ID NO: 49194 - DNA, 20 bp, Artificial Sequence
  Description of Artificial Sequence: Synthetic oligonucleotide
  Target: ATXN2; (+) strand; PAM type: NRG; PAM sequence: GAG
agtgctgggattacaggcgt

SEQ ID NO: 49195 - DNA, 20 bp, Artificial Sequence
  Description of Artificial Sequence: Synthetic oligonucleotide
  Target: ATXN2; (+) strand; PAM type: NRG; PAM sequence: CGG
caggcgtgagctaccacgcc

SEQ ID NO: 49196 - DNA, 20 bp, Artificial Sequence
  Description of Artificial Sequence: Synthetic oligonucleotide
  Target: ATXN2; (+) strand; PAM type: NRG; PAM sequence: AAG
tgagctaccacgcccggcca

SEQ ID NO: 49197 - DNA, 20 bp, Artificial Sequence
  Description of Artificial Sequence: Synthetic oligonucleotide
  Target: ATXN2; (+) strand; PAM type: NRG; PAM sequence: CGG
ccacgcccggccaaagatga

SEQ ID NO: 49198 - DNA, 20 bp, Artificial Sequence
  Description of Artificial Sequence: Synthetic oligonucleotide
  Target: ATXN2; (+) strand; PAM type: NRG; PAM sequence: TGG
ggtttaacaaataaatcaca

SEQ ID NO: 49199 - DNA, 20 bp, Artificial Sequence
  Description of Artificial Sequence: Synthetic oligonucleotide
  Target: ATXN2; (+) strand; PAM type: NRG; PAM sequence: GGG
gtttaacaaataaatcacat

SEQ ID NO: 49200 - DNA, 20 bp, Artificial Sequence
  Description of Artificial Sequence: Synthetic oligonucleotide
  Target: ATXN2; (+) strand; PAM type: NRG; PAM sequence: TAG
cacatgggacaaaaacatca

SEQ ID NO: 49201 - DNA, 20 bp, Artificial Sequence
  Description of Artificial Sequence: Synthetic oligonucleotide
  Target: ATXN2; (+) strand; PAM type: NRG; PAM sequence: AGG
acatgggacaaaaacatcat

SEQ ID NO: 49202 - DNA, 20 bp, Artificial Sequence
  Description of Artificial Sequence: Synthetic oligonucleotide
  Target: ATXN2; (+) strand; PAM type: NRG; PAM sequence: GAG
atgggacaaaaacatcatag

SEQ ID NO: 49203 - DNA, 20 bp, Artificial Sequence
  Description of Artificial Sequence: Synthetic oligonucleotide
  Target: ATXN2; (+) strand; PAM type: NRG; PAM sequence: AGG
tgggacaaaaacatcatagg

SEQ ID NO: 49204 - DNA, 20 bp, Artificial Sequence
  Description of Artificial Sequence: Synthetic oligonucleotide
  Target: ATXN2; (+) strand; PAM type: NRG; PAM sequence: GAG
ggacaaaaacatcataggag

SEQ ID NO: 49205 - DNA, 20 bp, Artificial Sequence
  Description of Artificial Sequence: Synthetic oligonucleotide
  Target: ATXN2; (+) strand; PAM type: NRG; PAM sequence: AAG
gaattttaaaatacatataa

SEQ ID NO: 49206 - DNA, 20 bp, Artificial Sequence
  Description of Artificial Sequence: Synthetic oligonucleotide
  Target: ATXN2; (+) strand; PAM type: NRG; PAM sequence: TAG
atacatataaaagcaatgca

SEQ ID NO: 49207 - DNA, 20 bp, Artificial Sequence
  Description of Artificial Sequence: Synthetic oligonucleotide
  Target: ATXN2; (+) strand; PAM type: NRG; PAM sequence: AGG
tacatataaaagcaatgcat

SEQ ID NO: 49208 - DNA, 20 bp, Artificial Sequence
  Description of Artificial Sequence: Synthetic oligonucleotide
  Target: ATXN2; (+) strand; PAM type: NRG; PAM sequence: CAG
tataaaagcaatgcataggc

SEQ ID NO: 49209 - DNA, 20 bp, Artificial Sequence
  Description of Artificial Sequence: Synthetic oligonucleotide
  Target: ATXN2; (+) strand; PAM type: NRG; PAM sequence: AGG
ataaaagcaatgcataggcc

SEQ ID NO: 49210 - DNA, 20 bp, Artificial Sequence
  Description of Artificial Sequence: Synthetic oligonucleotide
  Target: ATXN2; (+) strand; PAM type: NRG; PAM sequence: TGG
agcaatgcataggccaggtg

SEQ ID NO: 49211 - DNA, 20 bp, Artificial Sequence
  Description of Artificial Sequence: Synthetic oligonucleotide
  Target: ATXN2; (+) strand; PAM type: NRG; PAM sequence: TGG
aatgcataggccaggtgtgg

SEQ ID NO: 49212 - DNA, 20 bp, Artificial Sequence
  Description of Artificial Sequence: Synthetic oligonucleotide
  Target: ATXN2; (+) strand; PAM type: NRG; PAM sequence: AAG
ataggccaggtgtggtggct

SEQ ID NO: 49213 - DNA, 20 bp, Artificial Sequence
  Description of Artificial Sequence: Synthetic oligonucleotide
  Target: ATXN2; (+) strand; PAM type: NRG; PAM sequence: AGG
taggccaggtgtggtggcta

SEQ ID NO: 49214 - DNA, 20 bp, Artificial Sequence
  Description of Artificial Sequence: Synthetic oligonucleotide
  Target: ATXN2; (+) strand; PAM type: NRG; PAM sequence: CAG
gtggctaaggcctgtaatcc

SEQ ID NO: 49215 - DNA, 20 bp, Artificial Sequence
  Description of Artificial Sequence: Synthetic oligonucleotide
  Target: ATXN2; (+) strand; PAM type: NRG; PAM sequence: TGG
ggcctgtaatcccagcactt

SEQ ID NO: 49216 - DNA, 20 bp, Artificial Sequence
  Description of Artificial Sequence: Synthetic oligonucleotide
  Target: ATXN2; (+) strand; PAM type: NRG; PAM sequence: GGG
gcctgtaatcccagcacttt

SEQ ID NO: 49217 - DNA, 20 bp, Artificial Sequence
  Description of Artificial Sequence: Synthetic oligonucleotide
  Target: ATXN2; (+) strand; PAM type: NRG; PAM sequence: GAG
ctgtaatcccagcactttgg

SEQ ID NO: 49218 - DNA, 20 bp, Artificial Sequence
  Description of Artificial Sequence: Synthetic oligonucleotide
  Target: ATXN2; (+) strand; PAM type: NRG; PAM sequence: AGG
tgtaatcccagcactttggg

SEQ ID NO: 49219 - DNA, 20 bp, Artificial Sequence
  Description of Artificial Sequence: Synthetic oligonucleotide
  Target: ATXN2; (+) strand; PAM type: NRG; PAM sequence: GAG
tcccagcactttgggaggcc

SEQ ID NO: 49220 - DNA, 20 bp, Artificial Sequence
  Description of Artificial Sequence: Synthetic oligonucleotide
  Target: ATXN2; (+) strand; PAM type: NRG; PAM sequence: AGG
cccagcactttgggaggccg

SEQ ID NO: 49221 - DNA, 20 bp, Artificial Sequence
  Description of Artificial Sequence: Synthetic oligonucleotide
  Target: ATXN2; (+) strand; PAM type: NRG; PAM sequence: TGG
agcactttgggaggccgagg

SEQ ID NO: 49222 - DNA, 20 bp, Artificial Sequence
  Description of Artificial Sequence: Synthetic oligonucleotide
  Target: ATXN2; (+) strand; PAM type: NRG; PAM sequence: GGG
gcactttgggaggccgaggt

SEQ ID NO: 49223 - DNA, 20 bp, Artificial Sequence
  Description of Artificial Sequence: Synthetic oligonucleotide
  Target: ATXN2; (+) strand; PAM type: NRG; PAM sequence: TGG
ctttgggaggccgaggtggg

SEQ ID NO: 49224 - DNA, 20 bp, Artificial Sequence
  Description of Artificial Sequence: Synthetic oligonucleotide
  Target: ATXN2; (+) strand; PAM type: NRG; PAM sequence: GAG
ggccgaggtgggtggatcac

SEQ ID NO: 49225 - DNA, 20 bp, Artificial Sequence
  Description of Artificial Sequence: Synthetic oligonucleotide
  Target: ATXN2; (+) strand; PAM type: NRG; PAM sequence: CAG
aggtgggtggatcacgagct

SEQ ID NO: 49226 - DNA, 20 bp, Artificial Sequence
  Description of Artificial Sequence: Synthetic oligonucleotide
  Target: ATXN2; (+) strand; PAM type: NRG; PAM sequence: AAG
tgggtggatcacgagctcag

SEQ ID NO: 49227 - DNA, 20 bp, Artificial Sequence
  Description of Artificial Sequence: Synthetic oligonucleotide
  Target: ATXN2; (+) strand; PAM type: NRG; PAM sequence: AAG
gatcacgagctcagaagttc

SEQ ID NO: 49228 - DNA, 20 bp, Artificial Sequence
  Description of Artificial Sequence: Synthetic oligonucleotide
  Target: ATXN2; (+) strand; PAM type: NRG; PAM sequence: CAG
cgagctcagaagttcaagac

SEQ ID NO: 49229 - DNA, 20 bp, Artificial Sequence
  Description of Artificial Sequence: Synthetic oligonucleotide
  Target: ATXN2; (+) strand; PAM type: NRG; PAM sequence: TGG
caagaccagcctgaccaata

SEQ ID NO: 49230 - DNA, 20 bp, Artificial Sequence
  Description of Artificial Sequence: Synthetic oligonucleotide
  Target: ATXN2; (+) strand; PAM type: NRG; PAM sequence: TAG
aaccccgtttctactaaaaa

SEQ ID NO: 49231 - DNA, 20 bp, Artificial Sequence
  Description of Artificial Sequence: Synthetic oligonucleotide
  Target: ATXN2; (+) strand; PAM type: NRG; PAM sequence: TAG
tctactaaaaatagaaaaat

SEQ ID NO: 49232 - DNA, 20 bp, Artificial Sequence
  Description of Artificial Sequence: Synthetic oligonucleotide
  Target: ATXN2; (+) strand; PAM type: NRG; PAM sequence: CAG
ctaaaaatagaaaaattagc

SEQ ID NO: 49233 - DNA, 20 bp, Artificial Sequence
  Description of Artificial Sequence: Synthetic oligonucleotide
  Target: ATXN2; (+) strand; PAM type: NRG; PAM sequence: AGG
taaaaatagaaaaattagcc

SEQ ID NO: 49234 - DNA, 20 bp, Artificial Sequence
  Description of Artificial Sequence: Synthetic oligonucleotide
  Target: ATXN2; (+) strand; PAM type: NRG; PAM sequence: TGG
atagaaaaattagccaggcg

SEQ ID NO: 49235 - DNA, 20 bp, Artificial Sequence
  Description of Artificial Sequence: Synthetic oligonucleotide
  Target: ATXN2; (+) strand; PAM type: NRG; PAM sequence: TGG
gaaaaattagccaggcgtgg

SEQ ID NO: 49236 - DNA, 20 bp, Artificial Sequence
  Description of Artificial Sequence: Synthetic oligonucleotide
  Target: ATXN2; (+) strand; PAM type: NRG; PAM sequence: CAG
gtggtgcacacctgtaatcc

SEQ ID NO: 49237 - DNA, 20 bp, Artificial Sequence
  Description of Artificial Sequence: Synthetic oligonucleotide
  Target: ATXN2; (+) strand; PAM type: NRG; PAM sequence: TGG
cacctgtaatcccagatatt

SEQ ID NO: 49238 - DNA, 20 bp, Artificial Sequence
  Description of Artificial Sequence: Synthetic oligonucleotide
  Target: ATXN2; (+) strand; PAM type: NRG; PAM sequence: GGG
acctgtaatcccagatattt

SEQ ID NO: 49239 - DNA, 20 bp, Artificial Sequence
  Description of Artificial Sequence: Synthetic oligonucleotide
  Target: ATXN2; (+) strand; PAM type: NRG; PAM sequence: GGG
cctgtaatcccagatatttg

SEQ ID NO: 49240 - DNA, 20 bp, Artificial Sequence
  Description of Artificial Sequence: Synthetic oligonucleotide
  Target: ATXN2; (+) strand; PAM type: NRG; PAM sequence: GAG
tgtaatcccagatatttggg

SEQ ID NO: 49241 - DNA, 20 bp, Artificial Sequence
  Description of Artificial Sequence: Synthetic oligonucleotide
  Target: ATXN2; (+) strand; PAM type: NRG; PAM sequence: AGG
gtaatcccagatatttgggg

SEQ ID NO: 49242 - DNA, 20 bp, Artificial Sequence
  Description of Artificial Sequence: Synthetic oligonucleotide
  Target: ATXN2; (+) strand; PAM type: NRG; PAM sequence: GAG
cccagatatttggggaggct

SEQ ID NO: 49243 - DNA, 20 bp, Artificial Sequence
  Description of Artificial Sequence: Synthetic oligonucleotide
  Target: ATXN2; (+) strand; PAM type: NRG; PAM sequence: CAG
atatttggggaggctgagac

SEQ ID NO: 49244 - DNA, 20 bp, Artificial Sequence
  Description of Artificial Sequence: Synthetic oligonucleotide
  Target: ATXN2; (+) strand; PAM type: NRG; PAM sequence: GAG
atttggggaggctgagacca

SEQ ID NO: 49245 - DNA, 20 bp, Artificial Sequence
  Description of Artificial Sequence: Synthetic oligonucleotide
  Target: ATXN2; (+) strand; PAM type: NRG; PAM sequence: CGG
accagagaatcacttgaacc

SEQ ID NO: 49246 - DNA, 20 bp, Artificial Sequence
  Description of Artificial Sequence: Synthetic oligonucleotide
  Target: ATXN2; (+) strand; PAM type: NRG; PAM sequence: GGG
ccagagaatcacttgaaccc

SEQ ID NO: 49247 - DNA, 20 bp, Artificial Sequence
  Description of Artificial Sequence: Synthetic oligonucleotide
  Target: ATXN2; (+) strand; PAM type: NRG; PAM sequence: AAG
gagaatcacttgaacccggg

SEQ ID NO: 49248 - DNA, 20 bp, Artificial Sequence
  Description of Artificial Sequence: Synthetic oligonucleotide
  Target: ATXN2; (+) strand; PAM type: NRG; PAM sequence: TGG
aatcacttgaacccgggaag

SEQ ID NO: 49249 - DNA, 20 bp, Artificial Sequence
  Description of Artificial Sequence: Synthetic oligonucleotide
  Target: ATXN2; (+) strand; PAM type: NRG; PAM sequence: GAG
tcacttgaacccgggaagtg

SEQ ID NO: 49250 - DNA, 20 bp, Artificial Sequence
  Description of Artificial Sequence: Synthetic oligonucleotide
  Target: ATXN2; (+) strand; PAM type: NRG; PAM sequence: AGG
cacttgaacccgggaagtgg

SEQ ID NO: 49251 - DNA, 20 bp, Artificial Sequence
  Description of Artificial Sequence: Synthetic oligonucleotide
  Target: ATXN2; (+) strand; PAM type: NRG; PAM sequence: CAG
aacccgggaagtggaggttc

SEQ ID NO: 49252 - DNA, 20 bp, Artificial Sequence
  Description of Artificial Sequence: Synthetic oligonucleotide
  Target: ATXN2; (+) strand; PAM type: NRG; PAM sequence: GAG
cgggaagtggaggttccagt

SEQ ID NO: 49253 - DNA, 20 bp, Artificial Sequence
  Description of Artificial Sequence: Synthetic oligonucleotide
  Target: ATXN2; (+) strand; PAM type: NRG; PAM sequence: GAG
agtggaggttccagtgagcc

SEQ ID NO: 49254 - DNA, 20 bp, Artificial Sequence
  Description of Artificial Sequence: Synthetic oligonucleotide
  Target: ATXN2; (+) strand; PAM type: NRG; PAM sequence: CAG
gagatcgtgccactgcactc

SEQ ID NO: 49255 - DNA, 20 bp, Artificial Sequence
  Description of Artificial Sequence: Synthetic oligonucleotide
  Target: ATXN2; (+) strand; PAM type: NRG; PAM sequence: TGG
cgtgccactgcactccagcc

SEQ ID NO: 49256 - DNA, 20 bp, Artificial Sequence
  Description of Artificial Sequence: Synthetic oligonucleotide
  Target: ATXN2; (+) strand; PAM type: NRG; PAM sequence: GGG
gtgccactgcactccagcct

SEQ ID NO: 49257 - DNA, 20 bp, Artificial Sequence
  Description of Artificial Sequence: Synthetic oligonucleotide
  Target: ATXN2; (+) strand; PAM type: NRG; PAM sequence: CAG
ctgcactccagcctgggcga

SEQ ID NO: 49258 - DNA, 20 bp, Artificial Sequence
  Description of Artificial Sequence: Synthetic oligonucleotide
  Target: ATXN2; (+) strand; PAM type: NRG; PAM sequence: GAG
gcactccagcctgggcgaca

SEQ ID NO: 49259 - DNA, 20 bp, Artificial Sequence
  Description of Artificial Sequence: Synthetic oligonucleotide
  Target: ATXN2; (+) strand; PAM type: NRG; PAM sequence: AAG
tccagcctgggcgacagagc

SEQ ID NO: 49260 - DNA, 20 bp, Artificial Sequence
  Description of Artificial Sequence: Synthetic oligonucleotide
  Target: ATXN2; (+) strand; PAM type: NRG; PAM sequence: TGG
tacacttaaaattgttaaaa

SEQ ID NO: 49261 - DNA, 20 bp, Artificial Sequence
  Description of Artificial Sequence: Synthetic oligonucleotide
  Target: ATXN2; (+) strand; PAM type: NRG; PAM sequence: TAG
acttatattgcaccataatt

SEQ ID NO: 49262 - DNA, 20 bp, Artificial Sequence
  Description of Artificial Sequence: Synthetic oligonucleotide
  Target: ATXN2; (+) strand; PAM type: NRG; PAM sequence: AGG
cttatattgcaccataattt

SEQ ID NO: 49263 - DNA, 20 bp, Artificial Sequence
  Description of Artificial Sequence: Synthetic oligonucleotide
  Target: ATXN2; (+) strand; PAM type: NRG; PAM sequence: GAG
tatattgcaccataatttag

SEQ ID NO: 49264 - DNA, 20 bp, Artificial Sequence
  Description of Artificial Sequence: Synthetic oligonucleotide
  Target: ATXN2; (+) strand; PAM type: NRG; PAM sequence: AAG
aaactcacaatctcttccca

SEQ ID NO: 49265 - DNA, 20 bp, Artificial Sequence
  Description of Artificial Sequence: Synthetic oligonucleotide
  Target: ATXN2; (+) strand; PAM type: NRG; PAM sequence: AAG
aaagaaatttcatttgcaac

SEQ ID NO: 49266 - DNA, 20 bp, Artificial Sequence
  Description of Artificial Sequence: Synthetic oligonucleotide
  Target: ATXN2; (+) strand; PAM type: NRG; PAM sequence: AGG
aagaaatttcatttgcaaca

SEQ ID NO: 49267 - DNA, 20 bp, Artificial Sequence
  Description of Artificial Sequence: Synthetic oligonucleotide
  Target: ATXN2; (+) strand; PAM type: NRG; PAM sequence: AAG
tcatttgcaacaaggtatga

SEQ ID NO: 49268 - DNA, 20 bp, Artificial Sequence
  Description of Artificial Sequence: Synthetic oligonucleotide
  Target: ATXN2; (+) strand; PAM type: NRG; PAM sequence: GAG
atttgcaacaaggtatgaaa

SEQ ID NO: 49269 - DNA, 20 bp, Artificial Sequence
  Description of Artificial Sequence: Synthetic oligonucleotide
  Target: ATXN2; (+) strand; PAM type: NRG; PAM sequence: AAG
aagagttaatgatgctttca

SEQ ID NO: 49270 - DNA, 20 bp, Artificial Sequence
  Description of Artificial Sequence: Synthetic oligonucleotide
  Target: ATXN2; (+) strand; PAM type: NRG; PAM sequence: AGG
agagttaatgatgctttcaa

SEQ ID NO: 49271 - DNA, 20 bp, Artificial Sequence
  Description of Artificial Sequence: Synthetic oligonucleotide
  Target: ATXN2; (+) strand; PAM type: NRG; PAM sequence: TGG
atgatgctttcaaaggcact

SEQ ID NO: 49272 - DNA, 20 bp, Artificial Sequence
  Description of Artificial Sequence: Synthetic oligonucleotide
  Target: ATXN2; (+) strand; PAM type: NRG; PAM sequence: TAG
atgctttcaaaggcacttgg

SEQ ID NO: 49273 - DNA, 20 bp, Artificial Sequence
  Description of Artificial Sequence: Synthetic oligonucleotide
  Target: ATXN2; (+) strand; PAM type: NRG; PAM sequence: AGG
tgctttcaaaggcacttggt

SEQ ID NO: 49274 - DNA, 20 bp, Artificial Sequence
  Description of Artificial Sequence: Synthetic oligonucleotide
  Target: ATXN2; (+) strand; PAM type: NRG; PAM sequence: GAG
ctttcaaaggcacttggtag

SEQ ID NO: 49275 - DNA, 20 bp, Artificial Sequence
  Description of Artificial Sequence: Synthetic oligonucleotide
  Target: ATXN2; (+) strand; PAM type: NRG; PAM sequence: AGG
tttcaaaggcacttggtagg

SEQ ID NO: 49276 - DNA, 20 bp, Artificial Sequence
  Description of Artificial Sequence: Synthetic oligonucleotide
  Target: ATXN2; (+) strand; PAM type: NRG; PAM sequence: GAG
tcaaaggcacttggtaggag

SEQ ID NO: 49277 - DNA, 20 bp, Artificial Sequence
  Description of Artificial Sequence: Synthetic oligonucleotide
  Target: ATXN2; (+) strand; PAM type: NRG; PAM sequence: TGG
cttggtaggaggagaatcat

SEQ ID NO: 49278 - DNA, 20 bp, Artificial Sequence
  Description of Artificial Sequence: Synthetic oligonucleotide
  Target: ATXN2; (+) strand; PAM type: NRG; PAM sequence: GAG
tggtaggaggagaatcattg

SEQ ID NO: 49279 - DNA, 20 bp, Artificial Sequence
  Description of Artificial Sequence: Synthetic oligonucleotide
  Target: ATXN2; (+) strand; PAM type: NRG; PAM sequence: AAG
ggaggagaatcattggagat

SEQ ID NO: 49280 - DNA, 20 bp, Artificial Sequence
  Description of Artificial Sequence: Synthetic oligonucleotide
  Target: ATXN2; (+) strand; PAM type: NRG; PAM sequence: TAG
tggagataagtgctaaattg

SEQ ID NO: 49281 - DNA, 20 bp, Artificial Sequence
  Description of Artificial Sequence: Synthetic oligonucleotide
  Target: ATXN2; (+) strand; PAM type: NRG; PAM sequence: TAG
agtgctaaattgtagttgtc

SEQ ID NO: 49282 - DNA, 20 bp, Artificial Sequence
  Description of Artificial Sequence: Synthetic oligonucleotide
  Target: ATXN2; (+) strand; PAM type: NRG; PAM sequence: TGG
taaattgtagttgtctagtt

SEQ ID NO: 49283 - DNA, 20 bp, Artificial Sequence
  Description of Artificial Sequence: Synthetic oligonucleotide
  Target: ATXN2; (+) strand; PAM type: NRG; PAM sequence: TGG
attgtagttgtctagtttgg

SEQ ID NO: 49284 - DNA, 20 bp, Artificial Sequence
  Description of Artificial Sequence: Synthetic oligonucleotide
  Target: ATXN2; (+) strand; PAM type: NRG; PAM sequence: CAG
tagttgtctagtttggtggc

SEQ ID NO: 49285 - DNA, 20 bp, Artificial Sequence
  Description of Artificial Sequence: Synthetic oligonucleotide
  Target: ATXN2; (+) strand; PAM type: NRG; PAM sequence: TAG
tctagtttggtggccagaac

SEQ ID NO: 49286 - DNA, 20 bp, Artificial Sequence
  Description of Artificial Sequence: Synthetic oligonucleotide
  Target: ATXN2; (+) strand; PAM type: NRG; PAM sequence: AGG
ctagtttggtggccagaact

SEQ ID NO: 49287 - DNA, 20 bp, Artificial Sequence
  Description of Artificial Sequence: Synthetic oligonucleotide
  Target: ATXN2; (+) strand; PAM type: NRG; PAM sequence: GGG
tagtttggtggccagaacta

SEQ ID NO: 49288 - DNA, 20 bp, Artificial Sequence
  Description of Artificial Sequence: Synthetic oligonucleotide
  Target: ATXN2; (+) strand; PAM type: NRG; PAM sequence: AAG
ttggtggccagaactaggga

SEQ ID NO: 49289 - DNA, 20 bp, Artificial Sequence
  Description of Artificial Sequence: Synthetic oligonucleotide
  Target: ATXN2; (+) strand; PAM type: NRG; PAM sequence: GAG
ggtggccagaactagggaaa

SEQ ID NO: 49290 - DNA, 20 bp, Artificial Sequence
  Description of Artificial Sequence: Synthetic oligonucleotide
  Target: ATXN2; (+) strand; PAM type: NRG; PAM sequence: GAG
tggccagaactagggaaaga

SEQ ID NO: 49291 - DNA, 20 bp, Artificial Sequence
  Description of Artificial Sequence: Synthetic oligonucleotide
  Target: ATXN2; (+) strand; PAM type: NRG; PAM sequence: TGG
cagaactagggaaagagagc

SEQ ID NO: 49292 - DNA, 20 bp, Artificial Sequence
  Description of Artificial Sequence: Synthetic oligonucleotide
  Target: ATXN2; (+) strand; PAM type: NRG; PAM sequence: GGG
agaactagggaaagagagct

SEQ ID NO: 49293 - DNA, 20 bp, Artificial Sequence
  Description of Artificial Sequence: Synthetic oligonucleotide
  Target: ATXN2; (+) strand; PAM type: NRG; PAM sequence: GAG
aactagggaaagagagctgg

SEQ ID NO: 49294 - DNA, 20 bp, Artificial Sequence
  Description of Artificial Sequence: Synthetic oligonucleotide
  Target: ATXN2; (+) strand; PAM type: NRG; PAM sequence: AGG
actagggaaagagagctggg

SEQ ID NO: 49295 - DNA, 20 bp, Artificial Sequence
  Description of Artificial Sequence: Synthetic oligonucleotide
  Target: ATXN2; (+) strand; PAM type: NRG; PAM sequence: TGG
gagctgggaggactcctctg

SEQ ID NO: 49296 - DNA, 20 bp, Artificial Sequence
  Description of Artificial Sequence: Synthetic oligonucleotide
  Target: ATXN2; (+) strand; PAM type: NRG; PAM sequence: TGG
gggaggactcctctgtggat

SEQ ID NO: 49297 - DNA, 20 bp, Artificial Sequence
  Description of Artificial Sequence: Synthetic oligonucleotide
  Target: ATXN2; (+) strand; PAM type: NRG; PAM sequence: CAG
caaatttcaaacactgatct

SEQ ID NO: 49298 - DNA, 20 bp, Artificial Sequence
  Description of Artificial Sequence: Synthetic oligonucleotide
  Target: ATXN2; (+) strand; PAM type: NRG; PAM sequence: AAG
tctcagaaactatcccttca

SEQ ID NO: 49299 - DNA, 20 bp, Artificial Sequence
  Description of Artificial Sequence: Synthetic oligonucleotide
  Target: ATXN2; (+) strand; PAM type: NRG; PAM sequence: AAG
cagaaactatcccttcaaag

SEQ ID NO: 49300 - DNA, 20 bp, Artificial Sequence
  Description of Artificial Sequence: Synthetic oligonucleotide
  Target: ATXN2; (+) strand; PAM type: NRG; PAM sequence: CAG
caaagaagcgcaaatttgat

SEQ ID NO: 49301 - DNA, 20 bp, Artificial Sequence
  Description of Artificial Sequence: Synthetic oligonucleotide
  Target: ATXN2; (+) strand; PAM type: NRG; PAM sequence: CAG
aagcgcaaatttgatcagat

SEQ ID NO: 49302 - DNA, 20 bp, Artificial Sequence
  Description of Artificial Sequence: Synthetic oligonucleotide
  Target: ATXN2; (+) strand; PAM type: NRG; PAM sequence: TGG
aatttgatcagatcagtctg

SEQ ID NO: 49303 - DNA, 20 bp, Artificial Sequence
  Description of Artificial Sequence: Synthetic oligonucleotide
  Target: ATXN2; (+) strand; PAM type: NRG; PAM sequence: GAG
tttgatcagatcagtctgtg

SEQ ID NO: 49304 - DNA, 20 bp, Artificial Sequence
  Description of Artificial Sequence: Synthetic oligonucleotide
  Target: ATXN2; (+) strand; PAM type: NRG; PAM sequence: CAG
gatcagatcagtctgtggag

SEQ ID NO: 49305 - DNA, 20 bp, Artificial Sequence
  Description of Artificial Sequence: Synthetic oligonucleotide
  Target: ATXN2; (+) strand; PAM type: NRG; PAM sequence: TAG
gatcagtctgtggagcagtt

SEQ ID NO: 49306 - DNA, 20 bp, Artificial Sequence
  Description of Artificial Sequence: Synthetic oligonucleotide
  Target: ATXN2; (+) strand; PAM type: NRG; PAM sequence: AGG
atcagtctgtggagcagttt

SEQ ID NO: 49307 - DNA, 20 bp, Artificial Sequence
  Description of Artificial Sequence: Synthetic oligonucleotide
  Target: ATXN2; (+) strand; PAM type: NRG; PAM sequence: AAG
tgtggagcagtttaggccca

SEQ ID NO: 49308 - DNA, 20 bp, Artificial Sequence
  Description of Artificial Sequence: Synthetic oligonucleotide
  Target: ATXN2; (+) strand; PAM type: NRG; PAM sequence: CGG
agtttaggcccaaagctcca

SEQ ID NO: 49309 - DNA, 20 bp, Artificial Sequence
  Description of Artificial Sequence: Synthetic oligonucleotide
  Target: ATXN2; (+) strand; PAM type: NRG; PAM sequence: CAG
aagctccacggaaaacaatg

SEQ ID NO: 49310 - DNA, 20 bp, Artificial Sequence
  Description of Artificial Sequence: Synthetic oligonucleotide
  Target: ATXN2; (+) strand; PAM type: NRG; PAM sequence: AGG
agctccacggaaaacaatgc

SEQ ID NO: 49311 - DNA, 20 bp, Artificial Sequence
  Description of Artificial Sequence: Synthetic oligonucleotide
  Target: ATXN2; (+) strand; PAM type: NRG; PAM sequence: CAG
atgcaggccctccatatctg

SEQ ID NO: 49312 - DNA, 20 bp, Artificial Sequence
  Description of Artificial Sequence: Synthetic oligonucleotide
  Target: ATXN2; (+) strand; PAM type: NRG; PAM sequence: CAG
atctgcagatttcacatcct

SEQ ID NO: 49313 - DNA, 20 bp, Artificial Sequence
  Description of Artificial Sequence: Synthetic oligonucleotide
  Target: ATXN2; (+) strand; PAM type: NRG; PAM sequence: GAG
atcctcagattcaatcactc

SEQ ID NO: 49314 - DNA, 20 bp, Artificial Sequence
  Description of Artificial Sequence: Synthetic oligonucleotide
  Target: ATXN2; (+) strand; PAM type: NRG; PAM sequence: AAG
aaaataaatacaataaaaat

SEQ ID NO: 49315 - DNA, 20 bp, Artificial Sequence
  Description of Artificial Sequence: Synthetic oligonucleotide
  Target: ATXN2; (+) strand; PAM type: NRG; PAM sequence: TAG
atatataacaactatttacc

SEQ ID NO: 49316 - DNA, 20 bp, Artificial Sequence
  Description of Artificial Sequence: Synthetic oligonucleotide
  Target: ATXN2; (+) strand; PAM type: NRG; PAM sequence: TAG
acctagtgtttacaccatat

SEQ ID NO: 49317 - DNA, 20 bp, Artificial Sequence
  Description of Artificial Sequence: Synthetic oligonucleotide
  Target: ATXN2; (+) strand; PAM type: NRG; PAM sequence: AGG
cctagtgtttacaccatatt

SEQ ID NO: 49318 - DNA, 20 bp, Artificial Sequence
  Description of Artificial Sequence: Synthetic oligonucleotide
  Target: ATXN2; (+) strand; PAM type: NRG; PAM sequence: AAG
tacaccatattaggtattat

SEQ ID NO: 49319 - DNA, 20 bp, Artificial Sequence
  Description of Artificial Sequence: Synthetic oligonucleotide
  Target: ATXN2; (+) strand; PAM type: NRG; PAM sequence: TAG
attaggtattataagtaatc

SEQ ID NO: 49320 - DNA, 20 bp, Artificial Sequence
  Description of Artificial Sequence: Synthetic oligonucleotide
  Target: ATXN2; (+) strand; PAM type: NRG; PAM sequence: AAG
taagtaatctagaaatgaca

SEQ ID NO: 49321 - DNA, 20 bp, Artificial Sequence
  Description of Artificial Sequence: Synthetic oligonucleotide
  Target: ATXN2; (+) strand; PAM type: NRG; PAM sequence: CAG
tctagaaatgacaaagcata

SEQ ID NO: 49322 - DNA, 20 bp, Artificial Sequence
  Description of Artificial Sequence: Synthetic oligonucleotide
  Target: ATXN2; (+) strand; PAM type: NRG; PAM sequence: AGG
ctagaaatgacaaagcatac

SEQ ID NO: 49323 - DNA, 20 bp, Artificial Sequence
  Description of Artificial Sequence: Synthetic oligonucleotide
  Target: ATXN2; (+) strand; PAM type: NRG; PAM sequence: GAG
agaaatgacaaagcatacag

SEQ ID NO: 49324 - DNA, 20 bp, Artificial Sequence
  Description of Artificial Sequence: Synthetic oligonucleotide
  Target: ATXN2; (+) strand; PAM type: NRG; PAM sequence: AGG
gaaatgacaaagcatacagg

SEQ ID NO: 49325 - DNA, 20 bp, Artificial Sequence
  Description of Artificial Sequence: Synthetic oligonucleotide
  Target: ATXN2; (+) strand; PAM type: NRG; PAM sequence: CGG
gcatacaggaggatgtgcac

SEQ ID NO: 49326 - DNA, 20 bp, Artificial Sequence
  Description of Artificial Sequence: Synthetic oligonucleotide
  Target: ATXN2; (+) strand; PAM type: NRG; PAM sequence: GAG
caaatactgtgccattttat

SEQ ID NO: 49327 - DNA, 20 bp, Artificial Sequence
  Description of Artificial Sequence: Synthetic oligonucleotide
  Target: ATXN2; (+) strand; PAM type: NRG; PAM sequence: AGG
aaatactgtgccattttatg

SEQ ID NO: 49328 - DNA, 20 bp, Artificial Sequence
  Description of Artificial Sequence: Synthetic oligonucleotide
  Target: ATXN2; (+) strand; PAM type: NRG; PAM sequence: GGG
aatactgtgccattttatga

SEQ ID NO: 49329 - DNA, 20 bp, Artificial Sequence
  Description of Artificial Sequence: Synthetic oligonucleotide
  Target: ATXN2; (+) strand; PAM type: NRG; PAM sequence: TAG
tgtgccattttatgagggac

SEQ ID NO: 49330 - DNA, 20 bp, Artificial Sequence
  Description of Artificial Sequence: Synthetic oligonucleotide
  Target: ATXN2; (+) strand; PAM type: NRG; PAM sequence: GAG
tgccattttatgagggacta

SEQ ID NO: 49331 - DNA, 20 bp, Artificial Sequence
  Description of Artificial Sequence: Synthetic oligonucleotide
  Target: ATXN2; (+) strand; PAM type: NRG; PAM sequence: CGG
ccataaatttttatatccaa

SEQ ID NO: 49332 - DNA, 20 bp, Artificial Sequence
  Description of Artificial Sequence: Synthetic oligonucleotide
  Target: ATXN2; (+) strand; PAM type: NRG; PAM sequence: GGG
cataaatttttatatccaac

SEQ ID NO: 49333 - DNA, 20 bp, Artificial Sequence
  Description of Artificial Sequence: Synthetic oligonucleotide
  Target: ATXN2; (+) strand; PAM type: NRG; PAM sequence: GGG
ataaatttttatatccaacg

SEQ ID NO: 49334 - DNA, 20 bp, Artificial Sequence
  Description of Artificial Sequence: Synthetic oligonucleotide
  Target: ATXN2; (+) strand; PAM type: NRG; PAM sequence: GGG
taaatttttatatccaacgg

SEQ ID NO: 49335 - DNA, 20 bp, Artificial Sequence
  Description of Artificial Sequence: Synthetic oligonucleotide
  Target: ATXN2; (+) strand; PAM type: NRG; PAM sequence: GGG
aaatttttatatccaacggg

SEQ ID NO: 49336 - DNA, 20 bp, Artificial Sequence
  Description of Artificial Sequence: Synthetic oligonucleotide
  Target: ATXN2; (+) strand; PAM type: NRG; PAM sequence: GGG
aatttttatatccaacgggg

SEQ ID NO: 49337 - DNA, 20 bp, Artificial Sequence
  Description of Artificial Sequence: Synthetic oligonucleotide
  Target: ATXN2; (+) strand; PAM type: NRG; PAM sequence: TGG
tatatccaacgggggggtcc

SEQ ID NO: 49338 - DNA, 20 bp, Artificial Sequence
  Description of Artificial Sequence: Synthetic oligonucleotide
  Target: ATXN2; (+) strand; PAM type: NRG; PAM sequence: GGG
atatccaacgggggggtcct

SEQ ID NO: 49339 - DNA, 20 bp, Artificial Sequence
  Description of Artificial Sequence: Synthetic oligonucleotide
  Target: ATXN2; (+) strand; PAM type: NRG; PAM sequence: AAG
ggtcctgggaccaatccccc

SEQ ID NO: 49340 - DNA, 20 bp, Artificial Sequence
  Description of Artificial Sequence: Synthetic oligonucleotide
  Target: ATXN2; (+) strand; PAM type: NRG; PAM sequence: AGG
gtcctgggaccaatccccca

SEQ ID NO: 49341 - DNA, 20 bp, Artificial Sequence
  Description of Artificial Sequence: Synthetic oligonucleotide
  Target: ATXN2; (+) strand; PAM type: NRG; PAM sequence: AAG
accaatcccccaaggacacc

SEQ ID NO: 49342 - DNA, 20 bp, Artificial Sequence
  Description of Artificial Sequence: Synthetic oligonucleotide
  Target: ATXN2; (+) strand; PAM type: NRG; PAM sequence: CAG
gacaccaagaaatgactaca

SEQ ID NO: 49343 - DNA, 20 bp, Artificial Sequence
  Description of Artificial Sequence: Synthetic oligonucleotide
  Target: ATXN2; (+) strand; PAM type: NRG; PAM sequence: TAG
aatgactacacagcatcacc

SEQ ID NO: 49344 - DNA, 20 bp, Artificial Sequence
  Description of Artificial Sequence: Synthetic oligonucleotide
  Target: ATXN2; (+) strand; PAM type: NRG; PAM sequence: TAG
acacagcatcacctagtaat

SEQ ID NO: 49345 - DNA, 20 bp, Artificial Sequence
  Description of Artificial Sequence: Synthetic oligonucleotide
  Target: ATXN2; (+) strand; PAM type: NRG; PAM sequence: TAG
gcatcacctagtaattagtg

SEQ ID NO: 49346 - DNA, 20 bp, Artificial Sequence
  Description of Artificial Sequence: Synthetic oligonucleotide
  Target: ATXN2; (+) strand; PAM type: NRG; PAM sequence: CAG
tagtaattagtgtagcttaa

SEQ ID NO: 49347 - DNA, 20 bp, Artificial Sequence
  Description of Artificial Sequence: Synthetic oligonucleotide
  Target: ATXN2; (+) strand; PAM type: NRG; PAM sequence: TGG
aattagtgtagcttaacagc

SEQ ID NO: 49348 - DNA, 20 bp, Artificial Sequence
  Description of Artificial Sequence: Synthetic oligonucleotide
  Target: ATXN2; (+) strand; PAM type: NRG; PAM sequence: GGG
attagtgtagcttaacagct

SEQ ID NO: 49349 - DNA, 20 bp, Artificial Sequence
  Description of Artificial Sequence: Synthetic oligonucleotide
  Target: ATXN2; (+) strand; PAM type: NRG; PAM sequence: CAG
tgtagcttaacagctgggta

SEQ ID NO: 49350 - DNA, 20 bp, Artificial Sequence
  Description of Artificial Sequence: Synthetic oligonucleotide
  Target: ATXN2; (+) strand; PAM type: NRG; PAM sequence: CAG
gcttaacagctgggtacagt

SEQ ID NO: 49351 - DNA, 20 bp, Artificial Sequence
  Description of Artificial Sequence: Synthetic oligonucleotide
  Target: ATXN2; (+) strand; PAM type: NRG; PAM sequence: AGG
cttaacagctgggtacagtc

SEQ ID NO: 49352 - DNA, 20 bp, Artificial Sequence
  Description of Artificial Sequence: Synthetic oligonucleotide
  Target: ATXN2; (+) strand; PAM type: NRG; PAM sequence: AAG
cagctgggtacagtcaggaa

SEQ ID NO: 49353 - DNA, 20 bp, Artificial Sequence
  Description of Artificial Sequence: Synthetic oligonucleotide
  Target: ATXN2; (+) strand; PAM type: NRG; PAM sequence: GAG
gctgggtacagtcaggaaaa

SEQ ID NO: 49354 - DNA, 20 bp, Artificial Sequence
  Description of Artificial Sequence: Synthetic oligonucleotide
  Target: ATXN2; (+) strand; PAM type: NRG; PAM sequence: AAG
tacagtcaggaaaagagaca

SEQ ID NO: 49355 - DNA, 20 bp, Artificial Sequence
  Description of Artificial Sequence: Synthetic oligonucleotide
  Target: ATXN2; (+) strand; PAM type: NRG; PAM sequence: TAG
tgccaaaatcactgtgattc

SEQ ID NO: 49356 - DNA, 20 bp, Artificial Sequence
  Description of Artificial Sequence: Synthetic oligonucleotide
  Target: ATXN2; (+) strand; PAM type: NRG; PAM sequence: GAG
ccaaaatcactgtgattcta

SEQ ID NO: 49357 - DNA, 20 bp, Artificial Sequence
  Description of Artificial Sequence: Synthetic oligonucleotide
  Target: ATXN2; (+) strand; PAM type: NRG; PAM sequence: TGG
tcactgtgattctagagtga

SEQ ID NO: 49358 - DNA, 20 bp, Artificial Sequence
  Description of Artificial Sequence: Synthetic oligonucleotide
  Target: ATXN2; (+) strand; PAM type: NRG; PAM sequence: TAG
ctgtgattctagagtgatgg

SEQ ID NO: 49359 - DNA, 20 bp, Artificial Sequence
  Description of Artificial Sequence: Synthetic oligonucleotide
  Target: ATXN2; (+) strand; PAM type: NRG; PAM sequence: AGG
tgtgattctagagtgatggt

SEQ ID NO: 49360 - DNA, 20 bp, Artificial Sequence
  Description of Artificial Sequence: Synthetic oligonucleotide
  Target: ATXN2; (+) strand; PAM type: NRG; PAM sequence: AAG
gagtgatggtaggcataccc

SEQ ID NO: 49361 - DNA, 20 bp, Artificial Sequence
  Description of Artificial Sequence: Synthetic oligonucleotide
  Target: ATXN2; (+) strand; PAM type: NRG; PAM sequence: AGG
agtgatggtaggcataccca

SEQ ID NO: 49362 - DNA, 20 bp, Artificial Sequence
  Description of Artificial Sequence: Synthetic oligonucleotide
  Target: ATXN2; (+) strand; PAM type: NRG; PAM sequence: AAG
catacccaaggctgcatccc

SEQ ID NO: 49363 - DNA, 20 bp, Artificial Sequence
  Description of Artificial Sequence: Synthetic oligonucleotide
  Target: ATXN2; (+) strand; PAM type: NRG; PAM sequence: TAG
aggctgcatcccaagaaaac

SEQ ID NO: 49364 - DNA, 20 bp, Artificial Sequence
  Description of Artificial Sequence: Synthetic oligonucleotide
  Target: ATXN2; (+) strand; PAM type: NRG; PAM sequence: CAG
catcccaagaaaactagcat

SEQ ID NO: 49365 - DNA, 20 bp, Artificial Sequence
  Description of Artificial Sequence: Synthetic oligonucleotide
  Target: ATXN2; (+) strand; PAM type: NRG; PAM sequence: CAG
atcagacgtgtcacactgta

SEQ ID NO: 49366 - DNA, 20 bp, Artificial Sequence
  Description of Artificial Sequence: Synthetic oligonucleotide
  Target: ATXN2; (+) strand; PAM type: NRG; PAM sequence: AGG
tcagacgtgtcacactgtac

SEQ ID NO: 49367 - DNA, 20 bp, Artificial Sequence
  Description of Artificial Sequence: Synthetic oligonucleotide
  Target: ATXN2; (+) strand; PAM type: NRG; PAM sequence: GGG
cagacgtgtcacactgtaca

SEQ ID NO: 49368 - DNA, 20 bp, Artificial Sequence
  Description of Artificial Sequence: Synthetic oligonucleotide
  Target: ATXN2; (+) strand; PAM type: NRG; PAM sequence: GAG
gacgtgtcacactgtacagg

SEQ ID NO: 49369 - DNA, 20 bp, Artificial Sequence
  Description of Artificial Sequence: Synthetic oligonucleotide
  Target: ATXN2; (+) strand; PAM type: NRG; PAM sequence: AGG
acgtgtcacactgtacaggg

SEQ ID NO: 49370 - DNA, 20 bp, Artificial Sequence
  Description of Artificial Sequence: Synthetic oligonucleotide
  Target: ATXN2; (+) strand; PAM type: NRG; PAM sequence: GGG
cgtgtcacactgtacaggga

SEQ ID NO: 49371 - DNA, 20 bp, Artificial Sequence
  Description of Artificial Sequence: Synthetic oligonucleotide
  Target: ATXN2; (+) strand; PAM type: NRG; PAM sequence: AAG
gtcacactgtacagggaggg

SEQ ID NO: 49372 - DNA, 20 bp, Artificial Sequence
  Description of Artificial Sequence: Synthetic oligonucleotide
  Target: ATXN2; (+) strand; PAM type: NRG; PAM sequence: AAG
acactgtacagggagggaag

SEQ ID NO: 49373 - DNA, 20 bp, Artificial Sequence
  Description of Artificial Sequence: Synthetic oligonucleotide
  Target: ATXN2; (+) strand; PAM type: NRG; PAM sequence: AGG
cactgtacagggagggaaga

SEQ ID NO: 49374 - DNA, 20 bp, Artificial Sequence
  Description of Artificial Sequence: Synthetic oligonucleotide
  Target: ATXN2; (+) strand; PAM type: NRG; PAM sequence: TAG
gtacagggagggaagaagga

SEQ ID NO: 49375 - DNA, 20 bp, Artificial Sequence
  Description of Artificial Sequence: Synthetic oligonucleotide
  Target: ATXN2; (+) strand; PAM type: NRG; PAM sequence: CAG
gatagaacactaaaatcatt

SEQ ID NO: 49376 - DNA, 20 bp, Artificial Sequence
  Description of Artificial Sequence: Synthetic oligonucleotide
  Target: ATXN2; (+) strand; PAM type: NRG; PAM sequence: CAG
gaacactaaaatcattcagc

SEQ ID NO: 49377 - DNA, 20 bp, Artificial Sequence
  Description of Artificial Sequence: Synthetic oligonucleotide
  Target: ATXN2; (+) strand; PAM type: NRG; PAM sequence: TAG
aaaatcattcagccagtcat

SEQ ID NO: 49378 - DNA, 20 bp, Artificial Sequence
  Description of Artificial Sequence: Synthetic oligonucleotide
  Target: ATXN2; (+) strand; PAM type: NRG; PAM sequence: AAG
cagccagtcattagacaaat

SEQ ID NO: 49379 - DNA, 20 bp, Artificial Sequence
  Description of Artificial Sequence: Synthetic oligonucleotide
  Target: ATXN2; (+) strand; PAM type: NRG; PAM sequence: CAG
ttagacaaataagcaaataa

SEQ ID NO: 49380 - DNA, 20 bp, Artificial Sequence
  Description of Artificial Sequence: Synthetic oligonucleotide
  Target: ATXN2; (+) strand; PAM type: NRG; PAM sequence: TAG
acaaccaccacccccaacca

SEQ ID NO: 49381 - DNA, 20 bp, Artificial Sequence
  Description of Artificial Sequence: Synthetic oligonucleotide
  Target: ATXN2; (+) strand; PAM type: NRG; PAM sequence: AGG
caaccaccacccccaaccat

SEQ ID NO: 49382 - DNA, 20 bp, Artificial Sequence
  Description of Artificial Sequence: Synthetic oligonucleotide
  Target: ATXN2; (+) strand; PAM type: NRG; PAM sequence: GAG
acccccaaccataggctaat

SEQ ID NO: 49383 - DNA, 20 bp, Artificial Sequence
  Description of Artificial Sequence: Synthetic oligonucleotide
  Target: ATXN2; (+) strand; PAM type: NRG; PAM sequence: AGG
cccccaaccataggctaatg

SEQ ID NO: 49384 - DNA, 20 bp, Artificial Sequence
  Description of Artificial Sequence: Synthetic oligonucleotide
  Target: ATXN2; (+) strand; PAM type: NRG; PAM sequence: CAG
ccataggctaatgaggtatc

SEQ ID NO: 49385 - DNA, 20 bp, Artificial Sequence
  Description of Artificial Sequence: Synthetic oligonucleotide
  Target: ATXN2; (+) strand; PAM type: NRG; PAM sequence: GAG
ataggctaatgaggtatcca

SEQ ID NO: 49386 - DNA, 20 bp, Artificial Sequence
  Description of Artificial Sequence: Synthetic oligonucleotide
  Target: ATXN2; (+) strand; PAM type: NRG; PAM sequence: CAG
actacattacttaaaatgtc

SEQ ID NO: 49387 - DNA, 20 bp, Artificial Sequence
  Description of Artificial Sequence: Synthetic oligonucleotide
  Target: ATXN2; (+) strand; PAM type: NRG; PAM sequence: AAG
acaacaaaaaaaaaaacgac

SEQ ID NO: 49388 - DNA, 20 bp, Artificial Sequence
  Description of Artificial Sequence: Synthetic oligonucleotide
  Target: ATXN2; (+) strand; PAM type: NRG; PAM sequence: AAG
aaaaaaaaaaacgacaagct

SEQ ID NO: 49389 - DNA, 20 bp, Artificial Sequence
  Description of Artificial Sequence: Synthetic oligonucleotide
  Target: ATXN2; (+) strand; PAM type: NRG; PAM sequence: CAG
aaaaacgacaagctaagaca

SEQ ID NO: 49390 - DNA, 20 bp, Artificial Sequence
  Description of Artificial Sequence: Synthetic oligonucleotide
  Target: ATXN2; (+) strand; PAM type: NRG; PAM sequence: AGG
aaaacgacaagctaagacac

SEQ ID NO: 49391 - DNA, 20 bp, Artificial Sequence
  Description of Artificial Sequence: Synthetic oligonucleotide
  Target: ATXN2; (+) strand; PAM type: NRG; PAM sequence: AAG
cgacaagctaagacacagga

SEQ ID NO: 49392 - DNA, 20 bp, Artificial Sequence
  Description of Artificial Sequence: Synthetic oligonucleotide
  Target: ATXN2; (+) strand; PAM type: NRG; PAM sequence: TGG
gaaagtataaccccacccac

SEQ ID NO: 49393 - DNA, 20 bp, Artificial Sequence
  Description of Artificial Sequence: Synthetic oligonucleotide
  Target: ATXN2; (+) strand; PAM type: NRG; PAM sequence: AAG
ataaccccacccactggaaa

SEQ ID NO: 49394 - DNA, 20 bp, Artificial Sequence
  Description of Artificial Sequence: Synthetic oligonucleotide
  Target: ATXN2; (+) strand; PAM type: NRG; PAM sequence: AAG
accccacccactggaaaaag

SEQ ID NO: 49395 - DNA, 20 bp, Artificial Sequence
  Description of Artificial Sequence: Synthetic oligonucleotide
  Target: ATXN2; (+) strand; PAM type: NRG; PAM sequence: TAG
ccacccactggaaaaagaag

SEQ ID NO: 49396 - DNA, 20 bp, Artificial Sequence
  Description of Artificial Sequence: Synthetic oligonucleotide
  Target: ATXN2; (+) strand; PAM type: NRG; PAM sequence: AGG
cacccactggaaaaagaagt

SEQ ID NO: 49397 - DNA, 20 bp, Artificial Sequence
  Description of Artificial Sequence: Synthetic oligonucleotide
  Target: ATXN2; (+) strand; PAM type: NRG; PAM sequence: TAG
ctggaaaaagaagtaggcaa

SEQ ID NO: 49398 - DNA, 20 bp, Artificial Sequence
  Description of Artificial Sequence: Synthetic oligonucleotide
  Target: ATXN2; (+) strand; PAM type: NRG; PAM sequence: CAG
atagaaattgcttgtataac

SEQ ID NO: 49399 - DNA, 20 bp, Artificial Sequence
  Description of Artificial Sequence: Synthetic oligonucleotide
  Target: ATXN2; (+) strand; PAM type: NRG; PAM sequence: AAG
aaccagatgtctgacttaat

SEQ ID NO: 49400 - DNA, 20 bp, Artificial Sequence
  Description of Artificial Sequence: Synthetic oligonucleotide
  Target: ATXN2; (+) strand; PAM type: NRG; PAM sequence: AAG
tgacttaataagaatttcaa

SEQ ID NO: 49401 - DNA, 20 bp, Artificial Sequence
  Description of Artificial Sequence: Synthetic oligonucleotide
  Target: ATXN2; (+) strand; PAM type: NRG; PAM sequence: TGG
cttaataagaatttcaaaag

SEQ ID NO: 49402 - DNA, 20 bp, Artificial Sequence
  Description of Artificial Sequence: Synthetic oligonucleotide
  Target: ATXN2; (+) strand; PAM type: NRG; PAM sequence: AAG
ggtcactataaacatgtttt

SEQ ID NO: 49403 - DNA, 20 bp, Artificial Sequence
  Description of Artificial Sequence: Synthetic oligonucleotide
  Target: ATXN2; (+) strand; PAM type: NRG; PAM sequence: AAG
taaacatgttttaagaacga

SEQ ID NO: 49404 - DNA, 20 bp, Artificial Sequence
  Description of Artificial Sequence: Synthetic oligonucleotide
  Target: ATXN2; (+) strand; PAM type: NRG; PAM sequence: CAG
aaagaaaaccataattaatg

SEQ ID NO: 49405 - DNA, 20 bp, Artificial Sequence
  Description of Artificial Sequence: Synthetic oligonucleotide
  Target: ATXN2; (+) strand; PAM type: NRG; PAM sequence: AAG
aaccataattaatgcagtaa

SEQ ID NO: 49406 - DNA, 20 bp, Artificial Sequence
  Description of Artificial Sequence: Synthetic oligonucleotide
  Target: ATXN2; (+) strand; PAM type: NRG; PAM sequence: AAG
cataattaatgcagtaaaag

SEQ ID NO: 49407 - DNA, 20 bp, Artificial Sequence
  Description of Artificial Sequence: Synthetic oligonucleotide
  Target: ATXN2; (+) strand; PAM type: NRG; PAM sequence: AGG
ataattaatgcagtaaaaga

SEQ ID NO: 49408 - DNA, 20 bp, Artificial Sequence
  Description of Artificial Sequence: Synthetic oligonucleotide
  Target: ATXN2; (+) strand; PAM type: NRG; PAM sequence: TGG
gcagtaaaagaaggtatgat

SEQ ID NO: 49409 - DNA, 20 bp, Artificial Sequence
  Description of Artificial Sequence: Synthetic oligonucleotide
  Target: ATXN2; (+) strand; PAM type: NRG; PAM sequence: CAG
taaaagaaggtatgattggc

SEQ ID NO: 49410 - DNA, 20 bp, Artificial Sequence
  Description of Artificial Sequence: Synthetic oligonucleotide
  Target: ATXN2; (+) strand; PAM type: NRG; PAM sequence: AGG
aaaagaaggtatgattggcc

SEQ ID NO: 49411 - DNA, 20 bp, Artificial Sequence
  Description of Artificial Sequence: Synthetic oligonucleotide
  Target: ATXN2; (+) strand; PAM type: NRG; PAM sequence: CAG
ctgactcacgcctgtaatcc

SEQ ID NO: 49412 - DNA, 20 bp, Artificial Sequence
  Description of Artificial Sequence: Synthetic oligonucleotide
  Target: ATXN2; (+) strand; PAM type: NRG; PAM sequence: CAG
cgcctgtaatcccagcactc

SEQ ID NO: 49413 - DNA, 20 bp, Artificial Sequence
  Description of Artificial Sequence: Synthetic oligonucleotide
  Target: ATXN2; (+) strand; PAM type: NRG; PAM sequence: AGG
gcctgtaatcccagcactcc

SEQ ID NO: 49414 - DNA, 20 bp, Artificial Sequence
  Description of Artificial Sequence: Synthetic oligonucleotide
  Target: ATXN2; (+) strand; PAM type: NRG; PAM sequence: GAG
ctgtaatcccagcactccag

SEQ ID NO: 49415 - DNA, 20 bp, Artificial Sequence
  Description of Artificial Sequence: Synthetic oligonucleotide
  Target: ATXN2; (+) strand; PAM type: NRG; PAM sequence: AGG
tgtaatcccagcactccagg

SEQ ID NO: 49416 - DNA, 20 bp, Artificial Sequence
  Description of Artificial Sequence: Synthetic oligonucleotide
  Target: ATXN2; (+) strand; PAM type: NRG; PAM sequence: AAG
tcccagcactccaggaggcc

SEQ ID NO: 49417 - DNA, 20 bp, Artificial Sequence
  Description of Artificial Sequence: Synthetic oligonucleotide
  Target: ATXN2; (+) strand; PAM type: NRG; PAM sequence: AGG
cccagcactccaggaggcca

SEQ ID NO: 49418 - DNA, 20 bp, Artificial Sequence
  Description of Artificial Sequence: Synthetic oligonucleotide
  Target: ATXN2; (+) strand; PAM type: NRG; PAM sequence: CGG
agcactccaggaggccaagg

SEQ ID NO: 49419 - DNA, 20 bp, Artificial Sequence
  Description of Artificial Sequence: Synthetic oligonucleotide
  Target: ATXN2; (+) strand; PAM type: NRG; PAM sequence: GGG
gcactccaggaggccaaggc

SEQ ID NO: 49420 - DNA, 20 bp, Artificial Sequence
  Description of Artificial Sequence: Synthetic oligonucleotide
  Target: ATXN2; (+) strand; PAM type: NRG; PAM sequence: TAG
taaaaatacaaaaacaaaat

SEQ ID NO: 49421 - DNA, 20 bp, Artificial Sequence
  Description of Artificial Sequence: Synthetic oligonucleotide
  Target: ATXN2; (+) strand; PAM type: NRG; PAM sequence: CAG
aatacaaaaacaaaattagc

SEQ ID NO: 49422 - DNA, 20 bp, Artificial Sequence
  Description of Artificial Sequence: Synthetic oligonucleotide
  Target: ATXN2; (+) strand; PAM type: NRG; PAM sequence: AGG
atacaaaaacaaaattagcc

SEQ ID NO: 49423 - DNA, 20 bp, Artificial Sequence
  Description of Artificial Sequence: Synthetic oligonucleotide
  Target: ATXN2; (+) strand; PAM type: NRG; PAM sequence: TGG
aaaacaaaattagccaggcg

SEQ ID NO: 49424 - DNA, 20 bp, Artificial Sequence
  Description of Artificial Sequence: Synthetic oligonucleotide
  Target: ATXN2; (+) strand; PAM type: NRG; PAM sequence: TGG
acaaaattagccaggcgtgg

SEQ ID NO: 49425 - DNA, 20 bp, Artificial Sequence
  Description of Artificial Sequence: Synthetic oligonucleotide
  Target: ATXN2; (+) strand; PAM type: NRG; PAM sequence: CAG
aaattagccaggcgtggtgg

SEQ ID NO: 49426 - DNA, 20 bp, Artificial Sequence
  Description of Artificial Sequence: Synthetic oligonucleotide
  Target: ATXN2; (+) strand; PAM type: NRG; PAM sequence: AGG
aattagccaggcgtggtggc

SEQ ID NO: 49427 - DNA, 20 bp, Artificial Sequence
  Description of Artificial Sequence: Synthetic oligonucleotide
  Target: ATXN2; (+) strand; PAM type: NRG; PAM sequence: TAG
ggcgtggtggcaggcacctg

SEQ ID NO: 49428 - DNA, 20 bp, Artificial Sequence
  Description of Artificial Sequence: Synthetic oligonucleotide
  Target: ATXN2; (+) strand; PAM type: NRG; PAM sequence: CAG
gtggcaggcacctgtagtcc

SEQ ID NO: 49429 - DNA, 20 bp, Artificial Sequence
  Description of Artificial Sequence: Synthetic oligonucleotide
  Target: ATXN2; (+) strand; PAM type: NRG; PAM sequence: CAG
cacctgtagtcccagctact

SEQ ID NO: 49430 - DNA, 20 bp, Artificial Sequence
  Description of Artificial Sequence: Synthetic oligonucleotide
  Target: ATXN2; (+) strand; PAM type: NRG; PAM sequence: AGG
acctgtagtcccagctactc

SEQ ID NO: 49431 - DNA, 20 bp, Artificial Sequence
  Description of Artificial Sequence: Synthetic oligonucleotide
  Target: ATXN2; (+) strand; PAM type: NRG; PAM sequence: GAG
ctgtagtcccagctactcag

SEQ ID NO: 49432 - DNA, 20 bp, Artificial Sequence
  Description of Artificial Sequence: Synthetic oligonucleotide
  Target: ATXN2; (+) strand; PAM type: NRG; PAM sequence: AGG
tgtagtcccagctactcagg

SEQ ID NO: 49433 - DNA, 20 bp, Artificial Sequence
  Description of Artificial Sequence: Synthetic oligonucleotide
  Target: ATXN2; (+) strand; PAM type: NRG; PAM sequence: AAG
tcccagctactcaggaggct

SEQ ID NO: 49434 - DNA, 20 bp, Artificial Sequence
  Description of Artificial Sequence: Synthetic oligonucleotide
  Target: ATXN2; (+) strand; PAM type: NRG; PAM sequence: AGG
cccagctactcaggaggcta

SEQ ID NO: 49435 - DNA, 20 bp, Artificial Sequence
  Description of Artificial Sequence: Synthetic oligonucleotide
  Target: ATXN2; (+) strand; PAM type: NRG; PAM sequence: CAG
agctactcaggaggctaagg

SEQ ID NO: 49436 - DNA, 20 bp, Artificial Sequence
  Description of Artificial Sequence: Synthetic oligonucleotide
  Target: ATXN2; (+) strand; PAM type: NRG; PAM sequence: AGG
gctactcaggaggctaaggc

SEQ ID NO: 49437 - DNA, 20 bp, Artificial Sequence
  Description of Artificial Sequence: Synthetic oligonucleotide
  Target: ATXN2; (+) strand; PAM type: NRG; PAM sequence: TGG
aggaggctaaggcaggacaa

SEQ ID NO: 49438 - DNA, 20 bp, Artificial Sequence
  Description of Artificial Sequence: Synthetic oligonucleotide
  Target: ATXN2; (+) strand; PAM type: NRG; PAM sequence: TGG
gcaggacaatggtgtgaact

SEQ ID NO: 49439 - DNA, 20 bp, Artificial Sequence
  Description of Artificial Sequence: Synthetic oligonucleotide
  Target: ATXN2; (+) strand; PAM type: NRG; PAM sequence: GGG
caggacaatggtgtgaactt

SEQ ID NO: 49440 - DNA, 20 bp, Artificial Sequence
  Description of Artificial Sequence: Synthetic oligonucleotide
  Target: ATXN2; (+) strand; PAM type: NRG; PAM sequence: GAG
ggacaatggtgtgaacttgg

SEQ ID NO: 49441 - DNA, 20 bp, Artificial Sequence
  Description of Artificial Sequence: Synthetic oligonucleotide
  Target: ATXN2; (+) strand; PAM type: NRG; PAM sequence: AGG
gacaatggtgtgaacttggg

SEQ ID NO: 49442 - DNA, 20 bp, Artificial Sequence
  Description of Artificial Sequence: Synthetic oligonucleotide
  Target: ATXN2; (+) strand; PAM type: NRG; PAM sequence: CGG
aatggtgtgaacttgggagg

SEQ ID NO: 49443 - DNA, 20 bp, Artificial Sequence
  Description of Artificial Sequence: Synthetic oligonucleotide
  Target: ATXN2; (+) strand; PAM type: NRG; PAM sequence: GAG
tggtgtgaacttgggaggcg

SEQ ID NO: 49444 - DNA, 20 bp, Artificial Sequence
  Description of Artificial Sequence: Synthetic oligonucleotide
  Target: ATXN2; (+) strand; PAM type: NRG; PAM sequence: CAG
aacttgggaggcggagcttg

SEQ ID NO: 49445 - DNA, 20 bp, Artificial Sequence
  Description of Artificial Sequence: Synthetic oligonucleotide
  Target: ATXN2; (+) strand; PAM type: NRG; PAM sequence: GAG
tgggaggcggagcttgcagt

SEQ ID NO: 49446 - DNA, 20 bp, Artificial Sequence
  Description of Artificial Sequence: Synthetic oligonucleotide
  Target: ATXN2; (+) strand; PAM type: NRG; PAM sequence: GAG
ggcggagcttgcagtgagcc

SEQ ID NO: 49447 - DNA, 20 bp, Artificial Sequence
  Description of Artificial Sequence: Synthetic oligonucleotide
  Target: ATXN2; (+) strand; PAM type: NRG; PAM sequence: CAG
gagattgtgccactgcactc

SEQ ID NO: 49448 - DNA, 20 bp, Artificial Sequence
  Description of Artificial Sequence: Synthetic oligonucleotide
  Target: ATXN2; (+) strand; PAM type: NRG; PAM sequence: TGG
tgtgccactgcactccagcc

SEQ ID NO: 49449 - DNA, 20 bp, Artificial Sequence
  Description of Artificial Sequence: Synthetic oligonucleotide
  Target: ATXN2; (+) strand; PAM type: NRG; PAM sequence: GGG
gtgccactgcactccagcct

SEQ ID NO: 49450 - DNA, 20 bp, Artificial Sequence
  Description of Artificial Sequence: Synthetic oligonucleotide
  Target: ATXN2; (+) strand; PAM type: NRG; PAM sequence: CAG
gcactccagcctgggcaata

SEQ ID NO: 49451 - DNA, 20 bp, Artificial Sequence
  Description of Artificial Sequence: Synthetic oligonucleotide
  Target: ATXN2; (+) strand; PAM type: NRG; PAM sequence: GAG
tccagcctgggcaatacagc

SEQ ID NO: 49452 - DNA, 20 bp, Artificial Sequence
  Description of Artificial Sequence: Synthetic oligonucleotide
  Target: ATXN2; (+) strand; PAM type: NRG; PAM sequence: CAG
aaaaaaaaaaaataaatgaa

SEQ ID NO: 49453 - DNA, 20 bp, Artificial Sequence
  Description of Artificial Sequence: Synthetic oligonucleotide
  Target: ATXN2; (+) strand; PAM type: NRG; PAM sequence: TGG
aaaaataaatgaacagtctc

SEQ ID NO: 49454 - DNA, 20 bp, Artificial Sequence
  Description of Artificial Sequence: Synthetic oligonucleotide
  Target: ATXN2; (+) strand; PAM type: NRG; PAM sequence: CGG
ataaatgaacagtctctggc

SEQ ID NO: 49455 - DNA, 20 bp, Artificial Sequence
  Description of Artificial Sequence: Synthetic oligonucleotide
  Target: ATXN2; (+) strand; PAM type: NRG; PAM sequence: GGG
taaatgaacagtctctggcc

SEQ ID NO: 49456 - DNA, 20 bp, Artificial Sequence
  Description of Artificial Sequence: Synthetic oligonucleotide
  Target: ATXN2; (+) strand; PAM type: NRG; PAM sequence: TGG
gaacagtctctggccgggca

SEQ ID NO: 49457 - DNA, 20 bp, Artificial Sequence
  Description of Artificial Sequence: Synthetic oligonucleotide
  Target: ATXN2; (+) strand; PAM type: NRG; PAM sequence: TGG
cagtctctggccgggcatgg

SEQ ID NO: 49458 - DNA, 20 bp, Artificial Sequence
  Description of Artificial Sequence: Synthetic oligonucleotide
  Target: ATXN2; (+) strand; PAM type: NRG; PAM sequence: CAG
ggtggctcatgccttaatcc

SEQ ID NO: 49459 - DNA, 20 bp, Artificial Sequence
  Description of Artificial Sequence: Synthetic oligonucleotide
  Target: ATXN2; (+) strand; PAM type: NRG; PAM sequence: TGG
atgccttaatcccagcactt

SEQ ID NO: 49460 - DNA, 20 bp, Artificial Sequence
  Description of Artificial Sequence: Synthetic oligonucleotide
  Target: ATXN2; (+) strand; PAM type: NRG; PAM sequence: GGG
tgccttaatcccagcacttt

SEQ ID NO: 49461 - DNA, 20 bp, Artificial Sequence
  Description of Artificial Sequence: Synthetic oligonucleotide
  Target: ATXN2; (+) strand; PAM type: NRG; PAM sequence: GAG
ccttaatcccagcactttgg

SEQ ID NO: 49462 - DNA, 20 bp, Artificial Sequence
  Description of Artificial Sequence: Synthetic oligonucleotide
  Target: ATXN2; (+) strand; PAM type: NRG; PAM sequence: AGG
cttaatcccagcactttggg

SEQ ID NO: 49463 - DNA, 20 bp, Artificial Sequence
  Description of Artificial Sequence: Synthetic oligonucleotide
  Target: ATXN2; (+) strand; PAM type: NRG; PAM sequence: AAG
tcccagcactttgggaggcc

SEQ ID NO: 49464 - DNA, 20 bp, Artificial Sequence
  Description of Artificial Sequence: Synthetic oligonucleotide
  Target: ATXN2; (+) strand; PAM type: NRG; PAM sequence: AGG
cccagcactttgggaggcca

SEQ ID NO: 49465 - DNA, 20 bp, Artificial Sequence
  Description of Artificial Sequence: Synthetic oligonucleotide
  Target: ATXN2; (+) strand; PAM type: NRG; PAM sequence: CAG
agcactttgggaggccaagg

SEQ ID NO: 49466 - DNA, 20 bp, Artificial Sequence
  Description of Artificial Sequence: Synthetic oligonucleotide
  Target: ATXN2; (+) strand; PAM type: NRG; PAM sequence: AGG
gcactttgggaggccaaggc

SEQ ID NO: 49467 - DNA, 20 bp, Artificial Sequence
  Description of Artificial Sequence: Synthetic oligonucleotide
  Target: ATXN2; (+) strand; PAM type: NRG; PAM sequence: TGG
ctttgggaggccaaggcagg

SEQ ID NO: 49468 - DNA, 20 bp, Artificial Sequence
  Description of Artificial Sequence: Synthetic oligonucleotide
  Target: ATXN2; (+) strand; PAM type: NRG; PAM sequence: GAG
ccaaggcaggtggatcacct

SEQ ID NO: 49469 - DNA, 20 bp, Artificial Sequence
  Description of Artificial Sequence: Synthetic oligonucleotide
  Target: ATXN2; (+) strand; PAM type: NRG; PAM sequence: AGG
caaggcaggtggatcacctg

SEQ ID NO: 49470 - DNA, 20 bp, Artificial Sequence
  Description of Artificial Sequence: Synthetic oligonucleotide
  Target: ATXN2; (+) strand; PAM type: NRG; PAM sequence: CAG
gcaggtggatcacctgaggt

SEQ ID NO: 49471 - DNA, 20 bp, Artificial Sequence
  Description of Artificial Sequence: Synthetic oligonucleotide
  Target: ATXN2; (+) strand; PAM type: NRG; PAM sequence: GAG
aggtggatcacctgaggtca

SEQ ID NO: 49472 - DNA, 20 bp, Artificial Sequence
  Description of Artificial Sequence: Synthetic oligonucleotide
  Target: ATXN2; (+) strand; PAM type: NRG; PAM sequence: AGG
ggtggatcacctgaggtcag

SEQ ID NO: 49473 - DNA, 20 bp, Artificial Sequence
  Description of Artificial Sequence: Synthetic oligonucleotide
  Target: ATXN2; (+) strand; PAM type: NRG; PAM sequence: AAG
tcacctgaggtcagaggttc

SEQ ID NO: 49474 - DNA, 20 bp, Artificial Sequence
  Description of Artificial Sequence: Synthetic oligonucleotide
  Target: ATXN2; (+) strand; PAM type: NRG; PAM sequence: CAG
tgaggtcagaggttcaagac

SEQ ID NO: 49475 - DNA, 20 bp, Artificial Sequence
  Description of Artificial Sequence: Synthetic oligonucleotide
  Target: ATXN2; (+) strand; PAM type: NRG; PAM sequence: TGG
tcagaggttcaagaccagcc

SEQ ID NO: 49476 - DNA, 20 bp, Artificial Sequence
  Description of Artificial Sequence: Synthetic oligonucleotide
  Target: ATXN2; (+) strand; PAM type: NRG; PAM sequence: TAG
tgctcaaactccatcactac

SEQ ID NO: 49477 - DNA, 20 bp, Artificial Sequence
  Description of Artificial Sequence: Synthetic oligonucleotide
  Target: ATXN2; (+) strand; PAM type: NRG; PAM sequence: TAG
ctactagatatacaaaaaat

SEQ ID NO: 49478 - DNA, 20 bp, Artificial Sequence
  Description of Artificial Sequence: Synthetic oligonucleotide
  Target: ATXN2; (+) strand; PAM type: NRG; PAM sequence: CAG
tagatatacaaaaaattagc

SEQ ID NO: 49479 - DNA, 20 bp, Artificial Sequence
  Description of Artificial Sequence: Synthetic oligonucleotide
  Target: ATXN2; (+) strand; PAM type: NRG; PAM sequence: AGG
agatatacaaaaaattagcc

SEQ ID NO: 49480 - DNA, 20 bp, Artificial Sequence
  Description of Artificial Sequence: Synthetic oligonucleotide
  Target: ATXN2; (+) strand; PAM type: NRG; PAM sequence: TGG
tacaaaaaattagccaggca

SEQ ID NO: 49481 - DNA, 20 bp, Artificial Sequence
  Description of Artificial Sequence: Synthetic oligonucleotide
  Target: ATXN2; (+) strand; PAM type: NRG; PAM sequence: TGG
aaaaaattagccaggcatgg

SEQ ID NO: 49482 - DNA, 20 bp, Artificial Sequence
  Description of Artificial Sequence: Synthetic oligonucleotide
  Target: ATXN2; (+) strand; PAM type: NRG; PAM sequence: CAG
aaattagccaggcatggtgg

SEQ ID NO: 49483 - DNA, 20 bp, Artificial Sequence
  Description of Artificial Sequence: Synthetic oligonucleotide
  Target: ATXN2; (+) strand; PAM type: NRG; PAM sequence: AGG
aattagccaggcatggtggc

SEQ ID NO: 49484 - DNA, 20 bp, Artificial Sequence
  Description of Artificial Sequence: Synthetic oligonucleotide
  Target: ATXN2; (+) strand; PAM type: NRG; PAM sequence: CAG
cgcctataatcccaactatt

SEQ ID NO: 49485 - DNA, 20 bp, Artificial Sequence
  Description of Artificial Sequence: Synthetic oligonucleotide
  Target: ATXN2; (+) strand; PAM type: NRG; PAM sequence: AGG
gcctataatcccaactattc

SEQ ID NO: 49486 - DNA, 20 bp, Artificial Sequence
  Description of Artificial Sequence: Synthetic oligonucleotide
  Target: ATXN2; (+) strand; PAM type: NRG; PAM sequence: GAG
ctataatcccaactattcag

SEQ ID NO: 49487 - DNA, 20 bp, Artificial Sequence
  Description of Artificial Sequence: Synthetic oligonucleotide
  Target: ATXN2; (+) strand; PAM type: NRG; PAM sequence: AGG
tataatcccaactattcagg

SEQ ID NO: 49488 - DNA, 20 bp, Artificial Sequence
  Description of Artificial Sequence: Synthetic oligonucleotide
  Target: ATXN2; (+) strand; PAM type: NRG; PAM sequence: GAG
taatcccaactattcaggag

SEQ ID NO: 49489 - DNA, 20 bp, Artificial Sequence
  Description of Artificial Sequence: Synthetic oligonucleotide
  Target: ATXN2; (+) strand; PAM type: NRG; PAM sequence: AGG
aatcccaactattcaggagg

SEQ ID NO: 49490 - DNA, 20 bp, Artificial Sequence
  Description of Artificial Sequence: Synthetic oligonucleotide
  Target: ATXN2; (+) strand; PAM type: NRG; PAM sequence: TGG
cccaactattcaggaggagg

SEQ ID NO: 49491 - DNA, 20 bp, Artificial Sequence
  Description of Artificial Sequence: Synthetic oligonucleotide
  Target: ATXN2; (+) strand; PAM type: NRG; PAM sequence: GAG
ctattcaggaggaggtggct

SEQ ID NO: 49492 - DNA, 20 bp, Artificial Sequence
  Description of Artificial Sequence: Synthetic oligonucleotide
  Target: ATXN2; (+) strand; PAM type: NRG; PAM sequence: AGG
tattcaggaggaggtggctg

SEQ ID NO: 49493 - DNA, 20 bp, Artificial Sequence
  Description of Artificial Sequence: Synthetic oligonucleotide
  Target: ATXN2; (+) strand; PAM type: NRG; PAM sequence: GGG
attcaggaggaggtggctga

SEQ ID NO: 49494 - DNA, 20 bp, Artificial Sequence
  Description of Artificial Sequence: Synthetic oligonucleotide
  Target: ATXN2; (+) strand; PAM type: NRG; PAM sequence: GAG
tcaggaggaggtggctgagg

SEQ ID NO: 49495 - DNA, 20 bp, Artificial Sequence
  Description of Artificial Sequence: Synthetic oligonucleotide
  Target: ATXN2; (+) strand; PAM type: NRG; PAM sequence: AGG
caggaggaggtggctgaggg

SEQ ID NO: 49496 - DNA, 20 bp, Artificial Sequence
  Description of Artificial Sequence: Synthetic oligonucleotide
  Target: ATXN2; (+) strand; PAM type: NRG; PAM sequence: GAG
ggaggaggtggctgagggag

SEQ ID NO: 49497 - DNA, 20 bp, Artificial Sequence
  Description of Artificial Sequence: Synthetic oligonucleotide
  Target: ATXN2; (+) strand; PAM type: NRG; PAM sequence: CGG
aggtggctgagggaggagaa

SEQ ID NO: 49498 - DNA, 20 bp, Artificial Sequence
  Description of Artificial Sequence: Synthetic oligonucleotide
  Target: ATXN2; (+) strand; PAM type: NRG; PAM sequence: CAG
ggaggagaacggcttgaacc

SEQ ID NO: 49499 - DNA, 20 bp, Artificial Sequence
  Description of Artificial Sequence: Synthetic oligonucleotide
  Target: ATXN2; (+) strand; PAM type: NRG; PAM sequence: AGG
gaggagaacggcttgaaccc

SEQ ID NO: 49500 - DNA, 20 bp, Artificial Sequence
  Description of Artificial Sequence: Synthetic oligonucleotide
  Target: ATXN2; (+) strand; PAM type: NRG; PAM sequence: GAG
ggagaacggcttgaacccag

SEQ ID NO: 49501 - DNA, 20 bp, Artificial Sequence
  Description of Artificial Sequence: Synthetic oligonucleotide
  Target: ATXN2; (+) strand; PAM type: NRG; PAM sequence: AGG
gagaacggcttgaacccagg

SEQ ID NO: 49502 - DNA, 20 bp, Artificial Sequence
  Description of Artificial Sequence: Synthetic oligonucleotide
  Target: ATXN2; (+) strand; PAM type: NRG; PAM sequence: TGG
aacggcttgaacccaggagg

SEQ ID NO: 49503 - DNA, 20 bp, Artificial Sequence
  Description of Artificial Sequence: Synthetic oligonucleotide
  Target: ATXN2; (+) strand; PAM type: NRG; PAM sequence: GAG
cggcttgaacccaggaggtg

SEQ ID NO: 49504 - DNA, 20 bp, Artificial Sequence
  Description of Artificial Sequence: Synthetic oligonucleotide
  Target: ATXN2; (+) strand; PAM type: NRG; PAM sequence: AGG
ggcttgaacccaggaggtgg

SEQ ID NO: 49505 - DNA, 20 bp, Artificial Sequence
  Description of Artificial Sequence: Synthetic oligonucleotide
  Target: ATXN2; (+) strand; PAM type: NRG; PAM sequence: CAG
aacccaggaggtggaggctg

SEQ ID NO: 49506 - DNA, 20 bp, Artificial Sequence
  Description of Artificial Sequence: Synthetic oligonucleotide
  Target: ATXN2; (+) strand; PAM type: NRG; PAM sequence: GAG
caggaggtggaggctgcagt

SEQ ID NO: 49507 - DNA, 20 bp, Artificial Sequence
  Description of Artificial Sequence: Synthetic oligonucleotide
  Target: ATXN2; (+) strand; PAM type: NRG; PAM sequence: GAG
ggtggaggctgcagtgagcc

SEQ ID NO: 49508 - DNA, 20 bp, Artificial Sequence
  Description of Artificial Sequence: Synthetic oligonucleotide
  Target: ATXN2; (+) strand; PAM type: NRG; PAM sequence: TGG
gaggctgcagtgagccgaga

SEQ ID NO: 49509 - DNA, 20 bp, Artificial Sequence
  Description of Artificial Sequence: Synthetic oligonucleotide
  Target: ATXN2; (+) strand; PAM type: NRG; PAM sequence: CAG
gagatggcaccactgtactc

SEQ ID NO: 49510 - DNA, 20 bp, Artificial Sequence
  Description of Artificial Sequence: Synthetic oligonucleotide
  Target: ATXN2; (+) strand; PAM type: NRG; PAM sequence: TGG
ggcaccactgtactccagct

SEQ ID NO: 49511 - DNA, 20 bp, Artificial Sequence
  Description of Artificial Sequence: Synthetic oligonucleotide
  Target: ATXN2; (+) strand; PAM type: NRG; PAM sequence: GGG
gcaccactgtactccagctt

SEQ ID NO: 49512 - DNA, 20 bp, Artificial Sequence
  Description of Artificial Sequence: Synthetic oligonucleotide
  Target: ATXN2; (+) strand; PAM type: NRG; PAM sequence: AAG
tgtactccagcttgggcaac

SEQ ID NO: 49513 - DNA, 20 bp, Artificial Sequence
  Description of Artificial Sequence: Synthetic oligonucleotide
  Target: ATXN2; (+) strand; PAM type: NRG; PAM sequence: GAG
tactccagcttgggcaacaa

SEQ ID NO: 49514 - DNA, 20 bp, Artificial Sequence
  Description of Artificial Sequence: Synthetic oligonucleotide
  Target: ATXN2; (+) strand; PAM type: NRG; PAM sequence: AAG
aagagcaaacctccgtctca

SEQ ID NO: 49515 - DNA, 20 bp, Artificial Sequence
  Description of Artificial Sequence: Synthetic oligonucleotide
  Target: ATXN2; (+) strand; PAM type: NRG; PAM sequence: AAG
ataaaattaaaatactacat

SEQ ID NO: 49516 - DNA, 20 bp, Artificial Sequence
  Description of Artificial Sequence: Synthetic oligonucleotide
  Target: ATXN2; (+) strand; PAM type: NRG; PAM sequence: TGG
tacataagcaaatactcact

SEQ ID NO: 49517 - DNA, 20 bp, Artificial Sequence
  Description of Artificial Sequence: Synthetic oligonucleotide
  Target: ATXN2; (+) strand; PAM type: NRG; PAM sequence: TGG
taagcaaatactcacttggc

SEQ ID NO: 49518 - DNA, 20 bp, Artificial Sequence
  Description of Artificial Sequence: Synthetic oligonucleotide
  Target: ATXN2; (+) strand; PAM type: NRG; PAM sequence: GGG
aagcaaatactcacttggct

SEQ ID NO: 49519 - DNA, 20 bp, Artificial Sequence
  Description of Artificial Sequence: Synthetic oligonucleotide
  Target: ATXN2; (+) strand; PAM type: NRG; PAM sequence: CAG
aatactcacttggctgggca

SEQ ID NO: 49520 - DNA, 20 bp, Artificial Sequence
  Description of Artificial Sequence: Synthetic oligonucleotide
  Target: ATXN2; (+) strand; PAM type: NRG; PAM sequence: TGG
actcacttggctgggcacag

SEQ ID NO: 49521 - DNA, 20 bp, Artificial Sequence
  Description of Artificial Sequence: Synthetic oligonucleotide
  Target: ATXN2; (+) strand; PAM type: NRG; PAM sequence: AAG
actcataatcccaccacttc

SEQ ID NO: 49522 - DNA, 20 bp, Artificial Sequence
  Description of Artificial Sequence: Synthetic oligonucleotide
  Target: ATXN2; (+) strand; PAM type: NRG; PAM sequence: GAG
tcataatcccaccacttcaa

SEQ ID NO: 49523 - DNA, 20 bp, Artificial Sequence
  Description of Artificial Sequence: Synthetic oligonucleotide
  Target: ATXN2; (+) strand; PAM type: NRG; PAM sequence: AGG
cataatcccaccacttcaag

SEQ ID NO: 49524 - DNA, 20 bp, Artificial Sequence
  Description of Artificial Sequence: Synthetic oligonucleotide
  Target: ATXN2; (+) strand; PAM type: NRG; PAM sequence: AAG
tcccaccacttcaagaggcc

SEQ ID NO: 49525 - DNA, 20 bp, Artificial Sequence
  Description of Artificial Sequence: Synthetic oligonucleotide
  Target: ATXN2; (+) strand; PAM type: NRG; PAM sequence: AGG
cccaccacttcaagaggcca

SEQ ID NO: 49526 - DNA, 20 bp, Artificial Sequence
  Description of Artificial Sequence: Synthetic oligonucleotide
  Target: ATXN2; (+) strand; PAM type: NRG; PAM sequence: CGG
accacttcaagaggccaagg

SEQ ID NO: 49527 - DNA, 20 bp, Artificial Sequence
  Description of Artificial Sequence: Synthetic oligonucleotide
  Target: ATXN2; (+) strand; PAM type: NRG; PAM sequence: GGG
ccacttcaagaggccaaggc

SEQ ID NO: 49528 - DNA, 20 bp, Artificial Sequence
  Description of Artificial Sequence: Synthetic oligonucleotide
  Target: ATXN2; (+) strand; PAM type: NRG; PAM sequence: TGG
cttcaagaggccaaggcggg

SEQ ID NO: 49529 - DNA, 20 bp, Artificial Sequence
  Description of Artificial Sequence: Synthetic oligonucleotide
  Target: ATXN2; (+) strand; PAM type: NRG; PAM sequence: AAG
caaggcgggtggatcacctg

SEQ ID NO: 49530 - DNA, 20 bp, Artificial Sequence
  Description of Artificial Sequence: Synthetic oligonucleotide
  Target: ATXN2; (+) strand; PAM type: NRG; PAM sequence: CAG
gcgggtggatcacctgaagt

SEQ ID NO: 49531 - DNA, 20 bp, Artificial Sequence
  Description of Artificial Sequence: Synthetic oligonucleotide
  Target: ATXN2; (+) strand; PAM type: NRG; PAM sequence: AGG
cgggtggatcacctgaagtc

SEQ ID NO: 49532 - DNA, 20 bp, Artificial Sequence
  Description of Artificial Sequence: Synthetic oligonucleotide
  Target: ATXN2; (+) strand; PAM type: NRG; PAM sequence: GAG
ggtggatcacctgaagtcag

SEQ ID NO: 49533 - DNA, 20 bp, Artificial Sequence
  Description of Artificial Sequence: Synthetic oligonucleotide
  Target: ATXN2; (+) strand; PAM type: NRG; PAM sequence: AAG
tcacctgaagtcaggagttc

SEQ ID NO: 49534 - DNA, 20 bp, Artificial Sequence
  Description of Artificial Sequence: Synthetic oligonucleotide
  Target: ATXN2; (+) strand; PAM type: NRG; PAM sequence: CAG
tgaagtcaggagttcaagac

SEQ ID NO: 49535 - DNA, 20 bp, Artificial Sequence
  Description of Artificial Sequence: Synthetic oligonucleotide
  Target: ATXN2; (+) strand; PAM type: NRG; PAM sequence: TAG
tcaggagttcaagaccagcc

SEQ ID NO: 49536 - DNA, 20 bp, Artificial Sequence
  Description of Artificial Sequence: Synthetic oligonucleotide
  Target: ATXN2; (+) strand; PAM type: NRG; PAM sequence: TGG
caagaccagcctagccaaca

SEQ ID NO: 49537 - DNA, 20 bp, Artificial Sequence
  Description of Artificial Sequence: Synthetic oligonucleotide
  Target: ATXN2; (+) strand; PAM type: NRG; PAM sequence: TAG
tctactaaaactataaaaat

SEQ ID NO: 49538 - DNA, 20 bp, Artificial Sequence
  Description of Artificial Sequence: Synthetic oligonucleotide
  Target: ATXN2; (+) strand; PAM type: NRG; PAM sequence: TGG
ctataaaaattagccacgtg

SEQ ID NO: 49539 - DNA, 20 bp, Artificial Sequence
  Description of Artificial Sequence: Synthetic oligonucleotide
  Target: ATXN2; (+) strand; PAM type: NRG; PAM sequence: TGG
taaaaattagccacgtgtgg

SEQ ID NO: 49540 - DNA, 20 bp, Artificial Sequence
  Description of Artificial Sequence: Synthetic oligonucleotide
  Target: ATXN2; (+) strand; PAM type: NRG; PAM sequence: CAG
gtggcacatgtctgtaatcc

SEQ ID NO: 49541 - DNA, 20 bp, Artificial Sequence
  Description of Artificial Sequence: Synthetic oligonucleotide
  Target: ATXN2; (+) strand; PAM type: NRG; PAM sequence: TGG
tgtctgtaatcccagctact

SEQ ID NO: 49542 - DNA, 20 bp, Artificial Sequence
  Description of Artificial Sequence: Synthetic oligonucleotide
  Target: ATXN2; (+) strand; PAM type: NRG; PAM sequence: GGG
gtctgtaatcccagctactt

SEQ ID NO: 49543 - DNA, 20 bp, Artificial Sequence
  Description of Artificial Sequence: Synthetic oligonucleotide
  Target: ATXN2; (+) strand; PAM type: NRG; PAM sequence: GAG
ctgtaatcccagctacttgg

SEQ ID NO: 49544 - DNA, 20 bp, Artificial Sequence
  Description of Artificial Sequence: Synthetic oligonucleotide
  Target: ATXN2; (+) strand; PAM type: NRG; PAM sequence: AGG
tgtaatcccagctacttggg

SEQ ID NO: 49545 - DNA, 20 bp, Artificial Sequence
  Description of Artificial Sequence: Synthetic oligonucleotide
  Target: ATXN2; (+) strand; PAM type: NRG; PAM sequence: GAG
tcccagctacttgggaggct

SEQ ID NO: 49546 - DNA, 20 bp, Artificial Sequence
  Description of Artificial Sequence: Synthetic oligonucleotide
  Target: ATXN2; (+) strand; PAM type: NRG; PAM sequence: AGG
cccagctacttgggaggctg

SEQ ID NO: 49547 - DNA, 20 bp, Artificial Sequence
  Description of Artificial Sequence: Synthetic oligonucleotide
  Target: ATXN2; (+) strand; PAM type: NRG; PAM sequence: AAG
tacttgggaggctgaggcac

SEQ ID NO: 49548 - DNA, 20 bp, Artificial Sequence
  Description of Artificial Sequence: Synthetic oligonucleotide
  Target: ATXN2; (+) strand; PAM type: NRG; PAM sequence: CAG
gcacaagaattgcttgaact

SEQ ID NO: 49549 - DNA, 20 bp, Artificial Sequence
  Description of Artificial Sequence: Synthetic oligonucleotide
  Target: ATXN2; (+) strand; PAM type: NRG; PAM sequence: AGG
cacaagaattgcttgaactc

SEQ ID NO: 49550 - DNA, 20 bp, Artificial Sequence
  Description of Artificial Sequence: Synthetic oligonucleotide
  Target: ATXN2; (+) strand; PAM type: NRG; PAM sequence: GAG
caagaattgcttgaactcag

SEQ ID NO: 49551 - DNA, 20 bp, Artificial Sequence
  Description of Artificial Sequence: Synthetic oligonucleotide
  Target: ATXN2; (+) strand; PAM type: NRG; PAM sequence: AGG
aagaattgcttgaactcagg

SEQ ID NO: 49552 - DNA, 20 bp, Artificial Sequence
  Description of Artificial Sequence: Synthetic oligonucleotide
  Target: ATXN2; (+) strand; PAM type: NRG; PAM sequence: CGG
aattgcttgaactcaggagg

SEQ ID NO: 49553 - DNA, 20 bp, Artificial Sequence
  Description of Artificial Sequence: Synthetic oligonucleotide
  Target: ATXN2; (+) strand; PAM type: NRG; PAM sequence: GAG
ttgcttgaactcaggaggcg

SEQ ID NO: 49554 - DNA, 20 bp, Artificial Sequence
  Description of Artificial Sequence: Synthetic oligonucleotide
  Target: ATXN2; (+) strand; PAM type: NRG; PAM sequence: CAG
gagttcatgccactgcaatg

SEQ ID NO: 49555 - DNA, 20 bp, Artificial Sequence
  Description of Artificial Sequence: Synthetic oligonucleotide
  Target: ATXN2; (+) strand; PAM type: NRG; PAM sequence: TGG
catgccactgcaatgcagcc

SEQ ID NO: 49556 - DNA, 20 bp, Artificial Sequence
  Description of Artificial Sequence: Synthetic oligonucleotide
  Target: ATXN2; (+) strand; PAM type: NRG; PAM sequence: GGG
atgccactgcaatgcagcct

SEQ ID NO: 49557 - DNA, 20 bp, Artificial Sequence
  Description of Artificial Sequence: Synthetic oligonucleotide
  Target: ATXN2; (+) strand; PAM type: NRG; PAM sequence: CAG
ctgcaatgcagcctgggtga

SEQ ID NO: 49558 - DNA, 20 bp, Artificial Sequence
  Description of Artificial Sequence: Synthetic oligonucleotide
  Target: ATXN2; (+) strand; PAM type: NRG; PAM sequence: GAG
gcaatgcagcctgggtgaca

SEQ ID NO: 49559 - DNA, 20 bp, Artificial Sequence
  Description of Artificial Sequence: Synthetic oligonucleotide
  Target: ATXN2; (+) strand; PAM type: NRG; PAM sequence: AAG
tgcagcctgggtgacagagc

SEQ ID NO: 49560 - DNA, 20 bp, Artificial Sequence
  Description of Artificial Sequence: Synthetic oligonucleotide
  Target: ATXN2; (+) strand; PAM type: NRG; PAM sequence: GAG
tccgtctttctgtttttttt

SEQ ID NO: 49561 - DNA, 20 bp, Artificial Sequence
  Description of Artificial Sequence: Synthetic oligonucleotide
  Target: ATXN2; (+) strand; PAM type: NRG; PAM sequence: CAG
tctttctgttttttttgaga

SEQ ID NO: 49562 - DNA, 20 bp, Artificial Sequence
  Description of Artificial Sequence: Synthetic oligonucleotide
  Target: ATXN2; (+) strand; PAM type: NRG; PAM sequence: GAG
tttctgttttttttgagaca

SEQ ID NO: 49563 - DNA, 20 bp, Artificial Sequence
  Description of Artificial Sequence: Synthetic oligonucleotide
  Target: ATXN2; (+) strand; PAM type: NRG; PAM sequence: CAG
cagagtctacctctgtcgct

SEQ ID NO: 49564 - DNA, 20 bp, Artificial Sequence
  Description of Artificial Sequence: Synthetic oligonucleotide
  Target: ATXN2; (+) strand; PAM type: NRG; PAM sequence: AGG
agagtctacctctgtcgctc

SEQ ID NO: 49565 - DNA, 20 bp, Artificial Sequence
  Description of Artificial Sequence: Synthetic oligonucleotide
  Target: ATXN2; (+) strand; PAM type: NRG; PAM sequence: TGG
tctacctctgtcgctcaggc

SEQ ID NO: 49566 - DNA, 20 bp, Artificial Sequence
  Description of Artificial Sequence: Synthetic oligonucleotide
  Target: ATXN2; (+) strand; PAM type: NRG; PAM sequence: GAG
tacctctgtcgctcaggctg

SEQ ID NO: 49567 - DNA, 20 bp, Artificial Sequence
  Description of Artificial Sequence: Synthetic oligonucleotide
  Target: ATXN2; (+) strand; PAM type: NRG; PAM sequence: CAG
ctgtcgctcaggctggagtg

SEQ ID NO: 49568 - DNA, 20 bp, Artificial Sequence
  Description of Artificial Sequence: Synthetic oligonucleotide
  Target: ATXN2; (+) strand; PAM type: NRG; PAM sequence: TGG
tcgctcaggctggagtgcag

SEQ ID NO: 49569 - DNA, 20 bp, Artificial Sequence
  Description of Artificial Sequence: Synthetic oligonucleotide
  Target: ATXN2; (+) strand; PAM type: NRG; PAM sequence: TGG
tcactgcaacctccacctcc

SEQ ID NO: 49570 - DNA, 20 bp, Artificial Sequence
  Description of Artificial Sequence: Synthetic oligonucleotide
  Target: ATXN2; (+) strand; PAM type: NRG; PAM sequence: GGG
cactgcaacctccacctcct

SEQ ID NO: 49571 - DNA, 20 bp, Artificial Sequence
  Description of Artificial Sequence: Synthetic oligonucleotide
  Target: ATXN2; (+) strand; PAM type: NRG; PAM sequence: AAG
aacctccacctcctgggttc

SEQ ID NO: 49572 - DNA, 20 bp, Artificial Sequence
  Description of Artificial Sequence: Synthetic oligonucleotide
  Target: ATXN2; (+) strand; PAM type: NRG; PAM sequence: CAG
ttcaagcaattctcctgcct

SEQ ID NO: 49573 - DNA, 20 bp, Artificial Sequence
  Description of Artificial Sequence: Synthetic oligonucleotide
  Target: ATXN2; (+) strand; PAM type: NRG; PAM sequence: GAG
ttctcctgcctcagcctccc

SEQ ID NO: 49574 - DNA, 20 bp, Artificial Sequence
  Description of Artificial Sequence: Synthetic oligonucleotide
  Target: ATXN2; (+) strand; PAM type: NRG; PAM sequence: TAG
tcctgcctcagcctcccgag

SEQ ID NO: 49575 - DNA, 20 bp, Artificial Sequence
  Description of Artificial Sequence: Synthetic oligonucleotide
  Target: ATXN2; (+) strand; PAM type: NRG; PAM sequence: TGG
gcctcagcctcccgagtagc

SEQ ID NO: 49576 - DNA, 20 bp, Artificial Sequence
  Description of Artificial Sequence: Synthetic oligonucleotide
  Target: ATXN2; (+) strand; PAM type: NRG; PAM sequence: GGG
cctcagcctcccgagtagct

SEQ ID NO: 49577 - DNA, 20 bp, Artificial Sequence
  Description of Artificial Sequence: Synthetic oligonucleotide
  Target: ATXN2; (+) strand; PAM type: NRG; PAM sequence: CAG
ctcccgagtagctgggacta

SEQ ID NO: 49578 - DNA, 20 bp, Artificial Sequence
  Description of Artificial Sequence: Synthetic oligonucleotide
  Target: ATXN2; (+) strand; PAM type: NRG; PAM sequence: AGG
tcccgagtagctgggactac

SEQ ID NO: 49579 - DNA, 20 bp, Artificial Sequence
  Description of Artificial Sequence: Synthetic oligonucleotide
  Target: ATXN2; (+) strand; PAM type: NRG; PAM sequence: CAG
caggcgtgtgccaccatgcc

SEQ ID NO: 49580 - DNA, 20 bp, Artificial Sequence
  Description of Artificial Sequence: Synthetic oligonucleotide
  Target: ATXN2; (+) strand; PAM type: NRG; PAM sequence: TAG
cagttaattttttgtatttt

SEQ ID NO: 49581 - DNA, 20 bp, Artificial Sequence
  Description of Artificial Sequence: Synthetic oligonucleotide
  Target: ATXN2; (+) strand; PAM type: NRG; PAM sequence: TAG
ttaattttttgtatttttag

SEQ ID NO: 49582 - DNA, 20 bp, Artificial Sequence
  Description of Artificial Sequence: Synthetic oligonucleotide
  Target: ATXN2; (+) strand; PAM type: NRG; PAM sequence: GAG
aattttttgtatttttagta

SEQ ID NO: 49583 - DNA, 20 bp, Artificial Sequence
  Description of Artificial Sequence: Synthetic oligonucleotide
  Target: ATXN2; (+) strand; PAM type: NRG; PAM sequence: CAG
ttttgtatttttagtagaga

SEQ ID NO: 49584 - DNA, 20 bp, Artificial Sequence
  Description of Artificial Sequence: Synthetic oligonucleotide
  Target: ATXN2; (+) strand; PAM type: NRG; PAM sequence: AGG
tttgtatttttagtagagac

SEQ ID NO: 49585 - DNA, 20 bp, Artificial Sequence
  Description of Artificial Sequence: Synthetic oligonucleotide
  Target: ATXN2; (+) strand; PAM type: NRG; PAM sequence: GGG
ttgtatttttagtagagaca

SEQ ID NO: 49586 - DNA, 20 bp, Artificial Sequence
  Description of Artificial Sequence: Synthetic oligonucleotide
  Target: ATXN2; (+) strand; PAM type: NRG; PAM sequence: TAG
gagacagggtttcaccatgt

SEQ ID NO: 49587 - DNA, 20 bp, Artificial Sequence
  Description of Artificial Sequence: Synthetic oligonucleotide
  Target: ATXN2; (+) strand; PAM type: NRG; PAM sequence: CAG
cagggtttcaccatgttagc

SEQ ID NO: 49588 - DNA, 20 bp, Artificial Sequence
  Description of Artificial Sequence: Synthetic oligonucleotide
  Target: ATXN2; (+) strand; PAM type: NRG; PAM sequence: AGG
agggtttcaccatgttagcc

SEQ ID NO: 49589 - DNA, 20 bp, Artificial Sequence
  Description of Artificial Sequence: Synthetic oligonucleotide
  Target: ATXN2; (+) strand; PAM type: NRG; PAM sequence: TGG
tttcaccatgttagccagga

SEQ ID NO: 49590 - DNA, 20 bp, Artificial Sequence
  Description of Artificial Sequence: Synthetic oligonucleotide
  Target: ATXN2; (+) strand; PAM type: NRG; PAM sequence: CGG
acctcttgatccacccacct

SEQ ID NO: 49591 - DNA, 20 bp, Artificial Sequence
  Description of Artificial Sequence: Synthetic oligonucleotide
  Target: ATXN2; (+) strand; PAM type: NRG; PAM sequence: AAG
ccacccacctcggccttcca

SEQ ID NO: 49592 - DNA, 20 bp, Artificial Sequence
  Description of Artificial Sequence: Synthetic oligonucleotide
  Target: ATXN2; (+) strand; PAM type: NRG; PAM sequence: TGG
acctcggccttccaaagtgc

SEQ ID NO: 49593 - DNA, 20 bp, Artificial Sequence
  Description of Artificial Sequence: Synthetic oligonucleotide
  Target: ATXN2; (+) strand; PAM type: NRG; PAM sequence: GGG
cctcggccttccaaagtgct

SEQ ID NO: 49594 - DNA, 20 bp, Artificial Sequence
  Description of Artificial Sequence: Synthetic oligonucleotide
  Target: ATXN2; (+) strand; PAM type: NRG; PAM sequence: CAG
cttccaaagtgctgggatta

SEQ ID NO: 49595 - DNA, 20 bp, Artificial Sequence
  Description of Artificial Sequence: Synthetic oligonucleotide
  Target: ATXN2; (+) strand; PAM type: NRG; PAM sequence: AGG
ttccaaagtgctgggattac

SEQ ID NO: 49596 - DNA, 20 bp, Artificial Sequence
  Description of Artificial Sequence: Synthetic oligonucleotide
  Target: ATXN2; (+) strand; PAM type: NRG; PAM sequence: GAG
agtgctgggattacaggtgt

SEQ ID NO: 49597 - DNA, 20 bp, Artificial Sequence
  Description of Artificial Sequence: Synthetic oligonucleotide
  Target: ATXN2; (+) strand; PAM type: NRG; PAM sequence: CGG
caggtgtgagccactgcgcc

SEQ ID NO: 49598 - DNA, 20 bp, Artificial Sequence
  Description of Artificial Sequence: Synthetic oligonucleotide
  Target: ATXN2; (+) strand; PAM type: NRG; PAM sequence: GAG
gagccactgcgcccggcctc

SEQ ID NO: 49599 - DNA, 20 bp, Artificial Sequence
  Description of Artificial Sequence: Synthetic oligonucleotide
  Target: ATXN2; (+) strand; PAM type: NRG; PAM sequence: AAG
ctccaccttaaaaaaaaaaa

SEQ ID NO: 49600 - DNA, 20 bp, Artificial Sequence
  Description of Artificial Sequence: Synthetic oligonucleotide
  Target: ATXN2; (+) strand; PAM type: NRG; PAM sequence: CAG
aaaagaaaatatgcacttgc

SEQ ID NO: 49601 - DNA, 20 bp, Artificial Sequence
  Description of Artificial Sequence: Synthetic oligonucleotide
  Target: ATXN2; (+) strand; PAM type: NRG; PAM sequence: AGG
aaagaaaatatgcacttgcc

SEQ ID NO: 49602 - DNA, 20 bp, Artificial Sequence
  Description of Artificial Sequence: Synthetic oligonucleotide
  Target: ATXN2; (+) strand; PAM type: NRG; PAM sequence: TGG
tatgcacttgccaggtacaa

SEQ ID NO: 49603 - DNA, 20 bp, Artificial Sequence
  Description of Artificial Sequence: Synthetic oligonucleotide
  Target: ATXN2; (+) strand; PAM type: NRG; PAM sequence: CAG
gcctgtaatgccaactaatc

SEQ ID NO: 49604 - DNA, 20 bp, Artificial Sequence
  Description of Artificial Sequence: Synthetic oligonucleotide
  Target: ATXN2; (+) strand; PAM type: NRG; PAM sequence: GAG
ctgtaatgccaactaatcca

SEQ ID NO: 49605 - DNA, 20 bp, Artificial Sequence
  Description of Artificial Sequence: Synthetic oligonucleotide
  Target: ATXN2; (+) strand; PAM type: NRG; PAM sequence: AGG
tgtaatgccaactaatccag

SEQ ID NO: 49606 - DNA, 20 bp, Artificial Sequence
  Description of Artificial Sequence: Synthetic oligonucleotide
  Target: ATXN2; (+) strand; PAM type: NRG; PAM sequence: GAG
tgccaactaatccagaggct

SEQ ID NO: 49607 - DNA, 20 bp, Artificial Sequence
  Description of Artificial Sequence: Synthetic oligonucleotide
  Target: ATXN2; (+) strand; PAM type: NRG; PAM sequence: AGG
gccaactaatccagaggctg

SEQ ID NO: 49608 - DNA, 20 bp, Artificial Sequence
  Description of Artificial Sequence: Synthetic oligonucleotide
  Target: ATXN2; (+) strand; PAM type: NRG; PAM sequence: CAG
aactaatccagaggctgagg

SEQ ID NO: 49609 - DNA, 20 bp, Artificial Sequence
  Description of Artificial Sequence: Synthetic oligonucleotide
  Target: ATXN2; (+) strand; PAM type: NRG; PAM sequence: AAG
taatccagaggctgaggcag

SEQ ID NO: 49610 - DNA, 20 bp, Artificial Sequence
  Description of Artificial Sequence: Synthetic oligonucleotide
  Target: ATXN2; (+) strand; PAM type: NRG; PAM sequence: AGG
aatccagaggctgaggcaga

SEQ ID NO: 49611 - DNA, 20 bp, Artificial Sequence
  Description of Artificial Sequence: Synthetic oligonucleotide
  Target: ATXN2; (+) strand; PAM type: NRG; PAM sequence: AAG
ctgaggcagaaggaccactt

SEQ ID NO: 49612 - DNA, 20 bp, Artificial Sequence
  Description of Artificial Sequence: Synthetic oligonucleotide
  Target: ATXN2; (+) strand; PAM type: NRG; PAM sequence: CGG
cagaaggaccacttaagacc

SEQ ID NO: 49613 - DNA, 20 bp, Artificial Sequence
  Description of Artificial Sequence: Synthetic oligonucleotide
  Target: ATXN2; (+) strand; PAM type: NRG; PAM sequence: GAG
gaaggaccacttaagacccg

SEQ ID NO: 49614 - DNA, 20 bp, Artificial Sequence
  Description of Artificial Sequence: Synthetic oligonucleotide
  Target: ATXN2; (+) strand; PAM type: NRG; PAM sequence: AAG
ccacttaagacccggagttc

SEQ ID NO: 49615 - DNA, 20 bp, Artificial Sequence
  Description of Artificial Sequence: Synthetic oligonucleotide
  Target: ATXN2; (+) strand; PAM type: NRG; PAM sequence: GAG
ccggagttcaagaccatcct

SEQ ID NO: 49616 - DNA, 20 bp, Artificial Sequence
  Description of Artificial Sequence: Synthetic oligonucleotide
  Target: ATXN2; (+) strand; PAM type: NRG; PAM sequence: AAG
accatcctgagcaacttcgc

SEQ ID NO: 49617 - DNA, 20 bp, Artificial Sequence
  Description of Artificial Sequence: Synthetic oligonucleotide
  Target: ATXN2; (+) strand; PAM type: NRG; PAM sequence: TAG
gcaagaccccatctctaaaa

SEQ ID NO: 49618 - DNA, 20 bp, Artificial Sequence
  Description of Artificial Sequence: Synthetic oligonucleotide
  Target: ATXN2; (+) strand; PAM type: NRG; PAM sequence: CAG
tctaaaatagttttaaaaaa

SEQ ID NO: 49619 - DNA, 20 bp, Artificial Sequence
  Description of Artificial Sequence: Synthetic oligonucleotide
  Target: ATXN2; (+) strand; PAM type: NRG; PAM sequence: CAG
aaatagttttaaaaaacagt

SEQ ID NO: 49620 - DNA, 20 bp, Artificial Sequence
  Description of Artificial Sequence: Synthetic oligonucleotide
  Target: ATXN2; (+) strand; PAM type: NRG; PAM sequence: AGG
aatagttttaaaaaacagtc

SEQ ID NO: 49621 - DNA, 20 bp, Artificial Sequence
  Description of Artificial Sequence: Synthetic oligonucleotide
  Target: ATXN2; (+) strand; PAM type: NRG; PAM sequence: CAG
aaaaacagtcaggtgttatg

SEQ ID NO: 49622 - DNA, 20 bp, Artificial Sequence
  Description of Artificial Sequence: Synthetic oligonucleotide
  Target: ATXN2; (+) strand; PAM type: NRG; PAM sequence: AGG
aaaacagtcaggtgttatgc

SEQ ID NO: 49623 - DNA, 20 bp, Artificial Sequence
  Description of Artificial Sequence: Synthetic oligonucleotide
  Target: ATXN2; (+) strand; PAM type: NRG; PAM sequence: TAG
aggtgttatgcaggtgcctg

SEQ ID NO: 49624 - DNA, 20 bp, Artificial Sequence
  Description of Artificial Sequence: Synthetic oligonucleotide
  Target: ATXN2; (+) strand; PAM type: NRG; PAM sequence: CAG
tatgcaggtgcctgtagtcc

SEQ ID NO: 49625 - DNA, 20 bp, Artificial Sequence
  Description of Artificial Sequence: Synthetic oligonucleotide
  Target: ATXN2; (+) strand; PAM type: NRG; PAM sequence: CAG
ggtgcctgtagtcccagcta

SEQ ID NO: 49626 - DNA, 20 bp, Artificial Sequence
  Description of Artificial Sequence: Synthetic oligonucleotide
  Target: ATXN2; (+) strand; PAM type: NRG; PAM sequence: TGG
cctgtagtcccagctacaga

SEQ ID NO: 49627 - DNA, 20 bp, Artificial Sequence
  Description of Artificial Sequence: Synthetic oligonucleotide
  Target: ATXN2; (+) strand; PAM type: NRG; PAM sequence: GGG
ctgtagtcccagctacagat

SEQ ID NO: 49628 - DNA, 20 bp, Artificial Sequence
  Description of Artificial Sequence: Synthetic oligonucleotide
  Target: ATXN2; (+) strand; PAM type: NRG; PAM sequence: GAG
gtagtcccagctacagatgg

SEQ ID NO: 49629 - DNA, 20 bp, Artificial Sequence
  Description of Artificial Sequence: Synthetic oligonucleotide
  Target: ATXN2; (+) strand; PAM type: NRG; PAM sequence: AGG
tagtcccagctacagatggg

SEQ ID NO: 49630 - DNA, 20 bp, Artificial Sequence
  Description of Artificial Sequence: Synthetic oligonucleotide
  Target: ATXN2; (+) strand; PAM type: NRG; PAM sequence: GAG
tacagatgggaggttcactt

SEQ ID NO: 49631 - DNA, 20 bp, Artificial Sequence
  Description of Artificial Sequence: Synthetic oligonucleotide
  Target: ATXN2; (+) strand; PAM type: NRG; PAM sequence: CAG
atgggaggttcacttgagcc

SEQ ID NO: 49632 - DNA, 20 bp, Artificial Sequence
  Description of Artificial Sequence: Synthetic oligonucleotide
  Target: ATXN2; (+) strand; PAM type: NRG; PAM sequence: AGG
tgggaggttcacttgagccc

SEQ ID NO: 49633 - DNA, 20 bp, Artificial Sequence
  Description of Artificial Sequence: Synthetic oligonucleotide
  Target: ATXN2; (+) strand; PAM type: NRG; PAM sequence: GAG
ggaggttcacttgagcccag

SEQ ID NO: 49634 - DNA, 20 bp, Artificial Sequence
  Description of Artificial Sequence: Synthetic oligonucleotide
  Target: ATXN2; (+) strand; PAM type: NRG; PAM sequence: GAG
tcacttgagcccaggagttt

SEQ ID NO: 49635 - DNA, 20 bp, Artificial Sequence
  Description of Artificial Sequence: Synthetic oligonucleotide
  Target: ATXN2; (+) strand; PAM type: NRG; PAM sequence: AGG
cacttgagcccaggagtttg

SEQ ID NO: 49636 - DNA, 20 bp, Artificial Sequence
  Description of Artificial Sequence: Synthetic oligonucleotide
  Target: ATXN2; (+) strand; PAM type: NRG; PAM sequence: CAG
agcccaggagtttgaggctg

SEQ ID NO: 49637 - DNA, 20 bp, Artificial Sequence
  Description of Artificial Sequence: Synthetic oligonucleotide
  Target: ATXN2; (+) strand; PAM type: NRG; PAM sequence: CAG
atcatcatgccactgcactc

SEQ ID NO: 49638 - DNA, 20 bp, Artificial Sequence
  Description of Artificial Sequence: Synthetic oligonucleotide
  Target: ATXN2; (+) strand; PAM type: NRG; PAM sequence: TGG
atgccactgcactccagcct

SEQ ID NO: 49639 - DNA, 20 bp, Artificial Sequence
  Description of Artificial Sequence: Synthetic oligonucleotide
  Target: ATXN2; (+) strand; PAM type: NRG; PAM sequence: AAG
gcactccagccttggtgaca

SEQ ID NO: 49640 - DNA, 20 bp, Artificial Sequence
  Description of Artificial Sequence: Synthetic oligonucleotide
  Target: ATXN2; (+) strand; PAM type: NRG; PAM sequence: CAG
ctccagccttggtgacaaag

SEQ ID NO: 49641 - DNA, 20 bp, Artificial Sequence
  Description of Artificial Sequence: Synthetic oligonucleotide
  Target: ATXN2; (+) strand; PAM type: NRG; PAM sequence: AGG
tccagccttggtgacaaagc

SEQ ID NO: 49642 - DNA, 20 bp, Artificial Sequence
  Description of Artificial Sequence: Synthetic oligonucleotide
  Target: ATXN2; (+) strand; PAM type: NRG; PAM sequence: AAG
agcaggactctatctcttaa

SEQ ID NO: 49643 - DNA, 20 bp, Artificial Sequence
  Description of Artificial Sequence: Synthetic oligonucleotide
  Target: ATXN2; (+) strand; PAM type: NRG; PAM sequence: GAG
caggactctatctcttaaaa

SEQ ID NO: 49644 - DNA, 20 bp, Artificial Sequence
  Description of Artificial Sequence: Synthetic oligonucleotide
  Target: ATXN2; (+) strand; PAM type: NRG; PAM sequence: AAG
tctatctcttaaaagagaaa

SEQ ID NO: 49645 - DNA, 20 bp, Artificial Sequence
  Description of Artificial Sequence: Synthetic oligonucleotide
  Target: ATXN2; (+) strand; PAM type: NRG; PAM sequence: AAG
atctcttaaaagagaaaaag

SEQ ID NO: 49646 - DNA, 20 bp, Artificial Sequence
  Description of Artificial Sequence: Synthetic oligonucleotide
  Target: ATXN2; (+) strand; PAM type: NRG; PAM sequence: AGG
tctcttaaaagagaaaaaga

SEQ ID NO: 49647 - DNA, 20 bp, Artificial Sequence
  Description of Artificial Sequence: Synthetic oligonucleotide
  Target: ATXN2; (+) strand; PAM type: NRG; PAM sequence: TGG
taaaagagaaaaagaaggcc

SEQ ID NO: 49648 - DNA, 20 bp, Artificial Sequence
  Description of Artificial Sequence: Synthetic oligonucleotide
  Target: ATXN2; (+) strand; PAM type: NRG; PAM sequence: TGG
gagaaaaagaaggcctggtg

SEQ ID NO: 49649 - DNA, 20 bp, Artificial Sequence
  Description of Artificial Sequence: Synthetic oligonucleotide
  Target: ATXN2; (+) strand; PAM type: NRG; PAM sequence: CAG
aaaaagaaggcctggtgtgg

SEQ ID NO: 49650 - DNA, 20 bp, Artificial Sequence
  Description of Artificial Sequence: Synthetic oligonucleotide
  Target: ATXN2; (+) strand; PAM type: NRG; PAM sequence: TAG
gcagctcacgcctgtaatcc

SEQ ID NO: 49651 - DNA, 20 bp, Artificial Sequence
  Description of Artificial Sequence: Synthetic oligonucleotide
  Target: ATXN2; (+) strand; PAM type: NRG; PAM sequence: TGG
cgcctgtaatcctagcactc

SEQ ID NO: 49652 - DNA, 20 bp, Artificial Sequence
  Description of Artificial Sequence: Synthetic oligonucleotide
  Target: ATXN2; (+) strand; PAM type: NRG; PAM sequence: GGG
gcctgtaatcctagcactct

SEQ ID NO: 49653 - DNA, 20 bp, Artificial Sequence
  Description of Artificial Sequence: Synthetic oligonucleotide
  Target: ATXN2; (+) strand; PAM type: NRG; PAM sequence: GAG
ctgtaatcctagcactctgg

SEQ ID NO: 49654 - DNA, 20 bp, Artificial Sequence
  Description of Artificial Sequence: Synthetic oligonucleotide
  Target: ATXN2; (+) strand; PAM type: NRG; PAM sequence: AGG
tgtaatcctagcactctggg

SEQ ID NO: 49655 - DNA, 20 bp, Artificial Sequence
  Description of Artificial Sequence: Synthetic oligonucleotide
  Target: ATXN2; (+) strand; PAM type: NRG; PAM sequence: GAG
tcctagcactctgggaggct

SEQ ID NO: 49656 - DNA, 20 bp, Artificial Sequence
  Description of Artificial Sequence: Synthetic oligonucleotide
  Target: ATXN2; (+) strand; PAM type: NRG; PAM sequence: AGG
cctagcactctgggaggctg

SEQ ID NO: 49657 - DNA, 20 bp, Artificial Sequence
  Description of Artificial Sequence: Synthetic oligonucleotide
  Target: ATXN2; (+) strand; PAM type: NRG; PAM sequence: TGG
agcactctgggaggctgagg

SEQ ID NO: 49658 - DNA, 20 bp, Artificial Sequence
  Description of Artificial Sequence: Synthetic oligonucleotide
  Target: ATXN2; (+) strand; PAM type: NRG; PAM sequence: GGG
gcactctgggaggctgaggt

SEQ ID NO: 49659 - DNA, 20 bp, Artificial Sequence
  Description of Artificial Sequence: Synthetic oligonucleotide
  Target: ATXN2; (+) strand; PAM type: NRG; PAM sequence: TGG
ctctgggaggctgaggtggg

SEQ ID NO: 49660 - DNA, 20 bp, Artificial Sequence
  Description of Artificial Sequence: Synthetic oligonucleotide
  Target: ATXN2; (+) strand; PAM type: NRG; PAM sequence: GAG
ctgaggtgggtggatcacct

SEQ ID NO: 49661 - DNA, 20 bp, Artificial Sequence
  Description of Artificial Sequence: Synthetic oligonucleotide
  Target: ATXN2; (+) strand; PAM type: NRG; PAM sequence: AGG
tgaggtgggtggatcacctg

SEQ ID NO: 49662 - DNA, 20 bp, Artificial Sequence
  Description of Artificial Sequence: Synthetic oligonucleotide
  Target: ATXN2; (+) strand; PAM type: NRG; PAM sequence: CGG
gtgggtggatcacctgaggt

SEQ ID NO: 49663 - DNA, 20 bp, Artificial Sequence
  Description of Artificial Sequence: Synthetic oligonucleotide
  Target: ATXN2; (+) strand; PAM type: NRG; PAM sequence: GGG
tgggtggatcacctgaggtc

SEQ ID NO: 49664 - DNA, 20 bp, Artificial Sequence
  Description of Artificial Sequence: Synthetic oligonucleotide
  Target: ATXN2; (+) strand; PAM type: NRG; PAM sequence: GAG
ggtggatcacctgaggtcgg

SEQ ID NO: 49665 - DNA, 20 bp, Artificial Sequence
  Description of Artificial Sequence: Synthetic oligonucleotide
  Target: ATXN2; (+) strand; PAM type: NRG; PAM sequence: TGG
gatcacctgaggtcgggagt

SEQ ID NO: 49666 - DNA, 20 bp, Artificial Sequence
  Description of Artificial Sequence: Synthetic oligonucleotide
  Target: ATXN2; (+) strand; PAM type: NRG; PAM sequence: GAG
tcacctgaggtcgggagttg

SEQ ID NO: 49667 - DNA, 20 bp, Artificial Sequence
  Description of Artificial Sequence: Synthetic oligonucleotide
  Target: ATXN2; (+) strand; PAM type: NRG; PAM sequence: CAG
tgaggtcgggagttggagac

SEQ ID NO: 49668 - DNA, 20 bp, Artificial Sequence
  Description of Artificial Sequence: Synthetic oligonucleotide
  Target: ATXN2; (+) strand; PAM type: NRG; PAM sequence: TGG
ggagaccagcctgaccaaca

SEQ ID NO: 49669 - DNA, 20 bp, Artificial Sequence
  Description of Artificial Sequence: Synthetic oligonucleotide
  Target: ATXN2; (+) strand; PAM type: NRG; PAM sequence: TAG
ctctactgaacatacaaaat

SEQ ID NO: 49670 - DNA, 20 bp, Artificial Sequence
  Description of Artificial Sequence: Synthetic oligonucleotide
  Target: ATXN2; (+) strand; PAM type: NRG; PAM sequence: CAG
actgaacatacaaaattagc

SEQ ID NO: 49671 - DNA, 20 bp, Artificial Sequence
  Description of Artificial Sequence: Synthetic oligonucleotide
  Target: ATXN2; (+) strand; PAM type: NRG; PAM sequence: AGG
ctgaacatacaaaattagcc

SEQ ID NO: 49672 - DNA, 20 bp, Artificial Sequence
  Description of Artificial Sequence: Synthetic oligonucleotide
  Target: ATXN2; (+) strand; PAM type: NRG; PAM sequence: GAG
gaacatacaaaattagccag

SEQ ID NO: 49673 - DNA, 20 bp, Artificial Sequence
  Description of Artificial Sequence: Synthetic oligonucleotide
  Target: ATXN2; (+) strand; PAM type: NRG; PAM sequence: TGG
catacaaaattagccaggag

SEQ ID NO: 49674 - DNA, 20 bp, Artificial Sequence
  Description of Artificial Sequence: Synthetic oligonucleotide
  Target: ATXN2; (+) strand; PAM type: NRG; PAM sequence: TGG
acaaaattagccaggagtgg

SEQ ID NO: 49675 - DNA, 20 bp, Artificial Sequence
  Description of Artificial Sequence: Synthetic oligonucleotide
  Target: ATXN2; (+) strand; PAM type: NRG; PAM sequence: CAG
gtggcgcatgtctgtaatcc

SEQ ID NO: 49676 - DNA, 20 bp, Artificial Sequence
  Description of Artificial Sequence: Synthetic oligonucleotide
  Target: ATXN2; (+) strand; PAM type: NRG; PAM sequence: CGG
tgtctgtaatcccagctact

SEQ ID NO: 49677 - DNA, 20 bp, Artificial Sequence
  Description of Artificial Sequence: Synthetic oligonucleotide
  Target: ATXN2; (+) strand; PAM type: NRG; PAM sequence: GGG
gtctgtaatcccagctactc

SEQ ID NO: 49678 - DNA, 20 bp, Artificial Sequence
  Description of Artificial Sequence: Synthetic oligonucleotide
  Target: ATXN2; (+) strand; PAM type: NRG; PAM sequence: GAG
ctgtaatcccagctactcgg

SEQ ID NO: 49679 - DNA, 20 bp, Artificial Sequence
  Description of Artificial Sequence: Synthetic oligonucleotide
  Target: ATXN2; (+) strand; PAM type: NRG; PAM sequence: AGG
tgtaatcccagctactcggg

SEQ ID NO: 49680 - DNA, 20 bp, Artificial Sequence
  Description of Artificial Sequence: Synthetic oligonucleotide
  Target: ATXN2; (+) strand; PAM type: NRG; PAM sequence: CAG
agctactcgggaggctgacg

SEQ ID NO: 49681 - DNA, 20 bp, Artificial Sequence
  Description of Artificial Sequence: Synthetic oligonucleotide
  Target: ATXN2; (+) strand; PAM type: NRG; PAM sequence: AGG
gctactcgggaggctgacgc

SEQ ID NO: 49682 - DNA, 20 bp, Artificial Sequence
  Description of Artificial Sequence: Synthetic oligonucleotide
  Target: ATXN2; (+) strand; PAM type: NRG; PAM sequence: GAG
tactcgggaggctgacgcag

SEQ ID NO: 49683 - DNA, 20 bp, Artificial Sequence
  Description of Artificial Sequence: Synthetic oligonucleotide
  Target: ATXN2; (+) strand; PAM type: NRG; PAM sequence: CGG
gcaggagaactgcttgaacc

SEQ ID NO: 49684 - DNA, 20 bp, Artificial Sequence
  Description of Artificial Sequence: Synthetic oligonucleotide
  Target: ATXN2; (+) strand; PAM type: NRG; PAM sequence: GGG
caggagaactgcttgaaccc

SEQ ID NO: 49685 - DNA, 20 bp, Artificial Sequence
  Description of Artificial Sequence: Synthetic oligonucleotide
  Target: ATXN2; (+) strand; PAM type: NRG; PAM sequence: GAG
ggagaactgcttgaacccgg

SEQ ID NO: 49686 - DNA, 20 bp, Artificial Sequence
  Description of Artificial Sequence: Synthetic oligonucleotide
  Target: ATXN2; (+) strand; PAM type: NRG; PAM sequence: AGG
gagaactgcttgaacccggg

SEQ ID NO: 49687 - DNA, 20 bp, Artificial Sequence
  Description of Artificial Sequence: Synthetic oligonucleotide
  Target: ATXN2; (+) strand; PAM type: NRG; PAM sequence: CAG
aactgcttgaacccgggagg

SEQ ID NO: 49688 - DNA, 20 bp, Artificial Sequence
  Description of Artificial Sequence: Synthetic oligonucleotide
  Target: ATXN2; (+) strand; PAM type: NRG; PAM sequence: GAG
ctgcttgaacccgggaggca

SEQ ID NO: 49689 - DNA, 20 bp, Artificial Sequence
  Description of Artificial Sequence: Synthetic oligonucleotide
  Target: ATXN2; (+) strand; PAM type: NRG; PAM sequence: AGG
tgcttgaacccgggaggcag

SEQ ID NO: 49690 - DNA, 20 bp, Artificial Sequence
  Description of Artificial Sequence: Synthetic oligonucleotide
  Target: ATXN2; (+) strand; PAM type: NRG; PAM sequence: CAG
aacccgggaggcagaggttg

SEQ ID NO: 49691 - DNA, 20 bp, Artificial Sequence
  Description of Artificial Sequence: Synthetic oligonucleotide
  Target: ATXN2; (+) strand; PAM type: NRG; PAM sequence: GAG
cgggaggcagaggttgcagt

SEQ ID NO: 49692 - DNA, 20 bp, Artificial Sequence
  Description of Artificial Sequence: Synthetic oligonucleotide
  Target: ATXN2; (+) strand; PAM type: NRG; PAM sequence: AAG
ggcagaggttgcagtgagcc

SEQ ID NO: 49693 - DNA, 20 bp, Artificial Sequence
  Description of Artificial Sequence: Synthetic oligonucleotide
  Target: ATXN2; (+) strand; PAM type: NRG; PAM sequence: CAG
aggttgcagtgagccaagat

SEQ ID NO: 49694 - DNA, 20 bp, Artificial Sequence
  Description of Artificial Sequence: Synthetic oligonucleotide
  Target: ATXN2; (+) strand; PAM type: NRG; PAM sequence: AGG
ggttgcagtgagccaagatc

SEQ ID NO: 49695 - DNA, 20 bp, Artificial Sequence
  Description of Artificial Sequence: Synthetic oligonucleotide
  Target: ATXN2; (+) strand; PAM type: NRG; PAM sequence: CAG
aagatcaggccaccgcactc

SEQ ID NO: 49696 - DNA, 20 bp, Artificial Sequence
  Description of Artificial Sequence: Synthetic oligonucleotide
  Target: ATXN2; (+) strand; PAM type: NRG; PAM sequence: TGG
caggccaccgcactccagcc

SEQ ID NO: 49697 - DNA, 20 bp, Artificial Sequence
  Description of Artificial Sequence: Synthetic oligonucleotide
  Target: ATXN2; (+) strand; PAM type: NRG; PAM sequence: GGG
aggccaccgcactccagcct

SEQ ID NO: 49698 - DNA, 20 bp, Artificial Sequence
  Description of Artificial Sequence: Synthetic oligonucleotide
  Target: ATXN2; (+) strand; PAM type: NRG; PAM sequence: AAG
cgcactccagcctgggcaat

SEQ ID NO: 49699 - DNA, 20 bp, Artificial Sequence
  Description of Artificial Sequence: Synthetic oligonucleotide
  Target: ATXN2; (+) strand; PAM type: NRG; PAM sequence: GAG
cactccagcctgggcaataa

SEQ ID NO: 49700 - DNA, 20 bp, Artificial Sequence
  Description of Artificial Sequence: Synthetic oligonucleotide
  Target: ATXN2; (+) strand; PAM type: NRG; PAM sequence: TAG
aaaaaaaaaaaaaaaaaatg

SEQ ID NO: 49701 - DNA, 20 bp, Artificial Sequence
  Description of Artificial Sequence: Synthetic oligonucleotide
  Target: ATXN2; (+) strand; PAM type: NRG; PAM sequence: CAG
aaaaaaaaaaaaaatgtaga

SEQ ID NO: 49702 - DNA, 20 bp, Artificial Sequence
  Description of Artificial Sequence: Synthetic oligonucleotide
  Target: ATXN2; (+) strand; PAM type: NRG; PAM sequence: TGG
aaaaaatgtagacagaatga

SEQ ID NO: 49703 - DNA, 20 bp, Artificial Sequence
  Description of Artificial Sequence: Synthetic oligonucleotide
  Target: ATXN2; (+) strand; PAM type: NRG; PAM sequence: AAG
aaatgtagacagaatgatgg

SEQ ID NO: 49704 - DNA, 20 bp, Artificial Sequence
  Description of Artificial Sequence: Synthetic oligonucleotide
  Target: ATXN2; (+) strand; PAM type: NRG; PAM sequence: AAG
tagacagaatgatggaagaa

SEQ ID NO: 49705 - DNA, 20 bp, Artificial Sequence
  Description of Artificial Sequence: Synthetic oligonucleotide
  Target: ATXN2; (+) strand; PAM type: NRG; PAM sequence: AGG
agacagaatgatggaagaaa

SEQ ID NO: 49706 - DNA, 20 bp, Artificial Sequence
  Description of Artificial Sequence: Synthetic oligonucleotide
  Target: ATXN2; (+) strand; PAM type: NRG; PAM sequence: GGG
gacagaatgatggaagaaaa

SEQ ID NO: 49707 - DNA, 20 bp, Artificial Sequence
  Description of Artificial Sequence: Synthetic oligonucleotide
  Target: ATXN2; (+) strand; PAM type: NRG; PAM sequence: TGG
aagaaaagggcatcactact

SEQ ID NO: 49708 - DNA, 20 bp, Artificial Sequence
  Description of Artificial Sequence: Synthetic oligonucleotide
  Target: ATXN2; (+) strand; PAM type: NRG; PAM sequence: TAG
atcactacttggtaacacca

SEQ ID NO: 49709 - DNA, 20 bp, Artificial Sequence
  Description of Artificial Sequence: Synthetic oligonucleotide
  Target: ATXN2; (+) strand; PAM type: NRG; PAM sequence: CAG
accatagtaaataactgttt

SEQ ID NO: 49710 - DNA, 20 bp, Artificial Sequence
  Description of Artificial Sequence: Synthetic oligonucleotide
  Target: ATXN2; (+) strand; PAM type: NRG; PAM sequence: AGG
ccatagtaaataactgtttc

SEQ ID NO: 49711 - DNA, 20 bp, Artificial Sequence
  Description of Artificial Sequence: Synthetic oligonucleotide
  Target: ATXN2; (+) strand; PAM type: NRG; PAM sequence: AAG
taaataactgtttcaggcaa

SEQ ID NO: 49712 - DNA, 20 bp, Artificial Sequence
  Description of Artificial Sequence: Synthetic oligonucleotide
  Target: ATXN2; (+) strand; PAM type: NRG; PAM sequence: CAG
gtttcaggcaaaagtgtcca

SEQ ID NO: 49713 - DNA, 20 bp, Artificial Sequence
  Description of Artificial Sequence: Synthetic oligonucleotide
  Target: ATXN2; (+) strand; PAM type: NRG; PAM sequence: AAG
tcaggcaaaagtgtccacag

SEQ ID NO: 49714 - DNA, 20 bp, Artificial Sequence
  Description of Artificial Sequence: Synthetic oligonucleotide
  Target: ATXN2; (+) strand; PAM type: NRG; PAM sequence: TAG
gtgtccacagaagctaaata

SEQ ID NO: 49715 - DNA, 20 bp, Artificial Sequence
  Description of Artificial Sequence: Synthetic oligonucleotide
  Target: ATXN2; (+) strand; PAM type: NRG; PAM sequence: AAG
ccacagaagctaaatatagt

SEQ ID NO: 49716 - DNA, 20 bp, Artificial Sequence
  Description of Artificial Sequence: Synthetic oligonucleotide
  Target: ATXN2; (+) strand; PAM type: NRG; PAM sequence: AGG
cacagaagctaaatatagta

SEQ ID NO: 49717 - DNA, 20 bp, Artificial Sequence
  Description of Artificial Sequence: Synthetic oligonucleotide
  Target: ATXN2; (+) strand; PAM type: NRG; PAM sequence: GGG
acagaagctaaatatagtaa

SEQ ID NO: 49718 - DNA, 20 bp, Artificial Sequence
  Description of Artificial Sequence: Synthetic oligonucleotide
  Target: ATXN2; (+) strand; PAM type: NRG; PAM sequence: AAG
aagctaaatatagtaaggga

SEQ ID NO: 49719 - DNA, 20 bp, Artificial Sequence
  Description of Artificial Sequence: Synthetic oligonucleotide
  Target: ATXN2; (+) strand; PAM type: NRG; PAM sequence: TAG
ctaaatatagtaagggaaag

SEQ ID NO: 49720 - DNA, 20 bp, Artificial Sequence
  Description of Artificial Sequence: Synthetic oligonucleotide
  Target: ATXN2; (+) strand; PAM type: NRG; PAM sequence: CAG
atagtaagggaaagtagaaa

SEQ ID NO: 49721 - DNA, 20 bp, Artificial Sequence
  Description of Artificial Sequence: Synthetic oligonucleotide
  Target: ATXN2; (+) strand; PAM type: NRG; PAM sequence: GAG
agtaagggaaagtagaaaca

SEQ ID NO: 49722 - DNA, 20 bp, Artificial Sequence
  Description of Artificial Sequence: Synthetic oligonucleotide
  Target: ATXN2; (+) strand; PAM type: NRG; PAM sequence: AAG
agagtatttatataaccaca

SEQ ID NO: 49723 - DNA, 20 bp, Artificial Sequence
  Description of Artificial Sequence: Synthetic oligonucleotide
  Target: ATXN2; (+) strand; PAM type: NRG; PAM sequence: AAG
accacaaagtaactccccac

SEQ ID NO: 49724 - DNA, 20 bp, Artificial Sequence
  Description of Artificial Sequence: Synthetic oligonucleotide
  Target: ATXN2; (+) strand; PAM type: NRG; PAM sequence: AAG
aagatactgatgaaatgacc

SEQ ID NO: 49725 - DNA, 20 bp, Artificial Sequence
  Description of Artificial Sequence: Synthetic oligonucleotide
  Target: ATXN2; (+) strand; PAM type: NRG; PAM sequence: TAG
ccaagtgaaaaataacttta

SEQ ID NO: 49726 - DNA, 20 bp, Artificial Sequence
  Description of Artificial Sequence: Synthetic oligonucleotide
  Target: ATXN2; (+) strand; PAM type: NRG; PAM sequence: AAG
tgaaaaataactttatagtg

SEQ ID NO: 49727 - DNA, 20 bp, Artificial Sequence
  Description of Artificial Sequence: Synthetic oligonucleotide
  Target: ATXN2; (+) strand; PAM type: NRG; PAM sequence: TAG
aactttatagtgaagaaact

SEQ ID NO: 49728 - DNA, 20 bp, Artificial Sequence
  Description of Artificial Sequence: Synthetic oligonucleotide
  Target: ATXN2; (+) strand; PAM type: NRG; PAM sequence: TAG
tttatagtgaagaaacttag

SEQ ID NO: 49729 - DNA, 20 bp, Artificial Sequence
  Description of Artificial Sequence: Synthetic oligonucleotide
  Target: ATXN2; (+) strand; PAM type: NRG; PAM sequence: AAG
tagtagacacaactctaacc

SEQ ID NO: 49730 - DNA, 20 bp, Artificial Sequence
  Description of Artificial Sequence: Synthetic oligonucleotide
  Target: ATXN2; (+) strand; PAM type: NRG; PAM sequence: AAG
caactctaaccaagtgatca

SEQ ID NO: 49731 - DNA, 20 bp, Artificial Sequence
  Description of Artificial Sequence: Synthetic oligonucleotide
  Target: ATXN2; (+) strand; PAM type: NRG; PAM sequence: CAG
gtgatcaaagttaacaaccc

SEQ ID NO: 49732 - DNA, 20 bp, Artificial Sequence
  Description of Artificial Sequence: Synthetic oligonucleotide
  Target: ATXN2; (+) strand; PAM type: NRG; PAM sequence: TGG
aaagttaacaaccccagtaa

SEQ ID NO: 49733 - DNA, 20 bp, Artificial Sequence
  Description of Artificial Sequence: Synthetic oligonucleotide
  Target: ATXN2; (+) strand; PAM type: NRG; PAM sequence: GGG
aagttaacaaccccagtaat

SEQ ID NO: 49734 - DNA, 20 bp, Artificial Sequence
  Description of Artificial Sequence: Synthetic oligonucleotide
  Target: ATXN2; (+) strand; PAM type: NRG; PAM sequence: GAG
actttctgatatcatgcaat

SEQ ID NO: 49735 - DNA, 20 bp, Artificial Sequence
  Description of Artificial Sequence: Synthetic oligonucleotide
  Target: ATXN2; (+) strand; PAM type: NRG; PAM sequence: AAG
aaatatctgaatctaatcat

SEQ ID NO: 49736 - DNA, 20 bp, Artificial Sequence
  Description of Artificial Sequence: Synthetic oligonucleotide
  Target: ATXN2; (+) strand; PAM type: NRG; PAM sequence: AGG
aatatctgaatctaatcata

SEQ ID NO: 49737 - DNA, 20 bp, Artificial Sequence
  Description of Artificial Sequence: Synthetic oligonucleotide
  Target: ATXN2; (+) strand; PAM type: NRG; PAM sequence: CAG
atctaatcataaggaaacct

SEQ ID NO: 49738 - DNA, 20 bp, Artificial Sequence
  Description of Artificial Sequence: Synthetic oligonucleotide
  Target: ATXN2; (+) strand; PAM type: NRG; PAM sequence: TAG
aggaaacctcagataaaccc

SEQ ID NO: 49739 - DNA, 20 bp, Artificial Sequence
  Description of Artificial Sequence: Synthetic oligonucleotide
  Target: ATXN2; (+) strand; PAM type: NRG; PAM sequence: GAG
acctcagataaaccctagtt

SEQ ID NO: 49740 - DNA, 20 bp, Artificial Sequence
  Description of Artificial Sequence: Synthetic oligonucleotide
  Target: ATXN2; (+) strand; PAM type: NRG; PAM sequence: AGG
cctcagataaaccctagttg

SEQ ID NO: 49741 - DNA, 20 bp, Artificial Sequence
  Description of Artificial Sequence: Synthetic oligonucleotide
  Target: ATXN2; (+) strand; PAM type: NRG; PAM sequence: GGG
ctcagataaaccctagttga

SEQ ID NO: 49742 - DNA, 20 bp, Artificial Sequence
  Description of Artificial Sequence: Synthetic oligonucleotide
  Target: ATXN2; (+) strand; PAM type: NRG; PAM sequence: CAG
gataaaccctagttgaggga

SEQ ID NO: 49743 - DNA, 20 bp, Artificial Sequence
  Description of Artificial Sequence: Synthetic oligonucleotide
  Target: ATXN2; (+) strand; PAM type: NRG; PAM sequence: AAG
aaataacctgtaatcttcaa

SEQ ID NO: 49744 - DNA, 20 bp, Artificial Sequence
  Description of Artificial Sequence: Synthetic oligonucleotide
  Target: ATXN2; (+) strand; PAM type: NRG; PAM sequence: AAG
ctgtaatcttcaaaagtgtc

SEQ ID NO: 49745 - DNA, 20 bp, Artificial Sequence
  Description of Artificial Sequence: Synthetic oligonucleotide
  Target: ATXN2; (+) strand; PAM type: NRG; PAM sequence: AAG
tcaaaagtgtcaagtcataa

SEQ ID NO: 49746 - DNA, 20 bp, Artificial Sequence
  Description of Artificial Sequence: Synthetic oligonucleotide
  Target: ATXN2; (+) strand; PAM type: NRG; PAM sequence: AAG
gtgtcaagtcataaaagaca

SEQ ID NO: 49747 - DNA, 20 bp, Artificial Sequence
  Description of Artificial Sequence: Synthetic oligonucleotide
  Target: ATXN2; (+) strand; PAM type: NRG; PAM sequence: TGG
aaaagacaaagaaactgctt

SEQ ID NO: 49748 - DNA, 20 bp, Artificial Sequence
  Description of Artificial Sequence: Synthetic oligonucleotide
  Target: ATXN2; (+) strand; PAM type: NRG; PAM sequence: AAG
aaagaaactgctttggatta

SEQ ID NO: 49749 - DNA, 20 bp, Artificial Sequence
  Description of Artificial Sequence: Synthetic oligonucleotide
  Target: ATXN2; (+) strand; PAM type: NRG; PAM sequence: AGG
aagaaactgctttggattaa

SEQ ID NO: 49750 - DNA, 20 bp, Artificial Sequence
  Description of Artificial Sequence: Synthetic oligonucleotide
  Target: ATXN2; (+) strand; PAM type: NRG; PAM sequence: GAG
gaaactgctttggattaaag

SEQ ID NO: 49751 - DNA, 20 bp, Artificial Sequence
  Description of Artificial Sequence: Synthetic oligonucleotide
  Target: ATXN2; (+) strand; PAM type: NRG; PAM sequence: AAG
ctttggattaaaggagacca

SEQ ID NO: 49752 - DNA, 20 bp, Artificial Sequence
  Description of Artificial Sequence: Synthetic oligonucleotide
  Target: ATXN2; (+) strand; PAM type: NRG; PAM sequence: AAG
ccaaagatacatgataaccg

SEQ ID NO: 49753 - DNA, 20 bp, Artificial Sequence
  Description of Artificial Sequence: Synthetic oligonucleotide
  Target: ATXN2; (+) strand; PAM type: NRG; PAM sequence: AGG
caaagatacatgataaccga

SEQ ID NO: 49754 - DNA, 20 bp, Artificial Sequence
  Description of Artificial Sequence: Synthetic oligonucleotide
  Target: ATXN2; (+) strand; PAM type: NRG; PAM sequence: TGG
ataaccgaaggtaacaatcc

SEQ ID NO: 49755 - DNA, 20 bp, Artificial Sequence
  Description of Artificial Sequence: Synthetic oligonucleotide
  Target: ATXN2; (+) strand; PAM type: NRG; PAM sequence: TGG
cgaaggtaacaatcctggat

SEQ ID NO: 49756 - DNA, 20 bp, Artificial Sequence
  Description of Artificial Sequence: Synthetic oligonucleotide
  Target: ATXN2; (+) strand; PAM type: NRG; PAM sequence: TGG
aacaatcctggattggttct

SEQ ID NO: 49757 - DNA, 20 bp, Artificial Sequence
  Description of Artificial Sequence: Synthetic oligonucleotide
  Target: ATXN2; (+) strand; PAM type: NRG; PAM sequence: CAG
atcctggattggttcttgga

SEQ ID NO: 49758 - DNA, 20 bp, Artificial Sequence
  Description of Artificial Sequence: Synthetic oligonucleotide
  Target: ATXN2; (+) strand; PAM type: NRG; PAM sequence: GAG
cctggattggttcttggaca

SEQ ID NO: 49759 - DNA, 20 bp, Artificial Sequence
  Description of Artificial Sequence: Synthetic oligonucleotide
  Target: ATXN2; (+) strand; PAM type: NRG; PAM sequence: AGG
ctggattggttcttggacag

SEQ ID NO: 49760 - DNA, 20 bp, Artificial Sequence
  Description of Artificial Sequence: Synthetic oligonucleotide
  Target: ATXN2; (+) strand; PAM type: NRG; PAM sequence: GGG
tggattggttcttggacaga

SEQ ID NO: 49761 - DNA, 20 bp, Artificial Sequence
  Description of Artificial Sequence: Synthetic oligonucleotide
  Target: ATXN2; (+) strand; PAM type: NRG; PAM sequence: GAG
gattggttcttggacagagg

SEQ ID NO: 49762 - DNA, 20 bp, Artificial Sequence
  Description of Artificial Sequence: Synthetic oligonucleotide
  Target: ATXN2; (+) strand; PAM type: NRG; PAM sequence: TAG
gtatattccacatatatatg

SEQ ID NO: 49763 - DNA, 20 bp, Artificial Sequence
  Description of Artificial Sequence: Synthetic oligonucleotide
  Target: ATXN2; (+) strand; PAM type: NRG; PAM sequence: TAG
tatatgtgtatatatatatg

SEQ ID NO: 49764 - DNA, 20 bp, Artificial Sequence
  Description of Artificial Sequence: Synthetic oligonucleotide
  Target: ATXN2; (+) strand; PAM type: NRG; PAM sequence: TGG
tgtagaatatacatatttac

SEQ ID NO: 49765 - DNA, 20 bp, Artificial Sequence
  Description of Artificial Sequence: Synthetic oligonucleotide
  Target: ATXN2; (+) strand; PAM type: NRG; PAM sequence: CAG
catatttactggttcttgac

SEQ ID NO: 49766 - DNA, 20 bp, Artificial Sequence
  Description of Artificial Sequence: Synthetic oligonucleotide
  Target: ATXN2; (+) strand; PAM type: NRG; PAM sequence: AAG
ttgatttgttgattgtttta

SEQ ID NO: 49767 - DNA, 20 bp, Artificial Sequence
  Description of Artificial Sequence: Synthetic oligonucleotide
  Target: ATXN2; (+) strand; PAM type: NRG; PAM sequence: AGG
tgatttgttgattgttttaa

SEQ ID NO: 49768 - DNA, 20 bp, Artificial Sequence
  Description of Artificial Sequence: Synthetic oligonucleotide
  Target: ATXN2; (+) strand; PAM type: NRG; PAM sequence: TAG
ttgattgttttaaaggacat

SEQ ID NO: 49769 - DNA, 20 bp, Artificial Sequence
  Description of Artificial Sequence: Synthetic oligonucleotide
  Target: ATXN2; (+) strand; PAM type: NRG; PAM sequence: AAG
attgttttaaaggacattag

SEQ ID NO: 49770 - DNA, 20 bp, Artificial Sequence
  Description of Artificial Sequence: Synthetic oligonucleotide
  Target: ATXN2; (+) strand; PAM type: NRG; PAM sequence: AGG
ttgttttaaaggacattaga

SEQ ID NO: 49771 - DNA, 20 bp, Artificial Sequence
  Description of Artificial Sequence: Synthetic oligonucleotide
  Target: ATXN2; (+) strand; PAM type: NRG; PAM sequence: CAG
gacattagaaggtctataaa

SEQ ID NO: 49772 - DNA, 20 bp, Artificial Sequence
  Description of Artificial Sequence: Synthetic oligonucleotide
  Target: ATXN2; (+) strand; PAM type: NRG; PAM sequence: CAG
aaggtctataaacagaataa

SEQ ID NO: 49773 - DNA, 20 bp, Artificial Sequence
  Description of Artificial Sequence: Synthetic oligonucleotide
  Target: ATXN2; (+) strand; PAM type: NRG; PAM sequence: TGG
ttattttgacaactgtactg

SEQ ID NO: 49774 - DNA, 20 bp, Artificial Sequence
  Description of Artificial Sequence: Synthetic oligonucleotide
  Target: ATXN2; (+) strand; PAM type: NRG; PAM sequence: TAG
actgtactgtggttttgaaa

SEQ ID NO: 49775 - DNA, 20 bp, Artificial Sequence
  Description of Artificial Sequence: Synthetic oligonucleotide
  Target: ATXN2; (+) strand; PAM type: NRG; PAM sequence: TAG
aaatagaatgcccttgttat

SEQ ID NO: 49776 - DNA, 20 bp, Artificial Sequence
  Description of Artificial Sequence: Synthetic oligonucleotide
  Target: ATXN2; (+) strand; PAM type: NRG; PAM sequence: AAG
cccttgttattagtacatac

SEQ ID NO: 49777 - DNA, 20 bp, Artificial Sequence
  Description of Artificial Sequence: Synthetic oligonucleotide
  Target: ATXN2; (+) strand; PAM type: NRG; PAM sequence: AAG
ttattagtacatacaagttg

SEQ ID NO: 49778 - DNA, 20 bp, Artificial Sequence
  Description of Artificial Sequence: Synthetic oligonucleotide
  Target: ATXN2; (+) strand; PAM type: NRG; PAM sequence: TAG
tacatacaagttgaagtatt

SEQ ID NO: 49779 - DNA, 20 bp, Artificial Sequence
  Description of Artificial Sequence: Synthetic oligonucleotide
  Target: ATXN2; (+) strand; PAM type: NRG; PAM sequence: AGG
acatacaagttgaagtattt

SEQ ID NO: 49780 - DNA, 20 bp, Artificial Sequence
  Description of Artificial Sequence: Synthetic oligonucleotide
  Target: ATXN2; (+) strand; PAM type: NRG; PAM sequence: GGG
catacaagttgaagtattta

SEQ ID NO: 49781 - DNA, 20 bp, Artificial Sequence
  Description of Artificial Sequence: Synthetic oligonucleotide
  Target: ATXN2; (+) strand; PAM type: NRG; PAM sequence: AAG
agttgaagtatttagggcta

SEQ ID NO: 49782 - DNA, 20 bp, Artificial Sequence
  Description of Artificial Sequence: Synthetic oligonucleotide
  Target: ATXN2; (+) strand; PAM type: NRG; PAM sequence: GAG
ttgaagtatttagggctaaa

SEQ ID NO: 49783 - DNA, 20 bp, Artificial Sequence
  Description of Artificial Sequence: Synthetic oligonucleotide
  Target: ATXN2; (+) strand; PAM type: NRG; PAM sequence: AGG
tgaagtatttagggctaaag

SEQ ID NO: 49784 - DNA, 20 bp, Artificial Sequence
  Description of Artificial Sequence: Synthetic oligonucleotide
  Target: ATXN2; (+) strand; PAM type: NRG; PAM sequence: AAG
atgtctctcatatgtttaat

SEQ ID NO: 49785 - DNA, 20 bp, Artificial Sequence
  Description of Artificial Sequence: Synthetic oligonucleotide
  Target: ATXN2; (+) strand; PAM type: NRG; PAM sequence: CAG
tacatatacaattaccaata

SEQ ID NO: 49786 - DNA, 20 bp, Artificial Sequence
  Description of Artificial Sequence: Synthetic oligonucleotide
  Target: ATXN2; (+) strand; PAM type: NRG; PAM sequence: GAG
catatacaattaccaataca

SEQ ID NO: 49787 - DNA, 20 bp, Artificial Sequence
  Description of Artificial Sequence: Synthetic oligonucleotide
  Target: ATXN2; (+) strand; PAM type: NRG; PAM sequence: AAG
accaatacagagaaaatgtt

SEQ ID NO: 49788 - DNA, 20 bp, Artificial Sequence
  Description of Artificial Sequence: Synthetic oligonucleotide
  Target: ATXN2; (+) strand; PAM type: NRG; PAM sequence: AGG
ccaatacagagaaaatgtta

SEQ ID NO: 49789 - DNA, 20 bp, Artificial Sequence
  Description of Artificial Sequence: Synthetic oligonucleotide
  Target: ATXN2; (+) strand; PAM type: NRG; PAM sequence: TGG
agaaaatgttaaggtgaata

SEQ ID NO: 49790 - DNA, 20 bp, Artificial Sequence
  Description of Artificial Sequence: Synthetic oligonucleotide
  Target: ATXN2; (+) strand; PAM type: NRG; PAM sequence: AAG
atatggtaaaatgttacttg

SEQ ID NO: 49791 - DNA, 20 bp, Artificial Sequence
  Description of Artificial Sequence: Synthetic oligonucleotide
  Target: ATXN2; (+) strand; PAM type: NRG; PAM sequence: CAG
aaaatgttacttgaagaata

SEQ ID NO: 49792 - DNA, 20 bp, Artificial Sequence
  Description of Artificial Sequence: Synthetic oligonucleotide
  Target: ATXN2; (+) strand; PAM type: NRG; PAM sequence: AGG
aaatgttacttgaagaatac

SEQ ID NO: 49793 - DNA, 20 bp, Artificial Sequence
  Description of Artificial Sequence: Synthetic oligonucleotide
  Target: ATXN2; (+) strand; PAM type: NRG; PAM sequence: GAG
gttacttgaagaatacaggt

SEQ ID NO: 49794 - DNA, 20 bp, Artificial Sequence
  Description of Artificial Sequence: Synthetic oligonucleotide
  Target: ATXN2; (+) strand; PAM type: NRG; PAM sequence: TAG
aagaatacaggtgagatata

SEQ ID NO: 49795 - DNA, 20 bp, Artificial Sequence
  Description of Artificial Sequence: Synthetic oligonucleotide
  Target: ATXN2; (+) strand; PAM type: NRG; PAM sequence: AGG
agaatacaggtgagatatat

SEQ ID NO: 49796 - DNA, 20 bp, Artificial Sequence
  Description of Artificial Sequence: Synthetic oligonucleotide
  Target: ATXN2; (+) strand; PAM type: NRG; PAM sequence: GAG
aatacaggtgagatatatag

SEQ ID NO: 49797 - DNA, 20 bp, Artificial Sequence
  Description of Artificial Sequence: Synthetic oligonucleotide
  Target: ATXN2; (+) strand; PAM type: NRG; PAM sequence: AAG
tatctttgcaatttttctaa

SEQ ID NO: 49798 - DNA, 20 bp, Artificial Sequence
  Description of Artificial Sequence: Synthetic oligonucleotide
  Target: ATXN2; (+) strand; PAM type: NRG; PAM sequence: AAG
aaaagtctaaaattatgttt

SEQ ID NO: 49799 - DNA, 20 bp, Artificial Sequence
  Description of Artificial Sequence: Synthetic oligonucleotide
  Target: ATXN2; (+) strand; PAM type: NRG; PAM sequence: TGG
ttaagtaaaatgtttttaat

SEQ ID NO: 49800 - DNA, 20 bp, Artificial Sequence
  Description of Artificial Sequence: Synthetic oligonucleotide
  Target: ATXN2; (+) strand; PAM type: NRG; PAM sequence: GAG
aagtaaaatgtttttaattg

SEQ ID NO: 49801 - DNA, 20 bp, Artificial Sequence
  Description of Artificial Sequence: Synthetic oligonucleotide
  Target: ATXN2; (+) strand; PAM type: NRG; PAM sequence: AAG
tgtttttaattggagactat

SEQ ID NO: 49802 - DNA, 20 bp, Artificial Sequence
  Description of Artificial Sequence: Synthetic oligonucleotide
  Target: ATXN2; (+) strand; PAM type: NRG; PAM sequence: AAG
ctctatttaatgcattgtcc

SEQ ID NO: 49803 - DNA, 20 bp, Artificial Sequence
  Description of Artificial Sequence: Synthetic oligonucleotide
  Target: ATXN2; (+) strand; PAM type: NRG; PAM sequence: AGG
tctatttaatgcattgtcca

SEQ ID NO: 49804 - DNA, 20 bp, Artificial Sequence
  Description of Artificial Sequence: Synthetic oligonucleotide
  Target: ATXN2; (+) strand; PAM type: NRG; PAM sequence: CAG
taataatacttaatcctact

SEQ ID NO: 49805 - DNA, 20 bp, Artificial Sequence
  Description of Artificial Sequence: Synthetic oligonucleotide
  Target: ATXN2; (+) strand; PAM type: NRG; PAM sequence: CAG
aaactcaaatgccatctttt

SEQ ID NO: 49806 - DNA, 20 bp, Artificial Sequence
  Description of Artificial Sequence: Synthetic oligonucleotide
  Target: ATXN2; (+) strand; PAM type: NRG; PAM sequence: AGG
aactcaaatgccatcttttc

SEQ ID NO: 49807 - DNA, 20 bp, Artificial Sequence
  Description of Artificial Sequence: Synthetic oligonucleotide
  Target: ATXN2; (+) strand; PAM type: NRG; PAM sequence: AAG
tcaaatgccatcttttcagg

SEQ ID NO: 49808 - DNA, 20 bp, Artificial Sequence
  Description of Artificial Sequence: Synthetic oligonucleotide
  Target: ATXN2; (+) strand; PAM type: NRG; PAM sequence: CAG
cgatgctgttttcaactctc

SEQ ID NO: 49809 - DNA, 20 bp, Artificial Sequence
  Description of Artificial Sequence: Synthetic oligonucleotide
  Target: ATXN2; (+) strand; PAM type: NRG; PAM sequence: TAG
ctgttttcaactctccagtt

SEQ ID NO: 49810 - DNA, 20 bp, Artificial Sequence
  Description of Artificial Sequence: Synthetic oligonucleotide
  Target: ATXN2; (+) strand; PAM type: NRG; PAM sequence: TAG
tagatctgtattataattac

SEQ ID NO: 49811 - DNA, 20 bp, Artificial Sequence
  Description of Artificial Sequence: Synthetic oligonucleotide
  Target: ATXN2; (+) strand; PAM type: NRG; PAM sequence: CAG
tctgtcatatacccactact

SEQ ID NO: 49812 - DNA, 20 bp, Artificial Sequence
  Description of Artificial Sequence: Synthetic oligonucleotide
  Target: ATXN2; (+) strand; PAM type: NRG; PAM sequence: AGG
ctgtcatatacccactactc

SEQ ID NO: 49813 - DNA, 20 bp, Artificial Sequence
  Description of Artificial Sequence: Synthetic oligonucleotide
  Target: ATXN2; (+) strand; PAM type: NRG; PAM sequence: CAG
tattatgcttctgtgaaaat

SEQ ID NO: 49814 - DNA, 20 bp, Artificial Sequence
  Description of Artificial Sequence: Synthetic oligonucleotide
  Target: ATXN2; (+) strand; PAM type: NRG; PAM sequence: CAG
tcagaaaatgatgcctcttc

SEQ ID NO: 49815 - DNA, 20 bp, Artificial Sequence
  Description of Artificial Sequence: Synthetic oligonucleotide
  Target: ATXN2; (+) strand; PAM type: NRG; PAM sequence: AGG
cagaaaatgatgcctcttcc

SEQ ID NO: 49816 - DNA, 20 bp, Artificial Sequence
  Description of Artificial Sequence: Synthetic oligonucleotide
  Target: ATXN2; (+) strand; PAM type: NRG; PAM sequence: GGG
agaaaatgatgcctcttcca

SEQ ID NO: 49817 - DNA, 20 bp, Artificial Sequence
  Description of Artificial Sequence: Synthetic oligonucleotide
  Target: ATXN2; (+) strand; PAM type: NRG; PAM sequence: GGG
gaaaatgatgcctcttccag

SEQ ID NO: 49818 - DNA, 20 bp, Artificial Sequence
  Description of Artificial Sequence: Synthetic oligonucleotide
  Target: ATXN2; (+) strand; PAM type: NRG; PAM sequence: GGG
aaaatgatgcctcttccagg

SEQ ID NO: 49819 - DNA, 20 bp, Artificial Sequence
  Description of Artificial Sequence: Synthetic oligonucleotide
  Target: ATXN2; (+) strand; PAM type: NRG; PAM sequence: TAG
atgcctcttccagggggtca

SEQ ID NO: 49820 - DNA, 20 bp, Artificial Sequence
  Description of Artificial Sequence: Synthetic oligonucleotide
  Target: ATXN2; (+) strand; PAM type: NRG; PAM sequence: TAG
agggggtcatagccccacat

SEQ ID NO: 49821 - DNA, 20 bp, Artificial Sequence
  Description of Artificial Sequence: Synthetic oligonucleotide
  Target: ATXN2; (+) strand; PAM type: NRG; PAM sequence: CAG
tagccccacattagacaaaa

SEQ ID NO: 49822 - DNA, 20 bp, Artificial Sequence
  Description of Artificial Sequence: Synthetic oligonucleotide
  Target: ATXN2; (+) strand; PAM type: NRG; PAM sequence: TGG
ccacattagacaaaacagtg

SEQ ID NO: 49823 - DNA, 20 bp, Artificial Sequence
  Description of Artificial Sequence: Synthetic oligonucleotide
  Target: ATXN2; (+) strand; PAM type: NRG; PAM sequence: CGG
attagacaaaacagtgtggt

SEQ ID NO: 49824 - DNA, 20 bp, Artificial Sequence
  Description of Artificial Sequence: Synthetic oligonucleotide
  Target: ATXN2; (+) strand; PAM type: NRG; PAM sequence: AAG
gacaaaacagtgtggtcggc

SEQ ID NO: 49825 - DNA, 20 bp, Artificial Sequence
  Description of Artificial Sequence: Synthetic oligonucleotide
  Target: ATXN2; (+) strand; PAM type: NRG; PAM sequence: CAG
aaaacagtgtggtcggcaag

SEQ ID NO: 49826 - DNA, 20 bp, Artificial Sequence
  Description of Artificial Sequence: Synthetic oligonucleotide
  Target: ATXN2; (+) strand; PAM type: NRG; PAM sequence: AAG
agtgtctttgtgaaaattaa

SEQ ID NO: 49827 - DNA, 20 bp, Artificial Sequence
  Description of Artificial Sequence: Synthetic oligonucleotide
  Target: ATXN2; (+) strand; PAM type: NRG; PAM sequence: AAG
gtctttgtgaaaattaaaag

SEQ ID NO: 49828 - DNA, 20 bp, Artificial Sequence
  Description of Artificial Sequence: Synthetic oligonucleotide
  Target: ATXN2; (+) strand; PAM type: NRG; PAM sequence: AGG
tctttgtgaaaattaaaaga

SEQ ID NO: 49829 - DNA, 20 bp, Artificial Sequence
  Description of Artificial Sequence: Synthetic oligonucleotide
  Target: ATXN2; (+) strand; PAM type: NRG; PAM sequence: CAG
tgaaaattaaaagaaggtac

SEQ ID NO: 49830 - DNA, 20 bp, Artificial Sequence
  Description of Artificial Sequence: Synthetic oligonucleotide
  Target: ATXN2; (+) strand; PAM type: NRG; PAM sequence: AAG
aaattaaaagaaggtaccag

SEQ ID NO: 49831 - DNA, 20 bp, Artificial Sequence
  Description of Artificial Sequence: Synthetic oligonucleotide
  Target: ATXN2; (+) strand; PAM type: NRG; PAM sequence: TAG
aagaaggtaccagaagcaca

SEQ ID NO: 49832 - DNA, 20 bp, Artificial Sequence
  Description of Artificial Sequence: Synthetic oligonucleotide
  Target: ATXN2; (+) strand; PAM type: NRG; PAM sequence: TAG
gtaccagaagcacatagata

SEQ ID NO: 49833 - DNA, 20 bp, Artificial Sequence
  Description of Artificial Sequence: Synthetic oligonucleotide
  Target: ATXN2; (+) strand; PAM type: NRG; PAM sequence: AAG
gcacatagatatagccccca

SEQ ID NO: 49834 - DNA, 20 bp, Artificial Sequence
  Description of Artificial Sequence: Synthetic oligonucleotide
  Target: ATXN2; (+) strand; PAM type: NRG; PAM sequence: AGG
cacatagatatagcccccaa

SEQ ID NO: 49835 - DNA, 20 bp, Artificial Sequence
  Description of Artificial Sequence: Synthetic oligonucleotide
  Target: ATXN2; (+) strand; PAM type: NRG; PAM sequence: TGG
gcccccaaaggcacattgtg

SEQ ID NO: 49836 - DNA, 20 bp, Artificial Sequence
  Description of Artificial Sequence: Synthetic oligonucleotide
  Target: ATXN2; (+) strand; PAM type: NRG; PAM sequence: AAG
aaaggcacattgtgtggcca

SEQ ID NO: 49837 - DNA, 20 bp, Artificial Sequence
  Description of Artificial Sequence: Synthetic oligonucleotide
  Target: ATXN2; (+) strand; PAM type: NRG; PAM sequence: TGG
tttcaacatccattcacact

SEQ ID NO: 49838 - DNA, 20 bp, Artificial Sequence
  Description of Artificial Sequence: Synthetic oligonucleotide
  Target: ATXN2; (+) strand; PAM type: NRG; PAM sequence: CAG
aacatccattcacacttggt

SEQ ID NO: 49839 - DNA, 20 bp, Artificial Sequence
  Description of Artificial Sequence: Synthetic oligonucleotide
  Target: ATXN2; (+) strand; PAM type: NRG; PAM sequence: AGG
acatccattcacacttggtc

SEQ ID NO: 49840 - DNA, 20 bp, Artificial Sequence
  Description of Artificial Sequence: Synthetic oligonucleotide
  Target: ATXN2; (+) strand; PAM type: NRG; PAM sequence: TGG
cacacttggtcaggaactct

SEQ ID NO: 49841 - DNA, 20 bp, Artificial Sequence
  Description of Artificial Sequence: Synthetic oligonucleotide
  Target: ATXN2; (+) strand; PAM type: NRG; PAM sequence: AAG
caaatgaaaacctaacaacc

SEQ ID NO: 49842 - DNA, 20 bp, Artificial Sequence
  Description of Artificial Sequence: Synthetic oligonucleotide
  Target: ATXN2; (+) strand; PAM type: NRG; PAM sequence: TGG
gaaaacctaacaaccaagct

SEQ ID NO: 49843 - DNA, 20 bp, Artificial Sequence
  Description of Artificial Sequence: Synthetic oligonucleotide
  Target: ATXN2; (+) strand; PAM type: NRG; PAM sequence: AAG
ctaacaaccaagcttggcaa

SEQ ID NO: 49844 - DNA, 20 bp, Artificial Sequence
  Description of Artificial Sequence: Synthetic oligonucleotide
  Target: ATXN2; (+) strand; PAM type: NRG; PAM sequence: TAG
ctttctaccactaccaaaat

SEQ ID NO: 49845 - DNA, 20 bp, Artificial Sequence
  Description of Artificial Sequence: Synthetic oligonucleotide
  Target: ATXN2; (+) strand; PAM type: NRG; PAM sequence: CAG
tctaccactaccaaaattag

SEQ ID NO: 49846 - DNA, 20 bp, Artificial Sequence
  Description of Artificial Sequence: Synthetic oligonucleotide
  Target: ATXN2; (+) strand; PAM type: NRG; PAM sequence: GAG
taccactaccaaaattagca

SEQ ID NO: 49847 - DNA, 20 bp, Artificial Sequence
  Description of Artificial Sequence: Synthetic oligonucleotide
  Target: ATXN2; (+) strand; PAM type: NRG; PAM sequence: AGG
accactaccaaaattagcag

SEQ ID NO: 49848 - DNA, 20 bp, Artificial Sequence
  Description of Artificial Sequence: Synthetic oligonucleotide
  Target: ATXN2; (+) strand; PAM type: NRG; PAM sequence: GAG
tgcctcatatgatacacact

SEQ ID NO: 49849 - DNA, 20 bp, Artificial Sequence
  Description of Artificial Sequence: Synthetic oligonucleotide
  Target: ATXN2; (+) strand; PAM type: NRG; PAM sequence: CAG
gtaaatacctaatgaattaa

SEQ ID NO: 49850 - DNA, 20 bp, Artificial Sequence
  Description of Artificial Sequence: Synthetic oligonucleotide
  Target: ATXN2; (+) strand; PAM type: NRG; PAM sequence: CAG
taatgaattaacagcccaat

SEQ ID NO: 49851 - DNA, 20 bp, Artificial Sequence
  Description of Artificial Sequence: Synthetic oligonucleotide
  Target: ATXN2; (+) strand; PAM type: NRG; PAM sequence: AAG
attaacagcccaatcagaac

SEQ ID NO: 49852 - DNA, 20 bp, Artificial Sequence
  Description of Artificial Sequence: Synthetic oligonucleotide
  Target: ATXN2; (+) strand; PAM type: NRG; PAM sequence: AGG
ttaacagcccaatcagaaca

SEQ ID NO: 49853 - DNA, 20 bp, Artificial Sequence
  Description of Artificial Sequence: Synthetic oligonucleotide
  Target: ATXN2; (+) strand; PAM type: NRG; PAM sequence: GGG
taacagcccaatcagaacaa

SEQ ID NO: 49854 - DNA, 20 bp, Artificial Sequence
  Description of Artificial Sequence: Synthetic oligonucleotide
  Target: ATXN2; (+) strand; PAM type: NRG; PAM sequence: AAG
agcccaatcagaacaaggga

SEQ ID NO: 49855 - DNA, 20 bp, Artificial Sequence
  Description of Artificial Sequence: Synthetic oligonucleotide
  Target: ATXN2; (+) strand; PAM type: NRG; PAM sequence: AAG
gaacaagggaaagaaaaaaa

SEQ ID NO: 49856 - DNA, 20 bp, Artificial Sequence
  Description of Artificial Sequence: Synthetic oligonucleotide
  Target: ATXN2; (+) strand; PAM type: NRG; PAM sequence: AAG
aagggaaagaaaaaaaaaga

SEQ ID NO: 49857 - DNA, 20 bp, Artificial Sequence
  Description of Artificial Sequence: Synthetic oligonucleotide
  Target: ATXN2; (+) strand; PAM type: NRG; PAM sequence: AAG
agttaaaactttccatttca

SEQ ID NO: 49858 - DNA, 20 bp, Artificial Sequence
  Description of Artificial Sequence: Synthetic oligonucleotide
  Target: ATXN2; (+) strand; PAM type: NRG; PAM sequence: CAG
aaagctatcaatctttaaat

SEQ ID NO: 49859 - DNA, 20 bp, Artificial Sequence
  Description of Artificial Sequence: Synthetic oligonucleotide
  Target: ATXN2; (+) strand; PAM type: NRG; PAM sequence: AGG
aagctatcaatctttaaatc

SEQ ID NO: 49860 - DNA, 20 bp, Artificial Sequence
  Description of Artificial Sequence: Synthetic oligonucleotide
  Target: ATXN2; (+) strand; PAM type: NRG; PAM sequence: GGG
agctatcaatctttaaatca

SEQ ID NO: 49861 - DNA, 20 bp, Artificial Sequence
  Description of Artificial Sequence: Synthetic oligonucleotide
  Target: ATXN2; (+) strand; PAM type: NRG; PAM sequence: GGG
gctatcaatctttaaatcag

SEQ ID NO: 49862 - DNA, 20 bp, Artificial Sequence
  Description of Artificial Sequence: Synthetic oligonucleotide
  Target: ATXN2; (+) strand; PAM type: NRG; PAM sequence: CAG
tcaatctttaaatcaggggt

SEQ ID NO: 49863 - DNA, 20 bp, Artificial Sequence
  Description of Artificial Sequence: Synthetic oligonucleotide
  Target: ATXN2; (+) strand; PAM type: NRG; PAM sequence: AGG
caatctttaaatcaggggtc

SEQ ID NO: 49864 - DNA, 20 bp, Artificial Sequence
  Description of Artificial Sequence: Synthetic oligonucleotide
  Target: ATXN2; (+) strand; PAM type: NRG; PAM sequence: CAG
aatcaggggtcaggacacta

SEQ ID NO: 49865 - DNA, 20 bp, Artificial Sequence
  Description of Artificial Sequence: Synthetic oligonucleotide
  Target: ATXN2; (+) strand; PAM type: NRG; PAM sequence: TGG
ctacagcccacaacctgttt

SEQ ID NO: 49866 - DNA, 20 bp, Artificial Sequence
  Description of Artificial Sequence: Synthetic oligonucleotide
  Target: ATXN2; (+) strand; PAM type: NRG; PAM sequence: TGG
gcccacaacctgttttggtc

SEQ ID NO: 49867 - DNA, 20 bp, Artificial Sequence
  Description of Artificial Sequence: Synthetic oligonucleotide
  Target: ATXN2; (+) strand; PAM type: NRG; PAM sequence: TGG
acctgttttggtctggcttc

SEQ ID NO: 49868 - DNA, 20 bp, Artificial Sequence
  Description of Artificial Sequence: Synthetic oligonucleotide
  Target: ATXN2; (+) strand; PAM type: NRG; PAM sequence: GGG
cctgttttggtctggcttct

SEQ ID NO: 49869 - DNA, 20 bp, Artificial Sequence
  Description of Artificial Sequence: Synthetic oligonucleotide
  Target: ATXN2; (+) strand; PAM type: NRG; PAM sequence: AAG
tttggtctggcttctgggct

SEQ ID NO: 49870 - DNA, 20 bp, Artificial Sequence
  Description of Artificial Sequence: Synthetic oligonucleotide
  Target: ATXN2; (+) strand; PAM type: NRG; PAM sequence: AAG
gaatgatttttatgttcctc

SEQ ID NO: 49871 - DNA, 20 bp, Artificial Sequence
  Description of Artificial Sequence: Synthetic oligonucleotide
  Target: ATXN2; (+) strand; PAM type: NRG; PAM sequence: GAG
atgatttttatgttcctcaa

SEQ ID NO: 49872 - DNA, 20 bp, Artificial Sequence
  Description of Artificial Sequence: Synthetic oligonucleotide
  Target: ATXN2; (+) strand; PAM type: NRG; PAM sequence: TGG
tgttcctcaagagttgctta

SEQ ID NO: 49873 - DNA, 20 bp, Artificial Sequence
  Description of Artificial Sequence: Synthetic oligonucleotide
  Target: ATXN2; (+) strand; PAM type: NRG; PAM sequence: AAG
tcaagagttgcttatggtaa

SEQ ID NO: 49874 - DNA, 20 bp, Artificial Sequence
  Description of Artificial Sequence: Synthetic oligonucleotide
  Target: ATXN2; (+) strand; PAM type: NRG; PAM sequence: AGG
caagagttgcttatggtaaa

SEQ ID NO: 49875 - DNA, 20 bp, Artificial Sequence
  Description of Artificial Sequence: Synthetic oligonucleotide
  Target: ATXN2; (+) strand; PAM type: NRG; PAM sequence: GAG
gcttatggtaaaaggaattt

SEQ ID NO: 49876 - DNA, 20 bp, Artificial Sequence
  Description of Artificial Sequence: Synthetic oligonucleotide
  Target: ATXN2; (+) strand; PAM type: NRG; PAM sequence: AGG
cttatggtaaaaggaatttg

SEQ ID NO: 49877 - DNA, 20 bp, Artificial Sequence
  Description of Artificial Sequence: Synthetic oligonucleotide
  Target: ATXN2; (+) strand; PAM type: NRG; PAM sequence: GGG
ttatggtaaaaggaatttga

SEQ ID NO: 49878 - DNA, 20 bp, Artificial Sequence
  Description of Artificial Sequence: Synthetic oligonucleotide
  Target: ATXN2; (+) strand; PAM type: NRG; PAM sequence: GGG
tatggtaaaaggaatttgag

SEQ ID NO: 49879 - DNA, 20 bp, Artificial Sequence
  Description of Artificial Sequence: Synthetic oligonucleotide
  Target: ATXN2; (+) strand; PAM type: NRG; PAM sequence: TGG
aaaaggaatttgaggggaaa

SEQ ID NO: 49880 - DNA, 20 bp, Artificial Sequence
  Description of Artificial Sequence: Synthetic oligonucleotide
  Target: ATXN2; (+) strand; PAM type: NRG; PAM sequence: AAG
gggaaatggaaaaaaaaaaa

SEQ ID NO: 49881 - DNA, 20 bp, Artificial Sequence
  Description of Artificial Sequence: Synthetic oligonucleotide
  Target: ATXN2; (+) strand; PAM type: NRG; PAM sequence: AGG
ggaaatggaaaaaaaaaaaa

SEQ ID NO: 49882 - DNA, 20 bp, Artificial Sequence
  Description of Artificial Sequence: Synthetic oligonucleotide
  Target: ATXN2; (+) strand; PAM type: NRG; PAM sequence: CAG
aaaaaaaaaaggatatgcaa

SEQ ID NO: 49883 - DNA, 20 bp, Artificial Sequence
  Description of Artificial Sequence: Synthetic oligonucleotide
  Target: ATXN2; (+) strand; PAM type: NRG; PAM sequence: GAG
aaaaaaaaggatatgcaaca

SEQ ID NO: 49884 - DNA, 20 bp, Artificial Sequence
  Description of Artificial Sequence: Synthetic oligonucleotide
  Target: ATXN2; (+) strand; PAM type: NRG; PAM sequence: AAG
aaaaaggatatgcaacagag

SEQ ID NO: 49885 - DNA, 20 bp, Artificial Sequence
  Description of Artificial Sequence: Synthetic oligonucleotide
  Target: ATXN2; (+) strand; PAM type: NRG; PAM sequence: TGG
tatgcaacagagaagctata

SEQ ID NO: 49886 - DNA, 20 bp, Artificial Sequence
  Description of Artificial Sequence: Synthetic oligonucleotide
  Target: ATXN2; (+) strand; PAM type: NRG; PAM sequence: TAG
acagagaagctatatggccc

SEQ ID NO: 49887 - DNA, 20 bp, Artificial Sequence
  Description of Artificial Sequence: Synthetic oligonucleotide
  Target: ATXN2; (+) strand; PAM type: NRG; PAM sequence: GAG
agagaagctatatggcccta

SEQ ID NO: 49888 - DNA, 20 bp, Artificial Sequence
  Description of Artificial Sequence: Synthetic oligonucleotide
  Target: ATXN2; (+) strand; PAM type: NRG; PAM sequence: GAG
gcctaaaatacttattacct

SEQ ID NO: 49889 - DNA, 20 bp, Artificial Sequence
  Description of Artificial Sequence: Synthetic oligonucleotide
  Target: ATXN2; (+) strand; PAM type: NRG; PAM sequence: AAG
tacctgagactttacataaa

SEQ ID NO: 49890 - DNA, 20 bp, Artificial Sequence
  Description of Artificial Sequence: Synthetic oligonucleotide
  Target: ATXN2; (+) strand; PAM type: NRG; PAM sequence: AAG
gtttgcccatcctcacactg

SEQ ID NO: 49891 - DNA, 20 bp, Artificial Sequence
  Description of Artificial Sequence: Synthetic oligonucleotide
  Target: ATXN2; (+) strand; PAM type: NRG; PAM sequence: TAG
actgaagaaaaaaaaaaaca

SEQ ID NO: 49892 - DNA, 20 bp, Artificial Sequence
  Description of Artificial Sequence: Synthetic oligonucleotide
  Target: ATXN2; (+) strand; PAM type: NRG; PAM sequence: CAG
aaaaaaaaacatagctgcaa

SEQ ID NO: 49893 - DNA, 20 bp, Artificial Sequence
  Description of Artificial Sequence: Synthetic oligonucleotide
  Target: ATXN2; (+) strand; PAM type: NRG; PAM sequence: AAG
caatacaacaattaaaaatc

SEQ ID NO: 49894 - DNA, 20 bp, Artificial Sequence
  Description of Artificial Sequence: Synthetic oligonucleotide
  Target: ATXN2; (+) strand; PAM type: NRG; PAM sequence: CAG
tacaacaattaaaaatcaag

SEQ ID NO: 49895 - DNA, 20 bp, Artificial Sequence
  Description of Artificial Sequence: Synthetic oligonucleotide
  Target: ATXN2; (+) strand; PAM type: NRG; PAM sequence: GAG
caacaattaaaaatcaagca

SEQ ID NO: 49896 - DNA, 20 bp, Artificial Sequence
  Description of Artificial Sequence: Synthetic oligonucleotide
  Target: ATXN2; (+) strand; PAM type: NRG; PAM sequence: CAG
aattaaaaatcaagcagagc

SEQ ID NO: 49897 - DNA, 20 bp, Artificial Sequence
  Description of Artificial Sequence: Synthetic oligonucleotide
  Target: ATXN2; (+) strand; PAM type: NRG; PAM sequence: AGG
attaaaaatcaagcagagcc

SEQ ID NO: 49898 - DNA, 20 bp, Artificial Sequence
  Description of Artificial Sequence: Synthetic oligonucleotide
  Target: ATXN2; (+) strand; PAM type: NRG; PAM sequence: CAG
aaatcaagcagagccaggtg

SEQ ID NO: 49899 - DNA, 20 bp, Artificial Sequence
  Description of Artificial Sequence: Synthetic oligonucleotide
  Target: ATXN2; (+) strand; PAM type: NRG; PAM sequence: GAG
atcaagcagagccaggtgca

SEQ ID NO: 49900 - DNA, 20 bp, Artificial Sequence
  Description of Artificial Sequence: Synthetic oligonucleotide
  Target: ATXN2; (+) strand; PAM type: NRG; PAM sequence: AGG
tcaagcagagccaggtgcag

SEQ ID NO: 49901 - DNA, 20 bp, Artificial Sequence
  Description of Artificial Sequence: Synthetic oligonucleotide
  Target: ATXN2; (+) strand; PAM type: NRG; PAM sequence: CAG
cagagccaggtgcagaggtg

SEQ ID NO: 49902 - DNA, 20 bp, Artificial Sequence
  Description of Artificial Sequence: Synthetic oligonucleotide
  Target: ATXN2; (+) strand; PAM type: NRG; PAM sequence: TAG
aggtgcagaggtgcagcctg

SEQ ID NO: 49903 - DNA, 20 bp, Artificial Sequence
  Description of Artificial Sequence: Synthetic oligonucleotide
  Target: ATXN2; (+) strand; PAM type: NRG; PAM sequence: CAG
agaggtgcagcctgtagtct

SEQ ID NO: 49904 - DNA, 20 bp, Artificial Sequence
  Description of Artificial Sequence: Synthetic oligonucleotide
  Target: ATXN2; (+) strand; PAM type: NRG; PAM sequence: AAG
ctgtagtctcagctactcaa

SEQ ID NO: 49905 - DNA, 20 bp, Artificial Sequence
  Description of Artificial Sequence: Synthetic oligonucleotide
  Target: ATXN2; (+) strand; PAM type: NRG; PAM sequence: AGG
tgtagtctcagctactcaaa

SEQ ID NO: 49906 - DNA, 20 bp, Artificial Sequence
  Description of Artificial Sequence: Synthetic oligonucleotide
  Target: ATXN2; (+) strand; PAM type: NRG; PAM sequence: CAG
tctcagctactcaaaaggct

SEQ ID NO: 49907 - DNA, 20 bp, Artificial Sequence
  Description of Artificial Sequence: Synthetic oligonucleotide
  Target: ATXN2; (+) strand; PAM type: NRG; PAM sequence: AGG
ctcagctactcaaaaggctc

SEQ ID NO: 49908 - DNA, 20 bp, Artificial Sequence
  Description of Artificial Sequence: Synthetic oligonucleotide
  Target: ATXN2; (+) strand; PAM type: NRG; PAM sequence: GAG
gctactcaaaaggctcaggt

SEQ ID NO: 49909 - DNA, 20 bp, Artificial Sequence
  Description of Artificial Sequence: Synthetic oligonucleotide
  Target: ATXN2; (+) strand; PAM type: NRG; PAM sequence: GAG
tactcaaaaggctcaggtga

SEQ ID NO: 49910 - DNA, 20 bp, Artificial Sequence
  Description of Artificial Sequence: Synthetic oligonucleotide
  Target: ATXN2; (+) strand; PAM type: NRG; PAM sequence: AGG
actcaaaaggctcaggtgag

SEQ ID NO: 49911 - DNA, 20 bp, Artificial Sequence
  Description of Artificial Sequence: Synthetic oligonucleotide
  Target: ATXN2; (+) strand; PAM type: NRG; PAM sequence: GAG
ctcaggtgagaggatcgctt

SEQ ID NO: 49912 - DNA, 20 bp, Artificial Sequence
  Description of Artificial Sequence: Synthetic oligonucleotide
  Target: ATXN2; (+) strand; PAM type: NRG; PAM sequence: CAG
gtgagaggatcgcttgagcc

SEQ ID NO: 49913 - DNA, 20 bp, Artificial Sequence
  Description of Artificial Sequence: Synthetic oligonucleotide
  Target: ATXN2; (+) strand; PAM type: NRG; PAM sequence: AGG
tgagaggatcgcttgagccc

SEQ ID NO: 49914 - DNA, 20 bp, Artificial Sequence
  Description of Artificial Sequence: Synthetic oligonucleotide
  Target: ATXN2; (+) strand; PAM type: NRG; PAM sequence: AAG
tcgcttgagcccaggaatta

SEQ ID NO: 49915 - DNA, 20 bp, Artificial Sequence
  Description of Artificial Sequence: Synthetic oligonucleotide
  Target: ATXN2; (+) strand; PAM type: NRG; PAM sequence: AGG
cgcttgagcccaggaattaa

SEQ ID NO: 49916 - DNA, 20 bp, Artificial Sequence
  Description of Artificial Sequence: Synthetic oligonucleotide
  Target: ATXN2; (+) strand; PAM type: NRG; PAM sequence: CAG
tgagcccaggaattaaaggc

SEQ ID NO: 49917 - DNA, 20 bp, Artificial Sequence
  Description of Artificial Sequence: Synthetic oligonucleotide
  Target: ATXN2; (+) strand; PAM type: NRG; PAM sequence: TGG
ccaggaattaaaggccagtc

SEQ ID NO: 49918 - DNA, 20 bp, Artificial Sequence
  Description of Artificial Sequence: Synthetic oligonucleotide
  Target: ATXN2; (+) strand; PAM type: NRG; PAM sequence: GGG
caggaattaaaggccagtct

SEQ ID NO: 49919 - DNA, 20 bp, Artificial Sequence
  Description of Artificial Sequence: Synthetic oligonucleotide
  Target: ATXN2; (+) strand; PAM type: NRG; PAM sequence: AAG
gccagtctgggcaacgttac

SEQ ID NO: 49920 - DNA, 20 bp, Artificial Sequence
  Description of Artificial Sequence: Synthetic oligonucleotide
  Target: ATXN2; (+) strand; PAM type: NRG; PAM sequence: AAG
ccctgtcttttaaaaactga

SEQ ID NO: 49921 - DNA, 20 bp, Artificial Sequence
  Description of Artificial Sequence: Synthetic oligonucleotide
  Target: ATXN2; (+) strand; PAM type: NRG; PAM sequence: AAG
cttttaaaaactgaaagata

SEQ ID NO: 49922 - DNA, 20 bp, Artificial Sequence
  Description of Artificial Sequence: Synthetic oligonucleotide
  Target: ATXN2; (+) strand; PAM type: NRG; PAM sequence: CAG
gtttattattttacatgaat

SEQ ID NO: 49923 - DNA, 20 bp, Artificial Sequence
  Description of Artificial Sequence: Synthetic oligonucleotide
  Target: ATXN2; (+) strand; PAM type: NRG; PAM sequence: TGG
cagtatttactacttctgca

SEQ ID NO: 49924 - DNA, 20 bp, Artificial Sequence
  Description of Artificial Sequence: Synthetic oligonucleotide
  Target: ATXN2; (+) strand; PAM type: NRG; PAM sequence: GGG
agtatttactacttctgcat

SEQ ID NO: 49925 - DNA, 20 bp, Artificial Sequence
  Description of Artificial Sequence: Synthetic oligonucleotide
  Target: ATXN2; (+) strand; PAM type: NRG; PAM sequence: GGG
gtatttactacttctgcatg

SEQ ID NO: 49926 - DNA, 20 bp, Artificial Sequence
  Description of Artificial Sequence: Synthetic oligonucleotide
  Target: ATXN2; (+) strand; PAM type: NRG; PAM sequence: GGG
tatttactacttctgcatgg

SEQ ID NO: 49927 - DNA, 20 bp, Artificial Sequence
  Description of Artificial Sequence: Synthetic oligonucleotide
  Target: ATXN2; (+) strand; PAM type: NRG; PAM sequence: TGG
cttctgcatgggggcatttc

SEQ ID NO: 49928 - DNA, 20 bp, Artificial Sequence
  Description of Artificial Sequence: Synthetic oligonucleotide
  Target: ATXN2; (+) strand; PAM type: NRG; PAM sequence: AAG
gcatgggggcatttctggta

SEQ ID NO: 49929 - DNA, 20 bp, Artificial Sequence
  Description of Artificial Sequence: Synthetic oligonucleotide
  Target: ATXN2; (+) strand; PAM type: NRG; PAM sequence: TGG
ggggcatttctggtaaagac

SEQ ID NO: 49930 - DNA, 20 bp, Artificial Sequence
  Description of Artificial Sequence: Synthetic oligonucleotide
  Target: ATXN2; (+) strand; PAM type: NRG; PAM sequence: TAG
gtaaagactggaaaacctgc

SEQ ID NO: 49931 - DNA, 20 bp, Artificial Sequence
  Description of Artificial Sequence: Synthetic oligonucleotide
  Target: ATXN2; (+) strand; PAM type: NRG; PAM sequence: AAG
acctgctagacaaattctgt

SEQ ID NO: 49932 - DNA, 20 bp, Artificial Sequence
  Description of Artificial Sequence: Synthetic oligonucleotide
  Target: ATXN2; (+) strand; PAM type: NRG; PAM sequence: GAG
ctgctagacaaattctgtaa

SEQ ID NO: 49933 - DNA, 20 bp, Artificial Sequence
  Description of Artificial Sequence: Synthetic oligonucleotide
  Target: ATXN2; (+) strand; PAM type: NRG; PAM sequence: CAG
ctgtaagagctgcaacactc

SEQ ID NO: 49934 - DNA, 20 bp, Artificial Sequence
  Description of Artificial Sequence: Synthetic oligonucleotide
  Target: ATXN2; (+) strand; PAM type: NRG; PAM sequence: TAG
agtacttcttttctcttttg

SEQ ID NO: 49935 - DNA, 20 bp, Artificial Sequence
  Description of Artificial Sequence: Synthetic oligonucleotide
  Target: ATXN2; (+) strand; PAM type: NRG; PAM sequence: GAG
tacttcttttctcttttgta

SEQ ID NO: 49936 - DNA, 20 bp, Artificial Sequence
  Description of Artificial Sequence: Synthetic oligonucleotide
  Target: ATXN2; (+) strand; PAM type: NRG; PAM sequence: TGG
tcttttctcttttgtagaga

SEQ ID NO: 49937 - DNA, 20 bp, Artificial Sequence
  Description of Artificial Sequence: Synthetic oligonucleotide
  Target: ATXN2; (+) strand; PAM type: NRG; PAM sequence: GGG
cttttctcttttgtagagat

SEQ ID NO: 49938 - DNA, 20 bp, Artificial Sequence
  Description of Artificial Sequence: Synthetic oligonucleotide
  Target: ATXN2; (+) strand; PAM type: NRG; PAM sequence: GGG
ttttctcttttgtagagatg

SEQ ID NO: 49939 - DNA, 20 bp, Artificial Sequence
  Description of Artificial Sequence: Synthetic oligonucleotide
  Target: ATXN2; (+) strand; PAM type: NRG; PAM sequence: AAG
ggggtcgcactatattgccc

SEQ ID NO: 49940 - DNA, 20 bp, Artificial Sequence
  Description of Artificial Sequence: Synthetic oligonucleotide
  Target: ATXN2; (+) strand; PAM type: NRG; PAM sequence: TGG
tcgcactatattgcccaagc

SEQ ID NO: 49941 - DNA, 20 bp, Artificial Sequence
  Description of Artificial Sequence: Synthetic oligonucleotide
  Target: ATXN2; (+) strand; PAM type: NRG; PAM sequence: CAG
atattgcccaagctggtctc

SEQ ID NO: 49942 - DNA, 20 bp, Artificial Sequence
  Description of Artificial Sequence: Synthetic oligonucleotide
  Target: ATXN2; (+) strand; PAM type: NRG; PAM sequence: AAG
ggtctccagctcctgaactc

SEQ ID NO: 49943 - DNA, 20 bp, Artificial Sequence
  Description of Artificial Sequence: Synthetic oligonucleotide
  Target: ATXN2; (+) strand; PAM type: NRG; PAM sequence: CAG
ctcaagtgatcctcctacct

SEQ ID NO: 49944 - DNA, 20 bp, Artificial Sequence
  Description of Artificial Sequence: Synthetic oligonucleotide
  Target: ATXN2; (+) strand; PAM type: NRG; PAM sequence: AAG
cctcctacctcagcctccca

SEQ ID NO: 49945 - DNA, 20 bp, Artificial Sequence
  Description of Artificial Sequence: Synthetic oligonucleotide
  Target: ATXN2; (+) strand; PAM type: NRG; PAM sequence: TGG
acctcagcctcccaaagtgc

SEQ ID NO: 49946 - DNA, 20 bp, Artificial Sequence
  Description of Artificial Sequence: Synthetic oligonucleotide
  Target: ATXN2; (+) strand; PAM type: NRG; PAM sequence: GGG
cctcagcctcccaaagtgct

SEQ ID NO: 49947 - DNA, 20 bp, Artificial Sequence
  Description of Artificial Sequence: Synthetic oligonucleotide
  Target: ATXN2; (+) strand; PAM type: NRG; PAM sequence: CAG
ctcccaaagtgctgggatta

SEQ ID NO: 49948 - DNA, 20 bp, Artificial Sequence
  Description of Artificial Sequence: Synthetic oligonucleotide
  Target: ATXN2; (+) strand; PAM type: NRG; PAM sequence: AGG
tcccaaagtgctgggattac

SEQ ID NO: 49949 - DNA, 20 bp, Artificial Sequence
  Description of Artificial Sequence: Synthetic oligonucleotide
  Target: ATXN2; (+) strand; PAM type: NRG; PAM sequence: AAG
agtgctgggattacaggcat

SEQ ID NO: 49950 - DNA, 20 bp, Artificial Sequence
  Description of Artificial Sequence: Synthetic oligonucleotide
  Target: ATXN2; (+) strand; PAM type: NRG; PAM sequence: TAG
caggcataagacaccatgcc

SEQ ID NO: 49951 - DNA, 20 bp, Artificial Sequence
  Description of Artificial Sequence: Synthetic oligonucleotide
  Target: ATXN2; (+) strand; PAM type: NRG; PAM sequence: CAG
aagacaccatgcctagcctc

SEQ ID NO: 49952 - DNA, 20 bp, Artificial Sequence
  Description of Artificial Sequence: Synthetic oligonucleotide
  Target: ATXN2; (+) strand; PAM type: NRG; PAM sequence: TGG
gtacttctaaaataaactgc

SEQ ID NO: 49953 - DNA, 20 bp, Artificial Sequence
  Description of Artificial Sequence: Synthetic oligonucleotide
  Target: ATXN2; (+) strand; PAM type: NRG; PAM sequence: TAG
ttctaaaataaactgctgga

SEQ ID NO: 49954 - DNA, 20 bp, Artificial Sequence
  Description of Artificial Sequence: Synthetic oligonucleotide
  Target: ATXN2; (+) strand; PAM type: NRG; PAM sequence: AAG
agcattaaattattttcatg

SEQ ID NO: 49955 - DNA, 20 bp, Artificial Sequence
  Description of Artificial Sequence: Synthetic oligonucleotide
  Target: ATXN2; (+) strand; PAM type: NRG; PAM sequence: AAG
atgaagttttatgtacatat

SEQ ID NO: 49956 - DNA, 20 bp, Artificial Sequence
  Description of Artificial Sequence: Synthetic oligonucleotide
  Target: ATXN2; (+) strand; PAM type: NRG; PAM sequence: AAG
atgtccccatattctccttt

SEQ ID NO: 49957 - DNA, 20 bp, Artificial Sequence
  Description of Artificial Sequence: Synthetic oligonucleotide
  Target: ATXN2; (+) strand; PAM type: NRG; PAM sequence: GAG
aatgctttatattaaaattt

SEQ ID NO: 49958 - DNA, 20 bp, Artificial Sequence
  Description of Artificial Sequence: Synthetic oligonucleotide
  Target: ATXN2; (+) strand; PAM type: NRG; PAM sequence: AGG
atgctttatattaaaatttg

SEQ ID NO: 49959 - DNA, 20 bp, Artificial Sequence
  Description of Artificial Sequence: Synthetic oligonucleotide
  Target: ATXN2; (+) strand; PAM type: NRG; PAM sequence: TAG
aaaaaaaaaacgtattttac

SEQ ID NO: 49960 - DNA, 20 bp, Artificial Sequence
  Description of Artificial Sequence: Synthetic oligonucleotide
  Target: ATXN2; (+) strand; PAM type: NRG; PAM sequence: TGG
ttttactagtgtacatgtga

SEQ ID NO: 49961 - DNA, 20 bp, Artificial Sequence
  Description of Artificial Sequence: Synthetic oligonucleotide
  Target: ATXN2; (+) strand; PAM type: NRG; PAM sequence: CAG
ctttgctttattgaaattca

SEQ ID NO: 49962 - DNA, 20 bp, Artificial Sequence
  Description of Artificial Sequence: Synthetic oligonucleotide
  Target: ATXN2; (+) strand; PAM type: NRG; PAM sequence: AAG
acagatgctgcatttttgac

SEQ ID NO: 49963 - DNA, 20 bp, Artificial Sequence
  Description of Artificial Sequence: Synthetic oligonucleotide
  Target: ATXN2; (+) strand; PAM type: NRG; PAM sequence: TGG
tttgacaagctgaccgtctg

SEQ ID NO: 49964 - DNA, 20 bp, Artificial Sequence
  Description of Artificial Sequence: Synthetic oligonucleotide
  Target: ATXN2; (+) strand; PAM type: NRG; PAM sequence: GAG
tgaccgtctgtggaaacccc

SEQ ID NO: 49965 - DNA, 20 bp, Artificial Sequence
  Description of Artificial Sequence: Synthetic oligonucleotide
  Target: ATXN2; (+) strand; PAM type: NRG; PAM sequence: CGG
cgtctgtggaaaccccgagt

SEQ ID NO: 49966 - DNA, 20 bp, Artificial Sequence
  Description of Artificial Sequence: Synthetic oligonucleotide
  Target: ATXN2; (+) strand; PAM type: NRG; PAM sequence: GGG
gtctgtggaaaccccgagtc

SEQ ID NO: 49967 - DNA, 20 bp, Artificial Sequence
  Description of Artificial Sequence: Synthetic oligonucleotide
  Target: ATXN2; (+) strand; PAM type: NRG; PAM sequence: AAG
gtggaaaccccgagtcgggc

SEQ ID NO: 49968 - DNA, 20 bp, Artificial Sequence
  Description of Artificial Sequence: Synthetic oligonucleotide
  Target: ATXN2; (+) strand; PAM type: NRG; PAM sequence: TAG
cccgagtcgggcaagtccat

SEQ ID NO: 49969 - DNA, 20 bp, Artificial Sequence
  Description of Artificial Sequence: Synthetic oligonucleotide
  Target: ATXN2; (+) strand; PAM type: NRG; PAM sequence: CAG
gtccattagtgccgtatttc

SEQ ID NO: 49970 - DNA, 20 bp, Artificial Sequence
  Description of Artificial Sequence: Synthetic oligonucleotide
  Target: ATXN2; (+) strand; PAM type: NRG; PAM sequence: TAG
cactattattgtatacgtta

SEQ ID NO: 49971 - DNA, 20 bp, Artificial Sequence
  Description of Artificial Sequence: Synthetic oligonucleotide
  Target: ATXN2; (+) strand; PAM type: NRG; PAM sequence: CAG
acgttatagtaatctgtaat

SEQ ID NO: 49972 - DNA, 20 bp, Artificial Sequence
  Description of Artificial Sequence: Synthetic oligonucleotide
  Target: ATXN2; (+) strand; PAM type: NRG; PAM sequence: AAG
tacaataattgtaaataata

SEQ ID NO: 49973 - DNA, 20 bp, Artificial Sequence
  Description of Artificial Sequence: Synthetic oligonucleotide
  Target: ATXN2; (+) strand; PAM type: NRG; PAM sequence: AAG
taattgtaaataataaagaa

SEQ ID NO: 49974 - DNA, 20 bp, Artificial Sequence
  Description of Artificial Sequence: Synthetic oligonucleotide
  Target: ATXN2; (+) strand; PAM type: NRG; PAM sequence: TAG
aattattattgtatctgtta

SEQ ID NO: 49975 - DNA, 20 bp, Artificial Sequence
  Description of Artificial Sequence: Synthetic oligonucleotide
  Target: ATXN2; (+) strand; PAM type: NRG; PAM sequence: CAG
ctgttatagtaatctgtaat

SEQ ID NO: 49976 - DNA, 20 bp, Artificial Sequence
  Description of Artificial Sequence: Synthetic oligonucleotide
  Target: ATXN2; (+) strand; PAM type: NRG; PAM sequence: AAG
atgttaccctgatttctttt

SEQ ID NO: 49977 - DNA, 20 bp, Artificial Sequence
  Description of Artificial Sequence: Synthetic oligonucleotide
  Target: ATXN2; (+) strand; PAM type: NRG; PAM sequence: AGG
tgttaccctgatttctttta

SEQ ID NO: 49978 - DNA, 20 bp, Artificial Sequence
  Description of Artificial Sequence: Synthetic oligonucleotide
  Target: ATXN2; (+) strand; PAM type: NRG; PAM sequence: CGG
ttcttttaaggcaccacaaa

SEQ ID NO: 49979 - DNA, 20 bp, Artificial Sequence
  Description of Artificial Sequence: Synthetic oligonucleotide
  Target: ATXN2; (+) strand; PAM type: NRG; PAM sequence: AAG
gcaccacaaacggtccatat

SEQ ID NO: 49980 - DNA, 20 bp, Artificial Sequence
  Description of Artificial Sequence: Synthetic oligonucleotide
  Target: ATXN2; (+) strand; PAM type: NRG; PAM sequence: CAG
cacaaacggtccatataaga

SEQ ID NO: 49981 - DNA, 20 bp, Artificial Sequence
  Description of Artificial Sequence: Synthetic oligonucleotide
  Target: ATXN2; (+) strand; PAM type: NRG; PAM sequence: CAG
gttatgactactccacgaac

SEQ ID NO: 49982 - DNA, 20 bp, Artificial Sequence
  Description of Artificial Sequence: Synthetic oligonucleotide
  Target: ATXN2; (+) strand; PAM type: NRG; PAM sequence: CAG
atgactactccacgaaccag

SEQ ID NO: 49983 - DNA, 20 bp, Artificial Sequence
  Description of Artificial Sequence: Synthetic oligonucleotide
  Target: ATXN2; (+) strand; PAM type: NRG; PAM sequence: CAG
ctactccacgaaccagcagt

SEQ ID NO: 49984 - DNA, 20 bp, Artificial Sequence
  Description of Artificial Sequence: Synthetic oligonucleotide
  Target: ATXN2; (+) strand; PAM type: NRG; PAM sequence: GAG
ctcgtgcctctctattccct

SEQ ID NO: 49985 - DNA, 20 bp, Artificial Sequence
  Description of Artificial Sequence: Synthetic oligonucleotide
  Target: ATXN2; (+) strand; PAM type: NRG; PAM sequence: TAG
agatataacaatattgaaat

SEQ ID NO: 49986 - DNA, 20 bp, Artificial Sequence
  Description of Artificial Sequence: Synthetic oligonucleotide
  Target: ATXN2; (+) strand; PAM type: NRG; PAM sequence: AGG
gatataacaatattgaaatt

SEQ ID NO: 49987 - DNA, 20 bp, Artificial Sequence
  Description of Artificial Sequence: Synthetic oligonucleotide
  Target: ATXN2; (+) strand; PAM type: NRG; PAM sequence: TAG
aatattgaaattaggccaat

SEQ ID NO: 49988 - DNA, 20 bp, Artificial Sequence
  Description of Artificial Sequence: Synthetic oligonucleotide
  Target: ATXN2; (+) strand; PAM type: NRG; PAM sequence: AGG
atattgaaattaggccaatt

SEQ ID NO: 49989 - DNA, 20 bp, Artificial Sequence
  Description of Artificial Sequence: Synthetic oligonucleotide
  Target: ATXN2; (+) strand; PAM type: NRG; PAM sequence: CAG
tgaaattaggccaattaggc

SEQ ID NO: 49990 - DNA, 20 bp, Artificial Sequence
  Description of Artificial Sequence: Synthetic oligonucleotide
  Target: ATXN2; (+) strand; PAM type: NRG; PAM sequence: AGG
gaaattaggccaattaggcc

SEQ ID NO: 49991 - DNA, 20 bp, Artificial Sequence
  Description of Artificial Sequence: Synthetic oligonucleotide
  Target: ATXN2; (+) strand; PAM type: NRG; PAM sequence: TAG
taggccaattaggccaggca

SEQ ID NO: 49992 - DNA, 20 bp, Artificial Sequence
  Description of Artificial Sequence: Synthetic oligonucleotide
  Target: ATXN2; (+) strand; PAM type: NRG; PAM sequence: TGG
gccaattaggccaggcatag

SEQ ID NO: 49993 - DNA, 20 bp, Artificial Sequence
  Description of Artificial Sequence: Synthetic oligonucleotide
  Target: ATXN2; (+) strand; PAM type: NRG; PAM sequence: CAG
gtggctcacacctacaatcc

SEQ ID NO: 49994 - DNA, 20 bp, Artificial Sequence
  Description of Artificial Sequence: Synthetic oligonucleotide
  Target: ATXN2; (+) strand; PAM type: NRG; PAM sequence: TGG
cacctacaatcccagcactt

SEQ ID NO: 49995 - DNA, 20 bp, Artificial Sequence
  Description of Artificial Sequence: Synthetic oligonucleotide
  Target: ATXN2; (+) strand; PAM type: NRG; PAM sequence: GGG
acctacaatcccagcacttt

SEQ ID NO: 49996 - DNA, 20 bp, Artificial Sequence
  Description of Artificial Sequence: Synthetic oligonucleotide
  Target: ATXN2; (+) strand; PAM type: NRG; PAM sequence: GAG
ctacaatcccagcactttgg

SEQ ID NO: 49997 - DNA, 20 bp, Artificial Sequence
  Description of Artificial Sequence: Synthetic oligonucleotide
  Target: ATXN2; (+) strand; PAM type: NRG; PAM sequence: AGG
tacaatcccagcactttggg

SEQ ID NO: 49998 - DNA, 20 bp, Artificial Sequence
  Description of Artificial Sequence: Synthetic oligonucleotide
  Target: ATXN2; (+) strand; PAM type: NRG; PAM sequence: AAG
tcccagcactttgggaggcc

SEQ ID NO: 49999 - DNA, 20 bp, Artificial Sequence
  Description of Artificial Sequence: Synthetic oligonucleotide
  Target: ATXN2; (+) strand; PAM type: NRG; PAM sequence: AGG
cccagcactttgggaggcca

SEQ ID NO: 50000 - DNA, 20 bp, Artificial Sequence
  Description of Artificial Sequence: Synthetic oligonucleotide
  Target: ATXN2; (+) strand; PAM type: NRG; PAM sequence: CAG
agcactttgggaggccaagg

SEQ ID NO: 50001 - DNA, 20 bp, Artificial Sequence
  Description of Artificial Sequence: Synthetic oligonucleotide
  Target: ATXN2; (+) strand; PAM type: NRG; PAM sequence: AGG
gcactttgggaggccaaggc

SEQ ID NO: 50002 - DNA, 20 bp, Artificial Sequence
  Description of Artificial Sequence: Synthetic oligonucleotide
  Target: ATXN2; (+) strand; PAM type: NRG; PAM sequence: TGG
ctttgggaggccaaggcagg

SEQ ID NO: 50003 - DNA, 20 bp, Artificial Sequence
  Description of Artificial Sequence: Synthetic oligonucleotide
  Target: ATXN2; (+) strand; PAM type: NRG; PAM sequence: AAG
caaggcaggtggatcacttg

SEQ ID NO: 50004 - DNA, 20 bp, Artificial Sequence
  Description of Artificial Sequence: Synthetic oligonucleotide
  Target: ATXN2; (+) strand; PAM type: NRG; PAM sequence: CAG
gcaggtggatcacttgaagc

SEQ ID NO: 50005 - DNA, 20 bp, Artificial Sequence
  Description of Artificial Sequence: Synthetic oligonucleotide
  Target: ATXN2; (+) strand; PAM type: NRG; PAM sequence: AGG
caggtggatcacttgaagcc

SEQ ID NO: 50006 - DNA, 20 bp, Artificial Sequence
  Description of Artificial Sequence: Synthetic oligonucleotide
  Target: ATXN2; (+) strand; PAM type: NRG; PAM sequence: GAG
ggtggatcacttgaagccag

SEQ ID NO: 50007 - DNA, 20 bp, Artificial Sequence
  Description of Artificial Sequence: Synthetic oligonucleotide
  Target: ATXN2; (+) strand; PAM type: NRG; PAM sequence: GAG
tcacttgaagccaggagttc

SEQ ID NO: 50008 - DNA, 20 bp, Artificial Sequence
  Description of Artificial Sequence: Synthetic oligonucleotide
  Target: ATXN2; (+) strand; PAM type: NRG; PAM sequence: CAG
tgaagccaggagttcgagcc

SEQ ID NO: 50009 - DNA, 20 bp, Artificial Sequence
  Description of Artificial Sequence: Synthetic oligonucleotide
  Target: ATXN2; (+) strand; PAM type: NRG; PAM sequence: TGG
ccaggagttcgagcccagcc

SEQ ID NO: 50010 - DNA, 20 bp, Artificial Sequence
  Description of Artificial Sequence: Synthetic oligonucleotide
  Target: ATXN2; (+) strand; PAM type: NRG; PAM sequence: TAG
tctactaaaaatacaaaaat

SEQ ID NO: 50011 - DNA, 20 bp, Artificial Sequence
  Description of Artificial Sequence: Synthetic oligonucleotide
  Target: ATXN2; (+) strand; PAM type: NRG; PAM sequence: CAG
ctaaaaatacaaaaattagc

SEQ ID NO: 50012 - DNA, 20 bp, Artificial Sequence
  Description of Artificial Sequence: Synthetic oligonucleotide
  Target: ATXN2; (+) strand; PAM type: NRG; PAM sequence: TGG
atacaaaaattagccagacg

SEQ ID NO: 50013 - DNA, 20 bp, Artificial Sequence
  Description of Artificial Sequence: Synthetic oligonucleotide
  Target: ATXN2; (+) strand; PAM type: NRG; PAM sequence: TGG
caaaaattagccagacgtgg

SEQ ID NO: 50014 - DNA, 20 bp, Artificial Sequence
  Description of Artificial Sequence: Synthetic oligonucleotide
  Target: ATXN2; (+) strand; PAM type: NRG; PAM sequence: TGG
aaattagccagacgtggtgg

SEQ ID NO: 50015 - DNA, 20 bp, Artificial Sequence
  Description of Artificial Sequence: Synthetic oligonucleotide
  Target: ATXN2; (+) strand; PAM type: NRG; PAM sequence: GGG
aattagccagacgtggtggt

SEQ ID NO: 50016 - DNA, 20 bp, Artificial Sequence
  Description of Artificial Sequence: Synthetic oligonucleotide
  Target: ATXN2; (+) strand; PAM type: NRG; PAM sequence: CAG
gtggtgggcgcctgtaatcc

SEQ ID NO: 50017 - DNA, 20 bp, Artificial Sequence
  Description of Artificial Sequence: Synthetic oligonucleotide
  Target: ATXN2; (+) strand; PAM type: NRG; PAM sequence: CAG
cgcctgtaatcccagctact

SEQ ID NO: 50018 - DNA, 20 bp, Artificial Sequence
  Description of Artificial Sequence: Synthetic oligonucleotide
  Target: ATXN2; (+) strand; PAM type: NRG; PAM sequence: AAG
tgtaatcccagctactcagt

SEQ ID NO: 50019 - DNA, 20 bp, Artificial Sequence
  Description of Artificial Sequence: Synthetic oligonucleotide
  Target: ATXN2; (+) strand; PAM type: NRG; PAM sequence: GAG
tcccagctactcagtaagct

SEQ ID NO: 50020 - DNA, 20 bp, Artificial Sequence
  Description of Artificial Sequence: Synthetic oligonucleotide
  Target: ATXN2; (+) strand; PAM type: NRG; PAM sequence: AGG
cccagctactcagtaagctg

SEQ ID NO: 50021 - DNA, 20 bp, Artificial Sequence
  Description of Artificial Sequence: Synthetic oligonucleotide
  Target: ATXN2; (+) strand; PAM type: NRG; PAM sequence: GAG
tactcagtaagctgaggcac

SEQ ID NO: 50022 - DNA, 20 bp, Artificial Sequence
  Description of Artificial Sequence: Synthetic oligonucleotide
  Target: ATXN2; (+) strand; PAM type: NRG; PAM sequence: CAG
cacgagaattgcttgaacct

SEQ ID NO: 50023 - DNA, 20 bp, Artificial Sequence
  Description of Artificial Sequence: Synthetic oligonucleotide
  Target: ATXN2; (+) strand; PAM type: NRG; PAM sequence: GAG
cgagaattgcttgaacctca

SEQ ID NO: 50024 - DNA, 20 bp, Artificial Sequence
  Description of Artificial Sequence: Synthetic oligonucleotide
  Target: ATXN2; (+) strand; PAM type: NRG; PAM sequence: TAG
ttgcttgaacctcagagttg

SEQ ID NO: 50025 - DNA, 20 bp, Artificial Sequence
  Description of Artificial Sequence: Synthetic oligonucleotide
  Target: ATXN2; (+) strand; PAM type: NRG; PAM sequence: AGG
tgcttgaacctcagagttgt

SEQ ID NO: 50026 - DNA, 20 bp, Artificial Sequence
  Description of Artificial Sequence: Synthetic oligonucleotide
  Target: ATXN2; (+) strand; PAM type: NRG; PAM sequence: GAG
tcagagttgtaggatgcact

SEQ ID NO: 50027 - DNA, 20 bp, Artificial Sequence
  Description of Artificial Sequence: Synthetic oligonucleotide
  Target: ATXN2; (+) strand; PAM type: NRG; PAM sequence: GAG
gttgtaggatgcactgagct

SEQ ID NO: 50028 - DNA, 20 bp, Artificial Sequence
  Description of Artificial Sequence: Synthetic oligonucleotide
  Target: ATXN2; (+) strand; PAM type: NRG; PAM sequence: TGG
catgccactgcactccacgc

SEQ ID NO: 50029 - DNA, 20 bp, Artificial Sequence
  Description of Artificial Sequence: Synthetic oligonucleotide
  Target: ATXN2; (+) strand; PAM type: NRG; PAM sequence: GGG
atgccactgcactccacgct

SEQ ID NO: 50030 - DNA, 20 bp, Artificial Sequence
  Description of Artificial Sequence: Synthetic oligonucleotide
  Target: ATXN2; (+) strand; PAM type: NRG; PAM sequence: CAG
ctgcactccacgctgggaaa

SEQ ID NO: 50031 - DNA, 20 bp, Artificial Sequence
  Description of Artificial Sequence: Synthetic oligonucleotide
  Target: ATXN2; (+) strand; PAM type: NRG; PAM sequence: GAG
gcactccacgctgggaaaca

SEQ ID NO: 50032 - DNA, 20 bp, Artificial Sequence
  Description of Artificial Sequence: Synthetic oligonucleotide
  Target: ATXN2; (+) strand; PAM type: NRG; PAM sequence: GAG
tccacgctgggaaacagagt

SEQ ID NO: 50033 - DNA, 20 bp, Artificial Sequence
  Description of Artificial Sequence: Synthetic oligonucleotide
  Target: ATXN2; (+) strand; PAM type: NRG; PAM sequence: AAG
aattacttctcattgacaaa

SEQ ID NO: 50034 - DNA, 20 bp, Artificial Sequence
  Description of Artificial Sequence: Synthetic oligonucleotide
  Target: ATXN2; (+) strand; PAM type: NRG; PAM sequence: TGG
tcattgacaaaaagctatga

SEQ ID NO: 50035 - DNA, 20 bp, Artificial Sequence
  Description of Artificial Sequence: Synthetic oligonucleotide
  Target: ATXN2; (+) strand; PAM type: NRG; PAM sequence: GGG
cattgacaaaaagctatgat

SEQ ID NO: 50036 - DNA, 20 bp, Artificial Sequence
  Description of Artificial Sequence: Synthetic oligonucleotide
  Target: ATXN2; (+) strand; PAM type: NRG; PAM sequence: AAG
aagctatgatgggaatgtac

SEQ ID NO: 50037 - DNA, 20 bp, Artificial Sequence
  Description of Artificial Sequence: Synthetic oligonucleotide
  Target: ATXN2; (+) strand; PAM type: NRG; PAM sequence: AGG
agctatgatgggaatgtaca

SEQ ID NO: 50038 - DNA, 20 bp, Artificial Sequence
  Description of Artificial Sequence: Synthetic oligonucleotide
  Target: ATXN2; (+) strand; PAM type: NRG; PAM sequence: AAG
gttttcataactgctaacac

SEQ ID NO: 50039 - DNA, 20 bp, Artificial Sequence
  Description of Artificial Sequence: Synthetic oligonucleotide
  Target: ATXN2; (+) strand; PAM type: NRG; PAM sequence: CAG
ataactgctaacacaagaat

SEQ ID NO: 50040 - DNA, 20 bp, Artificial Sequence
  Description of Artificial Sequence: Synthetic oligonucleotide
  Target: ATXN2; (+) strand; PAM type: NRG; PAM sequence: TAG
ctaacacaagaatcagtcca

SEQ ID NO: 50041 - DNA, 20 bp, Artificial Sequence
  Description of Artificial Sequence: Synthetic oligonucleotide
  Target: ATXN2; (+) strand; PAM type: NRG; PAM sequence: CAG
acaagaatcagtccatagcc

SEQ ID NO: 50042 - DNA, 20 bp, Artificial Sequence
  Description of Artificial Sequence: Synthetic oligonucleotide
  Target: ATXN2; (+) strand; PAM type: NRG; PAM sequence: AGG
caagaatcagtccatagccc

SEQ ID NO: 50043 - DNA, 20 bp, Artificial Sequence
  Description of Artificial Sequence: Synthetic oligonucleotide
  Target: ATXN2; (+) strand; PAM type: NRG; PAM sequence: GGG
aagaatcagtccatagccca

SEQ ID NO: 50044 - DNA, 20 bp, Artificial Sequence
  Description of Artificial Sequence: Synthetic oligonucleotide
  Target: ATXN2; (+) strand; PAM type: NRG; PAM sequence: AAG
cagtccatagcccagggatc

SEQ ID NO: 50045 - DNA, 20 bp, Artificial Sequence
  Description of Artificial Sequence: Synthetic oligonucleotide
  Target: ATXN2; (+) strand; PAM type: NRG; PAM sequence: AGG
agtccatagcccagggatca

SEQ ID NO: 50046 - DNA, 20 bp, Artificial Sequence
  Description of Artificial Sequence: Synthetic oligonucleotide
  Target: ATXN2; (+) strand; PAM type: NRG; PAM sequence: GGG
gtccatagcccagggatcaa

SEQ ID NO: 50047 - DNA, 20 bp, Artificial Sequence
  Description of Artificial Sequence: Synthetic oligonucleotide
  Target: ATXN2; (+) strand; PAM type: NRG; PAM sequence: AAG
aagggataattttgacgttt

SEQ ID NO: 50048 - DNA, 20 bp, Artificial Sequence
  Description of Artificial Sequence: Synthetic oligonucleotide
  Target: ATXN2; (+) strand; PAM type: NRG; PAM sequence: AAG
acgtttaagccattttattt

SEQ ID NO: 50049 - DNA, 20 bp, Artificial Sequence
  Description of Artificial Sequence: Synthetic oligonucleotide
  Target: ATXN2; (+) strand; PAM type: NRG; PAM sequence: CGG
gccattttatttaagaaata

SEQ ID NO: 50050 - DNA, 20 bp, Artificial Sequence
  Description of Artificial Sequence: Synthetic oligonucleotide
  Target: ATXN2; (+) strand; PAM type: NRG; PAM sequence: CGG
ttttatttaagaaatacggc

SEQ ID NO: 50051 - DNA, 20 bp, Artificial Sequence
  Description of Artificial Sequence: Synthetic oligonucleotide
  Target: ATXN2; (+) strand; PAM type: NRG; PAM sequence: GGG
tttatttaagaaatacggcc

SEQ ID NO: 50052 - DNA, 20 bp, Artificial Sequence
  Description of Artificial Sequence: Synthetic oligonucleotide
  Target: ATXN2; (+) strand; PAM type: NRG; PAM sequence: CGG
ttaagaaatacggccgggcg

SEQ ID NO: 50053 - DNA, 20 bp, Artificial Sequence
  Description of Artificial Sequence: Synthetic oligonucleotide
  Target: ATXN2; (+) strand; PAM type: NRG; PAM sequence: TGG
agaaatacggccgggcgcgg

SEQ ID NO: 50054 - DNA, 20 bp, Artificial Sequence
  Description of Artificial Sequence: Synthetic oligonucleotide
  Target: ATXN2; (+) strand; PAM type: NRG; PAM sequence: CGG
cgcctgtaatctcaacactt

SEQ ID NO: 50055 - DNA, 20 bp, Artificial Sequence
  Description of Artificial Sequence: Synthetic oligonucleotide
  Target: ATXN2; (+) strand; PAM type: NRG; PAM sequence: AAG
ctgtaatctcaacacttcgg

SEQ ID NO: 50056 - DNA, 20 bp, Artificial Sequence
  Description of Artificial Sequence: Synthetic oligonucleotide
  Target: ATXN2; (+) strand; PAM type: NRG; PAM sequence: AGG
tgtaatctcaacacttcgga

SEQ ID NO: 50057 - DNA, 20 bp, Artificial Sequence
  Description of Artificial Sequence: Synthetic oligonucleotide
  Target: ATXN2; (+) strand; PAM type: NRG; PAM sequence: GAG
tctcaacacttcggaaggcc

SEQ ID NO: 50058 - DNA, 20 bp, Artificial Sequence
  Description of Artificial Sequence: Synthetic oligonucleotide
  Target: ATXN2; (+) strand; PAM type: NRG; PAM sequence: AGG
ctcaacacttcggaaggccg

SEQ ID NO: 50059 - DNA, 20 bp, Artificial Sequence
  Description of Artificial Sequence: Synthetic oligonucleotide
  Target: ATXN2; (+) strand; PAM type: NRG; PAM sequence: CAG
aacacttcggaaggccgagg

SEQ ID NO: 50060 - DNA, 20 bp, Artificial Sequence
  Description of Artificial Sequence: Synthetic oligonucleotide
  Target: ATXN2; (+) strand; PAM type: NRG; PAM sequence: AGG
acacttcggaaggccgaggc

SEQ ID NO: 50061 - DNA, 20 bp, Artificial Sequence
  Description of Artificial Sequence: Synthetic oligonucleotide
  Target: ATXN2; (+) strand; PAM type: NRG; PAM sequence: CAG
cttcggaaggccgaggcagg

SEQ ID NO: 50062 - DNA, 20 bp, Artificial Sequence
  Description of Artificial Sequence: Synthetic oligonucleotide
  Target: ATXN2; (+) strand; PAM type: NRG; PAM sequence: GAG
ccgaggcaggcagatcacct

SEQ ID NO: 50063 - DNA, 20 bp, Artificial Sequence
  Description of Artificial Sequence: Synthetic oligonucleotide
  Target: ATXN2; (+) strand; PAM type: NRG; PAM sequence: CGG
gcaggcagatcacctgagat

SEQ ID NO: 50064 - DNA, 20 bp, Artificial Sequence
  Description of Artificial Sequence: Synthetic oligonucleotide
  Target: ATXN2; (+) strand; PAM type: NRG; PAM sequence: GGG
caggcagatcacctgagatc

SEQ ID NO: 50065 - DNA, 20 bp, Artificial Sequence
  Description of Artificial Sequence: Synthetic oligonucleotide
  Target: ATXN2; (+) strand; PAM type: NRG; PAM sequence: GAG
ggcagatcacctgagatcgg

SEQ ID NO: 50066 - DNA, 20 bp, Artificial Sequence
  Description of Artificial Sequence: Synthetic oligonucleotide
  Target: ATXN2; (+) strand; PAM type: NRG; PAM sequence: AAG
tcacctgagatcgggagttc

SEQ ID NO: 50067 - DNA, 20 bp, Artificial Sequence
  Description of Artificial Sequence: Synthetic oligonucleotide
  Target: ATXN2; (+) strand; PAM type: NRG; PAM sequence: CAG
tgagatcgggagttcaagac

SEQ ID NO: 50068 - DNA, 20 bp, Artificial Sequence
  Description of Artificial Sequence: Synthetic oligonucleotide
  Target: ATXN2; (+) strand; PAM type: NRG; PAM sequence: TGG
caagaccagcctgaccaaca

SEQ ID NO: 50069 - DNA, 20 bp, Artificial Sequence
  Description of Artificial Sequence: Synthetic oligonucleotide
  Target: ATXN2; (+) strand; PAM type: NRG; PAM sequence: GAG
agaccagcctgaccaacatg

SEQ ID NO: 50070 - DNA, 20 bp, Artificial Sequence
  Description of Artificial Sequence: Synthetic oligonucleotide
  Target: ATXN2; (+) strand; PAM type: NRG; PAM sequence: TAG
ctctactaaaaatacaaaat

SEQ ID NO: 50071 - DNA, 20 bp, Artificial Sequence
  Description of Artificial Sequence: Synthetic oligonucleotide
  Target: ATXN2; (+) strand; PAM type: NRG; PAM sequence: AGG
tctactaaaaatacaaaatt

SEQ ID NO: 50072 - DNA, 20 bp, Artificial Sequence
  Description of Artificial Sequence: Synthetic oligonucleotide
  Target: ATXN2; (+) strand; PAM type: NRG; PAM sequence: TGG
actaaaaatacaaaattagg

SEQ ID NO: 50073 - DNA, 20 bp, Artificial Sequence
  Description of Artificial Sequence: Synthetic oligonucleotide
  Target: ATXN2; (+) strand; PAM type: NRG; PAM sequence: GGG
ctaaaaatacaaaattaggt

SEQ ID NO: 50074 - DNA, 20 bp, Artificial Sequence
  Description of Artificial Sequence: Synthetic oligonucleotide
  Target: ATXN2; (+) strand; PAM type: NRG; PAM sequence: TGG
aatacaaaattaggtgggca

SEQ ID NO: 50075 - DNA, 20 bp, Artificial Sequence
  Description of Artificial Sequence: Synthetic oligonucleotide
  Target: ATXN2; (+) strand; PAM type: NRG; PAM sequence: TGG
acaaaattaggtgggcatgg

SEQ ID NO: 50076 - DNA, 20 bp, Artificial Sequence
  Description of Artificial Sequence: Synthetic oligonucleotide
  Target: ATXN2; (+) strand; PAM type: NRG; PAM sequence: CAG
gtggtgcatgcctgtaatcc

SEQ ID NO: 50077 - DNA, 20 bp, Artificial Sequence
  Description of Artificial Sequence: Synthetic oligonucleotide
  Target: ATXN2; (+) strand; PAM type: NRG; PAM sequence: CAG
tgcctgtaatcccagctact

SEQ ID NO: 50078 - DNA, 20 bp, Artificial Sequence
  Description of Artificial Sequence: Synthetic oligonucleotide
  Target: ATXN2; (+) strand; PAM type: NRG; PAM sequence: AGG
gcctgtaatcccagctactc

SEQ ID NO: 50079 - DNA, 20 bp, Artificial Sequence
  Description of Artificial Sequence: Synthetic oligonucleotide
  Target: ATXN2; (+) strand; PAM type: NRG; PAM sequence: GAG
ctgtaatcccagctactcag

SEQ ID NO: 50080 - DNA, 20 bp, Artificial Sequence
  Description of Artificial Sequence: Synthetic oligonucleotide
  Target: ATXN2; (+) strand; PAM type: NRG; PAM sequence: AGG
tgtaatcccagctactcagg

SEQ ID NO: 50081 - DNA, 20 bp, Artificial Sequence
  Description of Artificial Sequence: Synthetic oligonucleotide
  Target: ATXN2; (+) strand; PAM type: NRG; PAM sequence: GAG
tcccagctactcaggaggct

SEQ ID NO: 50082 - DNA, 20 bp, Artificial Sequence
  Description of Artificial Sequence: Synthetic oligonucleotide
  Target: ATXN2; (+) strand; PAM type: NRG; PAM sequence: AGG
cccagctactcaggaggctg

SEQ ID NO: 50083 - DNA, 20 bp, Artificial Sequence
  Description of Artificial Sequence: Synthetic oligonucleotide
  Target: ATXN2; (+) strand; PAM type: NRG; PAM sequence: CAG
agctactcaggaggctgagg

SEQ ID NO: 50084 - DNA, 20 bp, Artificial Sequence
  Description of Artificial Sequence: Synthetic oligonucleotide
  Target: ATXN2; (+) strand; PAM type: NRG; PAM sequence: AGG
gctactcaggaggctgaggc

SEQ ID NO: 50085 - DNA, 20 bp, Artificial Sequence
  Description of Artificial Sequence: Synthetic oligonucleotide
  Target: ATXN2; (+) strand; PAM type: NRG; PAM sequence: GAG
tactcaggaggctgaggcag

SEQ ID NO: 50086 - DNA, 20 bp, Artificial Sequence
  Description of Artificial Sequence: Synthetic oligonucleotide
  Target: ATXN2; (+) strand; PAM type: NRG; PAM sequence: CGG
gcaggagaattgcttgaacc

SEQ ID NO: 50087 - DNA, 20 bp, Artificial Sequence
  Description of Artificial Sequence: Synthetic oligonucleotide
  Target: ATXN2; (+) strand; PAM type: NRG; PAM sequence: GGG
caggagaattgcttgaaccc

SEQ ID NO: 50088 - DNA, 20 bp, Artificial Sequence
  Description of Artificial Sequence: Synthetic oligonucleotide
  Target: ATXN2; (+) strand; PAM type: NRG; PAM sequence: GAG
ggagaattgcttgaacccgg

SEQ ID NO: 50089 - DNA, 20 bp, Artificial Sequence
  Description of Artificial Sequence: Synthetic oligonucleotide
  Target: ATXN2; (+) strand; PAM type: NRG; PAM sequence: AGG
gagaattgcttgaacccggg

SEQ ID NO: 50090 - DNA, 20 bp, Artificial Sequence
  Description of Artificial Sequence: Synthetic oligonucleotide
  Target: ATXN2; (+) strand; PAM type: NRG; PAM sequence: CGG
aattgcttgaacccgggagg

SEQ ID NO: 50091 - DNA, 20 bp, Artificial Sequence
  Description of Artificial Sequence: Synthetic oligonucleotide
  Target: ATXN2; (+) strand; PAM type: NRG; PAM sequence: GAG
ttgcttgaacccgggaggcg

SEQ ID NO: 50092 - DNA, 20 bp, Artificial Sequence
  Description of Artificial Sequence: Synthetic oligonucleotide
  Target: ATXN2; (+) strand; PAM type: NRG; PAM sequence: AGG
tgcttgaacccgggaggcgg

SEQ ID NO: 50093 - DNA, 20 bp, Artificial Sequence
  Description of Artificial Sequence: Synthetic oligonucleotide
  Target: ATXN2; (+) strand; PAM type: NRG; PAM sequence: CGG
aacccgggaggcggaggttg

SEQ ID NO: 50094 - DNA, 20 bp, Artificial Sequence
  Description of Artificial Sequence: Synthetic oligonucleotide
  Target: ATXN2; (+) strand; PAM type: NRG; PAM sequence: GAG
cgggaggcggaggttgcggt

SEQ ID NO: 50095 - DNA, 20 bp, Artificial Sequence
  Description of Artificial Sequence: Synthetic oligonucleotide
  Target: ATXN2; (+) strand; PAM type: NRG; PAM sequence: GAG
ggcggaggttgcggtgagcc

SEQ ID NO: 50096 - DNA, 20 bp, Artificial Sequence
  Description of Artificial Sequence: Synthetic oligonucleotide
  Target: ATXN2; (+) strand; PAM type: NRG; PAM sequence: TAG
gaggttgcggtgagccgaga

SEQ ID NO: 50097 - DNA, 20 bp, Artificial Sequence
  Description of Artificial Sequence: Synthetic oligonucleotide
  Target: ATXN2; (+) strand; PAM type: NRG; PAM sequence: CAG
gatagcatgccactgcactc

SEQ ID NO: 50098 - DNA, 20 bp, Artificial Sequence
  Description of Artificial Sequence: Synthetic oligonucleotide
  Target: ATXN2; (+) strand; PAM type: NRG; PAM sequence: TGG
catgccactgcactccagcc

SEQ ID NO: 50099 - DNA, 20 bp, Artificial Sequence
  Description of Artificial Sequence: Synthetic oligonucleotide
  Target: ATXN2; (+) strand; PAM type: NRG; PAM sequence: GGG
atgccactgcactccagcct

SEQ ID NO: 50100 - DNA, 20 bp, Artificial Sequence
  Description of Artificial Sequence: Synthetic oligonucleotide
  Target: ATXN2; (+) strand; PAM type: NRG; PAM sequence: AAG
tgcactccagcctgggtgac

SEQ ID NO: 50101 - DNA, 20 bp, Artificial Sequence
  Description of Artificial Sequence: Synthetic oligonucleotide
  Target: ATXN2; (+) strand; PAM type: NRG; PAM sequence: GAG
cactccagcctgggtgacaa

SEQ ID NO: 50102 - DNA, 20 bp, Artificial Sequence
  Description of Artificial Sequence: Synthetic oligonucleotide
  Target: ATXN2; (+) strand; PAM type: NRG; PAM sequence: AAG
aaaactccatctcaaaaaaa

SEQ ID NO: 50103 - DNA, 20 bp, Artificial Sequence
  Description of Artificial Sequence: Synthetic oligonucleotide
  Target: ATXN2; (+) strand; PAM type: NRG; PAM sequence: AAG
aaaaaaaagaaaaaaaaaaa

SEQ ID NO: 50104 - DNA, 20 bp, Artificial Sequence
  Description of Artificial Sequence: Synthetic oligonucleotide
  Target: ATXN2; (+) strand; PAM type: NRG; PAM sequence: AAG
aaaaaagaaatacattctgt

SEQ ID NO: 50105 - DNA, 20 bp, Artificial Sequence
  Description of Artificial Sequence: Synthetic oligonucleotide
  Target: ATXN2; (+) strand; PAM type: NRG; PAM sequence: AGG
aaaaagaaatacattctgta

SEQ ID NO: 50106 - DNA, 20 bp, Artificial Sequence
  Description of Artificial Sequence: Synthetic oligonucleotide
  Target: ATXN2; (+) strand; PAM type: NRG; PAM sequence: TAG
aaggctactactgccattca

SEQ ID NO: 50107 - DNA, 20 bp, Artificial Sequence
  Description of Artificial Sequence: Synthetic oligonucleotide
  Target: ATXN2; (+) strand; PAM type: NRG; PAM sequence: TGG
cattcatagccattctctga

SEQ ID NO: 50108 - DNA, 20 bp, Artificial Sequence
  Description of Artificial Sequence: Synthetic oligonucleotide
  Target: ATXN2; (+) strand; PAM type: NRG; PAM sequence: AAG
taaattgaaaactttctaaa

SEQ ID NO: 50109 - DNA, 20 bp, Artificial Sequence
  Description of Artificial Sequence: Synthetic oligonucleotide
  Target: ATXN2; (+) strand; PAM type: NRG; PAM sequence: TAG
ctaaaaagtattcaccattc

SEQ ID NO: 50110 - DNA, 20 bp, Artificial Sequence
  Description of Artificial Sequence: Synthetic oligonucleotide
  Target: ATXN2; (+) strand; PAM type: NRG; PAM sequence: GAG
tcaccattctagatgccact

SEQ ID NO: 50111 - DNA, 20 bp, Artificial Sequence
  Description of Artificial Sequence: Synthetic oligonucleotide
  Target: ATXN2; (+) strand; PAM type: NRG; PAM sequence: GAG
ccactgagaatgccatccat

SEQ ID NO: 50112 - DNA, 20 bp, Artificial Sequence
  Description of Artificial Sequence: Synthetic oligonucleotide
  Target: ATXN2; (+) strand; PAM type: NRG; PAM sequence: TGG
gagaatgccatccatgagca

SEQ ID NO: 50113 - DNA, 20 bp, Artificial Sequence
  Description of Artificial Sequence: Synthetic oligonucleotide
  Target: ATXN2; (+) strand; PAM type: NRG; PAM sequence: GGG
agaatgccatccatgagcat

SEQ ID NO: 50114 - DNA, 20 bp, Artificial Sequence
  Description of Artificial Sequence: Synthetic oligonucleotide
  Target: ATXN2; (+) strand; PAM type: NRG; PAM sequence: GAG
aatgccatccatgagcatgg

SEQ ID NO: 50115 - DNA, 20 bp, Artificial Sequence
  Description of Artificial Sequence: Synthetic oligonucleotide
  Target: ATXN2; (+) strand; PAM type: NRG; PAM sequence: AGG
atgccatccatgagcatggg

SEQ ID NO: 50116 - DNA, 20 bp, Artificial Sequence
  Description of Artificial Sequence: Synthetic oligonucleotide
  Target: ATXN2; (+) strand; PAM type: NRG; PAM sequence: GAG
gccatccatgagcatgggag

SEQ ID NO: 50117 - DNA, 20 bp, Artificial Sequence
  Description of Artificial Sequence: Synthetic oligonucleotide
  Target: ATXN2; (+) strand; PAM type: NRG; PAM sequence: AGG
ccatccatgagcatgggagg

SEQ ID NO: 50118 - DNA, 20 bp, Artificial Sequence
  Description of Artificial Sequence: Synthetic oligonucleotide
  Target: ATXN2; (+) strand; PAM type: NRG; PAM sequence: CAG
ggttaaaacatcaacattaa

SEQ ID NO: 50119 - DNA, 20 bp, Artificial Sequence
  Description of Artificial Sequence: Synthetic oligonucleotide
  Target: ATXN2; (+) strand; PAM type: NRG; PAM sequence: AGG
gttaaaacatcaacattaac

SEQ ID NO: 50120 - DNA, 20 bp, Artificial Sequence
  Description of Artificial Sequence: Synthetic oligonucleotide
  Target: ATXN2; (+) strand; PAM type: NRG; PAM sequence: GAG
taaaacatcaacattaacag

SEQ ID NO: 50121 - DNA, 20 bp, Artificial Sequence
  Description of Artificial Sequence: Synthetic oligonucleotide
  Target: ATXN2; (+) strand; PAM type: NRG; PAM sequence: TAG
atcaacattaacaggagttt

SEQ ID NO: 50122 - DNA, 20 bp, Artificial Sequence
  Description of Artificial Sequence: Synthetic oligonucleotide
  Target: ATXN2; (+) strand; PAM type: NRG; PAM sequence: GAG
caacattaacaggagtttta

SEQ ID NO: 50123 - DNA, 20 bp, Artificial Sequence
  Description of Artificial Sequence: Synthetic oligonucleotide
  Target: ATXN2; (+) strand; PAM type: NRG; PAM sequence: AGG
aacattaacaggagttttag

SEQ ID NO: 50124 - DNA, 20 bp, Artificial Sequence
  Description of Artificial Sequence: Synthetic oligonucleotide
  Target: ATXN2; (+) strand; PAM type: NRG; PAM sequence: AAG
ttttcttttttttttttttt

SEQ ID NO: 50125 - DNA, 20 bp, Artificial Sequence
  Description of Artificial Sequence: Synthetic oligonucleotide
  Target: ATXN2; (+) strand; PAM type: NRG; PAM sequence: TAG
ctttttttttttttttaaga

SEQ ID NO: 50126 - DNA, 20 bp, Artificial Sequence
  Description of Artificial Sequence: Synthetic oligonucleotide
  Target: ATXN2; (+) strand; PAM type: NRG; PAM sequence: GAG
ttttttttttttttaagata

SEQ ID NO: 50127 - DNA, 20 bp, Artificial Sequence
  Description of Artificial Sequence: Synthetic oligonucleotide
  Target: ATXN2; (+) strand; PAM type: NRG; PAM sequence: CAG
agagtttcgctcctgttgcc

SEQ ID NO: 50128 - DNA, 20 bp, Artificial Sequence
  Description of Artificial Sequence: Synthetic oligonucleotide
  Target: ATXN2; (+) strand; PAM type: NRG; PAM sequence: AGG
gagtttcgctcctgttgccc

SEQ ID NO: 50129 - DNA, 20 bp, Artificial Sequence
  Description of Artificial Sequence: Synthetic oligonucleotide
  Target: ATXN2; (+) strand; PAM type: NRG; PAM sequence: TGG
ttcgctcctgttgcccaggc

SEQ ID NO: 50130 - DNA, 20 bp, Artificial Sequence
  Description of Artificial Sequence: Synthetic oligonucleotide
  Target: ATXN2; (+) strand; PAM type: NRG; PAM sequence: GAG
cgctcctgttgcccaggctg

SEQ ID NO: 50131 - DNA, 20 bp, Artificial Sequence
  Description of Artificial Sequence: Synthetic oligonucleotide
  Target: ATXN2; (+) strand; PAM type: NRG; PAM sequence: AAG
tgttgcccaggctggagtgc

SEQ ID NO: 50132 - DNA, 20 bp, Artificial Sequence
  Description of Artificial Sequence: Synthetic oligonucleotide
  Target: ATXN2; (+) strand; PAM type: NRG; PAM sequence: AGG
gttgcccaggctggagtgca

SEQ ID NO: 50133 - DNA, 20 bp, Artificial Sequence
  Description of Artificial Sequence: Synthetic oligonucleotide
  Target: ATXN2; (+) strand; PAM type: NRG; PAM sequence: GGG
ttgcccaggctggagtgcaa

SEQ ID NO: 50134 - DNA, 20 bp, Artificial Sequence
  Description of Artificial Sequence: Synthetic oligonucleotide
  Target: ATXN2; (+) strand; PAM type: NRG; PAM sequence: CAG
tcactgcaacctccacctcc

SEQ ID NO: 50135 - DNA, 20 bp, Artificial Sequence
  Description of Artificial Sequence: Synthetic oligonucleotide
  Target: ATXN2; (+) strand; PAM type: NRG; PAM sequence: AGG
cactgcaacctccacctccc

SEQ ID NO: 50136 - DNA, 20 bp, Artificial Sequence
  Description of Artificial Sequence: Synthetic oligonucleotide
  Target: ATXN2; (+) strand; PAM type: NRG; PAM sequence: AAG
aacctccacctcccaggttc

SEQ ID NO: 50137 - DNA, 20 bp, Artificial Sequence
  Description of Artificial Sequence: Synthetic oligonucleotide
  Target: ATXN2; (+) strand; PAM type: NRG; PAM sequence: CAG
ttcaagcgattctcctgcct

SEQ ID NO: 50138 - DNA, 20 bp, Artificial Sequence
  Description of Artificial Sequence: Synthetic oligonucleotide
  Target: ATXN2; (+) strand; PAM type: NRG; PAM sequence: AAG
ttctcctgcctcagtctccc

SEQ ID NO: 50139 - DNA, 20 bp, Artificial Sequence
  Description of Artificial Sequence: Synthetic oligonucleotide
  Target: ATXN2; (+) strand; PAM type: NRG; PAM sequence: TAG
tcctgcctcagtctcccaag

SEQ ID NO: 50140 - DNA, 20 bp, Artificial Sequence
  Description of Artificial Sequence: Synthetic oligonucleotide
  Target: ATXN2; (+) strand; PAM type: NRG; PAM sequence: TGG
gcctcagtctcccaagtagc

SEQ ID NO: 50141 - DNA, 20 bp, Artificial Sequence
  Description of Artificial Sequence: Synthetic oligonucleotide
  Target: ATXN2; (+) strand; PAM type: NRG; PAM sequence: GGG
cctcagtctcccaagtagct

SEQ ID NO: 50142 - DNA, 20 bp, Artificial Sequence
  Description of Artificial Sequence: Synthetic oligonucleotide
  Target: ATXN2; (+) strand; PAM type: NRG; PAM sequence: TAG
ctcccaagtagctgggatta

SEQ ID NO: 50143 - DNA, 20 bp, Artificial Sequence
  Description of Artificial Sequence: Synthetic oligonucleotide
  Target: ATXN2; (+) strand; PAM type: NRG; PAM sequence: AGG
tcccaagtagctgggattat

SEQ ID NO: 50144 - DNA, 20 bp, Artificial Sequence
  Description of Artificial Sequence: Synthetic oligonucleotide
  Target: ATXN2; (+) strand; PAM type: NRG; PAM sequence: TAG
cccgctaatttttgtatttt

SEQ ID NO: 50145 - DNA, 20 bp, Artificial Sequence
  Description of Artificial Sequence: Synthetic oligonucleotide
  Target: ATXN2; (+) strand; PAM type: NRG; PAM sequence: TAG
gctaatttttgtatttttag

SEQ ID NO: 50146 - DNA, 20 bp, Artificial Sequence
  Description of Artificial Sequence: Synthetic oligonucleotide
  Target: ATXN2; (+) strand; PAM type: NRG; PAM sequence: CGG
ttttgtatttttagtagaaa

SEQ ID NO: 50147 - DNA, 20 bp, Artificial Sequence
  Description of Artificial Sequence: Synthetic oligonucleotide
  Target: ATXN2; (+) strand; PAM type: NRG; PAM sequence: GGG
tttgtatttttagtagaaac

SEQ ID NO: 50148 - DNA, 20 bp, Artificial Sequence
  Description of Artificial Sequence: Synthetic oligonucleotide
  Target: ATXN2; (+) strand; PAM type: NRG; PAM sequence: GGG
ttgtatttttagtagaaacg

SEQ ID NO: 50149 - DNA, 20 bp, Artificial Sequence
  Description of Artificial Sequence: Synthetic oligonucleotide
  Target: ATXN2; (+) strand; PAM type: NRG; PAM sequence: CAG
cggggtttcaccacgtttgc

SEQ ID NO: 50150 - DNA, 20 bp, Artificial Sequence
  Description of Artificial Sequence: Synthetic oligonucleotide
  Target: ATXN2; (+) strand; PAM type: NRG; PAM sequence: TGG
tttcaccacgtttgccagac

SEQ ID NO: 50151 - DNA, 20 bp, Artificial Sequence
  Description of Artificial Sequence: Synthetic oligonucleotide
  Target: ATXN2; (+) strand; PAM type: NRG; PAM sequence: CAG
tggtcttgaactcctgactt

SEQ ID NO: 50152 - DNA, 20 bp, Artificial Sequence
  Description of Artificial Sequence: Synthetic oligonucleotide
  Target: ATXN2; (+) strand; PAM type: NRG; PAM sequence: AGG
ggtcttgaactcctgacttc

SEQ ID NO: 50153 - DNA, 20 bp, Artificial Sequence
  Description of Artificial Sequence: Synthetic oligonucleotide
  Target: ATXN2; (+) strand; PAM type: NRG; PAM sequence: TGG
ttcaggtgatccgccctcct

SEQ ID NO: 50154 - DNA, 20 bp, Artificial Sequence
  Description of Artificial Sequence: Synthetic oligonucleotide
  Target: ATXN2; (+) strand; PAM type: NRG; PAM sequence: AAG
ccgccctccttggcctccca

SEQ ID NO: 50155 - DNA, 20 bp, Artificial Sequence
  Description of Artificial Sequence: Synthetic oligonucleotide
  Target: ATXN2; (+) strand; PAM type: NRG; PAM sequence: TGG
tccttggcctcccaaagtac

SEQ ID NO: 50156 - DNA, 20 bp, Artificial Sequence
  Description of Artificial Sequence: Synthetic oligonucleotide
  Target: ATXN2; (+) strand; PAM type: NRG; PAM sequence: GGG
ccttggcctcccaaagtact

SEQ ID NO: 50157 - DNA, 20 bp, Artificial Sequence
  Description of Artificial Sequence: Synthetic oligonucleotide
  Target: ATXN2; (+) strand; PAM type: NRG; PAM sequence: CAG
ctcccaaagtactgggatta

SEQ ID NO: 50158 - DNA, 20 bp, Artificial Sequence
  Description of Artificial Sequence: Synthetic oligonucleotide
  Target: ATXN2; (+) strand; PAM type: NRG; PAM sequence: AGG
tcccaaagtactgggattac

SEQ ID NO: 50159 - DNA, 20 bp, Artificial Sequence
  Description of Artificial Sequence: Synthetic oligonucleotide
  Target: ATXN2; (+) strand; PAM type: NRG; PAM sequence: GAG
agtactgggattacaggcat

SEQ ID NO: 50160 - DNA, 20 bp, Artificial Sequence
  Description of Artificial Sequence: Synthetic oligonucleotide
  Target: ATXN2; (+) strand; PAM type: NRG; PAM sequence: CAG
catgagccaccgtgcccaac

SEQ ID NO: 50161 - DNA, 20 bp, Artificial Sequence
  Description of Artificial Sequence: Synthetic oligonucleotide
  Target: ATXN2; (+) strand; PAM type: NRG; PAM sequence: AGG
atgagccaccgtgcccaacc

SEQ ID NO: 50162 - DNA, 20 bp, Artificial Sequence
  Description of Artificial Sequence: Synthetic oligonucleotide
  Target: ATXN2; (+) strand; PAM type: NRG; PAM sequence: GAG
taatactcatgaatgatttt

SEQ ID NO: 50163 - DNA, 20 bp, Artificial Sequence
  Description of Artificial Sequence: Synthetic oligonucleotide
  Target: ATXN2; (+) strand; PAM type: NRG; PAM sequence: AGG
aatactcatgaatgattttg

SEQ ID NO: 50164 - DNA, 20 bp, Artificial Sequence
  Description of Artificial Sequence: Synthetic oligonucleotide
  Target: ATXN2; (+) strand; PAM type: NRG; PAM sequence: GGG
atactcatgaatgattttga

SEQ ID NO: 50165 - DNA, 20 bp, Artificial Sequence
  Description of Artificial Sequence: Synthetic oligonucleotide
  Target: ATXN2; (+) strand; PAM type: NRG; PAM sequence: GGG
tactcatgaatgattttgag

SEQ ID NO: 50166 - DNA, 20 bp, Artificial Sequence
  Description of Artificial Sequence: Synthetic oligonucleotide
  Target: ATXN2; (+) strand; PAM type: NRG; PAM sequence: CAG
atgaatgattttgaggggtt

SEQ ID NO: 50167 - DNA, 20 bp, Artificial Sequence
  Description of Artificial Sequence: Synthetic oligonucleotide
  Target: ATXN2; (+) strand; PAM type: NRG; PAM sequence: AGG
tgaatgattttgaggggttc

SEQ ID NO: 50168 - DNA, 20 bp, Artificial Sequence
  Description of Artificial Sequence: Synthetic oligonucleotide
  Target: ATXN2; (+) strand; PAM type: NRG; PAM sequence: CAG
ttttgaggggttcaggactt

SEQ ID NO: 50169 - DNA, 20 bp, Artificial Sequence
  Description of Artificial Sequence: Synthetic oligonucleotide
  Target: ATXN2; (+) strand; PAM type: NRG; PAM sequence: TAG
tgaggggttcaggacttcag

SEQ ID NO: 50170 - DNA, 20 bp, Artificial Sequence
  Description of Artificial Sequence: Synthetic oligonucleotide
  Target: ATXN2; (+) strand; PAM type: NRG; PAM sequence: GAG
aggggttcaggacttcagta

SEQ ID NO: 50171 - DNA, 20 bp, Artificial Sequence
  Description of Artificial Sequence: Synthetic oligonucleotide
  Target: ATXN2; (+) strand; PAM type: NRG; PAM sequence: AAG
gttcaggacttcagtagagc

SEQ ID NO: 50172 - DNA, 20 bp, Artificial Sequence
  Description of Artificial Sequence: Synthetic oligonucleotide
  Target: ATXN2; (+) strand; PAM type: NRG; PAM sequence: CAG
ttcagtagagcaagtaactg

SEQ ID NO: 50173 - DNA, 20 bp, Artificial Sequence
  Description of Artificial Sequence: Synthetic oligonucleotide
  Target: ATXN2; (+) strand; PAM type: NRG; PAM sequence: TGG
agagcaagtaactgcagatg

SEQ ID NO: 50174 - DNA, 20 bp, Artificial Sequence
  Description of Artificial Sequence: Synthetic oligonucleotide
  Target: ATXN2; (+) strand; PAM type: NRG; PAM sequence: AAG
taactgcagatgtggtaaaa

SEQ ID NO: 50175 - DNA, 20 bp, Artificial Sequence
  Description of Artificial Sequence: Synthetic oligonucleotide
  Target: ATXN2; (+) strand; PAM type: NRG; PAM sequence: AAG
tgcagatgtggtaaaaaagc

SEQ ID NO: 50176 - DNA, 20 bp, Artificial Sequence
  Description of Artificial Sequence: Synthetic oligonucleotide
  Target: ATXN2; (+) strand; PAM type: NRG; PAM sequence: GAG
cagatgtggtaaaaaagcaa

SEQ ID NO: 50177 - DNA, 20 bp, Artificial Sequence
  Description of Artificial Sequence: Synthetic oligonucleotide
  Target: ATXN2; (+) strand; PAM type: NRG; PAM sequence: TAG
aaaagcaagagaactaaaat

SEQ ID NO: 50178 - DNA, 20 bp, Artificial Sequence
  Description of Artificial Sequence: Synthetic oligonucleotide
  Target: ATXN2; (+) strand; PAM type: NRG; PAM sequence: AAG
agcaagagaactaaaattag

SEQ ID NO: 50179 - DNA, 20 bp, Artificial Sequence
  Description of Artificial Sequence: Synthetic oligonucleotide
  Target: ATXN2; (+) strand; PAM type: NRG; PAM sequence: TGG
aagagaactaaaattagaag

SEQ ID NO: 50180 - DNA, 20 bp, Artificial Sequence
  Description of Artificial Sequence: Synthetic oligonucleotide
  Target: ATXN2; (+) strand; PAM type: NRG; PAM sequence: GGG
agagaactaaaattagaagt

SEQ ID NO: 50181 - DNA, 20 bp, Artificial Sequence
  Description of Artificial Sequence: Synthetic oligonucleotide
  Target: ATXN2; (+) strand; PAM type: NRG; PAM sequence: GGG
gagaactaaaattagaagtg

SEQ ID NO: 50182 - DNA, 20 bp, Artificial Sequence
  Description of Artificial Sequence: Synthetic oligonucleotide
  Target: ATXN2; (+) strand; PAM type: NRG; PAM sequence: CAG
actaaaattagaagtggggt

SEQ ID NO: 50183 - DNA, 20 bp, Artificial Sequence
  Description of Artificial Sequence: Synthetic oligonucleotide
  Target: ATXN2; (+) strand; PAM type: NRG; PAM sequence: AAG
aaaattagaagtggggtcag

SEQ ID NO: 50184 - DNA, 20 bp, Artificial Sequence
  Description of Artificial Sequence: Synthetic oligonucleotide
  Target: ATXN2; (+) strand; PAM type: NRG; PAM sequence: TAG
atctcatgataaaacttgaa

SEQ ID NO: 50185 - DNA, 20 bp, Artificial Sequence
  Description of Artificial Sequence: Synthetic oligonucleotide
  Target: ATXN2; (+) strand; PAM type: NRG; PAM sequence: GAG
atgataaaacttgaatagat

SEQ ID NO: 50186 - DNA, 20 bp, Artificial Sequence
  Description of Artificial Sequence: Synthetic oligonucleotide
  Target: ATXN2; (+) strand; PAM type: NRG; PAM sequence: AGG
tgataaaacttgaatagatg

SEQ ID NO: 50187 - DNA, 20 bp, Artificial Sequence
  Description of Artificial Sequence: Synthetic oligonucleotide
  Target: ATXN2; (+) strand; PAM type: NRG; PAM sequence: TGG
agatgaggtgttgcttctca

SEQ ID NO: 50188 - DNA, 20 bp, Artificial Sequence
  Description of Artificial Sequence: Synthetic oligonucleotide
  Target: ATXN2; (+) strand; PAM type: NRG; PAM sequence: AAG
aggtgttgcttctcatggat

SEQ ID NO: 50189 - DNA, 20 bp, Artificial Sequence
  Description of Artificial Sequence: Synthetic oligonucleotide
  Target: ATXN2; (+) strand; PAM type: NRG; PAM sequence: AAG
ttgcttctcatggataagca

SEQ ID NO: 50190 - DNA, 20 bp, Artificial Sequence
  Description of Artificial Sequence: Synthetic oligonucleotide
  Target: ATXN2; (+) strand; PAM type: NRG; PAM sequence: AAG
ttctcatggataagcaaaga

SEQ ID NO: 50191 - DNA, 20 bp, Artificial Sequence
  Description of Artificial Sequence: Synthetic oligonucleotide
  Target: ATXN2; (+) strand; PAM type: NRG; PAM sequence: TGG
tcatggataagcaaagaaag

SEQ ID NO: 50192 - DNA, 20 bp, Artificial Sequence
  Description of Artificial Sequence: Synthetic oligonucleotide
  Target: ATXN2; (+) strand; PAM type: NRG; PAM sequence: AAG
agcaaagaaagtggtttctt

SEQ ID NO: 50193 - DNA, 20 bp, Artificial Sequence
  Description of Artificial Sequence: Synthetic oligonucleotide
  Target: ATXN2; (+) strand; PAM type: NRG; PAM sequence: TGG
aagaaagtggtttcttaaga

SEQ ID NO: 50194 - DNA, 20 bp, Artificial Sequence
  Description of Artificial Sequence: Synthetic oligonucleotide
  Target: ATXN2; (+) strand; PAM type: NRG; PAM sequence: TGG
cttaagatggaatctacacc

SEQ ID NO: 50195 - DNA, 20 bp, Artificial Sequence
  Description of Artificial Sequence: Synthetic oligonucleotide
  Target: ATXN2; (+) strand; PAM type: NRG; PAM sequence: AAG
gatggaatctacacctggtg

SEQ ID NO: 50196 - DNA, 20 bp, Artificial Sequence
  Description of Artificial Sequence: Synthetic oligonucleotide
  Target: ATXN2; (+) strand; PAM type: NRG; PAM sequence: GAG
acacctggtgaagctgctgt

SEQ ID NO: 50197 - DNA, 20 bp, Artificial Sequence
  Description of Artificial Sequence: Synthetic oligonucleotide
  Target: ATXN2; (+) strand; PAM type: NRG; PAM sequence: AAG
cactgttgaaatgacaacaa

SEQ ID NO: 50198 - DNA, 20 bp, Artificial Sequence
  Description of Artificial Sequence: Synthetic oligonucleotide
  Target: ATXN2; (+) strand; PAM type: NRG; PAM sequence: CAG
acaaaagattatgaatattc

SEQ ID NO: 50199 - DNA, 20 bp, Artificial Sequence
  Description of Artificial Sequence: Synthetic oligonucleotide
  Target: ATXN2; (+) strand; PAM type: NRG; PAM sequence: CAG
gattatgaatattccagaaa

SEQ ID NO: 50200 - DNA, 20 bp, Artificial Sequence
  Description of Artificial Sequence: Synthetic oligonucleotide
  Target: ATXN2; (+) strand; PAM type: NRG; PAM sequence: AGG
attatgaatattccagaaac

SEQ ID NO: 50201 - DNA, 20 bp, Artificial Sequence
  Description of Artificial Sequence: Synthetic oligonucleotide
  Target: ATXN2; (+) strand; PAM type: NRG; PAM sequence: CGG
tgaatattccagaaacaggc

SEQ ID NO: 50202 - DNA, 20 bp, Artificial Sequence
  Description of Artificial Sequence: Synthetic oligonucleotide
  Target: ATXN2; (+) strand; PAM type: NRG; PAM sequence: GGG
gaatattccagaaacaggcc

SEQ ID NO: 50203 - DNA, 20 bp, Artificial Sequence
  Description of Artificial Sequence: Synthetic oligonucleotide
  Target: ATXN2; (+) strand; PAM type: NRG; PAM sequence: TGG
ttccagaaacaggccgggcg

SEQ ID NO: 50204 - DNA, 20 bp, Artificial Sequence
  Description of Artificial Sequence: Synthetic oligonucleotide
  Target: ATXN2; (+) strand; PAM type: NRG; PAM sequence: TGG
cagaaacaggccgggcgtgg

SEQ ID NO: 50205 - DNA, 20 bp, Artificial Sequence
  Description of Artificial Sequence: Synthetic oligonucleotide
  Target: ATXN2; (+) strand; PAM type: NRG; PAM sequence: CAG
gtggctcacacttgtaatcc

SEQ ID NO: 50206 - DNA, 20 bp, Artificial Sequence
  Description of Artificial Sequence: Synthetic oligonucleotide
  Target: ATXN2; (+) strand; PAM type: NRG; PAM sequence: AAG
tgtaatcccagcactttgcg

SEQ ID NO: 50207 - DNA, 20 bp, Artificial Sequence
  Description of Artificial Sequence: Synthetic oligonucleotide
  Target: ATXN2; (+) strand; PAM type: NRG; PAM sequence: GAG
tcccagcactttgcgaagtt

SEQ ID NO: 50208 - DNA, 20 bp, Artificial Sequence
  Description of Artificial Sequence: Synthetic oligonucleotide
  Target: ATXN2; (+) strand; PAM type: NRG; PAM sequence: AGG
cccagcactttgcgaagttg

SEQ ID NO: 50209 - DNA, 20 bp, Artificial Sequence
  Description of Artificial Sequence: Synthetic oligonucleotide
  Target: ATXN2; (+) strand; PAM type: NRG; PAM sequence: CGG
agcactttgcgaagttgagg

SEQ ID NO: 50210 - DNA, 20 bp, Artificial Sequence
  Description of Artificial Sequence: Synthetic oligonucleotide
  Target: ATXN2; (+) strand; PAM type: NRG; PAM sequence: GGG
gcactttgcgaagttgaggc

SEQ ID NO: 50211 - DNA, 20 bp, Artificial Sequence
  Description of Artificial Sequence: Synthetic oligonucleotide
  Target: ATXN2; (+) strand; PAM type: NRG; PAM sequence: CAG
ctttgcgaagttgaggcggg

SEQ ID NO: 50212 - DNA, 20 bp, Artificial Sequence
  Description of Artificial Sequence: Synthetic oligonucleotide
  Target: ATXN2; (+) strand; PAM type: NRG; PAM sequence: AAG
gttgaggcgggcagatcacg

SEQ ID NO: 50213 - DNA, 20 bp, Artificial Sequence
  Description of Artificial Sequence: Synthetic oligonucleotide
  Target: ATXN2; (+) strand; PAM type: NRG; PAM sequence: CAG
aggcgggcagatcacgaagc

SEQ ID NO: 50214 - DNA, 20 bp, Artificial Sequence
  Description of Artificial Sequence: Synthetic oligonucleotide
  Target: ATXN2; (+) strand; PAM type: NRG; PAM sequence: AGG
ggcgggcagatcacgaagcc

SEQ ID NO: 50215 - DNA, 20 bp, Artificial Sequence
  Description of Artificial Sequence: Synthetic oligonucleotide
  Target: ATXN2; (+) strand; PAM type: NRG; PAM sequence: GAG
cgggcagatcacgaagccag

SEQ ID NO: 50216 - DNA, 20 bp, Artificial Sequence
  Description of Artificial Sequence: Synthetic oligonucleotide
  Target: ATXN2; (+) strand; PAM type: NRG; PAM sequence: AAG
gatcacgaagccaggagttc

SEQ ID NO: 50217 - DNA, 20 bp, Artificial Sequence
  Description of Artificial Sequence: Synthetic oligonucleotide
  Target: ATXN2; (+) strand; PAM type: NRG; PAM sequence: CAG
cgaagccaggagttcaagac

SEQ ID NO: 50218 - DNA, 20 bp, Artificial Sequence
  Description of Artificial Sequence: Synthetic oligonucleotide
  Target: ATXN2; (+) strand; PAM type: NRG; PAM sequence: TGG
caagaccagcctcaccaata

SEQ ID NO: 50219 - DNA, 20 bp, Artificial Sequence
  Description of Artificial Sequence: Synthetic oligonucleotide
  Target: ATXN2; (+) strand; PAM type: NRG; PAM sequence: TAG
tctactaaaaatacaaaaat

SEQ ID NO: 50220 - DNA, 20 bp, Artificial Sequence
  Description of Artificial Sequence: Synthetic oligonucleotide
  Target: ATXN2; (+) strand; PAM type: NRG; PAM sequence: TGG
taaaaatacaaaaattagcc

SEQ ID NO: 50221 - DNA, 20 bp, Artificial Sequence
  Description of Artificial Sequence: Synthetic oligonucleotide
  Target: ATXN2; (+) strand; PAM type: NRG; PAM sequence: TGG
atacaaaaattagcctggcg

SEQ ID NO: 50222 - DNA, 20 bp, Artificial Sequence
  Description of Artificial Sequence: Synthetic oligonucleotide
  Target: ATXN2; (+) strand; PAM type: NRG; PAM sequence: TGG
caaaaattagcctggcgtgg

SEQ ID NO: 50223 - DNA, 20 bp, Artificial Sequence
  Description of Artificial Sequence: Synthetic oligonucleotide
  Target: ATXN2; (+) strand; PAM type: NRG; PAM sequence: TAG
ggcgtggtggcatgcacctg

SEQ ID NO: 50224 - DNA, 20 bp, Artificial Sequence
  Description of Artificial Sequence: Synthetic oligonucleotide
  Target: ATXN2; (+) strand; PAM type: NRG; PAM sequence: CAG
gtggcatgcacctgtagtcc

SEQ ID NO: 50225 - DNA, 20 bp, Artificial Sequence
  Description of Artificial Sequence: Synthetic oligonucleotide
  Target: ATXN2; (+) strand; PAM type: NRG; PAM sequence: CAG
cacctgtagtcccagatact

SEQ ID NO: 50226 - DNA, 20 bp, Artificial Sequence
  Description of Artificial Sequence: Synthetic oligonucleotide
  Target: ATXN2; (+) strand; PAM type: NRG; PAM sequence: AGG
acctgtagtcccagatactc

SEQ ID NO: 50227 - DNA, 20 bp, Artificial Sequence
  Description of Artificial Sequence: Synthetic oligonucleotide
  Target: ATXN2; (+) strand; PAM type: NRG; PAM sequence: GAG
ctgtagtcccagatactcag

SEQ ID NO: 50228 - DNA, 20 bp, Artificial Sequence
  Description of Artificial Sequence: Synthetic oligonucleotide
  Target: ATXN2; (+) strand; PAM type: NRG; PAM sequence: AGG
tgtagtcccagatactcagg

SEQ ID NO: 50229 - DNA, 20 bp, Artificial Sequence
  Description of Artificial Sequence: Synthetic oligonucleotide
  Target: ATXN2; (+) strand; PAM type: NRG; PAM sequence: GAG
tcccagatactcaggaggct

SEQ ID NO: 50230 - DNA, 20 bp, Artificial Sequence
  Description of Artificial Sequence: Synthetic oligonucleotide
  Target: ATXN2; (+) strand; PAM type: NRG; PAM sequence: AGG
cccagatactcaggaggctg

SEQ ID NO: 50231 - DNA, 20 bp, Artificial Sequence
  Description of Artificial Sequence: Synthetic oligonucleotide
  Target: ATXN2; (+) strand; PAM type: NRG; PAM sequence: CAG
agatactcaggaggctgagg

SEQ ID NO: 50232 - DNA, 20 bp, Artificial Sequence
  Description of Artificial Sequence: Synthetic oligonucleotide
  Target: ATXN2; (+) strand; PAM type: NRG; PAM sequence: AGG
gatactcaggaggctgaggc

SEQ ID NO: 50233 - DNA, 20 bp, Artificial Sequence
  Description of Artificial Sequence: Synthetic oligonucleotide
  Target: ATXN2; (+) strand; PAM type: NRG; PAM sequence: GAG
tactcaggaggctgaggcag

SEQ ID NO: 50234 - DNA, 20 bp, Artificial Sequence
  Description of Artificial Sequence: Synthetic oligonucleotide
  Target: ATXN2; (+) strand; PAM type: NRG; PAM sequence: CGG
gcaggagaatcacttgaacc

SEQ ID NO: 50235 - DNA, 20 bp, Artificial Sequence
  Description of Artificial Sequence: Synthetic oligonucleotide
  Target: ATXN2; (+) strand; PAM type: NRG; PAM sequence: AAG
ggagaatcacttgaacccgg

SEQ ID NO: 50236 - DNA, 20 bp, Artificial Sequence
  Description of Artificial Sequence: Synthetic oligonucleotide
  Target: ATXN2; (+) strand; PAM type: NRG; PAM sequence: AGG
gagaatcacttgaacccgga

SEQ ID NO: 50237 - DNA, 20 bp, Artificial Sequence
  Description of Artificial Sequence: Synthetic oligonucleotide
  Target: ATXN2; (+) strand; PAM type: NRG; PAM sequence: CAG
aatcacttgaacccggaagg

SEQ ID NO: 50238 - DNA, 20 bp, Artificial Sequence
  Description of Artificial Sequence: Synthetic oligonucleotide
  Target: ATXN2; (+) strand; PAM type: NRG; PAM sequence: GAG
tcacttgaacccggaaggca

SEQ ID NO: 50239 - DNA, 20 bp, Artificial Sequence
  Description of Artificial Sequence: Synthetic oligonucleotide
  Target: ATXN2; (+) strand; PAM type: NRG; PAM sequence: AGG
cacttgaacccggaaggcag

SEQ ID NO: 50240 - DNA, 20 bp, Artificial Sequence
  Description of Artificial Sequence: Synthetic oligonucleotide
  Target: ATXN2; (+) strand; PAM type: NRG; PAM sequence: CAG
aacccggaaggcagaggttg

SEQ ID NO: 50241 - DNA, 20 bp, Artificial Sequence
  Description of Artificial Sequence: Synthetic oligonucleotide
  Target: ATXN2; (+) strand; PAM type: NRG; PAM sequence: AAG
cggaaggcagaggttgcagt

SEQ ID NO: 50242 - DNA, 20 bp, Artificial Sequence
  Description of Artificial Sequence: Synthetic oligonucleotide
  Target: ATXN2; (+) strand; PAM type: NRG; PAM sequence: GAG
ggcagaggttgcagtaagct

SEQ ID NO: 50243 - DNA, 20 bp, Artificial Sequence
  Description of Artificial Sequence: Synthetic oligonucleotide
  Target: ATXN2; (+) strand; PAM type: NRG; PAM sequence: GAG
ggttgcagtaagctgagatt

SEQ ID NO: 50244 - DNA, 20 bp, Artificial Sequence
  Description of Artificial Sequence: Synthetic oligonucleotide
  Target: ATXN2; (+) strand; PAM type: NRG; PAM sequence: CAG
gagattgagccactgcactc

SEQ ID NO: 50245 - DNA, 20 bp, Artificial Sequence
  Description of Artificial Sequence: Synthetic oligonucleotide
  Target: ATXN2; (+) strand; PAM type: NRG; PAM sequence: TGG
tgagccactgcactccagcc

SEQ ID NO: 50246 - DNA, 20 bp, Artificial Sequence
  Description of Artificial Sequence: Synthetic oligonucleotide
  Target: ATXN2; (+) strand; PAM type: NRG; PAM sequence: GGG
gagccactgcactccagcct

SEQ ID NO: 50247 - DNA, 20 bp, Artificial Sequence
  Description of Artificial Sequence: Synthetic oligonucleotide
  Target: ATXN2; (+) strand; PAM type: NRG; PAM sequence: GAG
gccactgcactccagcctgg

SEQ ID NO: 50248 - DNA, 20 bp, Artificial Sequence
  Description of Artificial Sequence: Synthetic oligonucleotide
  Target: ATXN2; (+) strand; PAM type: NRG; PAM sequence: CAG
ctgcactccagcctgggaga

SEQ ID NO: 50249 - DNA, 20 bp, Artificial Sequence
  Description of Artificial Sequence: Synthetic oligonucleotide
  Target: ATXN2; (+) strand; PAM type: NRG; PAM sequence: GAG
gcactccagcctgggagaca

SEQ ID NO: 50250 - DNA, 20 bp, Artificial Sequence
  Description of Artificial Sequence: Synthetic oligonucleotide
  Target: ATXN2; (+) strand; PAM type: NRG; PAM sequence: GAG
tccagcctgggagacagagc

SEQ ID NO: 50251 - DNA, 20 bp, Artificial Sequence
  Description of Artificial Sequence: Synthetic oligonucleotide
  Target: ATXN2; (+) strand; PAM type: NRG; PAM sequence: AAG
accccatttcaaaaaaaaaa

SEQ ID NO: 50252 - DNA, 20 bp, Artificial Sequence
  Description of Artificial Sequence: Synthetic oligonucleotide
  Target: ATXN2; (+) strand; PAM type: NRG; PAM sequence: TGG
agaacgttccaaaaatgaaa

SEQ ID NO: 50253 - DNA, 20 bp, Artificial Sequence
  Description of Artificial Sequence: Synthetic oligonucleotide
  Target: ATXN2; (+) strand; PAM type: NRG; PAM sequence: TGG
gttccaaaaatgaaatggcc

SEQ ID NO: 50254 - DNA, 20 bp, Artificial Sequence
  Description of Artificial Sequence: Synthetic oligonucleotide
  Target: ATXN2; (+) strand; PAM type: NRG; PAM sequence: CAG
aaaaatgaaatggcctggca

SEQ ID NO: 50255 - DNA, 20 bp, Artificial Sequence
  Description of Artificial Sequence: Synthetic oligonucleotide
  Target: ATXN2; (+) strand; PAM type: NRG; PAM sequence: TGG
aatgaaatggcctggcacag

SEQ ID NO: 50256 - DNA, 20 bp, Artificial Sequence
  Description of Artificial Sequence: Synthetic oligonucleotide
  Target: ATXN2; (+) strand; PAM type: NRG; PAM sequence: TAG
ggcacagtggctcatgcctg

SEQ ID NO: 50257 - DNA, 20 bp, Artificial Sequence
  Description of Artificial Sequence: Synthetic oligonucleotide
  Target: ATXN2; (+) strand; PAM type: NRG; PAM sequence: CAG
gtggctcatgcctgtagtcc

SEQ ID NO: 50258 - DNA, 20 bp, Artificial Sequence
  Description of Artificial Sequence: Synthetic oligonucleotide
  Target: ATXN2; (+) strand; PAM type: NRG; PAM sequence: TGG
tgcctgtagtcccagcactt

SEQ ID NO: 50259 - DNA, 20 bp, Artificial Sequence
  Description of Artificial Sequence: Synthetic oligonucleotide
  Target: ATXN2; (+) strand; PAM type: NRG; PAM sequence: GGG
gcctgtagtcccagcacttt

SEQ ID NO: 50260 - DNA, 20 bp, Artificial Sequence
  Description of Artificial Sequence: Synthetic oligonucleotide
  Target: ATXN2; (+) strand; PAM type: NRG; PAM sequence: GAG
ctgtagtcccagcactttgg

SEQ ID NO: 50261 - DNA, 20 bp, Artificial Sequence
  Description of Artificial Sequence: Synthetic oligonucleotide
  Target: ATXN2; (+) strand; PAM type: NRG; PAM sequence: AAG
tcccagcactttgggagacc

SEQ ID NO: 50262 - DNA, 20 bp, Artificial Sequence
  Description of Artificial Sequence: Synthetic oligonucleotide
  Target: ATXN2; (+) strand; PAM type: NRG; PAM sequence: AGG
cccagcactttgggagacca

SEQ ID NO: 50263 - DNA, 20 bp, Artificial Sequence
  Description of Artificial Sequence: Synthetic oligonucleotide
  Target: ATXN2; (+) strand; PAM type: NRG; PAM sequence: CGG
agcactttgggagaccaagg

SEQ ID NO: 50264 - DNA, 20 bp, Artificial Sequence
  Description of Artificial Sequence: Synthetic oligonucleotide
  Target: ATXN2; (+) strand; PAM type: NRG; PAM sequence: GGG
gcactttgggagaccaaggc

SEQ ID NO: 50265 - DNA, 20 bp, Artificial Sequence
  Description of Artificial Sequence: Synthetic oligonucleotide
  Target: ATXN2; (+) strand; PAM type: NRG; PAM sequence: CAG
ctttgggagaccaaggcggg

SEQ ID NO: 50266 - DNA, 20 bp, Artificial Sequence
  Description of Artificial Sequence: Synthetic oligonucleotide
  Target: ATXN2; (+) strand; PAM type: NRG; PAM sequence: GAG
ccaaggcgggcagatcacct

SEQ ID NO: 50267 - DNA, 20 bp, Artificial Sequence
  Description of Artificial Sequence: Synthetic oligonucleotide
  Target: ATXN2; (+) strand; PAM type: NRG; PAM sequence: AGG
caaggcgggcagatcacctg

SEQ ID NO: 50268 - DNA, 20 bp, Artificial Sequence
  Description of Artificial Sequence: Synthetic oligonucleotide
  Target: ATXN2; (+) strand; PAM type: NRG; PAM sequence: CAG
gcgggcagatcacctgaggt

SEQ ID NO: 50269 - DNA, 20 bp, Artificial Sequence
  Description of Artificial Sequence: Synthetic oligonucleotide
  Target: ATXN2; (+) strand; PAM type: NRG; PAM sequence: AGG
cgggcagatcacctgaggtc

SEQ ID NO: 50270 - DNA, 20 bp, Artificial Sequence
  Description of Artificial Sequence: Synthetic oligonucleotide
  Target: ATXN2; (+) strand; PAM type: NRG; PAM sequence: GAG
tcacctgaggtcaggaattc

SEQ ID NO: 50271 - DNA, 20 bp, Artificial Sequence
  Description of Artificial Sequence: Synthetic oligonucleotide
  Target: ATXN2; (+) strand; PAM type: NRG; PAM sequence: CAG
tgaggtcaggaattcgagac

SEQ ID NO: 50272 - DNA, 20 bp, Artificial Sequence
  Description of Artificial Sequence: Synthetic oligonucleotide
  Target: ATXN2; (+) strand; PAM type: NRG; PAM sequence: TGG
tcaggaattcgagaccagcc

SEQ ID NO: 50273 - DNA, 20 bp, Artificial Sequence
  Description of Artificial Sequence: Synthetic oligonucleotide
  Target: ATXN2; (+) strand; PAM type: NRG; PAM sequence: TGG
cgagaccagcctggccaata

SEQ ID NO: 50274 - DNA, 20 bp, Artificial Sequence
  Description of Artificial Sequence: Synthetic oligonucleotide
  Target: ATXN2; (+) strand; PAM type: NRG; PAM sequence: TAG
tctactaaaaatataaaaat

SEQ ID NO: 50275 - DNA, 20 bp, Artificial Sequence
  Description of Artificial Sequence: Synthetic oligonucleotide
  Target: ATXN2; (+) strand; PAM type: NRG; PAM sequence: CGG
ctaaaaatataaaaattagc

SEQ ID NO: 50276 - DNA, 20 bp, Artificial Sequence
  Description of Artificial Sequence: Synthetic oligonucleotide
  Target: ATXN2; (+) strand; PAM type: NRG; PAM sequence: GGG
taaaaatataaaaattagcc

SEQ ID NO: 50277 - DNA, 20 bp, Artificial Sequence
  Description of Artificial Sequence: Synthetic oligonucleotide
  Target: ATXN2; (+) strand; PAM type: NRG; PAM sequence: TGG
atataaaaattagccgggta

SEQ ID NO: 50278 - DNA, 20 bp, Artificial Sequence
  Description of Artificial Sequence: Synthetic oligonucleotide
  Target: ATXN2; (+) strand; PAM type: NRG; PAM sequence: TGG
taaaaattagccgggtatgg

SEQ ID NO: 50279 - DNA, 20 bp, Artificial Sequence
  Description of Artificial Sequence: Synthetic oligonucleotide
  Target: ATXN2; (+) strand; PAM type: NRG; PAM sequence: TGG
ggtatggtggcgtgcaccca

SEQ ID NO: 50280 - DNA, 20 bp, Artificial Sequence
  Description of Artificial Sequence: Synthetic oligonucleotide
  Target: ATXN2; (+) strand; PAM type: NRG; PAM sequence: CAG
gtggcgtgcacccatggccc

SEQ ID NO: 50281 - DNA, 20 bp, Artificial Sequence
  Description of Artificial Sequence: Synthetic oligonucleotide
  Target: ATXN2; (+) strand; PAM type: NRG; PAM sequence: GAG
ccatggccccagctactcat

SEQ ID NO: 50282 - DNA, 20 bp, Artificial Sequence
  Description of Artificial Sequence: Synthetic oligonucleotide
  Target: ATXN2; (+) strand; PAM type: NRG; PAM sequence: AGG
catggccccagctactcatg

SEQ ID NO: 50283 - DNA, 20 bp, Artificial Sequence
  Description of Artificial Sequence: Synthetic oligonucleotide
  Target: ATXN2; (+) strand; PAM type: NRG; PAM sequence: AAG
gctactcatgaggctgacac

SEQ ID NO: 50284 - DNA, 20 bp, Artificial Sequence
  Description of Artificial Sequence: Synthetic oligonucleotide
  Target: ATXN2; (+) strand; PAM type: NRG; PAM sequence: GAG
tactcatgaggctgacacaa

SEQ ID NO: 50285 - DNA, 20 bp, Artificial Sequence
  Description of Artificial Sequence: Synthetic oligonucleotide
  Target: ATXN2; (+) strand; PAM type: NRG; PAM sequence: CAG
acaagagaatcgcttcaact

SEQ ID NO: 50286 - DNA, 20 bp, Artificial Sequence
  Description of Artificial Sequence: Synthetic oligonucleotide
  Target: ATXN2; (+) strand; PAM type: NRG; PAM sequence: AGG
caagagaatcgcttcaactc

SEQ ID NO: 50287 - DNA, 20 bp, Artificial Sequence
  Description of Artificial Sequence: Synthetic oligonucleotide
  Target: ATXN2; (+) strand; PAM type: NRG; PAM sequence: GAG
agagaatcgcttcaactcag

SEQ ID NO: 50288 - DNA, 20 bp, Artificial Sequence
  Description of Artificial Sequence: Synthetic oligonucleotide
  Target: ATXN2; (+) strand; PAM type: NRG; PAM sequence: AGG
gagaatcgcttcaactcagg

SEQ ID NO: 50289 - DNA, 20 bp, Artificial Sequence
  Description of Artificial Sequence: Synthetic oligonucleotide
  Target: ATXN2; (+) strand; PAM type: NRG; PAM sequence: CAG
aatcgcttcaactcaggagg

SEQ ID NO: 50290 - DNA, 20 bp, Artificial Sequence
  Description of Artificial Sequence: Synthetic oligonucleotide
  Target: ATXN2; (+) strand; PAM type: NRG; PAM sequence: GAG
tcgcttcaactcaggaggca

SEQ ID NO: 50291 - DNA, 20 bp, Artificial Sequence
  Description of Artificial Sequence: Synthetic oligonucleotide
  Target: ATXN2; (+) strand; PAM type: NRG; PAM sequence: AGG
cgcttcaactcaggaggcag

SEQ ID NO: 50292 - DNA, 20 bp, Artificial Sequence
  Description of Artificial Sequence: Synthetic oligonucleotide
  Target: ATXN2; (+) strand; PAM type: NRG; PAM sequence: CAG
aactcaggaggcagaggttg

SEQ ID NO: 50293 - DNA, 20 bp, Artificial Sequence
  Description of Artificial Sequence: Synthetic oligonucleotide
  Target: ATXN2; (+) strand; PAM type: NRG; PAM sequence: TGG
tcaggaggcagaggttgcag

SEQ ID NO: 50294 - DNA, 20 bp, Artificial Sequence
  Description of Artificial Sequence: Synthetic oligonucleotide
  Target: ATXN2; (+) strand; PAM type: NRG; PAM sequence: GGG
caggaggcagaggttgcagt

SEQ ID NO: 50295 - DNA, 20 bp, Artificial Sequence
  Description of Artificial Sequence: Synthetic oligonucleotide
  Target: ATXN2; (+) strand; PAM type: NRG; PAM sequence: GAG
ggcagaggttgcagtgggcc

SEQ ID NO: 50296 - DNA, 20 bp, Artificial Sequence
  Description of Artificial Sequence: Synthetic oligonucleotide
  Target: ATXN2; (+) strand; PAM type: NRG; PAM sequence: TGG
aggttgcagtgggccgagat

SEQ ID NO: 50297 - DNA, 20 bp, Artificial Sequence
  Description of Artificial Sequence: Synthetic oligonucleotide
  Target: ATXN2; (+) strand; PAM type: NRG; PAM sequence: GGG
ggttgcagtgggccgagatt

SEQ ID NO: 50298 - DNA, 20 bp, Artificial Sequence
  Description of Artificial Sequence: Synthetic oligonucleotide
  Target: ATXN2; (+) strand; PAM type: NRG; PAM sequence: CAG
gagattgggccactgcactc

SEQ ID NO: 50299 - DNA, 20 bp, Artificial Sequence
  Description of Artificial Sequence: Synthetic oligonucleotide
  Target: ATXN2; (+) strand; PAM type: NRG; PAM sequence: TGG
tgggccactgcactccagcc

SEQ ID NO: 50300 - DNA, 20 bp, Artificial Sequence
  Description of Artificial Sequence: Synthetic oligonucleotide
  Target: ATXN2; (+) strand; PAM type: NRG; PAM sequence: GGG
gggccactgcactccagcct

SEQ ID NO: 50301 - DNA, 20 bp, Artificial Sequence
  Description of Artificial Sequence: Synthetic oligonucleotide
  Target: ATXN2; (+) strand; PAM type: NRG; PAM sequence: CAG
ctgcactccagcctgggcaa

SEQ ID NO: 50302 - DNA, 20 bp, Artificial Sequence
  Description of Artificial Sequence: Synthetic oligonucleotide
  Target: ATXN2; (+) strand; PAM type: NRG; PAM sequence: AAG
cactgtgttacttaattaac

SEQ ID NO: 50303 - DNA, 20 bp, Artificial Sequence
  Description of Artificial Sequence: Synthetic oligonucleotide
  Target: ATXN2; (+) strand; PAM type: NRG; PAM sequence: AAG
tgaaaaacattaaataatct

SEQ ID NO: 50304 - DNA, 20 bp, Artificial Sequence
  Description of Artificial Sequence: Synthetic oligonucleotide
  Target: ATXN2; (+) strand; PAM type: NRG; PAM sequence: TGG
tccattattgtttcaacaac

SEQ ID NO: 50305 - DNA, 20 bp, Artificial Sequence
  Description of Artificial Sequence: Synthetic oligonucleotide
  Target: ATXN2; (+) strand; PAM type: NRG; PAM sequence: GGG
ccattattgtttcaacaact

SEQ ID NO: 50306 - DNA, 20 bp, Artificial Sequence
  Description of Artificial Sequence: Synthetic oligonucleotide
  Target: ATXN2; (+) strand; PAM type: NRG; PAM sequence: GGG
cattattgtttcaacaactg

SEQ ID NO: 50307 - DNA, 20 bp, Artificial Sequence
  Description of Artificial Sequence: Synthetic oligonucleotide
  Target: ATXN2; (+) strand; PAM type: NRG; PAM sequence: GGG
attattgtttcaacaactgg

SEQ ID NO: 50308 - DNA, 20 bp, Artificial Sequence
  Description of Artificial Sequence: Synthetic oligonucleotide
  Target: ATXN2; (+) strand; PAM type: NRG; PAM sequence: GAG
tattgtttcaacaactgggg

SEQ ID NO: 50309 - DNA, 20 bp, Artificial Sequence
  Description of Artificial Sequence: Synthetic oligonucleotide
  Target: ATXN2; (+) strand; PAM type: NRG; PAM sequence: AGG
attgtttcaacaactggggg

SEQ ID NO: 50310 - DNA, 20 bp, Artificial Sequence
  Description of Artificial Sequence: Synthetic oligonucleotide
  Target: ATXN2; (+) strand; PAM type: NRG; PAM sequence: CGG
tttcaacaactgggggaggc

SEQ ID NO: 50311 - DNA, 20 bp, Artificial Sequence
  Description of Artificial Sequence: Synthetic oligonucleotide
  Target: ATXN2; (+) strand; PAM type: NRG; PAM sequence: GGG
ttcaacaactgggggaggcc

SEQ ID NO: 50312 - DNA, 20 bp, Artificial Sequence
  Description of Artificial Sequence: Synthetic oligonucleotide
  Target: ATXN2; (+) strand; PAM type: NRG; PAM sequence: CAG
caactgggggaggccgggcg

SEQ ID NO: 50313 - DNA, 20 bp, Artificial Sequence
  Description of Artificial Sequence: Synthetic oligonucleotide
  Target: ATXN2; (+) strand; PAM type: NRG; PAM sequence: TGG
ctgggggaggccgggcgcag

SEQ ID NO: 50314 - DNA, 20 bp, Artificial Sequence
  Description of Artificial Sequence: Synthetic oligonucleotide
  Target: ATXN2; (+) strand; PAM type: NRG; PAM sequence: CGG
gtggctcacacctgtaatcc

SEQ ID NO: 50315 - DNA, 20 bp, Artificial Sequence
  Description of Artificial Sequence: Synthetic oligonucleotide
  Target: ATXN2; (+) strand; PAM type: NRG; PAM sequence: TGG
cacctgtaatcccggcactt

SEQ ID NO: 50316 - DNA, 20 bp, Artificial Sequence
  Description of Artificial Sequence: Synthetic oligonucleotide
  Target: ATXN2; (+) strand; PAM type: NRG; PAM sequence: GGG
acctgtaatcccggcacttt

SEQ ID NO: 50317 - DNA, 20 bp, Artificial Sequence
  Description of Artificial Sequence: Synthetic oligonucleotide
  Target: ATXN2; (+) strand; PAM type: NRG; PAM sequence: GAG
ctgtaatcccggcactttgg

SEQ ID NO: 50318 - DNA, 20 bp, Artificial Sequence
  Description of Artificial Sequence: Synthetic oligonucleotide
  Target: ATXN2; (+) strand; PAM type: NRG; PAM sequence: AGG
tgtaatcccggcactttggg

SEQ ID NO: 50319 - DNA, 20 bp, Artificial Sequence
  Description of Artificial Sequence: Synthetic oligonucleotide
  Target: ATXN2; (+) strand; PAM type: NRG; PAM sequence: GAG
tcccggcactttgggaggct

SEQ ID NO: 50320 - DNA, 20 bp, Artificial Sequence
  Description of Artificial Sequence: Synthetic oligonucleotide
  Target: ATXN2; (+) strand; PAM type: NRG; PAM sequence: AGG
cccggcactttgggaggctg

SEQ ID NO: 50321 - DNA, 20 bp, Artificial Sequence
  Description of Artificial Sequence: Synthetic oligonucleotide
  Target: ATXN2; (+) strand; PAM type: NRG; PAM sequence: CAG
ggcactttgggaggctgagg

SEQ ID NO: 50322 - DNA, 20 bp, Artificial Sequence
  Description of Artificial Sequence: Synthetic oligonucleotide
  Target: ATXN2; (+) strand; PAM type: NRG; PAM sequence: AGG
gcactttgggaggctgaggc

SEQ ID NO: 50323 - DNA, 20 bp, Artificial Sequence
  Description of Artificial Sequence: Synthetic oligonucleotide
  Target: ATXN2; (+) strand; PAM type: NRG; PAM sequence: TGG
ctttgggaggctgaggcagg

SEQ ID NO: 50324 - DNA, 20 bp, Artificial Sequence
  Description of Artificial Sequence: Synthetic oligonucleotide
  Target: ATXN2; (+) strand; PAM type: NRG; PAM sequence: GAG
ctgaggcaggtggattatct

SEQ ID NO: 50325 - DNA, 20 bp, Artificial Sequence
  Description of Artificial Sequence: Synthetic oligonucleotide
  Target: ATXN2; (+) strand; PAM type: NRG; PAM sequence: AGG
tgaggcaggtggattatctg

SEQ ID NO: 50326 - DNA, 20 bp, Artificial Sequence
  Description of Artificial Sequence: Synthetic oligonucleotide
  Target: ATXN2; (+) strand; PAM type: NRG; PAM sequence: CAG
gcaggtggattatctgaggt

SEQ ID NO: 50327 - DNA, 20 bp, Artificial Sequence
  Description of Artificial Sequence: Synthetic oligonucleotide
  Target: ATXN2; (+) strand; PAM type: NRG; PAM sequence: AGG
caggtggattatctgaggtc

SEQ ID NO: 50328 - DNA, 20 bp, Artificial Sequence
  Description of Artificial Sequence: Synthetic oligonucleotide
  Target: ATXN2; (+) strand; PAM type: NRG; PAM sequence: AAG
ttatctgaggtcaggaactc

SEQ ID NO: 50329 - DNA, 20 bp, Artificial Sequence
  Description of Artificial Sequence: Synthetic oligonucleotide
  Target: ATXN2; (+) strand; PAM type: NRG; PAM sequence: CAG
tgaggtcaggaactcaagac

SEQ ID NO: 50330 - DNA, 20 bp, Artificial Sequence
  Description of Artificial Sequence: Synthetic oligonucleotide
  Target: ATXN2; (+) strand; PAM type: NRG; PAM sequence: TGG
caagaccagccttgccaaca

SEQ ID NO: 50331 - DNA, 20 bp, Artificial Sequence
  Description of Artificial Sequence: Synthetic oligonucleotide
  Target: ATXN2; (+) strand; PAM type: NRG; PAM sequence: TAG
tcaaataaaaatacaaaaat

SEQ ID NO: 50332 - DNA, 20 bp, Artificial Sequence
  Description of Artificial Sequence: Synthetic oligonucleotide
  Target: ATXN2; (+) strand; PAM type: NRG; PAM sequence: CGG
ataaaaatacaaaaattagc

SEQ ID NO: 50333 - DNA, 20 bp, Artificial Sequence
  Description of Artificial Sequence: Synthetic oligonucleotide
  Target: ATXN2; (+) strand; PAM type: NRG; PAM sequence: GGG
taaaaatacaaaaattagcc

SEQ ID NO: 50334 - DNA, 20 bp, Artificial Sequence
  Description of Artificial Sequence: Synthetic oligonucleotide
  Target: ATXN2; (+) strand; PAM type: NRG; PAM sequence: TGG
atacaaaaattagccgggcg

SEQ ID NO: 50335 - DNA, 20 bp, Artificial Sequence
  Description of Artificial Sequence: Synthetic oligonucleotide
  Target: ATXN2; (+) strand; PAM type: NRG; PAM sequence: TGG
caaaaattagccgggcgtgg

SEQ ID NO: 50336 - DNA, 20 bp, Artificial Sequence
  Description of Artificial Sequence: Synthetic oligonucleotide
  Target: ATXN2; (+) strand; PAM type: NRG; PAM sequence: CAG
gtggcacatgcctgtaatcc

SEQ ID NO: 50337 - DNA, 20 bp, Artificial Sequence
  Description of Artificial Sequence: Synthetic oligonucleotide
  Target: ATXN2; (+) strand; PAM type: NRG; PAM sequence: CAG
tgcctgtaatcccagctact

SEQ ID NO: 50338 - DNA, 20 bp, Artificial Sequence
  Description of Artificial Sequence: Synthetic oligonucleotide
  Target: ATXN2; (+) strand; PAM type: NRG; PAM sequence: AGG
gcctgtaatcccagctactc

SEQ ID NO: 50339 - DNA, 20 bp, Artificial Sequence
  Description of Artificial Sequence: Synthetic oligonucleotide
  Target: ATXN2; (+) strand; PAM type: NRG; PAM sequence: GAG
ctgtaatcccagctactcag

SEQ ID NO: 50340 - DNA, 20 bp, Artificial Sequence
  Description of Artificial Sequence: Synthetic oligonucleotide
  Target: ATXN2; (+) strand; PAM type: NRG; PAM sequence: AGG
tgtaatcccagctactcagg

SEQ ID NO: 50341 - DNA, 20 bp, Artificial Sequence
  Description of Artificial Sequence: Synthetic oligonucleotide
  Target: ATXN2; (+) strand; PAM type: NRG; PAM sequence: GAG
tcccagctactcaggaggct

SEQ ID NO: 50342 - DNA, 20 bp, Artificial Sequence
  Description of Artificial Sequence: Synthetic oligonucleotide
  Target: ATXN2; (+) strand; PAM type: NRG; PAM sequence: AGG
cccagctactcaggaggctg

SEQ ID NO: 50343 - DNA, 20 bp, Artificial Sequence
  Description of Artificial Sequence: Synthetic oligonucleotide
  Target: ATXN2; (+) strand; PAM type: NRG; PAM sequence: CAG
agctactcaggaggctgagg

SEQ ID NO: 50344 - DNA, 20 bp, Artificial Sequence
  Description of Artificial Sequence: Synthetic oligonucleotide
  Target: ATXN2; (+) strand; PAM type: NRG; PAM sequence: AGG
gctactcaggaggctgaggc

SEQ ID NO: 50345 - DNA, 20 bp, Artificial Sequence
  Description of Artificial Sequence: Synthetic oligonucleotide
  Target: ATXN2; (+) strand; PAM type: NRG; PAM sequence: GAG
tactcaggaggctgaggcag

SEQ ID NO: 50346 - DNA, 20 bp, Artificial Sequence
  Description of Artificial Sequence: Synthetic oligonucleotide
  Target: ATXN2; (+) strand; PAM type: NRG; PAM sequence: CAG
gcaggagaatcgcttgaacc

SEQ ID NO: 50347 - DNA, 20 bp, Artificial Sequence
  Description of Artificial Sequence: Synthetic oligonucleotide
  Target: ATXN2; (+) strand; PAM type: NRG; PAM sequence: AGG
caggagaatcgcttgaaccc

SEQ ID NO: 50348 - DNA, 20 bp, Artificial Sequence
  Description of Artificial Sequence: Synthetic oligonucleotide
  Target: ATXN2; (+) strand; PAM type: NRG; PAM sequence: AAG
gagaatcgcttgaacccagg

SEQ ID NO: 50349 - DNA, 20 bp, Artificial Sequence
  Description of Artificial Sequence: Synthetic oligonucleotide
  Target: ATXN2; (+) strand; PAM type: NRG; PAM sequence: CAG
aatcgcttgaacccaggaag

SEQ ID NO: 50350 - DNA, 20 bp, Artificial Sequence
  Description of Artificial Sequence: Synthetic oligonucleotide
  Target: ATXN2; (+) strand; PAM type: NRG; PAM sequence: GAG
tcgcttgaacccaggaagca

SEQ ID NO: 50351 - DNA, 20 bp, Artificial Sequence
  Description of Artificial Sequence: Synthetic oligonucleotide
  Target: ATXN2; (+) strand; PAM type: NRG; PAM sequence: AGG
cgcttgaacccaggaagcag

SEQ ID NO: 50352 - DNA, 20 bp, Artificial Sequence
  Description of Artificial Sequence: Synthetic oligonucleotide
  Target: ATXN2; (+) strand; PAM type: NRG; PAM sequence: CAG
aacccaggaagcagaggttg

SEQ ID NO: 50353 - DNA, 20 bp, Artificial Sequence
  Description of Artificial Sequence: Synthetic oligonucleotide
  Target: ATXN2; (+) strand; PAM type: NRG; PAM sequence: AAG
caggaagcagaggttgcagt

SEQ ID NO: 50354 - DNA, 20 bp, Artificial Sequence
  Description of Artificial Sequence: Synthetic oligonucleotide
  Target: ATXN2; (+) strand; PAM type: NRG; PAM sequence: CAG
aatatcacgacaatgcactc

SEQ ID NO: 50355 - DNA, 20 bp, Artificial Sequence
  Description of Artificial Sequence: Synthetic oligonucleotide
  Target: ATXN2; (+) strand; PAM type: NRG; PAM sequence: GAG
acgacaatgcactccagcct

SEQ ID NO: 50356 - DNA, 20 bp, Artificial Sequence
  Description of Artificial Sequence: Synthetic oligonucleotide
  Target: ATXN2; (+) strand; PAM type: NRG; PAM sequence: CAG
gcactccagcctgagtgaca

SEQ ID NO: 50357 - DNA, 20 bp, Artificial Sequence
  Description of Artificial Sequence: Synthetic oligonucleotide
  Target: ATXN2; (+) strand; PAM type: NRG; PAM sequence: GAG
tccagcctgagtgacacagt

SEQ ID NO: 50358 - DNA, 20 bp, Artificial Sequence
  Description of Artificial Sequence: Synthetic oligonucleotide
  Target: ATXN2; (+) strand; PAM type: NRG; PAM sequence: TGG
aacaaaacaaaaaaaaaaac

SEQ ID NO: 50359 - DNA, 20 bp, Artificial Sequence
  Description of Artificial Sequence: Synthetic oligonucleotide
  Target: ATXN2; (+) strand; PAM type: NRG; PAM sequence: GGG
acaaaacaaaaaaaaaaact

SEQ ID NO: 50360 - DNA, 20 bp, Artificial Sequence
  Description of Artificial Sequence: Synthetic oligonucleotide
  Target: ATXN2; (+) strand; PAM type: NRG; PAM sequence: GGG
caaaacaaaaaaaaaaactg

SEQ ID NO: 50361 - DNA, 20 bp, Artificial Sequence
  Description of Artificial Sequence: Synthetic oligonucleotide
  Target: ATXN2; (+) strand; PAM type: NRG; PAM sequence: GAG
aaacaaaaaaaaaaactggg

SEQ ID NO: 50362 - DNA, 20 bp, Artificial Sequence
  Description of Artificial Sequence: Synthetic oligonucleotide
  Target: ATXN2; (+) strand; PAM type: NRG; PAM sequence: TGG
aaaaaacatgcaatctctat

SEQ ID NO: 50363 - DNA, 20 bp, Artificial Sequence
  Description of Artificial Sequence: Synthetic oligonucleotide
  Target: ATXN2; (+) strand; PAM type: NRG; PAM sequence: TAG
gtcaccatacaatataatta

SEQ ID NO: 50364 - DNA, 20 bp, Artificial Sequence
  Description of Artificial Sequence: Synthetic oligonucleotide
  Target: ATXN2; (+) strand; PAM type: NRG; PAM sequence: GAG
caccatacaatataattata

SEQ ID NO: 50365 - DNA, 20 bp, Artificial Sequence
  Description of Artificial Sequence: Synthetic oligonucleotide
  Target: ATXN2; (+) strand; PAM type: NRG; PAM sequence: CAG
ctcctcctctatatgtcctt

SEQ ID NO: 50366 - DNA, 20 bp, Artificial Sequence
  Description of Artificial Sequence: Synthetic oligonucleotide
  Target: ATXN2; (+) strand; PAM type: NRG; PAM sequence: TAG
ctcctctatatgtccttcag

SEQ ID NO: 50367 - DNA, 20 bp, Artificial Sequence
  Description of Artificial Sequence: Synthetic oligonucleotide
  Target: ATXN2; (+) strand; PAM type: NRG; PAM sequence: AAG
gtttctaatgctatttcaac

SEQ ID NO: 50368 - DNA, 20 bp, Artificial Sequence
  Description of Artificial Sequence: Synthetic oligonucleotide
  Target: ATXN2; (+) strand; PAM type: NRG; PAM sequence: TGG
aatgctatttcaacaagacc

SEQ ID NO: 50369 - DNA, 20 bp, Artificial Sequence
  Description of Artificial Sequence: Synthetic oligonucleotide
  Target: ATXN2; (+) strand; PAM type: NRG; PAM sequence: GGG
atgctatttcaacaagacct

SEQ ID NO: 50370 - DNA, 20 bp, Artificial Sequence
  Description of Artificial Sequence: Synthetic oligonucleotide
  Target: ATXN2; (+) strand; PAM type: NRG; PAM sequence: CAG
tttcaacaagacctgggtaa

SEQ ID NO: 50371 - DNA, 20 bp, Artificial Sequence
  Description of Artificial Sequence: Synthetic oligonucleotide
  Target: ATXN2; (+) strand; PAM type: NRG; PAM sequence: CAG
atcaaaatatttcattgatc

SEQ ID NO: 50372 - DNA, 20 bp, Artificial Sequence
  Description of Artificial Sequence: Synthetic oligonucleotide
  Target: ATXN2; (+) strand; PAM type: NRG; PAM sequence: AGG
tcaaaatatttcattgatcc

SEQ ID NO: 50373 - DNA, 20 bp, Artificial Sequence
  Description of Artificial Sequence: Synthetic oligonucleotide
  Target: ATXN2; (+) strand; PAM type: NRG; PAM sequence: TAG
atttcattgatccaggtttc

SEQ ID NO: 50374 - DNA, 20 bp, Artificial Sequence
  Description of Artificial Sequence: Synthetic oligonucleotide
  Target: ATXN2; (+) strand; PAM type: NRG; PAM sequence: CAG
ttgatccaggtttctagaat

SEQ ID NO: 50375 - DNA, 20 bp, Artificial Sequence
  Description of Artificial Sequence: Synthetic oligonucleotide
  Target: ATXN2; (+) strand; PAM type: NRG; PAM sequence: TGG
ccaggtttctagaatcagac

SEQ ID NO: 50376 - DNA, 20 bp, Artificial Sequence
  Description of Artificial Sequence: Synthetic oligonucleotide
  Target: ATXN2; (+) strand; PAM type: NRG; PAM sequence: TAG
ctagaatcagactggttgta

SEQ ID NO: 50377 - DNA, 20 bp, Artificial Sequence
  Description of Artificial Sequence: Synthetic oligonucleotide
  Target: ATXN2; (+) strand; PAM type: NRG; PAM sequence: AAG
gaatcagactggttgtatag

SEQ ID NO: 50378 - DNA, 20 bp, Artificial Sequence
  Description of Artificial Sequence: Synthetic oligonucleotide
  Target: ATXN2; (+) strand; PAM type: NRG; PAM sequence: TGG
tagaagtaactaattttctt

SEQ ID NO: 50379 - DNA, 20 bp, Artificial Sequence
  Description of Artificial Sequence: Synthetic oligonucleotide
  Target: ATXN2; (+) strand; PAM type: NRG; PAM sequence: AAG
taactaattttctttggcat

SEQ ID NO: 50380 - DNA, 20 bp, Artificial Sequence
  Description of Artificial Sequence: Synthetic oligonucleotide
  Target: ATXN2; (+) strand; PAM type: NRG; PAM sequence: AGG
aactaattttctttggcata

SEQ ID NO: 50381 - DNA, 20 bp, Artificial Sequence
  Description of Artificial Sequence: Synthetic oligonucleotide
  Target: ATXN2; (+) strand; PAM type: NRG; PAM sequence: GGG
actaattttctttggcataa

SEQ ID NO: 50382 - DNA, 20 bp, Artificial Sequence
  Description of Artificial Sequence: Synthetic oligonucleotide
  Target: ATXN2; (+) strand; PAM type: NRG; PAM sequence: CAG
acatacctctaacccccttc

SEQ ID NO: 50383 - DNA, 20 bp, Artificial Sequence
  Description of Artificial Sequence: Synthetic oligonucleotide
  Target: ATXN2; (+) strand; PAM type: NRG; PAM sequence: AAG
cccccttccagtaaaactgt

SEQ ID NO: 50384 - DNA, 20 bp, Artificial Sequence
  Description of Artificial Sequence: Synthetic oligonucleotide
  Target: ATXN2; (+) strand; PAM type: NRG; PAM sequence: CAG
tgtaagaatgctcttccctc

SEQ ID NO: 50385 - DNA, 20 bp, Artificial Sequence
  Description of Artificial Sequence: Synthetic oligonucleotide
  Target: ATXN2; (+) strand; PAM type: NRG; PAM sequence: TGG
cttccctccagctattcaca

SEQ ID NO: 50386 - DNA, 20 bp, Artificial Sequence
  Description of Artificial Sequence: Synthetic oligonucleotide
  Target: ATXN2; (+) strand; PAM type: NRG; PAM sequence: TAG
catggctgcccctttcttgt

SEQ ID NO: 50387 - DNA, 20 bp, Artificial Sequence
  Description of Artificial Sequence: Synthetic oligonucleotide
  Target: ATXN2; (+) strand; PAM type: NRG; PAM sequence: AAG
acttaaatgtcacctcctga

SEQ ID NO: 50388 - DNA, 20 bp, Artificial Sequence
  Description of Artificial Sequence: Synthetic oligonucleotide
  Target: ATXN2; (+) strand; PAM type: NRG; PAM sequence: AAG
taaatgtcacctcctgaaag

SEQ ID NO: 50389 - DNA, 20 bp, Artificial Sequence
  Description of Artificial Sequence: Synthetic oligonucleotide
  Target: ATXN2; (+) strand; PAM type: NRG; PAM sequence: CAG
ttctcaaactaccccctcta

SEQ ID NO: 50390 - DNA, 20 bp, Artificial Sequence
  Description of Artificial Sequence: Synthetic oligonucleotide
  Target: ATXN2; (+) strand; PAM type: NRG; PAM sequence: CAG
tcaaactaccccctctacag

SEQ ID NO: 50391 - DNA, 20 bp, Artificial Sequence
  Description of Artificial Sequence: Synthetic oligonucleotide
  Target: ATXN2; (+) strand; PAM type: NRG; PAM sequence: AAG
gtctacccgttttaatactt

SEQ ID NO: 50392 - DNA, 20 bp, Artificial Sequence
  Description of Artificial Sequence: Synthetic oligonucleotide
  Target: ATXN2; (+) strand; PAM type: NRG; PAM sequence: TAG
atacttaagtaactaatatt

SEQ ID NO: 50393 - DNA, 20 bp, Artificial Sequence
  Description of Artificial Sequence: Synthetic oligonucleotide
  Target: ATXN2; (+) strand; PAM type: NRG; PAM sequence: CAG
gtaactaatatttagtacat

SEQ ID NO: 50394 - DNA, 20 bp, Artificial Sequence
  Description of Artificial Sequence: Synthetic oligonucleotide
  Target: ATXN2; (+) strand; PAM type: NRG; PAM sequence: TAG
ctaatatttagtacatcagt

SEQ ID NO: 50395 - DNA, 20 bp, Artificial Sequence
  Description of Artificial Sequence: Synthetic oligonucleotide
  Target: ATXN2; (+) strand; PAM type: NRG; PAM sequence: TAG
ttagacaattaactaaaatc

SEQ ID NO: 50396 - DNA, 20 bp, Artificial Sequence
  Description of Artificial Sequence: Synthetic oligonucleotide
  Target: ATXN2; (+) strand; PAM type: NRG; PAM sequence: AAG
ttaactaaaatctagaaatc

SEQ ID NO: 50397 - DNA, 20 bp, Artificial Sequence
  Description of Artificial Sequence: Synthetic oligonucleotide
  Target: ATXN2; (+) strand; PAM type: NRG; PAM sequence: AAG
gaaatcaagttccacctctt

SEQ ID NO: 50398 - DNA, 20 bp, Artificial Sequence
  Description of Artificial Sequence: Synthetic oligonucleotide
  Target: ATXN2; (+) strand; PAM type: NRG; PAM sequence: AGG
aaatcaagttccacctctta

SEQ ID NO: 50399 - DNA, 20 bp, Artificial Sequence
  Description of Artificial Sequence: Synthetic oligonucleotide
  Target: ATXN2; (+) strand; PAM type: NRG; PAM sequence: TAG
cctcttaaggttaactcact

SEQ ID NO: 50400 - DNA, 20 bp, Artificial Sequence
  Description of Artificial Sequence: Synthetic oligonucleotide
  Target: ATXN2; (+) strand; PAM type: NRG; PAM sequence: AGG
ctcttaaggttaactcactt

SEQ ID NO: 50401 - DNA, 20 bp, Artificial Sequence
  Description of Artificial Sequence: Synthetic oligonucleotide
  Target: ATXN2; (+) strand; PAM type: NRG; PAM sequence: GAG
taaggttaactcacttaggt

SEQ ID NO: 50402 - DNA, 20 bp, Artificial Sequence
  Description of Artificial Sequence: Synthetic oligonucleotide
  Target: ATXN2; (+) strand; PAM type: NRG; PAM sequence: CAG
tcattttgttcttccaattt

SEQ ID NO: 50403 - DNA, 20 bp, Artificial Sequence
  Description of Artificial Sequence: Synthetic oligonucleotide
  Target: ATXN2; (+) strand; PAM type: NRG; PAM sequence: TAG
gttgttgtttacattattat

SEQ ID NO: 50404 - DNA, 20 bp, Artificial Sequence
  Description of Artificial Sequence: Synthetic oligonucleotide
  Target: ATXN2; (+) strand; PAM type: NRG; PAM sequence: AAG
ttgtttacattattattaga

SEQ ID NO: 50405 - DNA, 20 bp, Artificial Sequence
  Description of Artificial Sequence: Synthetic oligonucleotide
  Target: ATXN2; (+) strand; PAM type: NRG; PAM sequence: AGG
tgtttacattattattagaa

SEQ ID NO: 50406 - DNA, 20 bp, Artificial Sequence
  Description of Artificial Sequence: Synthetic oligonucleotide
  Target: ATXN2; (+) strand; PAM type: NRG; PAM sequence: GGG
gtttacattattattagaaa

SEQ ID NO: 50407 - DNA, 20 bp, Artificial Sequence
  Description of Artificial Sequence: Synthetic oligonucleotide
  Target: ATXN2; (+) strand; PAM type: NRG; PAM sequence: AAG
ttgaatattttctccctaaa

SEQ ID NO: 50408 - DNA, 20 bp, Artificial Sequence
  Description of Artificial Sequence: Synthetic oligonucleotide
  Target: ATXN2; (+) strand; PAM type: NRG; PAM sequence: GAG
tattttctccctaaaaagtt

SEQ ID NO: 50409 - DNA, 20 bp, Artificial Sequence
  Description of Artificial Sequence: Synthetic oligonucleotide
  Target: ATXN2; (+) strand; PAM type: NRG; PAM sequence: GAG
cctaaaaagttgagtcaaat

SEQ ID NO: 50410 - DNA, 20 bp, Artificial Sequence
  Description of Artificial Sequence: Synthetic oligonucleotide
  Target: ATXN2; (+) strand; PAM type: NRG; PAM sequence: AGG
ctaaaaagttgagtcaaatg

SEQ ID NO: 50411 - DNA, 20 bp, Artificial Sequence
  Description of Artificial Sequence: Synthetic oligonucleotide
  Target: ATXN2; (+) strand; PAM type: NRG; PAM sequence: TGG
aaaagttgagtcaaatgagg

SEQ ID NO: 50412 - DNA, 20 bp, Artificial Sequence
  Description of Artificial Sequence: Synthetic oligonucleotide
  Target: ATXN2; (+) strand; PAM type: NRG; PAM sequence: AAG
gttgagtcaaatgaggtggc

SEQ ID NO: 50413 - DNA, 20 bp, Artificial Sequence
  Description of Artificial Sequence: Synthetic oligonucleotide
  Target: ATXN2; (+) strand; PAM type: NRG; PAM sequence: GAG
tgagtcaaatgaggtggcaa

SEQ ID NO: 50414 - DNA, 20 bp, Artificial Sequence
  Description of Artificial Sequence: Synthetic oligonucleotide
  Target: ATXN2; (+) strand; PAM type: NRG; PAM sequence: AGG
gagtcaaatgaggtggcaag

SEQ ID NO: 50415 - DNA, 20 bp, Artificial Sequence
  Description of Artificial Sequence: Synthetic oligonucleotide
  Target: ATXN2; (+) strand; PAM type: NRG; PAM sequence: GGG
agtcaaatgaggtggcaaga

SEQ ID NO: 50416 - DNA, 20 bp, Artificial Sequence
  Description of Artificial Sequence: Synthetic oligonucleotide
  Target: ATXN2; (+) strand; PAM type: NRG; PAM sequence: GGG
gtcaaatgaggtggcaagag

SEQ ID NO: 50417 - DNA, 20 bp, Artificial Sequence
  Description of Artificial Sequence: Synthetic oligonucleotide
  Target: ATXN2; (+) strand; PAM type: NRG; PAM sequence: GGG
tcaaatgaggtggcaagagg

SEQ ID NO: 50418 - DNA, 20 bp, Artificial Sequence
  Description of Artificial Sequence: Synthetic oligonucleotide
  Target: ATXN2; (+) strand; PAM type: NRG; PAM sequence: TAG
aatgaggtggcaagaggggg

SEQ ID NO: 50419 - DNA, 20 bp, Artificial Sequence
  Description of Artificial Sequence: Synthetic oligonucleotide
  Target: ATXN2; (+) strand; PAM type: NRG; PAM sequence: AGG
atgaggtggcaagagggggt

SEQ ID NO: 50420 - DNA, 20 bp, Artificial Sequence
  Description of Artificial Sequence: Synthetic oligonucleotide
  Target: ATXN2; (+) strand; PAM type: NRG; PAM sequence: CAG
aggccatgacaacccaaaca

SEQ ID NO: 50421 - DNA, 20 bp, Artificial Sequence
  Description of Artificial Sequence: Synthetic oligonucleotide
  Target: ATXN2; (+) strand; PAM type: NRG; PAM sequence: AAG
atgacaacccaaacacagtg

SEQ ID NO: 50422 - DNA, 20 bp, Artificial Sequence
  Description of Artificial Sequence: Synthetic oligonucleotide
  Target: ATXN2; (+) strand; PAM type: NRG; PAM sequence: TAG
caacccaaacacagtgaagc

SEQ ID NO: 50423 - DNA, 20 bp, Artificial Sequence
  Description of Artificial Sequence: Synthetic oligonucleotide
  Target: ATXN2; (+) strand; PAM type: NRG; PAM sequence: GAG
acccaaacacagtgaagcta

SEQ ID NO: 50424 - DNA, 20 bp, Artificial Sequence
  Description of Artificial Sequence: Synthetic oligonucleotide
  Target: ATXN2; (+) strand; PAM type: NRG; PAM sequence: TAG
gttttgttttgttttgtttt

SEQ ID NO: 50425 - DNA, 20 bp, Artificial Sequence
  Description of Artificial Sequence: Synthetic oligonucleotide
  Target: ATXN2; (+) strand; PAM type: NRG; PAM sequence: AGG
ttttgttttgttttgttttt

SEQ ID NO: 50426 - DNA, 20 bp, Artificial Sequence
  Description of Artificial Sequence: Synthetic oligonucleotide
  Target: ATXN2; (+) strand; PAM type: NRG; PAM sequence: GAG
tgttttgtttttaggaaact

SEQ ID NO: 50427 - DNA, 20 bp, Artificial Sequence
  Description of Artificial Sequence: Synthetic oligonucleotide
  Target: ATXN2; (+) strand; PAM type: NRG; PAM sequence: AGG
gttttgtttttaggaaactg

SEQ ID NO: 50428 - DNA, 20 bp, Artificial Sequence
  Description of Artificial Sequence: Synthetic oligonucleotide
  Target: ATXN2; (+) strand; PAM type: NRG; PAM sequence: TGG
ttgtttttaggaaactgagg

SEQ ID NO: 50429 - DNA, 20 bp, Artificial Sequence
  Description of Artificial Sequence: Synthetic oligonucleotide
  Target: ATXN2; (+) strand; PAM type: NRG; PAM sequence: GGG
tgtttttaggaaactgaggt

SEQ ID NO: 50430 - DNA, 20 bp, Artificial Sequence
  Description of Artificial Sequence: Synthetic oligonucleotide
  Target: ATXN2; (+) strand; PAM type: NRG; PAM sequence: AAG
ttttaggaaactgaggtggg

SEQ ID NO: 50431 - DNA, 20 bp, Artificial Sequence
  Description of Artificial Sequence: Synthetic oligonucleotide
  Target: ATXN2; (+) strand; PAM type: NRG; PAM sequence: AGG
tttaggaaactgaggtggga

SEQ ID NO: 50432 - DNA, 20 bp, Artificial Sequence
  Description of Artificial Sequence: Synthetic oligonucleotide
  Target: ATXN2; (+) strand; PAM type: NRG; PAM sequence: CAG
aaggcaactctaaattcaca

SEQ ID NO: 50433 - DNA, 20 bp, Artificial Sequence
  Description of Artificial Sequence: Synthetic oligonucleotide
  Target: ATXN2; (+) strand; PAM type: NRG; PAM sequence: CAG
aattcacacagaacaactgc

SEQ ID NO: 50434 - DNA, 20 bp, Artificial Sequence
  Description of Artificial Sequence: Synthetic oligonucleotide
  Target: ATXN2; (+) strand; PAM type: NRG; PAM sequence: CGG
gaacaactgccagattaatc

SEQ ID NO: 50435 - DNA, 20 bp, Artificial Sequence
  Description of Artificial Sequence: Synthetic oligonucleotide
  Target: ATXN2; (+) strand; PAM type: NRG; PAM sequence: TAG
aatccggtcatataatcatc

SEQ ID NO: 50436 - DNA, 20 bp, Artificial Sequence
  Description of Artificial Sequence: Synthetic oligonucleotide
  Target: ATXN2; (+) strand; PAM type: NRG; PAM sequence: AGG
atccggtcatataatcatct

SEQ ID NO: 50437 - DNA, 20 bp, Artificial Sequence
  Description of Artificial Sequence: Synthetic oligonucleotide
  Target: ATXN2; (+) strand; PAM type: NRG; PAM sequence: AAG
aaaacaattaccattcacac

SEQ ID NO: 50438 - DNA, 20 bp, Artificial Sequence
  Description of Artificial Sequence: Synthetic oligonucleotide
  Target: ATXN2; (+) strand; PAM type: NRG; PAM sequence: CAG
attcacacaagaactaatat

SEQ ID NO: 50439 - DNA, 20 bp, Artificial Sequence
  Description of Artificial Sequence: Synthetic oligonucleotide
  Target: ATXN2; (+) strand; PAM type: NRG; PAM sequence: TGG
taatatcagcattaattgct

SEQ ID NO: 50440 - DNA, 20 bp, Artificial Sequence
  Description of Artificial Sequence: Synthetic oligonucleotide
  Target: ATXN2; (+) strand; PAM type: NRG; PAM sequence: GGG
aatatcagcattaattgctt

SEQ ID NO: 50441 - DNA, 20 bp, Artificial Sequence
  Description of Artificial Sequence: Synthetic oligonucleotide
  Target: ATXN2; (+) strand; PAM type: NRG; PAM sequence: CGG
aattgcttgggttcaaattc

SEQ ID NO: 50442 - DNA, 20 bp, Artificial Sequence
  Description of Artificial Sequence: Synthetic oligonucleotide
  Target: ATXN2; (+) strand; PAM type: NRG; PAM sequence: CAG
attccggctccatcacttct

SEQ ID NO: 50443 - DNA, 20 bp, Artificial Sequence
  Description of Artificial Sequence: Synthetic oligonucleotide
  Target: ATXN2; (+) strand; PAM type: NRG; PAM sequence: TGG
tccatcacttctcagctctg

SEQ ID NO: 50444 - DNA, 20 bp, Artificial Sequence
  Description of Artificial Sequence: Synthetic oligonucleotide
  Target: ATXN2; (+) strand; PAM type: NRG; PAM sequence: CAG
tggccttaatcctgtgactt

SEQ ID NO: 50445 - DNA, 20 bp, Artificial Sequence
  Description of Artificial Sequence: Synthetic oligonucleotide
  Target: ATXN2; (+) strand; PAM type: NRG; PAM sequence: AAG
atttcaacatctatgaaatg

SEQ ID NO: 50446 - DNA, 20 bp, Artificial Sequence
  Description of Artificial Sequence: Synthetic oligonucleotide
  Target: ATXN2; (+) strand; PAM type: NRG; PAM sequence: TAG
ctatgaaatgaagatgaaaa

SEQ ID NO: 50447 - DNA, 20 bp, Artificial Sequence
  Description of Artificial Sequence: Synthetic oligonucleotide
  Target: ATXN2; (+) strand; PAM type: NRG; PAM sequence: AAG
tgaaaatagtaccttctcaa

SEQ ID NO: 50448 - DNA, 20 bp, Artificial Sequence
  Description of Artificial Sequence: Synthetic oligonucleotide
  Target: ATXN2; (+) strand; PAM type: NRG; PAM sequence: TAG
ccttctcaaaagaaaaaaaa

SEQ ID NO: 50449 - DNA, 20 bp, Artificial Sequence
  Description of Artificial Sequence: Synthetic oligonucleotide
  Target: ATXN2; (+) strand; PAM type: NRG; PAM sequence: AAG
aaaaaatagtatcttttcat

SEQ ID NO: 50450 - DNA, 20 bp, Artificial Sequence
  Description of Artificial Sequence: Synthetic oligonucleotide
  Target: ATXN2; (+) strand; PAM type: NRG; PAM sequence: AGG
aaaaatagtatcttttcata

SEQ ID NO: 50451 - DNA, 20 bp, Artificial Sequence
  Description of Artificial Sequence: Synthetic oligonucleotide
  Target: ATXN2; (+) strand; PAM type: NRG; PAM sequence: TGG
agtatcttttcataaggttg

SEQ ID NO: 50452 - DNA, 20 bp, Artificial Sequence
  Description of Artificial Sequence: Synthetic oligonucleotide
  Target: ATXN2; (+) strand; PAM type: NRG; PAM sequence: AAG
ttcataaggttgtggaaatt

SEQ ID NO: 50453 - DNA, 20 bp, Artificial Sequence
  Description of Artificial Sequence: Synthetic oligonucleotide
  Target: ATXN2; (+) strand; PAM type: NRG; PAM sequence: CAG
aaattaagtaatattccata

SEQ ID NO: 50454 - DNA, 20 bp, Artificial Sequence
  Description of Artificial Sequence: Synthetic oligonucleotide
  Target: ATXN2; (+) strand; PAM type: NRG; PAM sequence: TAG
aatattccatacagatcgca

SEQ ID NO: 50455 - DNA, 20 bp, Artificial Sequence
  Description of Artificial Sequence: Synthetic oligonucleotide
  Target: ATXN2; (+) strand; PAM type: NRG; PAM sequence: CAG
acagatcgcatagcttaaaa

SEQ ID NO: 50456 - DNA, 20 bp, Artificial Sequence
  Description of Artificial Sequence: Synthetic oligonucleotide
  Target: ATXN2; (+) strand; PAM type: NRG; PAM sequence: TGG
gcatagcttaaaacagtgcc

SEQ ID NO: 50457 - DNA, 20 bp, Artificial Sequence
  Description of Artificial Sequence: Synthetic oligonucleotide
  Target: ATXN2; (+) strand; PAM type: NRG; PAM sequence: AAG
acagtgcctggtatgttatt

SEQ ID NO: 50458 - DNA, 20 bp, Artificial Sequence
  Description of Artificial Sequence: Synthetic oligonucleotide
  Target: ATXN2; (+) strand; PAM type: NRG; PAM sequence: TAG
attaagtgtttaataactgc

SEQ ID NO: 50459 - DNA, 20 bp, Artificial Sequence
  Description of Artificial Sequence: Synthetic oligonucleotide
  Target: ATXN2; (+) strand; PAM type: NRG; PAM sequence: CAG
ataattatttcctcatattc

SEQ ID NO: 50460 - DNA, 20 bp, Artificial Sequence
  Description of Artificial Sequence: Synthetic oligonucleotide
  Target: ATXN2; (+) strand; PAM type: NRG; PAM sequence: TAG
cctcatattccagcatacac

SEQ ID NO: 50461 - DNA, 20 bp, Artificial Sequence
  Description of Artificial Sequence: Synthetic oligonucleotide
  Target: ATXN2; (+) strand; PAM type: NRG; PAM sequence: GAG
tcatattccagcatacacta

SEQ ID NO: 50462 - DNA, 20 bp, Artificial Sequence
  Description of Artificial Sequence: Synthetic oligonucleotide
  Target: ATXN2; (+) strand; PAM type: NRG; PAM sequence: TAG
tattccagcatacactagag

SEQ ID NO: 50463 - DNA, 20 bp, Artificial Sequence
  Description of Artificial Sequence: Synthetic oligonucleotide
  Target: ATXN2; (+) strand; PAM type: NRG; PAM sequence: AAG
cagcatacactagagtagta

SEQ ID NO: 50464 - DNA, 20 bp, Artificial Sequence
  Description of Artificial Sequence: Synthetic oligonucleotide
  Target: ATXN2; (+) strand; PAM type: NRG; PAM sequence: AGG
agcatacactagagtagtaa

SEQ ID NO: 50465 - DNA, 20 bp, Artificial Sequence
  Description of Artificial Sequence: Synthetic oligonucleotide
  Target: ATXN2; (+) strand; PAM type: NRG; PAM sequence: GAG
catacactagagtagtaaag

SEQ ID NO: 50466 - DNA, 20 bp, Artificial Sequence
  Description of Artificial Sequence: Synthetic oligonucleotide
  Target: ATXN2; (+) strand; PAM type: NRG; PAM sequence: AAG
gagtagtaaaggagaaaaaa

SEQ ID NO: 50467 - DNA, 20 bp, Artificial Sequence
  Description of Artificial Sequence: Synthetic oligonucleotide
  Target: ATXN2; (+) strand; PAM type: NRG; PAM sequence: AGG
agtagtaaaggagaaaaaaa

SEQ ID NO: 50468 - DNA, 20 bp, Artificial Sequence
  Description of Artificial Sequence: Synthetic oligonucleotide
  Target: ATXN2; (+) strand; PAM type: NRG; PAM sequence: CAG
gtaaaggagaaaaaaaaggc

SEQ ID NO: 50469 - DNA, 20 bp, Artificial Sequence
  Description of Artificial Sequence: Synthetic oligonucleotide
  Target: ATXN2; (+) strand; PAM type: NRG; PAM sequence: CAG
gagaaaaaaaaggccagtcg

SEQ ID NO: 50470 - DNA, 20 bp, Artificial Sequence
  Description of Artificial Sequence: Synthetic oligonucleotide
  Target: ATXN2; (+) strand; PAM type: NRG; PAM sequence: TGG
aaaaaaaaggccagtcgcag

SEQ ID NO: 50471 - DNA, 20 bp, Artificial Sequence
  Description of Artificial Sequence: Synthetic oligonucleotide
  Target: ATXN2; (+) strand; PAM type: NRG; PAM sequence: CAG
gtggcccacacctgcaatcc

SEQ ID NO: 50472 - DNA, 20 bp, Artificial Sequence
  Description of Artificial Sequence: Synthetic oligonucleotide
  Target: ATXN2; (+) strand; PAM type: NRG; PAM sequence: TGG
cacctgcaatcccagcactc

SEQ ID NO: 50473 - DNA, 20 bp, Artificial Sequence
  Description of Artificial Sequence: Synthetic oligonucleotide
  Target: ATXN2; (+) strand; PAM type: NRG; PAM sequence: GGG
acctgcaatcccagcactct

SEQ ID NO: 50474 - DNA, 20 bp, Artificial Sequence
  Description of Artificial Sequence: Synthetic oligonucleotide
  Target: ATXN2; (+) strand; PAM type: NRG; PAM sequence: GAG
ctgcaatcccagcactctgg

SEQ ID NO: 50475 - DNA, 20 bp, Artificial Sequence
  Description of Artificial Sequence: Synthetic oligonucleotide
  Target: ATXN2; (+) strand; PAM type: NRG; PAM sequence: AGG
tgcaatcccagcactctggg

SEQ ID NO: 50476 - DNA, 20 bp, Artificial Sequence
  Description of Artificial Sequence: Synthetic oligonucleotide
  Target: ATXN2; (+) strand; PAM type: NRG; PAM sequence: AAG
tcccagcactctgggaggcc

SEQ ID NO: 50477 - DNA, 20 bp, Artificial Sequence
  Description of Artificial Sequence: Synthetic oligonucleotide
  Target: ATXN2; (+) strand; PAM type: NRG; PAM sequence: AGG
cccagcactctgggaggcca

SEQ ID NO: 50478 - DNA, 20 bp, Artificial Sequence
  Description of Artificial Sequence: Synthetic oligonucleotide
  Target: ATXN2; (+) strand; PAM type: NRG; PAM sequence: GAG
gcactctgggaggccaaggt

SEQ ID NO: 50479 - DNA, 20 bp, Artificial Sequence
  Description of Artificial Sequence: Synthetic oligonucleotide
  Target: ATXN2; (+) strand; PAM type: NRG; PAM sequence: CAG
ctgggaggccaaggtgagtc

SEQ ID NO: 50480 - DNA, 20 bp, Artificial Sequence
  Description of Artificial Sequence: Synthetic oligonucleotide
  Target: ATXN2; (+) strand; PAM type: NRG; PAM sequence: AGG
tgggaggccaaggtgagtcc

SEQ ID NO: 50481 - DNA, 20 bp, Artificial Sequence
  Description of Artificial Sequence: Synthetic oligonucleotide
  Target: ATXN2; (+) strand; PAM type: NRG; PAM sequence: GAG
caaggtgagtccaggaattt

SEQ ID NO: 50482 - DNA, 20 bp, Artificial Sequence
  Description of Artificial Sequence: Synthetic oligonucleotide
  Target: ATXN2; (+) strand; PAM type: NRG; PAM sequence: CAG
tgagtccaggaatttgagac

SEQ ID NO: 50483 - DNA, 20 bp, Artificial Sequence
  Description of Artificial Sequence: Synthetic oligonucleotide
  Target: ATXN2; (+) strand; PAM type: NRG; PAM sequence: TGG
ccaggaatttgagaccagcc

SEQ ID NO: 50484 - DNA, 20 bp, Artificial Sequence
  Description of Artificial Sequence: Synthetic oligonucleotide
  Target: ATXN2; (+) strand; PAM type: NRG; PAM sequence: TGG
tgagaccagcctggacaaca

SEQ ID NO: 50485 - DNA, 20 bp, Artificial Sequence
  Description of Artificial Sequence: Synthetic oligonucleotide
  Target: ATXN2; (+) strand; PAM type: NRG; PAM sequence: CAG
atggcgaaatctcgtctcta

SEQ ID NO: 50486 - DNA, 20 bp, Artificial Sequence
  Description of Artificial Sequence: Synthetic oligonucleotide
  Target: ATXN2; (+) strand; PAM type: NRG; PAM sequence: AAG
cgaaatctcgtctctacaga

SEQ ID NO: 50487 - DNA, 20 bp, Artificial Sequence
  Description of Artificial Sequence: Synthetic oligonucleotide
  Target: ATXN2; (+) strand; PAM type: NRG; PAM sequence: TAG
ctacagaaagttttaaaaat

SEQ ID NO: 50488 - DNA, 20 bp, Artificial Sequence
  Description of Artificial Sequence: Synthetic oligonucleotide
  Target: ATXN2; (+) strand; PAM type: NRG; PAM sequence: AGG
tacagaaagttttaaaaatt

SEQ ID NO: 50489 - DNA, 20 bp, Artificial Sequence
  Description of Artificial Sequence: Synthetic oligonucleotide
  Target: ATXN2; (+) strand; PAM type: NRG; PAM sequence: CAG
agaaagttttaaaaattagg

SEQ ID NO: 50490 - DNA, 20 bp, Artificial Sequence
  Description of Artificial Sequence: Synthetic oligonucleotide
  Target: ATXN2; (+) strand; PAM type: NRG; PAM sequence: AGG
gaaagttttaaaaattaggc

SEQ ID NO: 50491 - DNA, 20 bp, Artificial Sequence
  Description of Artificial Sequence: Synthetic oligonucleotide
  Target: ATXN2; (+) strand; PAM type: NRG; PAM sequence: TGG
ttttaaaaattaggcaggtg

SEQ ID NO: 50492 - DNA, 20 bp, Artificial Sequence
  Description of Artificial Sequence: Synthetic oligonucleotide
  Target: ATXN2; (+) strand; PAM type: NRG; PAM sequence: TGG
taaaaattaggcaggtgtgg

SEQ ID NO: 50493 - DNA, 20 bp, Artificial Sequence
  Description of Artificial Sequence: Synthetic oligonucleotide
  Target: ATXN2; (+) strand; PAM type: NRG; PAM sequence: CAG
ggtgtggtggctcatgccta

SEQ ID NO: 50494 - DNA, 20 bp, Artificial Sequence
  Description of Artificial Sequence: Synthetic oligonucleotide
  Target: ATXN2; (+) strand; PAM type: NRG; PAM sequence: CAG
gtggctcatgcctacagttc

SEQ ID NO: 50495 - DNA, 20 bp, Artificial Sequence
  Description of Artificial Sequence: Synthetic oligonucleotide
  Target: ATXN2; (+) strand; PAM type: NRG; PAM sequence: TGG
tgcctacagttccagttact

SEQ ID NO: 50496 - DNA, 20 bp, Artificial Sequence
  Description of Artificial Sequence: Synthetic oligonucleotide
  Target: ATXN2; (+) strand; PAM type: NRG; PAM sequence: GGG
gcctacagttccagttactt

SEQ ID NO: 50497 - DNA, 20 bp, Artificial Sequence
  Description of Artificial Sequence: Synthetic oligonucleotide
  Target: ATXN2; (+) strand; PAM type: NRG; PAM sequence: GAG
ctacagttccagttacttgg

SEQ ID NO: 50498 - DNA, 20 bp, Artificial Sequence
  Description of Artificial Sequence: Synthetic oligonucleotide
  Target: ATXN2; (+) strand; PAM type: NRG; PAM sequence: GAG
gttccagttacttgggagct

SEQ ID NO: 50499 - DNA, 20 bp, Artificial Sequence
  Description of Artificial Sequence: Synthetic oligonucleotide
  Target: ATXN2; (+) strand; PAM type: NRG; PAM sequence: AGG
ttccagttacttgggagctg

SEQ ID NO: 50500 - DNA, 20 bp, Artificial Sequence
  Description of Artificial Sequence: Synthetic oligonucleotide
  Target: ATXN2; (+) strand; PAM type: NRG; PAM sequence: TGG
cagttacttgggagctgagg

SEQ ID NO: 50501 - DNA, 20 bp, Artificial Sequence
  Description of Artificial Sequence: Synthetic oligonucleotide
  Target: ATXN2; (+) strand; PAM type: NRG; PAM sequence: GGG
agttacttgggagctgaggt

SEQ ID NO: 50502 - DNA, 20 bp, Artificial Sequence
  Description of Artificial Sequence: Synthetic oligonucleotide
  Target: ATXN2; (+) strand; PAM type: NRG; PAM sequence: GAG
ttacttgggagctgaggtgg

SEQ ID NO: 50503 - DNA, 20 bp, Artificial Sequence
  Description of Artificial Sequence: Synthetic oligonucleotide
  Target: ATXN2; (+) strand; PAM type: NRG; PAM sequence: AGG
tacttgggagctgaggtggg

SEQ ID NO: 50504 - DNA, 20 bp, Artificial Sequence
  Description of Artificial Sequence: Synthetic oligonucleotide
  Target: ATXN2; (+) strand; PAM type: NRG; PAM sequence: AAG
ctgaggtgggaggatcactt

SEQ ID NO: 50505 - DNA, 20 bp, Artificial Sequence
  Description of Artificial Sequence: Synthetic oligonucleotide
  Target: ATXN2; (+) strand; PAM type: NRG; PAM sequence: CAG
gtgggaggatcacttaagcc

SEQ ID NO: 50506 - DNA, 20 bp, Artificial Sequence
  Description of Artificial Sequence: Synthetic oligonucleotide
  Target: ATXN2; (+) strand; PAM type: NRG; PAM sequence: AGG
tgggaggatcacttaagccc

SEQ ID NO: 50507 - DNA, 20 bp, Artificial Sequence
  Description of Artificial Sequence: Synthetic oligonucleotide
  Target: ATXN2; (+) strand; PAM type: NRG; PAM sequence: AAG
gaggatcacttaagcccagg

SEQ ID NO: 50508 - DNA, 20 bp, Artificial Sequence
  Description of Artificial Sequence: Synthetic oligonucleotide
  Target: ATXN2; (+) strand; PAM type: NRG; PAM sequence: GAG
tcacttaagcccaggaagtc

SEQ ID NO: 50509 - DNA, 20 bp, Artificial Sequence
  Description of Artificial Sequence: Synthetic oligonucleotide
  Target: ATXN2; (+) strand; PAM type: NRG; PAM sequence: AGG
cacttaagcccaggaagtcg

SEQ ID NO: 50510 - DNA, 20 bp, Artificial Sequence
  Description of Artificial Sequence: Synthetic oligonucleotide
  Target: ATXN2; (+) strand; PAM type: NRG; PAM sequence: CAG
agcccaggaagtcgaggctg

SEQ ID NO: 50511 - DNA, 20 bp, Artificial Sequence
  Description of Artificial Sequence: Synthetic oligonucleotide
  Target: ATXN2; (+) strand; PAM type: NRG; PAM sequence: GAG
caggaagtcgaggctgcagt

SEQ ID NO: 50512 - DNA, 20 bp, Artificial Sequence
  Description of Artificial Sequence: Synthetic oligonucleotide
  Target: ATXN2; (+) strand; PAM type: NRG; PAM sequence: CAG
aagtcgaggctgcagtgagc

SEQ ID NO: 50513 - DNA, 20 bp, Artificial Sequence
  Description of Artificial Sequence: Synthetic oligonucleotide
  Target: ATXN2; (+) strand; PAM type: NRG; PAM sequence: AGG
agtcgaggctgcagtgagcc

SEQ ID NO: 50514 - DNA, 20 bp, Artificial Sequence
  Description of Artificial Sequence: Synthetic oligonucleotide
  Target: ATXN2; (+) strand; PAM type: NRG; PAM sequence: TGG
gtgagccaggatcatgccac

SEQ ID NO: 50515 - DNA, 20 bp, Artificial Sequence
  Description of Artificial Sequence: Synthetic oligonucleotide
  Target: ATXN2; (+) strand; PAM type: NRG; PAM sequence: CAG
aggatcatgccactggactc

SEQ ID NO: 50516 - DNA, 20 bp, Artificial Sequence
  Description of Artificial Sequence: Synthetic oligonucleotide
  Target: ATXN2; (+) strand; PAM type: NRG; PAM sequence: GAG
atgccactggactccagcct

SEQ ID NO: 50517 - DNA, 20 bp, Artificial Sequence
  Description of Artificial Sequence: Synthetic oligonucleotide
  Target: ATXN2; (+) strand; PAM type: NRG; PAM sequence: CAG
ctggactccagcctgagtga

SEQ ID NO: 50518 - DNA, 20 bp, Artificial Sequence
  Description of Artificial Sequence: Synthetic oligonucleotide
  Target: ATXN2; (+) strand; PAM type: NRG; PAM sequence: GAG
ggactccagcctgagtgaca

SEQ ID NO: 50519 - DNA, 20 bp, Artificial Sequence
  Description of Artificial Sequence: Synthetic oligonucleotide
  Target: ATXN2; (+) strand; PAM type: NRG; PAM sequence: GAG
tccagcctgagtgacagagc

SEQ ID NO: 50520 - DNA, 20 bp, Artificial Sequence
  Description of Artificial Sequence: Synthetic oligonucleotide
  Target: ATXN2; (+) strand; PAM type: NRG; PAM sequence: AAG
accaccacactcttcatatg

SEQ ID NO: 50521 - DNA, 20 bp, Artificial Sequence
  Description of Artificial Sequence: Synthetic oligonucleotide
  Target: ATXN2; (+) strand; PAM type: NRG; PAM sequence: CAG
catatgaagttttacccctt

SEQ ID NO: 50522 - DNA, 20 bp, Artificial Sequence
  Description of Artificial Sequence: Synthetic oligonucleotide
  Target: ATXN2; (+) strand; PAM type: NRG; PAM sequence: GAG
cttcagtgcctttacccctt

SEQ ID NO: 50523 - DNA, 20 bp, Artificial Sequence
  Description of Artificial Sequence: Synthetic oligonucleotide
  Target: ATXN2; (+) strand; PAM type: NRG; PAM sequence: TAG
ctttaccccttgagtccctc

SEQ ID NO: 50524 - DNA, 20 bp, Artificial Sequence
  Description of Artificial Sequence: Synthetic oligonucleotide
  Target: ATXN2; (+) strand; PAM type: NRG; PAM sequence: GAG
ttaccccttgagtccctcta

SEQ ID NO: 50525 - DNA, 20 bp, Artificial Sequence
  Description of Artificial Sequence: Synthetic oligonucleotide
  Target: ATXN2; (+) strand; PAM type: NRG; PAM sequence: AAG
cccttgagtccctctagaga

SEQ ID NO: 50526 - DNA, 20 bp, Artificial Sequence
  Description of Artificial Sequence: Synthetic oligonucleotide
  Target: ATXN2; (+) strand; PAM type: NRG; PAM sequence: AGG
ccttgagtccctctagagaa

SEQ ID NO: 50527 - DNA, 20 bp, Artificial Sequence
  Description of Artificial Sequence: Synthetic oligonucleotide
  Target: ATXN2; (+) strand; PAM type: NRG; PAM sequence: GGG
cttgagtccctctagagaaa

SEQ ID NO: 50528 - DNA, 20 bp, Artificial Sequence
  Description of Artificial Sequence: Synthetic oligonucleotide
  Target: ATXN2; (+) strand; PAM type: NRG; PAM sequence: AAG
ccctctagagaaagggataa

SEQ ID NO: 50529 - DNA, 20 bp, Artificial Sequence
  Description of Artificial Sequence: Synthetic oligonucleotide
  Target: ATXN2; (+) strand; PAM type: NRG; PAM sequence: AGG
cctctagagaaagggataaa

SEQ ID NO: 50530 - DNA, 20 bp, Artificial Sequence
  Description of Artificial Sequence: Synthetic oligonucleotide
  Target: ATXN2; (+) strand; PAM type: NRG; PAM sequence: TGG
agagaaagggataaaaggct

SEQ ID NO: 50531 - DNA, 20 bp, Artificial Sequence
  Description of Artificial Sequence: Synthetic oligonucleotide
  Target: ATXN2; (+) strand; PAM type: NRG; PAM sequence: AAG
ggataaaaggcttggtcatg

SEQ ID NO: 50532 - DNA, 20 bp, Artificial Sequence
  Description of Artificial Sequence: Synthetic oligonucleotide
  Target: ATXN2; (+) strand; PAM type: NRG; PAM sequence: TAG
gtcatgaagccatgaacaac

SEQ ID NO: 50533 - DNA, 20 bp, Artificial Sequence
  Description of Artificial Sequence: Synthetic oligonucleotide
  Target: ATXN2; (+) strand; PAM type: NRG; PAM sequence: TAG
atgaacaactagatccaacc

SEQ ID NO: 50534 - DNA, 20 bp, Artificial Sequence
  Description of Artificial Sequence: Synthetic oligonucleotide
  Target: ATXN2; (+) strand; PAM type: NRG; PAM sequence: CAG
accaaaaaatccaaacaact

SEQ ID NO: 50535 - DNA, 20 bp, Artificial Sequence
  Description of Artificial Sequence: Synthetic oligonucleotide
  Target: ATXN2; (+) strand; PAM type: NRG; PAM sequence: AGG
ccaaaaaatccaaacaactc

SEQ ID NO: 50536 - DNA, 20 bp, Artificial Sequence
  Description of Artificial Sequence: Synthetic oligonucleotide
  Target: ATXN2; (+) strand; PAM type: NRG; PAM sequence: TAG
aaaaatccaaacaactcagg

SEQ ID NO: 50537 - DNA, 20 bp, Artificial Sequence
  Description of Artificial Sequence: Synthetic oligonucleotide
  Target: ATXN2; (+) strand; PAM type: NRG; PAM sequence: AAG
tccaaacaactcaggtagaa

SEQ ID NO: 50538 - DNA, 20 bp, Artificial Sequence
  Description of Artificial Sequence: Synthetic oligonucleotide
  Target: ATXN2; (+) strand; PAM type: NRG; PAM sequence: AGG
ccaaacaactcaggtagaaa

SEQ ID NO: 50539 - DNA, 20 bp, Artificial Sequence
  Description of Artificial Sequence: Synthetic oligonucleotide
  Target: ATXN2; (+) strand; PAM type: NRG; PAM sequence: TAG
actcaggtagaaaaggatct

SEQ ID NO: 50540 - DNA, 20 bp, Artificial Sequence
  Description of Artificial Sequence: Synthetic oligonucleotide
  Target: ATXN2; (+) strand; PAM type: NRG; PAM sequence: AGG
ctcaggtagaaaaggatctt

SEQ ID NO: 50541 - DNA, 20 bp, Artificial Sequence
  Description of Artificial Sequence: Synthetic oligonucleotide
  Target: ATXN2; (+) strand; PAM type: NRG; PAM sequence: GGG
tcaggtagaaaaggatctta

SEQ ID NO: 50542 - DNA, 20 bp, Artificial Sequence
  Description of Artificial Sequence: Synthetic oligonucleotide
  Target: ATXN2; (+) strand; PAM type: NRG; PAM sequence: TAG
agaaaaggatcttagggctc

SEQ ID NO: 50543 - DNA, 20 bp, Artificial Sequence
  Description of Artificial Sequence: Synthetic oligonucleotide
  Target: ATXN2; (+) strand; PAM type: NRG; PAM sequence: AAG
gctctagtcccatgctgtcc

SEQ ID NO: 50544 - DNA, 20 bp, Artificial Sequence
  Description of Artificial Sequence: Synthetic oligonucleotide
  Target: ATXN2; (+) strand; PAM type: NRG; PAM sequence: GAG
tctagtcccatgctgtccaa

SEQ ID NO: 50545 - DNA, 20 bp, Artificial Sequence
  Description of Artificial Sequence: Synthetic oligonucleotide
  Target: ATXN2; (+) strand; PAM type: NRG; PAM sequence: AAG
gagaactttgtacaatgatg

SEQ ID NO: 50546 - DNA, 20 bp, Artificial Sequence
  Description of Artificial Sequence: Synthetic oligonucleotide
  Target: ATXN2; (+) strand; PAM type: NRG; PAM sequence: CAG
tgtcatgctgtccaatattg

SEQ ID NO: 50547 - DNA, 20 bp, Artificial Sequence
  Description of Artificial Sequence: Synthetic oligonucleotide
  Target: ATXN2; (+) strand; PAM type: NRG; PAM sequence: TAG
ctgtccaatattgcagccat

SEQ ID NO: 50548 - DNA, 20 bp, Artificial Sequence
  Description of Artificial Sequence: Synthetic oligonucleotide
  Target: ATXN2; (+) strand; PAM type: NRG; PAM sequence: AGG
tgtccaatattgcagccatt

SEQ ID NO: 50549 - DNA, 20 bp, Artificial Sequence
  Description of Artificial Sequence: Synthetic oligonucleotide
  Target: ATXN2; (+) strand; PAM type: NRG; PAM sequence: TGG
ttgcagccattaggcacatg

SEQ ID NO: 50550 - DNA, 20 bp, Artificial Sequence
  Description of Artificial Sequence: Synthetic oligonucleotide
  Target: ATXN2; (+) strand; PAM type: NRG; PAM sequence: CAG
cagccattaggcacatgtgg

SEQ ID NO: 50551 - DNA, 20 bp, Artificial Sequence
  Description of Artificial Sequence: Synthetic oligonucleotide
  Target: ATXN2; (+) strand; PAM type: NRG; PAM sequence: AAG
attaggcacatgtggcagct

SEQ ID NO: 50552 - DNA, 20 bp, Artificial Sequence
  Description of Artificial Sequence: Synthetic oligonucleotide
  Target: ATXN2; (+) strand; PAM type: NRG; PAM sequence: TAG
ctaagcacttgaaatacgat

SEQ ID NO: 50553 - DNA, 20 bp, Artificial Sequence
  Description of Artificial Sequence: Synthetic oligonucleotide
  Target: ATXN2; (+) strand; PAM type: NRG; PAM sequence: TGG
cacttgaaatacgattagta

SEQ ID NO: 50554 - DNA, 20 bp, Artificial Sequence
  Description of Artificial Sequence: Synthetic oligonucleotide
  Target: ATXN2; (+) strand; PAM type: NRG; PAM sequence: GAG
gaaatacgattagtatggct

SEQ ID NO: 50555 - DNA, 20 bp, Artificial Sequence
  Description of Artificial Sequence: Synthetic oligonucleotide
  Target: ATXN2; (+) strand; PAM type: NRG; PAM sequence: AGG
aaatacgattagtatggctg

SEQ ID NO: 50556 - DNA, 20 bp, Artificial Sequence
  Description of Artificial Sequence: Synthetic oligonucleotide
  Target: ATXN2; (+) strand; PAM type: NRG; PAM sequence: AAG
tcaacataattttaaattta

SEQ ID NO: 50557 - DNA, 20 bp, Artificial Sequence
  Description of Artificial Sequence: Synthetic oligonucleotide
  Target: ATXN2; (+) strand; PAM type: NRG; PAM sequence: TGG
taaatttaaagaaccatgtg

SEQ ID NO: 50558 - DNA, 20 bp, Artificial Sequence
  Description of Artificial Sequence: Synthetic oligonucleotide
  Target: ATXN2; (+) strand; PAM type: NRG; PAM sequence: AAG
atttaaagaaccatgtgtgg

SEQ ID NO: 50559 - DNA, 20 bp, Artificial Sequence
  Description of Artificial Sequence: Synthetic oligonucleotide
  Target: ATXN2; (+) strand; PAM type: NRG; PAM sequence: TAG
taaagaaccatgtgtggaag

SEQ ID NO: 50560 - DNA, 20 bp, Artificial Sequence
  Description of Artificial Sequence: Synthetic oligonucleotide
  Target: ATXN2; (+) strand; PAM type: NRG; PAM sequence: TGG
tgtggaagtagccacaatac

SEQ ID NO: 50561 - DNA, 20 bp, Artificial Sequence
  Description of Artificial Sequence: Synthetic oligonucleotide
  Target: ATXN2; (+) strand; PAM type: NRG; PAM sequence: CAG
gaagtagccacaatactgga

SEQ ID NO: 50562 - DNA, 20 bp, Artificial Sequence
  Description of Artificial Sequence: Synthetic oligonucleotide
  Target: ATXN2; (+) strand; PAM type: NRG; PAM sequence: GAG
gtgcccattcccatcttctc

SEQ ID NO: 50563 - DNA, 20 bp, Artificial Sequence
  Description of Artificial Sequence: Synthetic oligonucleotide
  Target: ATXN2; (+) strand; PAM type: NRG; PAM sequence: CAG
tcccatcttctcgagttctc

SEQ ID NO: 50564 - DNA, 20 bp, Artificial Sequence
  Description of Artificial Sequence: Synthetic oligonucleotide
  Target: ATXN2; (+) strand; PAM type: NRG; PAM sequence: CAG
atcttctcgagttctccaga

SEQ ID NO: 50565 - DNA, 20 bp, Artificial Sequence
  Description of Artificial Sequence: Synthetic oligonucleotide
  Target: ATXN2; (+) strand; PAM type: NRG; PAM sequence: AAG
tctcgagttctccagacagt

SEQ ID NO: 50566 - DNA, 20 bp, Artificial Sequence
  Description of Artificial Sequence: Synthetic oligonucleotide
  Target: ATXN2; (+) strand; PAM type: NRG; PAM sequence: CGG
cagtaagccacccccttcca

SEQ ID NO: 50567 - DNA, 20 bp, Artificial Sequence
  Description of Artificial Sequence: Synthetic oligonucleotide
  Target: ATXN2; (+) strand; PAM type: NRG; PAM sequence: AAG
tcacctctgacttatgcacc

SEQ ID NO: 50568 - DNA, 20 bp, Artificial Sequence
  Description of Artificial Sequence: Synthetic oligonucleotide
  Target: ATXN2; (+) strand; PAM type: NRG; PAM sequence: CAG
gcaccaagaatgcttcctga

SEQ ID NO: 50569 - DNA, 20 bp, Artificial Sequence
  Description of Artificial Sequence: Synthetic oligonucleotide
  Target: ATXN2; (+) strand; PAM type: NRG; PAM sequence: AGG
caccaagaatgcttcctgac

SEQ ID NO: 50570 - DNA, 20 bp, Artificial Sequence
  Description of Artificial Sequence: Synthetic oligonucleotide
  Target: ATXN2; (+) strand; PAM type: NRG; PAM sequence: AAG
tgcttcctgacaggaaactc

SEQ ID NO: 50571 - DNA, 20 bp, Artificial Sequence
  Description of Artificial Sequence: Synthetic oligonucleotide
  Target: ATXN2; (+) strand; PAM type: NRG; PAM sequence: TGG
ctcataaacttatccctttc

SEQ ID NO: 50572 - DNA, 20 bp, Artificial Sequence
  Description of Artificial Sequence: Synthetic oligonucleotide
  Target: ATXN2; (+) strand; PAM type: NRG; PAM sequence: GAG
cataaacttatccctttctg

SEQ ID NO: 50573 - DNA, 20 bp, Artificial Sequence
  Description of Artificial Sequence: Synthetic oligonucleotide
  Target: ATXN2; (+) strand; PAM type: NRG; PAM sequence: AGG
ataaacttatccctttctgg

SEQ ID NO: 50574 - DNA, 20 bp, Artificial Sequence
  Description of Artificial Sequence: Synthetic oligonucleotide
  Target: ATXN2; (+) strand; PAM type: NRG; PAM sequence: AAG
acaattgtattccccttcaa

SEQ ID NO: 50575 - DNA, 20 bp, Artificial Sequence
  Description of Artificial Sequence: Synthetic oligonucleotide
  Target: ATXN2; (+) strand; PAM type: NRG; PAM sequence: CAG
attccccttcaaaagactat

SEQ ID NO: 50576 - DNA, 20 bp, Artificial Sequence
  Description of Artificial Sequence: Synthetic oligonucleotide
  Target: ATXN2; (+) strand; PAM type: NRG; PAM sequence: TGG
ccccttcaaaagactatcag

SEQ ID NO: 50577 - DNA, 20 bp, Artificial Sequence
  Description of Artificial Sequence: Synthetic oligonucleotide
  Target: ATXN2; (+) strand; PAM type: NRG; PAM sequence: GAG
ccttcaaaagactatcagtg

SEQ ID NO: 50578 - DNA, 20 bp, Artificial Sequence
  Description of Artificial Sequence: Synthetic oligonucleotide
  Target: ATXN2; (+) strand; PAM type: NRG; PAM sequence: AGG
cttcaaaagactatcagtgg

SEQ ID NO: 50579 - DNA, 20 bp, Artificial Sequence
  Description of Artificial Sequence: Synthetic oligonucleotide
  Target: ATXN2; (+) strand; PAM type: NRG; PAM sequence: GAG
tcaaaagactatcagtggag

SEQ ID NO: 50580 - DNA, 20 bp, Artificial Sequence
  Description of Artificial Sequence: Synthetic oligonucleotide
  Target: ATXN2; (+) strand; PAM type: NRG; PAM sequence: GAG
aaaagactatcagtggagga

SEQ ID NO: 50581 - DNA, 20 bp, Artificial Sequence
  Description of Artificial Sequence: Synthetic oligonucleotide
  Target: ATXN2; (+) strand; PAM type: NRG; PAM sequence: AGG
aaagactatcagtggaggag

SEQ ID NO: 50582 - DNA, 20 bp, Artificial Sequence
  Description of Artificial Sequence: Synthetic oligonucleotide
  Target: ATXN2; (+) strand; PAM type: NRG; PAM sequence: GGG
aagactatcagtggaggaga

SEQ ID NO: 50583 - DNA, 20 bp, Artificial Sequence
  Description of Artificial Sequence: Synthetic oligonucleotide
  Target: ATXN2; (+) strand; PAM type: NRG; PAM sequence: GGG
agactatcagtggaggagag

SEQ ID NO: 50584 - DNA, 20 bp, Artificial Sequence
  Description of Artificial Sequence: Synthetic oligonucleotide
  Target: ATXN2; (+) strand; PAM type: NRG; PAM sequence: GAG
actatcagtggaggagaggg

SEQ ID NO: 50585 - DNA, 20 bp, Artificial Sequence
  Description of Artificial Sequence: Synthetic oligonucleotide
  Target: ATXN2; (+) strand; PAM type: NRG; PAM sequence: TAG
cagtggaggagaggggagta

SEQ ID NO: 50586 - DNA, 20 bp, Artificial Sequence
  Description of Artificial Sequence: Synthetic oligonucleotide
  Target: ATXN2; (+) strand; PAM type: NRG; PAM sequence: TGG
gagtatagctgaaacaacgt

SEQ ID NO: 50587 - DNA, 20 bp, Artificial Sequence
  Description of Artificial Sequence: Synthetic oligonucleotide
  Target: ATXN2; (+) strand; PAM type: NRG; PAM sequence: AAG
ccatttactgataactgcta

SEQ ID NO: 50588 - DNA, 20 bp, Artificial Sequence
  Description of Artificial Sequence: Synthetic oligonucleotide
  Target: ATXN2; (+) strand; PAM type: NRG; PAM sequence: GAG
tactgataactgctaaagct

SEQ ID NO: 50589 - DNA, 20 bp, Artificial Sequence
  Description of Artificial Sequence: Synthetic oligonucleotide
  Target: ATXN2; (+) strand; PAM type: NRG; PAM sequence: CAG
taactgctaaagctgagtga

SEQ ID NO: 50590 - DNA, 20 bp, Artificial Sequence
  Description of Artificial Sequence: Synthetic oligonucleotide
  Target: ATXN2; (+) strand; PAM type: NRG; PAM sequence: AGG
aactgctaaagctgagtgac

SEQ ID NO: 50591 - DNA, 20 bp, Artificial Sequence
  Description of Artificial Sequence: Synthetic oligonucleotide
  Target: ATXN2; (+) strand; PAM type: NRG; PAM sequence: AAG
aagctgagtgacaggtacat

SEQ ID NO: 50592 - DNA, 20 bp, Artificial Sequence
  Description of Artificial Sequence: Synthetic oligonucleotide
  Target: ATXN2; (+) strand; PAM type: NRG; PAM sequence: CAG
acaggtacataagattcatc

SEQ ID NO: 50593 - DNA, 20 bp, Artificial Sequence
  Description of Artificial Sequence: Synthetic oligonucleotide
  Target: ATXN2; (+) strand; PAM type: NRG; PAM sequence: TAG
ttacattttaaaaaccttat

SEQ ID NO: 50594 - DNA, 20 bp, Artificial Sequence
  Description of Artificial Sequence: Synthetic oligonucleotide
  Target: ATXN2; (+) strand; PAM type: NRG; PAM sequence: AAG
accttattagcgtttacttt

SEQ ID NO: 50595 - DNA, 20 bp, Artificial Sequence
  Description of Artificial Sequence: Synthetic oligonucleotide
  Target: ATXN2; (+) strand; PAM type: NRG; PAM sequence: CAG
caaatgtgtttccttacttt

SEQ ID NO: 50596 - DNA, 20 bp, Artificial Sequence
  Description of Artificial Sequence: Synthetic oligonucleotide
  Target: ATXN2; (+) strand; PAM type: NRG; PAM sequence: GAG
tgtgtttccttactttcagt

SEQ ID NO: 50597 - DNA, 20 bp, Artificial Sequence
  Description of Artificial Sequence: Synthetic oligonucleotide
  Target: ATXN2; (+) strand; PAM type: NRG; PAM sequence: AGG
gtgtttccttactttcagtg

SEQ ID NO: 50598 - DNA, 20 bp, Artificial Sequence
  Description of Artificial Sequence: Synthetic oligonucleotide
  Target: ATXN2; (+) strand; PAM type: NRG; PAM sequence: TAG
ttctacatacaccatgtgta

SEQ ID NO: 50599 - DNA, 20 bp, Artificial Sequence
  Description of Artificial Sequence: Synthetic oligonucleotide
  Target: ATXN2; (+) strand; PAM type: NRG; PAM sequence: TAG
gtatagcaatccctgtactt

SEQ ID NO: 50600 - DNA, 20 bp, Artificial Sequence
  Description of Artificial Sequence: Synthetic oligonucleotide
  Target: ATXN2; (+) strand; PAM type: NRG; PAM sequence: TGG
tagcacaaactcttcccgcc

SEQ ID NO: 50601 - DNA, 20 bp, Artificial Sequence
  Description of Artificial Sequence: Synthetic oligonucleotide
  Target: ATXN2; (+) strand; PAM type: NRG; PAM sequence: TGG
ggaacttcctcctctcttca

SEQ ID NO: 50602 - DNA, 20 bp, Artificial Sequence
  Description of Artificial Sequence: Synthetic oligonucleotide
  Target: ATXN2; (+) strand; PAM type: NRG; PAM sequence: AAG
aaaactgcttatcttccttg

SEQ ID NO: 50603 - DNA, 20 bp, Artificial Sequence
  Description of Artificial Sequence: Synthetic oligonucleotide
  Target: ATXN2; (+) strand; PAM type: NRG; PAM sequence: AAG
tctcaactctcattattttg

SEQ ID NO: 50604 - DNA, 20 bp, Artificial Sequence
  Description of Artificial Sequence: Synthetic oligonucleotide
  Target: ATXN2; (+) strand; PAM type: NRG; PAM sequence: TGG
ttttcttcactgcccaccca

SEQ ID NO: 50605 - DNA, 20 bp, Artificial Sequence
  Description of Artificial Sequence: Synthetic oligonucleotide
  Target: ATXN2; (+) strand; PAM type: NRG; PAM sequence: CAG
tcttcactgcccacccatgg

SEQ ID NO: 50606 - DNA, 20 bp, Artificial Sequence
  Description of Artificial Sequence: Synthetic oligonucleotide
  Target: ATXN2; (+) strand; PAM type: NRG; PAM sequence: CAG
cacccatggcagtcccctcc

SEQ ID NO: 50607 - DNA, 20 bp, Artificial Sequence
  Description of Artificial Sequence: Synthetic oligonucleotide
  Target: ATXN2; (+) strand; PAM type: NRG; PAM sequence: TGG
gcctgccttctctactacac

SEQ ID NO: 50608 - DNA, 20 bp, Artificial Sequence
  Description of Artificial Sequence: Synthetic oligonucleotide
  Target: ATXN2; (+) strand; PAM type: NRG; PAM sequence: GGG
cctgccttctctactacact

SEQ ID NO: 50609 - DNA, 20 bp, Artificial Sequence
  Description of Artificial Sequence: Synthetic oligonucleotide
  Target: ATXN2; (+) strand; PAM type: NRG; PAM sequence: TGG
ctctactacactgggtaacc

SEQ ID NO: 50610 - DNA, 20 bp, Artificial Sequence
  Description of Artificial Sequence: Synthetic oligonucleotide
  Target: ATXN2; (+) strand; PAM type: NRG; PAM sequence: AAG
tactacactgggtaacctgg

SEQ ID NO: 50611 - DNA, 20 bp, Artificial Sequence
  Description of Artificial Sequence: Synthetic oligonucleotide
  Target: ATXN2; (+) strand; PAM type: NRG; PAM sequence: CAG
tacactgggtaacctggaag

SEQ ID NO: 50612 - DNA, 20 bp, Artificial Sequence
  Description of Artificial Sequence: Synthetic oligonucleotide
  Target: ATXN2; (+) strand; PAM type: NRG; PAM sequence: GAG
cactgggtaacctggaagca

SEQ ID NO: 50613 - DNA, 20 bp, Artificial Sequence
  Description of Artificial Sequence: Synthetic oligonucleotide
  Target: ATXN2; (+) strand; PAM type: NRG; PAM sequence: TAG
attcatctttgtctctgtcc

SEQ ID NO: 50614 - DNA, 20 bp, Artificial Sequence
  Description of Artificial Sequence: Synthetic oligonucleotide
  Target: ATXN2; (+) strand; PAM type: NRG; PAM sequence: CAG
ttgtctctgtcctagtctga

SEQ ID NO: 50615 - DNA, 20 bp, Artificial Sequence
  Description of Artificial Sequence: Synthetic oligonucleotide
  Target: ATXN2; (+) strand; PAM type: NRG; PAM sequence: TAG
cttaatgaaacgctaaactg

SEQ ID NO: 50616 - DNA, 20 bp, Artificial Sequence
  Description of Artificial Sequence: Synthetic oligonucleotide
  Target: ATXN2; (+) strand; PAM type: NRG; PAM sequence: AAG
cattcatactgtactacccc

SEQ ID NO: 50617 - DNA, 20 bp, Artificial Sequence
  Description of Artificial Sequence: Synthetic oligonucleotide
  Target: ATXN2; (+) strand; PAM type: NRG; PAM sequence: TGG
acttttcaaccttaacttgc

SEQ ID NO: 50618 - DNA, 20 bp, Artificial Sequence
  Description of Artificial Sequence: Synthetic oligonucleotide
  Target: ATXN2; (+) strand; PAM type: NRG; PAM sequence: TAG
tcaaccttaacttgctggtg

SEQ ID NO: 50619 - DNA, 20 bp, Artificial Sequence
  Description of Artificial Sequence: Synthetic oligonucleotide
  Target: ATXN2; (+) strand; PAM type: NRG; PAM sequence: TGG
cttgctggtgtagtttctac

SEQ ID NO: 50620 - DNA, 20 bp, Artificial Sequence
  Description of Artificial Sequence: Synthetic oligonucleotide
  Target: ATXN2; (+) strand; PAM type: NRG; PAM sequence: AAG
tggtttccaaacatgctaat

SEQ ID NO: 50621 - DNA, 20 bp, Artificial Sequence
  Description of Artificial Sequence: Synthetic oligonucleotide
  Target: ATXN2; (+) strand; PAM type: NRG; PAM sequence: CAG
tccaaacatgctaataagaa

SEQ ID NO: 50622 - DNA, 20 bp, Artificial Sequence
  Description of Artificial Sequence: Synthetic oligonucleotide
  Target: ATXN2; (+) strand; PAM type: NRG; PAM sequence: AAG
atgctaataagaacagctaa

SEQ ID NO: 50623 - DNA, 20 bp, Artificial Sequence
  Description of Artificial Sequence: Synthetic oligonucleotide
  Target: ATXN2; (+) strand; PAM type: NRG; PAM sequence: GAG
aagaacagctaaaagttact

SEQ ID NO: 50624 - DNA, 20 bp, Artificial Sequence
  Description of Artificial Sequence: Synthetic oligonucleotide
  Target: ATXN2; (+) strand; PAM type: NRG; PAM sequence: CAG
actgagcacttattacttgc

SEQ ID NO: 50625 - DNA, 20 bp, Artificial Sequence
  Description of Artificial Sequence: Synthetic oligonucleotide
  Target: ATXN2; (+) strand; PAM type: NRG; PAM sequence: AGG
ctgagcacttattacttgcc

SEQ ID NO: 50626 - DNA, 20 bp, Artificial Sequence
  Description of Artificial Sequence: Synthetic oligonucleotide
  Target: ATXN2; (+) strand; PAM type: NRG; PAM sequence: AAG
tacttgccaggcattgcttt

SEQ ID NO: 50627 - DNA, 20 bp, Artificial Sequence
  Description of Artificial Sequence: Synthetic oligonucleotide
  Target: ATXN2; (+) strand; PAM type: NRG; PAM sequence: CAG
cctcttccatccccttttta

SEQ ID NO: 50628 - DNA, 20 bp, Artificial Sequence
  Description of Artificial Sequence: Synthetic oligonucleotide
  Target: ATXN2; (+) strand; PAM type: NRG; PAM sequence: AGG
ctcttccatcccctttttac

SEQ ID NO: 50629 - DNA, 20 bp, Artificial Sequence
  Description of Artificial Sequence: Synthetic oligonucleotide
  Target: ATXN2; (+) strand; PAM type: NRG; PAM sequence: GGG
tcttccatcccctttttaca

SEQ ID NO: 50630 - DNA, 20 bp, Artificial Sequence
  Description of Artificial Sequence: Synthetic oligonucleotide
  Target: ATXN2; (+) strand; PAM type: NRG; PAM sequence: GGG
cttccatcccctttttacag

SEQ ID NO: 50631 - DNA, 20 bp, Artificial Sequence
  Description of Artificial Sequence: Synthetic oligonucleotide
  Target: ATXN2; (+) strand; PAM type: NRG; PAM sequence: AAG
ccatcccctttttacagggg

SEQ ID NO: 50632 - DNA, 20 bp, Artificial Sequence
  Description of Artificial Sequence: Synthetic oligonucleotide
  Target: ATXN2; (+) strand; PAM type: NRG; PAM sequence: AAG
ttttacaggggaagaaactt

SEQ ID NO: 50633 - DNA, 20 bp, Artificial Sequence
  Description of Artificial Sequence: Synthetic oligonucleotide
  Target: ATXN2; (+) strand; PAM type: NRG; PAM sequence: AAG
aggggaagaaacttaagcat

SEQ ID NO: 50634 - DNA, 20 bp, Artificial Sequence
  Description of Artificial Sequence: Synthetic oligonucleotide
  Target: ATXN2; (+) strand; PAM type: NRG; PAM sequence: AAG
ataacttgccttacatcacg

SEQ ID NO: 50635 - DNA, 20 bp, Artificial Sequence
  Description of Artificial Sequence: Synthetic oligonucleotide
  Target: ATXN2; (+) strand; PAM type: NRG; PAM sequence: AAG
gccttacatcacgaagtatg

SEQ ID NO: 50636 - DNA, 20 bp, Artificial Sequence
  Description of Artificial Sequence: Synthetic oligonucleotide
  Target: ATXN2; (+) strand; PAM type: NRG; PAM sequence: AGG
ccttacatcacgaagtatga

SEQ ID NO: 50637 - DNA, 20 bp, Artificial Sequence
  Description of Artificial Sequence: Synthetic oligonucleotide
  Target: ATXN2; (+) strand; PAM type: NRG; PAM sequence: GAG
ttacatcacgaagtatgaag

SEQ ID NO: 50638 - DNA, 20 bp, Artificial Sequence
  Description of Artificial Sequence: Synthetic oligonucleotide
  Target: ATXN2; (+) strand; PAM type: NRG; PAM sequence: CAG
catcacgaagtatgaaggag

SEQ ID NO: 50639 - DNA, 20 bp, Artificial Sequence
  Description of Artificial Sequence: Synthetic oligonucleotide
  Target: ATXN2; (+) strand; PAM type: NRG; PAM sequence: AGG
atcacgaagtatgaaggagc

SEQ ID NO: 50640 - DNA, 20 bp, Artificial Sequence
  Description of Artificial Sequence: Synthetic oligonucleotide
  Target: ATXN2; (+) strand; PAM type: NRG; PAM sequence: GGG
tcacgaagtatgaaggagca

SEQ ID NO: 50641 - DNA, 20 bp, Artificial Sequence
  Description of Artificial Sequence: Synthetic oligonucleotide
  Target: ATXN2; (+) strand; PAM type: NRG; PAM sequence: AAG
ggatgcgaatactaattgta

SEQ ID NO: 50642 - DNA, 20 bp, Artificial Sequence
  Description of Artificial Sequence: Synthetic oligonucleotide
  Target: ATXN2; (+) strand; PAM type: NRG; PAM sequence: AAG
tccctgctcctgtgtacaac

SEQ ID NO: 50643 - DNA, 20 bp, Artificial Sequence
  Description of Artificial Sequence: Synthetic oligonucleotide
  Target: ATXN2; (+) strand; PAM type: NRG; PAM sequence: AGG
ccctgctcctgtgtacaaca

SEQ ID NO: 50644 - DNA, 20 bp, Artificial Sequence
  Description of Artificial Sequence: Synthetic oligonucleotide
  Target: ATXN2; (+) strand; PAM type: NRG; PAM sequence: AAG
tgctcctgtgtacaacaagg

SEQ ID NO: 50645 - DNA, 20 bp, Artificial Sequence
  Description of Artificial Sequence: Synthetic oligonucleotide
  Target: ATXN2; (+) strand; PAM type: NRG; PAM sequence: AAG
caaatcataatctcaaatgc

SEQ ID NO: 50646 - DNA, 20 bp, Artificial Sequence
  Description of Artificial Sequence: Synthetic oligonucleotide
  Target: ATXN2; (+) strand; PAM type: NRG; PAM sequence: CAG
aagcttcaaatcccaaaatt

SEQ ID NO: 50647 - DNA, 20 bp, Artificial Sequence
  Description of Artificial Sequence: Synthetic oligonucleotide
  Target: ATXN2; (+) strand; PAM type: NRG; PAM sequence: TGG
caaatcccaaaattcagatt

SEQ ID NO: 50648 - DNA, 20 bp, Artificial Sequence
  Description of Artificial Sequence: Synthetic oligonucleotide
  Target: ATXN2; (+) strand; PAM type: NRG; PAM sequence: GGG
aaatcccaaaattcagattt

SEQ ID NO: 50649 - DNA, 20 bp, Artificial Sequence
  Description of Artificial Sequence: Synthetic oligonucleotide
  Target: ATXN2; (+) strand; PAM type: NRG; PAM sequence: AAG
cccaaaattcagatttggga

SEQ ID NO: 50650 - DNA, 20 bp, Artificial Sequence
  Description of Artificial Sequence: Synthetic oligonucleotide
  Target: ATXN2; (+) strand; PAM type: NRG; PAM sequence: AGG
ccaaaattcagatttgggaa

SEQ ID NO: 50651 - DNA, 20 bp, Artificial Sequence
  Description of Artificial Sequence: Synthetic oligonucleotide
  Target: ATXN2; (+) strand; PAM type: NRG; PAM sequence: GGG
caaaattcagatttgggaaa

SEQ ID NO: 50652 - DNA, 20 bp, Artificial Sequence
  Description of Artificial Sequence: Synthetic oligonucleotide
  Target: ATXN2; (+) strand; PAM type: NRG; PAM sequence: GGG
aaaattcagatttgggaaag

SEQ ID NO: 50653 - DNA, 20 bp, Artificial Sequence
  Description of Artificial Sequence: Synthetic oligonucleotide
  Target: ATXN2; (+) strand; PAM type: NRG; PAM sequence: TAG
tcagatttgggaaaggggat

SEQ ID NO: 50654 - DNA, 20 bp, Artificial Sequence
  Description of Artificial Sequence: Synthetic oligonucleotide
  Target: ATXN2; (+) strand; PAM type: NRG; PAM sequence: AGG
cagatttgggaaaggggatt

SEQ ID NO: 50655 - DNA, 20 bp, Artificial Sequence
  Description of Artificial Sequence: Synthetic oligonucleotide
  Target: ATXN2; (+) strand; PAM type: NRG; PAM sequence: TAG
aaggggattaggatgccaaa

SEQ ID NO: 50656 - DNA, 20 bp, Artificial Sequence
  Description of Artificial Sequence: Synthetic oligonucleotide
  Target: ATXN2; (+) strand; PAM type: NRG; PAM sequence: AGG
aggggattaggatgccaaat

SEQ ID NO: 50657 - DNA, 20 bp, Artificial Sequence
  Description of Artificial Sequence: Synthetic oligonucleotide
  Target: ATXN2; (+) strand; PAM type: NRG; PAM sequence: AAG
taggaatactgacctgtaaa

SEQ ID NO: 50658 - DNA, 20 bp, Artificial Sequence
  Description of Artificial Sequence: Synthetic oligonucleotide
  Target: ATXN2; (+) strand; PAM type: NRG; PAM sequence: AAG
tactgacctgtaaaaagaaa

SEQ ID NO: 50659 - DNA, 20 bp, Artificial Sequence
  Description of Artificial Sequence: Synthetic oligonucleotide
  Target: ATXN2; (+) strand; PAM type: NRG; PAM sequence: TAG
gtaaaaagaaaaagtaactt

SEQ ID NO: 50660 - DNA, 20 bp, Artificial Sequence
  Description of Artificial Sequence: Synthetic oligonucleotide
  Target: ATXN2; (+) strand; PAM type: NRG; PAM sequence: AGG
taaaaagaaaaagtaacttt

SEQ ID NO: 50661 - DNA, 20 bp, Artificial Sequence
  Description of Artificial Sequence: Synthetic oligonucleotide
  Target: ATXN2; (+) strand; PAM type: NRG; PAM sequence: CAG
tttaggcattctccacaaaa

SEQ ID NO: 50662 - DNA, 20 bp, Artificial Sequence
  Description of Artificial Sequence: Synthetic oligonucleotide
  Target: ATXN2; (+) strand; PAM type: NRG; PAM sequence: GAG
cattctccacaaaacagtgt

SEQ ID NO: 50663 - DNA, 20 bp, Artificial Sequence
  Description of Artificial Sequence: Synthetic oligonucleotide
  Target: ATXN2; (+) strand; PAM type: NRG; PAM sequence: AGG
attctccacaaaacagtgtg

SEQ ID NO: 50664 - DNA, 20 bp, Artificial Sequence
  Description of Artificial Sequence: Synthetic oligonucleotide
  Target: ATXN2; (+) strand; PAM type: NRG; PAM sequence: GGG
ttctccacaaaacagtgtga

SEQ ID NO: 50665 - DNA, 20 bp, Artificial Sequence
  Description of Artificial Sequence: Synthetic oligonucleotide
  Target: ATXN2; (+) strand; PAM type: NRG; PAM sequence: TGG
caaaacagtgtgagggaaaa

SEQ ID NO: 50666 - DNA, 20 bp, Artificial Sequence
  Description of Artificial Sequence: Synthetic oligonucleotide
  Target: ATXN2; (+) strand; PAM type: NRG; PAM sequence: TAG
ctttttattcttgtaattta

SEQ ID NO: 50667 - DNA, 20 bp, Artificial Sequence
  Description of Artificial Sequence: Synthetic oligonucleotide
  Target: ATXN2; (+) strand; PAM type: NRG; PAM sequence: AAG
ttattcttgtaatttatagt

SEQ ID NO: 50668 - DNA, 20 bp, Artificial Sequence
  Description of Artificial Sequence: Synthetic oligonucleotide
  Target: ATXN2; (+) strand; PAM type: NRG; PAM sequence: AAG
atagtaagctactactgaat

SEQ ID NO: 50669 - DNA, 20 bp, Artificial Sequence
  Description of Artificial Sequence: Synthetic oligonucleotide
  Target: ATXN2; (+) strand; PAM type: NRG; PAM sequence: AAG
taagctactactgaataaga

SEQ ID NO: 50670 - DNA, 20 bp, Artificial Sequence
  Description of Artificial Sequence: Synthetic oligonucleotide
  Target: ATXN2; (+) strand; PAM type: NRG; PAM sequence: TAG
ataagaaagctaacttgtac

SEQ ID NO: 50671 - DNA, 20 bp, Artificial Sequence
  Description of Artificial Sequence: Synthetic oligonucleotide
  Target: ATXN2; (+) strand; PAM type: NRG; PAM sequence: AAG
aagctaacttgtactagaca

SEQ ID NO: 50672 - DNA, 20 bp, Artificial Sequence
  Description of Artificial Sequence: Synthetic oligonucleotide
  Target: ATXN2; (+) strand; PAM type: NRG; PAM sequence: AAG
aacttgtactagacaaagtt

SEQ ID NO: 50673 - DNA, 20 bp, Artificial Sequence
  Description of Artificial Sequence: Synthetic oligonucleotide
  Target: ATXN2; (+) strand; PAM type: NRG; PAM sequence: CAG
ctagacaaagttaagttcta

SEQ ID NO: 50674 - DNA, 20 bp, Artificial Sequence
  Description of Artificial Sequence: Synthetic oligonucleotide
  Target: ATXN2; (+) strand; PAM type: NRG; PAM sequence: AGG
tagacaaagttaagttctac

SEQ ID NO: 50675 - DNA, 20 bp, Artificial Sequence
  Description of Artificial Sequence: Synthetic oligonucleotide
  Target: ATXN2; (+) strand; PAM type: NRG; PAM sequence: AAG
acaaagttaagttctacagg

SEQ ID NO: 50676 - DNA, 20 bp, Artificial Sequence
  Description of Artificial Sequence: Synthetic oligonucleotide
  Target: ATXN2; (+) strand; PAM type: NRG; PAM sequence: TAG
tacaggaagtttttaattat

SEQ ID NO: 50677 - DNA, 20 bp, Artificial Sequence
  Description of Artificial Sequence: Synthetic oligonucleotide
  Target: ATXN2; (+) strand; PAM type: NRG; PAM sequence: TAG
aagtttttaattattagaat

SEQ ID NO: 50678 - DNA, 20 bp, Artificial Sequence
  Description of Artificial Sequence: Synthetic oligonucleotide
  Target: ATXN2; (+) strand; PAM type: NRG; PAM sequence: TGG
aattattagaattagtttca

SEQ ID NO: 50679 - DNA, 20 bp, Artificial Sequence
  Description of Artificial Sequence: Synthetic oligonucleotide
  Target: ATXN2; (+) strand; PAM type: NRG; PAM sequence: TGG
aattagtttcatggaaaatt

SEQ ID NO: 50680 - DNA, 20 bp, Artificial Sequence
  Description of Artificial Sequence: Synthetic oligonucleotide
  Target: ATXN2; (+) strand; PAM type: NRG; PAM sequence: GGG
attagtttcatggaaaattt

SEQ ID NO: 50681 - DNA, 20 bp, Artificial Sequence
  Description of Artificial Sequence: Synthetic oligonucleotide
  Target: ATXN2; (+) strand; PAM type: NRG; PAM sequence: TAG
gtttcatggaaaatttgggc

SEQ ID NO: 50682 - DNA, 20 bp, Artificial Sequence
  Description of Artificial Sequence: Synthetic oligonucleotide
  Target: ATXN2; (+) strand; PAM type: NRG; PAM sequence: AAG
aaaatttgggctagatctta

SEQ ID NO: 50683 - DNA, 20 bp, Artificial Sequence
  Description of Artificial Sequence: Synthetic oligonucleotide
  Target: ATXN2; (+) strand; PAM type: NRG; PAM sequence: AGG
aaatttgggctagatcttaa

SEQ ID NO: 50684 - DNA, 20 bp, Artificial Sequence
  Description of Artificial Sequence: Synthetic oligonucleotide
  Target: ATXN2; (+) strand; PAM type: NRG; PAM sequence: GGG
aatttgggctagatcttaaa

SEQ ID NO: 50685 - DNA, 20 bp, Artificial Sequence
  Description of Artificial Sequence: Synthetic oligonucleotide
  Target: ATXN2; (+) strand; PAM type: NRG; PAM sequence: AAG
tgggctagatcttaaagggt

SEQ ID NO: 50686 - DNA, 20 bp, Artificial Sequence
  Description of Artificial Sequence: Synthetic oligonucleotide
  Target: ATXN2; (+) strand; PAM type: NRG; PAM sequence: GAG
agatcttaaagggtaagtat

SEQ ID NO: 50687 - DNA, 20 bp, Artificial Sequence
  Description of Artificial Sequence: Synthetic oligonucleotide
  Target: ATXN2; (+) strand; PAM type: NRG; PAM sequence: AGG
gatcttaaagggtaagtatg

SEQ ID NO: 50688 - DNA, 20 bp, Artificial Sequence
  Description of Artificial Sequence: Synthetic oligonucleotide
  Target: ATXN2; (+) strand; PAM type: NRG; PAM sequence: TGG
gtaagtatgaggatctcgaa

SEQ ID NO: 50689 - DNA, 20 bp, Artificial Sequence
  Description of Artificial Sequence: Synthetic oligonucleotide
  Target: ATXN2; (+) strand; PAM type: NRG; PAM sequence: CAG
agtatgaggatctcgaatgg

SEQ ID NO: 50690 - DNA, 20 bp, Artificial Sequence
  Description of Artificial Sequence: Synthetic oligonucleotide
  Target: ATXN2; (+) strand; PAM type: NRG; PAM sequence: TGG
ctcgaatggcagaacaatga

SEQ ID NO: 50691 - DNA, 20 bp, Artificial Sequence
  Description of Artificial Sequence: Synthetic oligonucleotide
  Target: ATXN2; (+) strand; PAM type: NRG; PAM sequence: GAG
cgaatggcagaacaatgatg

SEQ ID NO: 50692 - DNA, 20 bp, Artificial Sequence
  Description of Artificial Sequence: Synthetic oligonucleotide
  Target: ATXN2; (+) strand; PAM type: NRG; PAM sequence: AGG
gaatggcagaacaatgatgg

SEQ ID NO: 50693 - DNA, 20 bp, Artificial Sequence
  Description of Artificial Sequence: Synthetic oligonucleotide
  Target: ATXN2; (+) strand; PAM type: NRG; PAM sequence: GAG
atggcagaacaatgatggag

SEQ ID NO: 50694 - DNA, 20 bp, Artificial Sequence
  Description of Artificial Sequence: Synthetic oligonucleotide
  Target: ATXN2; (+) strand; PAM type: NRG; PAM sequence: AAG
cagaacaatgatggaggagc

SEQ ID NO: 50695 - DNA, 20 bp, Artificial Sequence
  Description of Artificial Sequence: Synthetic oligonucleotide
  Target: ATXN2; (+) strand; PAM type: NRG; PAM sequence: AAG
acaatgatggaggagcaagc

SEQ ID NO: 50696 - DNA, 20 bp, Artificial Sequence
  Description of Artificial Sequence: Synthetic oligonucleotide
  Target: ATXN2; (+) strand; PAM type: NRG; PAM sequence: GAG
aatgatggaggagcaagcaa

SEQ ID NO: 50697 - DNA, 20 bp, Artificial Sequence
  Description of Artificial Sequence: Synthetic oligonucleotide
  Target: ATXN2; (+) strand; PAM type: NRG; PAM sequence: AGG
atgatggaggagcaagcaag

SEQ ID NO: 50698 - DNA, 20 bp, Artificial Sequence
  Description of Artificial Sequence: Synthetic oligonucleotide
  Target: ATXN2; (+) strand; PAM type: NRG; PAM sequence: CAG
atggaggagcaagcaagagg

SEQ ID NO: 50699 - DNA, 20 bp, Artificial Sequence
  Description of Artificial Sequence: Synthetic oligonucleotide
  Target: ATXN2; (+) strand; PAM type: NRG; PAM sequence: TGG
agcaagcaagaggcagacac

SEQ ID NO: 50700 - DNA, 20 bp, Artificial Sequence
  Description of Artificial Sequence: Synthetic oligonucleotide
  Target: ATXN2; (+) strand; PAM type: NRG; PAM sequence: GGG
gcaagcaagaggcagacact

SEQ ID NO: 50701 - DNA, 20 bp, Artificial Sequence
  Description of Artificial Sequence: Synthetic oligonucleotide
  Target: ATXN2; (+) strand; PAM type: NRG; PAM sequence: TGG
aagaggcagacactgggcac

SEQ ID NO: 50702 - DNA, 20 bp, Artificial Sequence
  Description of Artificial Sequence: Synthetic oligonucleotide
  Target: ATXN2; (+) strand; PAM type: NRG; PAM sequence: AAG
actgggcactggacctccac

SEQ ID NO: 50703 - DNA, 20 bp, Artificial Sequence
  Description of Artificial Sequence: Synthetic oligonucleotide
  Target: ATXN2; (+) strand; PAM type: NRG; PAM sequence: CAG
gggcactggacctccacaag

SEQ ID NO: 50704 - DNA, 20 bp, Artificial Sequence
  Description of Artificial Sequence: Synthetic oligonucleotide
  Target: ATXN2; (+) strand; PAM type: NRG; PAM sequence: GAG
actggacctccacaagcagt

SEQ ID NO: 50705 - DNA, 20 bp, Artificial Sequence
  Description of Artificial Sequence: Synthetic oligonucleotide
  Target: ATXN2; (+) strand; PAM type: NRG; PAM sequence: AGG
ctggacctccacaagcagtg

SEQ ID NO: 50706 - DNA, 20 bp, Artificial Sequence
  Description of Artificial Sequence: Synthetic oligonucleotide
  Target: ATXN2; (+) strand; PAM type: NRG; PAM sequence: AAG
gacctccacaagcagtgagg

SEQ ID NO: 50707 - DNA, 20 bp, Artificial Sequence
  Description of Artificial Sequence: Synthetic oligonucleotide
  Target: ATXN2; (+) strand; PAM type: NRG; PAM sequence: AGG
acctccacaagcagtgagga

SEQ ID NO: 50708 - DNA, 20 bp, Artificial Sequence
  Description of Artificial Sequence: Synthetic oligonucleotide
  Target: ATXN2; (+) strand; PAM type: NRG; PAM sequence: GAG
ctccacaagcagtgaggaag

SEQ ID NO: 50709 - DNA, 20 bp, Artificial Sequence
  Description of Artificial Sequence: Synthetic oligonucleotide
  Target: ATXN2; (+) strand; PAM type: NRG; PAM sequence: TGG
ggagaccatcttgatttaaa

SEQ ID NO: 50710 - DNA, 20 bp, Artificial Sequence
  Description of Artificial Sequence: Synthetic oligonucleotide
  Target: ATXN2; (+) strand; PAM type: NRG; PAM sequence: GAG
agaccatcttgatttaaatg

SEQ ID NO: 50711 - DNA, 20 bp, Artificial Sequence
  Description of Artificial Sequence: Synthetic oligonucleotide
  Target: ATXN2; (+) strand; PAM type: NRG; PAM sequence: AGG
gaccatcttgatttaaatgg

SEQ ID NO: 50712 - DNA, 20 bp, Artificial Sequence
  Description of Artificial Sequence: Synthetic oligonucleotide
  Target: ATXN2; (+) strand; PAM type: NRG; PAM sequence: AAG
aaatggaggtcatatttttg

SEQ ID NO: 50713 - DNA, 20 bp, Artificial Sequence
  Description of Artificial Sequence: Synthetic oligonucleotide
  Target: ATXN2; (+) strand; PAM type: NRG; PAM sequence: GAG
atggaggtcatatttttgaa

SEQ ID NO: 50714 - DNA, 20 bp, Artificial Sequence
  Description of Artificial Sequence: Synthetic oligonucleotide
  Target: ATXN2; (+) strand; PAM type: NRG; PAM sequence: TGG
tcatatttttgaagagttaa

SEQ ID NO: 50715 - DNA, 20 bp, Artificial Sequence
  Description of Artificial Sequence: Synthetic oligonucleotide
  Target: ATXN2; (+) strand; PAM type: NRG; PAM sequence: GGG
catatttttgaagagttaat

SEQ ID NO: 50716 - DNA, 20 bp, Artificial Sequence
  Description of Artificial Sequence: Synthetic oligonucleotide
  Target: ATXN2; (+) strand; PAM type: NRG; PAM sequence: CAG
gagttaatgggaaacatgat

SEQ ID NO: 50717 - DNA, 20 bp, Artificial Sequence
  Description of Artificial Sequence: Synthetic oligonucleotide
  Target: ATXN2; (+) strand; PAM type: NRG; PAM sequence: AAG
taatgggaaacatgatcaga

SEQ ID NO: 50718 - DNA, 20 bp, Artificial Sequence
  Description of Artificial Sequence: Synthetic oligonucleotide
  Target: ATXN2; (+) strand; PAM type: NRG; PAM sequence: AGG
aatgggaaacatgatcagaa

SEQ ID NO: 50719 - DNA, 20 bp, Artificial Sequence
  Description of Artificial Sequence: Synthetic oligonucleotide
  Target: ATXN2; (+) strand; PAM type: NRG; PAM sequence: TGG
acatgatcagaaaggtaaaa

SEQ ID NO: 50720 - DNA, 20 bp, Artificial Sequence
  Description of Artificial Sequence: Synthetic oligonucleotide
  Target: ATXN2; (+) strand; PAM type: NRG; PAM sequence: GAG
atgatcagaaaggtaaaatg

SEQ ID NO: 50721 - DNA, 20 bp, Artificial Sequence
  Description of Artificial Sequence: Synthetic oligonucleotide
  Target: ATXN2; (+) strand; PAM type: NRG; PAM sequence: TAG
aaggtaaaatggagttctat

SEQ ID NO: 50722 - DNA, 20 bp, Artificial Sequence
  Description of Artificial Sequence: Synthetic oligonucleotide
  Target: ATXN2; (+) strand; PAM type: NRG; PAM sequence: AGG
aggtaaaatggagttctatt

SEQ ID NO: 50723 - DNA, 20 bp, Artificial Sequence
  Description of Artificial Sequence: Synthetic oligonucleotide
  Target: ATXN2; (+) strand; PAM type: NRG; PAM sequence: GGG
ggtaaaatggagttctatta

SEQ ID NO: 50724 - DNA, 20 bp, Artificial Sequence
  Description of Artificial Sequence: Synthetic oligonucleotide
  Target: ATXN2; (+) strand; PAM type: NRG; PAM sequence: GGG
gtaaaatggagttctattag

SEQ ID NO: 50725 - DNA, 20 bp, Artificial Sequence
  Description of Artificial Sequence: Synthetic oligonucleotide
  Target: ATXN2; (+) strand; PAM type: NRG; PAM sequence: CAG
aatggagttctattaggggt

SEQ ID NO: 50726 - DNA, 20 bp, Artificial Sequence
  Description of Artificial Sequence: Synthetic oligonucleotide
  Target: ATXN2; (+) strand; PAM type: NRG; PAM sequence: TGG
taggggtcagcaaatgccca

SEQ ID NO: 50727 - DNA, 20 bp, Artificial Sequence
  Description of Artificial Sequence: Synthetic oligonucleotide
  Target: ATXN2; (+) strand; PAM type: NRG; PAM sequence: TGG
gcccatggcctattttcaca

SEQ ID NO: 50728 - DNA, 20 bp, Artificial Sequence
  Description of Artificial Sequence: Synthetic oligonucleotide
  Target: ATXN2; (+) strand; PAM type: NRG; PAM sequence: AAG
gcctattttcacatggctta

SEQ ID NO: 50729 - DNA, 20 bp, Artificial Sequence
  Description of Artificial Sequence: Synthetic oligonucleotide
  Target: ATXN2; (+) strand; PAM type: NRG; PAM sequence: CAG
ttttcacatggcttaaagct

SEQ ID NO: 50730 - DNA, 20 bp, Artificial Sequence
  Description of Artificial Sequence: Synthetic oligonucleotide
  Target: ATXN2; (+) strand; PAM type: NRG; PAM sequence: AAG
agaatattttttacactgta

SEQ ID NO: 50731 - DNA, 20 bp, Artificial Sequence
  Description of Artificial Sequence: Synthetic oligonucleotide
  Target: ATXN2; (+) strand; PAM type: NRG; PAM sequence: GAG
aatattttttacactgtaaa

SEQ ID NO: 50732 - DNA, 20 bp, Artificial Sequence
  Description of Artificial Sequence: Synthetic oligonucleotide
  Target: ATXN2; (+) strand; PAM type: NRG; PAM sequence: TAG
tttacactgtaaagagcttt

SEQ ID NO: 50733 - DNA, 20 bp, Artificial Sequence
  Description of Artificial Sequence: Synthetic oligonucleotide
  Target: ATXN2; (+) strand; PAM type: NRG; PAM sequence: AGG
ttacactgtaaagagctttt

SEQ ID NO: 50734 - DNA, 20 bp, Artificial Sequence
  Description of Artificial Sequence: Synthetic oligonucleotide
  Target: ATXN2; (+) strand; PAM type: NRG; PAM sequence: CAG
actgtaaagagcttttaggt

SEQ ID NO: 50735 - DNA, 20 bp, Artificial Sequence
  Description of Artificial Sequence: Synthetic oligonucleotide
  Target: ATXN2; (+) strand; PAM type: NRG; PAM sequence: AGG
ctgtaaagagcttttaggtc

SEQ ID NO: 50736 - DNA, 20 bp, Artificial Sequence
  Description of Artificial Sequence: Synthetic oligonucleotide
  Target: ATXN2; (+) strand; PAM type: NRG; PAM sequence: CGG
aagagcttttaggtcaggca

SEQ ID NO: 50737 - DNA, 20 bp, Artificial Sequence
  Description of Artificial Sequence: Synthetic oligonucleotide
  Target: ATXN2; (+) strand; PAM type: NRG; PAM sequence: TGG
agcttttaggtcaggcacgg

SEQ ID NO: 50738 - DNA, 20 bp, Artificial Sequence
  Description of Artificial Sequence: Synthetic oligonucleotide
  Target: ATXN2; (+) strand; PAM type: NRG; PAM sequence: CAG
gtggctcacacctgtaatcc

SEQ ID NO: 50739 - DNA, 20 bp, Artificial Sequence
  Description of Artificial Sequence: Synthetic oligonucleotide
  Target: ATXN2; (+) strand; PAM type: NRG; PAM sequence: TGG
cacctgtaatcccagcactt

SEQ ID NO: 50740 - DNA, 20 bp, Artificial Sequence
  Description of Artificial Sequence: Synthetic oligonucleotide
  Target: ATXN2; (+) strand; PAM type: NRG; PAM sequence: GGG
acctgtaatcccagcacttt

SEQ ID NO: 50741 - DNA, 20 bp, Artificial Sequence
  Description of Artificial Sequence: Synthetic oligonucleotide
  Target: ATXN2; (+) strand; PAM type: NRG; PAM sequence: GAG
ctgtaatcccagcactttgg

SEQ ID NO: 50742 - DNA, 20 bp, Artificial Sequence
  Description of Artificial Sequence: Synthetic oligonucleotide
  Target: ATXN2; (+) strand; PAM type: NRG; PAM sequence: AGG
tgtaatcccagcactttggg

SEQ ID NO: 50743 - DNA, 20 bp, Artificial Sequence
  Description of Artificial Sequence: Synthetic oligonucleotide
  Target: ATXN2; (+) strand; PAM type: NRG; PAM sequence: CAG
aatcccagcactttgggagg

SEQ ID NO: 50744 - DNA, 20 bp, Artificial Sequence
  Description of Artificial Sequence: Synthetic oligonucleotide
  Target: ATXN2; (+) strand; PAM type: NRG; PAM sequence: GAG
tcccagcactttgggaggca

SEQ ID NO: 50745 - DNA, 20 bp, Artificial Sequence
  Description of Artificial Sequence: Synthetic oligonucleotide
  Target: ATXN2; (+) strand; PAM type: NRG; PAM sequence: AGG
cccagcactttgggaggcag

SEQ ID NO: 50746 - DNA, 20 bp, Artificial Sequence
  Description of Artificial Sequence: Synthetic oligonucleotide
  Target: ATXN2; (+) strand; PAM type: NRG; PAM sequence: TGG
agcactttgggaggcagagg

SEQ ID NO: 50747 - DNA, 20 bp, Artificial Sequence
  Description of Artificial Sequence: Synthetic oligonucleotide
  Target: ATXN2; (+) strand; PAM type: NRG; PAM sequence: GGG
gcactttgggaggcagaggt

SEQ ID NO: 50748 - DNA, 20 bp, Artificial Sequence
  Description of Artificial Sequence: Synthetic oligonucleotide
  Target: ATXN2; (+) strand; PAM type: NRG; PAM sequence: CAG
ctttgggaggcagaggtggg

SEQ ID NO: 50749 - DNA, 20 bp, Artificial Sequence
  Description of Artificial Sequence: Synthetic oligonucleotide
  Target: ATXN2; (+) strand; PAM type: NRG; PAM sequence: GAG
cagaggtgggcagatcacct

SEQ ID NO: 50750 - DNA, 20 bp, Artificial Sequence
  Description of Artificial Sequence: Synthetic oligonucleotide
  Target: ATXN2; (+) strand; PAM type: NRG; PAM sequence: CAG
gtgggcagatcacctgagat

SEQ ID NO: 50751 - DNA, 20 bp, Artificial Sequence
  Description of Artificial Sequence: Synthetic oligonucleotide
  Target: ATXN2; (+) strand; PAM type: NRG; PAM sequence: AGG
tgggcagatcacctgagatc

SEQ ID NO: 50752 - DNA, 20 bp, Artificial Sequence
  Description of Artificial Sequence: Synthetic oligonucleotide
  Target: ATXN2; (+) strand; PAM type: NRG; PAM sequence: GAG
ggcagatcacctgagatcag

SEQ ID NO: 50753 - DNA, 20 bp, Artificial Sequence
  Description of Artificial Sequence: Synthetic oligonucleotide
  Target: ATXN2; (+) strand; PAM type: NRG; PAM sequence: CAG
atcacctgagatcaggagac

SEQ ID NO: 50754 - DNA, 20 bp, Artificial Sequence
  Description of Artificial Sequence: Synthetic oligonucleotide
  Target: ATXN2; (+) strand; PAM type: NRG; PAM sequence: TGG
ctgagatcaggagaccagcc

SEQ ID NO: 50755 - DNA, 20 bp, Artificial Sequence
  Description of Artificial Sequence: Synthetic oligonucleotide
  Target: ATXN2; (+) strand; PAM type: NRG; PAM sequence: TGG
ggagaccagcctggccaatg

SEQ ID NO: 50756 - DNA, 20 bp, Artificial Sequence
  Description of Artificial Sequence: Synthetic oligonucleotide
  Target: ATXN2; (+) strand; PAM type: NRG; PAM sequence: TAG
tttactaaaaatacaaaaat

SEQ ID NO: 50757 - DNA, 20 bp, Artificial Sequence
  Description of Artificial Sequence: Synthetic oligonucleotide
  Target: ATXN2; (+) strand; PAM type: NRG; PAM sequence: TGG
ctaaaaatacaaaaattagc

SEQ ID NO: 50758 - DNA, 20 bp, Artificial Sequence
  Description of Artificial Sequence: Synthetic oligonucleotide
  Target: ATXN2; (+) strand; PAM type: NRG; PAM sequence: GGG
taaaaatacaaaaattagct

SEQ ID NO: 50759 - DNA, 20 bp, Artificial Sequence
  Description of Artificial Sequence: Synthetic oligonucleotide
  Target: ATXN2; (+) strand; PAM type: NRG; PAM sequence: TGG
atacaaaaattagctgggcg

SEQ ID NO: 50760 - DNA, 20 bp, Artificial Sequence
  Description of Artificial Sequence: Synthetic oligonucleotide
  Target: ATXN2; (+) strand; PAM type: NRG; PAM sequence: CAG
caaaaattagctgggcgtgg

SEQ ID NO: 50761 - DNA, 20 bp, Artificial Sequence
  Description of Artificial Sequence: Synthetic oligonucleotide
  Target: ATXN2; (+) strand; PAM type: NRG; PAM sequence: CAG
gcagcatgtgcctgtaatcc

SEQ ID NO: 50762 - DNA, 20 bp, Artificial Sequence
  Description of Artificial Sequence: Synthetic oligonucleotide
  Target: ATXN2; (+) strand; PAM type: NRG; PAM sequence: CGG
tgcctgtaatcccagttact

SEQ ID NO: 50763 - DNA, 20 bp, Artificial Sequence
  Description of Artificial Sequence: Synthetic oligonucleotide
  Target: ATXN2; (+) strand; PAM type: NRG; PAM sequence: GGG
gcctgtaatcccagttactc

SEQ ID NO: 50764 - DNA, 20 bp, Artificial Sequence
  Description of Artificial Sequence: Synthetic oligonucleotide
  Target: ATXN2; (+) strand; PAM type: NRG; PAM sequence: AAG
tgtaatcccagttactcggg

SEQ ID NO: 50765 - DNA, 20 bp, Artificial Sequence
  Description of Artificial Sequence: Synthetic oligonucleotide
  Target: ATXN2; (+) strand; PAM type: NRG; PAM sequence: GAG
tcccagttactcgggaagct

SEQ ID NO: 50766 - DNA, 20 bp, Artificial Sequence
  Description of Artificial Sequence: Synthetic oligonucleotide
  Target: ATXN2; (+) strand; PAM type: NRG; PAM sequence: CAG
agttactcgggaagctgaga

SEQ ID NO: 50767 - DNA, 20 bp, Artificial Sequence
  Description of Artificial Sequence: Synthetic oligonucleotide
  Target: ATXN2; (+) strand; PAM type: NRG; PAM sequence: AGG
gttactcgggaagctgagac

SEQ ID NO: 50768 - DNA, 20 bp, Artificial Sequence
  Description of Artificial Sequence: Synthetic oligonucleotide
  Target: ATXN2; (+) strand; PAM type: NRG; PAM sequence: GAG
tactcgggaagctgagacag

SEQ ID NO: 50769 - DNA, 20 bp, Artificial Sequence
  Description of Artificial Sequence: Synthetic oligonucleotide
  Target: ATXN2; (+) strand; PAM type: NRG; PAM sequence: CAG
acaggagaatcgcctgaacc

SEQ ID NO: 50770 - DNA, 20 bp, Artificial Sequence
  Description of Artificial Sequence: Synthetic oligonucleotide
  Target: ATXN2; (+) strand; PAM type: NRG; PAM sequence: AGG
caggagaatcgcctgaaccc

SEQ ID NO: 50771 - DNA, 20 bp, Artificial Sequence
  Description of Artificial Sequence: Synthetic oligonucleotide
  Target: ATXN2; (+) strand; PAM type: NRG; PAM sequence: GAG
ggagaatcgcctgaacccag

SEQ ID NO: 50772 - DNA, 20 bp, Artificial Sequence
  Description of Artificial Sequence: Synthetic oligonucleotide
  Target: ATXN2; (+) strand; PAM type: NRG; PAM sequence: AGG
gagaatcgcctgaacccagg

SEQ ID NO: 50773 - DNA, 20 bp, Artificial Sequence
  Description of Artificial Sequence: Synthetic oligonucleotide
  Target: ATXN2; (+) strand; PAM type: NRG; PAM sequence: CAG
aatcgcctgaacccaggagg

SEQ ID NO: 50774 - DNA, 20 bp, Artificial Sequence
  Description of Artificial Sequence: Synthetic oligonucleotide
  Target: ATXN2; (+) strand; PAM type: NRG; PAM sequence: GAG
tcgcctgaacccaggaggca

SEQ ID NO: 50775 - DNA, 20 bp, Artificial Sequence
  Description of Artificial Sequence: Synthetic oligonucleotide
  Target: ATXN2; (+) strand; PAM type: NRG; PAM sequence: AGG
cgcctgaacccaggaggcag

SEQ ID NO: 50776 - DNA, 20 bp, Artificial Sequence
  Description of Artificial Sequence: Synthetic oligonucleotide
  Target: ATXN2; (+) strand; PAM type: NRG; PAM sequence: CAG
aacccaggaggcagaggttg

SEQ ID NO: 50777 - DNA, 20 bp, Artificial Sequence
  Description of Artificial Sequence: Synthetic oligonucleotide
  Target: ATXN2; (+) strand; PAM type: NRG; PAM sequence: GAG
caggaggcagaggttgcagt

SEQ ID NO: 50778 - DNA, 20 bp, Artificial Sequence
  Description of Artificial Sequence: Synthetic oligonucleotide
  Target: ATXN2; (+) strand; PAM type: NRG; PAM sequence: AAG
ggcagaggttgcagtgagcc

SEQ ID NO: 50779 - DNA, 20 bp, Artificial Sequence
  Description of Artificial Sequence: Synthetic oligonucleotide
  Target: ATXN2; (+) strand; PAM type: NRG; PAM sequence: CAG
aagattgcaccactgcactc

SEQ ID NO: 50780 - DNA, 20 bp, Artificial Sequence
  Description of Artificial Sequence: Synthetic oligonucleotide
  Target: ATXN2; (+) strand; PAM type: NRG; PAM sequence: GAG
gcaccactgcactccagcct

SEQ ID NO: 50781 - DNA, 20 bp, Artificial Sequence
  Description of Artificial Sequence: Synthetic oligonucleotide
  Target: ATXN2; (+) strand; PAM type: NRG; PAM sequence: CAG
gcactccagcctgagcaaca

SEQ ID NO: 50782 - DNA, 20 bp, Artificial Sequence
  Description of Artificial Sequence: Synthetic oligonucleotide
  Target: ATXN2; (+) strand; PAM type: NRG; PAM sequence: AAG
tccagcctgagcaacacagc

SEQ ID NO: 50783 - DNA, 20 bp, Artificial Sequence
  Description of Artificial Sequence: Synthetic oligonucleotide
  Target: ATXN2; (+) strand; PAM type: NRG; PAM sequence: AAG
ctgtctcaaaaaaaaaaaaa

SEQ ID NO: 50784 - DNA, 20 bp, Artificial Sequence
  Description of Artificial Sequence: Synthetic oligonucleotide
  Target: ATXN2; (+) strand; PAM type: NRG; PAM sequence: AGG
tgtctcaaaaaaaaaaaaaa

SEQ ID NO: 50785 - DNA, 20 bp, Artificial Sequence
  Description of Artificial Sequence: Synthetic oligonucleotide
  Target: ATXN2; (+) strand; PAM type: NRG; PAM sequence: GGG
gtctcaaaaaaaaaaaaaaa

SEQ ID NO: 50786 - DNA, 20 bp, Artificial Sequence
  Description of Artificial Sequence: Synthetic oligonucleotide
  Target: ATXN2; (+) strand; PAM type: NRG; PAM sequence: GGG
tctcaaaaaaaaaaaaaaag

SEQ ID NO: 50787 - DNA, 20 bp, Artificial Sequence
  Description of Artificial Sequence: Synthetic oligonucleotide
  Target: ATXN2; (+) strand; PAM type: NRG; PAM sequence: AAG
aggggcttttaaaatatgta

SEQ ID NO: 50788 - DNA, 20 bp, Artificial Sequence
  Description of Artificial Sequence: Synthetic oligonucleotide
  Target: ATXN2; (+) strand; PAM type: NRG; PAM sequence: TGG
tgcaaacatacacaaaaaaa

SEQ ID NO: 50789 - DNA, 20 bp, Artificial Sequence
  Description of Artificial Sequence: Synthetic oligonucleotide
  Target: ATXN2; (+) strand; PAM type: NRG; PAM sequence: GGG
gcaaacatacacaaaaaaat

SEQ ID NO: 50790 - DNA, 20 bp, Artificial Sequence
  Description of Artificial Sequence: Synthetic oligonucleotide
  Target: ATXN2; (+) strand; PAM type: NRG; PAM sequence: TGG
caaaaaaatgggactgtata

SEQ ID NO: 50791 - DNA, 20 bp, Artificial Sequence
  Description of Artificial Sequence: Synthetic oligonucleotide
  Target: ATXN2; (+) strand; PAM type: NRG; PAM sequence: AAG
gggactgtatatggactgca

SEQ ID NO: 50792 - DNA, 20 bp, Artificial Sequence
  Description of Artificial Sequence: Synthetic oligonucleotide
  Target: ATXN2; (+) strand; PAM type: NRG; PAM sequence: CGG
aagcctaaaatatttactat

SEQ ID NO: 50793 - DNA, 20 bp, Artificial Sequence
  Description of Artificial Sequence: Synthetic oligonucleotide
  Target: ATXN2; (+) strand; PAM type: NRG; PAM sequence: GGG
agcctaaaatatttactatc

SEQ ID NO: 50794 - DNA, 20 bp, Artificial Sequence
  Description of Artificial Sequence: Synthetic oligonucleotide
  Target: ATXN2; (+) strand; PAM type: NRG; PAM sequence: TGG
taaaatatttactatcgggc

SEQ ID NO: 50795 - DNA, 20 bp, Artificial Sequence
  Description of Artificial Sequence: Synthetic oligonucleotide
  Target: ATXN2; (+) strand; PAM type: NRG; PAM sequence: GGG
aaaatatttactatcgggct

SEQ ID NO: 50796 - DNA, 20 bp, Artificial Sequence
  Description of Artificial Sequence: Synthetic oligonucleotide
  Target: ATXN2; (+) strand; PAM type: NRG; PAM sequence: CGG
atttactatcgggctgggca

SEQ ID NO: 50797 - DNA, 20 bp, Artificial Sequence
  Description of Artificial Sequence: Synthetic oligonucleotide
  Target: ATXN2; (+) strand; PAM type: NRG; PAM sequence: TGG
tactatcgggctgggcacgg

SEQ ID NO: 50798 - DNA, 20 bp, Artificial Sequence
  Description of Artificial Sequence: Synthetic oligonucleotide
  Target: ATXN2; (+) strand; PAM type: NRG; PAM sequence: TGG
ctgggcacggtggttcacac

SEQ ID NO: 50799 - DNA, 20 bp, Artificial Sequence
  Description of Artificial Sequence: Synthetic oligonucleotide
  Target: ATXN2; (+) strand; PAM type: NRG; PAM sequence: CAG
gtggttcacactggtaatcc

SEQ ID NO: 50800 - DNA, 20 bp, Artificial Sequence
  Description of Artificial Sequence: Synthetic oligonucleotide
  Target: ATXN2; (+) strand; PAM type: NRG; PAM sequence: TGG
cactggtaatcccagcactt

SEQ ID NO: 50801 - DNA, 20 bp, Artificial Sequence
  Description of Artificial Sequence: Synthetic oligonucleotide
  Target: ATXN2; (+) strand; PAM type: NRG; PAM sequence: GGG
actggtaatcccagcacttt

SEQ ID NO: 50802 - DNA, 20 bp, Artificial Sequence
  Description of Artificial Sequence: Synthetic oligonucleotide
  Target: ATXN2; (+) strand; PAM type: NRG; PAM sequence: GAG
tggtaatcccagcactttgg

SEQ ID NO: 50803 - DNA, 20 bp, Artificial Sequence
  Description of Artificial Sequence: Synthetic oligonucleotide
  Target: ATXN2; (+) strand; PAM type: NRG; PAM sequence: AGG
ggtaatcccagcactttggg

SEQ ID NO: 50804 - DNA, 20 bp, Artificial Sequence
  Description of Artificial Sequence: Synthetic oligonucleotide
  Target: ATXN2; (+) strand; PAM type: NRG; PAM sequence: CAG
cccagcactttgggaggccg

SEQ ID NO: 50805 - DNA, 20 bp, Artificial Sequence
  Description of Artificial Sequence: Synthetic oligonucleotide
  Target: ATXN2; (+) strand; PAM type: NRG; PAM sequence: CAG
agcactttgggaggccgcag

SEQ ID NO: 50806 - DNA, 20 bp, Artificial Sequence
  Description of Artificial Sequence: Synthetic oligonucleotide
  Target: ATXN2; (+) strand; PAM type: NRG; PAM sequence: AGG
gcactttgggaggccgcagc

SEQ ID NO: 50807 - DNA, 20 bp, Artificial Sequence
  Description of Artificial Sequence: Synthetic oligonucleotide
  Target: ATXN2; (+) strand; PAM type: NRG; PAM sequence: TGG
ctttgggaggccgcagcagg

SEQ ID NO: 50808 - DNA, 20 bp, Artificial Sequence
  Description of Artificial Sequence: Synthetic oligonucleotide
  Target: ATXN2; (+) strand; PAM type: NRG; PAM sequence: GAG
ccgcagcaggtggatcacct

SEQ ID NO: 50809 - DNA, 20 bp, Artificial Sequence
  Description of Artificial Sequence: Synthetic oligonucleotide
  Target: ATXN2; (+) strand; PAM type: NRG; PAM sequence: AGG
cgcagcaggtggatcacctg

SEQ ID NO: 50810 - DNA, 20 bp, Artificial Sequence
  Description of Artificial Sequence: Synthetic oligonucleotide
  Target: ATXN2; (+) strand; PAM type: NRG; PAM sequence: CAG
gcaggtggatcacctgaggt

SEQ ID NO: 50811 - DNA, 20 bp, Artificial Sequence
  Description of Artificial Sequence: Synthetic oligonucleotide
  Target: ATXN2; (+) strand; PAM type: NRG; PAM sequence: AGG
caggtggatcacctgaggtc

SEQ ID NO: 50812 - DNA, 20 bp, Artificial Sequence
  Description of Artificial Sequence: Synthetic oligonucleotide
  Target: ATXN2; (+) strand; PAM type: NRG; PAM sequence: GAG
ggtggatcacctgaggtcag

SEQ ID NO: 50813 - DNA, 20 bp, Artificial Sequence
  Description of Artificial Sequence: Synthetic oligonucleotide
  Target: ATXN2; (+) strand; PAM type: NRG; PAM sequence: GAG
tcacctgaggtcaggagttc

SEQ ID NO: 50814 - DNA, 20 bp, Artificial Sequence
  Description of Artificial Sequence: Synthetic oligonucleotide
  Target: ATXN2; (+) strand; PAM type: NRG; PAM sequence: CAG
tgaggtcaggagttcgagac

SEQ ID NO: 50815 - DNA, 20 bp, Artificial Sequence
  Description of Artificial Sequence: Synthetic oligonucleotide
  Target: ATXN2; (+) strand; PAM type: NRG; PAM sequence: TGG
cgagaccagcctgaccaaaa

SEQ ID NO: 50816 - DNA, 20 bp, Artificial Sequence
  Description of Artificial Sequence: Synthetic oligonucleotide
  Target: ATXN2; (+) strand; PAM type: NRG; PAM sequence: AAG
ccccatctctactaaataca

SEQ ID NO: 50817 - DNA, 20 bp, Artificial Sequence
  Description of Artificial Sequence: Synthetic oligonucleotide
  Target: ATXN2; (+) strand; PAM type: NRG; PAM sequence: TAG
tctactaaatacaaagaaat

SEQ ID NO: 50818 - DNA, 20 bp, Artificial Sequence
  Description of Artificial Sequence: Synthetic oligonucleotide
  Target: ATXN2; (+) strand; PAM type: NRG; PAM sequence: GAG
taaatacaaagaaattagcc

SEQ ID NO: 50819 - DNA, 20 bp, Artificial Sequence
  Description of Artificial Sequence: Synthetic oligonucleotide
  Target: ATXN2; (+) strand; PAM type: NRG; PAM sequence: TGG
acaaagaaattagccgagcg

SEQ ID NO: 50820 - DNA, 20 bp, Artificial Sequence
  Description of Artificial Sequence: Synthetic oligonucleotide
  Target: ATXN2; (+) strand; PAM type: NRG; PAM sequence: TGG
aagaaattagccgagcgtgg

SEQ ID NO: 50821 - DNA, 20 bp, Artificial Sequence
  Description of Artificial Sequence: Synthetic oligonucleotide
  Target: ATXN2; (+) strand; PAM type: NRG; PAM sequence: CAG
gtggcacatgcctataaccc

SEQ ID NO: 50822 - DNA, 20 bp, Artificial Sequence
  Description of Artificial Sequence: Synthetic oligonucleotide
  Target: ATXN2; (+) strand; PAM type: NRG; PAM sequence: GAG
gcctataaccccagctactt

SEQ ID NO: 50823 - DNA, 20 bp, Artificial Sequence
  Description of Artificial Sequence: Synthetic oligonucleotide
  Target: ATXN2; (+) strand; PAM type: NRG; PAM sequence: GAG
ctataaccccagctacttga

SEQ ID NO: 50824 - DNA, 20 bp, Artificial Sequence
  Description of Artificial Sequence: Synthetic oligonucleotide
  Target: ATXN2; (+) strand; PAM type: NRG; PAM sequence: AGG
tataaccccagctacttgag

SEQ ID NO: 50825 - DNA, 20 bp, Artificial Sequence
  Description of Artificial Sequence: Synthetic oligonucleotide
  Target: ATXN2; (+) strand; PAM type: NRG; PAM sequence: GAG
ccccagctacttgagaggct

SEQ ID NO: 50826 - DNA, 20 bp, Artificial Sequence
  Description of Artificial Sequence: Synthetic oligonucleotide
  Target: ATXN2; (+) strand; PAM type: NRG; PAM sequence: AGG
cccagctacttgagaggctg

SEQ ID NO: 50827 - DNA, 20 bp, Artificial Sequence
  Description of Artificial Sequence: Synthetic oligonucleotide
  Target: ATXN2; (+) strand; PAM type: NRG; PAM sequence: CAG
agctacttgagaggctgagg

SEQ ID NO: 50828 - DNA, 20 bp, Artificial Sequence
  Description of Artificial Sequence: Synthetic oligonucleotide
  Target: ATXN2; (+) strand; PAM type: NRG; PAM sequence: AGG
gctacttgagaggctgaggc

SEQ ID NO: 50829 - DNA, 20 bp, Artificial Sequence
  Description of Artificial Sequence: Synthetic oligonucleotide
  Target: ATXN2; (+) strand; PAM type: NRG; PAM sequence: GAG
tacttgagaggctgaggcag

SEQ ID NO: 50830 - DNA, 20 bp, Artificial Sequence
  Description of Artificial Sequence: Synthetic oligonucleotide
  Target: ATXN2; (+) strand; PAM type: NRG; PAM sequence: TGG
gcaggagaatcacttgaacc

SEQ ID NO: 50831 - DNA, 20 bp, Artificial Sequence
  Description of Artificial Sequence: Synthetic oligonucleotide
  Target: ATXN2; (+) strand; PAM type: NRG; PAM sequence: GGG
caggagaatcacttgaacct

SEQ ID NO: 50832 - DNA, 20 bp, Artificial Sequence
  Description of Artificial Sequence: Synthetic oligonucleotide
  Target: ATXN2; (+) strand; PAM type: NRG; PAM sequence: GAG
ggagaatcacttgaacctgg

SEQ ID NO: 50833 - DNA, 20 bp, Artificial Sequence
  Description of Artificial Sequence: Synthetic oligonucleotide
  Target: ATXN2; (+) strand; PAM type: NRG; PAM sequence: AGG
gagaatcacttgaacctggg

SEQ ID NO: 50834 - DNA, 20 bp, Artificial Sequence
  Description of Artificial Sequence: Synthetic oligonucleotide
  Target: ATXN2; (+) strand; PAM type: NRG; PAM sequence: CAG
aatcacttgaacctgggagg

SEQ ID NO: 50835 - DNA, 20 bp, Artificial Sequence
  Description of Artificial Sequence: Synthetic oligonucleotide
  Target: ATXN2; (+) strand; PAM type: NRG; PAM sequence: GAG
tcacttgaacctgggaggca

SEQ ID NO: 50836 - DNA, 20 bp, Artificial Sequence
  Description of Artificial Sequence: Synthetic oligonucleotide
  Target: ATXN2; (+) strand; PAM type: NRG; PAM sequence: AGG
cacttgaacctgggaggcag

SEQ ID NO: 50837 - DNA, 20 bp, Artificial Sequence
  Description of Artificial Sequence: Synthetic oligonucleotide
  Target: ATXN2; (+) strand; PAM type: NRG; PAM sequence: CAG
aacctgggaggcagaggttg

SEQ ID NO: 50838 - DNA, 20 bp, Artificial Sequence
  Description of Artificial Sequence: Synthetic oligonucleotide
  Target: ATXN2; (+) strand; PAM type: NRG; PAM sequence: GAG
tgggaggcagaggttgcagt

SEQ ID NO: 50839 - DNA, 20 bp, Artificial Sequence
  Description of Artificial Sequence: Synthetic oligonucleotide
  Target: ATXN2; (+) strand; PAM type: NRG; PAM sequence: AAG
ggcagaggttgcagtgagcc

SEQ ID NO: 50840 - DNA, 20 bp, Artificial Sequence
  Description of Artificial Sequence: Synthetic oligonucleotide
  Target: ATXN2; (+) strand; PAM type: NRG; PAM sequence: TGG
gaggttgcagtgagccaaga

SEQ ID NO: 50841 - DNA, 20 bp, Artificial Sequence
  Description of Artificial Sequence: Synthetic oligonucleotide
  Target: ATXN2; (+) strand; PAM type: NRG; PAM sequence: CAG
aagatggcaccattgcactc

SEQ ID NO: 50842 - DNA, 20 bp, Artificial Sequence
  Description of Artificial Sequence: Synthetic oligonucleotide
  Target: ATXN2; (+) strand; PAM type: NRG; PAM sequence: TGG
ggcaccattgcactccagcc

SEQ ID NO: 50843 - DNA, 20 bp, Artificial Sequence
  Description of Artificial Sequence: Synthetic oligonucleotide
  Target: ATXN2; (+) strand; PAM type: NRG; PAM sequence: GGG
gcaccattgcactccagcct

SEQ ID NO: 50844 - DNA, 20 bp, Artificial Sequence
  Description of Artificial Sequence: Synthetic oligonucleotide
  Target: ATXN2; (+) strand; PAM type: NRG; PAM sequence: AAG
tgcactccagcctgggtgac

SEQ ID NO: 50845 - DNA, 20 bp, Artificial Sequence
  Description of Artificial Sequence: Synthetic oligonucleotide
  Target: ATXN2; (+) strand; PAM type: NRG; PAM sequence: GAG
cactccagcctgggtgacaa

SEQ ID NO: 50846 - DNA, 20 bp, Artificial Sequence
  Description of Artificial Sequence: Synthetic oligonucleotide
  Target: ATXN2; (+) strand; PAM type: NRG; PAM sequence: TGG
aaaaaaacaaatttactatc

SEQ ID NO: 50847 - DNA, 20 bp, Artificial Sequence
  Description of Artificial Sequence: Synthetic oligonucleotide
  Target: ATXN2; (+) strand; PAM type: NRG; PAM sequence: AAG
ttactatctggccctttacg

SEQ ID NO: 50848 - DNA, 20 bp, Artificial Sequence
  Description of Artificial Sequence: Synthetic oligonucleotide
  Target: ATXN2; (+) strand; PAM type: NRG; PAM sequence: CAG
tggccctttacgaagtttga

SEQ ID NO: 50849 - DNA, 20 bp, Artificial Sequence
  Description of Artificial Sequence: Synthetic oligonucleotide
  Target: ATXN2; (+) strand; PAM type: NRG; PAM sequence: AGG
ggccctttacgaagtttgac

SEQ ID NO: 50850 - DNA, 20 bp, Artificial Sequence
  Description of Artificial Sequence: Synthetic oligonucleotide
  Target: ATXN2; (+) strand; PAM type: NRG; PAM sequence: TGG
ttacgaagtttgacaggcct

SEQ ID NO: 50851 - DNA, 20 bp, Artificial Sequence
  Description of Artificial Sequence: Synthetic oligonucleotide
  Target: ATXN2; (+) strand; PAM type: NRG; PAM sequence: TAG
aagtttgacaggccttggat

SEQ ID NO: 50852 - DNA, 20 bp, Artificial Sequence
  Description of Artificial Sequence: Synthetic oligonucleotide
  Target: ATXN2; (+) strand; PAM type: NRG; PAM sequence: AGG
agtttgacaggccttggatt

SEQ ID NO: 50853 - DNA, 20 bp, Artificial Sequence
  Description of Artificial Sequence: Synthetic oligonucleotide
  Target: ATXN2; (+) strand; PAM type: NRG; PAM sequence: TAG
acaggccttggattaggtca

SEQ ID NO: 50854 - DNA, 20 bp, Artificial Sequence
  Description of Artificial Sequence: Synthetic oligonucleotide
  Target: ATXN2; (+) strand; PAM type: NRG; PAM sequence: AAG
gccttggattaggtcataga

SEQ ID NO: 50855 - DNA, 20 bp, Artificial Sequence
  Description of Artificial Sequence: Synthetic oligonucleotide
  Target: ATXN2; (+) strand; PAM type: NRG; PAM sequence: AAG
ttaggtcatagaaagctttg

SEQ ID NO: 50856 - DNA, 20 bp, Artificial Sequence
  Description of Artificial Sequence: Synthetic oligonucleotide
  Target: ATXN2; (+) strand; PAM type: NRG; PAM sequence: AGG
taggtcatagaaagctttga

SEQ ID NO: 50857 - DNA, 20 bp, Artificial Sequence
  Description of Artificial Sequence: Synthetic oligonucleotide
  Target: ATXN2; (+) strand; PAM type: NRG; PAM sequence: TAG
gtcatagaaagctttgaagg

SEQ ID NO: 50858 - DNA, 20 bp, Artificial Sequence
  Description of Artificial Sequence: Synthetic oligonucleotide
  Target: ATXN2; (+) strand; PAM type: NRG; PAM sequence: CAG
gctttgaaggtagactccct

SEQ ID NO: 50859 - DNA, 20 bp, Artificial Sequence
  Description of Artificial Sequence: Synthetic oligonucleotide
  Target: ATXN2; (+) strand; PAM type: NRG; PAM sequence: AGG
ctttgaaggtagactccctc

SEQ ID NO: 50860 - DNA, 20 bp, Artificial Sequence
  Description of Artificial Sequence: Synthetic oligonucleotide
  Target: ATXN2; (+) strand; PAM type: NRG; PAM sequence: TGG
aaggtagactccctcaggct

SEQ ID NO: 50861 - DNA, 20 bp, Artificial Sequence
  Description of Artificial Sequence: Synthetic oligonucleotide
  Target: ATXN2; (+) strand; PAM type: NRG; PAM sequence: GGG
aggtagactccctcaggctt

SEQ ID NO: 50862 - DNA, 20 bp, Artificial Sequence
  Description of Artificial Sequence: Synthetic oligonucleotide
  Target: ATXN2; (+) strand; PAM type: NRG; PAM sequence: TAG
gactccctcaggcttgggaa

SEQ ID NO: 50863 - DNA, 20 bp, Artificial Sequence
  Description of Artificial Sequence: Synthetic oligonucleotide
  Target: ATXN2; (+) strand; PAM type: NRG; PAM sequence: AGG
actccctcaggcttgggaat

SEQ ID NO: 50864 - DNA, 20 bp, Artificial Sequence
  Description of Artificial Sequence: Synthetic oligonucleotide
  Target: ATXN2; (+) strand; PAM type: NRG; PAM sequence: GGG
ctccctcaggcttgggaata

SEQ ID NO: 50865 - DNA, 20 bp, Artificial Sequence
  Description of Artificial Sequence: Synthetic oligonucleotide
  Target: ATXN2; (+) strand; PAM type: NRG; PAM sequence: AAG
ttgggaatagggtgattttt

SEQ ID NO: 50866 - DNA, 20 bp, Artificial Sequence
  Description of Artificial Sequence: Synthetic oligonucleotide
  Target: ATXN2; (+) strand; PAM type: NRG; PAM sequence: CAG
ggaatagggtgatttttaag

SEQ ID NO: 50867 - DNA, 20 bp, Artificial Sequence
  Description of Artificial Sequence: Synthetic oligonucleotide
  Target: ATXN2; (+) strand; PAM type: NRG; PAM sequence: GAG
aatagggtgatttttaagca

SEQ ID NO: 50868 - DNA, 20 bp, Artificial Sequence
  Description of Artificial Sequence: Synthetic oligonucleotide
  Target: ATXN2; (+) strand; PAM type: NRG; PAM sequence: AGG
atagggtgatttttaagcag

SEQ ID NO: 50869 - DNA, 20 bp, Artificial Sequence
  Description of Artificial Sequence: Synthetic oligonucleotide
  Target: ATXN2; (+) strand; PAM type: NRG; PAM sequence: GGG
tagggtgatttttaagcaga

SEQ ID NO: 50870 - DNA, 20 bp, Artificial Sequence
  Description of Artificial Sequence: Synthetic oligonucleotide
  Target: ATXN2; (+) strand; PAM type: NRG; PAM sequence: GGG
agggtgatttttaagcagag

SEQ ID NO: 50871 - DNA, 20 bp, Artificial Sequence
  Description of Artificial Sequence: Synthetic oligonucleotide
  Target: ATXN2; (+) strand; PAM type: NRG; PAM sequence: AAG
gcagaggggtaacccaacac

SEQ ID NO: 50872 - DNA, 20 bp, Artificial Sequence
  Description of Artificial Sequence: Synthetic oligonucleotide
  Target: ATXN2; (+) strand; PAM type: NRG; PAM sequence: TAG
gaggggtaacccaacacaag

SEQ ID NO: 50873 - DNA, 20 bp, Artificial Sequence
  Description of Artificial Sequence: Synthetic oligonucleotide
  Target: ATXN2; (+) strand; PAM type: NRG; PAM sequence: GAG
ggggtaacccaacacaagta

SEQ ID NO: 50874 - DNA, 20 bp, Artificial Sequence
  Description of Artificial Sequence: Synthetic oligonucleotide
  Target: ATXN2; (+) strand; PAM type: NRG; PAM sequence: AAG
acccaacacaagtagagttg

SEQ ID NO: 50875 - DNA, 20 bp, Artificial Sequence
  Description of Artificial Sequence: Synthetic oligonucleotide
  Target: ATXN2; (+) strand; PAM type: NRG; PAM sequence: CAG
caagtagagttgaagtctaa

SEQ ID NO: 50876 - DNA, 20 bp, Artificial Sequence
  Description of Artificial Sequence: Synthetic oligonucleotide
  Target: ATXN2; (+) strand; PAM type: NRG; PAM sequence: AAG
gagttgaagtctaacagcaa

SEQ ID NO: 50877 - DNA, 20 bp, Artificial Sequence
  Description of Artificial Sequence: Synthetic oligonucleotide
  Target: ATXN2; (+) strand; PAM type: NRG; PAM sequence: AGG
agttgaagtctaacagcaaa

SEQ ID NO: 50878 - DNA, 20 bp, Artificial Sequence
  Description of Artificial Sequence: Synthetic oligonucleotide
  Target: ATXN2; (+) strand; PAM type: NRG; PAM sequence: TAG
tgaagtctaacagcaaaagg

SEQ ID NO: 50879 - DNA, 20 bp, Artificial Sequence
  Description of Artificial Sequence: Synthetic oligonucleotide
  Target: ATXN2; (+) strand; PAM type: NRG; PAM sequence: AGG
gaagtctaacagcaaaaggt

SEQ ID NO: 50880 - DNA, 20 bp, Artificial Sequence
  Description of Artificial Sequence: Synthetic oligonucleotide
  Target: ATXN2; (+) strand; PAM type: NRG; PAM sequence: TAG
tctaacagcaaaaggtaggc

SEQ ID NO: 50881 - DNA, 20 bp, Artificial Sequence
  Description of Artificial Sequence: Synthetic oligonucleotide
  Target: ATXN2; (+) strand; PAM type: NRG; PAM sequence: AGG
ctaacagcaaaaggtaggct

SEQ ID NO: 50882 - DNA, 20 bp, Artificial Sequence
  Description of Artificial Sequence: Synthetic oligonucleotide
  Target: ATXN2; (+) strand; PAM type: NRG; PAM sequence: TGG
ggtaggctaggttaaaccca

SEQ ID NO: 50883 - DNA, 20 bp, Artificial Sequence
  Description of Artificial Sequence: Synthetic oligonucleotide
  Target: ATXN2; (+) strand; PAM type: NRG; PAM sequence: CAG
tggataaaattaatgtatcg

SEQ ID NO: 50884 - DNA, 20 bp, Artificial Sequence
  Description of Artificial Sequence: Synthetic oligonucleotide
  Target: ATXN2; (+) strand; PAM type: NRG; PAM sequence: AAG
attaatgtatcgcagtaatt

SEQ ID NO: 50885 - DNA, 20 bp, Artificial Sequence
  Description of Artificial Sequence: Synthetic oligonucleotide
  Target: ATXN2; (+) strand; PAM type: NRG; PAM sequence: TGG
tacaacctcctgatattgtt

SEQ ID NO: 50886 - DNA, 20 bp, Artificial Sequence
  Description of Artificial Sequence: Synthetic oligonucleotide
  Target: ATXN2; (+) strand; PAM type: NRG; PAM sequence: CAG
tgtttggcccaaataaataa

SEQ ID NO: 50887 - DNA, 20 bp, Artificial Sequence
  Description of Artificial Sequence: Synthetic oligonucleotide
  Target: ATXN2; (+) strand; PAM type: NRG; PAM sequence: TAG
ggcccaaataaataacagca

SEQ ID NO: 50888 - DNA, 20 bp, Artificial Sequence
  Description of Artificial Sequence: Synthetic oligonucleotide
  Target: ATXN2; (+) strand; PAM type: NRG; PAM sequence: AAG
aaataaataacagcatagcc

SEQ ID NO: 50889 - DNA, 20 bp, Artificial Sequence
  Description of Artificial Sequence: Synthetic oligonucleotide
  Target: ATXN2; (+) strand; PAM type: NRG; PAM sequence: AAG
catagccaagaatttgccta

SEQ ID NO: 50890 - DNA, 20 bp, Artificial Sequence
  Description of Artificial Sequence: Synthetic oligonucleotide
  Target: ATXN2; (+) strand; PAM type: NRG; PAM sequence: CAG
caagaatttgcctaaagtca

SEQ ID NO: 50891 - DNA, 20 bp, Artificial Sequence
  Description of Artificial Sequence: Synthetic oligonucleotide
  Target: ATXN2; (+) strand; PAM type: NRG; PAM sequence: GAG
agaatttgcctaaagtcaca

SEQ ID NO: 50892 - DNA, 20 bp, Artificial Sequence
  Description of Artificial Sequence: Synthetic oligonucleotide
  Target: ATXN2; (+) strand; PAM type: NRG; PAM sequence: AGG
gaatttgcctaaagtcacag

SEQ ID NO: 50893 - DNA, 20 bp, Artificial Sequence
  Description of Artificial Sequence: Synthetic oligonucleotide
  Target: ATXN2; (+) strand; PAM type: NRG; PAM sequence: AAG
ttgcctaaagtcacagagga

SEQ ID NO: 50894 - DNA, 20 bp, Artificial Sequence
  Description of Artificial Sequence: Synthetic oligonucleotide
  Target: ATXN2; (+) strand; PAM type: NRG; PAM sequence: AGG
tgcctaaagtcacagaggaa

SEQ ID NO: 50895 - DNA, 20 bp, Artificial Sequence
  Description of Artificial Sequence: Synthetic oligonucleotide
  Target: ATXN2; (+) strand; PAM type: NRG; PAM sequence: TGG
actattatattccttccctc

SEQ ID NO: 50896 - DNA, 20 bp, Artificial Sequence
  Description of Artificial Sequence: Synthetic oligonucleotide
  Target: ATXN2; (+) strand; PAM type: NRG; PAM sequence: AAG
attatattccttccctctgg

SEQ ID NO: 50897 - DNA, 20 bp, Artificial Sequence
  Description of Artificial Sequence: Synthetic oligonucleotide
  Target: ATXN2; (+) strand; PAM type: NRG; PAM sequence: AAG
aagactaacatgtactgctg

SEQ ID NO: 50898 - DNA, 20 bp, Artificial Sequence
  Description of Artificial Sequence: Synthetic oligonucleotide
  Target: ATXN2; (+) strand; PAM type: NRG; PAM sequence: CAG
tgtactgctgaagtcttgtt

SEQ ID NO: 50899 - DNA, 20 bp, Artificial Sequence
  Description of Artificial Sequence: Synthetic oligonucleotide
  Target: ATXN2; (+) strand; PAM type: NRG; PAM sequence: TAG
agtcttgttcagtgtccttc

SEQ ID NO: 50900 - DNA, 20 bp, Artificial Sequence
  Description of Artificial Sequence: Synthetic oligonucleotide
  Target: ATXN2; (+) strand; PAM type: NRG; PAM sequence: CAG
gttcagtgtccttctagccc

SEQ ID NO: 50901 - DNA, 20 bp, Artificial Sequence
  Description of Artificial Sequence: Synthetic oligonucleotide
  Target: ATXN2; (+) strand; PAM type: NRG; PAM sequence: CAG
ccttctagccccagactttg

SEQ ID NO: 50902 - DNA, 20 bp, Artificial Sequence
  Description of Artificial Sequence: Synthetic oligonucleotide
  Target: ATXN2; (+) strand; PAM type: NRG; PAM sequence: TGG
gactttgcagcctaccaaca

SEQ ID NO: 50903 - DNA, 20 bp, Artificial Sequence
  Description of Artificial Sequence: Synthetic oligonucleotide
  Target: ATXN2; (+) strand; PAM type: NRG; PAM sequence: GAG
gcagcctaccaacatggact

SEQ ID NO: 50904 - DNA, 20 bp, Artificial Sequence
  Description of Artificial Sequence: Synthetic oligonucleotide
  Target: ATXN2; (+) strand; PAM type: NRG; PAM sequence: CAG
cctaccaacatggactgaga

SEQ ID NO: 50905 - DNA, 20 bp, Artificial Sequence
  Description of Artificial Sequence: Synthetic oligonucleotide
  Target: ATXN2; (+) strand; PAM type: NRG; PAM sequence: AGG
ctaccaacatggactgagac

SEQ ID NO: 50906 - DNA, 20 bp, Artificial Sequence
  Description of Artificial Sequence: Synthetic oligonucleotide
  Target: ATXN2; (+) strand; PAM type: NRG; PAM sequence: GGG
taccaacatggactgagaca

SEQ ID NO: 50907 - DNA, 20 bp, Artificial Sequence
  Description of Artificial Sequence: Synthetic oligonucleotide
  Target: ATXN2; (+) strand; PAM type: NRG; PAM sequence: AAG
aacatggactgagacaggga

SEQ ID NO: 50908 - DNA, 20 bp, Artificial Sequence
  Description of Artificial Sequence: Synthetic oligonucleotide
  Target: ATXN2; (+) strand; PAM type: NRG; PAM sequence: TGG
ggactgagacagggaaagcg

SEQ ID NO: 50909 - DNA, 20 bp, Artificial Sequence
  Description of Artificial Sequence: Synthetic oligonucleotide
  Target: ATXN2; (+) strand; PAM type: NRG; PAM sequence: GGG
gactgagacagggaaagcgt

SEQ ID NO: 50910 - DNA, 20 bp, Artificial Sequence
  Description of Artificial Sequence: Synthetic oligonucleotide
  Target: ATXN2; (+) strand; PAM type: NRG; PAM sequence: AAG
gagacagggaaagcgtgggc

SEQ ID NO: 50911 - DNA, 20 bp, Artificial Sequence
  Description of Artificial Sequence: Synthetic oligonucleotide
  Target: ATXN2; (+) strand; PAM type: NRG; PAM sequence: GAG
cagggaaagcgtgggcaagt

SEQ ID NO: 50912 - DNA, 20 bp, Artificial Sequence
  Description of Artificial Sequence: Synthetic oligonucleotide
  Target: ATXN2; (+) strand; PAM type: NRG; PAM sequence: CAG
tccatactctaattttccta

SEQ ID NO: 50913 - DNA, 20 bp, Artificial Sequence
  Description of Artificial Sequence: Synthetic oligonucleotide
  Target: ATXN2; (+) strand; PAM type: NRG; PAM sequence: AAG
atactctaattttcctacag

SEQ ID NO: 50914 - DNA, 20 bp, Artificial Sequence
  Description of Artificial Sequence: Synthetic oligonucleotide
  Target: ATXN2; (+) strand; PAM type: NRG; PAM sequence: AAG
ttttcctacagaagcatcct

SEQ ID NO: 50915 - DNA, 20 bp, Artificial Sequence
  Description of Artificial Sequence: Synthetic oligonucleotide
  Target: ATXN2; (+) strand; PAM type: NRG; PAM sequence: TGG
tcctacagaagcatcctaag

SEQ ID NO: 50916 - DNA, 20 bp, Artificial Sequence
  Description of Artificial Sequence: Synthetic oligonucleotide
  Target: ATXN2; (+) strand; PAM type: NRG; PAM sequence: TGG
gaagcatcctaagtggtgtg

SEQ ID NO: 50917 - DNA, 20 bp, Artificial Sequence
  Description of Artificial Sequence: Synthetic oligonucleotide
  Target: ATXN2; (+) strand; PAM type: NRG; PAM sequence: GGG
aagcatcctaagtggtgtgt

SEQ ID NO: 50918 - DNA, 20 bp, Artificial Sequence
  Description of Artificial Sequence: Synthetic oligonucleotide
  Target: ATXN2; (+) strand; PAM type: NRG; PAM sequence: CAG
ctaagtggtgtgtgggttct

SEQ ID NO: 50919 - DNA, 20 bp, Artificial Sequence
  Description of Artificial Sequence: Synthetic oligonucleotide
  Target: ATXN2; (+) strand; PAM type: NRG; PAM sequence: AAG
ggtgtgtgggttctcagatc

SEQ ID NO: 50920 - DNA, 20 bp, Artificial Sequence
  Description of Artificial Sequence: Synthetic oligonucleotide
  Target: ATXN2; (+) strand; PAM type: NRG; PAM sequence: CAG
tcaagtcacaaacacattca

SEQ ID NO: 50921 - DNA, 20 bp, Artificial Sequence
  Description of Artificial Sequence: Synthetic oligonucleotide
  Target: ATXN2; (+) strand; PAM type: NRG; PAM sequence: TAG
tatcgtacaacactactttt

SEQ ID NO: 50922 - DNA, 20 bp, Artificial Sequence
  Description of Artificial Sequence: Synthetic oligonucleotide
  Target: ATXN2; (+) strand; PAM type: NRG; PAM sequence: GAG
ttttagttcaaattaattat

SEQ ID NO: 50923 - DNA, 20 bp, Artificial Sequence
  Description of Artificial Sequence: Synthetic oligonucleotide
  Target: ATXN2; (+) strand; PAM type: NRG; PAM sequence: CAG
aaattaattatgagtaacaa

SEQ ID NO: 50924 - DNA, 20 bp, Artificial Sequence
  Description of Artificial Sequence: Synthetic oligonucleotide
  Target: ATXN2; (+) strand; PAM type: NRG; PAM sequence: TAG
caacagactatctgccaaaa

SEQ ID NO: 50925 - DNA, 20 bp, Artificial Sequence
  Description of Artificial Sequence: Synthetic oligonucleotide
  Target: ATXN2; (+) strand; PAM type: NRG; PAM sequence: AGG
aacagactatctgccaaaat

SEQ ID NO: 50926 - DNA, 20 bp, Artificial Sequence
  Description of Artificial Sequence: Synthetic oligonucleotide
  Target: ATXN2; (+) strand; PAM type: NRG; PAM sequence: GGG
acagactatctgccaaaata

SEQ ID NO: 50927 - DNA, 20 bp, Artificial Sequence
  Description of Artificial Sequence: Synthetic oligonucleotide
  Target: ATXN2; (+) strand; PAM type: NRG; PAM sequence: GAG
agactatctgccaaaatagg

SEQ ID NO: 50928 - DNA, 20 bp, Artificial Sequence
  Description of Artificial Sequence: Synthetic oligonucleotide
  Target: ATXN2; (+) strand; PAM type: NRG; PAM sequence: CAG
tctgccaaaatagggagctg

SEQ ID NO: 50929 - DNA, 20 bp, Artificial Sequence
  Description of Artificial Sequence: Synthetic oligonucleotide
  Target: ATXN2; (+) strand; PAM type: NRG; PAM sequence: TAG
ttttgattgaaactcactga

SEQ ID NO: 50930 - DNA, 20 bp, Artificial Sequence
  Description of Artificial Sequence: Synthetic oligonucleotide
  Target: ATXN2; (+) strand; PAM type: NRG; PAM sequence: GAG
ttgattgaaactcactgata

SEQ ID NO: 50931 - DNA, 20 bp, Artificial Sequence
  Description of Artificial Sequence: Synthetic oligonucleotide
  Target: ATXN2; (+) strand; PAM type: NRG; PAM sequence: CAG
actcactgatagagaactgc

SEQ ID NO: 50932 - DNA, 20 bp, Artificial Sequence
  Description of Artificial Sequence: Synthetic oligonucleotide
  Target: ATXN2; (+) strand; PAM type: NRG; PAM sequence: AGG
ctcactgatagagaactgcc

SEQ ID NO: 50933 - DNA, 20 bp, Artificial Sequence
  Description of Artificial Sequence: Synthetic oligonucleotide
  Target: ATXN2; (+) strand; PAM type: NRG; PAM sequence: AAG
atagagaactgccaggacta

SEQ ID NO: 50934 - DNA, 20 bp, Artificial Sequence
  Description of Artificial Sequence: Synthetic oligonucleotide
  Target: ATXN2; (+) strand; PAM type: NRG; PAM sequence: TGG
gaactgccaggactaaagca

SEQ ID NO: 50935 - DNA, 20 bp, Artificial Sequence
  Description of Artificial Sequence: Synthetic oligonucleotide
  Target: ATXN2; (+) strand; PAM type: NRG; PAM sequence: AAG
gactaaagcatggttgattg

SEQ ID NO: 50936 - DNA, 20 bp, Artificial Sequence
  Description of Artificial Sequence: Synthetic oligonucleotide
  Target: ATXN2; (+) strand; PAM type: NRG; PAM sequence: CGG
ttattgctgacaataatcac

SEQ ID NO: 50937 - DNA, 20 bp, Artificial Sequence
  Description of Artificial Sequence: Synthetic oligonucleotide
  Target: ATXN2; (+) strand; PAM type: NRG; PAM sequence: GAG
tatttatttatttatttttt

SEQ ID NO: 50938 - DNA, 20 bp, Artificial Sequence
  Description of Artificial Sequence: Synthetic oligonucleotide
  Target: ATXN2; (+) strand; PAM type: NRG; PAM sequence: CGG
tatttatttattttttgaga

SEQ ID NO: 50939 - DNA, 20 bp, Artificial Sequence
  Description of Artificial Sequence: Synthetic oligonucleotide
  Target: ATXN2; (+) strand; PAM type: NRG; PAM sequence: GAG
tttatttattttttgagacg

SEQ ID NO: 50940 - DNA, 20 bp, Artificial Sequence
  Description of Artificial Sequence: Synthetic oligonucleotide
  Target: ATXN2; (+) strand; PAM type: NRG; PAM sequence: TGG
tcttgctttgttgcctacgc

SEQ ID NO: 50941 - DNA, 20 bp, Artificial Sequence
  Description of Artificial Sequence: Synthetic oligonucleotide
  Target: ATXN2; (+) strand; PAM type: NRG; PAM sequence: GAG
ttgctttgttgcctacgctg

SEQ ID NO: 50942 - DNA, 20 bp, Artificial Sequence
  Description of Artificial Sequence: Synthetic oligonucleotide
  Target: ATXN2; (+) strand; PAM type: NRG; PAM sequence: TGG
ttgcctacgctggagtgcaa

SEQ ID NO: 50943 - DNA, 20 bp, Artificial Sequence
  Description of Artificial Sequence: Synthetic oligonucleotide
  Target: ATXN2; (+) strand; PAM type: NRG; PAM sequence: GAG
gcctacgctggagtgcaatg

SEQ ID NO: 50944 - DNA, 20 bp, Artificial Sequence
  Description of Artificial Sequence: Synthetic oligonucleotide
  Target: ATXN2; (+) strand; PAM type: NRG; PAM sequence: CAG
ggagtgcaatggagcgatct

SEQ ID NO: 50945 - DNA, 20 bp, Artificial Sequence
  Description of Artificial Sequence: Synthetic oligonucleotide
  Target: ATXN2; (+) strand; PAM type: NRG; PAM sequence: CAG
tcactgcaacctccacctcc

SEQ ID NO: 50946 - DNA, 20 bp, Artificial Sequence
  Description of Artificial Sequence: Synthetic oligonucleotide
  Target: ATXN2; (+) strand; PAM type: NRG; PAM sequence: AGG
cactgcaacctccacctccc

SEQ ID NO: 50947 - DNA, 20 bp, Artificial Sequence
  Description of Artificial Sequence: Synthetic oligonucleotide
  Target: ATXN2; (+) strand; PAM type: NRG; PAM sequence: AAG
aacctccacctcccaggttc

SEQ ID NO: 50948 - DNA, 20 bp, Artificial Sequence
  Description of Artificial Sequence: Synthetic oligonucleotide
  Target: ATXN2; (+) strand; PAM type: NRG; PAM sequence: CAG
tcaagcgattctccttgcct

SEQ ID NO: 50949 - DNA, 20 bp, Artificial Sequence
  Description of Artificial Sequence: Synthetic oligonucleotide
  Target: ATXN2; (+) strand; PAM type: NRG; PAM sequence: GAG
tctccttgcctcagcctact

SEQ ID NO: 50950 - DNA, 20 bp, Artificial Sequence
  Description of Artificial Sequence: Synthetic oligonucleotide
  Target: ATXN2; (+) strand; PAM type: NRG; PAM sequence: TAG
ccttgcctcagcctactgag

SEQ ID NO: 50951 - DNA, 20 bp, Artificial Sequence
  Description of Artificial Sequence: Synthetic oligonucleotide
  Target: ATXN2; (+) strand; PAM type: NRG; PAM sequence: TGG
gcctcagcctactgagtagc

SEQ ID NO: 50952 - DNA, 20 bp, Artificial Sequence
  Description of Artificial Sequence: Synthetic oligonucleotide
  Target: ATXN2; (+) strand; PAM type: NRG; PAM sequence: GGG
cctcagcctactgagtagct

SEQ ID NO: 50953 - DNA, 20 bp, Artificial Sequence
  Description of Artificial Sequence: Synthetic oligonucleotide
  Target: ATXN2; (+) strand; PAM type: NRG; PAM sequence: CAG
ctactgagtagctgggatta

SEQ ID NO: 50954 - DNA, 20 bp, Artificial Sequence
  Description of Artificial Sequence: Synthetic oligonucleotide
  Target: ATXN2; (+) strand; PAM type: NRG; PAM sequence: AGG
tactgagtagctgggattac

SEQ ID NO: 50955 - DNA, 20 bp, Artificial Sequence
  Description of Artificial Sequence: Synthetic oligonucleotide
  Target: ATXN2; (+) strand; PAM type: NRG; PAM sequence: TGG
caggtgcttgtcaccacgcc

SEQ ID NO: 50956 - DNA, 20 bp, Artificial Sequence
  Description of Artificial Sequence: Synthetic oligonucleotide
  Target: ATXN2; (+) strand; PAM type: NRG; PAM sequence: TAG
ggctaacttttttgtatttt

SEQ ID NO: 50957 - DNA, 20 bp, Artificial Sequence
  Description of Artificial Sequence: Synthetic oligonucleotide
  Target: ATXN2; (+) strand; PAM type: NRG; PAM sequence: TAG
taacttttttgtatttttag

SEQ ID NO: 50958 - DNA, 20 bp, Artificial Sequence
  Description of Artificial Sequence: Synthetic oligonucleotide
  Target: ATXN2; (+) strand; PAM type: NRG; PAM sequence: GAG
acttttttgtatttttagta

SEQ ID NO: 50959 - DNA, 20 bp, Artificial Sequence
  Description of Artificial Sequence: Synthetic oligonucleotide
  Target: ATXN2; (+) strand; PAM type: NRG; PAM sequence: CGG
ttttgtatttttagtagaga

SEQ ID NO: 50960 - DNA, 20 bp, Artificial Sequence
  Description of Artificial Sequence: Synthetic oligonucleotide
  Target: ATXN2; (+) strand; PAM type: NRG; PAM sequence: GAG
ttgtatttttagtagagacg

SEQ ID NO: 50961 - DNA, 20 bp, Artificial Sequence
  Description of Artificial Sequence: Synthetic oligonucleotide
  Target: ATXN2; (+) strand; PAM type: NRG; PAM sequence: TGG
gagacggagttttgtcatgt

SEQ ID NO: 50962 - DNA, 20 bp, Artificial Sequence
  Description of Artificial Sequence: Synthetic oligonucleotide
  Target: ATXN2; (+) strand; PAM type: NRG; PAM sequence: CAG
cggagttttgtcatgttggc

SEQ ID NO: 50963 - DNA, 20 bp, Artificial Sequence
  Description of Artificial Sequence: Synthetic oligonucleotide
  Target: ATXN2; (+) strand; PAM type: NRG; PAM sequence: AGG
ggagttttgtcatgttggcc

SEQ ID NO: 50964 - DNA, 20 bp, Artificial Sequence
  Description of Artificial Sequence: Synthetic oligonucleotide
  Target: ATXN2; (+) strand; PAM type: NRG; PAM sequence: TGG
ttttgtcatgttggccaggc

SEQ ID NO: 50965 - DNA, 20 bp, Artificial Sequence
  Description of Artificial Sequence: Synthetic oligonucleotide
  Target: ATXN2; (+) strand; PAM type: NRG; PAM sequence: CAG
tggtctcaaattcctgacct

SEQ ID NO: 50966 - DNA, 20 bp, Artificial Sequence
  Description of Artificial Sequence: Synthetic oligonucleotide
  Target: ATXN2; (+) strand; PAM type: NRG; PAM sequence: AGG
ggtctcaaattcctgacctc

SEQ ID NO: 50967 - DNA, 20 bp, Artificial Sequence
  Description of Artificial Sequence: Synthetic oligonucleotide
  Target: ATXN2; (+) strand; PAM type: NRG; PAM sequence: CGG
ctcaggcgatccacacgcct

SEQ ID NO: 50968 - DNA, 20 bp, Artificial Sequence
  Description of Artificial Sequence: Synthetic oligonucleotide
  Target: ATXN2; (+) strand; PAM type: NRG; PAM sequence: TGG
gcctcggcctcccaaactgc

SEQ ID NO: 50969 - DNA, 20 bp, Artificial Sequence
  Description of Artificial Sequence: Synthetic oligonucleotide
  Target: ATXN2; (+) strand; PAM type: NRG; PAM sequence: GGG
cctcggcctcccaaactgct

SEQ ID NO: 50970 - DNA, 20 bp, Artificial Sequence
  Description of Artificial Sequence: Synthetic oligonucleotide
  Target: ATXN2; (+) strand; PAM type: NRG; PAM sequence: CAG
ctcccaaactgctgggatta

SEQ ID NO: 50971 - DNA, 20 bp, Artificial Sequence
  Description of Artificial Sequence: Synthetic oligonucleotide
  Target: ATXN2; (+) strand; PAM type: NRG; PAM sequence: AGG
tcccaaactgctgggattac

SEQ ID NO: 50972 - DNA, 20 bp, Artificial Sequence
  Description of Artificial Sequence: Synthetic oligonucleotide
  Target: ATXN2; (+) strand; PAM type: NRG; PAM sequence: AAG
actgctgggattacaggcat

SEQ ID NO: 50973 - DNA, 20 bp, Artificial Sequence
  Description of Artificial Sequence: Synthetic oligonucleotide
  Target: ATXN2; (+) strand; PAM type: NRG; PAM sequence: CAG
caggcataagcgactgctcc

SEQ ID NO: 50974 - DNA, 20 bp, Artificial Sequence
  Description of Artificial Sequence: Synthetic oligonucleotide
  Target: ATXN2; (+) strand; PAM type: NRG; PAM sequence: TAG
tttttgtcatatctctatat

SEQ ID NO: 50975 - DNA, 20 bp, Artificial Sequence
  Description of Artificial Sequence: Synthetic oligonucleotide
  Target: ATXN2; (+) strand; PAM type: NRG; PAM sequence: AAG
ttgtcatatctctatattag

SEQ ID NO: 50976 - DNA, 20 bp, Artificial Sequence
  Description of Artificial Sequence: Synthetic oligonucleotide
  Target: ATXN2; (+) strand; PAM type: NRG; PAM sequence: TGG
tatctctatattagaagcaa

SEQ ID NO: 50977 - DNA, 20 bp, Artificial Sequence
  Description of Artificial Sequence: Synthetic oligonucleotide
  Target: ATXN2; (+) strand; PAM type: NRG; PAM sequence: CAG
ctatattagaagcaatggaa

SEQ ID NO: 50978 - DNA, 20 bp, Artificial Sequence
  Description of Artificial Sequence: Synthetic oligonucleotide
  Target: ATXN2; (+) strand; PAM type: NRG; PAM sequence: AAG
gcaatggaacagttattaaa

SEQ ID NO: 50979 - DNA, 20 bp, Artificial Sequence
  Description of Artificial Sequence: Synthetic oligonucleotide
  Target: ATXN2; (+) strand; PAM type: NRG; PAM sequence: AAG
ggaacagttattaaaaagca

SEQ ID NO: 50980 - DNA, 20 bp, Artificial Sequence
  Description of Artificial Sequence: Synthetic oligonucleotide
  Target: ATXN2; (+) strand; PAM type: NRG; PAM sequence: AAG
caaagactttgaaatctcac

SEQ ID NO: 50981 - DNA, 20 bp, Artificial Sequence
  Description of Artificial Sequence: Synthetic oligonucleotide
  Target: ATXN2; (+) strand; PAM type: NRG; PAM sequence: AGG
aaagactttgaaatctcaca

SEQ ID NO: 50982 - DNA, 20 bp, Artificial Sequence
  Description of Artificial Sequence: Synthetic oligonucleotide
  Target: ATXN2; (+) strand; PAM type: NRG; PAM sequence: CAG
tctcacaaggttaaaaatct

SEQ ID NO: 50983 - DNA, 20 bp, Artificial Sequence
  Description of Artificial Sequence: Synthetic oligonucleotide
  Target: ATXN2; (+) strand; PAM type: NRG; PAM sequence: AAG
cttcctatctctttgaccta

SEQ ID NO: 50984 - DNA, 20 bp, Artificial Sequence
  Description of Artificial Sequence: Synthetic oligonucleotide
  Target: ATXN2; (+) strand; PAM type: NRG; PAM sequence: AGG
ttcctatctctttgacctaa

SEQ ID NO: 50985 - DNA, 20 bp, Artificial Sequence
  Description of Artificial Sequence: Synthetic oligonucleotide
  Target: ATXN2; (+) strand; PAM type: NRG; PAM sequence: CAG
tcacttcctcatctgtaaaa

SEQ ID NO: 50986 - DNA, 20 bp, Artificial Sequence
  Description of Artificial Sequence: Synthetic oligonucleotide
  Target: ATXN2; (+) strand; PAM type: NRG; PAM sequence: TGG
cctcatctgtaaaacagata

SEQ ID NO: 50987 - DNA, 20 bp, Artificial Sequence
  Description of Artificial Sequence: Synthetic oligonucleotide
  Target: ATXN2; (+) strand; PAM type: NRG; PAM sequence: CAG
taaaacagatatggcactac

SEQ ID NO: 50988 - DNA, 20 bp, Artificial Sequence
  Description of Artificial Sequence: Synthetic oligonucleotide
  Target: ATXN2; (+) strand; PAM type: NRG; PAM sequence: CAG
atatggcactaccagcctga

SEQ ID NO: 50989 - DNA, 20 bp, Artificial Sequence
  Description of Artificial Sequence: Synthetic oligonucleotide
  Target: ATXN2; (+) strand; PAM type: NRG; PAM sequence: AGG
tatggcactaccagcctgac

SEQ ID NO: 50990 - DNA, 20 bp, Artificial Sequence
  Description of Artificial Sequence: Synthetic oligonucleotide
  Target: ATXN2; (+) strand; PAM type: NRG; PAM sequence: TGG
gcactaccagcctgacaggc

SEQ ID NO: 50991 - DNA, 20 bp, Artificial Sequence
  Description of Artificial Sequence: Synthetic oligonucleotide
  Target: ATXN2; (+) strand; PAM type: NRG; PAM sequence: GGG
cactaccagcctgacaggct

SEQ ID NO: 50992 - DNA, 20 bp, Artificial Sequence
  Description of Artificial Sequence: Synthetic oligonucleotide
  Target: ATXN2; (+) strand; PAM type: NRG; PAM sequence: AAG
ctgacaggctgggctgttgt

SEQ ID NO: 50993 - DNA, 20 bp, Artificial Sequence
  Description of Artificial Sequence: Synthetic oligonucleotide
  Target: ATXN2; (+) strand; PAM type: NRG; PAM sequence: AGG
tgacaggctgggctgttgta

SEQ ID NO: 50994 - DNA, 20 bp, Artificial Sequence
  Description of Artificial Sequence: Synthetic oligonucleotide
  Target: ATXN2; (+) strand; PAM type: NRG; PAM sequence: AAG
tgggctgttgtaaggcttaa

SEQ ID NO: 50995 - DNA, 20 bp, Artificial Sequence
  Description of Artificial Sequence: Synthetic oligonucleotide
  Target: ATXN2; (+) strand; PAM type: NRG; PAM sequence: AAG
gtaaggcttaaaagatatac

SEQ ID NO: 50996 - DNA, 20 bp, Artificial Sequence
  Description of Artificial Sequence: Synthetic oligonucleotide
  Target: ATXN2; (+) strand; PAM type: NRG; PAM sequence: TGG
agatatacaagtaatgctct

SEQ ID NO: 50997 - DNA, 20 bp, Artificial Sequence
  Description of Artificial Sequence: Synthetic oligonucleotide
  Target: ATXN2; (+) strand; PAM type: NRG; PAM sequence: CAG
tacaagtaatgctcttggca

SEQ ID NO: 50998 - DNA, 20 bp, Artificial Sequence
  Description of Artificial Sequence: Synthetic oligonucleotide
  Target: ATXN2; (+) strand; PAM type: NRG; PAM sequence: TAG
acagctctcctgaaacctaa

SEQ ID NO: 50999 - DNA, 20 bp, Artificial Sequence
  Description of Artificial Sequence: Synthetic oligonucleotide
  Target: ATXN2; (+) strand; PAM type: NRG; PAM sequence: AGG
cagctctcctgaaacctaat

SEQ ID NO: 51000 - DNA, 20 bp, Artificial Sequence
  Description of Artificial Sequence: Synthetic oligonucleotide
  Target: ATXN2; (+) strand; PAM type: NRG; PAM sequence: TGG
cctaataggcacacaataaa

SEQ ID NO: 51001 - DNA, 20 bp, Artificial Sequence
  Description of Artificial Sequence: Synthetic oligonucleotide
  Target: ATXN2; (+) strand; PAM type: NRG; PAM sequence: TAG
atgttcatcttttcacatca

SEQ ID NO: 51002 - DNA, 20 bp, Artificial Sequence
  Description of Artificial Sequence: Synthetic oligonucleotide
  Target: ATXN2; (+) strand; PAM type: NRG; PAM sequence: TAG
tcatcttttcacatcataga

SEQ ID NO: 51003 - DNA, 20 bp, Artificial Sequence
  Description of Artificial Sequence: Synthetic oligonucleotide
  Target: ATXN2; (+) strand; PAM type: NRG; PAM sequence: CAG
tttctttttttttttttttc

SEQ ID NO: 51004 - DNA, 20 bp, Artificial Sequence
  Description of Artificial Sequence: Synthetic oligonucleotide
  Target: ATXN2; (+) strand; PAM type: NRG; PAM sequence: TGG
ttttttttttccagaaaaaa

SEQ ID NO: 51005 - DNA, 20 bp, Artificial Sequence
  Description of Artificial Sequence: Synthetic oligonucleotide
  Target: ATXN2; (+) strand; PAM type: NRG; PAM sequence: TGG
aaatggccactactaccact

SEQ ID NO: 51006 - DNA, 20 bp, Artificial Sequence
  Description of Artificial Sequence: Synthetic oligonucleotide
  Target: ATXN2; (+) strand; PAM type: NRG; PAM sequence: CAG
gccactactaccacttggct

SEQ ID NO: 51007 - DNA, 20 bp, Artificial Sequence
  Description of Artificial Sequence: Synthetic oligonucleotide
  Target: ATXN2; (+) strand; PAM type: NRG; PAM sequence: TAG
accacttggctcagaaatgc

SEQ ID NO: 51008 - DNA, 20 bp, Artificial Sequence
  Description of Artificial Sequence: Synthetic oligonucleotide
  Target: ATXN2; (+) strand; PAM type: NRG; PAM sequence: TAG
attttctgaaatgttttata

SEQ ID NO: 51009 - DNA, 20 bp, Artificial Sequence
  Description of Artificial Sequence: Synthetic oligonucleotide
  Target: ATXN2; (+) strand; PAM type: NRG; PAM sequence: TAG
agaaaaaatttaataataaa

SEQ ID NO: 51010 - DNA, 20 bp, Artificial Sequence
  Description of Artificial Sequence: Synthetic oligonucleotide
  Target: ATXN2; (+) strand; PAM type: NRG; PAM sequence: TAG
tatatatttccttaccattt

SEQ ID NO: 51011 - DNA, 20 bp, Artificial Sequence
  Description of Artificial Sequence: Synthetic oligonucleotide
  Target: ATXN2; (+) strand; PAM type: NRG; PAM sequence: TGG
atttccttaccattttagat

SEQ ID NO: 51012 - DNA, 20 bp, Artificial Sequence
  Description of Artificial Sequence: Synthetic oligonucleotide
  Target: ATXN2; (+) strand; PAM type: NRG; PAM sequence: GGG
tttccttaccattttagatt

SEQ ID NO: 51013 - DNA, 20 bp, Artificial Sequence
  Description of Artificial Sequence: Synthetic oligonucleotide
  Target: ATXN2; (+) strand; PAM type: NRG; PAM sequence: AAG
ccattttagattgggttaaa

SEQ ID NO: 51014 - DNA, 20 bp, Artificial Sequence
  Description of Artificial Sequence: Synthetic oligonucleotide
  Target: ATXN2; (+) strand; PAM type: NRG; PAM sequence: TGG
ttagattgggttaaaaagta

SEQ ID NO: 51015 - DNA, 20 bp, Artificial Sequence
  Description of Artificial Sequence: Synthetic oligonucleotide
  Target: ATXN2; (+) strand; PAM type: NRG; PAM sequence: GAG
agattgggttaaaaagtatg

SEQ ID NO: 51016 - DNA, 20 bp, Artificial Sequence
  Description of Artificial Sequence: Synthetic oligonucleotide
  Target: ATXN2; (+) strand; PAM type: NRG; PAM sequence: CGG
ttaaaaagtatggagacttc

SEQ ID NO: 51017 - DNA, 20 bp, Artificial Sequence
  Description of Artificial Sequence: Synthetic oligonucleotide
  Target: ATXN2; (+) strand; PAM type: NRG; PAM sequence: CGG
aaagtatggagacttccggc

SEQ ID NO: 51018 - DNA, 20 bp, Artificial Sequence
  Description of Artificial Sequence: Synthetic oligonucleotide
  Target: ATXN2; (+) strand; PAM type: NRG; PAM sequence: GGG
aagtatggagacttccggcc

SEQ ID NO: 51019 - DNA, 20 bp, Artificial Sequence
  Description of Artificial Sequence: Synthetic oligonucleotide
  Target: ATXN2; (+) strand; PAM type: NRG; PAM sequence: CGG
tggagacttccggccgggtg

SEQ ID NO: 51020 - DNA, 20 bp, Artificial Sequence
  Description of Artificial Sequence: Synthetic oligonucleotide
  Target: ATXN2; (+) strand; PAM type: NRG; PAM sequence: AAG
ccggccgggtgcggtgattc

SEQ ID NO: 51021 - DNA, 20 bp, Artificial Sequence
  Description of Artificial Sequence: Synthetic oligonucleotide
  Target: ATXN2; (+) strand; PAM type: NRG; PAM sequence: CAG
gtgattcaagcctgcaatcc

SEQ ID NO: 51022 - DNA, 20 bp, Artificial Sequence
  Description of Artificial Sequence: Synthetic oligonucleotide
  Target: ATXN2; (+) strand; PAM type: NRG; PAM sequence: TGG
agcctgcaatcccagcactt

SEQ ID NO: 51023 - DNA, 20 bp, Artificial Sequence
  Description of Artificial Sequence: Synthetic oligonucleotide
  Target: ATXN2; (+) strand; PAM type: NRG; PAM sequence: GGG
gcctgcaatcccagcacttt

SEQ ID NO: 51024 - DNA, 20 bp, Artificial Sequence
  Description of Artificial Sequence: Synthetic oligonucleotide
  Target: ATXN2; (+) strand; PAM type: NRG; PAM sequence: GAG
ctgcaatcccagcactttgg

SEQ ID NO: 51025 - DNA, 20 bp, Artificial Sequence
  Description of Artificial Sequence: Synthetic oligonucleotide
  Target: ATXN2; (+) strand; PAM type: NRG; PAM sequence: AGG
tgcaatcccagcactttggg

SEQ ID NO: 51026 - DNA, 20 bp, Artificial Sequence
  Description of Artificial Sequence: Synthetic oligonucleotide
  Target: ATXN2; (+) strand; PAM type: NRG; PAM sequence: GAG
tcccagcactttgggaggct

SEQ ID NO: 51027 - DNA, 20 bp, Artificial Sequence
  Description of Artificial Sequence: Synthetic oligonucleotide
  Target: ATXN2; (+) strand; PAM type: NRG; PAM sequence: AGG
cccagcactttgggaggctg

SEQ ID NO: 51028 - DNA, 20 bp, Artificial Sequence
  Description of Artificial Sequence: Synthetic oligonucleotide
  Target: ATXN2; (+) strand; PAM type: NRG; PAM sequence: CAG
agcactttgggaggctgagg

SEQ ID NO: 51029 - DNA, 20 bp, Artificial Sequence
  Description of Artificial Sequence: Synthetic oligonucleotide
  Target: ATXN2; (+) strand; PAM type: NRG; PAM sequence: CAG
ctttgggaggctgaggcaga

SEQ ID NO: 51030 - DNA, 20 bp, Artificial Sequence
  Description of Artificial Sequence: Synthetic oligonucleotide
  Target: ATXN2; (+) strand; PAM type: NRG; PAM sequence: GAG
ggctgaggcagacagatcat

SEQ ID NO: 51031 - DNA, 20 bp, Artificial Sequence
  Description of Artificial Sequence: Synthetic oligonucleotide
  Target: ATXN2; (+) strand; PAM type: NRG; PAM sequence: AGG
gctgaggcagacagatcatg

SEQ ID NO: 51032 - DNA, 20 bp, Artificial Sequence
  Description of Artificial Sequence: Synthetic oligonucleotide
  Target: ATXN2; (+) strand; PAM type: NRG; PAM sequence: CGG
aggcagacagatcatgaggt

SEQ ID NO: 51033 - DNA, 20 bp, Artificial Sequence
  Description of Artificial Sequence: Synthetic oligonucleotide
  Target: ATXN2; (+) strand; PAM type: NRG; PAM sequence: GGG
ggcagacagatcatgaggtc

SEQ ID NO: 51034 - DNA, 20 bp, Artificial Sequence
  Description of Artificial Sequence: Synthetic oligonucleotide
  Target: ATXN2; (+) strand; PAM type: NRG; PAM sequence: TGG
gatcatgaggtcgggatctg

SEQ ID NO: 51035 - DNA, 20 bp, Artificial Sequence
  Description of Artificial Sequence: Synthetic oligonucleotide
  Target: ATXN2; (+) strand; PAM type: NRG; PAM sequence: CAG
gtcgggatctgtggctaaca

SEQ ID NO: 51036 - DNA, 20 bp, Artificial Sequence
  Description of Artificial Sequence: Synthetic oligonucleotide
  Target: ATXN2; (+) strand; PAM type: NRG; PAM sequence: TAG
taccaaaaatacaaaaaaat

SEQ ID NO: 51037 - DNA, 20 bp, Artificial Sequence
  Description of Artificial Sequence: Synthetic oligonucleotide
  Target: ATXN2; (+) strand; PAM type: NRG; PAM sequence: CGG
aaaaatacaaaaaaattagc

SEQ ID NO: 51038 - DNA, 20 bp, Artificial Sequence
  Description of Artificial Sequence: Synthetic oligonucleotide
  Target: ATXN2; (+) strand; PAM type: NRG; PAM sequence: GGG
aaaatacaaaaaaattagcc

SEQ ID NO: 51039 - DNA, 20 bp, Artificial Sequence
  Description of Artificial Sequence: Synthetic oligonucleotide
  Target: ATXN2; (+) strand; PAM type: NRG; PAM sequence: TGG
acaaaaaaattagccgggcg

SEQ ID NO: 51040 - DNA, 20 bp, Artificial Sequence
  Description of Artificial Sequence: Synthetic oligonucleotide
  Target: ATXN2; (+) strand; PAM type: NRG; PAM sequence: TGG
aaaaaattagccgggcgtgg

SEQ ID NO: 51041 - DNA, 20 bp, Artificial Sequence
  Description of Artificial Sequence: Synthetic oligonucleotide
  Target: ATXN2; (+) strand; PAM type: NRG; PAM sequence: CGG
aaattagccgggcgtggtgg

SEQ ID NO: 51042 - DNA, 20 bp, Artificial Sequence
  Description of Artificial Sequence: Synthetic oligonucleotide
  Target: ATXN2; (+) strand; PAM type: NRG; PAM sequence: GGG
aattagccgggcgtggtggc

SEQ ID NO: 51043 - DNA, 20 bp, Artificial Sequence
  Description of Artificial Sequence: Synthetic oligonucleotide
  Target: ATXN2; (+) strand; PAM type: NRG; PAM sequence: TAG
ggcgtggtggcgggcacctg

SEQ ID NO: 51044 - DNA, 20 bp, Artificial Sequence
  Description of Artificial Sequence: Synthetic oligonucleotide
  Target: ATXN2; (+) strand; PAM type: NRG; PAM sequence: CAG
gtggcgggcacctgtagtcc

SEQ ID NO: 51045 - DNA, 20 bp, Artificial Sequence
  Description of Artificial Sequence: Synthetic oligonucleotide
  Target: ATXN2; (+) strand; PAM type: NRG; PAM sequence: CGG
cacctgtagtcccagctact

SEQ ID NO: 51046 - DNA, 20 bp, Artificial Sequence
  Description of Artificial Sequence: Synthetic oligonucleotide
  Target: ATXN2; (+) strand; PAM type: NRG; PAM sequence: GGG
acctgtagtcccagctactc

SEQ ID NO: 51047 - DNA, 20 bp, Artificial Sequence
  Description of Artificial Sequence: Synthetic oligonucleotide
  Target: ATXN2; (+) strand; PAM type: NRG; PAM sequence: GAG
ctgtagtcccagctactcgg

SEQ ID NO: 51048 - DNA, 20 bp, Artificial Sequence
  Description of Artificial Sequence: Synthetic oligonucleotide
  Target: ATXN2; (+) strand; PAM type: NRG; PAM sequence: AGG
tgtagtcccagctactcggg

SEQ ID NO: 51049 - DNA, 20 bp, Artificial Sequence
  Description of Artificial Sequence: Synthetic oligonucleotide
  Target: ATXN2; (+) strand; PAM type: NRG; PAM sequence: TGG
agtcccagctactcgggagg

SEQ ID NO: 51050 - DNA, 20 bp, Artificial Sequence
  Description of Artificial Sequence: Synthetic oligonucleotide
  Target: ATXN2; (+) strand; PAM type: NRG; PAM sequence: GAG
tcccagctactcgggaggtg

SEQ ID NO: 51051 - DNA, 20 bp, Artificial Sequence
  Description of Artificial Sequence: Synthetic oligonucleotide
  Target: ATXN2; (+) strand; PAM type: NRG; PAM sequence: AGG
cccagctactcgggaggtgg

SEQ ID NO: 51052 - DNA, 20 bp, Artificial Sequence
  Description of Artificial Sequence: Synthetic oligonucleotide
  Target: ATXN2; (+) strand; PAM type: NRG; PAM sequence: CAG
agctactcgggaggtggagg

SEQ ID NO: 51053 - DNA, 20 bp, Artificial Sequence
  Description of Artificial Sequence: Synthetic oligonucleotide
  Target: ATXN2; (+) strand; PAM type: NRG; PAM sequence: AGG
gctactcgggaggtggaggc

SEQ ID NO: 51054 - DNA, 20 bp, Artificial Sequence
  Description of Artificial Sequence: Synthetic oligonucleotide
  Target: ATXN2; (+) strand; PAM type: NRG; PAM sequence: GAG
tactcgggaggtggaggcag

SEQ ID NO: 51055 - DNA, 20 bp, Artificial Sequence
  Description of Artificial Sequence: Synthetic oligonucleotide
  Target: ATXN2; (+) strand; PAM type: NRG; PAM sequence: TGG
gggaggtggaggcaggagaa

SEQ ID NO: 51056 - DNA, 20 bp, Artificial Sequence
  Description of Artificial Sequence: Synthetic oligonucleotide
  Target: ATXN2; (+) strand; PAM type: NRG; PAM sequence: GAG
caggagaatggcgtgaaccc

SEQ ID NO: 51057 - DNA, 20 bp, Artificial Sequence
  Description of Artificial Sequence: Synthetic oligonucleotide
  Target: ATXN2; (+) strand; PAM type: NRG; PAM sequence: GAG
ggagaatggcgtgaacccga

SEQ ID NO: 51058 - DNA, 20 bp, Artificial Sequence
  Description of Artificial Sequence: Synthetic oligonucleotide
  Target: ATXN2; (+) strand; PAM type: NRG; PAM sequence: AGG
gagaatggcgtgaacccgag

SEQ ID NO: 51059 - DNA, 20 bp, Artificial Sequence
  Description of Artificial Sequence: Synthetic oligonucleotide
  Target: ATXN2; (+) strand; PAM type: NRG; PAM sequence: CAG
aatggcgtgaacccgagagg

SEQ ID NO: 51060 - DNA, 20 bp, Artificial Sequence
  Description of Artificial Sequence: Synthetic oligonucleotide
  Target: ATXN2; (+) strand; PAM type: NRG; PAM sequence: GAG
tggcgtgaacccgagaggca

SEQ ID NO: 51061 - DNA, 20 bp, Artificial Sequence
  Description of Artificial Sequence: Synthetic oligonucleotide
  Target: ATXN2; (+) strand; PAM type: NRG; PAM sequence: TAG
aacccgagaggcagagcttg

SEQ ID NO: 51062 - DNA, 20 bp, Artificial Sequence
  Description of Artificial Sequence: Synthetic oligonucleotide
  Target: ATXN2; (+) strand; PAM type: NRG; PAM sequence: GAG
cgagaggcagagcttgtagt

SEQ ID NO: 51063 - DNA, 20 bp, Artificial Sequence
  Description of Artificial Sequence: Synthetic oligonucleotide
  Target: ATXN2; (+) strand; PAM type: NRG; PAM sequence: AAG
ggcagagcttgtagtgagcc

SEQ ID NO: 51064 - DNA, 20 bp, Artificial Sequence
  Description of Artificial Sequence: Synthetic oligonucleotide
  Target: ATXN2; (+) strand; PAM type: NRG; PAM sequence: CAG
aagatcgcaccactgcactc

SEQ ID NO: 51065 - DNA, 20 bp, Artificial Sequence
  Description of Artificial Sequence: Synthetic oligonucleotide
  Target: ATXN2; (+) strand; PAM type: NRG; PAM sequence: TGG
cgcaccactgcactccagcc

SEQ ID NO: 51066 - DNA, 20 bp, Artificial Sequence
  Description of Artificial Sequence: Synthetic oligonucleotide
  Target: ATXN2; (+) strand; PAM type: NRG; PAM sequence: GGG
gcaccactgcactccagcct

SEQ ID NO: 51067 - DNA, 20 bp, Artificial Sequence
  Description of Artificial Sequence: Synthetic oligonucleotide
  Target: ATXN2; (+) strand; PAM type: NRG; PAM sequence: CAG
ctgcactccagcctgggcga

SEQ ID NO: 51068 - DNA, 20 bp, Artificial Sequence
  Description of Artificial Sequence: Synthetic oligonucleotide
  Target: ATXN2; (+) strand; PAM type: NRG; PAM sequence: GAG
gcactccagcctgggcgaca

SEQ ID NO: 51069 - DNA, 20 bp, Artificial Sequence
  Description of Artificial Sequence: Synthetic oligonucleotide
  Target: ATXN2; (+) strand; PAM type: NRG; PAM sequence: AAG
tccagcctgggcgacagagc

SEQ ID NO: 51070 - DNA, 20 bp, Artificial Sequence
  Description of Artificial Sequence: Synthetic oligonucleotide
  Target: ATXN2; (+) strand; PAM type: NRG; PAM sequence: AAG
aaaaaaaaaaaaaaaaaaaa

SEQ ID NO: 51071 - DNA, 20 bp, Artificial Sequence
  Description of Artificial Sequence: Synthetic oligonucleotide
  Target: ATXN2; (+) strand; PAM type: NRG; PAM sequence: AGG
aaaaaaaaaaaaaaaaaaaa

SEQ ID NO: 51072 - DNA, 20 bp, Artificial Sequence
  Description of Artificial Sequence: Synthetic oligonucleotide
  Target: ATXN2; (+) strand; PAM type: NRG; PAM sequence: TGG
aaaaaaaaaaaaaaaaggta

SEQ ID NO: 51073 - DNA, 20 bp, Artificial Sequence
  Description of Artificial Sequence: Synthetic oligonucleotide
  Target: ATXN2; (+) strand; PAM type: NRG; PAM sequence: GAG
aaaaaaaaaaaaaaggtatg

SEQ ID NO: 51074 - DNA, 20 bp, Artificial Sequence
  Description of Artificial Sequence: Synthetic oligonucleotide
  Target: ATXN2; (+) strand; PAM type: NRG; PAM sequence: TAG
aaaggtatggagacttctta

SEQ ID NO: 51075 - DNA, 20 bp, Artificial Sequence
  Description of Artificial Sequence: Synthetic oligonucleotide
  Target: ATXN2; (+) strand; PAM type: NRG; PAM sequence: TAG
gagacttcttatagcattta

SEQ ID NO: 51076 - DNA, 20 bp, Artificial Sequence
  Description of Artificial Sequence: Synthetic oligonucleotide
  Target: ATXN2; (+) strand; PAM type: NRG; PAM sequence: TGG
tcattttcttttcttttttt

SEQ ID NO: 51077 - DNA, 20 bp, Artificial Sequence
  Description of Artificial Sequence: Synthetic oligonucleotide
  Target: ATXN2; (+) strand; PAM type: NRG; PAM sequence: CGG
ttttcttttcttttttttgg

SEQ ID NO: 51078 - DNA, 20 bp, Artificial Sequence
  Description of Artificial Sequence: Synthetic oligonucleotide
  Target: ATXN2; (+) strand; PAM type: NRG; PAM sequence: TGG
tcttttcttttttttggcgg

SEQ ID NO: 51079 - DNA, 20 bp, Artificial Sequence
  Description of Artificial Sequence: Synthetic oligonucleotide
  Target: ATXN2; (+) strand; PAM type: NRG; PAM sequence: GGG
cttttcttttttttggcggt

SEQ ID NO: 51080 - DNA, 20 bp, Artificial Sequence
  Description of Artificial Sequence: Synthetic oligonucleotide
  Target: ATXN2; (+) strand; PAM type: NRG; PAM sequence: GGG
ttttcttttttttggcggtg

SEQ ID NO: 51081 - DNA, 20 bp, Artificial Sequence
  Description of Artificial Sequence: Synthetic oligonucleotide
  Target: ATXN2; (+) strand; PAM type: NRG; PAM sequence: GGG
tttcttttttttggcggtgg

SEQ ID NO: 51082 - DNA, 20 bp, Artificial Sequence
  Description of Artificial Sequence: Synthetic oligonucleotide
  Target: ATXN2; (+) strand; PAM type: NRG; PAM sequence: GGG
ttcttttttttggcggtggg

SEQ ID NO: 51083 - DNA, 20 bp, Artificial Sequence
  Description of Artificial Sequence: Synthetic oligonucleotide
  Target: ATXN2; (+) strand; PAM type: NRG; PAM sequence: TAG
tttttttggcggtgggggga

SEQ ID NO: 51084 - DNA, 20 bp, Artificial Sequence
  Description of Artificial Sequence: Synthetic oligonucleotide
  Target: ATXN2; (+) strand; PAM type: NRG; PAM sequence: AGG
ttttttggcggtggggggat

SEQ ID NO: 51085 - DNA, 20 bp, Artificial Sequence
  Description of Artificial Sequence: Synthetic oligonucleotide
  Target: ATXN2; (+) strand; PAM type: NRG; PAM sequence: GGG
tttttggcggtggggggata

SEQ ID NO: 51086 - DNA, 20 bp, Artificial Sequence
  Description of Artificial Sequence: Synthetic oligonucleotide
  Target: ATXN2; (+) strand; PAM type: NRG; PAM sequence: TGG
tagggtctcactctgtcgcc

SEQ ID NO: 51087 - DNA, 20 bp, Artificial Sequence
  Description of Artificial Sequence: Synthetic oligonucleotide
  Target: ATXN2; (+) strand; PAM type: NRG; PAM sequence: GGG
agggtctcactctgtcgcct

SEQ ID NO: 51088 - DNA, 20 bp, Artificial Sequence
  Description of Artificial Sequence: Synthetic oligonucleotide
  Target: ATXN2; (+) strand; PAM type: NRG; PAM sequence: TGG
tctcactctgtcgcctggga

SEQ ID NO: 51089 - DNA, 20 bp, Artificial Sequence
  Description of Artificial Sequence: Synthetic oligonucleotide
  Target: ATXN2; (+) strand; PAM type: NRG; PAM sequence: CAG
ctgtcgcctgggatggtata

SEQ ID NO: 51090 - DNA, 20 bp, Artificial Sequence
  Description of Artificial Sequence: Synthetic oligonucleotide
  Target: ATXN2; (+) strand; PAM type: NRG; PAM sequence: TGG
tcgcctgggatggtatacag

SEQ ID NO: 51091 - DNA, 20 bp, Artificial Sequence
  Description of Artificial Sequence: Synthetic oligonucleotide
  Target: ATXN2; (+) strand; PAM type: NRG; PAM sequence: TAG
ggtatacagtggcgcaatca

SEQ ID NO: 51092 - DNA, 20 bp, Artificial Sequence
  Description of Artificial Sequence: Synthetic oligonucleotide
  Target: ATXN2; (+) strand; PAM type: NRG; PAM sequence: TGG
tcactgcaacctccaattcc

SEQ ID NO: 51093 - DNA, 20 bp, Artificial Sequence
  Description of Artificial Sequence: Synthetic oligonucleotide
  Target: ATXN2; (+) strand; PAM type: NRG; PAM sequence: GGG
cactgcaacctccaattcct

SEQ ID NO: 51094 - DNA, 20 bp, Artificial Sequence
  Description of Artificial Sequence: Synthetic oligonucleotide
  Target: ATXN2; (+) strand; PAM type: NRG; PAM sequence: AAG
aacctccaattcctgggttt

SEQ ID NO: 51095 - DNA, 20 bp, Artificial Sequence
  Description of Artificial Sequence: Synthetic oligonucleotide
  Target: ATXN2; (+) strand; PAM type: NRG; PAM sequence: GAG
tgggtttaagtgaccctcct

SEQ ID NO: 51096 - DNA, 20 bp, Artificial Sequence
  Description of Artificial Sequence: Synthetic oligonucleotide
  Target: ATXN2; (+) strand; PAM type: NRG; PAM sequence: CAG
tttaagtgaccctcctgagt

SEQ ID NO: 51097 - DNA, 20 bp, Artificial Sequence
  Description of Artificial Sequence: Synthetic oligonucleotide
  Target: ATXN2; (+) strand; PAM type: NRG; PAM sequence: AAG
ccctcctgagtcagcctccc

SEQ ID NO: 51098 - DNA, 20 bp, Artificial Sequence
  Description of Artificial Sequence: Synthetic oligonucleotide
  Target: ATXN2; (+) strand; PAM type: NRG; PAM sequence: TAG
tcctgagtcagcctcccaag

SEQ ID NO: 51099 - DNA, 20 bp, Artificial Sequence
  Description of Artificial Sequence: Synthetic oligonucleotide
  Target: ATXN2; (+) strand; PAM type: NRG; PAM sequence: GAG
agtcagcctcccaagtagct

SEQ ID NO: 51100 - DNA, 20 bp, Artificial Sequence
  Description of Artificial Sequence: Synthetic oligonucleotide
  Target: ATXN2; (+) strand; PAM type: NRG; PAM sequence: CAG
tacgcatgcaccaccatgcc

SEQ ID NO: 51101 - DNA, 20 bp, Artificial Sequence
  Description of Artificial Sequence: Synthetic oligonucleotide
  Target: ATXN2; (+) strand; PAM type: NRG; PAM sequence: TAG
gcccagctaatttatttttg

SEQ ID NO: 51102 - DNA, 20 bp, Artificial Sequence
  Description of Artificial Sequence: Synthetic oligonucleotide
  Target: ATXN2; (+) strand; PAM type: NRG; PAM sequence: GAG
ccagctaatttatttttgta

SEQ ID NO: 51103 - DNA, 20 bp, Artificial Sequence
  Description of Artificial Sequence: Synthetic oligonucleotide
  Target: ATXN2; (+) strand; PAM type: NRG; PAM sequence: TGG
ctaatttatttttgtagaga

SEQ ID NO: 51104 - DNA, 20 bp, Artificial Sequence
  Description of Artificial Sequence: Synthetic oligonucleotide
  Target: ATXN2; (+) strand; PAM type: NRG; PAM sequence: GGG
taatttatttttgtagagat

SEQ ID NO: 51105 - DNA, 20 bp, Artificial Sequence
  Description of Artificial Sequence: Synthetic oligonucleotide
  Target: ATXN2; (+) strand; PAM type: NRG; PAM sequence: GGG
aatttatttttgtagagatg

SEQ ID NO: 51106 - DNA, 20 bp, Artificial Sequence
  Description of Artificial Sequence: Synthetic oligonucleotide
  Target: ATXN2; (+) strand; PAM type: NRG; PAM sequence: TAG
tggggcctcactatgttgcc

SEQ ID NO: 51107 - DNA, 20 bp, Artificial Sequence
  Description of Artificial Sequence: Synthetic oligonucleotide
  Target: ATXN2; (+) strand; PAM type: NRG; PAM sequence: AGG
ggggcctcactatgttgcct

SEQ ID NO: 51108 - DNA, 20 bp, Artificial Sequence
  Description of Artificial Sequence: Synthetic oligonucleotide
  Target: ATXN2; (+) strand; PAM type: NRG; PAM sequence: GAG
taggctgatcttgaattcct

SEQ ID NO: 51109 - DNA, 20 bp, Artificial Sequence
  Description of Artificial Sequence: Synthetic oligonucleotide
  Target: ATXN2; (+) strand; PAM type: NRG; PAM sequence: AAG
gatcttgaattcctgagctc

SEQ ID NO: 51110 - DNA, 20 bp, Artificial Sequence
  Description of Artificial Sequence: Synthetic oligonucleotide
  Target: ATXN2; (+) strand; PAM type: NRG; PAM sequence: TGG
ctcaagcgaccctcctccct

SEQ ID NO: 51111 - DNA, 20 bp, Artificial Sequence
  Description of Artificial Sequence: Synthetic oligonucleotide
  Target: ATXN2; (+) strand; PAM type: NRG; PAM sequence: AAG
cctcctcccttggcttccca

SEQ ID NO: 51112 - DNA, 20 bp, Artificial Sequence
  Description of Artificial Sequence: Synthetic oligonucleotide
  Target: ATXN2; (+) strand; PAM type: NRG; PAM sequence: TAG
cccttggcttcccaaagtgc

SEQ ID NO: 51113 - DNA, 20 bp, Artificial Sequence
  Description of Artificial Sequence: Synthetic oligonucleotide
  Target: ATXN2; (+) strand; PAM type: NRG; PAM sequence: CAG
ttcccaaagtgctagaatta

SEQ ID NO: 51114 - DNA, 20 bp, Artificial Sequence
  Description of Artificial Sequence: Synthetic oligonucleotide
  Target: ATXN2; (+) strand; PAM type: NRG; PAM sequence: AGG
tcccaaagtgctagaattac

SEQ ID NO: 51115 - DNA, 20 bp, Artificial Sequence
  Description of Artificial Sequence: Synthetic oligonucleotide
  Target: ATXN2; (+) strand; PAM type: NRG; PAM sequence: GAG
agtgctagaattacaggtgt

SEQ ID NO: 51116 - DNA, 20 bp, Artificial Sequence
  Description of Artificial Sequence: Synthetic oligonucleotide
  Target: ATXN2; (+) strand; PAM type: NRG; PAM sequence: CAG
caggtgtgagccactgtgcc

SEQ ID NO: 51117 - DNA, 20 bp, Artificial Sequence
  Description of Artificial Sequence: Synthetic oligonucleotide
  Target: ATXN2; (+) strand; PAM type: NRG; PAM sequence: AAG
ttccgtttttcatactgttg

SEQ ID NO: 51118 - DNA, 20 bp, Artificial Sequence
  Description of Artificial Sequence: Synthetic oligonucleotide
  Target: ATXN2; (+) strand; PAM type: NRG; PAM sequence: TAG
tttttcatactgttgaagta

SEQ ID NO: 51119 - DNA, 20 bp, Artificial Sequence
  Description of Artificial Sequence: Synthetic oligonucleotide
  Target: ATXN2; (+) strand; PAM type: NRG; PAM sequence: CAG
ttgaagtatagtccttcacc

SEQ ID NO: 51120 - DNA, 20 bp, Artificial Sequence
  Description of Artificial Sequence: Synthetic oligonucleotide
  Target: ATXN2; (+) strand; PAM type: NRG; PAM sequence: GAG
gaagtatagtccttcaccca

SEQ ID NO: 51121 - DNA, 20 bp, Artificial Sequence
  Description of Artificial Sequence: Synthetic oligonucleotide
  Target: ATXN2; (+) strand; PAM type: NRG; PAM sequence: AAG
gtatagtccttcacccagag

SEQ ID NO: 51122 - DNA, 20 bp, Artificial Sequence
  Description of Artificial Sequence: Synthetic oligonucleotide
  Target: ATXN2; (+) strand; PAM type: NRG; PAM sequence: TAG
agtccttcacccagagaagc

SEQ ID NO: 51123 - DNA, 20 bp, Artificial Sequence
  Description of Artificial Sequence: Synthetic oligonucleotide
  Target: ATXN2; (+) strand; PAM type: NRG; PAM sequence: AAG
cccagagaagctagtgactc

SEQ ID NO: 51124 - DNA, 20 bp, Artificial Sequence
  Description of Artificial Sequence: Synthetic oligonucleotide
  Target: ATXN2; (+) strand; PAM type: NRG; PAM sequence: TGG
aagctagtgactcaagttcc

SEQ ID NO: 51125 - DNA, 20 bp, Artificial Sequence
  Description of Artificial Sequence: Synthetic oligonucleotide
  Target: ATXN2; (+) strand; PAM type: NRG; PAM sequence: AAG
tcaagttcctggttgattaa

SEQ ID NO: 51126 - DNA, 20 bp, Artificial Sequence
  Description of Artificial Sequence: Synthetic oligonucleotide
  Target: ATXN2; (+) strand; PAM type: NRG; PAM sequence: TAG
acattttttaataccatcac

SEQ ID NO: 51127 - DNA, 20 bp, Artificial Sequence
  Description of Artificial Sequence: Synthetic oligonucleotide
  Target: ATXN2; (+) strand; PAM type: NRG; PAM sequence: CAG
tcactagttttctttctttc

SEQ ID NO: 51128 - DNA, 20 bp, Artificial Sequence
  Description of Artificial Sequence: Synthetic oligonucleotide
  Target: ATXN2; (+) strand; PAM type: NRG; PAM sequence: GAG
actagttttctttctttcca

SEQ ID NO: 51129 - DNA, 20 bp, Artificial Sequence
  Description of Artificial Sequence: Synthetic oligonucleotide
  Target: ATXN2; (+) strand; PAM type: NRG; PAM sequence: TAG
agagatccaaaatacaatga

SEQ ID NO: 51130 - DNA, 20 bp, Artificial Sequence
  Description of Artificial Sequence: Synthetic oligonucleotide
  Target: ATXN2; (+) strand; PAM type: NRG; PAM sequence: GAG
actcatctctgccaccttct

SEQ ID NO: 51131 - DNA, 20 bp, Artificial Sequence
  Description of Artificial Sequence: Synthetic oligonucleotide
  Target: ATXN2; (+) strand; PAM type: NRG; PAM sequence: TAG
accttctgagtgaatttgaa

SEQ ID NO: 51132 - DNA, 20 bp, Artificial Sequence
  Description of Artificial Sequence: Synthetic oligonucleotide
  Target: ATXN2; (+) strand; PAM type: NRG; PAM sequence: AGG
ccttctgagtgaatttgaat

SEQ ID NO: 51133 - DNA, 20 bp, Artificial Sequence
  Description of Artificial Sequence: Synthetic oligonucleotide
  Target: ATXN2; (+) strand; PAM type: NRG; PAM sequence: TGG
aataggtcatttaacctctc

SEQ ID NO: 51134 - DNA, 20 bp, Artificial Sequence
  Description of Artificial Sequence: Synthetic oligonucleotide
  Target: ATXN2; (+) strand; PAM type: NRG; PAM sequence: GGG
ataggtcatttaacctctct

SEQ ID NO: 51135 - DNA, 20 bp, Artificial Sequence
  Description of Artificial Sequence: Synthetic oligonucleotide
  Target: ATXN2; (+) strand; PAM type: NRG; PAM sequence: TGG
tctgggccttcatttcctca

SEQ ID NO: 51136 - DNA, 20 bp, Artificial Sequence
  Description of Artificial Sequence: Synthetic oligonucleotide
  Target: ATXN2; (+) strand; PAM type: NRG; PAM sequence: GGG
ctgggccttcatttcctcat

SEQ ID NO: 51137 - DNA, 20 bp, Artificial Sequence
  Description of Artificial Sequence: Synthetic oligonucleotide
  Target: ATXN2; (+) strand; PAM type: NRG; PAM sequence: GAG
catttcctcatgggtaaaat

SEQ ID NO: 51138 - DNA, 20 bp, Artificial Sequence
  Description of Artificial Sequence: Synthetic oligonucleotide
  Target: ATXN2; (+) strand; PAM type: NRG; PAM sequence: AGG
atttcctcatgggtaaaatg

SEQ ID NO: 51139 - DNA, 20 bp, Artificial Sequence
  Description of Artificial Sequence: Synthetic oligonucleotide
  Target: ATXN2; (+) strand; PAM type: NRG; PAM sequence: CAG
cctcatgggtaaaatgagga

SEQ ID NO: 51140 - DNA, 20 bp, Artificial Sequence
  Description of Artificial Sequence: Synthetic oligonucleotide
  Target: ATXN2; (+) strand; PAM type: NRG; PAM sequence: AGG
ctcatgggtaaaatgaggac

SEQ ID NO: 51141 - DNA, 20 bp, Artificial Sequence
  Description of Artificial Sequence: Synthetic oligonucleotide
  Target: ATXN2; (+) strand; PAM type: NRG; PAM sequence: CAG
gtaaaatgaggacaggataa

SEQ ID NO: 51142 - DNA, 20 bp, Artificial Sequence
  Description of Artificial Sequence: Synthetic oligonucleotide
  Target: ATXN2; (+) strand; PAM type: NRG; PAM sequence: CAG
caggataacagattatctaa

SEQ ID NO: 51143 - DNA, 20 bp, Artificial Sequence
  Description of Artificial Sequence: Synthetic oligonucleotide
  Target: ATXN2; (+) strand; PAM type: NRG; PAM sequence: AGG
aggataacagattatctaac

SEQ ID NO: 51144 - DNA, 20 bp, Artificial Sequence
  Description of Artificial Sequence: Synthetic oligonucleotide
  Target: ATXN2; (+) strand; PAM type: NRG; PAM sequence: GGG
ggataacagattatctaaca

SEQ ID NO: 51145 - DNA, 20 bp, Artificial Sequence
  Description of Artificial Sequence: Synthetic oligonucleotide
  Target: ATXN2; (+) strand; PAM type: NRG; PAM sequence: TGG
gattatctaacagggctatg

SEQ ID NO: 51146 - DNA, 20 bp, Artificial Sequence
  Description of Artificial Sequence: Synthetic oligonucleotide
  Target: ATXN2; (+) strand; PAM type: NRG; PAM sequence: GAG
gggctatgtggtaatcacat

SEQ ID NO: 51147 - DNA, 20 bp, Artificial Sequence
  Description of Artificial Sequence: Synthetic oligonucleotide
  Target: ATXN2; (+) strand; PAM type: NRG; PAM sequence: TGG
acatgagattatgtatgccc

SEQ ID NO: 51148 - DNA, 20 bp, Artificial Sequence
  Description of Artificial Sequence: Synthetic oligonucleotide
  Target: ATXN2; (+) strand; PAM type: NRG; PAM sequence: GGG
catgagattatgtatgccct

SEQ ID NO: 51149 - DNA, 20 bp, Artificial Sequence
  Description of Artificial Sequence: Synthetic oligonucleotide
  Target: ATXN2; (+) strand; PAM type: NRG; PAM sequence: GAG
tgagattatgtatgccctgg

SEQ ID NO: 51150 - DNA, 20 bp, Artificial Sequence
  Description of Artificial Sequence: Synthetic oligonucleotide
  Target: ATXN2; (+) strand; PAM type: NRG; PAM sequence: CGG
gccctgggagaataaactca

SEQ ID NO: 51151 - DNA, 20 bp, Artificial Sequence
  Description of Artificial Sequence: Synthetic oligonucleotide
  Target: ATXN2; (+) strand; PAM type: NRG; PAM sequence: TAG
ctgggagaataaactcacgg

SEQ ID NO: 51152 - DNA, 20 bp, Artificial Sequence
  Description of Artificial Sequence: Synthetic oligonucleotide
  Target: ATXN2; (+) strand; PAM type: NRG; PAM sequence: CGG
aataaactcacggtagcgtc

SEQ ID NO: 51153 - DNA, 20 bp, Artificial Sequence
  Description of Artificial Sequence: Synthetic oligonucleotide
  Target: ATXN2; (+) strand; PAM type: NRG; PAM sequence: AAG
atgaccctaatcaatttttc

SEQ ID NO: 51154 - DNA, 20 bp, Artificial Sequence
  Description of Artificial Sequence: Synthetic oligonucleotide
  Target: ATXN2; (+) strand; PAM type: NRG; PAM sequence: GAG
cctaatcaatttttcaagct

SEQ ID NO: 51155 - DNA, 20 bp, Artificial Sequence
  Description of Artificial Sequence: Synthetic oligonucleotide
  Target: ATXN2; (+) strand; PAM type: NRG; PAM sequence: AGG
ctaatcaatttttcaagctg

SEQ ID NO: 51156 - DNA, 20 bp, Artificial Sequence
  Description of Artificial Sequence: Synthetic oligonucleotide
  Target: ATXN2; (+) strand; PAM type: NRG; PAM sequence: CAG
tcaatttttcaagctgaggt

SEQ ID NO: 51157 - DNA, 20 bp, Artificial Sequence
  Description of Artificial Sequence: Synthetic oligonucleotide
  Target: ATXN2; (+) strand; PAM type: NRG; PAM sequence: AAG
tttttcaagctgaggtcaga

SEQ ID NO: 51158 - DNA, 20 bp, Artificial Sequence
  Description of Artificial Sequence: Synthetic oligonucleotide
  Target: ATXN2; (+) strand; PAM type: NRG; PAM sequence: TGG
ttctcaaacatacttatttc

SEQ ID NO: 51159 - DNA, 20 bp, Artificial Sequence
  Description of Artificial Sequence: Synthetic oligonucleotide
  Target: ATXN2; (+) strand; PAM type: NRG; PAM sequence: GGG
tctcaaacatacttatttct

SEQ ID NO: 51160 - DNA, 20 bp, Artificial Sequence
  Description of Artificial Sequence: Synthetic oligonucleotide
  Target: ATXN2; (+) strand; PAM type: NRG; PAM sequence: TAG
aacatacttatttctgggca

SEQ ID NO: 51161 - DNA, 20 bp, Artificial Sequence
  Description of Artificial Sequence: Synthetic oligonucleotide
  Target: ATXN2; (+) strand; PAM type: NRG; PAM sequence: CAG
tacttatttctgggcatagc

SEQ ID NO: 51162 - DNA, 20 bp, Artificial Sequence
  Description of Artificial Sequence: Synthetic oligonucleotide
  Target: ATXN2; (+) strand; PAM type: NRG; PAM sequence: TGG
ttatttctgggcatagccag

SEQ ID NO: 51163 - DNA, 20 bp, Artificial Sequence
  Description of Artificial Sequence: Synthetic oligonucleotide
  Target: ATXN2; (+) strand; PAM type: NRG; PAM sequence: AAG
atagccagtggctgtccctg

SEQ ID NO: 51164 - DNA, 20 bp, Artificial Sequence
  Description of Artificial Sequence: Synthetic oligonucleotide
  Target: ATXN2; (+) strand; PAM type: NRG; PAM sequence: AAG
gctgtccctgaagcactaaa

SEQ ID NO: 51165 - DNA, 20 bp, Artificial Sequence
  Description of Artificial Sequence: Synthetic oligonucleotide
  Target: ATXN2; (+) strand; PAM type: NRG; PAM sequence: AAG
cctgaagcactaaaaagaac

SEQ ID NO: 51166 - DNA, 20 bp, Artificial Sequence
  Description of Artificial Sequence: Synthetic oligonucleotide
  Target: ATXN2; (+) strand; PAM type: NRG; PAM sequence: TAG
actaaaaagaacaagaccct

SEQ ID NO: 51167 - DNA, 20 bp, Artificial Sequence
  Description of Artificial Sequence: Synthetic oligonucleotide
  Target: ATXN2; (+) strand; PAM type: NRG; PAM sequence: CAG
caagacccttagcaacatac

SEQ ID NO: 51168 - DNA, 20 bp, Artificial Sequence
  Description of Artificial Sequence: Synthetic oligonucleotide
  Target: ATXN2; (+) strand; PAM type: NRG; PAM sequence: AAG
caacataccagactgctgat

SEQ ID NO: 51169 - DNA, 20 bp, Artificial Sequence
  Description of Artificial Sequence: Synthetic oligonucleotide
  Target: ATXN2; (+) strand; PAM type: NRG; PAM sequence: GAG
acataccagactgctgataa

SEQ ID NO: 51170 - DNA, 20 bp, Artificial Sequence
  Description of Artificial Sequence: Synthetic oligonucleotide
  Target: ATXN2; (+) strand; PAM type: NRG; PAM sequence: AGG
cataccagactgctgataag

SEQ ID NO: 51171 - DNA, 20 bp, Artificial Sequence
  Description of Artificial Sequence: Synthetic oligonucleotide
  Target: ATXN2; (+) strand; PAM type: NRG; PAM sequence: GGG
ataccagactgctgataaga

SEQ ID NO: 51172 - DNA, 20 bp, Artificial Sequence
  Description of Artificial Sequence: Synthetic oligonucleotide
  Target: ATXN2; (+) strand; PAM type: NRG; PAM sequence: GGG
taccagactgctgataagag

SEQ ID NO: 51173 - DNA, 20 bp, Artificial Sequence
  Description of Artificial Sequence: Synthetic oligonucleotide
  Target: ATXN2; (+) strand; PAM type: NRG; PAM sequence: TGG
agactgctgataagaggggc

SEQ ID NO: 51174 - DNA, 20 bp, Artificial Sequence
  Description of Artificial Sequence: Synthetic oligonucleotide
  Target: ATXN2; (+) strand; PAM type: NRG; PAM sequence: GAG
actgctgataagaggggctg

SEQ ID NO: 51175 - DNA, 20 bp, Artificial Sequence
  Description of Artificial Sequence: Synthetic oligonucleotide
  Target: ATXN2; (+) strand; PAM type: NRG; PAM sequence: CAG
tgataagaggggctggagcg

SEQ ID NO: 51176 - DNA, 20 bp, Artificial Sequence
  Description of Artificial Sequence: Synthetic oligonucleotide
  Target: ATXN2; (+) strand; PAM type: NRG; PAM sequence: TAG
ggagcgcagtgctgtgatca

SEQ ID NO: 51177 - DNA, 20 bp, Artificial Sequence
  Description of Artificial Sequence: Synthetic oligonucleotide
  Target: ATXN2; (+) strand; PAM type: NRG; PAM sequence: GAG
tcctgcaatctttaactcct

SEQ ID NO: 51178 - DNA, 20 bp, Artificial Sequence
  Description of Artificial Sequence: Synthetic oligonucleotide
  Target: ATXN2; (+) strand; PAM type: NRG; PAM sequence: AAG
aatctttaactcctgagctc

SEQ ID NO: 51179 - DNA, 20 bp, Artificial Sequence
  Description of Artificial Sequence: Synthetic oligonucleotide
  Target: ATXN2; (+) strand; PAM type: NRG; PAM sequence: CAG
ctcaagcaatcctctcgctt

SEQ ID NO: 51180 - DNA, 20 bp, Artificial Sequence
  Description of Artificial Sequence: Synthetic oligonucleotide
  Target: ATXN2; (+) strand; PAM type: NRG; PAM sequence: TAG
atcctctcgcttcagcctcg

SEQ ID NO: 51181 - DNA, 20 bp, Artificial Sequence
  Description of Artificial Sequence: Synthetic oligonucleotide
  Target: ATXN2; (+) strand; PAM type: NRG; PAM sequence: TAG
ctctcgcttcagcctcgtag

SEQ ID NO: 51182 - DNA, 20 bp, Artificial Sequence
  Description of Artificial Sequence: Synthetic oligonucleotide
  Target: ATXN2; (+) strand; PAM type: NRG; PAM sequence: CAG
cctcgtagtagctgcgacta

SEQ ID NO: 51183 - DNA, 20 bp, Artificial Sequence
  Description of Artificial Sequence: Synthetic oligonucleotide
  Target: ATXN2; (+) strand; PAM type: NRG; PAM sequence: AGG
ctcgtagtagctgcgactac

SEQ ID NO: 51184 - DNA, 20 bp, Artificial Sequence
  Description of Artificial Sequence: Synthetic oligonucleotide
  Target: ATXN2; (+) strand; PAM type: NRG; PAM sequence: TAG
taattaaaaaatattttttg

SEQ ID NO: 51185 - DNA, 20 bp, Artificial Sequence
  Description of Artificial Sequence: Synthetic oligonucleotide
  Target: ATXN2; (+) strand; PAM type: NRG; PAM sequence: GAG
attaaaaaatattttttgta

SEQ ID NO: 51186 - DNA, 20 bp, Artificial Sequence
  Description of Artificial Sequence: Synthetic oligonucleotide
  Target: ATXN2; (+) strand; PAM type: NRG; PAM sequence: TGG
aaaaatattttttgtagaga

SEQ ID NO: 51187 - DNA, 20 bp, Artificial Sequence
  Description of Artificial Sequence: Synthetic oligonucleotide
  Target: ATXN2; (+) strand; PAM type: NRG; PAM sequence: GGG
aaaatattttttgtagagat

SEQ ID NO: 51188 - DNA, 20 bp, Artificial Sequence
  Description of Artificial Sequence: Synthetic oligonucleotide
  Target: ATXN2; (+) strand; PAM type: NRG; PAM sequence: GGG
aaatattttttgtagagatg

SEQ ID NO: 51189 - DNA, 20 bp, Artificial Sequence
  Description of Artificial Sequence: Synthetic oligonucleotide
  Target: ATXN2; (+) strand; PAM type: NRG; PAM sequence: CAG
tggggtcttgttatgtttct

SEQ ID NO: 51190 - DNA, 20 bp, Artificial Sequence
  Description of Artificial Sequence: Synthetic oligonucleotide
  Target: ATXN2; (+) strand; PAM type: NRG; PAM sequence: TGG
tcttgttatgtttctcagcc

SEQ ID NO: 51191 - DNA, 20 bp, Artificial Sequence
  Description of Artificial Sequence: Synthetic oligonucleotide
  Target: ATXN2; (+) strand; PAM type: NRG; PAM sequence: TGG
tcagcctggtcttgaactcc

SEQ ID NO: 51192 - DNA, 20 bp, Artificial Sequence
  Description of Artificial Sequence: Synthetic oligonucleotide
  Target: ATXN2; (+) strand; PAM type: NRG; PAM sequence: CAG
actcctggcccttcccattt

SEQ ID NO: 51193 - DNA, 20 bp, Artificial Sequence
  Description of Artificial Sequence: Synthetic oligonucleotide
  Target: ATXN2; (+) strand; PAM type: NRG; PAM sequence: TGG
atttcagcctccccatgacg

SEQ ID NO: 51194 - DNA, 20 bp, Artificial Sequence
  Description of Artificial Sequence: Synthetic oligonucleotide
  Target: ATXN2; (+) strand; PAM type: NRG; PAM sequence: GGG
tttcagcctccccatgacgt

SEQ ID NO: 51195 - DNA, 20 bp, Artificial Sequence
  Description of Artificial Sequence: Synthetic oligonucleotide
  Target: ATXN2; (+) strand; PAM type: NRG; PAM sequence: GGG
ttcagcctccccatgacgtg

SEQ ID NO: 51196 - DNA, 20 bp, Artificial Sequence
  Description of Artificial Sequence: Synthetic oligonucleotide
  Target: ATXN2; (+) strand; PAM type: NRG; PAM sequence: GAG
cagcctccccatgacgtggg

SEQ ID NO: 51197 - DNA, 20 bp, Artificial Sequence
  Description of Artificial Sequence: Synthetic oligonucleotide
  Target: ATXN2; (+) strand; PAM type: NRG; PAM sequence: AGG
agcctccccatgacgtgggg

SEQ ID NO: 51198 - DNA, 20 bp, Artificial Sequence
  Description of Artificial Sequence: Synthetic oligonucleotide
  Target: ATXN2; (+) strand; PAM type: NRG; PAM sequence: CAG
ccatgacgtggggaggttta

SEQ ID NO: 51199 - DNA, 20 bp, Artificial Sequence
  Description of Artificial Sequence: Synthetic oligonucleotide
  Target: ATXN2; (+) strand; PAM type: NRG; PAM sequence: CAG
ggaggtttacagacatgacc

SEQ ID NO: 51200 - DNA, 20 bp, Artificial Sequence
  Description of Artificial Sequence: Synthetic oligonucleotide
  Target: ATXN2; (+) strand; PAM type: NRG; PAM sequence: AGG
gaggtttacagacatgaccc

SEQ ID NO: 51201 - DNA, 20 bp, Artificial Sequence
  Description of Artificial Sequence: Synthetic oligonucleotide
  Target: ATXN2; (+) strand; PAM type: NRG; PAM sequence: AAG
ttgttttcctcttcatctaa

SEQ ID NO: 51202 - DNA, 20 bp, Artificial Sequence
  Description of Artificial Sequence: Synthetic oligonucleotide
  Target: ATXN2; (+) strand; PAM type: NRG; PAM sequence: AAG
catctaaaagaactcctttc

SEQ ID NO: 51203 - DNA, 20 bp, Artificial Sequence
  Description of Artificial Sequence: Synthetic oligonucleotide
  Target: ATXN2; (+) strand; PAM type: NRG; PAM sequence: GAG
aactcctttcaagattttat

SEQ ID NO: 51204 - DNA, 20 bp, Artificial Sequence
  Description of Artificial Sequence: Synthetic oligonucleotide
  Target: ATXN2; (+) strand; PAM type: NRG; PAM sequence: CAG
cctttcaagattttatgaga

SEQ ID NO: 51205 - DNA, 20 bp, Artificial Sequence
  Description of Artificial Sequence: Synthetic oligonucleotide
  Target: ATXN2; (+) strand; PAM type: NRG; PAM sequence: AAG
ttcaagattttatgagacag

SEQ ID NO: 51206 - DNA, 20 bp, Artificial Sequence
  Description of Artificial Sequence: Synthetic oligonucleotide
  Target: ATXN2; (+) strand; PAM type: NRG; PAM sequence: CAG
tatgagacagaagtaaacat

SEQ ID NO: 51207 - DNA, 20 bp, Artificial Sequence
  Description of Artificial Sequence: Synthetic oligonucleotide
  Target: ATXN2; (+) strand; PAM type: NRG; PAM sequence: AAG
ctcaaacacctcaatgccat

SEQ ID NO: 51208 - DNA, 20 bp, Artificial Sequence
  Description of Artificial Sequence: Synthetic oligonucleotide
  Target: ATXN2; (+) strand; PAM type: NRG; PAM sequence: AGG
tcaaacacctcaatgccata

SEQ ID NO: 51209 - DNA, 20 bp, Artificial Sequence
  Description of Artificial Sequence: Synthetic oligonucleotide
  Target: ATXN2; (+) strand; PAM type: NRG; PAM sequence: TGG
aacacctcaatgccataagg

SEQ ID NO: 51210 - DNA, 20 bp, Artificial Sequence
  Description of Artificial Sequence: Synthetic oligonucleotide
  Target: ATXN2; (+) strand; PAM type: NRG; PAM sequence: CAG
acctcaatgccataaggtgg

SEQ ID NO: 51211 - DNA, 20 bp, Artificial Sequence
  Description of Artificial Sequence: Synthetic oligonucleotide
  Target: ATXN2; (+) strand; PAM type: NRG; PAM sequence: AGG
cctcaatgccataaggtggc

SEQ ID NO: 51212 - DNA, 20 bp, Artificial Sequence
  Description of Artificial Sequence: Synthetic oligonucleotide
  Target: ATXN2; (+) strand; PAM type: NRG; PAM sequence: GGG
ctcaatgccataaggtggca

SEQ ID NO: 51213 - DNA, 20 bp, Artificial Sequence
  Description of Artificial Sequence: Synthetic oligonucleotide
  Target: ATXN2; (+) strand; PAM type: NRG; PAM sequence: GGG
tcaatgccataaggtggcag

SEQ ID NO: 51214 - DNA, 20 bp, Artificial Sequence
  Description of Artificial Sequence: Synthetic oligonucleotide
  Target: ATXN2; (+) strand; PAM type: NRG; PAM sequence: GAG
cataaggtggcaggggcaat

SEQ ID NO: 51215 - DNA, 20 bp, Artificial Sequence
  Description of Artificial Sequence: Synthetic oligonucleotide
  Target: ATXN2; (+) strand; PAM type: NRG; PAM sequence: TAG
ggcaatgagaactttctgcc

SEQ ID NO: 51216 - DNA, 20 bp, Artificial Sequence
  Description of Artificial Sequence: Synthetic oligonucleotide
  Target: ATXN2; (+) strand; PAM type: NRG; PAM sequence: AAG
cctagtctatactaccacat

SEQ ID NO: 51217 - DNA, 20 bp, Artificial Sequence
  Description of Artificial Sequence: Synthetic oligonucleotide
  Target: ATXN2; (+) strand; PAM type: NRG; PAM sequence: AAG
actaccacataagctccaaa

SEQ ID NO: 51218 - DNA, 20 bp, Artificial Sequence
  Description of Artificial Sequence: Synthetic oligonucleotide
  Target: ATXN2; (+) strand; PAM type: NRG; PAM sequence: GAG
taccacataagctccaaaaa

SEQ ID NO: 51219 - DNA, 20 bp, Artificial Sequence
  Description of Artificial Sequence: Synthetic oligonucleotide
  Target: ATXN2; (+) strand; PAM type: NRG; PAM sequence: GAG
ccacataagctccaaaaaga

SEQ ID NO: 51220 - DNA, 20 bp, Artificial Sequence
  Description of Artificial Sequence: Synthetic oligonucleotide
  Target: ATXN2; (+) strand; PAM type: NRG; PAM sequence: GAG
acataagctccaaaaagaga

SEQ ID NO: 51221 - DNA, 20 bp, Artificial Sequence
  Description of Artificial Sequence: Synthetic oligonucleotide
  Target: ATXN2; (+) strand; PAM type: NRG; PAM sequence: TGG
aaaaagagagagacctcatc

SEQ ID NO: 51222 - DNA, 20 bp, Artificial Sequence
  Description of Artificial Sequence: Synthetic oligonucleotide
  Target: ATXN2; (+) strand; PAM type: NRG; PAM sequence: AAG
ttattcactactgtattccc

SEQ ID NO: 51223 - DNA, 20 bp, Artificial Sequence
  Description of Artificial Sequence: Synthetic oligonucleotide
  Target: ATXN2; (+) strand; PAM type: NRG; PAM sequence: AAG
actgtattcccaagcctcac

SEQ ID NO: 51224 - DNA, 20 bp, Artificial Sequence
  Description of Artificial Sequence: Synthetic oligonucleotide
  Target: ATXN2; (+) strand; PAM type: NRG; PAM sequence: CAG
gtattcccaagcctcacaag

SEQ ID NO: 51225 - DNA, 20 bp, Artificial Sequence
  Description of Artificial Sequence: Synthetic oligonucleotide
  Target: ATXN2; (+) strand; PAM type: NRG; PAM sequence: AGG
tattcccaagcctcacaagc

SEQ ID NO: 51226 - DNA, 20 bp, Artificial Sequence
  Description of Artificial Sequence: Synthetic oligonucleotide
  Target: ATXN2; (+) strand; PAM type: NRG; PAM sequence: GAG
ttcccaagcctcacaagcag

SEQ ID NO: 51227 - DNA, 20 bp, Artificial Sequence
  Description of Artificial Sequence: Synthetic oligonucleotide
  Target: ATXN2; (+) strand; PAM type: NRG; PAM sequence: AGG
tcccaagcctcacaagcagg

SEQ ID NO: 51228 - DNA, 20 bp, Artificial Sequence
  Description of Artificial Sequence: Synthetic oligonucleotide
  Target: ATXN2; (+) strand; PAM type: NRG; PAM sequence: AAG
aggtactccaaaaataaaaa

SEQ ID NO: 51229 - DNA, 20 bp, Artificial Sequence
  Description of Artificial Sequence: Synthetic oligonucleotide
  Target: ATXN2; (+) strand; PAM type: NRG; PAM sequence: AGG
ggtactccaaaaataaaaaa

SEQ ID NO: 51230 - DNA, 20 bp, Artificial Sequence
  Description of Artificial Sequence: Synthetic oligonucleotide
  Target: ATXN2; (+) strand; PAM type: NRG; PAM sequence: GGG
gtactccaaaaataaaaaaa

SEQ ID NO: 51231 - DNA, 20 bp, Artificial Sequence
  Description of Artificial Sequence: Synthetic oligonucleotide
  Target: ATXN2; (+) strand; PAM type: NRG; PAM sequence: GGG
tactccaaaaataaaaaaag

SEQ ID NO: 51232 - DNA, 20 bp, Artificial Sequence
  Description of Artificial Sequence: Synthetic oligonucleotide
  Target: ATXN2; (+) strand; PAM type: NRG; PAM sequence: GAG
ctccaaaaataaaaaaaggg

SEQ ID NO: 51233 - DNA, 20 bp, Artificial Sequence
  Description of Artificial Sequence: Synthetic oligonucleotide
  Target: ATXN2; (+) strand; PAM type: NRG; PAM sequence: AGG
tccaaaaataaaaaaagggg

SEQ ID NO: 51234 - DNA, 20 bp, Artificial Sequence
  Description of Artificial Sequence: Synthetic oligonucleotide
  Target: ATXN2; (+) strand; PAM type: NRG; PAM sequence: TGG
aaaggggaggaaattaaacg

SEQ ID NO: 51235 - DNA, 20 bp, Artificial Sequence
  Description of Artificial Sequence: Synthetic oligonucleotide
  Target: ATXN2; (+) strand; PAM type: NRG; PAM sequence: CAG
atgccatgctttctacatga

SEQ ID NO: 51236 - DNA, 20 bp, Artificial Sequence
  Description of Artificial Sequence: Synthetic oligonucleotide
  Target: ATXN2; (+) strand; PAM type: NRG; PAM sequence: AGG
tgccatgctttctacatgac

SEQ ID NO: 51237 - DNA, 20 bp, Artificial Sequence
  Description of Artificial Sequence: Synthetic oligonucleotide
  Target: ATXN2; (+) strand; PAM type: NRG; PAM sequence: GGG
gccatgctttctacatgaca

SEQ ID NO: 51238 - DNA, 20 bp, Artificial Sequence
  Description of Artificial Sequence: Synthetic oligonucleotide
  Target: ATXN2; (+) strand; PAM type: NRG; PAM sequence: TAG
ctgcttaataataaaaccaa

SEQ ID NO: 51239 - DNA, 20 bp, Artificial Sequence
  Description of Artificial Sequence: Synthetic oligonucleotide
  Target: ATXN2; (+) strand; PAM type: NRG; PAM sequence: CAG
ttaataataaaaccaatagt

SEQ ID NO: 51240 - DNA, 20 bp, Artificial Sequence
  Description of Artificial Sequence: Synthetic oligonucleotide
  Target: ATXN2; (+) strand; PAM type: NRG; PAM sequence: CAG
taataaaaccaatagtcagc

SEQ ID NO: 51241 - DNA, 20 bp, Artificial Sequence
  Description of Artificial Sequence: Synthetic oligonucleotide
  Target: ATXN2; (+) strand; PAM type: NRG; PAM sequence: AGG
aataaaaccaatagtcagcc

SEQ ID NO: 51242 - DNA, 20 bp, Artificial Sequence
  Description of Artificial Sequence: Synthetic oligonucleotide
  Target: ATXN2; (+) strand; PAM type: NRG; PAM sequence: CAG
aaccaatagtcagccaggcg

SEQ ID NO: 51243 - DNA, 20 bp, Artificial Sequence
  Description of Artificial Sequence: Synthetic oligonucleotide
  Target: ATXN2; (+) strand; PAM type: NRG; PAM sequence: TGG
caatagtcagccaggcgcag

SEQ ID NO: 51244 - DNA, 20 bp, Artificial Sequence
  Description of Artificial Sequence: Synthetic oligonucleotide
  Target: ATXN2; (+) strand; PAM type: NRG; PAM sequence: CAG
gtggctcacgcctgtaatcc

SEQ ID NO: 51245 - DNA, 20 bp, Artificial Sequence
  Description of Artificial Sequence: Synthetic oligonucleotide
  Target: ATXN2; (+) strand; PAM type: NRG; PAM sequence: TGG
cgcctgtaatcccagcactt

SEQ ID NO: 51246 - DNA, 20 bp, Artificial Sequence
  Description of Artificial Sequence: Synthetic oligonucleotide
  Target: ATXN2; (+) strand; PAM type: NRG; PAM sequence: GGG
gcctgtaatcccagcacttt

SEQ ID NO: 51247 - DNA, 20 bp, Artificial Sequence
  Description of Artificial Sequence: Synthetic oligonucleotide
  Target: ATXN2; (+) strand; PAM type: NRG; PAM sequence: GAG
ctgtaatcccagcactttgg

SEQ ID NO: 51248 - DNA, 20 bp, Artificial Sequence
  Description of Artificial Sequence: Synthetic oligonucleotide
  Target: ATXN2; (+) strand; PAM type: NRG; PAM sequence: AGG
tgtaatcccagcactttggg

SEQ ID NO: 51249 - DNA, 20 bp, Artificial Sequence
  Description of Artificial Sequence: Synthetic oligonucleotide
  Target: ATXN2; (+) strand; PAM type: NRG; PAM sequence: AAG
tcccagcactttgggaggcc

SEQ ID NO: 51250 - DNA, 20 bp, Artificial Sequence
  Description of Artificial Sequence: Synthetic oligonucleotide
  Target: ATXN2; (+) strand; PAM type: NRG; PAM sequence: AGG
cccagcactttgggaggcca

SEQ ID NO: 51251 - DNA, 20 bp, Artificial Sequence
  Description of Artificial Sequence: Synthetic oligonucleotide
  Target: ATXN2; (+) strand; PAM type: NRG; PAM sequence: CGG
agcactttgggaggccaagg

SEQ ID NO: 51252 - DNA, 20 bp, Artificial Sequence
  Description of Artificial Sequence: Synthetic oligonucleotide
  Target: ATXN2; (+) strand; PAM type: NRG; PAM sequence: GGG
gcactttgggaggccaaggc

SEQ ID NO: 51253 - DNA, 20 bp, Artificial Sequence
  Description of Artificial Sequence: Synthetic oligonucleotide
  Target: ATXN2; (+) strand; PAM type: NRG; PAM sequence: TGG
ctttgggaggccaaggcggg

SEQ ID NO: 51254 - DNA, 20 bp, Artificial Sequence
  Description of Artificial Sequence: Synthetic oligonucleotide
  Target: ATXN2; (+) strand; PAM type: NRG; PAM sequence: GAG
ggccaaggcgggtggatcat

SEQ ID NO: 51255 - DNA, 20 bp, Artificial Sequence
  Description of Artificial Sequence: Synthetic oligonucleotide
  Target: ATXN2; (+) strand; PAM type: NRG; PAM sequence: AGG
gccaaggcgggtggatcatg

SEQ ID NO: 51256 - DNA, 20 bp, Artificial Sequence
  Description of Artificial Sequence: Synthetic oligonucleotide
  Target: ATXN2; (+) strand; PAM type: NRG; PAM sequence: CAG
aggcgggtggatcatgaggt

SEQ ID NO: 51257 - DNA, 20 bp, Artificial Sequence
  Description of Artificial Sequence: Synthetic oligonucleotide
  Target: ATXN2; (+) strand; PAM type: NRG; PAM sequence: AGG
ggcgggtggatcatgaggtc

SEQ ID NO: 51258 - DNA, 20 bp, Artificial Sequence
  Description of Artificial Sequence: Synthetic oligonucleotide
  Target: ATXN2; (+) strand; PAM type: NRG; PAM sequence: GAG
cgggtggatcatgaggtcag

SEQ ID NO: 51259 - DNA, 20 bp, Artificial Sequence
  Description of Artificial Sequence: Synthetic oligonucleotide
  Target: ATXN2; (+) strand; PAM type: NRG; PAM sequence: CAG
gatcatgaggtcaggagttc

SEQ ID NO: 51260 - DNA, 20 bp, Artificial Sequence
  Description of Artificial Sequence: Synthetic oligonucleotide
  Target: ATXN2; (+) strand; PAM type: NRG; PAM sequence: CAG
tgaggtcaggagttccagaa

SEQ ID NO: 51261 - DNA, 20 bp, Artificial Sequence
  Description of Artificial Sequence: Synthetic oligonucleotide
  Target: ATXN2; (+) strand; PAM type: NRG; PAM sequence: TGG
tcaggagttccagaacagcc

SEQ ID NO: 51262 - DNA, 20 bp, Artificial Sequence
  Description of Artificial Sequence: Synthetic oligonucleotide
  Target: ATXN2; (+) strand; PAM type: NRG; PAM sequence: AAG
agttccagaacagcctggcc

SEQ ID NO: 51263 - DNA, 20 bp, Artificial Sequence
  Description of Artificial Sequence: Synthetic oligonucleotide
  Target: ATXN2; (+) strand; PAM type: NRG; PAM sequence: TGG
ccagaacagcctggccaaga

SEQ ID NO: 51264 - DNA, 20 bp, Artificial Sequence
  Description of Artificial Sequence: Synthetic oligonucleotide
  Target: ATXN2; (+) strand; PAM type: NRG; PAM sequence: TAG
tctactaaaaatacaaaaat

SEQ ID NO: 51265 - DNA, 20 bp, Artificial Sequence
  Description of Artificial Sequence: Synthetic oligonucleotide
  Target: ATXN2; (+) strand; PAM type: NRG; PAM sequence: CAG
ctaaaaatacaaaaattagc

SEQ ID NO: 51266 - DNA, 20 bp, Artificial Sequence
  Description of Artificial Sequence: Synthetic oligonucleotide
  Target: ATXN2; (+) strand; PAM type: NRG; PAM sequence: AGG
taaaaatacaaaaattagcc

SEQ ID NO: 51267 - DNA, 20 bp, Artificial Sequence
  Description of Artificial Sequence: Synthetic oligonucleotide
  Target: ATXN2; (+) strand; PAM type: NRG; PAM sequence: CGG
atacaaaaattagccaggca

SEQ ID NO: 51268 - DNA, 20 bp, Artificial Sequence
  Description of Artificial Sequence: Synthetic oligonucleotide
  Target: ATXN2; (+) strand; PAM type: NRG; PAM sequence: TGG
caaaaattagccaggcacgg

SEQ ID NO: 51269 - DNA, 20 bp, Artificial Sequence
  Description of Artificial Sequence: Synthetic oligonucleotide
  Target: ATXN2; (+) strand; PAM type: NRG; PAM sequence: TGG
aaattagccaggcacggtgg

SEQ ID NO: 51270 - DNA, 20 bp, Artificial Sequence
  Description of Artificial Sequence: Synthetic oligonucleotide
  Target: ATXN2; (+) strand; PAM type: NRG; PAM sequence: GGG
aattagccaggcacggtggt

SEQ ID NO: 51271 - DNA, 20 bp, Artificial Sequence
  Description of Artificial Sequence: Synthetic oligonucleotide
  Target: ATXN2; (+) strand; PAM type: NRG; PAM sequence: CAG
gtggtgggcgcctgtaatcc

SEQ ID NO: 51272 - DNA, 20 bp, Artificial Sequence
  Description of Artificial Sequence: Synthetic oligonucleotide
  Target: ATXN2; (+) strand; PAM type: NRG; PAM sequence: TGG
cgcctgtaatcccagctact

SEQ ID NO: 51273 - DNA, 20 bp, Artificial Sequence
  Description of Artificial Sequence: Synthetic oligonucleotide
  Target: ATXN2; (+) strand; PAM type: NRG; PAM sequence: GGG
gcctgtaatcccagctactt

SEQ ID NO: 51274 - DNA, 20 bp, Artificial Sequence
  Description of Artificial Sequence: Synthetic oligonucleotide
  Target: ATXN2; (+) strand; PAM type: NRG; PAM sequence: GAG
ctgtaatcccagctacttgg

SEQ ID NO: 51275 - DNA, 20 bp, Artificial Sequence
  Description of Artificial Sequence: Synthetic oligonucleotide
  Target: ATXN2; (+) strand; PAM type: NRG; PAM sequence: AGG
tgtaatcccagctacttggg

SEQ ID NO: 51276 - DNA, 20 bp, Artificial Sequence
  Description of Artificial Sequence: Synthetic oligonucleotide
  Target: ATXN2; (+) strand; PAM type: NRG; PAM sequence: AAG
tcccagctacttgggaggct

SEQ ID NO: 51277 - DNA, 20 bp, Artificial Sequence
  Description of Artificial Sequence: Synthetic oligonucleotide
  Target: ATXN2; (+) strand; PAM type: NRG; PAM sequence: CAG
agctacttgggaggctaaga

SEQ ID NO: 51278 - DNA, 20 bp, Artificial Sequence
  Description of Artificial Sequence: Synthetic oligonucleotide
  Target: ATXN2; (+) strand; PAM type: NRG; PAM sequence: AGG
gctacttgggaggctaagac

SEQ ID NO: 51279 - DNA, 20 bp, Artificial Sequence
  Description of Artificial Sequence: Synthetic oligonucleotide
  Target: ATXN2; (+) strand; PAM type: NRG; PAM sequence: GAG
tacttgggaggctaagacag

SEQ ID NO: 51280 - DNA, 20 bp, Artificial Sequence
  Description of Artificial Sequence: Synthetic oligonucleotide
  Target: ATXN2; (+) strand; PAM type: NRG; PAM sequence: TGG
acaggagaatcacttgaacc

SEQ ID NO: 51281 - DNA, 20 bp, Artificial Sequence
  Description of Artificial Sequence: Synthetic oligonucleotide
  Target: ATXN2; (+) strand; PAM type: NRG; PAM sequence: GGG
caggagaatcacttgaacct

SEQ ID NO: 51282 - DNA, 20 bp, Artificial Sequence
  Description of Artificial Sequence: Synthetic oligonucleotide
  Target: ATXN2; (+) strand; PAM type: NRG; PAM sequence: GAG
ggagaatcacttgaacctgg

SEQ ID NO: 51283 - DNA, 20 bp, Artificial Sequence
  Description of Artificial Sequence: Synthetic oligonucleotide
  Target: ATXN2; (+) strand; PAM type: NRG; PAM sequence: AGG
gagaatcacttgaacctggg

SEQ ID NO: 51284 - DNA, 20 bp, Artificial Sequence
  Description of Artificial Sequence: Synthetic oligonucleotide
  Target: ATXN2; (+) strand; PAM type: NRG; PAM sequence: CGG
aatcacttgaacctgggagg

SEQ ID NO: 51285 - DNA, 20 bp, Artificial Sequence
  Description of Artificial Sequence: Synthetic oligonucleotide
  Target: ATXN2; (+) strand; PAM type: NRG; PAM sequence: GAG
tcacttgaacctgggaggcg

SEQ ID NO: 51286 - DNA, 20 bp, Artificial Sequence
  Description of Artificial Sequence: Synthetic oligonucleotide
  Target: ATXN2; (+) strand; PAM type: NRG; PAM sequence: AGG
cacttgaacctgggaggcgg

SEQ ID NO: 51287 - DNA, 20 bp, Artificial Sequence
  Description of Artificial Sequence: Synthetic oligonucleotide
  Target: ATXN2; (+) strand; PAM type: NRG; PAM sequence: CAG
aacctgggaggcggaggttg

SEQ ID NO: 51288 - DNA, 20 bp, Artificial Sequence
  Description of Artificial Sequence: Synthetic oligonucleotide
  Target: ATXN2; (+) strand; PAM type: NRG; PAM sequence: AAG
tgggaggcggaggttgcagt

SEQ ID NO: 51289 - DNA, 20 bp, Artificial Sequence
  Description of Artificial Sequence: Synthetic oligonucleotide
  Target: ATXN2; (+) strand; PAM type: NRG; PAM sequence: GAG
ggcggaggttgcagtaagcc

SEQ ID NO: 51290 - DNA, 20 bp, Artificial Sequence
  Description of Artificial Sequence: Synthetic oligonucleotide
  Target: ATXN2; (+) strand; PAM type: NRG; PAM sequence: CAG
gagatcatgccgctgcactc

SEQ ID NO: 51291 - DNA, 20 bp, Artificial Sequence
  Description of Artificial Sequence: Synthetic oligonucleotide
  Target: ATXN2; (+) strand; PAM type: NRG; PAM sequence: TGG
catgccgctgcactccagcc

SEQ ID NO: 51292 - DNA, 20 bp, Artificial Sequence
  Description of Artificial Sequence: Synthetic oligonucleotide
  Target: ATXN2; (+) strand; PAM type: NRG; PAM sequence: GGG
atgccgctgcactccagcct

SEQ ID NO: 51293 - DNA, 20 bp, Artificial Sequence
  Description of Artificial Sequence: Synthetic oligonucleotide
  Target: ATXN2; (+) strand; PAM type: NRG; PAM sequence: AAG
tgcactccagcctgggcgac

SEQ ID NO: 51294 - DNA, 20 bp, Artificial Sequence
  Description of Artificial Sequence: Synthetic oligonucleotide
  Target: ATXN2; (+) strand; PAM type: NRG; PAM sequence: GAG
cactccagcctgggcgacaa

SEQ ID NO: 51295 - DNA, 20 bp, Artificial Sequence
  Description of Artificial Sequence: Synthetic oligonucleotide
  Target: ATXN2; (+) strand; PAM type: NRG; PAM sequence: TAG
atcacaccaaaccaaaccaa

SEQ ID NO: 51296 - DNA, 20 bp, Artificial Sequence
  Description of Artificial Sequence: Synthetic oligonucleotide
  Target: ATXN2; (+) strand; PAM type: NRG; PAM sequence: TGG
accaaaccaaaccaatagtc

SEQ ID NO: 51297 - DNA, 20 bp, Artificial Sequence
  Description of Artificial Sequence: Synthetic oligonucleotide
  Target: ATXN2; (+) strand; PAM type: NRG; PAM sequence: CGG
aaccaaaccaatagtctggc

SEQ ID NO: 51298 - DNA, 20 bp, Artificial Sequence
  Description of Artificial Sequence: Synthetic oligonucleotide
  Target: ATXN2; (+) strand; PAM type: NRG; PAM sequence: GGG
accaaaccaatagtctggcc

SEQ ID NO: 51299 - DNA, 20 bp, Artificial Sequence
  Description of Artificial Sequence: Synthetic oligonucleotide
  Target: ATXN2; (+) strand; PAM type: NRG; PAM sequence: CGG
aatagtctggccgggcacca

SEQ ID NO: 51300 - DNA, 20 bp, Artificial Sequence
  Description of Artificial Sequence: Synthetic oligonucleotide
  Target: ATXN2; (+) strand; PAM type: NRG; PAM sequence: TGG
cacctataattccgccactt

SEQ ID NO: 51301 - DNA, 20 bp, Artificial Sequence
  Description of Artificial Sequence: Synthetic oligonucleotide
  Target: ATXN2; (+) strand; PAM type: NRG; PAM sequence: AAG
ctataattccgccactttgg

SEQ ID NO: 51302 - DNA, 20 bp, Artificial Sequence
  Description of Artificial Sequence: Synthetic oligonucleotide
  Target: ATXN2; (+) strand; PAM type: NRG; PAM sequence: AGG
tataattccgccactttgga

SEQ ID NO: 51303 - DNA, 20 bp, Artificial Sequence
  Description of Artificial Sequence: Synthetic oligonucleotide
  Target: ATXN2; (+) strand; PAM type: NRG; PAM sequence: GAG
ttccgccactttggaaggtc

SEQ ID NO: 51304 - DNA, 20 bp, Artificial Sequence
  Description of Artificial Sequence: Synthetic oligonucleotide
  Target: ATXN2; (+) strand; PAM type: NRG; PAM sequence: AGG
tccgccactttggaaggtcg

SEQ ID NO: 51305 - DNA, 20 bp, Artificial Sequence
  Description of Artificial Sequence: Synthetic oligonucleotide
  Target: ATXN2; (+) strand; PAM type: NRG; PAM sequence: TAG
gccactttggaaggtcgagg

SEQ ID NO: 51306 - DNA, 20 bp, Artificial Sequence
  Description of Artificial Sequence: Synthetic oligonucleotide
  Target: ATXN2; (+) strand; PAM type: NRG; PAM sequence: AGG
ccactttggaaggtcgaggt

SEQ ID NO: 51307 - DNA, 20 bp, Artificial Sequence
  Description of Artificial Sequence: Synthetic oligonucleotide
  Target: ATXN2; (+) strand; PAM type: NRG; PAM sequence: CGG
ctttggaaggtcgaggtagg

SEQ ID NO: 51308 - DNA, 20 bp, Artificial Sequence
  Description of Artificial Sequence: Synthetic oligonucleotide
  Target: ATXN2; (+) strand; PAM type: NRG; PAM sequence: GAG
tcgaggtaggcggatcactt

SEQ ID NO: 51309 - DNA, 20 bp, Artificial Sequence
  Description of Artificial Sequence: Synthetic oligonucleotide
  Target: ATXN2; (+) strand; PAM type: NRG; PAM sequence: TAG
gtaggcggatcacttgagaa

SEQ ID NO: 51310 - DNA, 20 bp, Artificial Sequence
  Description of Artificial Sequence: Synthetic oligonucleotide
  Target: ATXN2; (+) strand; PAM type: NRG; PAM sequence: AGG
taggcggatcacttgagaat

SEQ ID NO: 51311 - DNA, 20 bp, Artificial Sequence
  Description of Artificial Sequence: Synthetic oligonucleotide
  Target: ATXN2; (+) strand; PAM type: NRG; PAM sequence: GAG
ggcggatcacttgagaatag

SEQ ID NO: 51312 - DNA, 20 bp, Artificial Sequence
  Description of Artificial Sequence: Synthetic oligonucleotide
  Target: ATXN2; (+) strand; PAM type: NRG; PAM sequence: GAG
tcacttgagaataggagttt

SEQ ID NO: 51313 - DNA, 20 bp, Artificial Sequence
  Description of Artificial Sequence: Synthetic oligonucleotide
  Target: ATXN2; (+) strand; PAM type: NRG; PAM sequence: CAG
tgagaataggagtttgagac

SEQ ID NO: 51314 - DNA, 20 bp, Artificial Sequence
  Description of Artificial Sequence: Synthetic oligonucleotide
  Target: ATXN2; (+) strand; PAM type: NRG; PAM sequence: AGG
gagaataggagtttgagacc

SEQ ID NO: 51315 - DNA, 20 bp, Artificial Sequence
  Description of Artificial Sequence: Synthetic oligonucleotide
  Target: ATXN2; (+) strand; PAM type: NRG; PAM sequence: TGG
tgagaccaggctgaccaaca

SEQ ID NO: 51316 - DNA, 20 bp, Artificial Sequence
  Description of Artificial Sequence: Synthetic oligonucleotide
  Target: ATXN2; (+) strand; PAM type: NRG; PAM sequence: TAG
tctactaaaaatacaaaaat

SEQ ID NO: 51317 - DNA, 20 bp, Artificial Sequence
  Description of Artificial Sequence: Synthetic oligonucleotide
  Target: ATXN2; (+) strand; PAM type: NRG; PAM sequence: CAG
ctaaaaatacaaaaattagt

SEQ ID NO: 51318 - DNA, 20 bp, Artificial Sequence
  Description of Artificial Sequence: Synthetic oligonucleotide
  Target: ATXN2; (+) strand; PAM type: NRG; PAM sequence: AGG
taaaaatacaaaaattagtc

SEQ ID NO: 51319 - DNA, 20 bp, Artificial Sequence
  Description of Artificial Sequence: Synthetic oligonucleotide
  Target: ATXN2; (+) strand; PAM type: NRG; PAM sequence: CGG
atacaaaaattagtcaggca

SEQ ID NO: 51320 - DNA, 20 bp, Artificial Sequence
  Description of Artificial Sequence: Synthetic oligonucleotide
  Target: ATXN2; (+) strand; PAM type: NRG; PAM sequence: TAG
caaaaattagtcaggcacgg

SEQ ID NO: 51321 - DNA, 20 bp, Artificial Sequence
  Description of Artificial Sequence: Synthetic oligonucleotide
  Target: ATXN2; (+) strand; PAM type: NRG; PAM sequence: TAG
ggcacggtagtgcacgtctg

SEQ ID NO: 51322 - DNA, 20 bp, Artificial Sequence
  Description of Artificial Sequence: Synthetic oligonucleotide
  Target: ATXN2; (+) strand; PAM type: NRG; PAM sequence: CAG
gtagtgcacgtctgtagtct

SEQ ID NO: 51323 - DNA, 20 bp, Artificial Sequence
  Description of Artificial Sequence: Synthetic oligonucleotide
  Target: ATXN2; (+) strand; PAM type: NRG; PAM sequence: AGG
tagtgcacgtctgtagtctc

SEQ ID NO: 51324 - DNA, 20 bp, Artificial Sequence
  Description of Artificial Sequence: Synthetic oligonucleotide
  Target: ATXN2; (+) strand; PAM type: NRG; PAM sequence: TGG
cgtctgtagtctcaggtact

SEQ ID NO: 51325 - DNA, 20 bp, Artificial Sequence
  Description of Artificial Sequence: Synthetic oligonucleotide
  Target: ATXN2; (+) strand; PAM type: NRG; PAM sequence: GGG
gtctgtagtctcaggtactt

SEQ ID NO: 51326 - DNA, 20 bp, Artificial Sequence
  Description of Artificial Sequence: Synthetic oligonucleotide
  Target: ATXN2; (+) strand; PAM type: NRG; PAM sequence: GAG
ctgtagtctcaggtacttgg

SEQ ID NO: 51327 - DNA, 20 bp, Artificial Sequence
  Description of Artificial Sequence: Synthetic oligonucleotide
  Target: ATXN2; (+) strand; PAM type: NRG; PAM sequence: AGG
tgtagtctcaggtacttggg

SEQ ID NO: 51328 - DNA, 20 bp, Artificial Sequence
  Description of Artificial Sequence: Synthetic oligonucleotide
  Target: ATXN2; (+) strand; PAM type: NRG; PAM sequence: CAG
gaggctgaatcacctgaaca

SEQ ID NO: 51329 - DNA, 20 bp, Artificial Sequence
  Description of Artificial Sequence: Synthetic oligonucleotide
  Target: ATXN2; (+) strand; PAM type: NRG; PAM sequence: AGG
aggctgaatcacctgaacac

SEQ ID NO: 51330 - DNA, 20 bp, Artificial Sequence
  Description of Artificial Sequence: Synthetic oligonucleotide
  Target: ATXN2; (+) strand; PAM type: NRG; PAM sequence: GAG
gctgaatcacctgaacacag

SEQ ID NO: 51331 - DNA, 20 bp, Artificial Sequence
  Description of Artificial Sequence: Synthetic oligonucleotide
  Target: ATXN2; (+) strand; PAM type: NRG; PAM sequence: AGG
ctgaatcacctgaacacagg

SEQ ID NO: 51332 - DNA, 20 bp, Artificial Sequence
  Description of Artificial Sequence: Synthetic oligonucleotide
  Target: ATXN2; (+) strand; PAM type: NRG; PAM sequence: CGG
aatcacctgaacacaggagg

SEQ ID NO: 51333 - DNA, 20 bp, Artificial Sequence
  Description of Artificial Sequence: Synthetic oligonucleotide
  Target: ATXN2; (+) strand; PAM type: NRG; PAM sequence: GAG
tcacctgaacacaggaggcg

SEQ ID NO: 51334 - DNA, 20 bp, Artificial Sequence
  Description of Artificial Sequence: Synthetic oligonucleotide
  Target: ATXN2; (+) strand; PAM type: NRG; PAM sequence: AGG
cacctgaacacaggaggcgg

SEQ ID NO: 51335 - DNA, 20 bp, Artificial Sequence
  Description of Artificial Sequence: Synthetic oligonucleotide
  Target: ATXN2; (+) strand; PAM type: NRG; PAM sequence: CAG
aacacaggaggcggaggttg

SEQ ID NO: 51336 - DNA, 20 bp, Artificial Sequence
  Description of Artificial Sequence: Synthetic oligonucleotide
  Target: ATXN2; (+) strand; PAM type: NRG; PAM sequence: GAG
caggaggcggaggttgcagt

SEQ ID NO: 51337 - DNA, 20 bp, Artificial Sequence
  Description of Artificial Sequence: Synthetic oligonucleotide
  Target: ATXN2; (+) strand; PAM type: NRG; PAM sequence: AAG
ggcggaggttgcagtgagct

SEQ ID NO: 51338 - DNA, 20 bp, Artificial Sequence
  Description of Artificial Sequence: Synthetic oligonucleotide
  Target: ATXN2; (+) strand; PAM type: NRG; PAM sequence: TGG
cacgccactgtactccaacc

SEQ ID NO: 51339 - DNA, 20 bp, Artificial Sequence
  Description of Artificial Sequence: Synthetic oligonucleotide
  Target: ATXN2; (+) strand; PAM type: NRG; PAM sequence: GGG
acgccactgtactccaacct

SEQ ID NO: 51340 - DNA, 20 bp, Artificial Sequence
  Description of Artificial Sequence: Synthetic oligonucleotide
  Target: ATXN2; (+) strand; PAM type: NRG; PAM sequence: CAG
ctgtactccaacctgggcaa

SEQ ID NO: 51341 - DNA, 20 bp, Artificial Sequence
  Description of Artificial Sequence: Synthetic oligonucleotide
  Target: ATXN2; (+) strand; PAM type: NRG; PAM sequence: GAG
gtactccaacctgggcaaca

SEQ ID NO: 51342 - DNA, 20 bp, Artificial Sequence
  Description of Artificial Sequence: Synthetic oligonucleotide
  Target: ATXN2; (+) strand; PAM type: NRG; PAM sequence: GAG
tccaacctgggcaacagagt

SEQ ID NO: 51343 - DNA, 20 bp, Artificial Sequence
  Description of Artificial Sequence: Synthetic oligonucleotide
  Target: ATXN2; (+) strand; PAM type: NRG; PAM sequence: CAG
aaaaataaaaattaaaccaa

SEQ ID NO: 51344 - DNA, 20 bp, Artificial Sequence
  Description of Artificial Sequence: Synthetic oligonucleotide
  Target: ATXN2; (+) strand; PAM type: NRG; PAM sequence: GAG
caaattattattattatttt

SEQ ID NO: 51345 - DNA, 20 bp, Artificial Sequence
  Description of Artificial Sequence: Synthetic oligonucleotide
  Target: ATXN2; (+) strand; PAM type: NRG; PAM sequence: CAG
attattattattttgagaca

SEQ ID NO: 51346 - DNA, 20 bp, Artificial Sequence
  Description of Artificial Sequence: Synthetic oligonucleotide
  Target: ATXN2; (+) strand; PAM type: NRG; PAM sequence: CAG
cacagtctcactctgtcacc

SEQ ID NO: 51347 - DNA, 20 bp, Artificial Sequence
  Description of Artificial Sequence: Synthetic oligonucleotide
  Target: ATXN2; (+) strand; PAM type: NRG; PAM sequence: AGG
acagtctcactctgtcaccc

SEQ ID NO: 51348 - DNA, 20 bp, Artificial Sequence
  Description of Artificial Sequence: Synthetic oligonucleotide
  Target: ATXN2; (+) strand; PAM type: NRG; PAM sequence: AAG
tcactctgtcacccaggctg

SEQ ID NO: 51349 - DNA, 20 bp, Artificial Sequence
  Description of Artificial Sequence: Synthetic oligonucleotide
  Target: ATXN2; (+) strand; PAM type: NRG; PAM sequence: CAG
ctgtcacccaggctgaagta

SEQ ID NO: 51350 - DNA, 20 bp, Artificial Sequence
  Description of Artificial Sequence: Synthetic oligonucleotide
  Target: ATXN2; (+) strand; PAM type: NRG; PAM sequence: TGG
tcacccaggctgaagtacag

SEQ ID NO: 51351 - DNA, 20 bp, Artificial Sequence
  Description of Artificial Sequence: Synthetic oligonucleotide
  Target: ATXN2; (+) strand; PAM type: NRG; PAM sequence: CGG
tcactgcaacctctgcctcc

SEQ ID NO: 51352 - DNA, 20 bp, Artificial Sequence
  Description of Artificial Sequence: Synthetic oligonucleotide
  Target: ATXN2; (+) strand; PAM type: NRG; PAM sequence: GGG
cactgcaacctctgcctccc

SEQ ID NO: 51353 - DNA, 20 bp, Artificial Sequence
  Description of Artificial Sequence: Synthetic oligonucleotide
  Target: ATXN2; (+) strand; PAM type: NRG; PAM sequence: AAG
aacctctgcctcccgggttc

SEQ ID NO: 51354 - DNA, 20 bp, Artificial Sequence
  Description of Artificial Sequence: Synthetic oligonucleotide
  Target: ATXN2; (+) strand; PAM type: NRG; PAM sequence: GAG
cctctgcctcccgggttcaa

SEQ ID NO: 51355 - DNA, 20 bp, Artificial Sequence
  Description of Artificial Sequence: Synthetic oligonucleotide
  Target: ATXN2; (+) strand; PAM type: NRG; PAM sequence: CAG
ttcaagagattctcctgcct

SEQ ID NO: 51356 - DNA, 20 bp, Artificial Sequence
  Description of Artificial Sequence: Synthetic oligonucleotide
  Target: ATXN2; (+) strand; PAM type: NRG; PAM sequence: GAG
ttctcctgcctcagccttct

SEQ ID NO: 51357 - DNA, 20 bp, Artificial Sequence
  Description of Artificial Sequence: Synthetic oligonucleotide
  Target: ATXN2; (+) strand; PAM type: NRG; PAM sequence: GAG
cctcagccttctgagtcact

SEQ ID NO: 51358 - DNA, 20 bp, Artificial Sequence
  Description of Artificial Sequence: Synthetic oligonucleotide
  Target: ATXN2; (+) strand; PAM type: NRG; PAM sequence: TAG
cttctgagtcactgagactg

SEQ ID NO: 51359 - DNA, 20 bp, Artificial Sequence
  Description of Artificial Sequence: Synthetic oligonucleotide
  Target: ATXN2; (+) strand; PAM type: NRG; PAM sequence: GAG
gagtcactgagactgtagat

SEQ ID NO: 51360 - DNA, 20 bp, Artificial Sequence
  Description of Artificial Sequence: Synthetic oligonucleotide
  Target: ATXN2; (+) strand; PAM type: NRG; PAM sequence: TGG
gtagatgagccacgcacaaa

SEQ ID NO: 51361 - DNA, 20 bp, Artificial Sequence
  Description of Artificial Sequence: Synthetic oligonucleotide
  Target: ATXN2; (+) strand; PAM type: NRG; PAM sequence: CAG
ttgtgtatttgtaataaaca

SEQ ID NO: 51362 - DNA, 20 bp, Artificial Sequence
  Description of Artificial Sequence: Synthetic oligonucleotide
  Target: ATXN2; (+) strand; PAM type: NRG; PAM sequence: AGG
tgtgtatttgtaataaacac

SEQ ID NO: 51363 - DNA, 20 bp, Artificial Sequence
  Description of Artificial Sequence: Synthetic oligonucleotide
  Target: ATXN2; (+) strand; PAM type: NRG; PAM sequence: GGG
gtgtatttgtaataaacaca

SEQ ID NO: 51364 - DNA, 20 bp, Artificial Sequence
  Description of Artificial Sequence: Synthetic oligonucleotide
  Target: ATXN2; (+) strand; PAM type: NRG; PAM sequence: TAG
tatttgtaataaacacaggg

SEQ ID NO: 51365 - DNA, 20 bp, Artificial Sequence
  Description of Artificial Sequence: Synthetic oligonucleotide
  Target: ATXN2; (+) strand; PAM type: NRG; PAM sequence: AGG
atttgtaataaacacagggt

SEQ ID NO: 51366 - DNA, 20 bp, Artificial Sequence
  Description of Artificial Sequence: Synthetic oligonucleotide
  Target: ATXN2; (+) strand; PAM type: NRG; PAM sequence: CAG
gtaataaacacagggtaggc

SEQ ID NO: 51367 - DNA, 20 bp, Artificial Sequence
  Description of Artificial Sequence: Synthetic oligonucleotide
  Target: ATXN2; (+) strand; PAM type: NRG; PAM sequence: AGG
taataaacacagggtaggcc

SEQ ID NO: 51368 - DNA, 20 bp, Artificial Sequence
  Description of Artificial Sequence: Synthetic oligonucleotide
  Target: ATXN2; (+) strand; PAM type: NRG; PAM sequence: TGG
aacacagggtaggccaggtg

SEQ ID NO: 51369 - DNA, 20 bp, Artificial Sequence
  Description of Artificial Sequence: Synthetic oligonucleotide
  Target: ATXN2; (+) strand; PAM type: NRG; PAM sequence: TGG
acagggtaggccaggtgtgg

SEQ ID NO: 51370 - DNA, 20 bp, Artificial Sequence
  Description of Artificial Sequence: Synthetic oligonucleotide
  Target: ATXN2; (+) strand; PAM type: NRG; PAM sequence: CAG
gtggctcacgcctgtaatcc

SEQ ID NO: 51371 - DNA, 20 bp, Artificial Sequence
  Description of Artificial Sequence: Synthetic oligonucleotide
  Target: ATXN2; (+) strand; PAM type: NRG; PAM sequence: TGG
cgcctgtaatcccagaactt

SEQ ID NO: 51372 - DNA, 20 bp, Artificial Sequence
  Description of Artificial Sequence: Synthetic oligonucleotide
  Target: ATXN2; (+) strand; PAM type: NRG; PAM sequence: GGG
gcctgtaatcccagaacttt

SEQ ID NO: 51373 - DNA, 20 bp, Artificial Sequence
  Description of Artificial Sequence: Synthetic oligonucleotide
  Target: ATXN2; (+) strand; PAM type: NRG; PAM sequence: GAG
ctgtaatcccagaactttgg

SEQ ID NO: 51374 - DNA, 20 bp, Artificial Sequence
  Description of Artificial Sequence: Synthetic oligonucleotide
  Target: ATXN2; (+) strand; PAM type: NRG; PAM sequence: AGG
tgtaatcccagaactttggg

SEQ ID NO: 51375 - DNA, 20 bp, Artificial Sequence
  Description of Artificial Sequence: Synthetic oligonucleotide
  Target: ATXN2; (+) strand; PAM type: NRG; PAM sequence: GAG
tcccagaactttgggaggcc

SEQ ID NO: 51376 - DNA, 20 bp, Artificial Sequence
  Description of Artificial Sequence: Synthetic oligonucleotide
  Target: ATXN2; (+) strand; PAM type: NRG; PAM sequence: AGG
cccagaactttgggaggccg

SEQ ID NO: 51377 - DNA, 20 bp, Artificial Sequence
  Description of Artificial Sequence: Synthetic oligonucleotide
  Target: ATXN2; (+) strand; PAM type: NRG; PAM sequence: CGG
agaactttgggaggccgagg

SEQ ID NO: 51378 - DNA, 20 bp, Artificial Sequence
  Description of Artificial Sequence: Synthetic oligonucleotide
  Target: ATXN2; (+) strand; PAM type: NRG; PAM sequence: GGG
gaactttgggaggccgaggc

SEQ ID NO: 51379 - DNA, 20 bp, Artificial Sequence
  Description of Artificial Sequence: Synthetic oligonucleotide
  Target: ATXN2; (+) strand; PAM type: NRG; PAM sequence: CGG
ctttgggaggccgaggcggg

SEQ ID NO: 51380 - DNA, 20 bp, Artificial Sequence
  Description of Artificial Sequence: Synthetic oligonucleotide
  Target: ATXN2; (+) strand; PAM type: NRG; PAM sequence: AAG
gccgaggcgggcggatcaca

SEQ ID NO: 51381 - DNA, 20 bp, Artificial Sequence
  Description of Artificial Sequence: Synthetic oligonucleotide
  Target: ATXN2; (+) strand; PAM type: NRG; PAM sequence: CAG
aggcgggcggatcacaaagt

SEQ ID NO: 51382 - DNA, 20 bp, Artificial Sequence
  Description of Artificial Sequence: Synthetic oligonucleotide
  Target: ATXN2; (+) strand; PAM type: NRG; PAM sequence: AGG
ggcgggcggatcacaaagtc

SEQ ID NO: 51383 - DNA, 20 bp, Artificial Sequence
  Description of Artificial Sequence: Synthetic oligonucleotide
  Target: ATXN2; (+) strand; PAM type: NRG; PAM sequence: GAG
cgggcggatcacaaagtcag

SEQ ID NO: 51384 - DNA, 20 bp, Artificial Sequence
  Description of Artificial Sequence: Synthetic oligonucleotide
  Target: ATXN2; (+) strand; PAM type: NRG; PAM sequence: GAG
gatcacaaagtcaggagttc

SEQ ID NO: 51385 - DNA, 20 bp, Artificial Sequence
  Description of Artificial Sequence: Synthetic oligonucleotide
  Target: ATXN2; (+) strand; PAM type: NRG; PAM sequence: CAG
tcaggagttcgagaccatcc

SEQ ID NO: 51386 - DNA, 20 bp, Artificial Sequence
  Description of Artificial Sequence: Synthetic oligonucleotide
  Target: ATXN2; (+) strand; PAM type: NRG; PAM sequence: CGG
cgagaccatcccagataaca

SEQ ID NO: 51387 - DNA, 20 bp, Artificial Sequence
  Description of Artificial Sequence: Synthetic oligonucleotide
  Target: ATXN2; (+) strand; PAM type: NRG; PAM sequence: TAG
tctactaaaaataaaaaaat

SEQ ID NO: 51388 - DNA, 20 bp, Artificial Sequence
  Description of Artificial Sequence: Synthetic oligonucleotide
  Target: ATXN2; (+) strand; PAM type: NRG; PAM sequence: CAG
ctaaaaataaaaaaattagc

SEQ ID NO: 51389 - DNA, 20 bp, Artificial Sequence
  Description of Artificial Sequence: Synthetic oligonucleotide
  Target: ATXN2; (+) strand; PAM type: NRG; PAM sequence: AGG
taaaaataaaaaaattagcc

SEQ ID NO: 51390 - DNA, 20 bp, Artificial Sequence
  Description of Artificial Sequence: Synthetic oligonucleotide
  Target: ATXN2; (+) strand; PAM type: NRG; PAM sequence: TGG
ataaaaaaattagccaggca

SEQ ID NO: 51391 - DNA, 20 bp, Artificial Sequence
  Description of Artificial Sequence: Synthetic oligonucleotide
  Target: ATXN2; (+) strand; PAM type: NRG; PAM sequence: TGG
aaaaaattagccaggcatgg

SEQ ID NO: 51392 - DNA, 20 bp, Artificial Sequence
  Description of Artificial Sequence: Synthetic oligonucleotide
  Target: ATXN2; (+) strand; PAM type: NRG; PAM sequence: CGG
aaattagccaggcatggtgg

SEQ ID NO: 51393 - DNA, 20 bp, Artificial Sequence
  Description of Artificial Sequence: Synthetic oligonucleotide
  Target: ATXN2; (+) strand; PAM type: NRG; PAM sequence: GGG
aattagccaggcatggtggc

SEQ ID NO: 51394 - DNA, 20 bp, Artificial Sequence
  Description of Artificial Sequence: Synthetic oligonucleotide
  Target: ATXN2; (+) strand; PAM type: NRG; PAM sequence: TAG
ggcatggtggcgggctcctg

SEQ ID NO: 51395 - DNA, 20 bp, Artificial Sequence
  Description of Artificial Sequence: Synthetic oligonucleotide
  Target: ATXN2; (+) strand; PAM type: NRG; PAM sequence: CAG
gtggcgggctcctgtagtcc

SEQ ID NO: 51396 - DNA, 20 bp, Artificial Sequence
  Description of Artificial Sequence: Synthetic oligonucleotide
  Target: ATXN2; (+) strand; PAM type: NRG; PAM sequence: TGG
ctcctgtagtcccagctact

SEQ ID NO: 51397 - DNA, 20 bp, Artificial Sequence
  Description of Artificial Sequence: Synthetic oligonucleotide
  Target: ATXN2; (+) strand; PAM type: NRG; PAM sequence: GGG
tcctgtagtcccagctactt

SEQ ID NO: 51398 - DNA, 20 bp, Artificial Sequence
  Description of Artificial Sequence: Synthetic oligonucleotide
  Target: ATXN2; (+) strand; PAM type: NRG; PAM sequence: GAG
ctgtagtcccagctacttgg

SEQ ID NO: 51399 - DNA, 20 bp, Artificial Sequence
  Description of Artificial Sequence: Synthetic oligonucleotide
  Target: ATXN2; (+) strand; PAM type: NRG; PAM sequence: AGG
tgtagtcccagctacttggg

SEQ ID NO: 51400 - DNA, 20 bp, Artificial Sequence
  Description of Artificial Sequence: Synthetic oligonucleotide
  Target: ATXN2; (+) strand; PAM type: NRG; PAM sequence: GAG
tcccagctacttgggaggct

SEQ ID NO: 51401 - DNA, 20 bp, Artificial Sequence
  Description of Artificial Sequence: Synthetic oligonucleotide
  Target: ATXN2; (+) strand; PAM type: NRG; PAM sequence: AGG
cccagctacttgggaggctg

SEQ ID NO: 51402 - DNA, 20 bp, Artificial Sequence
  Description of Artificial Sequence: Synthetic oligonucleotide
  Target: ATXN2; (+) strand; PAM type: NRG; PAM sequence: CAG
agctacttgggaggctgagg

SEQ ID NO: 51403 - DNA, 20 bp, Artificial Sequence
  Description of Artificial Sequence: Synthetic oligonucleotide
  Target: ATXN2; (+) strand; PAM type: NRG; PAM sequence: AGG
gctacttgggaggctgaggc

SEQ ID NO: 51404 - DNA, 20 bp, Artificial Sequence
  Description of Artificial Sequence: Synthetic oligonucleotide
  Target: ATXN2; (+) strand; PAM type: NRG; PAM sequence: GAG
tacttgggaggctgaggcag

SEQ ID NO: 51405 - DNA, 20 bp, Artificial Sequence
  Description of Artificial Sequence: Synthetic oligonucleotide
  Target: ATXN2; (+) strand; PAM type: NRG; PAM sequence: TGG
gggaggctgaggcaggagaa

SEQ ID NO: 51406 - DNA, 20 bp, Artificial Sequence
  Description of Artificial Sequence: Synthetic oligonucleotide
  Target: ATXN2; (+) strand; PAM type: NRG; PAM sequence: TGG
gcaggagaatggcatgaacc

SEQ ID NO: 51407 - DNA, 20 bp, Artificial Sequence
  Description of Artificial Sequence: Synthetic oligonucleotide
  Target: ATXN2; (+) strand; PAM type: NRG; PAM sequence: GGG
caggagaatggcatgaacct

SEQ ID NO: 51408 - DNA, 20 bp, Artificial Sequence
  Description of Artificial Sequence: Synthetic oligonucleotide
  Target: ATXN2; (+) strand; PAM type: NRG; PAM sequence: GAG
ggagaatggcatgaacctgg

SEQ ID NO: 51409 - DNA, 20 bp, Artificial Sequence
  Description of Artificial Sequence: Synthetic oligonucleotide
  Target: ATXN2; (+) strand; PAM type: NRG; PAM sequence: CGG
aatggcatgaacctgggagt

SEQ ID NO: 51410 - DNA, 20 bp, Artificial Sequence
  Description of Artificial Sequence: Synthetic oligonucleotide
  Target: ATXN2; (+) strand; PAM type: NRG; PAM sequence: GAG
tggcatgaacctgggagtcg

SEQ ID NO: 51411 - DNA, 20 bp, Artificial Sequence
  Description of Artificial Sequence: Synthetic oligonucleotide
  Target: ATXN2; (+) strand; PAM type: NRG; PAM sequence: AGG
ggcatgaacctgggagtcgg

SEQ ID NO: 51412 - DNA, 20 bp, Artificial Sequence
  Description of Artificial Sequence: Synthetic oligonucleotide
  Target: ATXN2; (+) strand; PAM type: NRG; PAM sequence: CAG
aacctgggagtcggaggttg

SEQ ID NO: 51413 - DNA, 20 bp, Artificial Sequence
  Description of Artificial Sequence: Synthetic oligonucleotide
  Target: ATXN2; (+) strand; PAM type: NRG; PAM sequence: GAG
tgggagtcggaggttgcagt

SEQ ID NO: 51414 - DNA, 20 bp, Artificial Sequence
  Description of Artificial Sequence: Synthetic oligonucleotide
  Target: ATXN2; (+) strand; PAM type: NRG; PAM sequence: GAG
gtcggaggttgcagtgagcc

SEQ ID NO: 51415 - DNA, 20 bp, Artificial Sequence
  Description of Artificial Sequence: Synthetic oligonucleotide
  Target: ATXN2; (+) strand; PAM type: NRG; PAM sequence: CAG
gagatcacgccactgcactc

SEQ ID NO: 51416 - DNA, 20 bp, Artificial Sequence
  Description of Artificial Sequence: Synthetic oligonucleotide
  Target: ATXN2; (+) strand; PAM type: NRG; PAM sequence: TGG
cacgccactgcactccagcc

SEQ ID NO: 51417 - DNA, 20 bp, Artificial Sequence
  Description of Artificial Sequence: Synthetic oligonucleotide
  Target: ATXN2; (+) strand; PAM type: NRG; PAM sequence: GGG
acgccactgcactccagcct

SEQ ID NO: 51418 - DNA, 20 bp, Artificial Sequence
  Description of Artificial Sequence: Synthetic oligonucleotide
  Target: ATXN2; (+) strand; PAM type: NRG; PAM sequence: CAG
ctgcactccagcctgggcga

SEQ ID NO: 51419 - DNA, 20 bp, Artificial Sequence
  Description of Artificial Sequence: Synthetic oligonucleotide
  Target: ATXN2; (+) strand; PAM type: NRG; PAM sequence: GAG
gcactccagcctgggcgaca

SEQ ID NO: 51420 - DNA, 20 bp, Artificial Sequence
  Description of Artificial Sequence: Synthetic oligonucleotide
  Target: ATXN2; (+) strand; PAM type: NRG; PAM sequence: GAG
tccagcctgggcgacagagc

SEQ ID NO: 51421 - DNA, 20 bp, Artificial Sequence
  Description of Artificial Sequence: Synthetic oligonucleotide
  Target: ATXN2; (+) strand; PAM type: NRG; PAM sequence: CAG
aataaacaaacaaacaaacc

SEQ ID NO: 51422 - DNA, 20 bp, Artificial Sequence
  Description of Artificial Sequence: Synthetic oligonucleotide
  Target: ATXN2; (+) strand; PAM type: NRG; PAM sequence: AGG
ataaacaaacaaacaaaccc

SEQ ID NO: 51423 - DNA, 20 bp, Artificial Sequence
  Description of Artificial Sequence: Synthetic oligonucleotide
  Target: ATXN2; (+) strand; PAM type: NRG; PAM sequence: GGG
taaacaaacaaacaaaccca

SEQ ID NO: 51424 - DNA, 20 bp, Artificial Sequence
  Description of Artificial Sequence: Synthetic oligonucleotide
  Target: ATXN2; (+) strand; PAM type: NRG; PAM sequence: TGG
aacccagggtttcaccacgt

SEQ ID NO: 51425 - DNA, 20 bp, Artificial Sequence
  Description of Artificial Sequence: Synthetic oligonucleotide
  Target: ATXN2; (+) strand; PAM type: NRG; PAM sequence: TGG
tttcaccacgttggccacgc

SEQ ID NO: 51426 - DNA, 20 bp, Artificial Sequence
  Description of Artificial Sequence: Synthetic oligonucleotide
  Target: ATXN2; (+) strand; PAM type: NRG; PAM sequence: CAG
tggtctcgaactcctgacct

SEQ ID NO: 51427 - DNA, 20 bp, Artificial Sequence
  Description of Artificial Sequence: Synthetic oligonucleotide
  Target: ATXN2; (+) strand; PAM type: NRG; PAM sequence: AGG
ggtctcgaactcctgacctc

SEQ ID NO: 51428 - DNA, 20 bp, Artificial Sequence
  Description of Artificial Sequence: Synthetic oligonucleotide
  Target: ATXN2; (+) strand; PAM type: NRG; PAM sequence: CGG
ctcaggtgatctgcccgcct

SEQ ID NO: 51429 - DNA, 20 bp, Artificial Sequence
  Description of Artificial Sequence: Synthetic oligonucleotide
  Target: ATXN2; (+) strand; PAM type: NRG; PAM sequence: AAG
ctgcccgcctcggcctccca

SEQ ID NO: 51430 - DNA, 20 bp, Artificial Sequence
  Description of Artificial Sequence: Synthetic oligonucleotide
  Target: ATXN2; (+) strand; PAM type: NRG; PAM sequence: TGG
gcctcggcctcccaaagtgc

SEQ ID NO: 51431 - DNA, 20 bp, Artificial Sequence
  Description of Artificial Sequence: Synthetic oligonucleotide
  Target: ATXN2; (+) strand; PAM type: NRG; PAM sequence: GGG
cctcggcctcccaaagtgct

SEQ ID NO: 51432 - DNA, 20 bp, Artificial Sequence
  Description of Artificial Sequence: Synthetic oligonucleotide
  Target: ATXN2; (+) strand; PAM type: NRG; PAM sequence: CAG
ctcccaaagtgctgggatta

SEQ ID NO: 51433 - DNA, 20 bp, Artificial Sequence
  Description of Artificial Sequence: Synthetic oligonucleotide
  Target: ATXN2; (+) strand; PAM type: NRG; PAM sequence: GAG
agtgctgggattacagtcgt

SEQ ID NO: 51434 - DNA, 20 bp, Artificial Sequence
  Description of Artificial Sequence: Synthetic oligonucleotide
  Target: ATXN2; (+) strand; PAM type: NRG; PAM sequence: TGG
cagtcgtgagccactgcgcc

SEQ ID NO: 51435 - DNA, 20 bp, Artificial Sequence
  Description of Artificial Sequence: Synthetic oligonucleotide
  Target: ATXN2; (+) strand; PAM type: NRG; PAM sequence: AAG
ccactgcgcctggccacgac

SEQ ID NO: 51436 - DNA, 20 bp, Artificial Sequence
  Description of Artificial Sequence: Synthetic oligonucleotide
  Target: ATXN2; (+) strand; PAM type: NRG; PAM sequence: AAG
aagttaattgataacttact

SEQ ID NO: 51437 - DNA, 20 bp, Artificial Sequence
  Description of Artificial Sequence: Synthetic oligonucleotide
  Target: ATXN2; (+) strand; PAM type: NRG; PAM sequence: AAG
gataacttactaagcataca

SEQ ID NO: 51438 - DNA, 20 bp, Artificial Sequence
  Description of Artificial Sequence: Synthetic oligonucleotide
  Target: ATXN2; (+) strand; PAM type: NRG; PAM sequence: AAG
aaacacttgttcctactgtc

SEQ ID NO: 51439 - DNA, 20 bp, Artificial Sequence
  Description of Artificial Sequence: Synthetic oligonucleotide
  Target: ATXN2; (+) strand; PAM type: NRG; PAM sequence: TAG
ctgtcaagatgctctaaatc

SEQ ID NO: 51440 - DNA, 20 bp, Artificial Sequence
  Description of Artificial Sequence: Synthetic oligonucleotide
  Target: ATXN2; (+) strand; PAM type: NRG; PAM sequence: AAG
tcaagatgctctaaatctag

SEQ ID NO: 51441 - DNA, 20 bp, Artificial Sequence
  Description of Artificial Sequence: Synthetic oligonucleotide
  Target: ATXN2; (+) strand; PAM type: NRG; PAM sequence: AGG
caagatgctctaaatctaga

SEQ ID NO: 51442 - DNA, 20 bp, Artificial Sequence
  Description of Artificial Sequence: Synthetic oligonucleotide
  Target: ATXN2; (+) strand; PAM type: NRG; PAM sequence: AAG
gatgctctaaatctagaagg

SEQ ID NO: 51443 - DNA, 20 bp, Artificial Sequence
  Description of Artificial Sequence: Synthetic oligonucleotide
  Target: ATXN2; (+) strand; PAM type: NRG; PAM sequence: AAG
taatgcaaatatttccaaac

SEQ ID NO: 51444 - DNA, 20 bp, Artificial Sequence
  Description of Artificial Sequence: Synthetic oligonucleotide
  Target: ATXN2; (+) strand; PAM type: NRG; PAM sequence: CAG
gcaaatatttccaaacaagt

SEQ ID NO: 51445 - DNA, 20 bp, Artificial Sequence
  Description of Artificial Sequence: Synthetic oligonucleotide
  Target: ATXN2; (+) strand; PAM type: NRG; PAM sequence: GAG
tttatttatttatttatttt

SEQ ID NO: 51446 - DNA, 20 bp, Artificial Sequence
  Description of Artificial Sequence: Synthetic oligonucleotide
  Target: ATXN2; (+) strand; PAM type: NRG; PAM sequence: CAG
tttatttatttattttgaga

SEQ ID NO: 51447 - DNA, 20 bp, Artificial Sequence
  Description of Artificial Sequence: Synthetic oligonucleotide
  Target: ATXN2; (+) strand; PAM type: NRG; PAM sequence: GAG
tatttatttattttgagaca

SEQ ID NO: 51448 - DNA, 20 bp, Artificial Sequence
  Description of Artificial Sequence: Synthetic oligonucleotide
  Target: ATXN2; (+) strand; PAM type: NRG; PAM sequence: CAG
cagagtctcgctctgttgcc

SEQ ID NO: 51449 - DNA, 20 bp, Artificial Sequence
  Description of Artificial Sequence: Synthetic oligonucleotide
  Target: ATXN2; (+) strand; PAM type: NRG; PAM sequence: AGG
agagtctcgctctgttgccc

SEQ ID NO: 51450 - DNA, 20 bp, Artificial Sequence
  Description of Artificial Sequence: Synthetic oligonucleotide
  Target: ATXN2; (+) strand; PAM type: NRG; PAM sequence: TGG
tctcgctctgttgcccaggc

SEQ ID NO: 51451 - DNA, 20 bp, Artificial Sequence
  Description of Artificial Sequence: Synthetic oligonucleotide
  Target: ATXN2; (+) strand; PAM type: NRG; PAM sequence: GAG
tcgctctgttgcccaggctg

SEQ ID NO: 51452 - DNA, 20 bp, Artificial Sequence
  Description of Artificial Sequence: Synthetic oligonucleotide
  Target: ATXN2; (+) strand; PAM type: NRG; PAM sequence: CAG
ctgttgcccaggctggagtg

SEQ ID NO: 51453 - DNA, 20 bp, Artificial Sequence
  Description of Artificial Sequence: Synthetic oligonucleotide
  Target: ATXN2; (+) strand; PAM type: NRG; PAM sequence: TGG
ttgcccaggctggagtgcag

SEQ ID NO: 51454 - DNA, 20 bp, Artificial Sequence
  Description of Artificial Sequence: Synthetic oligonucleotide
  Target: ATXN2; (+) strand; PAM type: NRG; PAM sequence: CGG
ggagtgcagtggcacgatct

SEQ ID NO: 51455 - DNA, 20 bp, Artificial Sequence
  Description of Artificial Sequence: Synthetic oligonucleotide
  Target: ATXN2; (+) strand; PAM type: NRG; PAM sequence: AAG
gcacgatctcggctcactgc

SEQ ID NO: 51456 - DNA, 20 bp, Artificial Sequence
  Description of Artificial Sequence: Synthetic oligonucleotide
  Target: ATXN2; (+) strand; PAM type: NRG; PAM sequence: CGG
tcactgcaagctccgcctcc

SEQ ID NO: 51457 - DNA, 20 bp, Artificial Sequence
  Description of Artificial Sequence: Synthetic oligonucleotide
  Target: ATXN2; (+) strand; PAM type: NRG; PAM sequence: GGG
cactgcaagctccgcctccc

SEQ ID NO: 51458 - DNA, 20 bp, Artificial Sequence
  Description of Artificial Sequence: Synthetic oligonucleotide
  Target: ATXN2; (+) strand; PAM type: NRG; PAM sequence: CAG
ttcacgccattctcctgcct

SEQ ID NO: 51459 - DNA, 20 bp, Artificial Sequence
  Description of Artificial Sequence: Synthetic oligonucleotide
  Target: ATXN2; (+) strand; PAM type: NRG; PAM sequence: GAG
ttctcctgcctcagcctccc

SEQ ID NO: 51460 - DNA, 20 bp, Artificial Sequence
  Description of Artificial Sequence: Synthetic oligonucleotide
  Target: ATXN2; (+) strand; PAM type: NRG; PAM sequence: TAG
tcctgcctcagcctcccgag

SEQ ID NO: 51461 - DNA, 20 bp, Artificial Sequence
  Description of Artificial Sequence: Synthetic oligonucleotide
  Target: ATXN2; (+) strand; PAM type: NRG; PAM sequence: TGG
gcctcagcctcccgagtagc

SEQ ID NO: 51462 - DNA, 20 bp, Artificial Sequence
  Description of Artificial Sequence: Synthetic oligonucleotide
  Target: ATXN2; (+) strand; PAM type: NRG; PAM sequence: GGG
cctcagcctcccgagtagct

SEQ ID NO: 51463 - DNA, 20 bp, Artificial Sequence
  Description of Artificial Sequence: Synthetic oligonucleotide
  Target: ATXN2; (+) strand; PAM type: NRG; PAM sequence: CAG
ctcccgagtagctgggatta

SEQ ID NO: 51464 - DNA, 20 bp, Artificial Sequence
  Description of Artificial Sequence: Synthetic oligonucleotide
  Target: ATXN2; (+) strand; PAM type: NRG; PAM sequence: AGG
tcccgagtagctgggattac

SEQ ID NO: 51465 - DNA, 20 bp, Artificial Sequence
  Description of Artificial Sequence: Synthetic oligonucleotide
  Target: ATXN2; (+) strand; PAM type: NRG; PAM sequence: CGG
caggcgcccgccaccacacc

SEQ ID NO: 51466 - DNA, 20 bp, Artificial Sequence
  Description of Artificial Sequence: Synthetic oligonucleotide
  Target: ATXN2; (+) strand; PAM type: NRG; PAM sequence: TAG
caccacacccggttaatttt

SEQ ID NO: 51467 - DNA, 20 bp, Artificial Sequence
  Description of Artificial Sequence: Synthetic oligonucleotide
  Target: ATXN2; (+) strand; PAM type: NRG; PAM sequence: TAG
cggttaatttttagtatttt

SEQ ID NO: 51468 - DNA, 20 bp, Artificial Sequence
  Description of Artificial Sequence: Synthetic oligonucleotide
  Target: ATXN2; (+) strand; PAM type: NRG; PAM sequence: TAG
ttaatttttagtatttttag

SEQ ID NO: 51469 - DNA, 20 bp, Artificial Sequence
  Description of Artificial Sequence: Synthetic oligonucleotide
  Target: ATXN2; (+) strand; PAM type: NRG; PAM sequence: GAG
aatttttagtatttttagta

SEQ ID NO: 51470 - DNA, 20 bp, Artificial Sequence
  Description of Artificial Sequence: Synthetic oligonucleotide
  Target: ATXN2; (+) strand; PAM type: NRG; PAM sequence: CGG
tttagtatttttagtagaga

SEQ ID NO: 51471 - DNA, 20 bp, Artificial Sequence
  Description of Artificial Sequence: Synthetic oligonucleotide
  Target: ATXN2; (+) strand; PAM type: NRG; PAM sequence: GGG
ttagtatttttagtagagac

SEQ ID NO: 51472 - DNA, 20 bp, Artificial Sequence
  Description of Artificial Sequence: Synthetic oligonucleotide
  Target: ATXN2; (+) strand; PAM type: NRG; PAM sequence: GGG
tagtatttttagtagagacg

SEQ ID NO: 51473 - DNA, 20 bp, Artificial Sequence
  Description of Artificial Sequence: Synthetic oligonucleotide
  Target: ATXN2; (+) strand; PAM type: NRG; PAM sequence: TAG
gagacggggtttcaccgtgt

SEQ ID NO: 51474 - DNA, 20 bp, Artificial Sequence
  Description of Artificial Sequence: Synthetic oligonucleotide
  Target: ATXN2; (+) strand; PAM type: NRG; PAM sequence: CAG
cggggtttcaccgtgttagc

SEQ ID NO: 51475 - DNA, 20 bp, Artificial Sequence
  Description of Artificial Sequence: Synthetic oligonucleotide
  Target: ATXN2; (+) strand; PAM type: NRG; PAM sequence: AGG
ggggtttcaccgtgttagcc

SEQ ID NO: 51476 - DNA, 20 bp, Artificial Sequence
  Description of Artificial Sequence: Synthetic oligonucleotide
  Target: ATXN2; (+) strand; PAM type: NRG; PAM sequence: TGG
tttcaccgtgttagccagga

SEQ ID NO: 51477 - DNA, 20 bp, Artificial Sequence
  Description of Artificial Sequence: Synthetic oligonucleotide
  Target: ATXN2; (+) strand; PAM type: NRG; PAM sequence: CGG
accttgtgatccacccgcct

SEQ ID NO: 51478 - DNA, 20 bp, Artificial Sequence
  Description of Artificial Sequence: Synthetic oligonucleotide
  Target: ATXN2; (+) strand; PAM type: NRG; PAM sequence: AAG
ccacccgcctcggcctccca

SEQ ID NO: 51479 - DNA, 20 bp, Artificial Sequence
  Description of Artificial Sequence: Synthetic oligonucleotide
  Target: ATXN2; (+) strand; PAM type: NRG; PAM sequence: TGG
gcctcggcctcccaaagtgc

SEQ ID NO: 51480 - DNA, 20 bp, Artificial Sequence
  Description of Artificial Sequence: Synthetic oligonucleotide
  Target: ATXN2; (+) strand; PAM type: NRG; PAM sequence: GGG
cctcggcctcccaaagtgct

SEQ ID NO: 51481 - DNA, 20 bp, Artificial Sequence
  Description of Artificial Sequence: Synthetic oligonucleotide
  Target: ATXN2; (+) strand; PAM type: NRG; PAM sequence: CAG
ctcccaaagtgctgggatta

SEQ ID NO: 51482 - DNA, 20 bp, Artificial Sequence
  Description of Artificial Sequence: Synthetic oligonucleotide
  Target: ATXN2; (+) strand; PAM type: NRG; PAM sequence: AGG
tcccaaagtgctgggattac

SEQ ID NO: 51483 - DNA, 20 bp, Artificial Sequence
  Description of Artificial Sequence: Synthetic oligonucleotide
  Target: ATXN2; (+) strand; PAM type: NRG; PAM sequence: GAG
agtgctgggattacaggcat

SEQ ID NO: 51484 - DNA, 20 bp, Artificial Sequence
  Description of Artificial Sequence: Synthetic oligonucleotide
  Target: ATXN2; (+) strand; PAM type: NRG; PAM sequence: CGG
ggattacaggcatgagccac

SEQ ID NO: 51485 - DNA, 20 bp, Artificial Sequence
  Description of Artificial Sequence: Synthetic oligonucleotide
  Target: ATXN2; (+) strand; PAM type: NRG; PAM sequence: GGG
gattacaggcatgagccacc

SEQ ID NO: 51486 - DNA, 20 bp, Artificial Sequence
  Description of Artificial Sequence: Synthetic oligonucleotide
  Target: ATXN2; (+) strand; PAM type: NRG; PAM sequence: CGG
caggcatgagccaccgggcc

SEQ ID NO: 51487 - DNA, 20 bp, Artificial Sequence
  Description of Artificial Sequence: Synthetic oligonucleotide
  Target: ATXN2; (+) strand; PAM type: NRG; PAM sequence: CAG
ccgcatgtttcaattaacaa

SEQ ID NO: 51488 - DNA, 20 bp, Artificial Sequence
  Description of Artificial Sequence: Synthetic oligonucleotide
  Target: ATXN2; (+) strand; PAM type: NRG; PAM sequence: CAG
acctatatacaatgatcaac

SEQ ID NO: 51489 - DNA, 20 bp, Artificial Sequence
  Description of Artificial Sequence: Synthetic oligonucleotide
  Target: ATXN2; (+) strand; PAM type: NRG; PAM sequence: AAG
atatacaatgatcaaccagt

SEQ ID NO: 51490 - DNA, 20 bp, Artificial Sequence
  Description of Artificial Sequence: Synthetic oligonucleotide
  Target: ATXN2; (+) strand; PAM type: NRG; PAM sequence: AAG
caatgatcaaccagtaagtt

SEQ ID NO: 51491 - DNA, 20 bp, Artificial Sequence
  Description of Artificial Sequence: Synthetic oligonucleotide
  Target: ATXN2; (+) strand; PAM type: NRG; PAM sequence: AGG
aatgatcaaccagtaagtta

SEQ ID NO: 51492 - DNA, 20 bp, Artificial Sequence
  Description of Artificial Sequence: Synthetic oligonucleotide
  Target: ATXN2; (+) strand; PAM type: NRG; PAM sequence: AAG
ttaaggtaaatttactctta

SEQ ID NO: 51493 - DNA, 20 bp, Artificial Sequence
  Description of Artificial Sequence: Synthetic oligonucleotide
  Target: ATXN2; (+) strand; PAM type: NRG; PAM sequence: AAG
ggtaaatttactcttaaaga

SEQ ID NO: 51494 - DNA, 20 bp, Artificial Sequence
  Description of Artificial Sequence: Synthetic oligonucleotide
  Target: ATXN2; (+) strand; PAM type: NRG; PAM sequence: CAG
taaagaaagatatttttgac

SEQ ID NO: 51495 - DNA, 20 bp, Artificial Sequence
  Description of Artificial Sequence: Synthetic oligonucleotide
  Target: ATXN2; (+) strand; PAM type: NRG; PAM sequence: AGG
aaagaaagatatttttgacc

SEQ ID NO: 51496 - DNA, 20 bp, Artificial Sequence
  Description of Artificial Sequence: Synthetic oligonucleotide
  Target: ATXN2; (+) strand; PAM type: NRG; PAM sequence: TGG
atatttttgaccaggcgtga

SEQ ID NO: 51497 - DNA, 20 bp, Artificial Sequence
  Description of Artificial Sequence: Synthetic oligonucleotide
  Target: ATXN2; (+) strand; PAM type: NRG; PAM sequence: CAG
atggctcacacctgtaatcc

SEQ ID NO: 51498 - DNA, 20 bp, Artificial Sequence
  Description of Artificial Sequence: Synthetic oligonucleotide
  Target: ATXN2; (+) strand; PAM type: NRG; PAM sequence: TGG
cacctgtaatcccagcactt

SEQ ID NO: 51499 - DNA, 20 bp, Artificial Sequence
  Description of Artificial Sequence: Synthetic oligonucleotide
  Target: ATXN2; (+) strand; PAM type: NRG; PAM sequence: GGG
acctgtaatcccagcacttt

SEQ ID NO: 51500 - DNA, 20 bp, Artificial Sequence
  Description of Artificial Sequence: Synthetic oligonucleotide
  Target: ATXN2; (+) strand; PAM type: NRG; PAM sequence: GAG
ctgtaatcccagcactttgg

SEQ ID NO: 51501 - DNA, 20 bp, Artificial Sequence
  Description of Artificial Sequence: Synthetic oligonucleotide
  Target: ATXN2; (+) strand; PAM type: NRG; PAM sequence: AGG
tgtaatcccagcactttggg

SEQ ID NO: 51502 - DNA, 20 bp, Artificial Sequence
  Description of Artificial Sequence: Synthetic oligonucleotide
  Target: ATXN2; (+) strand; PAM type: NRG; PAM sequence: AAG
tcccagcactttgggaggtc

SEQ ID NO: 51503 - DNA, 20 bp, Artificial Sequence
  Description of Artificial Sequence: Synthetic oligonucleotide
  Target: ATXN2; (+) strand; PAM type: NRG; PAM sequence: AGG
cccagcactttgggaggtca

SEQ ID NO: 51504 - DNA, 20 bp, Artificial Sequence
  Description of Artificial Sequence: Synthetic oligonucleotide
  Target: ATXN2; (+) strand; PAM type: NRG; PAM sequence: TGG
agcactttgggaggtcaagg

SEQ ID NO: 51505 - DNA, 20 bp, Artificial Sequence
  Description of Artificial Sequence: Synthetic oligonucleotide
  Target: ATXN2; (+) strand; PAM type: NRG; PAM sequence: GGG
gcactttgggaggtcaaggt

SEQ ID NO: 51506 - DNA, 20 bp, Artificial Sequence
  Description of Artificial Sequence: Synthetic oligonucleotide
  Target: ATXN2; (+) strand; PAM type: NRG; PAM sequence: CAG
ctttgggaggtcaaggtggg

SEQ ID NO: 51507 - DNA, 20 bp, Artificial Sequence
  Description of Artificial Sequence: Synthetic oligonucleotide
  Target: ATXN2; (+) strand; PAM type: NRG; PAM sequence: GAG
tcaaggtgggcagatcactt

SEQ ID NO: 51508 - DNA, 20 bp, Artificial Sequence
  Description of Artificial Sequence: Synthetic oligonucleotide
  Target: ATXN2; (+) strand; PAM type: NRG; PAM sequence: AGG
caaggtgggcagatcacttg

SEQ ID NO: 51509 - DNA, 20 bp, Artificial Sequence
  Description of Artificial Sequence: Synthetic oligonucleotide
  Target: ATXN2; (+) strand; PAM type: NRG; PAM sequence: CAG
gtgggcagatcacttgaggt

SEQ ID NO: 51510 - DNA, 20 bp, Artificial Sequence
  Description of Artificial Sequence: Synthetic oligonucleotide
  Target: ATXN2; (+) strand; PAM type: NRG; PAM sequence: GAG
gggcagatcacttgaggtca

SEQ ID NO: 51511 - DNA, 20 bp, Artificial Sequence
  Description of Artificial Sequence: Synthetic oligonucleotide
  Target: ATXN2; (+) strand; PAM type: NRG; PAM sequence: AGG
ggcagatcacttgaggtcag

SEQ ID NO: 51512 - DNA, 20 bp, Artificial Sequence
  Description of Artificial Sequence: Synthetic oligonucleotide
  Target: ATXN2; (+) strand; PAM type: NRG; PAM sequence: AAG
cacttgaggtcagaggttaa

SEQ ID NO: 51513 - DNA, 20 bp, Artificial Sequence
  Description of Artificial Sequence: Synthetic oligonucleotide
  Target: ATXN2; (+) strand; PAM type: NRG; PAM sequence: CAG
aaagtcttaactcctaacca

SEQ ID NO: 51514 - DNA, 20 bp, Artificial Sequence
  Description of Artificial Sequence: Synthetic oligonucleotide
  Target: ATXN2; (+) strand; PAM type: NRG; PAM sequence: CAG
cacagtgaactttctgtctg

SEQ ID NO: 51515 - DNA, 20 bp, Artificial Sequence
  Description of Artificial Sequence: Synthetic oligonucleotide
  Target: ATXN2; (+) strand; PAM type: NRG; PAM sequence: AAG
tgaactttctgtctgcagaa

SEQ ID NO: 51516 - DNA, 20 bp, Artificial Sequence
  Description of Artificial Sequence: Synthetic oligonucleotide
  Target: ATXN2; (+) strand; PAM type: NRG; PAM sequence: GAG
aactttctgtctgcagaaaa

SEQ ID NO: 51517 - DNA, 20 bp, Artificial Sequence
  Description of Artificial Sequence: Synthetic oligonucleotide
  Target: ATXN2; (+) strand; PAM type: NRG; PAM sequence: TGG
ctgtctgcagaaaagagcat

SEQ ID NO: 51518 - DNA, 20 bp, Artificial Sequence
  Description of Artificial Sequence: Synthetic oligonucleotide
  Target: ATXN2; (+) strand; PAM type: NRG; PAM sequence: CAG
cagaaaagagcattggtcaa

SEQ ID NO: 51519 - DNA, 20 bp, Artificial Sequence
  Description of Artificial Sequence: Synthetic oligonucleotide
  Target: ATXN2; (+) strand; PAM type: NRG; PAM sequence: CGG
ttggtcaacagttcacaaaa

SEQ ID NO: 51520 - DNA, 20 bp, Artificial Sequence
  Description of Artificial Sequence: Synthetic oligonucleotide
  Target: ATXN2; (+) strand; PAM type: NRG; PAM sequence: TAG
tcaacagttcacaaaacggc

SEQ ID NO: 51521 - DNA, 20 bp, Artificial Sequence
  Description of Artificial Sequence: Synthetic oligonucleotide
  Target: ATXN2; (+) strand; PAM type: NRG; PAM sequence: AGG
caacagttcacaaaacggct

SEQ ID NO: 51522 - DNA, 20 bp, Artificial Sequence
  Description of Artificial Sequence: Synthetic oligonucleotide
  Target: ATXN2; (+) strand; PAM type: NRG; PAM sequence: TGG
cacaaaacggctaggcatga

SEQ ID NO: 51523 - DNA, 20 bp, Artificial Sequence
  Description of Artificial Sequence: Synthetic oligonucleotide
  Target: ATXN2; (+) strand; PAM type: NRG; PAM sequence: CAG
ggcatgatggcgtgcaccca

SEQ ID NO: 51524 - DNA, 20 bp, Artificial Sequence
  Description of Artificial Sequence: Synthetic oligonucleotide
  Target: ATXN2; (+) strand; PAM type: NRG; PAM sequence: CAG
atggcgtgcacccacagtcc

SEQ ID NO: 51525 - DNA, 20 bp, Artificial Sequence
  Description of Artificial Sequence: Synthetic oligonucleotide
  Target: ATXN2; (+) strand; PAM type: NRG; PAM sequence: TGG
cacccacagtcccagctacg

SEQ ID NO: 51526 - DNA, 20 bp, Artificial Sequence
  Description of Artificial Sequence: Synthetic oligonucleotide
  Target: ATXN2; (+) strand; PAM type: NRG; PAM sequence: GGG
acccacagtcccagctacgt

SEQ ID NO: 51527 - DNA, 20 bp, Artificial Sequence
  Description of Artificial Sequence: Synthetic oligonucleotide
  Target: ATXN2; (+) strand; PAM type: NRG; PAM sequence: AAG
cacagtcccagctacgtggg

SEQ ID NO: 51528 - DNA, 20 bp, Artificial Sequence
  Description of Artificial Sequence: Synthetic oligonucleotide
  Target: ATXN2; (+) strand; PAM type: NRG; PAM sequence: GAG
tcccagctacgtgggaagct

SEQ ID NO: 51529 - DNA, 20 bp, Artificial Sequence
  Description of Artificial Sequence: Synthetic oligonucleotide
  Target: ATXN2; (+) strand; PAM type: NRG; PAM sequence: AGG
cccagctacgtgggaagctg

SEQ ID NO: 51530 - DNA, 20 bp, Artificial Sequence
  Description of Artificial Sequence: Synthetic oligonucleotide
  Target: ATXN2; (+) strand; PAM type: NRG; PAM sequence: TGG
agctacgtgggaagctgagg

SEQ ID NO: 51531 - DNA, 20 bp, Artificial Sequence
  Description of Artificial Sequence: Synthetic oligonucleotide
  Target: ATXN2; (+) strand; PAM type: NRG; PAM sequence: GGG
gctacgtgggaagctgaggt

SEQ ID NO: 51532 - DNA, 20 bp, Artificial Sequence
  Description of Artificial Sequence: Synthetic oligonucleotide
  Target: ATXN2; (+) strand; PAM type: NRG; PAM sequence: GAG
tacgtgggaagctgaggtgg

SEQ ID NO: 51533 - DNA, 20 bp, Artificial Sequence
  Description of Artificial Sequence: Synthetic oligonucleotide
  Target: ATXN2; (+) strand; PAM type: NRG; PAM sequence: AGG
acgtgggaagctgaggtggg

SEQ ID NO: 51534 - DNA, 20 bp, Artificial Sequence
  Description of Artificial Sequence: Synthetic oligonucleotide
  Target: ATXN2; (+) strand; PAM type: NRG; PAM sequence: TGG
agctgaggtgggaggattgc

SEQ ID NO: 51535 - DNA, 20 bp, Artificial Sequence
  Description of Artificial Sequence: Synthetic oligonucleotide
  Target: ATXN2; (+) strand; PAM type: NRG; PAM sequence: GAG
ctgaggtgggaggattgctg

SEQ ID NO: 51536 - DNA, 20 bp, Artificial Sequence
  Description of Artificial Sequence: Synthetic oligonucleotide
  Target: ATXN2; (+) strand; PAM type: NRG; PAM sequence: CAG
gtgggaggattgctggagcc

SEQ ID NO: 51537 - DNA, 20 bp, Artificial Sequence
  Description of Artificial Sequence: Synthetic oligonucleotide
  Target: ATXN2; (+) strand; PAM type: NRG; PAM sequence: AGG
tgggaggattgctggagccc

SEQ ID NO: 51538 - DNA, 20 bp, Artificial Sequence
  Description of Artificial Sequence: Synthetic oligonucleotide
  Target: ATXN2; (+) strand; PAM type: NRG; PAM sequence: GAG
ggaggattgctggagcccag

SEQ ID NO: 51539 - DNA, 20 bp, Artificial Sequence
  Description of Artificial Sequence: Synthetic oligonucleotide
  Target: ATXN2; (+) strand; PAM type: NRG; PAM sequence: TGG
agcccaggagttcaacgccc

SEQ ID NO: 51540 - DNA, 20 bp, Artificial Sequence
  Description of Artificial Sequence: Synthetic oligonucleotide
  Target: ATXN2; (+) strand; PAM type: NRG; PAM sequence: GGG
gcccaggagttcaacgccct

SEQ ID NO: 51541 - DNA, 20 bp, Artificial Sequence
  Description of Artificial Sequence: Synthetic oligonucleotide
  Target: ATXN2; (+) strand; PAM type: NRG; PAM sequence: CAG
gttcaacgccctgggcaata

SEQ ID NO: 51542 - DNA, 20 bp, Artificial Sequence
  Description of Artificial Sequence: Synthetic oligonucleotide
  Target: ATXN2; (+) strand; PAM type: NRG; PAM sequence: AAG
aacgccctgggcaatacagc

SEQ ID NO: 51543 - DNA, 20 bp, Artificial Sequence
  Description of Artificial Sequence: Synthetic oligonucleotide
  Target: ATXN2; (+) strand; PAM type: NRG; PAM sequence: TGG
atacagcaagacctcatctc

SEQ ID NO: 51544 - DNA, 20 bp, Artificial Sequence
  Description of Artificial Sequence: Synthetic oligonucleotide
  Target: ATXN2; (+) strand; PAM type: NRG; PAM sequence: CAG
agcaagacctcatctctggc

SEQ ID NO: 51545 - DNA, 20 bp, Artificial Sequence
  Description of Artificial Sequence: Synthetic oligonucleotide
  Target: ATXN2; (+) strand; PAM type: NRG; PAM sequence: AGG
gcaagacctcatctctggcc

SEQ ID NO: 51546 - DNA, 20 bp, Artificial Sequence
  Description of Artificial Sequence: Synthetic oligonucleotide
  Target: ATXN2; (+) strand; PAM type: NRG; PAM sequence: CGG
acctcatctctggccaggtg

SEQ ID NO: 51547 - DNA, 20 bp, Artificial Sequence
  Description of Artificial Sequence: Synthetic oligonucleotide
  Target: ATXN2; (+) strand; PAM type: NRG; PAM sequence: TGG
tcatctctggccaggtgcgg

SEQ ID NO: 51548 - DNA, 20 bp, Artificial Sequence
  Description of Artificial Sequence: Synthetic oligonucleotide
  Target: ATXN2; (+) strand; PAM type: NRG; PAM sequence: CAG
gtggctcacatctgtaatcc

SEQ ID NO: 51549 - DNA, 20 bp, Artificial Sequence
  Description of Artificial Sequence: Synthetic oligonucleotide
  Target: ATXN2; (+) strand; PAM type: NRG; PAM sequence: TGG
catctgtaatcccagcactt

SEQ ID NO: 51550 - DNA, 20 bp, Artificial Sequence
  Description of Artificial Sequence: Synthetic oligonucleotide
  Target: ATXN2; (+) strand; PAM type: NRG; PAM sequence: GGG
atctgtaatcccagcacttt

SEQ ID NO: 51551 - DNA, 20 bp, Artificial Sequence
  Description of Artificial Sequence: Synthetic oligonucleotide
  Target: ATXN2; (+) strand; PAM type: NRG; PAM sequence: GAG
ctgtaatcccagcactttgg

SEQ ID NO: 51552 - DNA, 20 bp, Artificial Sequence
  Description of Artificial Sequence: Synthetic oligonucleotide
  Target: ATXN2; (+) strand; PAM type: NRG; PAM sequence: AGG
tgtaatcccagcactttggg

SEQ ID NO: 51553 - DNA, 20 bp, Artificial Sequence
  Description of Artificial Sequence: Synthetic oligonucleotide
  Target: ATXN2; (+) strand; PAM type: NRG; PAM sequence: CGG
cccagcactttgggaggcca

SEQ ID NO: 51554 - DNA, 20 bp, Artificial Sequence
  Description of Artificial Sequence: Synthetic oligonucleotide
  Target: ATXN2; (+) strand; PAM type: NRG; PAM sequence: CGG
agcactttgggaggccacgg

SEQ ID NO: 51555 - DNA, 20 bp, Artificial Sequence
  Description of Artificial Sequence: Synthetic oligonucleotide
  Target: ATXN2; (+) strand; PAM type: NRG; PAM sequence: GGG
gcactttgggaggccacggc

SEQ ID NO: 51556 - DNA, 20 bp, Artificial Sequence
  Description of Artificial Sequence: Synthetic oligonucleotide
  Target: ATXN2; (+) strand; PAM type: NRG; PAM sequence: TGG
ctttgggaggccacggcggg

SEQ ID NO: 51557 - DNA, 20 bp, Artificial Sequence
  Description of Artificial Sequence: Synthetic oligonucleotide
  Target: ATXN2; (+) strand; PAM type: NRG; PAM sequence: GAG
ccacggcgggtggatcacct

SEQ ID NO: 51558 - DNA, 20 bp, Artificial Sequence
  Description of Artificial Sequence: Synthetic oligonucleotide
  Target: ATXN2; (+) strand; PAM type: NRG; PAM sequence: AGG
cacggcgggtggatcacctg

SEQ ID NO: 51559 - DNA, 20 bp, Artificial Sequence
  Description of Artificial Sequence: Synthetic oligonucleotide
  Target: ATXN2; (+) strand; PAM type: NRG; PAM sequence: CAG
gcgggtggatcacctgaggt

SEQ ID NO: 51560 - DNA, 20 bp, Artificial Sequence
  Description of Artificial Sequence: Synthetic oligonucleotide
  Target: ATXN2; (+) strand; PAM type: NRG; PAM sequence: AGG
cgggtggatcacctgaggtc

SEQ ID NO: 51561 - DNA, 20 bp, Artificial Sequence
  Description of Artificial Sequence: Synthetic oligonucleotide
  Target: ATXN2; (+) strand; PAM type: NRG; PAM sequence: GAG
ggtggatcacctgaggtcag

SEQ ID NO: 51562 - DNA, 20 bp, Artificial Sequence
  Description of Artificial Sequence: Synthetic oligonucleotide
  Target: ATXN2; (+) strand; PAM type: NRG; PAM sequence: GAG
tcacctgaggtcaggagttc

SEQ ID NO: 51563 - DNA, 20 bp, Artificial Sequence
  Description of Artificial Sequence: Synthetic oligonucleotide
  Target: ATXN2; (+) strand; PAM type: NRG; PAM sequence: CAG
tgaggtcaggagttcgagac

SEQ ID NO: 51564 - DNA, 20 bp, Artificial Sequence
  Description of Artificial Sequence: Synthetic oligonucleotide
  Target: ATXN2; (+) strand; PAM type: NRG; PAM sequence: TGG
tcaggagttcgagaccagcc

SEQ ID NO: 51565 - DNA, 20 bp, Artificial Sequence
  Description of Artificial Sequence: Synthetic oligonucleotide
  Target: ATXN2; (+) strand; PAM type: NRG; PAM sequence: TGG
cgagaccagcctggccaaca

SEQ ID NO: 51566 - DNA, 20 bp, Artificial Sequence
  Description of Artificial Sequence: Synthetic oligonucleotide
  Target: ATXN2; (+) strand; PAM type: NRG; PAM sequence: TAG
tctactaaaaatacaaaaat

SEQ ID NO: 51567 - DNA, 20 bp, Artificial Sequence
  Description of Artificial Sequence: Synthetic oligonucleotide
  Target: ATXN2; (+) strand; PAM type: NRG; PAM sequence: CAG
ctaaaaatacaaaaattagc

SEQ ID NO: 51568 - DNA, 20 bp, Artificial Sequence
  Description of Artificial Sequence: Synthetic oligonucleotide
  Target: ATXN2; (+) strand; PAM type: NRG; PAM sequence: AGG
taaaaatacaaaaattagcc

SEQ ID NO: 51569 - DNA, 20 bp, Artificial Sequence
  Description of Artificial Sequence: Synthetic oligonucleotide
  Target: ATXN2; (+) strand; PAM type: NRG; PAM sequence: TGG
atacaaaaattagccaggtg

SEQ ID NO: 51570 - DNA, 20 bp, Artificial Sequence
  Description of Artificial Sequence: Synthetic oligonucleotide
  Target: ATXN2; (+) strand; PAM type: NRG; PAM sequence: TGG
caaaaattagccaggtgtgg

SEQ ID NO: 51571 - DNA, 20 bp, Artificial Sequence
  Description of Artificial Sequence: Synthetic oligonucleotide
  Target: ATXN2; (+) strand; PAM type: NRG; PAM sequence: CAG
gtggcacgcacctgtaatcc

SEQ ID NO: 51572 - DNA, 20 bp, Artificial Sequence
  Description of Artificial Sequence: Synthetic oligonucleotide
  Target: ATXN2; (+) strand; PAM type: NRG; PAM sequence: CAG
cacctgtaatcccagctatt

SEQ ID NO: 51573 - DNA, 20 bp, Artificial Sequence
  Description of Artificial Sequence: Synthetic oligonucleotide
  Target: ATXN2; (+) strand; PAM type: NRG; PAM sequence: AGG
acctgtaatcccagctattc

SEQ ID NO: 51574 - DNA, 20 bp, Artificial Sequence
  Description of Artificial Sequence: Synthetic oligonucleotide
  Target: ATXN2; (+) strand; PAM type: NRG; PAM sequence: GAG
ctgtaatcccagctattcag

SEQ ID NO: 51575 - DNA, 20 bp, Artificial Sequence
  Description of Artificial Sequence: Synthetic oligonucleotide
  Target: ATXN2; (+) strand; PAM type: NRG; PAM sequence: AGG
tgtaatcccagctattcagg

SEQ ID NO: 51576 - DNA, 20 bp, Artificial Sequence
  Description of Artificial Sequence: Synthetic oligonucleotide
  Target: ATXN2; (+) strand; PAM type: NRG; PAM sequence: GAG
tcccagctattcaggaggtt

SEQ ID NO: 51577 - DNA, 20 bp, Artificial Sequence
  Description of Artificial Sequence: Synthetic oligonucleotide
  Target: ATXN2; (+) strand; PAM type: NRG; PAM sequence: AGG
cccagctattcaggaggttg

SEQ ID NO: 51578 - DNA, 20 bp, Artificial Sequence
  Description of Artificial Sequence: Synthetic oligonucleotide
  Target: ATXN2; (+) strand; PAM type: NRG; PAM sequence: CAG
agctattcaggaggttgagg

SEQ ID NO: 51579 - DNA, 20 bp, Artificial Sequence
  Description of Artificial Sequence: Synthetic oligonucleotide
  Target: ATXN2; (+) strand; PAM type: NRG; PAM sequence: AGG
gctattcaggaggttgaggc

SEQ ID NO: 51580 - DNA, 20 bp, Artificial Sequence
  Description of Artificial Sequence: Synthetic oligonucleotide
  Target: ATXN2; (+) strand; PAM type: NRG; PAM sequence: GAG
tattcaggaggttgaggcag

SEQ ID NO: 51581 - DNA, 20 bp, Artificial Sequence
  Description of Artificial Sequence: Synthetic oligonucleotide
  Target: ATXN2; (+) strand; PAM type: NRG; PAM sequence: CAG
gcaggagaatcgcttgaacc

SEQ ID NO: 51582 - DNA, 20 bp, Artificial Sequence
  Description of Artificial Sequence: Synthetic oligonucleotide
  Target: ATXN2; (+) strand; PAM type: NRG; PAM sequence: AAG
ggagaatcgcttgaacccag

SEQ ID NO: 51583 - DNA, 20 bp, Artificial Sequence
  Description of Artificial Sequence: Synthetic oligonucleotide
  Target: ATXN2; (+) strand; PAM type: NRG; PAM sequence: AGG
gagaatcgcttgaacccaga

SEQ ID NO: 51584 - DNA, 20 bp, Artificial Sequence
  Description of Artificial Sequence: Synthetic oligonucleotide
  Target: ATXN2; (+) strand; PAM type: NRG; PAM sequence: CAG
aatcgcttgaacccagaagg

SEQ ID NO: 51585 - DNA, 20 bp, Artificial Sequence
  Description of Artificial Sequence: Synthetic oligonucleotide
  Target: ATXN2; (+) strand; PAM type: NRG; PAM sequence: GAG
tcgcttgaacccagaaggca

SEQ ID NO: 51586 - DNA, 20 bp, Artificial Sequence
  Description of Artificial Sequence: Synthetic oligonucleotide
  Target: ATXN2; (+) strand; PAM type: NRG; PAM sequence: CAG
aacccagaaggcagagactg

SEQ ID NO: 51587 - DNA, 20 bp, Artificial Sequence
  Description of Artificial Sequence: Synthetic oligonucleotide
  Target: ATXN2; (+) strand; PAM type: NRG; PAM sequence: GAG
cagaaggcagagactgcagt

SEQ ID NO: 51588 - DNA, 20 bp, Artificial Sequence
  Description of Artificial Sequence: Synthetic oligonucleotide
  Target: ATXN2; (+) strand; PAM type: NRG; PAM sequence: CAG
aacatcacgccactacactc

SEQ ID NO: 51589 - DNA, 20 bp, Artificial Sequence
  Description of Artificial Sequence: Synthetic oligonucleotide
  Target: ATXN2; (+) strand; PAM type: NRG; PAM sequence: TGG
cacgccactacactccagcc

SEQ ID NO: 51590 - DNA, 20 bp, Artificial Sequence
  Description of Artificial Sequence: Synthetic oligonucleotide
  Target: ATXN2; (+) strand; PAM type: NRG; PAM sequence: GGG
acgccactacactccagcct

SEQ ID NO: 51591 - DNA, 20 bp, Artificial Sequence
  Description of Artificial Sequence: Synthetic oligonucleotide
  Target: ATXN2; (+) strand; PAM type: NRG; PAM sequence: TAG
ctacactccagcctgggcga

SEQ ID NO: 51592 - DNA, 20 bp, Artificial Sequence
  Description of Artificial Sequence: Synthetic oligonucleotide
  Target: ATXN2; (+) strand; PAM type: NRG; PAM sequence: GAG
acactccagcctgggcgata

SEQ ID NO: 51593 - DNA, 20 bp, Artificial Sequence
  Description of Artificial Sequence: Synthetic oligonucleotide
  Target: ATXN2; (+) strand; PAM type: NRG; PAM sequence: GAG
tccagcctgggcgatagagc

SEQ ID NO: 51594 - DNA, 20 bp, Artificial Sequence
  Description of Artificial Sequence: Synthetic oligonucleotide
  Target: ATXN2; (+) strand; PAM type: NRG; PAM sequence: AAG
tccatctcaaaaaacaaaat

SEQ ID NO: 51595 - DNA, 20 bp, Artificial Sequence
  Description of Artificial Sequence: Synthetic oligonucleotide
  Target: ATXN2; (+) strand; PAM type: NRG; PAM sequence: AAG
tctcaaaaaacaaaataaga

SEQ ID NO: 51596 - DNA, 20 bp, Artificial Sequence
  Description of Artificial Sequence: Synthetic oligonucleotide
  Target: ATXN2; (+) strand; PAM type: NRG; PAM sequence: TAG
aagaaagatatttatcaatt

SEQ ID NO: 51597 - DNA, 20 bp, Artificial Sequence
  Description of Artificial Sequence: Synthetic oligonucleotide
  Target: ATXN2; (+) strand; PAM type: NRG; PAM sequence: CAG
tttagtgtatcctaactgtt

SEQ ID NO: 51598 - DNA, 20 bp, Artificial Sequence
  Description of Artificial Sequence: Synthetic oligonucleotide
  Target: ATXN2; (+) strand; PAM type: NRG; PAM sequence: CAG
aactgttcagtgtttgtcta

SEQ ID NO: 51599 - DNA, 20 bp, Artificial Sequence
  Description of Artificial Sequence: Synthetic oligonucleotide
  Target: ATXN2; (+) strand; PAM type: NRG; PAM sequence: TAG
tgttcagtgtttgtctacag

SEQ ID NO: 51600 - DNA, 20 bp, Artificial Sequence
  Description of Artificial Sequence: Synthetic oligonucleotide
  Target: ATXN2; (+) strand; PAM type: NRG; PAM sequence: CAG
tgtttgtctacagtagcata

SEQ ID NO: 51601 - DNA, 20 bp, Artificial Sequence
  Description of Artificial Sequence: Synthetic oligonucleotide
  Target: ATXN2; (+) strand; PAM type: NRG; PAM sequence: TAG
agtagcatacagtaatgtcc

SEQ ID NO: 51602 - DNA, 20 bp, Artificial Sequence
  Description of Artificial Sequence: Synthetic oligonucleotide
  Target: ATXN2; (+) strand; PAM type: NRG; PAM sequence: AGG
gtagcatacagtaatgtcct

SEQ ID NO: 51603 - DNA, 20 bp, Artificial Sequence
  Description of Artificial Sequence: Synthetic oligonucleotide
  Target: ATXN2; (+) strand; PAM type: NRG; PAM sequence: AAG
actgataaatgactcatccc

SEQ ID NO: 51604 - DNA, 20 bp, Artificial Sequence
  Description of Artificial Sequence: Synthetic oligonucleotide
  Target: ATXN2; (+) strand; PAM type: NRG; PAM sequence: AAG
caagcaacttcctgtcctgc

SEQ ID NO: 51605 - DNA, 20 bp, Artificial Sequence
  Description of Artificial Sequence: Synthetic oligonucleotide
  Target: ATXN2; (+) strand; PAM type: NRG; PAM sequence: TGG
tgtcctgcaagctccattca

SEQ ID NO: 51606 - DNA, 20 bp, Artificial Sequence
  Description of Artificial Sequence: Synthetic oligonucleotide
  Target: ATXN2; (+) strand; PAM type: NRG; PAM sequence: AAG
ctgcaagctccattcatggt

SEQ ID NO: 51607 - DNA, 20 bp, Artificial Sequence
  Description of Artificial Sequence: Synthetic oligonucleotide
  Target: ATXN2; (+) strand; PAM type: NRG; PAM sequence: CAG
ttcatggtaagtgacctatt

SEQ ID NO: 51608 - DNA, 20 bp, Artificial Sequence
  Description of Artificial Sequence: Synthetic oligonucleotide
  Target: ATXN2; (+) strand; PAM type: NRG; PAM sequence: TAG
ttactcaccttttctatgtt

SEQ ID NO: 51609 - DNA, 20 bp, Artificial Sequence
  Description of Artificial Sequence: Synthetic oligonucleotide
  Target: ATXN2; (+) strand; PAM type: NRG; PAM sequence: TAG
tttctatgtttagatatgtt

SEQ ID NO: 51610 - DNA, 20 bp, Artificial Sequence
  Description of Artificial Sequence: Synthetic oligonucleotide
  Target: ATXN2; (+) strand; PAM type: NRG; PAM sequence: CAG
cattatgttacatctgccaa

SEQ ID NO: 51611 - DNA, 20 bp, Artificial Sequence
  Description of Artificial Sequence: Synthetic oligonucleotide
  Target: ATXN2; (+) strand; PAM type: NRG; PAM sequence: CAG
ttacatctgccaacagtgtt

SEQ ID NO: 51612 - DNA, 20 bp, Artificial Sequence
  Description of Artificial Sequence: Synthetic oligonucleotide
  Target: ATXN2; (+) strand; PAM type: NRG; PAM sequence: CAG
cagtaccgcaacatgctata

SEQ ID NO: 51613 - DNA, 20 bp, Artificial Sequence
  Description of Artificial Sequence: Synthetic oligonucleotide
  Target: ATXN2; (+) strand; PAM type: NRG; PAM sequence: TAG
caacatgctatacagatttg

SEQ ID NO: 51614 - DNA, 20 bp, Artificial Sequence
  Description of Artificial Sequence: Synthetic oligonucleotide
  Target: ATXN2; (+) strand; PAM type: NRG; PAM sequence: AAG
gctatacagatttgtagcct

SEQ ID NO: 51615 - DNA, 20 bp, Artificial Sequence
  Description of Artificial Sequence: Synthetic oligonucleotide
  Target: ATXN2; (+) strand; PAM type: NRG; PAM sequence: GAG
tatacagatttgtagcctaa

SEQ ID NO: 51616 - DNA, 20 bp, Artificial Sequence
  Description of Artificial Sequence: Synthetic oligonucleotide
  Target: ATXN2; (+) strand; PAM type: NRG; PAM sequence: CAG
aagagtaatactctgtacga

SEQ ID NO: 51617 - DNA, 20 bp, Artificial Sequence
  Description of Artificial Sequence: Synthetic oligonucleotide
  Target: ATXN2; (+) strand; PAM type: NRG; PAM sequence: TAG
tgtacgacagcctatgtgtc

SEQ ID NO: 51618 - DNA, 20 bp, Artificial Sequence
  Description of Artificial Sequence: Synthetic oligonucleotide
  Target: ATXN2; (+) strand; PAM type: NRG; PAM sequence: TAG
acgacagcctatgtgtctag

SEQ ID NO: 51619 - DNA, 20 bp, Artificial Sequence
  Description of Artificial Sequence: Synthetic oligonucleotide
  Target: ATXN2; (+) strand; PAM type: NRG; PAM sequence: AGG
cgacagcctatgtgtctagt

SEQ ID NO: 51620 - DNA, 20 bp, Artificial Sequence
  Description of Artificial Sequence: Synthetic oligonucleotide
  Target: ATXN2; (+) strand; PAM type: NRG; PAM sequence: TAG
tgtctagtaggtataccatc

SEQ ID NO: 51621 - DNA, 20 bp, Artificial Sequence
  Description of Artificial Sequence: Synthetic oligonucleotide
  Target: ATXN2; (+) strand; PAM type: NRG; PAM sequence: AGG
gtctagtaggtataccatct

SEQ ID NO: 51622 - DNA, 20 bp, Artificial Sequence
  Description of Artificial Sequence: Synthetic oligonucleotide
  Target: ATXN2; (+) strand; PAM type: NRG; PAM sequence: AAG
tataccatctaggcttgtgt

SEQ ID NO: 51623 - DNA, 20 bp, Artificial Sequence
  Description of Artificial Sequence: Synthetic oligonucleotide
  Target: ATXN2; (+) strand; PAM type: NRG; PAM sequence: AAG
ctctatatttgtacaatgat

SEQ ID NO: 51624 - DNA, 20 bp, Artificial Sequence
  Description of Artificial Sequence: Synthetic oligonucleotide
  Target: ATXN2; (+) strand; PAM type: NRG; PAM sequence: AAG
caaaacacatccccatcatt

SEQ ID NO: 51625 - DNA, 20 bp, Artificial Sequence
  Description of Artificial Sequence: Synthetic oligonucleotide
  Target: ATXN2; (+) strand; PAM type: NRG; PAM sequence: TAG
cattaagcaatgcataaaca

SEQ ID NO: 51626 - DNA, 20 bp, Artificial Sequence
  Description of Artificial Sequence: Synthetic oligonucleotide
  Target: ATXN2; (+) strand; PAM type: NRG; PAM sequence: AAG
aacatagtttctcatcacca

SEQ ID NO: 51627 - DNA, 20 bp, Artificial Sequence
  Description of Artificial Sequence: Synthetic oligonucleotide
  Target: ATXN2; (+) strand; PAM type: NRG; PAM sequence: TGG
tagtttctcatcaccaaaga

SEQ ID NO: 51628 - DNA, 20 bp, Artificial Sequence
  Description of Artificial Sequence: Synthetic oligonucleotide
  Target: ATXN2; (+) strand; PAM type: NRG; PAM sequence: TGG
gaaaaaatgctcaatatcac

SEQ ID NO: 51629 - DNA, 20 bp, Artificial Sequence
  Description of Artificial Sequence: Synthetic oligonucleotide
  Target: ATXN2; (+) strand; PAM type: NRG; PAM sequence: GGG
aaaaaatgctcaatatcact

SEQ ID NO: 51630 - DNA, 20 bp, Artificial Sequence
  Description of Artificial Sequence: Synthetic oligonucleotide
  Target: ATXN2; (+) strand; PAM type: NRG; PAM sequence: TAG
tgctcaatatcactgggcat

SEQ ID NO: 51631 - DNA, 20 bp, Artificial Sequence
  Description of Artificial Sequence: Synthetic oligonucleotide
  Target: ATXN2; (+) strand; PAM type: NRG; PAM sequence: AGG
gctcaatatcactgggcatt

SEQ ID NO: 51632 - DNA, 20 bp, Artificial Sequence
  Description of Artificial Sequence: Synthetic oligonucleotide
  Target: ATXN2; (+) strand; PAM type: NRG; PAM sequence: GGG
ctcaatatcactgggcatta

SEQ ID NO: 51633 - DNA, 20 bp, Artificial Sequence
  Description of Artificial Sequence: Synthetic oligonucleotide
  Target: ATXN2; (+) strand; PAM type: NRG; PAM sequence: GAG
atgcaaattaaaaccacaat

SEQ ID NO: 51634 - DNA, 20 bp, Artificial Sequence
  Description of Artificial Sequence: Synthetic oligonucleotide
  Target: ATXN2; (+) strand; PAM type: NRG; PAM sequence: AGG
tgcaaattaaaaccacaatg

SEQ ID NO: 51635 - DNA, 20 bp, Artificial Sequence
  Description of Artificial Sequence: Synthetic oligonucleotide
  Target: ATXN2; (+) strand; PAM type: NRG; PAM sequence: CAG
aattaaaaccacaatgaggc

SEQ ID NO: 51636 - DNA, 20 bp, Artificial Sequence
  Description of Artificial Sequence: Synthetic oligonucleotide
  Target: ATXN2; (+) strand; PAM type: NRG; PAM sequence: AGG
attaaaaccacaatgaggcc

SEQ ID NO: 51637 - DNA, 20 bp, Artificial Sequence
  Description of Artificial Sequence: Synthetic oligonucleotide
  Target: ATXN2; (+) strand; PAM type: NRG; PAM sequence: CAG
aaccacaatgaggccaggca

SEQ ID NO: 51638 - DNA, 20 bp, Artificial Sequence
  Description of Artificial Sequence: Synthetic oligonucleotide
  Target: ATXN2; (+) strand; PAM type: NRG; PAM sequence: AGG
accacaatgaggccaggcac

SEQ ID NO: 51639 - DNA, 20 bp, Artificial Sequence
  Description of Artificial Sequence: Synthetic oligonucleotide
  Target: ATXN2; (+) strand; PAM type: NRG; PAM sequence: GGG
ccacaatgaggccaggcaca

SEQ ID NO: 51640 - DNA, 20 bp, Artificial Sequence
  Description of Artificial Sequence: Synthetic oligonucleotide
  Target: ATXN2; (+) strand; PAM type: NRG; PAM sequence: GGG
cacaatgaggccaggcacag

SEQ ID NO: 51641 - DNA, 20 bp, Artificial Sequence
  Description of Artificial Sequence: Synthetic oligonucleotide
  Target: ATXN2; (+) strand; PAM type: NRG; PAM sequence: CAG
ggggctcatatctataatcc

SEQ ID NO: 51642 - DNA, 20 bp, Artificial Sequence
  Description of Artificial Sequence: Synthetic oligonucleotide
  Target: ATXN2; (+) strand; PAM type: NRG; PAM sequence: TGG
tatctataatcccagcactt

SEQ ID NO: 51643 - DNA, 20 bp, Artificial Sequence
  Description of Artificial Sequence: Synthetic oligonucleotide
  Target: ATXN2; (+) strand; PAM type: NRG; PAM sequence: GGG
atctataatcccagcacttt

SEQ ID NO: 51644 - DNA, 20 bp, Artificial Sequence
  Description of Artificial Sequence: Synthetic oligonucleotide
  Target: ATXN2; (+) strand; PAM type: NRG; PAM sequence: GAG
ctataatcccagcactttgg

SEQ ID NO: 51645 - DNA, 20 bp, Artificial Sequence
  Description of Artificial Sequence: Synthetic oligonucleotide
  Target: ATXN2; (+) strand; PAM type: NRG; PAM sequence: AGG
tataatcccagcactttggg

SEQ ID NO: 51646 - DNA, 20 bp, Artificial Sequence
  Description of Artificial Sequence: Synthetic oligonucleotide
  Target: ATXN2; (+) strand; PAM type: NRG; PAM sequence: GAG
tcccagcactttgggaggct

SEQ ID NO: 51647 - DNA, 20 bp, Artificial Sequence
  Description of Artificial Sequence: Synthetic oligonucleotide
  Target: ATXN2; (+) strand; PAM type: NRG; PAM sequence: AGG
cccagcactttgggaggctg

SEQ ID NO: 51648 - DNA, 20 bp, Artificial Sequence
  Description of Artificial Sequence: Synthetic oligonucleotide
  Target: ATXN2; (+) strand; PAM type: NRG; PAM sequence: TAG
agcactttgggaggctgagg

SEQ ID NO: 51649 - DNA, 20 bp, Artificial Sequence
  Description of Artificial Sequence: Synthetic oligonucleotide
  Target: ATXN2; (+) strand; PAM type: NRG; PAM sequence: GAG
ctgaggtagatgaatcactt

SEQ ID NO: 51650 - DNA, 20 bp, Artificial Sequence
  Description of Artificial Sequence: Synthetic oligonucleotide
  Target: ATXN2; (+) strand; PAM type: NRG; PAM sequence: CAG
gtagatgaatcacttgagcc

SEQ ID NO: 51651 - DNA, 20 bp, Artificial Sequence
  Description of Artificial Sequence: Synthetic oligonucleotide
  Target: ATXN2; (+) strand; PAM type: NRG; PAM sequence: AGG
tagatgaatcacttgagccc

SEQ ID NO: 51652 - DNA, 20 bp, Artificial Sequence
  Description of Artificial Sequence: Synthetic oligonucleotide
  Target: ATXN2; (+) strand; PAM type: NRG; PAM sequence: GAG
gatgaatcacttgagcccag

SEQ ID NO: 51653 - DNA, 20 bp, Artificial Sequence
  Description of Artificial Sequence: Synthetic oligonucleotide
  Target: ATXN2; (+) strand; PAM type: NRG; PAM sequence: CAG
cccaggagttcaacaccacc

SEQ ID NO: 51654 - DNA, 20 bp, Artificial Sequence
  Description of Artificial Sequence: Synthetic oligonucleotide
  Target: ATXN2; (+) strand; PAM type: NRG; PAM sequence: AGG
ccaggagttcaacaccaccc

SEQ ID NO: 51655 - DNA, 20 bp, Artificial Sequence
  Description of Artificial Sequence: Synthetic oligonucleotide
  Target: ATXN2; (+) strand; PAM type: NRG; PAM sequence: GGG
caggagttcaacaccaccca

SEQ ID NO: 51656 - DNA, 20 bp, Artificial Sequence
  Description of Artificial Sequence: Synthetic oligonucleotide
  Target: ATXN2; (+) strand; PAM type: NRG; PAM sequence: TAG
caacaccacccagggcaaca

SEQ ID NO: 51657 - DNA, 20 bp, Artificial Sequence
  Description of Artificial Sequence: Synthetic oligonucleotide
  Target: ATXN2; (+) strand; PAM type: NRG; PAM sequence: GAG
accacccagggcaacatagt

SEQ ID NO: 51658 - DNA, 20 bp, Artificial Sequence
  Description of Artificial Sequence: Synthetic oligonucleotide
  Target: ATXN2; (+) strand; PAM type: NRG; PAM sequence: AAG
ctcttctctactaaaaatca

SEQ ID NO: 51659 - DNA, 20 bp, Artificial Sequence
  Description of Artificial Sequence: Synthetic oligonucleotide
  Target: ATXN2; (+) strand; PAM type: NRG; PAM sequence: CAG
taaaaatcaaagcaaactac

SEQ ID NO: 51660 - DNA, 20 bp, Artificial Sequence
  Description of Artificial Sequence: Synthetic oligonucleotide
  Target: ATXN2; (+) strand; PAM type: NRG; PAM sequence: AGG
aaaaatcaaagcaaactacc

SEQ ID NO: 51661 - DNA, 20 bp, Artificial Sequence
  Description of Artificial Sequence: Synthetic oligonucleotide
  Target: ATXN2; (+) strand; PAM type: NRG; PAM sequence: TGG
tcaaagcaaactaccaggtg

SEQ ID NO: 51662 - DNA, 20 bp, Artificial Sequence
  Description of Artificial Sequence: Synthetic oligonucleotide
  Target: ATXN2; (+) strand; PAM type: NRG; PAM sequence: TGG
aagcaaactaccaggtgtgg

SEQ ID NO: 51663 - DNA, 20 bp, Artificial Sequence
  Description of Artificial Sequence: Synthetic oligonucleotide
  Target: ATXN2; (+) strand; PAM type: NRG; PAM sequence: TGG
ggtgtggtggtacatgcctg

SEQ ID NO: 51664 - DNA, 20 bp, Artificial Sequence
  Description of Artificial Sequence: Synthetic oligonucleotide
  Target: ATXN2; (+) strand; PAM type: NRG; PAM sequence: CAG
gtggtacatgcctgtggtcc

SEQ ID NO: 51665 - DNA, 20 bp, Artificial Sequence
  Description of Artificial Sequence: Synthetic oligonucleotide
  Target: ATXN2; (+) strand; PAM type: NRG; PAM sequence: CAG
tacatgcctgtggtcccagc

SEQ ID NO: 51666 - DNA, 20 bp, Artificial Sequence
  Description of Artificial Sequence: Synthetic oligonucleotide
  Target: ATXN2; (+) strand; PAM type: NRG; PAM sequence: AGG
acatgcctgtggtcccagcc

SEQ ID NO: 51667 - DNA, 20 bp, Artificial Sequence
  Description of Artificial Sequence: Synthetic oligonucleotide
  Target: ATXN2; (+) strand; PAM type: NRG; PAM sequence: GAG
atgcctgtggtcccagccag

SEQ ID NO: 51668 - DNA, 20 bp, Artificial Sequence
  Description of Artificial Sequence: Synthetic oligonucleotide
  Target: ATXN2; (+) strand; PAM type: NRG; PAM sequence: AGG
tgcctgtggtcccagccagg

SEQ ID NO: 51669 - DNA, 20 bp, Artificial Sequence
  Description of Artificial Sequence: Synthetic oligonucleotide
  Target: ATXN2; (+) strand; PAM type: NRG; PAM sequence: GAG
gtggtcccagccaggaggct

SEQ ID NO: 51670 - DNA, 20 bp, Artificial Sequence
  Description of Artificial Sequence: Synthetic oligonucleotide
  Target: ATXN2; (+) strand; PAM type: NRG; PAM sequence: AGG
tggtcccagccaggaggctg

SEQ ID NO: 51671 - DNA, 20 bp, Artificial Sequence
  Description of Artificial Sequence: Synthetic oligonucleotide
  Target: ATXN2; (+) strand; PAM type: NRG; PAM sequence: CAG
tcccagccaggaggctgagg

SEQ ID NO: 51672 - DNA, 20 bp, Artificial Sequence
  Description of Artificial Sequence: Synthetic oligonucleotide
  Target: ATXN2; (+) strand; PAM type: NRG; PAM sequence: AGG
cccagccaggaggctgaggc

SEQ ID NO: 51673 - DNA, 20 bp, Artificial Sequence
  Description of Artificial Sequence: Synthetic oligonucleotide
  Target: ATXN2; (+) strand; PAM type: NRG; PAM sequence: GAG
cagccaggaggctgaggcag

SEQ ID NO: 51674 - DNA, 20 bp, Artificial Sequence
  Description of Artificial Sequence: Synthetic oligonucleotide
  Target: ATXN2; (+) strand; PAM type: NRG; PAM sequence: AGG
agccaggaggctgaggcagg

SEQ ID NO: 51675 - DNA, 20 bp, Artificial Sequence
  Description of Artificial Sequence: Synthetic oligonucleotide
  Target: ATXN2; (+) strand; PAM type: NRG; PAM sequence: GAG
ctgaggcaggaggatcactt

SEQ ID NO: 51676 - DNA, 20 bp, Artificial Sequence
  Description of Artificial Sequence: Synthetic oligonucleotide
  Target: ATXN2; (+) strand; PAM type: NRG; PAM sequence: CAG
gcaggaggatcacttgagcc

SEQ ID NO: 51677 - DNA, 20 bp, Artificial Sequence
  Description of Artificial Sequence: Synthetic oligonucleotide
  Target: ATXN2; (+) strand; PAM type: NRG; PAM sequence: AGG
caggaggatcacttgagccc

SEQ ID NO: 51678 - DNA, 20 bp, Artificial Sequence
  Description of Artificial Sequence: Synthetic oligonucleotide
  Target: ATXN2; (+) strand; PAM type: NRG; PAM sequence: GAG
ggaggatcacttgagcccag

SEQ ID NO: 51679 - DNA, 20 bp, Artificial Sequence
  Description of Artificial Sequence: Synthetic oligonucleotide
  Target: ATXN2; (+) strand; PAM type: NRG; PAM sequence: AGG
gaggatcacttgagcccagg

SEQ ID NO: 51680 - DNA, 20 bp, Artificial Sequence
  Description of Artificial Sequence: Synthetic oligonucleotide
  Target: ATXN2; (+) strand; PAM type: NRG; PAM sequence: CAG
agcccaggaggtcaatgttg

SEQ ID NO: 51681 - DNA, 20 bp, Artificial Sequence
  Description of Artificial Sequence: Synthetic oligonucleotide
  Target: ATXN2; (+) strand; PAM type: NRG; PAM sequence: CAG
caggaggtcaatgttgcagt

SEQ ID NO: 51682 - DNA, 20 bp, Artificial Sequence
  Description of Artificial Sequence: Synthetic oligonucleotide
  Target: ATXN2; (+) strand; PAM type: NRG; PAM sequence: TGG
cgcaccactgcactccaccc

SEQ ID NO: 51683 - DNA, 20 bp, Artificial Sequence
  Description of Artificial Sequence: Synthetic oligonucleotide
  Target: ATXN2; (+) strand; PAM type: NRG; PAM sequence: GGG
gcaccactgcactccaccct

SEQ ID NO: 51684 - DNA, 20 bp, Artificial Sequence
  Description of Artificial Sequence: Synthetic oligonucleotide
  Target: ATXN2; (+) strand; PAM type: NRG; PAM sequence: CAG
ctgcactccaccctgggtga

SEQ ID NO: 51685 - DNA, 20 bp, Artificial Sequence
  Description of Artificial Sequence: Synthetic oligonucleotide
  Target: ATXN2; (+) strand; PAM type: NRG; PAM sequence: GAG
gcactccaccctgggtgaca

SEQ ID NO: 51686 - DNA, 20 bp, Artificial Sequence
  Description of Artificial Sequence: Synthetic oligonucleotide
  Target: ATXN2; (+) strand; PAM type: NRG; PAM sequence: AAG
tccaccctgggtgacagagc

SEQ ID NO: 51687 - DNA, 20 bp, Artificial Sequence
  Description of Artificial Sequence: Synthetic oligonucleotide
  Target: ATXN2; (+) strand; PAM type: NRG; PAM sequence: TAG
aaaaaaaattcatacactgc

SEQ ID NO: 51688 - DNA, 20 bp, Artificial Sequence
  Description of Artificial Sequence: Synthetic oligonucleotide
  Target: ATXN2; (+) strand; PAM type: NRG; PAM sequence: AGG
aaaaaaattcatacactgct

SEQ ID NO: 51689 - DNA, 20 bp, Artificial Sequence
  Description of Artificial Sequence: Synthetic oligonucleotide
  Target: ATXN2; (+) strand; PAM type: NRG; PAM sequence: GGG
aaaaaattcatacactgcta

SEQ ID NO: 51690 - DNA, 20 bp, Artificial Sequence
  Description of Artificial Sequence: Synthetic oligonucleotide
  Target: ATXN2; (+) strand; PAM type: NRG; PAM sequence: AAG
aattcatacactgctaggga

SEQ ID NO: 51691 - DNA, 20 bp, Artificial Sequence
  Description of Artificial Sequence: Synthetic oligonucleotide
  Target: ATXN2; (+) strand; PAM type: NRG; PAM sequence: TAG
actgctagggaaagaaaata

SEQ ID NO: 51692 - DNA, 20 bp, Artificial Sequence
  Description of Artificial Sequence: Synthetic oligonucleotide
  Target: ATXN2; (+) strand; PAM type: NRG; PAM sequence: CAG
gctagggaaagaaaatatag

SEQ ID NO: 51693 - DNA, 20 bp, Artificial Sequence
  Description of Artificial Sequence: Synthetic oligonucleotide
  Target: ATXN2; (+) strand; PAM type: NRG; PAM sequence: TAG
agaaaatatagcagtcactt

SEQ ID NO: 51694 - DNA, 20 bp, Artificial Sequence
  Description of Artificial Sequence: Synthetic oligonucleotide
  Target: ATXN2; (+) strand; PAM type: NRG; PAM sequence: CAG
atagcagtcactttagcaaa

SEQ ID NO: 51695 - DNA, 20 bp, Artificial Sequence
  Description of Artificial Sequence: Synthetic oligonucleotide
  Target: ATXN2; (+) strand; PAM type: NRG; PAM sequence: TAG
agtcactttagcaaacagtt

SEQ ID NO: 51696 - DNA, 20 bp, Artificial Sequence
  Description of Artificial Sequence: Synthetic oligonucleotide
  Target: ATXN2; (+) strand; PAM type: NRG; PAM sequence: CAG
taaaattaaataaacactca

SEQ ID NO: 51697 - DNA, 20 bp, Artificial Sequence
  Description of Artificial Sequence: Synthetic oligonucleotide
  Target: ATXN2; (+) strand; PAM type: NRG; PAM sequence: AGG
aaaattaaataaacactcac

SEQ ID NO: 51698 - DNA, 20 bp, Artificial Sequence
  Description of Artificial Sequence: Synthetic oligonucleotide
  Target: ATXN2; (+) strand; PAM type: NRG; PAM sequence: TGG
tcacaggattatatgtaccc

SEQ ID NO: 51699 - DNA, 20 bp, Artificial Sequence
  Description of Artificial Sequence: Synthetic oligonucleotide
  Target: ATXN2; (+) strand; PAM type: NRG; PAM sequence: CAG
taaacacttgccacaaaacc

SEQ ID NO: 51700 - DNA, 20 bp, Artificial Sequence
  Description of Artificial Sequence: Synthetic oligonucleotide
  Target: ATXN2; (+) strand; PAM type: NRG; PAM sequence: AAG
catttctatgcattccaacc

SEQ ID NO: 51701 - DNA, 20 bp, Artificial Sequence
  Description of Artificial Sequence: Synthetic oligonucleotide
  Target: ATXN2; (+) strand; PAM type: NRG; PAM sequence: GAG
tttctatgcattccaaccaa

SEQ ID NO: 51702 - DNA, 20 bp, Artificial Sequence
  Description of Artificial Sequence: Synthetic oligonucleotide
  Target: ATXN2; (+) strand; PAM type: NRG; PAM sequence: CAG
ctgtacataaatattcatac

SEQ ID NO: 51703 - DNA, 20 bp, Artificial Sequence
  Description of Artificial Sequence: Synthetic oligonucleotide
  Target: ATXN2; (+) strand; PAM type: NRG; PAM sequence: GAG
ctttatttatttattttttt

SEQ ID NO: 51704 - DNA, 20 bp, Artificial Sequence
  Description of Artificial Sequence: Synthetic oligonucleotide
  Target: ATXN2; (+) strand; PAM type: NRG; PAM sequence: CGG
atttatttatttttttgaga

SEQ ID NO: 51705 - DNA, 20 bp, Artificial Sequence
  Description of Artificial Sequence: Synthetic oligonucleotide
  Target: ATXN2; (+) strand; PAM type: NRG; PAM sequence: GAG
ttatttatttttttgagacg

SEQ ID NO: 51706 - DNA, 20 bp, Artificial Sequence
  Description of Artificial Sequence: Synthetic oligonucleotide
  Target: ATXN2; (+) strand; PAM type: NRG; PAM sequence: CAG
ggagtttcactcttgatgcc

SEQ ID NO: 51707 - DNA, 20 bp, Artificial Sequence
  Description of Artificial Sequence: Synthetic oligonucleotide
  Target: ATXN2; (+) strand; PAM type: NRG; PAM sequence: AGG
gagtttcactcttgatgccc

SEQ ID NO: 51708 - DNA, 20 bp, Artificial Sequence
  Description of Artificial Sequence: Synthetic oligonucleotide
  Target: ATXN2; (+) strand; PAM type: NRG; PAM sequence: TGG
ttcactcttgatgcccaggc

SEQ ID NO: 51709 - DNA, 20 bp, Artificial Sequence
  Description of Artificial Sequence: Synthetic oligonucleotide
  Target: ATXN2; (+) strand; PAM type: NRG; PAM sequence: GAG
cactcttgatgcccaggctg

SEQ ID NO: 51710 - DNA, 20 bp, Artificial Sequence
  Description of Artificial Sequence: Synthetic oligonucleotide
  Target: ATXN2; (+) strand; PAM type: NRG; PAM sequence: TGG
atgcccaggctggagtgcaa

SEQ ID NO: 51711 - DNA, 20 bp, Artificial Sequence
  Description of Artificial Sequence: Synthetic oligonucleotide
  Target: ATXN2; (+) strand; PAM type: NRG; PAM sequence: TGG
ggagtgcaatggtgcaatct

SEQ ID NO: 51712 - DNA, 20 bp, Artificial Sequence
  Description of Artificial Sequence: Synthetic oligonucleotide
  Target: ATXN2; (+) strand; PAM type: NRG; PAM sequence: CGG
tcaccacaacctctgcctcc

SEQ ID NO: 51713 - DNA, 20 bp, Artificial Sequence
  Description of Artificial Sequence: Synthetic oligonucleotide
  Target: ATXN2; (+) strand; PAM type: NRG; PAM sequence: GGG
caccacaacctctgcctccc

SEQ ID NO: 51714 - DNA, 20 bp, Artificial Sequence
  Description of Artificial Sequence: Synthetic oligonucleotide
  Target: ATXN2; (+) strand; PAM type: NRG; PAM sequence: AAG
aacctctgcctcccgggttc

SEQ ID NO: 51715 - DNA, 20 bp, Artificial Sequence
  Description of Artificial Sequence: Synthetic oligonucleotide
  Target: ATXN2; (+) strand; PAM type: NRG; PAM sequence: CAG
ttcaagcgattctcctgcct

SEQ ID NO: 51716 - DNA, 20 bp, Artificial Sequence
  Description of Artificial Sequence: Synthetic oligonucleotide
  Target: ATXN2; (+) strand; PAM type: NRG; PAM sequence: GAG
ttctcctgcctcagcctcct

SEQ ID NO: 51717 - DNA, 20 bp, Artificial Sequence
  Description of Artificial Sequence: Synthetic oligonucleotide
  Target: ATXN2; (+) strand; PAM type: NRG; PAM sequence: TAG
tcctgcctcagcctcctgag

SEQ ID NO: 51718 - DNA, 20 bp, Artificial Sequence
  Description of Artificial Sequence: Synthetic oligonucleotide
  Target: ATXN2; (+) strand; PAM type: NRG; PAM sequence: TAG
gcctcagcctcctgagtagc

SEQ ID NO: 51719 - DNA, 20 bp, Artificial Sequence
  Description of Artificial Sequence: Synthetic oligonucleotide
  Target: ATXN2; (+) strand; PAM type: NRG; PAM sequence: AGG
cctcagcctcctgagtagct

SEQ ID NO: 51720 - DNA, 20 bp, Artificial Sequence
  Description of Artificial Sequence: Synthetic oligonucleotide
  Target: ATXN2; (+) strand; PAM type: NRG; PAM sequence: CAG
ctcctgagtagctaggatta

SEQ ID NO: 51721 - DNA, 20 bp, Artificial Sequence
  Description of Artificial Sequence: Synthetic oligonucleotide
  Target: ATXN2; (+) strand; PAM type: NRG; PAM sequence: AGG
tcctgagtagctaggattac

SEQ ID NO: 51722 - DNA, 20 bp, Artificial Sequence
  Description of Artificial Sequence: Synthetic oligonucleotide
  Target: ATXN2; (+) strand; PAM type: NRG; PAM sequence: TGG
caggcatgcgccaccacgcc

SEQ ID NO: 51723 - DNA, 20 bp, Artificial Sequence
  Description of Artificial Sequence: Synthetic oligonucleotide
  Target: ATXN2; (+) strand; PAM type: NRG; PAM sequence: TAG
cctggctaattttgtatttt

SEQ ID NO: 51724 - DNA, 20 bp, Artificial Sequence
  Description of Artificial Sequence: Synthetic oligonucleotide
  Target: ATXN2; (+) strand; PAM type: NRG; PAM sequence: TAG
ggctaattttgtatttttag

SEQ ID NO: 51725 - DNA, 20 bp, Artificial Sequence
  Description of Artificial Sequence: Synthetic oligonucleotide
  Target: ATXN2; (+) strand; PAM type: NRG; PAM sequence: GAG
ctaattttgtatttttagta

SEQ ID NO: 51726 - DNA, 20 bp, Artificial Sequence
  Description of Artificial Sequence: Synthetic oligonucleotide
  Target: ATXN2; (+) strand; PAM type: NRG; PAM sequence: TGG
ttttgtatttttagtagaga

SEQ ID NO: 51727 - DNA, 20 bp, Artificial Sequence
  Description of Artificial Sequence: Synthetic oligonucleotide
  Target: ATXN2; (+) strand; PAM type: NRG; PAM sequence: GGG
tttgtatttttagtagagat

SEQ ID NO: 51728 - DNA, 20 bp, Artificial Sequence
  Description of Artificial Sequence: Synthetic oligonucleotide
  Target: ATXN2; (+) strand; PAM type: NRG; PAM sequence: GGG
ttgtatttttagtagagatg

SEQ ID NO: 51729 - DNA, 20 bp, Artificial Sequence
  Description of Artificial Sequence: Synthetic oligonucleotide
  Target: ATXN2; (+) strand; PAM type: NRG; PAM sequence: TGG
gagatggggtttctccatgt

SEQ ID NO: 51730 - DNA, 20 bp, Artificial Sequence
  Description of Artificial Sequence: Synthetic oligonucleotide
  Target: ATXN2; (+) strand; PAM type: NRG; PAM sequence: CAG
tggggtttctccatgttggt

SEQ ID NO: 51731 - DNA, 20 bp, Artificial Sequence
  Description of Artificial Sequence: Synthetic oligonucleotide
  Target: ATXN2; (+) strand; PAM type: NRG; PAM sequence: AGG
ggggtttctccatgttggtc

SEQ ID NO: 51732 - DNA, 20 bp, Artificial Sequence
  Description of Artificial Sequence: Synthetic oligonucleotide
  Target: ATXN2; (+) strand; PAM type: NRG; PAM sequence: TGG
tttctccatgttggtcaggc

SEQ ID NO: 51733 - DNA, 20 bp, Artificial Sequence
  Description of Artificial Sequence: Synthetic oligonucleotide
  Target: ATXN2; (+) strand; PAM type: NRG; PAM sequence: TAG
tggtctcaaactcccaacct

SEQ ID NO: 51734 - DNA, 20 bp, Artificial Sequence
  Description of Artificial Sequence: Synthetic oligonucleotide
  Target: ATXN2; (+) strand; PAM type: NRG; PAM sequence: AGG
ggtctcaaactcccaacctt

SEQ ID NO: 51735 - DNA, 20 bp, Artificial Sequence
  Description of Artificial Sequence: Synthetic oligonucleotide
  Target: ATXN2; (+) strand; PAM type: NRG; PAM sequence: CGG
cttaggtgatccgcctgcct

SEQ ID NO: 51736 - DNA, 20 bp, Artificial Sequence
  Description of Artificial Sequence: Synthetic oligonucleotide
  Target: ATXN2; (+) strand; PAM type: NRG; PAM sequence: TGG
gcctcggccttccaaaatgc

SEQ ID NO: 51737 - DNA, 20 bp, Artificial Sequence
  Description of Artificial Sequence: Synthetic oligonucleotide
  Target: ATXN2; (+) strand; PAM type: NRG; PAM sequence: GGG
cctcggccttccaaaatgct

SEQ ID NO: 51738 - DNA, 20 bp, Artificial Sequence
  Description of Artificial Sequence: Synthetic oligonucleotide
  Target: ATXN2; (+) strand; PAM type: NRG; PAM sequence: CAG
cttccaaaatgctgggatta

SEQ ID NO: 51739 - DNA, 20 bp, Artificial Sequence
  Description of Artificial Sequence: Synthetic oligonucleotide
  Target: ATXN2; (+) strand; PAM type: NRG; PAM sequence: AGG
ttccaaaatgctgggattac

SEQ ID NO: 51740 - DNA, 20 bp, Artificial Sequence
  Description of Artificial Sequence: Synthetic oligonucleotide
  Target: ATXN2; (+) strand; PAM type: NRG; PAM sequence: GAG
aatgctgggattacaggcgt

SEQ ID NO: 51741 - DNA, 20 bp, Artificial Sequence
  Description of Artificial Sequence: Synthetic oligonucleotide
  Target: ATXN2; (+) strand; PAM type: NRG; PAM sequence: CGG
caggcgtgagacatcgcacc

SEQ ID NO: 51742 - DNA, 20 bp, Artificial Sequence
  Description of Artificial Sequence: Synthetic oligonucleotide
  Target: ATXN2; (+) strand; PAM type: NRG; PAM sequence: CAG
gagacatcgcacccggcctc

SEQ ID NO: 51743 - DNA, 20 bp, Artificial Sequence
  Description of Artificial Sequence: Synthetic oligonucleotide
  Target: ATXN2; (+) strand; PAM type: NRG; PAM sequence: TAG
gcctccagctttatttttaa

SEQ ID NO: 51744 - DNA, 20 bp, Artificial Sequence
  Description of Artificial Sequence: Synthetic oligonucleotide
  Target: ATXN2; (+) strand; PAM type: NRG; PAM sequence: TAG
gctaactcaatgtccaccac

SEQ ID NO: 51745 - DNA, 20 bp, Artificial Sequence
  Description of Artificial Sequence: Synthetic oligonucleotide
  Target: ATXN2; (+) strand; PAM type: NRG; PAM sequence: TGG
ccaccactagatgaacaaac

SEQ ID NO: 51746 - DNA, 20 bp, Artificial Sequence
  Description of Artificial Sequence: Synthetic oligonucleotide
  Target: ATXN2; (+) strand; PAM type: NRG; PAM sequence: TAG
aaactggtacatgcatacaa

SEQ ID NO: 51747 - DNA, 20 bp, Artificial Sequence
  Description of Artificial Sequence: Synthetic oligonucleotide
  Target: ATXN2; (+) strand; PAM type: NRG; PAM sequence: AAG
atagactactactcaacaat

SEQ ID NO: 51748 - DNA, 20 bp, Artificial Sequence
  Description of Artificial Sequence: Synthetic oligonucleotide
  Target: ATXN2; (+) strand; PAM type: NRG; PAM sequence: CAG
gactactactcaacaataag

SEQ ID NO: 51749 - DNA, 20 bp, Artificial Sequence
  Description of Artificial Sequence: Synthetic oligonucleotide
  Target: ATXN2; (+) strand; PAM type: NRG; PAM sequence: AAG
actactcaacaataagcaga

SEQ ID NO: 51750 - DNA, 20 bp, Artificial Sequence
  Description of Artificial Sequence: Synthetic oligonucleotide
  Target: ATXN2; (+) strand; PAM type: NRG; PAM sequence: TAG
aagaaactactaacatgcaa

SEQ ID NO: 51751 - DNA, 20 bp, Artificial Sequence
  Description of Artificial Sequence: Synthetic oligonucleotide
  Target: ATXN2; (+) strand; PAM type: NRG; PAM sequence: CAG
actactaacatgcaatagta

SEQ ID NO: 51752 - DNA, 20 bp, Artificial Sequence
  Description of Artificial Sequence: Synthetic oligonucleotide
  Target: ATXN2; (+) strand; PAM type: NRG; PAM sequence: GAG
gacctttttttttttttttt

SEQ ID NO: 51753 - DNA, 20 bp, Artificial Sequence
  Description of Artificial Sequence: Synthetic oligonucleotide
  Target: ATXN2; (+) strand; PAM type: NRG; PAM sequence: AAG
tttttttttttttttgagat

SEQ ID NO: 51754 - DNA, 20 bp, Artificial Sequence
  Description of Artificial Sequence: Synthetic oligonucleotide
  Target: ATXN2; (+) strand; PAM type: NRG; PAM sequence: GAG
tttttttttttttgagataa

SEQ ID NO: 51755 - DNA, 20 bp, Artificial Sequence
  Description of Artificial Sequence: Synthetic oligonucleotide
  Target: ATXN2; (+) strand; PAM type: NRG; PAM sequence: CAG
aagagtctcactatgtcacc

SEQ ID NO: 51756 - DNA, 20 bp, Artificial Sequence
  Description of Artificial Sequence: Synthetic oligonucleotide
  Target: ATXN2; (+) strand; PAM type: NRG; PAM sequence: AGG
agagtctcactatgtcaccc

SEQ ID NO: 51757 - DNA, 20 bp, Artificial Sequence
  Description of Artificial Sequence: Synthetic oligonucleotide
  Target: ATXN2; (+) strand; PAM type: NRG; PAM sequence: TGG
tctcactatgtcacccaggc

SEQ ID NO: 51758 - DNA, 20 bp, Artificial Sequence
  Description of Artificial Sequence: Synthetic oligonucleotide
  Target: ATXN2; (+) strand; PAM type: NRG; PAM sequence: GAG
tcactatgtcacccaggctg

SEQ ID NO: 51759 - DNA, 20 bp, Artificial Sequence
  Description of Artificial Sequence: Synthetic oligonucleotide
  Target: ATXN2; (+) strand; PAM type: NRG; PAM sequence: CAG
atgtcacccaggctggagtg

SEQ ID NO: 51760 - DNA, 20 bp, Artificial Sequence
  Description of Artificial Sequence: Synthetic oligonucleotide
  Target: ATXN2; (+) strand; PAM type: NRG; PAM sequence: TGG
tcacccaggctggagtgcag

SEQ ID NO: 51761 - DNA, 20 bp, Artificial Sequence
  Description of Artificial Sequence: Synthetic oligonucleotide
  Target: ATXN2; (+) strand; PAM type: NRG; PAM sequence: TGG
ggagtgcagtggcgtgttct

SEQ ID NO: 51762 - DNA, 20 bp, Artificial Sequence
  Description of Artificial Sequence: Synthetic oligonucleotide
  Target: ATXN2; (+) strand; PAM type: NRG; PAM sequence: TGG
tcactgcaacctcctcctcc

SEQ ID NO: 51763 - DNA, 20 bp, Artificial Sequence
  Description of Artificial Sequence: Synthetic oligonucleotide
  Target: ATXN2; (+) strand; PAM type: NRG; PAM sequence: GGG
cactgcaacctcctcctcct

SEQ ID NO: 51764 - DNA, 20 bp, Artificial Sequence
  Description of Artificial Sequence: Synthetic oligonucleotide
  Target: ATXN2; (+) strand; PAM type: NRG; PAM sequence: AAG
aacctcctcctcctgggttc

SEQ ID NO: 51765 - DNA, 20 bp, Artificial Sequence
  Description of Artificial Sequence: Synthetic oligonucleotide
  Target: ATXN2; (+) strand; PAM type: NRG; PAM sequence: CAG
ttcaagtgattctcctgtct

SEQ ID NO: 51766 - DNA, 20 bp, Artificial Sequence
  Description of Artificial Sequence: Synthetic oligonucleotide
  Target: ATXN2; (+) strand; PAM type: NRG; PAM sequence: GAG
tctcctgtctcagccccccc

SEQ ID NO: 51767 - DNA, 20 bp, Artificial Sequence
  Description of Artificial Sequence: Synthetic oligonucleotide
  Target: ATXN2; (+) strand; PAM type: NRG; PAM sequence: TAG
cctgtctcagcccccccgag

SEQ ID NO: 51768 - DNA, 20 bp, Artificial Sequence
  Description of Artificial Sequence: Synthetic oligonucleotide
  Target: ATXN2; (+) strand; PAM type: NRG; PAM sequence: TGG
tctcagcccccccgagtagc

SEQ ID NO: 51769 - DNA, 20 bp, Artificial Sequence
  Description of Artificial Sequence: Synthetic oligonucleotide
  Target: ATXN2; (+) strand; PAM type: NRG; PAM sequence: GGG
ctcagcccccccgagtagct

SEQ ID NO: 51770 - DNA, 20 bp, Artificial Sequence
  Description of Artificial Sequence: Synthetic oligonucleotide
  Target: ATXN2; (+) strand; PAM type: NRG; PAM sequence: CAG
cccccgagtagctgggatta

SEQ ID NO: 51771 - DNA, 20 bp, Artificial Sequence
  Description of Artificial Sequence: Synthetic oligonucleotide
  Target: ATXN2; (+) strand; PAM type: NRG; PAM sequence: AGG
ccccgagtagctgggattac

SEQ ID NO: 51772 - DNA, 20 bp, Artificial Sequence
  Description of Artificial Sequence: Synthetic oligonucleotide
  Target: ATXN2; (+) strand; PAM type: NRG; PAM sequence: GAG
ccgagtagctgggattacag

SEQ ID NO: 51773 - DNA, 20 bp, Artificial Sequence
  Description of Artificial Sequence: Synthetic oligonucleotide
  Target: ATXN2; (+) strand; PAM type: NRG; PAM sequence: TGG
caggagcgcgccaccgtgcc

SEQ ID NO: 51774 - DNA, 20 bp, Artificial Sequence
  Description of Artificial Sequence: Synthetic oligonucleotide
  Target: ATXN2; (+) strand; PAM type: NRG; PAM sequence: TAG
ctggctaatttttgtacttt

SEQ ID NO: 51775 - DNA, 20 bp, Artificial Sequence
  Description of Artificial Sequence: Synthetic oligonucleotide
  Target: ATXN2; (+) strand; PAM type: NRG; PAM sequence: TAG
gctaatttttgtacttttag

SEQ ID NO: 51776 - DNA, 20 bp, Artificial Sequence
  Description of Artificial Sequence: Synthetic oligonucleotide
  Target: ATXN2; (+) strand; PAM type: NRG; PAM sequence: CAG
ttttgtacttttagtagaca

SEQ ID NO: 51777 - DNA, 20 bp, Artificial Sequence
  Description of Artificial Sequence: Synthetic oligonucleotide
  Target: ATXN2; (+) strand; PAM type: NRG; PAM sequence: AGG
tttgtacttttagtagacac

SEQ ID NO: 51778 - DNA, 20 bp, Artificial Sequence
  Description of Artificial Sequence: Synthetic oligonucleotide
  Target: ATXN2; (+) strand; PAM type: NRG; PAM sequence: GGG
ttgtacttttagtagacaca

SEQ ID NO: 51779 - DNA, 20 bp, Artificial Sequence
  Description of Artificial Sequence: Synthetic oligonucleotide
  Target: ATXN2; (+) strand; PAM type: NRG; PAM sequence: TGG
gacacagggtctcaccatgt

SEQ ID NO: 51780 - DNA, 20 bp, Artificial Sequence
  Description of Artificial Sequence: Synthetic oligonucleotide
  Target: ATXN2; (+) strand; PAM type: NRG; PAM sequence: CAG
cagggtctcaccatgttggc

SEQ ID NO: 51781 - DNA, 20 bp, Artificial Sequence
  Description of Artificial Sequence: Synthetic oligonucleotide
  Target: ATXN2; (+) strand; PAM type: NRG; PAM sequence: AGG
agggtctcaccatgttggcc

SEQ ID NO: 51782 - DNA, 20 bp, Artificial Sequence
  Description of Artificial Sequence: Synthetic oligonucleotide
  Target: ATXN2; (+) strand; PAM type: NRG; PAM sequence: TGG
tctcaccatgttggccaggc

SEQ ID NO: 51783 - DNA, 20 bp, Artificial Sequence
  Description of Artificial Sequence: Synthetic oligonucleotide
  Target: ATXN2; (+) strand; PAM type: NRG; PAM sequence: CAG
tggtctcgaactcctgacct

SEQ ID NO: 51784 - DNA, 20 bp, Artificial Sequence
  Description of Artificial Sequence: Synthetic oligonucleotide
  Target: ATXN2; (+) strand; PAM type: NRG; PAM sequence: AGG
ggtctcgaactcctgacctc

SEQ ID NO: 51785 - DNA, 20 bp, Artificial Sequence
  Description of Artificial Sequence: Synthetic oligonucleotide
  Target: ATXN2; (+) strand; PAM type: NRG; PAM sequence: CAG
ctcaggtgatccacccacct

SEQ ID NO: 51786 - DNA, 20 bp, Artificial Sequence
  Description of Artificial Sequence: Synthetic oligonucleotide
  Target: ATXN2; (+) strand; PAM type: NRG; PAM sequence: AAG
ccacccacctcagcctccca

SEQ ID NO: 51787 - DNA, 20 bp, Artificial Sequence
  Description of Artificial Sequence: Synthetic oligonucleotide
  Target: ATXN2; (+) strand; PAM type: NRG; PAM sequence: TGG
acctcagcctcccaaagtgc

SEQ ID NO: 51788 - DNA, 20 bp, Artificial Sequence
  Description of Artificial Sequence: Synthetic oligonucleotide
  Target: ATXN2; (+) strand; PAM type: NRG; PAM sequence: GGG
cctcagcctcccaaagtgct

SEQ ID NO: 51789 - DNA, 20 bp, Artificial Sequence
  Description of Artificial Sequence: Synthetic oligonucleotide
  Target: ATXN2; (+) strand; PAM type: NRG; PAM sequence: CAG
ctcccaaagtgctgggatta

SEQ ID NO: 51790 - DNA, 20 bp, Artificial Sequence
  Description of Artificial Sequence: Synthetic oligonucleotide
  Target: ATXN2; (+) strand; PAM type: NRG; PAM sequence: AGG
tcccaaagtgctgggattac

SEQ ID NO: 51791 - DNA, 20 bp, Artificial Sequence
  Description of Artificial Sequence: Synthetic oligonucleotide
  Target: ATXN2; (+) strand; PAM type: NRG; PAM sequence: GAG
agtgctgggattacaggcgt

SEQ ID NO: 51792 - DNA, 20 bp, Artificial Sequence
  Description of Artificial Sequence: Synthetic oligonucleotide
  Target: ATXN2; (+) strand; PAM type: NRG; PAM sequence: TGG
ggattacaggcgtgagccac

SEQ ID NO: 51793 - DNA, 20 bp, Artificial Sequence
  Description of Artificial Sequence: Synthetic oligonucleotide
  Target: ATXN2; (+) strand; PAM type: NRG; PAM sequence: GGG
gattacaggcgtgagccact

SEQ ID NO: 51794 - DNA, 20 bp, Artificial Sequence
  Description of Artificial Sequence: Synthetic oligonucleotide
  Target: ATXN2; (+) strand; PAM type: NRG; PAM sequence: CAG
caggcgtgagccactgggcc

SEQ ID NO: 51795 - DNA, 20 bp, Artificial Sequence
  Description of Artificial Sequence: Synthetic oligonucleotide
  Target: ATXN2; (+) strand; PAM type: NRG; PAM sequence: CAG
cgtgagccactgggcccagc

SEQ ID NO: 51796 - DNA, 20 bp, Artificial Sequence
  Description of Artificial Sequence: Synthetic oligonucleotide
  Target: ATXN2; (+) strand; PAM type: NRG; PAM sequence: GAG
tgagccactgggcccagcca

SEQ ID NO: 51797 - DNA, 20 bp, Artificial Sequence
  Description of Artificial Sequence: Synthetic oligonucleotide
  Target: ATXN2; (+) strand; PAM type: NRG; PAM sequence: AAG
cactgggcccagccagagat

SEQ ID NO: 51798 - DNA, 20 bp, Artificial Sequence
  Description of Artificial Sequence: Synthetic oligonucleotide
  Target: ATXN2; (+) strand; PAM type: NRG; PAM sequence: AGG
actgggcccagccagagata

SEQ ID NO: 51799 - DNA, 20 bp, Artificial Sequence
  Description of Artificial Sequence: Synthetic oligonucleotide
  Target: ATXN2; (+) strand; PAM type: NRG; PAM sequence: CAG
taaggtcttgctgtgttgcc

SEQ ID NO: 51800 - DNA, 20 bp, Artificial Sequence
  Description of Artificial Sequence: Synthetic oligonucleotide
  Target: ATXN2; (+) strand; PAM type: NRG; PAM sequence: AGG
aaggtcttgctgtgttgccc

SEQ ID NO: 51801 - DNA, 20 bp, Artificial Sequence
  Description of Artificial Sequence: Synthetic oligonucleotide
  Target: ATXN2; (+) strand; PAM type: NRG; PAM sequence: GGG
aggtcttgctgtgttgccca

SEQ ID NO: 51802 - DNA, 20 bp, Artificial Sequence
  Description of Artificial Sequence: Synthetic oligonucleotide
  Target: ATXN2; (+) strand; PAM type: NRG; PAM sequence: TGG
tgcccagggccttgaactcc

SEQ ID NO: 51803 - DNA, 20 bp, Artificial Sequence
  Description of Artificial Sequence: Synthetic oligonucleotide
  Target: ATXN2; (+) strand; PAM type: NRG; PAM sequence: GGG
gcccagggccttgaactcct

SEQ ID NO: 51804 - DNA, 20 bp, Artificial Sequence
  Description of Artificial Sequence: Synthetic oligonucleotide
  Target: ATXN2; (+) strand; PAM type: NRG; PAM sequence: CAG
ggccttgaactcctgggctc

SEQ ID NO: 51805 - DNA, 20 bp, Artificial Sequence
  Description of Artificial Sequence: Synthetic oligonucleotide
  Target: ATXN2; (+) strand; PAM type: NRG; PAM sequence: CAG
ctccagcgatcctcccacct

SEQ ID NO: 51806 - DNA, 20 bp, Artificial Sequence
  Description of Artificial Sequence: Synthetic oligonucleotide
  Target: ATXN2; (+) strand; PAM type: NRG; PAM sequence: AAG
tcctcccacctcagctcccc

SEQ ID NO: 51807 - DNA, 20 bp, Artificial Sequence
  Description of Artificial Sequence: Synthetic oligonucleotide
  Target: ATXN2; (+) strand; PAM type: NRG; PAM sequence: TAG
tcccacctcagctccccaag

SEQ ID NO: 51808 - DNA, 20 bp, Artificial Sequence
  Description of Artificial Sequence: Synthetic oligonucleotide
  Target: ATXN2; (+) strand; PAM type: NRG; PAM sequence: TGG
acctcagctccccaagtagc

SEQ ID NO: 51809 - DNA, 20 bp, Artificial Sequence
  Description of Artificial Sequence: Synthetic oligonucleotide
  Target: ATXN2; (+) strand; PAM type: NRG; PAM sequence: GGG
cctcagctccccaagtagct

SEQ ID NO: 51810 - DNA, 20 bp, Artificial Sequence
  Description of Artificial Sequence: Synthetic oligonucleotide
  Target: ATXN2; (+) strand; PAM type: NRG; PAM sequence: TGG
tccccaagtagctgggacta

SEQ ID NO: 51811 - DNA, 20 bp, Artificial Sequence
  Description of Artificial Sequence: Synthetic oligonucleotide
  Target: ATXN2; (+) strand; PAM type: NRG; PAM sequence: GGG
ccccaagtagctgggactat

SEQ ID NO: 51812 - DNA, 20 bp, Artificial Sequence
  Description of Artificial Sequence: Synthetic oligonucleotide
  Target: ATXN2; (+) strand; PAM type: NRG; PAM sequence: TAG
tgggtgcacgccatcacacc

SEQ ID NO: 51813 - DNA, 20 bp, Artificial Sequence
  Description of Artificial Sequence: Synthetic oligonucleotide
  Target: ATXN2; (+) strand; PAM type: NRG; PAM sequence: CAG
ctgaccaatgctcctctctg

SEQ ID NO: 51814 - DNA, 20 bp, Artificial Sequence
  Description of Artificial Sequence: Synthetic oligonucleotide
  Target: ATXN2; (+) strand; PAM type: NRG; PAM sequence: CAG
ccaatgctcctctctgcaga

SEQ ID NO: 51815 - DNA, 20 bp, Artificial Sequence
  Description of Artificial Sequence: Synthetic oligonucleotide
  Target: ATXN2; (+) strand; PAM type: NRG; PAM sequence: AAG
tgctcctctctgcagacaga

SEQ ID NO: 51816 - DNA, 20 bp, Artificial Sequence
  Description of Artificial Sequence: Synthetic oligonucleotide
  Target: ATXN2; (+) strand; PAM type: NRG; PAM sequence: CGG
ctctctgcagacagaaagtt

SEQ ID NO: 51817 - DNA, 20 bp, Artificial Sequence
  Description of Artificial Sequence: Synthetic oligonucleotide
  Target: ATXN2; (+) strand; PAM type: NRG; PAM sequence: TGG
tgcagacagaaagttcggtg

SEQ ID NO: 51818 - DNA, 20 bp, Artificial Sequence
  Description of Artificial Sequence: Synthetic oligonucleotide
  Target: ATXN2; (+) strand; PAM type: NRG; PAM sequence: TAG
gacagaaagttcggtgtggt

SEQ ID NO: 51819 - DNA, 20 bp, Artificial Sequence
  Description of Artificial Sequence: Synthetic oligonucleotide
  Target: ATXN2; (+) strand; PAM type: NRG; PAM sequence: AGG
acagaaagttcggtgtggtt

SEQ ID NO: 51820 - DNA, 20 bp, Artificial Sequence
  Description of Artificial Sequence: Synthetic oligonucleotide
  Target: ATXN2; (+) strand; PAM type: NRG; PAM sequence: GAG
agaaagttcggtgtggttag

SEQ ID NO: 51821 - DNA, 20 bp, Artificial Sequence
  Description of Artificial Sequence: Synthetic oligonucleotide
  Target: ATXN2; (+) strand; PAM type: NRG; PAM sequence: TGG
cggtgtggttaggagttaaa

SEQ ID NO: 51822 - DNA, 20 bp, Artificial Sequence
  Description of Artificial Sequence: Synthetic oligonucleotide
  Target: ATXN2; (+) strand; PAM type: NRG; PAM sequence: GGG
ggtgtggttaggagttaaat

SEQ ID NO: 51823 - DNA, 20 bp, Artificial Sequence
  Description of Artificial Sequence: Synthetic oligonucleotide
  Target: ATXN2; (+) strand; PAM type: NRG; PAM sequence: AAG
gtggttaggagttaaatggg

SEQ ID NO: 51824 - DNA, 20 bp, Artificial Sequence
  Description of Artificial Sequence: Synthetic oligonucleotide
  Target: ATXN2; (+) strand; PAM type: NRG; PAM sequence: AAG
ttaggagttaaatgggaaga

SEQ ID NO: 51825 - DNA, 20 bp, Artificial Sequence
  Description of Artificial Sequence: Synthetic oligonucleotide
  Target: ATXN2; (+) strand; PAM type: NRG; PAM sequence: GAG
aggagttaaatgggaagaaa

SEQ ID NO: 51826 - DNA, 20 bp, Artificial Sequence
  Description of Artificial Sequence: Synthetic oligonucleotide
  Target: ATXN2; (+) strand; PAM type: NRG; PAM sequence: AGG
ggagttaaatgggaagaaag

SEQ ID NO: 51827 - DNA, 20 bp, Artificial Sequence
  Description of Artificial Sequence: Synthetic oligonucleotide
  Target: ATXN2; (+) strand; PAM type: NRG; PAM sequence: GAG
agttaaatgggaagaaagag

SEQ ID NO: 51828 - DNA, 20 bp, Artificial Sequence
  Description of Artificial Sequence: Synthetic oligonucleotide
  Target: ATXN2; (+) strand; PAM type: NRG; PAM sequence: AGG
gttaaatgggaagaaagagg

SEQ ID NO: 51829 - DNA, 20 bp, Artificial Sequence
  Description of Artificial Sequence: Synthetic oligonucleotide
  Target: ATXN2; (+) strand; PAM type: NRG; PAM sequence: TGG
aatgggaagaaagaggaggc

SEQ ID NO: 51830 - DNA, 20 bp, Artificial Sequence
  Description of Artificial Sequence: Synthetic oligonucleotide
  Target: ATXN2; (+) strand; PAM type: NRG; PAM sequence: GGG
atgggaagaaagaggaggct

SEQ ID NO: 51831 - DNA, 20 bp, Artificial Sequence
  Description of Artificial Sequence: Synthetic oligonucleotide
  Target: ATXN2; (+) strand; PAM type: NRG; PAM sequence: CAG
aagaaagaggaggctgggtg

SEQ ID NO: 51832 - DNA, 20 bp, Artificial Sequence
  Description of Artificial Sequence: Synthetic oligonucleotide
  Target: ATXN2; (+) strand; PAM type: NRG; PAM sequence: TGG
aaagaggaggctgggtgcag

SEQ ID NO: 51833 - DNA, 20 bp, Artificial Sequence
  Description of Artificial Sequence: Synthetic oligonucleotide
  Target: ATXN2; (+) strand; PAM type: NRG; PAM sequence: TGG
tgtaatccctcccaacactt

SEQ ID NO: 51834 - DNA, 20 bp, Artificial Sequence
  Description of Artificial Sequence: Synthetic oligonucleotide
  Target: ATXN2; (+) strand; PAM type: NRG; PAM sequence: GGG
gtaatccctcccaacacttt

SEQ ID NO: 51835 - DNA, 20 bp, Artificial Sequence
  Description of Artificial Sequence: Synthetic oligonucleotide
  Target: ATXN2; (+) strand; PAM type: NRG; PAM sequence: GAG
aatccctcccaacactttgg

SEQ ID NO: 51836 - DNA, 20 bp, Artificial Sequence
  Description of Artificial Sequence: Synthetic oligonucleotide
  Target: ATXN2; (+) strand; PAM type: NRG; PAM sequence: AGG
atccctcccaacactttggg

SEQ ID NO: 51837 - DNA, 20 bp, Artificial Sequence
  Description of Artificial Sequence: Synthetic oligonucleotide
  Target: ATXN2; (+) strand; PAM type: NRG; PAM sequence: AAG
tcccaacactttgggaggcc

SEQ ID NO: 51838 - DNA, 20 bp, Artificial Sequence
  Description of Artificial Sequence: Synthetic oligonucleotide
  Target: ATXN2; (+) strand; PAM type: NRG; PAM sequence: AGG
cccaacactttgggaggcca

SEQ ID NO: 51839 - DNA, 20 bp, Artificial Sequence
  Description of Artificial Sequence: Synthetic oligonucleotide
  Target: ATXN2; (+) strand; PAM type: NRG; PAM sequence: AAG
acactttgggaggccaaggc

SEQ ID NO: 51840 - DNA, 20 bp, Artificial Sequence
  Description of Artificial Sequence: Synthetic oligonucleotide
  Target: ATXN2; (+) strand; PAM type: NRG; PAM sequence: GAG
actttgggaggccaaggcaa

SEQ ID NO: 51841 - DNA, 20 bp, Artificial Sequence
  Description of Artificial Sequence: Synthetic oligonucleotide
  Target: ATXN2; (+) strand; PAM type: NRG; PAM sequence: GAG
ccaaggcaagagtttcactt

SEQ ID NO: 51842 - DNA, 20 bp, Artificial Sequence
  Description of Artificial Sequence: Synthetic oligonucleotide
  Target: ATXN2; (+) strand; PAM type: NRG; PAM sequence: CAG
gcaagagtttcacttgagcc

SEQ ID NO: 51843 - DNA, 20 bp, Artificial Sequence
  Description of Artificial Sequence: Synthetic oligonucleotide
  Target: ATXN2; (+) strand; PAM type: NRG; PAM sequence: AGG
caagagtttcacttgagccc

SEQ ID NO: 51844 - DNA, 20 bp, Artificial Sequence
  Description of Artificial Sequence: Synthetic oligonucleotide
  Target: ATXN2; (+) strand; PAM type: NRG; PAM sequence: GAG
agagtttcacttgagcccag

SEQ ID NO: 51845 - DNA, 20 bp, Artificial Sequence
  Description of Artificial Sequence: Synthetic oligonucleotide
  Target: ATXN2; (+) strand; PAM type: NRG; PAM sequence: CAG
tgagcccaggagtttgacac

SEQ ID NO: 51846 - DNA, 20 bp, Artificial Sequence
  Description of Artificial Sequence: Synthetic oligonucleotide
  Target: ATXN2; (+) strand; PAM type: NRG; PAM sequence: TGG
ccaggagtttgacaccagcc

SEQ ID NO: 51847 - DNA, 20 bp, Artificial Sequence
  Description of Artificial Sequence: Synthetic oligonucleotide
  Target: ATXN2; (+) strand; PAM type: NRG; PAM sequence: GGG
caggagtttgacaccagcct

SEQ ID NO: 51848 - DNA, 20 bp, Artificial Sequence
  Description of Artificial Sequence: Synthetic oligonucleotide
  Target: ATXN2; (+) strand; PAM type: NRG; PAM sequence: CAG
tttgacaccagcctgggcaa

SEQ ID NO: 51849 - DNA, 20 bp, Artificial Sequence
  Description of Artificial Sequence: Synthetic oligonucleotide
  Target: ATXN2; (+) strand; PAM type: NRG; PAM sequence: GAG
tgacaccagcctgggcaaca

SEQ ID NO: 51850 - DNA, 20 bp, Artificial Sequence
  Description of Artificial Sequence: Synthetic oligonucleotide
  Target: ATXN2; (+) strand; PAM type: NRG; PAM sequence: AAG
accagcctgggcaacagagc

SEQ ID NO: 51851 - DNA, 20 bp, Artificial Sequence
  Description of Artificial Sequence: Synthetic oligonucleotide
  Target: ATXN2; (+) strand; PAM type: NRG; PAM sequence: AAG
atctccgaaaaattaaaaat

SEQ ID NO: 51852 - DNA, 20 bp, Artificial Sequence
  Description of Artificial Sequence: Synthetic oligonucleotide
  Target: ATXN2; (+) strand; PAM type: NRG; PAM sequence: AAG
cgaaaaattaaaaataagaa

SEQ ID NO: 51853 - DNA, 20 bp, Artificial Sequence
  Description of Artificial Sequence: Synthetic oligonucleotide
  Target: ATXN2; (+) strand; PAM type: NRG; PAM sequence: TAG
ttaaaaataagaaaagtaat

SEQ ID NO: 51854 - DNA, 20 bp, Artificial Sequence
  Description of Artificial Sequence: Synthetic oligonucleotide
  Target: ATXN2; (+) strand; PAM type: NRG; PAM sequence: CGG
aaataagaaaagtaattagc

SEQ ID NO: 51855 - DNA, 20 bp, Artificial Sequence
  Description of Artificial Sequence: Synthetic oligonucleotide
  Target: ATXN2; (+) strand; PAM type: NRG; PAM sequence: TGG
gaaaagtaattagccggaca

SEQ ID NO: 51856 - DNA, 20 bp, Artificial Sequence
  Description of Artificial Sequence: Synthetic oligonucleotide
  Target: ATXN2; (+) strand; PAM type: NRG; PAM sequence: TGG
aagtaattagccggacatgg

SEQ ID NO: 51857 - DNA, 20 bp, Artificial Sequence
  Description of Artificial Sequence: Synthetic oligonucleotide
  Target: ATXN2; (+) strand; PAM type: NRG; PAM sequence: TAG
gacatggtggtacacacctg

SEQ ID NO: 51858 - DNA, 20 bp, Artificial Sequence
  Description of Artificial Sequence: Synthetic oligonucleotide
  Target: ATXN2; (+) strand; PAM type: NRG; PAM sequence: CAG
gtggtacacacctgtagccc

SEQ ID NO: 51859 - DNA, 20 bp, Artificial Sequence
  Description of Artificial Sequence: Synthetic oligonucleotide
  Target: ATXN2; (+) strand; PAM type: NRG; PAM sequence: AGG
tggtacacacctgtagcccc

SEQ ID NO: 51860 - DNA, 20 bp, Artificial Sequence
  Description of Artificial Sequence: Synthetic oligonucleotide
  Target: ATXN2; (+) strand; PAM type: NRG; PAM sequence: CAG
cacctgtagccccaggtact

SEQ ID NO: 51861 - DNA, 20 bp, Artificial Sequence
  Description of Artificial Sequence: Synthetic oligonucleotide
  Target: ATXN2; (+) strand; PAM type: NRG; PAM sequence: AAG
tgtagccccaggtactcagc

SEQ ID NO: 51862 - DNA, 20 bp, Artificial Sequence
  Description of Artificial Sequence: Synthetic oligonucleotide
  Target: ATXN2; (+) strand; PAM type: NRG; PAM sequence: GAG
ccccaggtactcagcaagct

SEQ ID NO: 51863 - DNA, 20 bp, Artificial Sequence
  Description of Artificial Sequence: Synthetic oligonucleotide
  Target: ATXN2; (+) strand; PAM type: NRG; PAM sequence: AGG
cccaggtactcagcaagctg

SEQ ID NO: 51864 - DNA, 20 bp, Artificial Sequence
  Description of Artificial Sequence: Synthetic oligonucleotide
  Target: ATXN2; (+) strand; PAM type: NRG; PAM sequence: TGG
aggtactcagcaagctgagg

SEQ ID NO: 51865 - DNA, 20 bp, Artificial Sequence
  Description of Artificial Sequence: Synthetic oligonucleotide
  Target: ATXN2; (+) strand; PAM type: NRG; PAM sequence: GGG
ggtactcagcaagctgaggt

SEQ ID NO: 51866 - DNA, 20 bp, Artificial Sequence
  Description of Artificial Sequence: Synthetic oligonucleotide
  Target: ATXN2; (+) strand; PAM type: NRG; PAM sequence: TGG
agcaagctgaggtgggatga

SEQ ID NO: 51867 - DNA, 20 bp, Artificial Sequence
  Description of Artificial Sequence: Synthetic oligonucleotide
  Target: ATXN2; (+) strand; PAM type: NRG; PAM sequence: GGG
gcaagctgaggtgggatgat

SEQ ID NO: 51868 - DNA, 20 bp, Artificial Sequence
  Description of Artificial Sequence: Synthetic oligonucleotide
  Target: ATXN2; (+) strand; PAM type: NRG; PAM sequence: GAG
ggatgatgggatgattgctt

SEQ ID NO: 51869 - DNA, 20 bp, Artificial Sequence
  Description of Artificial Sequence: Synthetic oligonucleotide
  Target: ATXN2; (+) strand; PAM type: NRG; PAM sequence: AAG
tgggatgattgcttgagccc

SEQ ID NO: 51870 - DNA, 20 bp, Artificial Sequence
  Description of Artificial Sequence: Synthetic oligonucleotide
  Target: ATXN2; (+) strand; PAM type: NRG; PAM sequence: GAG
ttgcttgagcccaagaattc

SEQ ID NO: 51871 - DNA, 20 bp, Artificial Sequence
  Description of Artificial Sequence: Synthetic oligonucleotide
  Target: ATXN2; (+) strand; PAM type: NRG; PAM sequence: AGG
tgcttgagcccaagaattcg

SEQ ID NO: 51872 - DNA, 20 bp, Artificial Sequence
  Description of Artificial Sequence: Synthetic oligonucleotide
  Target: ATXN2; (+) strand; PAM type: NRG; PAM sequence: CAG
cccaagaattcgaggttaca

SEQ ID NO: 51873 - DNA, 20 bp, Artificial Sequence
  Description of Artificial Sequence: Synthetic oligonucleotide
  Target: ATXN2; (+) strand; PAM type: NRG; PAM sequence: CAG
aattcgaggttacacagtta

SEQ ID NO: 51874 - DNA, 20 bp, Artificial Sequence
  Description of Artificial Sequence: Synthetic oligonucleotide
  Target: ATXN2; (+) strand; PAM type: NRG; PAM sequence: AAG
cgaggttacacagttacagt

SEQ ID NO: 51875 - DNA, 20 bp, Artificial Sequence
  Description of Artificial Sequence: Synthetic oligonucleotide
  Target: ATXN2; (+) strand; PAM type: NRG; PAM sequence: GAG
gtgccactacactccaccct

SEQ ID NO: 51876 - DNA, 20 bp, Artificial Sequence
  Description of Artificial Sequence: Synthetic oligonucleotide
  Target: ATXN2; (+) strand; PAM type: NRG; PAM sequence: CAG
ctacactccaccctgagcaa

SEQ ID NO: 51877 - DNA, 20 bp, Artificial Sequence
  Description of Artificial Sequence: Synthetic oligonucleotide
  Target: ATXN2; (+) strand; PAM type: NRG; PAM sequence: GAG
acactccaccctgagcaaca

SEQ ID NO: 51878 - DNA, 20 bp, Artificial Sequence
  Description of Artificial Sequence: Synthetic oligonucleotide
  Target: ATXN2; (+) strand; PAM type: NRG; PAM sequence: AGG
cactccaccctgagcaacag

SEQ ID NO: 51879 - DNA, 20 bp, Artificial Sequence
  Description of Artificial Sequence: Synthetic oligonucleotide
  Target: ATXN2; (+) strand; PAM type: NRG; PAM sequence: AAG
tccaccctgagcaacagagg

SEQ ID NO: 51880 - DNA, 20 bp, Artificial Sequence
  Description of Artificial Sequence: Synthetic oligonucleotide
  Target: ATXN2; (+) strand; PAM type: NRG; PAM sequence: AAG
ggaagattctgtctccaaaa

SEQ ID NO: 51881 - DNA, 20 bp, Artificial Sequence
  Description of Artificial Sequence: Synthetic oligonucleotide
  Target: ATXN2; (+) strand; PAM type: NRG; PAM sequence: AAG
caaaaaagaaaaaaaaaaaa

SEQ ID NO: 51882 - DNA, 20 bp, Artificial Sequence
  Description of Artificial Sequence: Synthetic oligonucleotide
  Target: ATXN2; (+) strand; PAM type: NRG; PAM sequence: CGG
aaaaaaaaaaaagatgacaa

SEQ ID NO: 51883 - DNA, 20 bp, Artificial Sequence
  Description of Artificial Sequence: Synthetic oligonucleotide
  Target: ATXN2; (+) strand; PAM type: NRG; PAM sequence: CGG
aaaaaaagatgacaacggaa

SEQ ID NO: 51884 - DNA, 20 bp, Artificial Sequence
  Description of Artificial Sequence: Synthetic oligonucleotide
  Target: ATXN2; (+) strand; PAM type: NRG; PAM sequence: GGG
aaaaaagatgacaacggaac

SEQ ID NO: 51885 - DNA, 20 bp, Artificial Sequence
  Description of Artificial Sequence: Synthetic oligonucleotide
  Target: ATXN2; (+) strand; PAM type: NRG; PAM sequence: GAG
aaaagatgacaacggaacgg

SEQ ID NO: 51886 - DNA, 20 bp, Artificial Sequence
  Description of Artificial Sequence: Synthetic oligonucleotide
  Target: ATXN2; (+) strand; PAM type: NRG; PAM sequence: AGG
aaagatgacaacggaacggg

SEQ ID NO: 51887 - DNA, 20 bp, Artificial Sequence
  Description of Artificial Sequence: Synthetic oligonucleotide
  Target: ATXN2; (+) strand; PAM type: NRG; PAM sequence: TGG
gatgacaacggaacgggagg

SEQ ID NO: 51888 - DNA, 20 bp, Artificial Sequence
  Description of Artificial Sequence: Synthetic oligonucleotide
  Target: ATXN2; (+) strand; PAM type: NRG; PAM sequence: GGG
atgacaacggaacgggaggt

SEQ ID NO: 51889 - DNA, 20 bp, Artificial Sequence
  Description of Artificial Sequence: Synthetic oligonucleotide
  Target: ATXN2; (+) strand; PAM type: NRG; PAM sequence: TAG
aacggaacgggaggtgggtg

SEQ ID NO: 51890 - DNA, 20 bp, Artificial Sequence
  Description of Artificial Sequence: Synthetic oligonucleotide
  Target: ATXN2; (+) strand; PAM type: NRG; PAM sequence: CAG
acgggaggtgggtgtagtcc

SEQ ID NO: 51891 - DNA, 20 bp, Artificial Sequence
  Description of Artificial Sequence: Synthetic oligonucleotide
  Target: ATXN2; (+) strand; PAM type: NRG; PAM sequence: AAG
tgggtgtagtcccagctact

SEQ ID NO: 51892 - DNA, 20 bp, Artificial Sequence
  Description of Artificial Sequence: Synthetic oligonucleotide
  Target: ATXN2; (+) strand; PAM type: NRG; PAM sequence: AGG
gggtgtagtcccagctacta

SEQ ID NO: 51893 - DNA, 20 bp, Artificial Sequence
  Description of Artificial Sequence: Synthetic oligonucleotide
  Target: ATXN2; (+) strand; PAM type: NRG; PAM sequence: GAG
gtgtagtcccagctactaag

SEQ ID NO: 51894 - DNA, 20 bp, Artificial Sequence
  Description of Artificial Sequence: Synthetic oligonucleotide
  Target: ATXN2; (+) strand; PAM type: NRG; PAM sequence: AGG
tgtagtcccagctactaagg

SEQ ID NO: 51895 - DNA, 20 bp, Artificial Sequence
  Description of Artificial Sequence: Synthetic oligonucleotide
  Target: ATXN2; (+) strand; PAM type: NRG; PAM sequence: CAG
agtcccagctactaaggagg

SEQ ID NO: 51896 - DNA, 20 bp, Artificial Sequence
  Description of Artificial Sequence: Synthetic oligonucleotide
  Target: ATXN2; (+) strand; PAM type: NRG; PAM sequence: TGG
actaaggaggcagaatcatc

SEQ ID NO: 51897 - DNA, 20 bp, Artificial Sequence
  Description of Artificial Sequence: Synthetic oligonucleotide
  Target: ATXN2; (+) strand; PAM type: NRG; PAM sequence: GGG
ctaaggaggcagaatcatct

SEQ ID NO: 51898 - DNA, 20 bp, Artificial Sequence
  Description of Artificial Sequence: Synthetic oligonucleotide
  Target: ATXN2; (+) strand; PAM type: NRG; PAM sequence: CAG
gaggcagaatcatctgggct

SEQ ID NO: 51899 - DNA, 20 bp, Artificial Sequence
  Description of Artificial Sequence: Synthetic oligonucleotide
  Target: ATXN2; (+) strand; PAM type: NRG; PAM sequence: AGG
aggcagaatcatctgggctc

SEQ ID NO: 51900 - DNA, 20 bp, Artificial Sequence
  Description of Artificial Sequence: Synthetic oligonucleotide
  Target: ATXN2; (+) strand; PAM type: NRG; PAM sequence: GAG
gcagaatcatctgggctcag

SEQ ID NO: 51901 - DNA, 20 bp, Artificial Sequence
  Description of Artificial Sequence: Synthetic oligonucleotide
  Target: ATXN2; (+) strand; PAM type: NRG; PAM sequence: AAG
tcatctgggctcaggagttc

SEQ ID NO: 51902 - DNA, 20 bp, Artificial Sequence
  Description of Artificial Sequence: Synthetic oligonucleotide
  Target: ATXN2; (+) strand; PAM type: NRG; PAM sequence: AGG
catctgggctcaggagttca

SEQ ID NO: 51903 - DNA, 20 bp, Artificial Sequence
  Description of Artificial Sequence: Synthetic oligonucleotide
  Target: ATXN2; (+) strand; PAM type: NRG; PAM sequence: CAG
tgggctcaggagttcaaggt

SEQ ID NO: 51904 - DNA, 20 bp, Artificial Sequence
  Description of Artificial Sequence: Synthetic oligonucleotide
  Target: ATXN2; (+) strand; PAM type: NRG; PAM sequence: CAG
caggagttcaaggtcagcct

SEQ ID NO: 51905 - DNA, 20 bp, Artificial Sequence
  Description of Artificial Sequence: Synthetic oligonucleotide
  Target: ATXN2; (+) strand; PAM type: NRG; PAM sequence: AAG
aaggtcagcctcagcaacat

SEQ ID NO: 51906 - DNA, 20 bp, Artificial Sequence
  Description of Artificial Sequence: Synthetic oligonucleotide
  Target: ATXN2; (+) strand; PAM type: NRG; PAM sequence: AGG
aggtcagcctcagcaacata

SEQ ID NO: 51907 - DNA, 20 bp, Artificial Sequence
  Description of Artificial Sequence: Synthetic oligonucleotide
  Target: ATXN2; (+) strand; PAM type: NRG; PAM sequence: GAG
gtcagcctcagcaacataag

SEQ ID NO: 51908 - DNA, 20 bp, Artificial Sequence
  Description of Artificial Sequence: Synthetic oligonucleotide
  Target: ATXN2; (+) strand; PAM type: NRG; PAM sequence: TAG
cataaggagaccctgtctct

SEQ ID NO: 51909 - DNA, 20 bp, Artificial Sequence
  Description of Artificial Sequence: Synthetic oligonucleotide
  Target: ATXN2; (+) strand; PAM type: NRG; PAM sequence: AGG
ataaggagaccctgtctctt

SEQ ID NO: 51910 - DNA, 20 bp, Artificial Sequence
  Description of Artificial Sequence: Synthetic oligonucleotide
  Target: ATXN2; (+) strand; PAM type: NRG; PAM sequence: AAG
accctgtctcttaggaacaa

SEQ ID NO: 51911 - DNA, 20 bp, Artificial Sequence
  Description of Artificial Sequence: Synthetic oligonucleotide
  Target: ATXN2; (+) strand; PAM type: NRG; PAM sequence: AGG
ccctgtctcttaggaacaaa

SEQ ID NO: 51912 - DNA, 20 bp, Artificial Sequence
  Description of Artificial Sequence: Synthetic oligonucleotide
  Target: ATXN2; (+) strand; PAM type: NRG; PAM sequence: GGG
cctgtctcttaggaacaaaa

SEQ ID NO: 51913 - DNA, 20 bp, Artificial Sequence
  Description of Artificial Sequence: Synthetic oligonucleotide
  Target: ATXN2; (+) strand; PAM type: NRG; PAM sequence: GGG
ctgtctcttaggaacaaaag

SEQ ID NO: 51914 - DNA, 20 bp, Artificial Sequence
  Description of Artificial Sequence: Synthetic oligonucleotide
  Target: ATXN2; (+) strand; PAM type: NRG; PAM sequence: GAG
gtctcttaggaacaaaaggg

SEQ ID NO: 51915 - DNA, 20 bp, Artificial Sequence
  Description of Artificial Sequence: Synthetic oligonucleotide
  Target: ATXN2; (+) strand; PAM type: NRG; PAM sequence: AGG
tctcttaggaacaaaagggg

SEQ ID NO: 51916 - DNA, 20 bp, Artificial Sequence
  Description of Artificial Sequence: Synthetic oligonucleotide
  Target: ATXN2; (+) strand; PAM type: NRG; PAM sequence: GGG
ctcttaggaacaaaagggga

SEQ ID NO: 51917 - DNA, 20 bp, Artificial Sequence
  Description of Artificial Sequence: Synthetic oligonucleotide
  Target: ATXN2; (+) strand; PAM type: NRG; PAM sequence: GGG
tcttaggaacaaaaggggag

SEQ ID NO: 51918 - DNA, 20 bp, Artificial Sequence
  Description of Artificial Sequence: Synthetic oligonucleotide
  Target: ATXN2; (+) strand; PAM type: NRG; PAM sequence: GGG
cttaggaacaaaaggggagg

SEQ ID NO: 51919 - DNA, 20 bp, Artificial Sequence
  Description of Artificial Sequence: Synthetic oligonucleotide
  Target: ATXN2; (+) strand; PAM type: NRG; PAM sequence: GAG
taggaacaaaaggggagggg

SEQ ID NO: 51920 - DNA, 20 bp, Artificial Sequence
  Description of Artificial Sequence: Synthetic oligonucleotide
  Target: ATXN2; (+) strand; PAM type: NRG; PAM sequence: GAG
ggaacaaaaggggaggggga

SEQ ID NO: 51921 - DNA, 20 bp, Artificial Sequence
  Description of Artificial Sequence: Synthetic oligonucleotide
  Target: ATXN2; (+) strand; PAM type: NRG; PAM sequence: GAG
aacaaaaggggagggggaga

SEQ ID NO: 51922 - DNA, 20 bp, Artificial Sequence
  Description of Artificial Sequence: Synthetic oligonucleotide
  Target: ATXN2; (+) strand; PAM type: NRG; PAM sequence: AAG
aaaaggggagggggagagag

SEQ ID NO: 51923 - DNA, 20 bp, Artificial Sequence
  Description of Artificial Sequence: Synthetic oligonucleotide
  Target: ATXN2; (+) strand; PAM type: NRG; PAM sequence: AGG
aaaggggagggggagagaga

SEQ ID NO: 51924 - DNA, 20 bp, Artificial Sequence
  Description of Artificial Sequence: Synthetic oligonucleotide
  Target: ATXN2; (+) strand; PAM type: NRG; PAM sequence: GGG
aaggggagggggagagagaa

SEQ ID NO: 51925 - DNA, 20 bp, Artificial Sequence
  Description of Artificial Sequence: Synthetic oligonucleotide
  Target: ATXN2; (+) strand; PAM type: NRG; PAM sequence: GGG
aggggagggggagagagaag

SEQ ID NO: 51926 - DNA, 20 bp, Artificial Sequence
  Description of Artificial Sequence: Synthetic oligonucleotide
  Target: ATXN2; (+) strand; PAM type: NRG; PAM sequence: GAG
gggagggggagagagaaggg

SEQ ID NO: 51927 - DNA, 20 bp, Artificial Sequence
  Description of Artificial Sequence: Synthetic oligonucleotide
  Target: ATXN2; (+) strand; PAM type: NRG; PAM sequence: AGG
ggagggggagagagaagggg

SEQ ID NO: 51928 - DNA, 20 bp, Artificial Sequence
  Description of Artificial Sequence: Synthetic oligonucleotide
  Target: ATXN2; (+) strand; PAM type: NRG; PAM sequence: GGG
gagggggagagagaagggga

SEQ ID NO: 51929 - DNA, 20 bp, Artificial Sequence
  Description of Artificial Sequence: Synthetic oligonucleotide
  Target: ATXN2; (+) strand; PAM type: NRG; PAM sequence: GAG
gggggagagagaaggggagg

SEQ ID NO: 51930 - DNA, 20 bp, Artificial Sequence
  Description of Artificial Sequence: Synthetic oligonucleotide
  Target: ATXN2; (+) strand; PAM type: NRG; PAM sequence: AGG
ggggagagagaaggggaggg

SEQ ID NO: 51931 - DNA, 20 bp, Artificial Sequence
  Description of Artificial Sequence: Synthetic oligonucleotide
  Target: ATXN2; (+) strand; PAM type: NRG; PAM sequence: GGG
gggagagagaaggggaggga

SEQ ID NO: 51932 - DNA, 20 bp, Artificial Sequence
  Description of Artificial Sequence: Synthetic oligonucleotide
  Target: ATXN2; (+) strand; PAM type: NRG; PAM sequence: GGG
ggagagagaaggggagggag

SEQ ID NO: 51933 - DNA, 20 bp, Artificial Sequence
  Description of Artificial Sequence: Synthetic oligonucleotide
  Target: ATXN2; (+) strand; PAM type: NRG; PAM sequence: GGG
gagagagaaggggagggagg

SEQ ID NO: 51934 - DNA, 20 bp, Artificial Sequence
  Description of Artificial Sequence: Synthetic oligonucleotide
  Target: ATXN2; (+) strand; PAM type: NRG; PAM sequence: GGG
agagagaaggggagggaggg

SEQ ID NO: 51935 - DNA, 20 bp, Artificial Sequence
  Description of Artificial Sequence: Synthetic oligonucleotide
  Target: ATXN2; (+) strand; PAM type: NRG; PAM sequence: GGG
gagagaaggggagggagggg

SEQ ID NO: 51936 - DNA, 20 bp, Artificial Sequence
  Description of Artificial Sequence: Synthetic oligonucleotide
  Target: ATXN2; (+) strand; PAM type: NRG; PAM sequence: GAG
gagaaggggagggagggggg

SEQ ID NO: 51937 - DNA, 20 bp, Artificial Sequence
  Description of Artificial Sequence: Synthetic oligonucleotide
  Target: ATXN2; (+) strand; PAM type: NRG; PAM sequence: GAG
gaaggggagggaggggggga

SEQ ID NO: 51938 - DNA, 20 bp, Artificial Sequence
  Description of Artificial Sequence: Synthetic oligonucleotide
  Target: ATXN2; (+) strand; PAM type: NRG; PAM sequence: GAG
aggggagggagggggggaga

SEQ ID NO: 51939 - DNA, 20 bp, Artificial Sequence
  Description of Artificial Sequence: Synthetic oligonucleotide
  Target: ATXN2; (+) strand; PAM type: NRG; PAM sequence: AAG
ggagggagggggggagagag

SEQ ID NO: 51940 - DNA, 20 bp, Artificial Sequence
  Description of Artificial Sequence: Synthetic oligonucleotide
  Target: ATXN2; (+) strand; PAM type: NRG; PAM sequence: AGG
gagggagggggggagagaga

SEQ ID NO: 51941 - DNA, 20 bp, Artificial Sequence
  Description of Artificial Sequence: Synthetic oligonucleotide
  Target: ATXN2; (+) strand; PAM type: NRG; PAM sequence: GGG
agggagggggggagagagaa

SEQ ID NO: 51942 - DNA, 20 bp, Artificial Sequence
  Description of Artificial Sequence: Synthetic oligonucleotide
  Target: ATXN2; (+) strand; PAM type: NRG; PAM sequence: GGG
gggagggggggagagagaag

SEQ ID NO: 51943 - DNA, 20 bp, Artificial Sequence
  Description of Artificial Sequence: Synthetic oligonucleotide
  Target: ATXN2; (+) strand; PAM type: NRG; PAM sequence: GAG
gagggggggagagagaaggg

SEQ ID NO: 51944 - DNA, 20 bp, Artificial Sequence
  Description of Artificial Sequence: Synthetic oligonucleotide
  Target: ATXN2; (+) strand; PAM type: NRG; PAM sequence: AGG
agggggggagagagaagggg

SEQ ID NO: 51945 - DNA, 20 bp, Artificial Sequence
  Description of Artificial Sequence: Synthetic oligonucleotide
  Target: ATXN2; (+) strand; PAM type: NRG; PAM sequence: GGG
gggggggagagagaagggga

SEQ ID NO: 51946 - DNA, 20 bp, Artificial Sequence
  Description of Artificial Sequence: Synthetic oligonucleotide
  Target: ATXN2; (+) strand; PAM type: NRG; PAM sequence: GAG
gggggagagagaaggggagg

SEQ ID NO: 51947 - DNA, 20 bp, Artificial Sequence
  Description of Artificial Sequence: Synthetic oligonucleotide
  Target: ATXN2; (+) strand; PAM type: NRG; PAM sequence: AGG
ggggagagagaaggggaggg

SEQ ID NO: 51948 - DNA, 20 bp, Artificial Sequence
  Description of Artificial Sequence: Synthetic oligonucleotide
  Target: ATXN2; (+) strand; PAM type: NRG; PAM sequence: GGG
gggagagagaaggggaggga

SEQ ID NO: 51949 - DNA, 20 bp, Artificial Sequence
  Description of Artificial Sequence: Synthetic oligonucleotide
  Target: ATXN2; (+) strand; PAM type: NRG; PAM sequence: GAG
gagagagaaggggagggagg

SEQ ID NO: 51950 - DNA, 20 bp, Artificial Sequence
  Description of Artificial Sequence: Synthetic oligonucleotide
  Target: ATXN2; (+) strand; PAM type: NRG; PAM sequence: AGG
agagagaaggggagggaggg

SEQ ID NO: 51951 - DNA, 20 bp, Artificial Sequence
  Description of Artificial Sequence: Synthetic oligonucleotide
  Target: ATXN2; (+) strand; PAM type: NRG; PAM sequence: GGG
gagagaaggggagggaggga

SEQ ID NO: 51952 - DNA, 20 bp, Artificial Sequence
  Description of Artificial Sequence: Synthetic oligonucleotide
  Target: ATXN2; (+) strand; PAM type: NRG; PAM sequence: GAG
gagaaggggagggagggagg

SEQ ID NO: 51953 - DNA, 20 bp, Artificial Sequence
  Description of Artificial Sequence: Synthetic oligonucleotide
  Target: ATXN2; (+) strand; PAM type: NRG; PAM sequence: GAG
gaaggggagggagggaggga

SEQ ID NO: 51954 - DNA, 20 bp, Artificial Sequence
  Description of Artificial Sequence: Synthetic oligonucleotide
  Target: ATXN2; (+) strand; PAM type: NRG; PAM sequence: GAG
aggggagggagggagggaga

SEQ ID NO: 51955 - DNA, 20 bp, Artificial Sequence
  Description of Artificial Sequence: Synthetic oligonucleotide
  Target: ATXN2; (+) strand; PAM type: NRG; PAM sequence: AGG
ggggagggagggagggagag

SEQ ID NO: 51956 - DNA, 20 bp, Artificial Sequence
  Description of Artificial Sequence: Synthetic oligonucleotide
  Target: ATXN2; (+) strand; PAM type: NRG; PAM sequence: AAG
gagggagggagggagagagg

SEQ ID NO: 51957 - DNA, 20 bp, Artificial Sequence
  Description of Artificial Sequence: Synthetic oligonucleotide
  Target: ATXN2; (+) strand; PAM type: NRG; PAM sequence: AGG
agggagggagggagagagga

SEQ ID NO: 51958 - DNA, 20 bp, Artificial Sequence
  Description of Artificial Sequence: Synthetic oligonucleotide
  Target: ATXN2; (+) strand; PAM type: NRG; PAM sequence: GGG
gggagggagggagagaggaa

SEQ ID NO: 51959 - DNA, 20 bp, Artificial Sequence
  Description of Artificial Sequence: Synthetic oligonucleotide
  Target: ATXN2; (+) strand; PAM type: NRG; PAM sequence: TGG
gggagggagagaggaagggt

SEQ ID NO: 51960 - DNA, 20 bp, Artificial Sequence
  Description of Artificial Sequence: Synthetic oligonucleotide
  Target: ATXN2; (+) strand; PAM type: NRG; PAM sequence: GGG
ggagggagagaggaagggtt

SEQ ID NO: 51961 - DNA, 20 bp, Artificial Sequence
  Description of Artificial Sequence: Synthetic oligonucleotide
  Target: ATXN2; (+) strand; PAM type: NRG; PAM sequence: GAG
agggagagaggaagggttgg

SEQ ID NO: 51962 - DNA, 20 bp, Artificial Sequence
  Description of Artificial Sequence: Synthetic oligonucleotide
  Target: ATXN2; (+) strand; PAM type: NRG; PAM sequence: GAG
ggagagaggaagggttggga

SEQ ID NO: 51963 - DNA, 20 bp, Artificial Sequence
  Description of Artificial Sequence: Synthetic oligonucleotide
  Target: ATXN2; (+) strand; PAM type: NRG; PAM sequence: CAG
agaggaagggttgggagaga

SEQ ID NO: 51964 - DNA, 20 bp, Artificial Sequence
  Description of Artificial Sequence: Synthetic oligonucleotide
  Target: ATXN2; (+) strand; PAM type: NRG; PAM sequence: GAG
aggaagggttgggagagaca

SEQ ID NO: 51965 - DNA, 20 bp, Artificial Sequence
  Description of Artificial Sequence: Synthetic oligonucleotide
  Target: ATXN2; (+) strand; PAM type: NRG; PAM sequence: AAG
agggttgggagagacagaga

SEQ ID NO: 51966 - DNA, 20 bp, Artificial Sequence
  Description of Artificial Sequence: Synthetic oligonucleotide
  Target: ATXN2; (+) strand; PAM type: NRG; PAM sequence: AAG
gggagagacagagaaagaaa

SEQ ID NO: 51967 - DNA, 20 bp, Artificial Sequence
  Description of Artificial Sequence: Synthetic oligonucleotide
  Target: ATXN2; (+) strand; PAM type: NRG; PAM sequence: AAG
gagacagagaaagaaaaaga

SEQ ID NO: 51968 - DNA, 20 bp, Artificial Sequence
  Description of Artificial Sequence: Synthetic oligonucleotide
  Target: ATXN2; (+) strand; PAM type: NRG; PAM sequence: AGG
agacagagaaagaaaaagaa

SEQ ID NO: 51969 - DNA, 20 bp, Artificial Sequence
  Description of Artificial Sequence: Synthetic oligonucleotide
  Target: ATXN2; (+) strand; PAM type: NRG; PAM sequence: AAG
aaaagaaaggaaaaaataaa

SEQ ID NO: 51970 - DNA, 20 bp, Artificial Sequence
  Description of Artificial Sequence: Synthetic oligonucleotide
  Target: ATXN2; (+) strand; PAM type: NRG; PAM sequence: AGG
aaagaaaggaaaaaataaaa

SEQ ID NO: 51971 - DNA, 20 bp, Artificial Sequence
  Description of Artificial Sequence: Synthetic oligonucleotide
  Target: ATXN2; (+) strand; PAM type: NRG; PAM sequence: GAG
agaaaggaaaaaataaaaag

SEQ ID NO: 51972 - DNA, 20 bp, Artificial Sequence
  Description of Artificial Sequence: Synthetic oligonucleotide
  Target: ATXN2; (+) strand; PAM type: NRG; PAM sequence: GAG
aaaggaaaaaataaaaagga

SEQ ID NO: 51973 - DNA, 20 bp, Artificial Sequence
  Description of Artificial Sequence: Synthetic oligonucleotide
  Target: ATXN2; (+) strand; PAM type: NRG; PAM sequence: AAG
gaaaaaataaaaaggagaga

SEQ ID NO: 51974 - DNA, 20 bp, Artificial Sequence
  Description of Artificial Sequence: Synthetic oligonucleotide
  Target: ATXN2; (+) strand; PAM type: NRG; PAM sequence: AGG
aaaaaataaaaaggagagaa

SEQ ID NO: 51975 - DNA, 20 bp, Artificial Sequence
  Description of Artificial Sequence: Synthetic oligonucleotide
  Target: ATXN2; (+) strand; PAM type: NRG; PAM sequence: AAG
aaataaaaaggagagaaagg

SEQ ID NO: 51976 - DNA, 20 bp, Artificial Sequence
  Description of Artificial Sequence: Synthetic oligonucleotide
  Target: ATXN2; (+) strand; PAM type: NRG; PAM sequence: AGG
aataaaaaggagagaaagga

SEQ ID NO: 51977 - DNA, 20 bp, Artificial Sequence
  Description of Artificial Sequence: Synthetic oligonucleotide
  Target: ATXN2; (+) strand; PAM type: NRG; PAM sequence: AAG
aaaaggagagaaaggaagga

SEQ ID NO: 51978 - DNA, 20 bp, Artificial Sequence
  Description of Artificial Sequence: Synthetic oligonucleotide
  Target: ATXN2; (+) strand; PAM type: NRG; PAM sequence: AAG
aggagagaaaggaaggaaag

SEQ ID NO: 51979 - DNA, 20 bp, Artificial Sequence
  Description of Artificial Sequence: Synthetic oligonucleotide
  Target: ATXN2; (+) strand; PAM type: NRG; PAM sequence: AGG
ggagagaaaggaaggaaaga

SEQ ID NO: 51980 - DNA, 20 bp, Artificial Sequence
  Description of Artificial Sequence: Synthetic oligonucleotide
  Target: ATXN2; (+) strand; PAM type: NRG; PAM sequence: GGG
gagagaaaggaaggaaagaa

SEQ ID NO: 51981 - DNA, 20 bp, Artificial Sequence
  Description of Artificial Sequence: Synthetic oligonucleotide
  Target: ATXN2; (+) strand; PAM type: NRG; PAM sequence: AAG
agaaaggaaggaaagaaggg

SEQ ID NO: 51982 - DNA, 20 bp, Artificial Sequence
  Description of Artificial Sequence: Synthetic oligonucleotide
  Target: ATXN2; (+) strand; PAM type: NRG; PAM sequence: CAG
aggaaggaaagaagggaaga

SEQ ID NO: 51983 - DNA, 20 bp, Artificial Sequence
  Description of Artificial Sequence: Synthetic oligonucleotide
  Target: ATXN2; (+) strand; PAM type: NRG; PAM sequence: AGG
ggaaggaaagaagggaagac

SEQ ID NO: 51984 - DNA, 20 bp, Artificial Sequence
  Description of Artificial Sequence: Synthetic oligonucleotide
  Target: ATXN2; (+) strand; PAM type: NRG; PAM sequence: GAG
aaggaaagaagggaagacag

SEQ ID NO: 51985 - DNA, 20 bp, Artificial Sequence
  Description of Artificial Sequence: Synthetic oligonucleotide
  Target: ATXN2; (+) strand; PAM type: NRG; PAM sequence: AGG
aggaaagaagggaagacagg

SEQ ID NO: 51986 - DNA, 20 bp, Artificial Sequence
  Description of Artificial Sequence: Synthetic oligonucleotide
  Target: ATXN2; (+) strand; PAM type: NRG; PAM sequence: GAG
gaaagaagggaagacaggag

SEQ ID NO: 51987 - DNA, 20 bp, Artificial Sequence
  Description of Artificial Sequence: Synthetic oligonucleotide
  Target: ATXN2; (+) strand; PAM type: NRG; PAM sequence: AGG
aaagaagggaagacaggagg

SEQ ID NO: 51988 - DNA, 20 bp, Artificial Sequence
  Description of Artificial Sequence: Synthetic oligonucleotide
  Target: ATXN2; (+) strand; PAM type: NRG; PAM sequence: CAG
gaagggaagacaggaggagg

SEQ ID NO: 51989 - DNA, 20 bp, Artificial Sequence
  Description of Artificial Sequence: Synthetic oligonucleotide
  Target: ATXN2; (+) strand; PAM type: NRG; PAM sequence: CGG
gggaagacaggaggaggcag

SEQ ID NO: 51990 - DNA, 20 bp, Artificial Sequence
  Description of Artificial Sequence: Synthetic oligonucleotide
  Target: ATXN2; (+) strand; PAM type: NRG; PAM sequence: GGG
ggaagacaggaggaggcagc

SEQ ID NO: 51991 - DNA, 20 bp, Artificial Sequence
  Description of Artificial Sequence: Synthetic oligonucleotide
  Target: ATXN2; (+) strand; PAM type: NRG; PAM sequence: GGG
gaagacaggaggaggcagcg

SEQ ID NO: 51992 - DNA, 20 bp, Artificial Sequence
  Description of Artificial Sequence: Synthetic oligonucleotide
  Target: ATXN2; (+) strand; PAM type: NRG; PAM sequence: GAG
agacaggaggaggcagcggg

SEQ ID NO: 51993 - DNA, 20 bp, Artificial Sequence
  Description of Artificial Sequence: Synthetic oligonucleotide
  Target: ATXN2; (+) strand; PAM type: NRG; PAM sequence: AGG
gacaggaggaggcagcgggg

SEQ ID NO: 51994 - DNA, 20 bp, Artificial Sequence
  Description of Artificial Sequence: Synthetic oligonucleotide
  Target: ATXN2; (+) strand; PAM type: NRG; PAM sequence: GGG
acaggaggaggcagcgggga

SEQ ID NO: 51995 - DNA, 20 bp, Artificial Sequence
  Description of Artificial Sequence: Synthetic oligonucleotide
  Target: ATXN2; (+) strand; PAM type: NRG; PAM sequence: GGG
caggaggaggcagcggggag

SEQ ID NO: 51996 - DNA, 20 bp, Artificial Sequence
  Description of Artificial Sequence: Synthetic oligonucleotide
  Target: ATXN2; (+) strand; PAM type: NRG; PAM sequence: AAG
aggcagcggggaggggaaaa

SEQ ID NO: 51997 - DNA, 20 bp, Artificial Sequence
  Description of Artificial Sequence: Synthetic oligonucleotide
  Target: ATXN2; (+) strand; PAM type: NRG; PAM sequence: AGG
ggcagcggggaggggaaaaa

SEQ ID NO: 51998 - DNA, 20 bp, Artificial Sequence
  Description of Artificial Sequence: Synthetic oligonucleotide
  Target: ATXN2; (+) strand; PAM type: NRG; PAM sequence: GAG
cagcggggaggggaaaaaag

SEQ ID NO: 51999 - DNA, 20 bp, Artificial Sequence
  Description of Artificial Sequence: Synthetic oligonucleotide
  Target: ATXN2; (+) strand; PAM type: NRG; PAM sequence: GAG
gcggggaggggaaaaaagga

SEQ ID NO: 52000 - DNA, 20 bp, Artificial Sequence
  Description of Artificial Sequence: Synthetic oligonucleotide
  Target: ATXN2; (+) strand; PAM type: NRG; PAM sequence: AGG
cggggaggggaaaaaaggag

SEQ ID NO: 52001 - DNA, 20 bp, Artificial Sequence
  Description of Artificial Sequence: Synthetic oligonucleotide
  Target: ATXN2; (+) strand; PAM type: NRG; PAM sequence: GAG
gggaggggaaaaaaggagag

SEQ ID NO: 52002 - DNA, 20 bp, Artificial Sequence
  Description of Artificial Sequence: Synthetic oligonucleotide
  Target: ATXN2; (+) strand; PAM type: NRG; PAM sequence: AGG
ggaggggaaaaaaggagagg

SEQ ID NO: 52003 - DNA, 20 bp, Artificial Sequence
  Description of Artificial Sequence: Synthetic oligonucleotide
  Target: ATXN2; (+) strand; PAM type: NRG; PAM sequence: GGG
gaggggaaaaaaggagagga

SEQ ID NO: 52004 - DNA, 20 bp, Artificial Sequence
  Description of Artificial Sequence: Synthetic oligonucleotide
  Target: ATXN2; (+) strand; PAM type: NRG; PAM sequence: AAG
aaaaaaggagaggagggatg

SEQ ID NO: 52005 - DNA, 20 bp, Artificial Sequence
  Description of Artificial Sequence: Synthetic oligonucleotide
  Target: ATXN2; (+) strand; PAM type: NRG; PAM sequence: GAG
aaaaggagaggagggatgaa

SEQ ID NO: 52006 - DNA, 20 bp, Artificial Sequence
  Description of Artificial Sequence: Synthetic oligonucleotide
  Target: ATXN2; (+) strand; PAM type: NRG; PAM sequence: AAG
ggagaggagggatgaagaga

SEQ ID NO: 52007 - DNA, 20 bp, Artificial Sequence
  Description of Artificial Sequence: Synthetic oligonucleotide
  Target: ATXN2; (+) strand; PAM type: NRG; PAM sequence: AAG
aggagggatgaagagaaaga

SEQ ID NO: 52008 - DNA, 20 bp, Artificial Sequence
  Description of Artificial Sequence: Synthetic oligonucleotide
  Target: ATXN2; (+) strand; PAM type: NRG; PAM sequence: AGG
ggagggatgaagagaaagaa

SEQ ID NO: 52009 - DNA, 20 bp, Artificial Sequence
  Description of Artificial Sequence: Synthetic oligonucleotide
  Target: ATXN2; (+) strand; PAM type: NRG; PAM sequence: AAG
gagaaagaaaggaaacgaca

SEQ ID NO: 52010 - DNA, 20 bp, Artificial Sequence
  Description of Artificial Sequence: Synthetic oligonucleotide
  Target: ATXN2; (+) strand; PAM type: NRG; PAM sequence: AAG
aagaaaggaaacgacaaaga

SEQ ID NO: 52011 - DNA, 20 bp, Artificial Sequence
  Description of Artificial Sequence: Synthetic oligonucleotide
  Target: ATXN2; (+) strand; PAM type: NRG; PAM sequence: AGG
agaaaggaaacgacaaagaa

SEQ ID NO: 52012 - DNA, 20 bp, Artificial Sequence
  Description of Artificial Sequence: Synthetic oligonucleotide
  Target: ATXN2; (+) strand; PAM type: NRG; PAM sequence: CAG
aggaaacgacaaagaaaggc

SEQ ID NO: 52013 - DNA, 20 bp, Artificial Sequence
  Description of Artificial Sequence: Synthetic oligonucleotide
  Target: ATXN2; (+) strand; PAM type: NRG; PAM sequence: AGG
ggaaacgacaaagaaaggcc

SEQ ID NO: 52014 - DNA, 20 bp, Artificial Sequence
  Description of Artificial Sequence: Synthetic oligonucleotide
  Target: ATXN2; (+) strand; PAM type: NRG; PAM sequence: TGG
cgacaaagaaaggccaggca

SEQ ID NO: 52015 - DNA, 20 bp, Artificial Sequence
  Description of Artificial Sequence: Synthetic oligonucleotide
  Target: ATXN2; (+) strand; PAM type: NRG; PAM sequence: TGG
caaagaaaggccaggcatgg

SEQ ID NO: 52016 - DNA, 20 bp, Artificial Sequence
  Description of Artificial Sequence: Synthetic oligonucleotide
  Target: ATXN2; (+) strand; PAM type: NRG; PAM sequence: CAG
gtggctcatgcctataatcc

SEQ ID NO: 52017 - DNA, 20 bp, Artificial Sequence
  Description of Artificial Sequence: Synthetic oligonucleotide
  Target: ATXN2; (+) strand; PAM type: NRG; PAM sequence: TGG
catgcctataatcccagcac

SEQ ID NO: 52018 - DNA, 20 bp, Artificial Sequence
  Description of Artificial Sequence: Synthetic oligonucleotide
  Target: ATXN2; (+) strand; PAM type: NRG; PAM sequence: GGG
atgcctataatcccagcact

SEQ ID NO: 52019 - DNA, 20 bp, Artificial Sequence
  Description of Artificial Sequence: Synthetic oligonucleotide
  Target: ATXN2; (+) strand; PAM type: NRG; PAM sequence: GAG
gcctataatcccagcactgg

SEQ ID NO: 52020 - DNA, 20 bp, Artificial Sequence
  Description of Artificial Sequence: Synthetic oligonucleotide
  Target: ATXN2; (+) strand; PAM type: NRG; PAM sequence: AGG
cctataatcccagcactggg

SEQ ID NO: 52021 - DNA, 20 bp, Artificial Sequence
  Description of Artificial Sequence: Synthetic oligonucleotide
  Target: ATXN2; (+) strand; PAM type: NRG; PAM sequence: GAG
aatcccagcactgggaggcc

SEQ ID NO: 52022 - DNA, 20 bp, Artificial Sequence
  Description of Artificial Sequence: Synthetic oligonucleotide
  Target: ATXN2; (+) strand; PAM type: NRG; PAM sequence: AGG
atcccagcactgggaggccg

SEQ ID NO: 52023 - DNA, 20 bp, Artificial Sequence
  Description of Artificial Sequence: Synthetic oligonucleotide
  Target: ATXN2; (+) strand; PAM type: NRG; PAM sequence: CAG
ccagcactgggaggccgagg

SEQ ID NO: 52024 - DNA, 20 bp, Artificial Sequence
  Description of Artificial Sequence: Synthetic oligonucleotide
  Target: ATXN2; (+) strand; PAM type: NRG; PAM sequence: AGG
cagcactgggaggccgaggc

SEQ ID NO: 52025 - DNA, 20 bp, Artificial Sequence
  Description of Artificial Sequence: Synthetic oligonucleotide
  Target: ATXN2; (+) strand; PAM type: NRG; PAM sequence: TGG
cactgggaggccgaggcagg

SEQ ID NO: 52026 - DNA, 20 bp, Artificial Sequence
  Description of Artificial Sequence: Synthetic oligonucleotide
  Target: ATXN2; (+) strand; PAM type: NRG; PAM sequence: GAG
ccgaggcaggtggatcacct

SEQ ID NO: 52027 - DNA, 20 bp, Artificial Sequence
  Description of Artificial Sequence: Synthetic oligonucleotide
  Target: ATXN2; (+) strand; PAM type: NRG; PAM sequence: AGG
cgaggcaggtggatcacctg

SEQ ID NO: 52028 - DNA, 20 bp, Artificial Sequence
  Description of Artificial Sequence: Synthetic oligonucleotide
  Target: ATXN2; (+) strand; PAM type: NRG; PAM sequence: GAG
ggtggatcacctgaggtcat

SEQ ID NO: 52029 - DNA, 20 bp, Artificial Sequence
  Description of Artificial Sequence: Synthetic oligonucleotide
  Target: ATXN2; (+) strand; PAM type: NRG; PAM sequence: GAG
tcacctgaggtcatgagttc

SEQ ID NO: 52030 - DNA, 20 bp, Artificial Sequence
  Description of Artificial Sequence: Synthetic oligonucleotide
  Target: ATXN2; (+) strand; PAM type: NRG; PAM sequence: CAG
tgaggtcatgagttcgagac

SEQ ID NO: 52031 - DNA, 20 bp, Artificial Sequence
  Description of Artificial Sequence: Synthetic oligonucleotide
  Target: ATXN2; (+) strand; PAM type: NRG; PAM sequence: TGG
tcatgagttcgagaccagcc

SEQ ID NO: 52032 - DNA, 20 bp, Artificial Sequence
  Description of Artificial Sequence: Synthetic oligonucleotide
  Target: ATXN2; (+) strand; PAM type: NRG; PAM sequence: TGG
cgagaccagcctggccaaca

SEQ ID NO: 52033 - DNA, 20 bp, Artificial Sequence
  Description of Artificial Sequence: Synthetic oligonucleotide
  Target: ATXN2; (+) strand; PAM type: NRG; PAM sequence: TAG
ctctactaaaatacaaaacc

SEQ ID NO: 52034 - DNA, 20 bp, Artificial Sequence
  Description of Artificial Sequence: Synthetic oligonucleotide
  Target: ATXN2; (+) strand; PAM type: NRG; PAM sequence: CGG
actaaaatacaaaacctagc

SEQ ID NO: 52035 - DNA, 20 bp, Artificial Sequence
  Description of Artificial Sequence: Synthetic oligonucleotide
  Target: ATXN2; (+) strand; PAM type: NRG; PAM sequence: TGG
atacaaaacctagccggctg

SEQ ID NO: 52036 - DNA, 20 bp, Artificial Sequence
  Description of Artificial Sequence: Synthetic oligonucleotide
  Target: ATXN2; (+) strand; PAM type: NRG; PAM sequence: TGG
caaaacctagccggctgtgg

SEQ ID NO: 52037 - DNA, 20 bp, Artificial Sequence
  Description of Artificial Sequence: Synthetic oligonucleotide
  Target: ATXN2; (+) strand; PAM type: NRG; PAM sequence: CAG
aacctagccggctgtggtgg

SEQ ID NO: 52038 - DNA, 20 bp, Artificial Sequence
  Description of Artificial Sequence: Synthetic oligonucleotide
  Target: ATXN2; (+) strand; PAM type: NRG; PAM sequence: AGG
acctagccggctgtggtggc

SEQ ID NO: 52039 - DNA, 20 bp, Artificial Sequence
  Description of Artificial Sequence: Synthetic oligonucleotide
  Target: ATXN2; (+) strand; PAM type: NRG; PAM sequence: TAG
gctgtggtggcaggtgcctg

SEQ ID NO: 52040 - DNA, 20 bp, Artificial Sequence
  Description of Artificial Sequence: Synthetic oligonucleotide
  Target: ATXN2; (+) strand; PAM type: NRG; PAM sequence: CAG
gtggcaggtgcctgtagtcc

SEQ ID NO: 52041 - DNA, 20 bp, Artificial Sequence
  Description of Artificial Sequence: Synthetic oligonucleotide
  Target: ATXN2; (+) strand; PAM type: NRG; PAM sequence: TGG
tgcctgtagtcccagctact

SEQ ID NO: 52042 - DNA, 20 bp, Artificial Sequence
  Description of Artificial Sequence: Synthetic oligonucleotide
  Target: ATXN2; (+) strand; PAM type: NRG; PAM sequence: GGG
gcctgtagtcccagctactt

SEQ ID NO: 52043 - DNA, 20 bp, Artificial Sequence
  Description of Artificial Sequence: Synthetic oligonucleotide
  Target: ATXN2; (+) strand; PAM type: NRG; PAM sequence: GAG
ctgtagtcccagctacttgg

SEQ ID NO: 52044 - DNA, 20 bp, Artificial Sequence
  Description of Artificial Sequence: Synthetic oligonucleotide
  Target: ATXN2; (+) strand; PAM type: NRG; PAM sequence: AGG
tgtagtcccagctacttggg

SEQ ID NO: 52045 - DNA, 20 bp, Artificial Sequence
  Description of Artificial Sequence: Synthetic oligonucleotide
  Target: ATXN2; (+) strand; PAM type: NRG; PAM sequence: GAG
tcccagctacttgggaggct

SEQ ID NO: 52046 - DNA, 20 bp, Artificial Sequence
  Description of Artificial Sequence: Synthetic oligonucleotide
  Target: ATXN2; (+) strand; PAM type: NRG; PAM sequence: CAG
agctacttgggaggctgaga

SEQ ID NO: 52047 - DNA, 20 bp, Artificial Sequence
  Description of Artificial Sequence: Synthetic oligonucleotide
  Target: ATXN2; (+) strand; PAM type: NRG; PAM sequence: AGG
gctacttgggaggctgagac

SEQ ID NO: 52048 - DNA, 20 bp, Artificial Sequence
  Description of Artificial Sequence: Synthetic oligonucleotide
  Target: ATXN2; (+) strand; PAM type: NRG; PAM sequence: TAG
ttgggaggctgagacaggaa

SEQ ID NO: 52049 - DNA, 20 bp, Artificial Sequence
  Description of Artificial Sequence: Synthetic oligonucleotide
  Target: ATXN2; (+) strand; PAM type: NRG; PAM sequence: CAG
agacaggaatagcttgaacc

SEQ ID NO: 52050 - DNA, 20 bp, Artificial Sequence
  Description of Artificial Sequence: Synthetic oligonucleotide
  Target: ATXN2; (+) strand; PAM type: NRG; PAM sequence: AGG
gacaggaatagcttgaaccc

SEQ ID NO: 52051 - DNA, 20 bp, Artificial Sequence
  Description of Artificial Sequence: Synthetic oligonucleotide
  Target: ATXN2; (+) strand; PAM type: NRG; PAM sequence: GAG
caggaatagcttgaacccag

SEQ ID NO: 52052 - DNA, 20 bp, Artificial Sequence
  Description of Artificial Sequence: Synthetic oligonucleotide
  Target: ATXN2; (+) strand; PAM type: NRG; PAM sequence: AGG
aggaatagcttgaacccagg

SEQ ID NO: 52053 - DNA, 20 bp, Artificial Sequence
  Description of Artificial Sequence: Synthetic oligonucleotide
  Target: ATXN2; (+) strand; PAM type: NRG; PAM sequence: TGG
aatagcttgaacccaggagg

SEQ ID NO: 52054 - DNA, 20 bp, Artificial Sequence
  Description of Artificial Sequence: Synthetic oligonucleotide
  Target: ATXN2; (+) strand; PAM type: NRG; PAM sequence: GAG
tagcttgaacccaggaggtg

SEQ ID NO: 52055 - DNA, 20 bp, Artificial Sequence
  Description of Artificial Sequence: Synthetic oligonucleotide
  Target: ATXN2; (+) strand; PAM type: NRG; PAM sequence: AGG
agcttgaacccaggaggtgg

SEQ ID NO: 52056 - DNA, 20 bp, Artificial Sequence
  Description of Artificial Sequence: Synthetic oligonucleotide
  Target: ATXN2; (+) strand; PAM type: NRG; PAM sequence: AAG
acccaggaggtggaggttgc

SEQ ID NO: 52057 - DNA, 20 bp, Artificial Sequence
  Description of Artificial Sequence: Synthetic oligonucleotide
  Target: ATXN2; (+) strand; PAM type: NRG; PAM sequence: AGG
cccaggaggtggaggttgca

SEQ ID NO: 52058 - DNA, 20 bp, Artificial Sequence
  Description of Artificial Sequence: Synthetic oligonucleotide
  Target: ATXN2; (+) strand; PAM type: NRG; PAM sequence: GAG
caggaggtggaggttgcaag

SEQ ID NO: 52059 - DNA, 20 bp, Artificial Sequence
  Description of Artificial Sequence: Synthetic oligonucleotide
  Target: ATXN2; (+) strand; PAM type: NRG; PAM sequence: AAG
ggtggaggttgcaaggagcc

SEQ ID NO: 52060 - DNA, 20 bp, Artificial Sequence
  Description of Artificial Sequence: Synthetic oligonucleotide
  Target: ATXN2; (+) strand; PAM type: NRG; PAM sequence: TAG
aagattgccccactgcactc

SEQ ID NO: 52061 - DNA, 20 bp, Artificial Sequence
  Description of Artificial Sequence: Synthetic oligonucleotide
  Target: ATXN2; (+) strand; PAM type: NRG; PAM sequence: AGG
agattgccccactgcactct

SEQ ID NO: 52062 - DNA, 20 bp, Artificial Sequence
  Description of Artificial Sequence: Synthetic oligonucleotide
  Target: ATXN2; (+) strand; PAM type: NRG; PAM sequence: CGG
gccccactgcactctaggct

SEQ ID NO: 52063 - DNA, 20 bp, Artificial Sequence
  Description of Artificial Sequence: Synthetic oligonucleotide
  Target: ATXN2; (+) strand; PAM type: NRG; PAM sequence: CAG
ctgcactctaggctcggcaa

SEQ ID NO: 52064 - DNA, 20 bp, Artificial Sequence
  Description of Artificial Sequence: Synthetic oligonucleotide
  Target: ATXN2; (+) strand; PAM type: NRG; PAM sequence: GAG
gcactctaggctcggcaaca

SEQ ID NO: 52065 - DNA, 20 bp, Artificial Sequence
  Description of Artificial Sequence: Synthetic oligonucleotide
  Target: ATXN2; (+) strand; PAM type: NRG; PAM sequence: GAG
tctaggctcggcaacagagc

SEQ ID NO: 52066 - DNA, 20 bp, Artificial Sequence
  Description of Artificial Sequence: Synthetic oligonucleotide
  Target: ATXN2; (+) strand; PAM type: NRG; PAM sequence: AAG
ctcaaaaaaaaaaaaaaaaa

SEQ ID NO: 52067 - DNA, 20 bp, Artificial Sequence
  Description of Artificial Sequence: Synthetic oligonucleotide
  Target: ATXN2; (+) strand; PAM type: NRG; PAM sequence: TAG
aaaaaaaaaaagaaatgtat

SEQ ID NO: 52068 - DNA, 20 bp, Artificial Sequence
  Description of Artificial Sequence: Synthetic oligonucleotide
  Target: ATXN2; (+) strand; PAM type: NRG; PAM sequence: AAG
aagaaatgtattagaaataa

SEQ ID NO: 52069 - DNA, 20 bp, Artificial Sequence
  Description of Artificial Sequence: Synthetic oligonucleotide
  Target: ATXN2; (+) strand; PAM type: NRG; PAM sequence: CAG
tattagaaataaaagtacat

SEQ ID NO: 52070 - DNA, 20 bp, Artificial Sequence
  Description of Artificial Sequence: Synthetic oligonucleotide
  Target: ATXN2; (+) strand; PAM type: NRG; PAM sequence: CAG
agtacatcagattctaatgc

SEQ ID NO: 52071 - DNA, 20 bp, Artificial Sequence
  Description of Artificial Sequence: Synthetic oligonucleotide
  Target: ATXN2; (+) strand; PAM type: NRG; PAM sequence: CAG
agattctaatgccagttatg

SEQ ID NO: 52072 - DNA, 20 bp, Artificial Sequence
  Description of Artificial Sequence: Synthetic oligonucleotide
  Target: ATXN2; (+) strand; PAM type: NRG; PAM sequence: GAG
ccagttatgcagccaatgat

SEQ ID NO: 52073 - DNA, 20 bp, Artificial Sequence
  Description of Artificial Sequence: Synthetic oligonucleotide
  Target: ATXN2; (+) strand; PAM type: NRG; PAM sequence: TGG
cagccaatgatgagatactc

SEQ ID NO: 52074 - DNA, 20 bp, Artificial Sequence
  Description of Artificial Sequence: Synthetic oligonucleotide
  Target: ATXN2; (+) strand; PAM type: NRG; PAM sequence: TGG
actctggtaaataaccctct

SEQ ID NO: 52075 - DNA, 20 bp, Artificial Sequence
  Description of Artificial Sequence: Synthetic oligonucleotide
  Target: ATXN2; (+) strand; PAM type: NRG; PAM sequence: TAG
tcaatttcttcacccgtaaa

SEQ ID NO: 52076 - DNA, 20 bp, Artificial Sequence
  Description of Artificial Sequence: Synthetic oligonucleotide
  Target: ATXN2; (+) strand; PAM type: NRG; PAM sequence: GAG
tcttcacccgtaaatagaat

SEQ ID NO: 52077 - DNA, 20 bp, Artificial Sequence
  Description of Artificial Sequence: Synthetic oligonucleotide
  Target: ATXN2; (+) strand; PAM type: NRG; PAM sequence: CAG
aatgagtactaaaaaaccac

SEQ ID NO: 52078 - DNA, 20 bp, Artificial Sequence
  Description of Artificial Sequence: Synthetic oligonucleotide
  Target: ATXN2; (+) strand; PAM type: NRG; PAM sequence: GAG
tgagtactaaaaaaccacca

SEQ ID NO: 52079 - DNA, 20 bp, Artificial Sequence
  Description of Artificial Sequence: Synthetic oligonucleotide
  Target: ATXN2; (+) strand; PAM type: NRG; PAM sequence: CAG
tactaaaaaaccaccagagc

SEQ ID NO: 52080 - DNA, 20 bp, Artificial Sequence
  Description of Artificial Sequence: Synthetic oligonucleotide
  Target: ATXN2; (+) strand; PAM type: NRG; PAM sequence: GAG
ctaaaaaaccaccagagcca

SEQ ID NO: 52081 - DNA, 20 bp, Artificial Sequence
  Description of Artificial Sequence: Synthetic oligonucleotide
  Target: ATXN2; (+) strand; PAM type: NRG; PAM sequence: CAG
gccagagaaatccaaactac

SEQ ID NO: 52082 - DNA, 20 bp, Artificial Sequence
  Description of Artificial Sequence: Synthetic oligonucleotide
  Target: ATXN2; (+) strand; PAM type: NRG; PAM sequence: AGG
ccagagaaatccaaactacc

SEQ ID NO: 52083 - DNA, 20 bp, Artificial Sequence
  Description of Artificial Sequence: Synthetic oligonucleotide
  Target: ATXN2; (+) strand; PAM type: NRG; PAM sequence: GGG
cagagaaatccaaactacca

SEQ ID NO: 52084 - DNA, 20 bp, Artificial Sequence
  Description of Artificial Sequence: Synthetic oligonucleotide
  Target: ATXN2; (+) strand; PAM type: NRG; PAM sequence: AAG
gaaatccaaactaccaggga

SEQ ID NO: 52085 - DNA, 20 bp, Artificial Sequence
  Description of Artificial Sequence: Synthetic oligonucleotide
  Target: ATXN2; (+) strand; PAM type: NRG; PAM sequence: AGG
aaatccaaactaccagggaa

SEQ ID NO: 52086 - DNA, 20 bp, Artificial Sequence
  Description of Artificial Sequence: Synthetic oligonucleotide
  Target: ATXN2; (+) strand; PAM type: NRG; PAM sequence: GGG
aatccaaactaccagggaaa

SEQ ID NO: 52087 - DNA, 20 bp, Artificial Sequence
  Description of Artificial Sequence: Synthetic oligonucleotide
  Target: ATXN2; (+) strand; PAM type: NRG; PAM sequence: GAG
tccaaactaccagggaaagg

SEQ ID NO: 52088 - DNA, 20 bp, Artificial Sequence
  Description of Artificial Sequence: Synthetic oligonucleotide
  Target: ATXN2; (+) strand; PAM type: NRG; PAM sequence: AGG
ccaaactaccagggaaaggg

SEQ ID NO: 52089 - DNA, 20 bp, Artificial Sequence
  Description of Artificial Sequence: Synthetic oligonucleotide
  Target: ATXN2; (+) strand; PAM type: NRG; PAM sequence: GGG
caaactaccagggaaaggga

SEQ ID NO: 52090 - DNA, 20 bp, Artificial Sequence
  Description of Artificial Sequence: Synthetic oligonucleotide
  Target: ATXN2; (+) strand; PAM type: NRG; PAM sequence: GGG
aaactaccagggaaagggag

SEQ ID NO: 52091 - DNA, 20 bp, Artificial Sequence
  Description of Artificial Sequence: Synthetic oligonucleotide
  Target: ATXN2; (+) strand; PAM type: NRG; PAM sequence: GAG
gggaaagggaggggcccact

SEQ ID NO: 52092 - DNA, 20 bp, Artificial Sequence
  Description of Artificial Sequence: Synthetic oligonucleotide
  Target: ATXN2; (+) strand; PAM type: NRG; PAM sequence: CAG
gggcccactgagaaccaccc

SEQ ID NO: 52093 - DNA, 20 bp, Artificial Sequence
  Description of Artificial Sequence: Synthetic oligonucleotide
  Target: ATXN2; (+) strand; PAM type: NRG; PAM sequence: CAG
ccaccccagcaacccgacca

SEQ ID NO: 52094 - DNA, 20 bp, Artificial Sequence
  Description of Artificial Sequence: Synthetic oligonucleotide
  Target: ATXN2; (+) strand; PAM type: NRG; PAM sequence: TGG
cccagcaacccgaccacagc

SEQ ID NO: 52095 - DNA, 20 bp, Artificial Sequence
  Description of Artificial Sequence: Synthetic oligonucleotide
  Target: ATXN2; (+) strand; PAM type: NRG; PAM sequence: TGG
cgaccacagctggtcttccc

SEQ ID NO: 52096 - DNA, 20 bp, Artificial Sequence
  Description of Artificial Sequence: Synthetic oligonucleotide
  Target: ATXN2; (+) strand; PAM type: NRG; PAM sequence: CGG
ctcttcactcctgccaacat

SEQ ID NO: 52097 - DNA, 20 bp, Artificial Sequence
  Description of Artificial Sequence: Synthetic oligonucleotide
  Target: ATXN2; (+) strand; PAM type: NRG; PAM sequence: GAG
tcggccatccccctaactat

SEQ ID NO: 52098 - DNA, 20 bp, Artificial Sequence
  Description of Artificial Sequence: Synthetic oligonucleotide
  Target: ATXN2; (+) strand; PAM type: NRG; PAM sequence: AAG
cccctaactatgagatgctc

SEQ ID NO: 52099 - DNA, 20 bp, Artificial Sequence
  Description of Artificial Sequence: Synthetic oligonucleotide
  Target: ATXN2; (+) strand; PAM type: NRG; PAM sequence: AGG
ccctaactatgagatgctca

SEQ ID NO: 52100 - DNA, 20 bp, Artificial Sequence
  Description of Artificial Sequence: Synthetic oligonucleotide
  Target: ATXN2; (+) strand; PAM type: NRG; PAM sequence: GAG
ctaactatgagatgctcaag

SEQ ID NO: 52101 - DNA, 20 bp, Artificial Sequence
  Description of Artificial Sequence: Synthetic oligonucleotide
  Target: ATXN2; (+) strand; PAM type: NRG; PAM sequence: AGG
taactatgagatgctcaagg

SEQ ID NO: 52102 - DNA, 20 bp, Artificial Sequence
  Description of Artificial Sequence: Synthetic oligonucleotide
  Target: ATXN2; (+) strand; PAM type: NRG; PAM sequence: GAG
actatgagatgctcaaggag

SEQ ID NO: 52103 - DNA, 20 bp, Artificial Sequence
  Description of Artificial Sequence: Synthetic oligonucleotide
  Target: ATXN2; (+) strand; PAM type: NRG; PAM sequence: AAG
tgagatgctcaaggaggagc

SEQ ID NO: 52104 - DNA, 20 bp, Artificial Sequence
  Description of Artificial Sequence: Synthetic oligonucleotide
  Target: ATXN2; (+) strand; PAM type: NRG; PAM sequence: GAG
agatgctcaaggaggagcaa

SEQ ID NO: 52105 - DNA, 20 bp, Artificial Sequence
  Description of Artificial Sequence: Synthetic oligonucleotide
  Target: ATXN2; (+) strand; PAM type: NRG; PAM sequence: AGG
gatgctcaaggaggagcaag

SEQ ID NO: 52106 - DNA, 20 bp, Artificial Sequence
  Description of Artificial Sequence: Synthetic oligonucleotide
  Target: ATXN2; (+) strand; PAM type: NRG; PAM sequence: TGG
gctcaaggaggagcaagagg

SEQ ID NO: 52107 - DNA, 20 bp, Artificial Sequence
  Description of Artificial Sequence: Synthetic oligonucleotide
  Target: ATXN2; (+) strand; PAM type: NRG; PAM sequence: TGG
ggagcaagaggtggctgtgc

SEQ ID NO: 52108 - DNA, 20 bp, Artificial Sequence
  Description of Artificial Sequence: Synthetic oligonucleotide
  Target: ATXN2; (+) strand; PAM type: NRG; PAM sequence: GGG
gagcaagaggtggctgtgct

SEQ ID NO: 52109 - DNA, 20 bp, Artificial Sequence
  Description of Artificial Sequence: Synthetic oligonucleotide
  Target: ATXN2; (+) strand; PAM type: NRG; PAM sequence: GGG
agcaagaggtggctgtgctg

SEQ ID NO: 52110 - DNA, 20 bp, Artificial Sequence
  Description of Artificial Sequence: Synthetic oligonucleotide
  Target: ATXN2; (+) strand; PAM type: NRG; PAM sequence: GGG
gcaagaggtggctgtgctgg

SEQ ID NO: 52111 - DNA, 20 bp, Artificial Sequence
  Description of Artificial Sequence: Synthetic oligonucleotide
  Target: ATXN2; (+) strand; PAM type: NRG; PAM sequence: CAG
tccaccgtgatccccatcca

SEQ ID NO: 52112 - DNA, 20 bp, Artificial Sequence
  Description of Artificial Sequence: Synthetic oligonucleotide
  Target: ATXN2; (+) strand; PAM type: NRG; PAM sequence: GAG
ccgtgatccccatccacagc

SEQ ID NO: 52113 - DNA, 20 bp, Artificial Sequence
  Description of Artificial Sequence: Synthetic oligonucleotide
  Target: ATXN2; (+) strand; PAM type: NRG; PAM sequence: TGG
ccgtgcccgaccatgtcgtc

SEQ ID NO: 52114 - DNA, 20 bp, Artificial Sequence
  Description of Artificial Sequence: Synthetic oligonucleotide
  Target: ATXN2; (+) strand; PAM type: NRG; PAM sequence: TGG
cttcatgaactcctgctgcc

SEQ ID NO: 52115 - DNA, 20 bp, Artificial Sequence
  Description of Artificial Sequence: Synthetic oligonucleotide
  Target: ATXN2; (+) strand; PAM type: NRG; PAM sequence: GGG
ttcatgaactcctgctgcct

SEQ ID NO: 52116 - DNA, 20 bp, Artificial Sequence
  Description of Artificial Sequence: Synthetic oligonucleotide
  Target: ATXN2; (+) strand; PAM type: NRG; PAM sequence: TAG
ctcctgctgcctgggcttca

SEQ ID NO: 52117 - DNA, 20 bp, Artificial Sequence
  Description of Artificial Sequence: Synthetic oligonucleotide
  Target: ATXN2; (+) strand; PAM type: NRG; PAM sequence: TGG
ctgcctgggcttcatagcat

SEQ ID NO: 52118 - DNA, 20 bp, Artificial Sequence
  Description of Artificial Sequence: Synthetic oligonucleotide
  Target: ATXN2; (+) strand; PAM type: NRG; PAM sequence: AAG
tagcattggcctactccgtg

SEQ ID NO: 52119 - DNA, 20 bp, Artificial Sequence
  Description of Artificial Sequence: Synthetic oligonucleotide
  Target: ATXN2; (+) strand; PAM type: NRG; PAM sequence: TAG
ttggcctactccgtgaagtc

SEQ ID NO: 52120 - DNA, 20 bp, Artificial Sequence
  Description of Artificial Sequence: Synthetic oligonucleotide
  Target: ATXN2; (+) strand; PAM type: NRG; PAM sequence: AGG
tggcctactccgtgaagtct

SEQ ID NO: 52121 - DNA, 20 bp, Artificial Sequence
  Description of Artificial Sequence: Synthetic oligonucleotide
  Target: ATXN2; (+) strand; PAM type: NRG; PAM sequence: GGG
ggcctactccgtgaagtcta

SEQ ID NO: 52122 - DNA, 20 bp, Artificial Sequence
  Description of Artificial Sequence: Synthetic oligonucleotide
  Target: ATXN2; (+) strand; PAM type: NRG; PAM sequence: AAG
actccgtgaagtctagggac

SEQ ID NO: 52123 - DNA, 20 bp, Artificial Sequence
  Description of Artificial Sequence: Synthetic oligonucleotide
  Target: ATXN2; (+) strand; PAM type: NRG; PAM sequence: AAG
ccgtgaagtctagggacaag

SEQ ID NO: 52124 - DNA, 20 bp, Artificial Sequence
  Description of Artificial Sequence: Synthetic oligonucleotide
  Target: ATXN2; (+) strand; PAM type: NRG; PAM sequence: TGG
gaagtctagggacaagaaga

SEQ ID NO: 52125 - DNA, 20 bp, Artificial Sequence
  Description of Artificial Sequence: Synthetic oligonucleotide
  Target: ATXN2; (+) strand; PAM type: NRG; PAM sequence: TGG
tctagggacaagaagatggt

SEQ ID NO: 52126 - DNA, 20 bp, Artificial Sequence
  Description of Artificial Sequence: Synthetic oligonucleotide
  Target: ATXN2; (+) strand; PAM type: NRG; PAM sequence: CAG
aagatggttggcgacctgat

SEQ ID NO: 52127 - DNA, 20 bp, Artificial Sequence
  Description of Artificial Sequence: Synthetic oligonucleotide
  Target: ATXN2; (+) strand; PAM type: NRG; PAM sequence: AGG
agatggttggcgacctgatc

SEQ ID NO: 52128 - DNA, 20 bp, Artificial Sequence
  Description of Artificial Sequence: Synthetic oligonucleotide
  Target: ATXN2; (+) strand; PAM type: NRG; PAM sequence: GGG
gatggttggcgacctgatca

SEQ ID NO: 52129 - DNA, 20 bp, Artificial Sequence
  Description of Artificial Sequence: Synthetic oligonucleotide
  Target: ATXN2; (+) strand; PAM type: NRG; PAM sequence: CAG
ttggcgacctgatcagggcc

SEQ ID NO: 52130 - DNA, 20 bp, Artificial Sequence
  Description of Artificial Sequence: Synthetic oligonucleotide
  Target: ATXN2; (+) strand; PAM type: NRG; PAM sequence: AGG
tggcgacctgatcagggccc

SEQ ID NO: 52131 - DNA, 20 bp, Artificial Sequence
  Description of Artificial Sequence: Synthetic oligonucleotide
  Target: ATXN2; (+) strand; PAM type: NRG; PAM sequence: AAG
aggcctatgcctttaccgcc

SEQ ID NO: 52132 - DNA, 20 bp, Artificial Sequence
  Description of Artificial Sequence: Synthetic oligonucleotide
  Target: ATXN2; (+) strand; PAM type: NRG; PAM sequence: TGG
ccgccaagtgcctgaacatc

SEQ ID NO: 52133 - DNA, 20 bp, Artificial Sequence
  Description of Artificial Sequence: Synthetic oligonucleotide
  Target: ATXN2; (+) strand; PAM type: NRG; PAM sequence: GGG
cgccaagtgcctgaacatct

SEQ ID NO: 52134 - DNA, 20 bp, Artificial Sequence
  Description of Artificial Sequence: Synthetic oligonucleotide
  Target: ATXN2; (+) strand; PAM type: NRG; PAM sequence: CAG
atcattacgaccattctgct

SEQ ID NO: 52135 - DNA, 20 bp, Artificial Sequence
  Description of Artificial Sequence: Synthetic oligonucleotide
  Target: ATXN2; (+) strand; PAM type: NRG; PAM sequence: CAG
cattctgctcagcatcatcc

SEQ ID NO: 52136 - DNA, 20 bp, Artificial Sequence
  Description of Artificial Sequence: Synthetic oligonucleotide
  Target: ATXN2; (+) strand; PAM type: NRG; PAM sequence: AAG
catcccagtgttgatctttc

SEQ ID NO: 52137 - DNA, 20 bp, Artificial Sequence
  Description of Artificial Sequence: Synthetic oligonucleotide
  Target: ATXN2; (+) strand; PAM type: NRG; PAM sequence: CAG
tgatctttcaagtctatcaa

SEQ ID NO: 52138 - DNA, 20 bp, Artificial Sequence
  Description of Artificial Sequence: Synthetic oligonucleotide
  Target: ATXN2; (+) strand; PAM type: NRG; PAM sequence: CAG
tttcaagtctatcaacagat

SEQ ID NO: 52139 - DNA, 20 bp, Artificial Sequence
  Description of Artificial Sequence: Synthetic oligonucleotide
  Target: ATXN2; (+) strand; PAM type: NRG; PAM sequence: AGG
ttcaagtctatcaacagatc

SEQ ID NO: 52140 - DNA, 20 bp, Artificial Sequence
  Description of Artificial Sequence: Synthetic oligonucleotide
  Target: ATXN2; (+) strand; PAM type: NRG; PAM sequence: GAG
caagtctatcaacagatcag

SEQ ID NO: 52141 - DNA, 20 bp, Artificial Sequence
  Description of Artificial Sequence: Synthetic oligonucleotide
  Target: ATXN2; (+) strand; PAM type: NRG; PAM sequence: AGG
aagtctatcaacagatcagg

SEQ ID NO: 52142 - DNA, 20 bp, Artificial Sequence
  Description of Artificial Sequence: Synthetic oligonucleotide
  Target: ATXN2; (+) strand; PAM type: NRG; PAM sequence: TAG
acagatcaggaggcattatc

SEQ ID NO: 52143 - DNA, 20 bp, Artificial Sequence
  Description of Artificial Sequence: Synthetic oligonucleotide
  Target: ATXN2; (+) strand; PAM type: NRG; PAM sequence: AGG
cagatcaggaggcattatct

SEQ ID NO: 52144 - DNA, 20 bp, Artificial Sequence
  Description of Artificial Sequence: Synthetic oligonucleotide
  Target: ATXN2; (+) strand; PAM type: NRG; PAM sequence: CAG
tcaggaggcattatctaggc

SEQ ID NO: 52145 - DNA, 20 bp, Artificial Sequence
  Description of Artificial Sequence: Synthetic oligonucleotide
  Target: ATXN2; (+) strand; PAM type: NRG; PAM sequence: AGG
caggaggcattatctaggcc

SEQ ID NO: 52146 - DNA, 20 bp, Artificial Sequence
  Description of Artificial Sequence: Synthetic oligonucleotide
  Target: ATXN2; (+) strand; PAM type: NRG; PAM sequence: GAG
ggaggcattatctaggccag

SEQ ID NO: 52147 - DNA, 20 bp, Artificial Sequence
  Description of Artificial Sequence: Synthetic oligonucleotide
  Target: ATXN2; (+) strand; PAM type: NRG; PAM sequence: CAG
tccattcctcgccctgcccc

SEQ ID NO: 52148 - DNA, 20 bp, Artificial Sequence
  Description of Artificial Sequence: Synthetic oligonucleotide
  Target: ATXN2; (+) strand; PAM type: NRG; PAM sequence: GAG
cattcctcgccctgccccca

SEQ ID NO: 52149 - DNA, 20 bp, Artificial Sequence
  Description of Artificial Sequence: Synthetic oligonucleotide
  Target: ATXN2; (+) strand; PAM type: NRG; PAM sequence: AAG
ctcgccctgcccccagagcc

SEQ ID NO: 52150 - DNA, 20 bp, Artificial Sequence
  Description of Artificial Sequence: Synthetic oligonucleotide
  Target: ATXN2; (+) strand; PAM type: NRG; PAM sequence: CAG
cccagagccaagttctctat

SEQ ID NO: 52151 - DNA, 20 bp, Artificial Sequence
  Description of Artificial Sequence: Synthetic oligonucleotide
  Target: ATXN2; (+) strand; PAM type: NRG; PAM sequence: TGG
cctcacacacttttctacaa

SEQ ID NO: 52152 - DNA, 20 bp, Artificial Sequence
  Description of Artificial Sequence: Synthetic oligonucleotide
  Target: ATXN2; (+) strand; PAM type: NRG; PAM sequence: TGG
caataaactgcacgtgtttc

SEQ ID NO: 52153 - DNA, 20 bp, Artificial Sequence
  Description of Artificial Sequence: Synthetic oligonucleotide
  Target: ATXN2; (+) strand; PAM type: NRG; PAM sequence: CAG
taaaaaaaaaaaaaaaacac

SEQ ID NO: 52154 - DNA, 20 bp, Artificial Sequence
  Description of Artificial Sequence: Synthetic oligonucleotide
  Target: ATXN2; (+) strand; PAM type: NRG; PAM sequence: GAG
aaaaaaaaaaaaaaacacca

SEQ ID NO: 52155 - DNA, 20 bp, Artificial Sequence
  Description of Artificial Sequence: Synthetic oligonucleotide
  Target: ATXN2; (+) strand; PAM type: NRG; PAM sequence: AAG
ttgaacatctactatgtgcc

SEQ ID NO: 52156 - DNA, 20 bp, Artificial Sequence
  Description of Artificial Sequence: Synthetic oligonucleotide
  Target: ATXN2; (+) strand; PAM type: NRG; PAM sequence: CAG
catctactatgtgccaagaa

SEQ ID NO: 52157 - DNA, 20 bp, Artificial Sequence
  Description of Artificial Sequence: Synthetic oligonucleotide
  Target: ATXN2; (+) strand; PAM type: NRG; PAM sequence: AAG
atgtgccaagaacagaacat

SEQ ID NO: 52158 - DNA, 20 bp, Artificial Sequence
  Description of Artificial Sequence: Synthetic oligonucleotide
  Target: ATXN2; (+) strand; PAM type: NRG; PAM sequence: AAG
tgccaagaacagaacataag

SEQ ID NO: 52159 - DNA, 20 bp, Artificial Sequence
  Description of Artificial Sequence: Synthetic oligonucleotide
  Target: ATXN2; (+) strand; PAM type: NRG; PAM sequence: TAG
aacagaacataagaagaatt

SEQ ID NO: 52160 - DNA, 20 bp, Artificial Sequence
  Description of Artificial Sequence: Synthetic oligonucleotide
  Target: ATXN2; (+) strand; PAM type: NRG; PAM sequence: AGG
acagaacataagaagaattt

SEQ ID NO: 52161 - DNA, 20 bp, Artificial Sequence
  Description of Artificial Sequence: Synthetic oligonucleotide
  Target: ATXN2; (+) strand; PAM type: NRG; PAM sequence: TGG
aacataagaagaatttaggc

SEQ ID NO: 52162 - DNA, 20 bp, Artificial Sequence
  Description of Artificial Sequence: Synthetic oligonucleotide
  Target: ATXN2; (+) strand; PAM type: NRG; PAM sequence: GGG
acataagaagaatttaggct

SEQ ID NO: 52163 - DNA, 20 bp, Artificial Sequence
  Description of Artificial Sequence: Synthetic oligonucleotide
  Target: ATXN2; (+) strand; PAM type: NRG; PAM sequence: TGG
aggctgggtgtgctgcctca

SEQ ID NO: 52164 - DNA, 20 bp, Artificial Sequence
  Description of Artificial Sequence: Synthetic oligonucleotide
  Target: ATXN2; (+) strand; PAM type: NRG; PAM sequence: TGG
tggccttaatttcaatactt

SEQ ID NO: 52165 - DNA, 20 bp, Artificial Sequence
  Description of Artificial Sequence: Synthetic oligonucleotide
  Target: ATXN2; (+) strand; PAM type: NRG; PAM sequence: GGG
ggccttaatttcaatacttt

SEQ ID NO: 52166 - DNA, 20 bp, Artificial Sequence
  Description of Artificial Sequence: Synthetic oligonucleotide
  Target: ATXN2; (+) strand; PAM type: NRG; PAM sequence: GAG
ccttaatttcaatactttgg

SEQ ID NO: 52167 - DNA, 20 bp, Artificial Sequence
  Description of Artificial Sequence: Synthetic oligonucleotide
  Target: ATXN2; (+) strand; PAM type: NRG; PAM sequence: AGG
cttaatttcaatactttggg

SEQ ID NO: 52168 - DNA, 20 bp, Artificial Sequence
  Description of Artificial Sequence: Synthetic oligonucleotide
  Target: ATXN2; (+) strand; PAM type: NRG; PAM sequence: AAG
tttcaatactttgggaggcc

SEQ ID NO: 52169 - DNA, 20 bp, Artificial Sequence
  Description of Artificial Sequence: Synthetic oligonucleotide
  Target: ATXN2; (+) strand; PAM type: NRG; PAM sequence: AGG
ttcaatactttgggaggcca

SEQ ID NO: 52170 - DNA, 20 bp, Artificial Sequence
  Description of Artificial Sequence: Synthetic oligonucleotide
  Target: ATXN2; (+) strand; PAM type: NRG; PAM sequence: AAG
atactttgggaggccaaggc

SEQ ID NO: 52171 - DNA, 20 bp, Artificial Sequence
  Description of Artificial Sequence: Synthetic oligonucleotide
  Target: ATXN2; (+) strand; PAM type: NRG; PAM sequence: GAG
actttgggaggccaaggcaa

SEQ ID NO: 52172 - DNA, 20 bp, Artificial Sequence
  Description of Artificial Sequence: Synthetic oligonucleotide
  Target: ATXN2; (+) strand; PAM type: NRG; PAM sequence: AGG
ctttgggaggccaaggcaag

SEQ ID NO: 52173 - DNA, 20 bp, Artificial Sequence
  Description of Artificial Sequence: Synthetic oligonucleotide
  Target: ATXN2; (+) strand; PAM type: NRG; PAM sequence: GAG
ttgggaggccaaggcaagag

SEQ ID NO: 52174 - DNA, 20 bp, Artificial Sequence
  Description of Artificial Sequence: Synthetic oligonucleotide
  Target: ATXN2; (+) strand; PAM type: NRG; PAM sequence: GAG
ccaaggcaagaggagtactt

SEQ ID NO: 52175 - DNA, 20 bp, Artificial Sequence
  Description of Artificial Sequence: Synthetic oligonucleotide
  Target: ATXN2; (+) strand; PAM type: NRG; PAM sequence: AGG
caaggcaagaggagtacttg

SEQ ID NO: 52176 - DNA, 20 bp, Artificial Sequence
  Description of Artificial Sequence: Synthetic oligonucleotide
  Target: ATXN2; (+) strand; PAM type: NRG; PAM sequence: GGG
aaggcaagaggagtacttga

SEQ ID NO: 52177 - DNA, 20 bp, Artificial Sequence
  Description of Artificial Sequence: Synthetic oligonucleotide
  Target: ATXN2; (+) strand; PAM type: NRG; PAM sequence: CAG
gcaagaggagtacttgaggg

SEQ ID NO: 52178 - DNA, 20 bp, Artificial Sequence
  Description of Artificial Sequence: Synthetic oligonucleotide
  Target: ATXN2; (+) strand; PAM type: NRG; PAM sequence: AAG
agaggagtacttgagggcag

SEQ ID NO: 52179 - DNA, 20 bp, Artificial Sequence
  Description of Artificial Sequence: Synthetic oligonucleotide
  Target: ATXN2; (+) strand; PAM type: NRG; PAM sequence: CAG
tgagggcagaagttcaaaac

SEQ ID NO: 52180 - DNA, 20 bp, Artificial Sequence
  Description of Artificial Sequence: Synthetic oligonucleotide
  Target: ATXN2; (+) strand; PAM type: NRG; PAM sequence: CGG
gcagaagttcaaaaccagcc

SEQ ID NO: 52181 - DNA, 20 bp, Artificial Sequence
  Description of Artificial Sequence: Synthetic oligonucleotide
  Target: ATXN2; (+) strand; PAM type: NRG; PAM sequence: GGG
cagaagttcaaaaccagccc

SEQ ID NO: 52182 - DNA, 20 bp, Artificial Sequence
  Description of Artificial Sequence: Synthetic oligonucleotide
  Target: ATXN2; (+) strand; PAM type: NRG; PAM sequence: CAG
ttcaaaaccagcccgggtaa

SEQ ID NO: 52183 - DNA, 20 bp, Artificial Sequence
  Description of Artificial Sequence: Synthetic oligonucleotide
  Target: ATXN2; (+) strand; PAM type: NRG; PAM sequence: GAG
aaaccagcccgggtaacagt

SEQ ID NO: 52184 - DNA, 20 bp, Artificial Sequence
  Description of Artificial Sequence: Synthetic oligonucleotide
  Target: ATXN2; (+) strand; PAM type: NRG; PAM sequence: TAG
acaaaaatttttttaaattg

SEQ ID NO: 52185 - DNA, 20 bp, Artificial Sequence
  Description of Artificial Sequence: Synthetic oligonucleotide
  Target: ATXN2; (+) strand; PAM type: NRG; PAM sequence: AGG
caaaaatttttttaaattgt

SEQ ID NO: 52186 - DNA, 20 bp, Artificial Sequence
  Description of Artificial Sequence: Synthetic oligonucleotide
  Target: ATXN2; (+) strand; PAM type: NRG; PAM sequence: GGG
aaaaatttttttaaattgta

SEQ ID NO: 52187 - DNA, 20 bp, Artificial Sequence
  Description of Artificial Sequence: Synthetic oligonucleotide
  Target: ATXN2; (+) strand; PAM type: NRG; PAM sequence: CAG
tttttttaaattgtagggcg

SEQ ID NO: 52188 - DNA, 20 bp, Artificial Sequence
  Description of Artificial Sequence: Synthetic oligonucleotide
  Target: ATXN2; (+) strand; PAM type: NRG; PAM sequence: TGG
attgtagggcgcagacactt

SEQ ID NO: 52189 - DNA, 20 bp, Artificial Sequence
  Description of Artificial Sequence: Synthetic oligonucleotide
  Target: ATXN2; (+) strand; PAM type: NRG; PAM sequence: GGG
ttgtagggcgcagacacttt

SEQ ID NO: 52190 - DNA, 20 bp, Artificial Sequence
  Description of Artificial Sequence: Synthetic oligonucleotide
  Target: ATXN2; (+) strand; PAM type: NRG; PAM sequence: GAG
gtagggcgcagacactttgg

SEQ ID NO: 52191 - DNA, 20 bp, Artificial Sequence
  Description of Artificial Sequence: Synthetic oligonucleotide
  Target: ATXN2; (+) strand; PAM type: NRG; PAM sequence: AGG
tagggcgcagacactttggg

SEQ ID NO: 52192 - DNA, 20 bp, Artificial Sequence
  Description of Artificial Sequence: Synthetic oligonucleotide
  Target: ATXN2; (+) strand; PAM type: NRG; PAM sequence: AAG
cgcagacactttgggaggcg

SEQ ID NO: 52193 - DNA, 20 bp, Artificial Sequence
  Description of Artificial Sequence: Synthetic oligonucleotide
  Target: ATXN2; (+) strand; PAM type: NRG; PAM sequence: AGG
gcagacactttgggaggcga

SEQ ID NO: 52194 - DNA, 20 bp, Artificial Sequence
  Description of Artificial Sequence: Synthetic oligonucleotide
  Target: ATXN2; (+) strand; PAM type: NRG; PAM sequence: CGG
gacactttgggaggcgaagg

SEQ ID NO: 52195 - DNA, 20 bp, Artificial Sequence
  Description of Artificial Sequence: Synthetic oligonucleotide
  Target: ATXN2; (+) strand; PAM type: NRG; PAM sequence: GGG
acactttgggaggcgaaggc

SEQ ID NO: 52196 - DNA, 20 bp, Artificial Sequence
  Description of Artificial Sequence: Synthetic oligonucleotide
  Target: ATXN2; (+) strand; PAM type: NRG; PAM sequence: CAG
ctttgggaggcgaaggcggg

SEQ ID NO: 52197 - DNA, 20 bp, Artificial Sequence
  Description of Artificial Sequence: Synthetic oligonucleotide
  Target: ATXN2; (+) strand; PAM type: NRG; PAM sequence: GAG
cgaaggcgggcagatcactt

SEQ ID NO: 52198 - DNA, 20 bp, Artificial Sequence
  Description of Artificial Sequence: Synthetic oligonucleotide
  Target: ATXN2; (+) strand; PAM type: NRG; PAM sequence: CAG
gcgggcagatcacttgagct

SEQ ID NO: 52199 - DNA, 20 bp, Artificial Sequence
  Description of Artificial Sequence: Synthetic oligonucleotide
  Target: ATXN2; (+) strand; PAM type: NRG; PAM sequence: AGG
cgggcagatcacttgagctc

SEQ ID NO: 52200 - DNA, 20 bp, Artificial Sequence
  Description of Artificial Sequence: Synthetic oligonucleotide
  Target: ATXN2; (+) strand; PAM type: NRG; PAM sequence: GAG
ggcagatcacttgagctcag

SEQ ID NO: 52201 - DNA, 20 bp, Artificial Sequence
  Description of Artificial Sequence: Synthetic oligonucleotide
  Target: ATXN2; (+) strand; PAM type: NRG; PAM sequence: GAG
tcacttgagctcaggagttt

SEQ ID NO: 52202 - DNA, 20 bp, Artificial Sequence
  Description of Artificial Sequence: Synthetic oligonucleotide
  Target: ATXN2; (+) strand; PAM type: NRG; PAM sequence: TGG
tcaggagtttgagaccaacc

SEQ ID NO: 52203 - DNA, 20 bp, Artificial Sequence
  Description of Artificial Sequence: Synthetic oligonucleotide
  Target: ATXN2; (+) strand; PAM type: NRG; PAM sequence: GGG
caggagtttgagaccaacct

SEQ ID NO: 52204 - DNA, 20 bp, Artificial Sequence
  Description of Artificial Sequence: Synthetic oligonucleotide
  Target: ATXN2; (+) strand; PAM type: NRG; PAM sequence: TGG
tgagaccaacctgggcaaca

SEQ ID NO: 52205 - DNA, 20 bp, Artificial Sequence
  Description of Artificial Sequence: Synthetic oligonucleotide
  Target: ATXN2; (+) strand; PAM type: NRG; PAM sequence: AAG
accaacctgggcaacatggt

SEQ ID NO: 52206 - DNA, 20 bp, Artificial Sequence
  Description of Artificial Sequence: Synthetic oligonucleotide
  Target: ATXN2; (+) strand; PAM type: NRG; PAM sequence: CAG
taaaaatacaaaaaattaac

SEQ ID NO: 52207 - DNA, 20 bp, Artificial Sequence
  Description of Artificial Sequence: Synthetic oligonucleotide
  Target: ATXN2; (+) strand; PAM type: NRG; PAM sequence: AGG
aaaaatacaaaaaattaacc

SEQ ID NO: 52208 - DNA, 20 bp, Artificial Sequence
  Description of Artificial Sequence: Synthetic oligonucleotide
  Target: ATXN2; (+) strand; PAM type: NRG; PAM sequence: TGG
aaaaaattaaccaggcatga

SEQ ID NO: 52209 - DNA, 20 bp, Artificial Sequence
  Description of Artificial Sequence: Synthetic oligonucleotide
  Target: ATXN2; (+) strand; PAM type: NRG; PAM sequence: TGG
ggcatgatggcacacacatg

SEQ ID NO: 52210 - DNA, 20 bp, Artificial Sequence
  Description of Artificial Sequence: Synthetic oligonucleotide
  Target: ATXN2; (+) strand; PAM type: NRG; PAM sequence: AAG
tggcacacacatgtggtccc

SEQ ID NO: 52211 - DNA, 20 bp, Artificial Sequence
  Description of Artificial Sequence: Synthetic oligonucleotide
  Target: ATXN2; (+) strand; PAM type: NRG; PAM sequence: CAG
acatgtggtcccaagctact

SEQ ID NO: 52212 - DNA, 20 bp, Artificial Sequence
  Description of Artificial Sequence: Synthetic oligonucleotide
  Target: ATXN2; (+) strand; PAM type: NRG; PAM sequence: AGG
catgtggtcccaagctactc

SEQ ID NO: 52213 - DNA, 20 bp, Artificial Sequence
  Description of Artificial Sequence: Synthetic oligonucleotide
  Target: ATXN2; (+) strand; PAM type: NRG; PAM sequence: GAG
tgtggtcccaagctactcag

SEQ ID NO: 52214 - DNA, 20 bp, Artificial Sequence
  Description of Artificial Sequence: Synthetic oligonucleotide
  Target: ATXN2; (+) strand; PAM type: NRG; PAM sequence: AGG
gtggtcccaagctactcagg

SEQ ID NO: 52215 - DNA, 20 bp, Artificial Sequence
  Description of Artificial Sequence: Synthetic oligonucleotide
  Target: ATXN2; (+) strand; PAM type: NRG; PAM sequence: GAG
cccaagctactcaggaggct

SEQ ID NO: 52216 - DNA, 20 bp, Artificial Sequence
  Description of Artificial Sequence: Synthetic oligonucleotide
  Target: ATXN2; (+) strand; PAM type: NRG; PAM sequence: AGG
ccaagctactcaggaggctg

SEQ ID NO: 52217 - DNA, 20 bp, Artificial Sequence
  Description of Artificial Sequence: Synthetic oligonucleotide
  Target: ATXN2; (+) strand; PAM type: NRG; PAM sequence: CAG
agctactcaggaggctgagg

SEQ ID NO: 52218 - DNA, 20 bp, Artificial Sequence
  Description of Artificial Sequence: Synthetic oligonucleotide
  Target: ATXN2; (+) strand; PAM type: NRG; PAM sequence: CGG
gaggcagaactgcttgaact

SEQ ID NO: 52219 - DNA, 20 bp, Artificial Sequence
  Description of Artificial Sequence: Synthetic oligonucleotide
  Target: ATXN2; (+) strand; PAM type: NRG; PAM sequence: GGG
aggcagaactgcttgaactc

SEQ ID NO: 52220 - DNA, 20 bp, Artificial Sequence
  Description of Artificial Sequence: Synthetic oligonucleotide
  Target: ATXN2; (+) strand; PAM type: NRG; PAM sequence: GAG
gcagaactgcttgaactcgg

SEQ ID NO: 52221 - DNA, 20 bp, Artificial Sequence
  Description of Artificial Sequence: Synthetic oligonucleotide
  Target: ATXN2; (+) strand; PAM type: NRG; PAM sequence: AGG
cagaactgcttgaactcggg

SEQ ID NO: 52222 - DNA, 20 bp, Artificial Sequence
  Description of Artificial Sequence: Synthetic oligonucleotide
  Target: ATXN2; (+) strand; PAM type: NRG; PAM sequence: TGG
aactgcttgaactcgggagg

SEQ ID NO: 52223 - DNA, 20 bp, Artificial Sequence
  Description of Artificial Sequence: Synthetic oligonucleotide
  Target: ATXN2; (+) strand; PAM type: NRG; PAM sequence: GAG
ctgcttgaactcgggaggtg

SEQ ID NO: 52224 - DNA, 20 bp, Artificial Sequence
  Description of Artificial Sequence: Synthetic oligonucleotide
  Target: ATXN2; (+) strand; PAM type: NRG; PAM sequence: AGG
tgcttgaactcgggaggtgg

SEQ ID NO: 52225 - DNA, 20 bp, Artificial Sequence
  Description of Artificial Sequence: Synthetic oligonucleotide
  Target: ATXN2; (+) strand; PAM type: NRG; PAM sequence: TAG
tgaactcgggaggtggaggt

SEQ ID NO: 52226 - DNA, 20 bp, Artificial Sequence
  Description of Artificial Sequence: Synthetic oligonucleotide
  Target: ATXN2; (+) strand; PAM type: NRG; PAM sequence: GAG
aactcgggaggtggaggtta

SEQ ID NO: 52227 - DNA, 20 bp, Artificial Sequence
  Description of Artificial Sequence: Synthetic oligonucleotide
  Target: ATXN2; (+) strand; PAM type: NRG; PAM sequence: GAG
cgggaggtggaggttagagt

SEQ ID NO: 52228 - DNA, 20 bp, Artificial Sequence
  Description of Artificial Sequence: Synthetic oligonucleotide
  Target: ATXN2; (+) strand; PAM type: NRG; PAM sequence: CAG
gaggtggaggttagagtgag

SEQ ID NO: 52229 - DNA, 20 bp, Artificial Sequence
  Description of Artificial Sequence: Synthetic oligonucleotide
  Target: ATXN2; (+) strand; PAM type: NRG; PAM sequence: CAG
agaaattgcaccacgcactg

SEQ ID NO: 52230 - DNA, 20 bp, Artificial Sequence
  Description of Artificial Sequence: Synthetic oligonucleotide
  Target: ATXN2; (+) strand; PAM type: NRG; PAM sequence: TGG
ttgcaccacgcactgcagcc

SEQ ID NO: 52231 - DNA, 20 bp, Artificial Sequence
  Description of Artificial Sequence: Synthetic oligonucleotide
  Target: ATXN2; (+) strand; PAM type: NRG; PAM sequence: GGG
tgcaccacgcactgcagcct

SEQ ID NO: 52232 - DNA, 20 bp, Artificial Sequence
  Description of Artificial Sequence: Synthetic oligonucleotide
  Target: ATXN2; (+) strand; PAM type: NRG; PAM sequence: AAG
gcactgcagcctgggtgaca

SEQ ID NO: 52233 - DNA, 20 bp, Artificial Sequence
  Description of Artificial Sequence: Synthetic oligonucleotide
  Target: ATXN2; (+) strand; PAM type: NRG; PAM sequence: GAG
tgcagcctgggtgacaaagc

SEQ ID NO: 52234 - DNA, 20 bp, Artificial Sequence
  Description of Artificial Sequence: Synthetic oligonucleotide
  Target: ATXN2; (+) strand; PAM type: NRG; PAM sequence: CGG
gcctgggtgacaaagcgaga

SEQ ID NO: 52235 - DNA, 20 bp, Artificial Sequence
  Description of Artificial Sequence: Synthetic oligonucleotide
  Target: ATXN2; (+) strand; PAM type: NRG; PAM sequence: AAG
cggtgtctcaaaaaaaaaaa

SEQ ID NO: 52236 - DNA, 20 bp, Artificial Sequence
  Description of Artificial Sequence: Synthetic oligonucleotide
  Target: ATXN2; (+) strand; PAM type: NRG; PAM sequence: CAG
caaaaaaaaaaaaagaactg

SEQ ID NO: 52237 - DNA, 20 bp, Artificial Sequence
  Description of Artificial Sequence: Synthetic oligonucleotide
  Target: ATXN2; (+) strand; PAM type: NRG; PAM sequence: AGG
aaaaaaaaaaaaagaactgc

SEQ ID NO: 52238 - DNA, 20 bp, Artificial Sequence
  Description of Artificial Sequence: Synthetic oligonucleotide
  Target: ATXN2; (+) strand; PAM type: NRG; PAM sequence: GGG
aaaaaaaaaaaagaactgca

SEQ ID NO: 52239 - DNA, 20 bp, Artificial Sequence
  Description of Artificial Sequence: Synthetic oligonucleotide
  Target: ATXN2; (+) strand; PAM type: NRG; PAM sequence: TGG
tgtgatgttgcatgtgcctg

SEQ ID NO: 52240 - DNA, 20 bp, Artificial Sequence
  Description of Artificial Sequence: Synthetic oligonucleotide
  Target: ATXN2; (+) strand; PAM type: NRG; PAM sequence: CAG
gttgcatgtgcctgtggtcc

SEQ ID NO: 52241 - DNA, 20 bp, Artificial Sequence
  Description of Artificial Sequence: Synthetic oligonucleotide
  Target: ATXN2; (+) strand; PAM type: NRG; PAM sequence: CAG
tgcctgtggtcccagctact

SEQ ID NO: 52242 - DNA, 20 bp, Artificial Sequence
  Description of Artificial Sequence: Synthetic oligonucleotide
  Target: ATXN2; (+) strand; PAM type: NRG; PAM sequence: AGG
gcctgtggtcccagctactc

SEQ ID NO: 52243 - DNA, 20 bp, Artificial Sequence
  Description of Artificial Sequence: Synthetic oligonucleotide
  Target: ATXN2; (+) strand; PAM type: NRG; PAM sequence: GAG
ctgtggtcccagctactcag

SEQ ID NO: 52244 - DNA, 20 bp, Artificial Sequence
  Description of Artificial Sequence: Synthetic oligonucleotide
  Target: ATXN2; (+) strand; PAM type: NRG; PAM sequence: AGG
tgtggtcccagctactcagg

SEQ ID NO: 52245 - DNA, 20 bp, Artificial Sequence
  Description of Artificial Sequence: Synthetic oligonucleotide
  Target: ATXN2; (+) strand; PAM type: NRG; PAM sequence: GAG
tcccagctactcaggaggct

SEQ ID NO: 52246 - DNA, 20 bp, Artificial Sequence
  Description of Artificial Sequence: Synthetic oligonucleotide
  Target: ATXN2; (+) strand; PAM type: NRG; PAM sequence: AGG
cccagctactcaggaggctg

SEQ ID NO: 52247 - DNA, 20 bp, Artificial Sequence
  Description of Artificial Sequence: Synthetic oligonucleotide
  Target: ATXN2; (+) strand; PAM type: NRG; PAM sequence: TGG
agctactcaggaggctgagg

SEQ ID NO: 52248 - DNA, 20 bp, Artificial Sequence
  Description of Artificial Sequence: Synthetic oligonucleotide
  Target: ATXN2; (+) strand; PAM type: NRG; PAM sequence: GGG
gctactcaggaggctgaggt

SEQ ID NO: 52249 - DNA, 20 bp, Artificial Sequence
  Description of Artificial Sequence: Synthetic oligonucleotide
  Target: ATXN2; (+) strand; PAM type: NRG; PAM sequence: GAG
tactcaggaggctgaggtgg

SEQ ID NO: 52250 - DNA, 20 bp, Artificial Sequence
  Description of Artificial Sequence: Synthetic oligonucleotide
  Target: ATXN2; (+) strand; PAM type: NRG; PAM sequence: AGG
actcaggaggctgaggtggg

SEQ ID NO: 52251 - DNA, 20 bp, Artificial Sequence
  Description of Artificial Sequence: Synthetic oligonucleotide
  Target: ATXN2; (+) strand; PAM type: NRG; PAM sequence: CAG
gtgggaggatcacttgaacc

SEQ ID NO: 52252 - DNA, 20 bp, Artificial Sequence
  Description of Artificial Sequence: Synthetic oligonucleotide
  Target: ATXN2; (+) strand; PAM type: NRG; PAM sequence: AGG
tgggaggatcacttgaaccc

SEQ ID NO: 52253 - DNA, 20 bp, Artificial Sequence
  Description of Artificial Sequence: Synthetic oligonucleotide
  Target: ATXN2; (+) strand; PAM type: NRG; PAM sequence: GAG
ggaggatcacttgaacccag

SEQ ID NO: 52254 - DNA, 20 bp, Artificial Sequence
  Description of Artificial Sequence: Synthetic oligonucleotide
  Target: ATXN2; (+) strand; PAM type: NRG; PAM sequence: AAG
tcacttgaacccaggagtta

SEQ ID NO: 52255 - DNA, 20 bp, Artificial Sequence
  Description of Artificial Sequence: Synthetic oligonucleotide
  Target: ATXN2; (+) strand; PAM type: NRG; PAM sequence: AGG
cacttgaacccaggagttaa

SEQ ID NO: 52256 - DNA, 20 bp, Artificial Sequence
  Description of Artificial Sequence: Synthetic oligonucleotide
  Target: ATXN2; (+) strand; PAM type: NRG; PAM sequence: AAG
caggagttaaaggctgcaat

SEQ ID NO: 52257 - DNA, 20 bp, Artificial Sequence
  Description of Artificial Sequence: Synthetic oligonucleotide
  Target: ATXN2; (+) strand; PAM type: NRG; PAM sequence: TGG
cacaatactgtactccaacc

SEQ ID NO: 52258 - DNA, 20 bp, Artificial Sequence
  Description of Artificial Sequence: Synthetic oligonucleotide
  Target: ATXN2; (+) strand; PAM type: NRG; PAM sequence: GGG
acaatactgtactccaacct

SEQ ID NO: 52259 - DNA, 20 bp, Artificial Sequence
  Description of Artificial Sequence: Synthetic oligonucleotide
  Target: ATXN2; (+) strand; PAM type: NRG; PAM sequence: CAG
gtactccaacctgggcaata

SEQ ID NO: 52260 - DNA, 20 bp, Artificial Sequence
  Description of Artificial Sequence: Synthetic oligonucleotide
  Target: ATXN2; (+) strand; PAM type: NRG; PAM sequence: AAG
tccaacctgggcaatacagc

SEQ ID NO: 52261 - DNA, 20 bp, Artificial Sequence
  Description of Artificial Sequence: Synthetic oligonucleotide
  Target: ATXN2; (+) strand; PAM type: NRG; PAM sequence: CAG
aaaaaataaatacataaaaa

SEQ ID NO: 52262 - DNA, 20 bp, Artificial Sequence
  Description of Artificial Sequence: Synthetic oligonucleotide
  Target: ATXN2; (+) strand; PAM type: NRG; PAM sequence: AAG
acataaaaacagaaaatatt

SEQ ID NO: 52263 - DNA, 20 bp, Artificial Sequence
  Description of Artificial Sequence: Synthetic oligonucleotide
  Target: ATXN2; (+) strand; PAM type: NRG; PAM sequence: TAG
aacagaaaatattaagactt

SEQ ID NO: 52264 - DNA, 20 bp, Artificial Sequence
  Description of Artificial Sequence: Synthetic oligonucleotide
  Target: ATXN2; (+) strand; PAM type: NRG; PAM sequence: CAG
atattaagactttagtatct

SEQ ID NO: 52265 - DNA, 20 bp, Artificial Sequence
  Description of Artificial Sequence: Synthetic oligonucleotide
  Target: ATXN2; (+) strand; PAM type: NRG; PAM sequence: GAG
gtttgtttgtttgtttgttt

SEQ ID NO: 52266 - DNA, 20 bp, Artificial Sequence
  Description of Artificial Sequence: Synthetic oligonucleotide
  Target: ATXN2; (+) strand; PAM type: NRG; PAM sequence: CGG
gtttgtttgtttgtttgaga

SEQ ID NO: 52267 - DNA, 20 bp, Artificial Sequence
  Description of Artificial Sequence: Synthetic oligonucleotide
  Target: ATXN2; (+) strand; PAM type: NRG; PAM sequence: GAG
ttgtttgtttgtttgagacg

SEQ ID NO: 52268 - DNA, 20 bp, Artificial Sequence
  Description of Artificial Sequence: Synthetic oligonucleotide
  Target: ATXN2; (+) strand; PAM type: NRG; PAM sequence: CAG
cggagtctcgctctgtcgcc

SEQ ID NO: 52269 - DNA, 20 bp, Artificial Sequence
  Description of Artificial Sequence: Synthetic oligonucleotide
  Target: ATXN2; (+) strand; PAM type: NRG; PAM sequence: CAG
agtctcgctctgtcgcccag

SEQ ID NO: 52270 - DNA, 20 bp, Artificial Sequence
  Description of Artificial Sequence: Synthetic oligonucleotide
  Target: ATXN2; (+) strand; PAM type: NRG; PAM sequence: AGG
gtctcgctctgtcgcccagc

SEQ ID NO: 52271 - DNA, 20 bp, Artificial Sequence
  Description of Artificial Sequence: Synthetic oligonucleotide
  Target: ATXN2; (+) strand; PAM type: NRG; PAM sequence: TGG
cgctctgtcgcccagcaggc

SEQ ID NO: 52272 - DNA, 20 bp, Artificial Sequence
  Description of Artificial Sequence: Synthetic oligonucleotide
  Target: ATXN2; (+) strand; PAM type: NRG; PAM sequence: GAG
ctctgtcgcccagcaggctg

SEQ ID NO: 52273 - DNA, 20 bp, Artificial Sequence
  Description of Artificial Sequence: Synthetic oligonucleotide
  Target: ATXN2; (+) strand; PAM type: NRG; PAM sequence: CAG
tcgcccagcaggctggagtg

SEQ ID NO: 52274 - DNA, 20 bp, Artificial Sequence
  Description of Artificial Sequence: Synthetic oligonucleotide
  Target: ATXN2; (+) strand; PAM type: NRG; PAM sequence: TGG
cccagcaggctggagtgcag

SEQ ID NO: 52275 - DNA, 20 bp, Artificial Sequence
  Description of Artificial Sequence: Synthetic oligonucleotide
  Target: ATXN2; (+) strand; PAM type: NRG; PAM sequence: AAG
gcaccatctccgctcactgc

SEQ ID NO: 52276 - DNA, 20 bp, Artificial Sequence
  Description of Artificial Sequence: Synthetic oligonucleotide
  Target: ATXN2; (+) strand; PAM type: NRG; PAM sequence: CGG
tcactgcaagctctgcctcc

SEQ ID NO: 52277 - DNA, 20 bp, Artificial Sequence
  Description of Artificial Sequence: Synthetic oligonucleotide
  Target: ATXN2; (+) strand; PAM type: NRG; PAM sequence: GGG
cactgcaagctctgcctccc

SEQ ID NO: 52278 - DNA, 20 bp, Artificial Sequence
  Description of Artificial Sequence: Synthetic oligonucleotide
  Target: ATXN2; (+) strand; PAM type: NRG; PAM sequence: CAG
ttcacgccattctcctgcct

SEQ ID NO: 52279 - DNA, 20 bp, Artificial Sequence
  Description of Artificial Sequence: Synthetic oligonucleotide
  Target: ATXN2; (+) strand; PAM type: NRG; PAM sequence: AAG
ttctcctgcctcagcctccc

SEQ ID NO: 52280 - DNA, 20 bp, Artificial Sequence
  Description of Artificial Sequence: Synthetic oligonucleotide
  Target: ATXN2; (+) strand; PAM type: NRG; PAM sequence: TAG
tcctgcctcagcctcccaag

SEQ ID NO: 52281 - DNA, 20 bp, Artificial Sequence
  Description of Artificial Sequence: Synthetic oligonucleotide
  Target: ATXN2; (+) strand; PAM type: NRG; PAM sequence: TGG
gcctcagcctcccaagtagc

SEQ ID NO: 52282 - DNA, 20 bp, Artificial Sequence
  Description of Artificial Sequence: Synthetic oligonucleotide
  Target: ATXN2; (+) strand; PAM type: NRG; PAM sequence: GGG
cctcagcctcccaagtagct

SEQ ID NO: 52283 - DNA, 20 bp, Artificial Sequence
  Description of Artificial Sequence: Synthetic oligonucleotide
  Target: ATXN2; (+) strand; PAM type: NRG; PAM sequence: CAG
ctcccaagtagctgggatta

SEQ ID NO: 52284 - DNA, 20 bp, Artificial Sequence
  Description of Artificial Sequence: Synthetic oligonucleotide
  Target: ATXN2; (+) strand; PAM type: NRG; PAM sequence: AGG
tcccaagtagctgggattac

SEQ ID NO: 52285 - DNA, 20 bp, Artificial Sequence
  Description of Artificial Sequence: Synthetic oligonucleotide
  Target: ATXN2; (+) strand; PAM type: NRG; PAM sequence: TGG
caggcgcccgccaccacgcc

SEQ ID NO: 52286 - DNA, 20 bp, Artificial Sequence
  Description of Artificial Sequence: Synthetic oligonucleotide
  Target: ATXN2; (+) strand; PAM type: NRG; PAM sequence: TAG
tggctaattttttgtatttt

SEQ ID NO: 52287 - DNA, 20 bp, Artificial Sequence
  Description of Artificial Sequence: Synthetic oligonucleotide
  Target: ATXN2; (+) strand; PAM type: NRG; PAM sequence: TAG
ctaattttttgtatttttag

SEQ ID NO: 52288 - DNA, 20 bp, Artificial Sequence
  Description of Artificial Sequence: Synthetic oligonucleotide
  Target: ATXN2; (+) strand; PAM type: NRG; PAM sequence: GAG
aattttttgtatttttagta

SEQ ID NO: 52289 - DNA, 20 bp, Artificial Sequence
  Description of Artificial Sequence: Synthetic oligonucleotide
  Target: ATXN2; (+) strand; PAM type: NRG; PAM sequence: CAG
ttttgtatttttagtagaga

SEQ ID NO: 52290 - DNA, 20 bp, Artificial Sequence
  Description of Artificial Sequence: Synthetic oligonucleotide
  Target: ATXN2; (+) strand; PAM type: NRG; PAM sequence: AGG
tttgtatttttagtagagac

SEQ ID NO: 52291 - DNA, 20 bp, Artificial Sequence
  Description of Artificial Sequence: Synthetic oligonucleotide
  Target: ATXN2; (+) strand; PAM type: NRG; PAM sequence: GGG
ttgtatttttagtagagaca

SEQ ID NO: 52292 - DNA, 20 bp, Artificial Sequence
  Description of Artificial Sequence: Synthetic oligonucleotide
  Target: ATXN2; (+) strand; PAM type: NRG; PAM sequence: TAG
gagacagggtttccccatgt

SEQ ID NO: 52293 - DNA, 20 bp, Artificial Sequence
  Description of Artificial Sequence: Synthetic oligonucleotide
  Target: ATXN2; (+) strand; PAM type: NRG; PAM sequence: AGG
agacagggtttccccatgtt

SEQ ID NO: 52294 - DNA, 20 bp, Artificial Sequence
  Description of Artificial Sequence: Synthetic oligonucleotide
  Target: ATXN2; (+) strand; PAM type: NRG; PAM sequence: CAG
cagggtttccccatgttagg

SEQ ID NO: 52295 - DNA, 20 bp, Artificial Sequence
  Description of Artificial Sequence: Synthetic oligonucleotide
  Target: ATXN2; (+) strand; PAM type: NRG; PAM sequence: AGG
agggtttccccatgttaggc

SEQ ID NO: 52296 - DNA, 20 bp, Artificial Sequence
  Description of Artificial Sequence: Synthetic oligonucleotide
  Target: ATXN2; (+) strand; PAM type: NRG; PAM sequence: CGG
tttccccatgttaggcagga

SEQ ID NO: 52297 - DNA, 20 bp, Artificial Sequence
  Description of Artificial Sequence: Synthetic oligonucleotide
  Target: ATXN2; (+) strand; PAM type: NRG; PAM sequence: CGG
acctcgtgatccacccgcct

SEQ ID NO: 52298 - DNA, 20 bp, Artificial Sequence
  Description of Artificial Sequence: Synthetic oligonucleotide
  Target: ATXN2; (+) strand; PAM type: NRG; PAM sequence: AAG
ccacccgcctcggccttcca

SEQ ID NO: 52299 - DNA, 20 bp, Artificial Sequence
  Description of Artificial Sequence: Synthetic oligonucleotide
  Target: ATXN2; (+) strand; PAM type: NRG; PAM sequence: TGG
gcctcggccttccaaagtgc

SEQ ID NO: 52300 - DNA, 20 bp, Artificial Sequence
  Description of Artificial Sequence: Synthetic oligonucleotide
  Target: ATXN2; (+) strand; PAM type: NRG; PAM sequence: GGG
cctcggccttccaaagtgct

SEQ ID NO: 52301 - DNA, 20 bp, Artificial Sequence
  Description of Artificial Sequence: Synthetic oligonucleotide
  Target: ATXN2; (+) strand; PAM type: NRG; PAM sequence: CAG
cttccaaagtgctgggatta

SEQ ID NO: 52302 - DNA, 20 bp, Artificial Sequence
  Description of Artificial Sequence: Synthetic oligonucleotide
  Target: ATXN2; (+) strand; PAM type: NRG; PAM sequence: AGG
ttccaaagtgctgggattac

SEQ ID NO: 52303 - DNA, 20 bp, Artificial Sequence
  Description of Artificial Sequence: Synthetic oligonucleotide
  Target: ATXN2; (+) strand; PAM type: NRG; PAM sequence: GAG
agtgctgggattacaggcac

SEQ ID NO: 52304 - DNA, 20 bp, Artificial Sequence
  Description of Artificial Sequence: Synthetic oligonucleotide
  Target: ATXN2; (+) strand; PAM type: NRG; PAM sequence: CGG
caggcacgagccaccgcgcc

SEQ ID NO: 52305 - DNA, 20 bp, Artificial Sequence
  Description of Artificial Sequence: Synthetic oligonucleotide
  Target: ATXN2; (+) strand; PAM type: NRG; PAM sequence: CAG
cacgagccaccgcgcccggc

SEQ ID NO: 52306 - DNA, 20 bp, Artificial Sequence
  Description of Artificial Sequence: Synthetic oligonucleotide
  Target: ATXN2; (+) strand; PAM type: NRG; PAM sequence: CAG
accgcgcccggccagtatct

SEQ ID NO: 52307 - DNA, 20 bp, Artificial Sequence
  Description of Artificial Sequence: Synthetic oligonucleotide
  Target: ATXN2; (+) strand; PAM type: NRG; PAM sequence: TGG
gtttgttttttttttttttt

SEQ ID NO: 52308 - DNA, 20 bp, Artificial Sequence
  Description of Artificial Sequence: Synthetic oligonucleotide
  Target: ATXN2; (+) strand; PAM type: NRG; PAM sequence: GAG
ttgttttttttttttttttg

SEQ ID NO: 52309 - DNA, 20 bp, Artificial Sequence
  Description of Artificial Sequence: Synthetic oligonucleotide
  Target: ATXN2; (+) strand; PAM type: NRG; PAM sequence: CAG
tttttttttttttttggaga

SEQ ID NO: 52310 - DNA, 20 bp, Artificial Sequence
  Description of Artificial Sequence: Synthetic oligonucleotide
  Target: ATXN2; (+) strand; PAM type: NRG; PAM sequence: GAG
tttttttttttttggagaca

SEQ ID NO: 52311 - DNA, 20 bp, Artificial Sequence
  Description of Artificial Sequence: Synthetic oligonucleotide
  Target: ATXN2; (+) strand; PAM type: NRG; PAM sequence: CAG
cagagtctcgttctgtcgcc

SEQ ID NO: 52312 - DNA, 20 bp, Artificial Sequence
  Description of Artificial Sequence: Synthetic oligonucleotide
  Target: ATXN2; (+) strand; PAM type: NRG; PAM sequence: AGG
agagtctcgttctgtcgccc

SEQ ID NO: 52313 - DNA, 20 bp, Artificial Sequence
  Description of Artificial Sequence: Synthetic oligonucleotide
  Target: ATXN2; (+) strand; PAM type: NRG; PAM sequence: TGG
tctcgttctgtcgcccaggc

SEQ ID NO: 52314 - DNA, 20 bp, Artificial Sequence
  Description of Artificial Sequence: Synthetic oligonucleotide
  Target: ATXN2; (+) strand; PAM type: NRG; PAM sequence: GAG
tcgttctgtcgcccaggctg

SEQ ID NO: 52315 - DNA, 20 bp, Artificial Sequence
  Description of Artificial Sequence: Synthetic oligonucleotide
  Target: ATXN2; (+) strand; PAM type: NRG; PAM sequence: CAG
ctgtcgcccaggctggagtg

SEQ ID NO: 52316 - DNA, 20 bp, Artificial Sequence
  Description of Artificial Sequence: Synthetic oligonucleotide
  Target: ATXN2; (+) strand; PAM type: NRG; PAM sequence: TGG
tcgcccaggctggagtgcag

SEQ ID NO: 52317 - DNA, 20 bp, Artificial Sequence
  Description of Artificial Sequence: Synthetic oligonucleotide
  Target: ATXN2; (+) strand; PAM type: NRG; PAM sequence: TGG
ggagtgcagtggcacaatct

SEQ ID NO: 52318 - DNA, 20 bp, Artificial Sequence
  Description of Artificial Sequence: Synthetic oligonucleotide
  Target: ATXN2; (+) strand; PAM type: NRG; PAM sequence: TGG
tcactgcaacctccacctcc

SEQ ID NO: 52319 - DNA, 20 bp, Artificial Sequence
  Description of Artificial Sequence: Synthetic oligonucleotide
  Target: ATXN2; (+) strand; PAM type: NRG; PAM sequence: GGG
cactgcaacctccacctcct

SEQ ID NO: 52320 - DNA, 20 bp, Artificial Sequence
  Description of Artificial Sequence: Synthetic oligonucleotide
  Target: ATXN2; (+) strand; PAM type: NRG; PAM sequence: AAG
aacctccacctcctgggttc

SEQ ID NO: 52321 - DNA, 20 bp, Artificial Sequence
  Description of Artificial Sequence: Synthetic oligonucleotide
  Target: ATXN2; (+) strand; PAM type: NRG; PAM sequence: CAG
ttcaagcgattcccctgcct

SEQ ID NO: 52322 - DNA, 20 bp, Artificial Sequence
  Description of Artificial Sequence: Synthetic oligonucleotide
  Target: ATXN2; (+) strand; PAM type: NRG; PAM sequence: GAG
ttcccctgcctcagcctctc

SEQ ID NO: 52323 - DNA, 20 bp, Artificial Sequence
  Description of Artificial Sequence: Synthetic oligonucleotide
  Target: ATXN2; (+) strand; PAM type: NRG; PAM sequence: TAG
ccctgcctcagcctctcgag

SEQ ID NO: 52324 - DNA, 20 bp, Artificial Sequence
  Description of Artificial Sequence: Synthetic oligonucleotide
  Target: ATXN2; (+) strand; PAM type: NRG; PAM sequence: TGG
gcctcagcctctcgagtagc

SEQ ID NO: 52325 - DNA, 20 bp, Artificial Sequence
  Description of Artificial Sequence: Synthetic oligonucleotide
  Target: ATXN2; (+) strand; PAM type: NRG; PAM sequence: GGG
cctcagcctctcgagtagct

SEQ ID NO: 52326 - DNA, 20 bp, Artificial Sequence
  Description of Artificial Sequence: Synthetic oligonucleotide
  Target: ATXN2; (+) strand; PAM type: NRG; PAM sequence: CAG
ctctcgagtagctgggacta

SEQ ID NO: 52327 - DNA, 20 bp, Artificial Sequence
  Description of Artificial Sequence: Synthetic oligonucleotide
  Target: ATXN2; (+) strand; PAM type: NRG; PAM sequence: CAG
cagatgcgcaccaccatgcc

SEQ ID NO: 52328 - DNA, 20 bp, Artificial Sequence
  Description of Artificial Sequence: Synthetic oligonucleotide
  Target: ATXN2; (+) strand; PAM type: NRG; PAM sequence: TAG
ccagctaattttttctattt

SEQ ID NO: 52329 - DNA, 20 bp, Artificial Sequence
  Description of Artificial Sequence: Synthetic oligonucleotide
  Target: ATXN2; (+) strand; PAM type: NRG; PAM sequence: TAG
gctaattttttctattttag

SEQ ID NO: 52330 - DNA, 20 bp, Artificial Sequence
  Description of Artificial Sequence: Synthetic oligonucleotide
  Target: ATXN2; (+) strand; PAM type: NRG; PAM sequence: GAG
taattttttctattttagta

SEQ ID NO: 52331 - DNA, 20 bp, Artificial Sequence
  Description of Artificial Sequence: Synthetic oligonucleotide
  Target: ATXN2; (+) strand; PAM type: NRG; PAM sequence: GAG
ttttctattttagtagagat

SEQ ID NO: 52332 - DNA, 20 bp, Artificial Sequence
  Description of Artificial Sequence: Synthetic oligonucleotide
  Target: ATXN2; (+) strand; PAM type: NRG; PAM sequence: AGG
tttctattttagtagagatg

SEQ ID NO: 52333 - DNA, 20 bp, Artificial Sequence
  Description of Artificial Sequence: Synthetic oligonucleotide
  Target: ATXN2; (+) strand; PAM type: NRG; PAM sequence: CAG
tgaggtttcacaatgttgcc

SEQ ID NO: 52334 - DNA, 20 bp, Artificial Sequence
  Description of Artificial Sequence: Synthetic oligonucleotide
  Target: ATXN2; (+) strand; PAM type: NRG; PAM sequence: AGG
gaggtttcacaatgttgccc

SEQ ID NO: 52335 - DNA, 20 bp, Artificial Sequence
  Description of Artificial Sequence: Synthetic oligonucleotide
  Target: ATXN2; (+) strand; PAM type: NRG; PAM sequence: TGG
tttcacaatgttgcccaggt

SEQ ID NO: 52336 - DNA, 20 bp, Artificial Sequence
  Description of Artificial Sequence: Synthetic oligonucleotide
  Target: ATXN2; (+) strand; PAM type: NRG; PAM sequence: CAG
acctcgtgatccacccgcct

SEQ ID NO: 52337 - DNA, 20 bp, Artificial Sequence
  Description of Artificial Sequence: Synthetic oligonucleotide
  Target: ATXN2; (+) strand; PAM type: NRG; PAM sequence: AAG
ccacccgcctcagcctccca

SEQ ID NO: 52338 - DNA, 20 bp, Artificial Sequence
  Description of Artificial Sequence: Synthetic oligonucleotide
  Target: ATXN2; (+) strand; PAM type: NRG; PAM sequence: TGG
gcctcagcctcccaaagtgc

SEQ ID NO: 52339 - DNA, 20 bp, Artificial Sequence
  Description of Artificial Sequence: Synthetic oligonucleotide
  Target: ATXN2; (+) strand; PAM type: NRG; PAM sequence: GGG
cctcagcctcccaaagtgct

SEQ ID NO: 52340 - DNA, 20 bp, Artificial Sequence
  Description of Artificial Sequence: Synthetic oligonucleotide
  Target: ATXN2; (+) strand; PAM type: NRG; PAM sequence: TAG
ctcccaaagtgctgggatta

SEQ ID NO: 52341 - DNA, 20 bp, Artificial Sequence
  Description of Artificial Sequence: Synthetic oligonucleotide
  Target: ATXN2; (+) strand; PAM type: NRG; PAM sequence: AGG
tcccaaagtgctgggattat

SEQ ID NO: 52342 - DNA, 20 bp, Artificial Sequence
  Description of Artificial Sequence: Synthetic oligonucleotide
  Target: ATXN2; (+) strand; PAM type: NRG; PAM sequence: GAG
agtgctgggattataggcgt

SEQ ID NO: 52343 - DNA, 20 bp, Artificial Sequence
  Description of Artificial Sequence: Synthetic oligonucleotide
  Target: ATXN2; (+) strand; PAM type: NRG; PAM sequence: CAG
taggcgtgagccaccgcgcc

SEQ ID NO: 52344 - DNA, 20 bp, Artificial Sequence
  Description of Artificial Sequence: Synthetic oligonucleotide
  Target: ATXN2; (+) strand; PAM type: NRG; PAM sequence: AAG
gtgagccaccgcgcccagcc

SEQ ID NO: 52345 - DNA, 20 bp, Artificial Sequence
  Description of Artificial Sequence: Synthetic oligonucleotide
  Target: ATXN2; (+) strand; PAM type: NRG; PAM sequence: AGG
tgagccaccgcgcccagcca

SEQ ID NO: 52346 - DNA, 20 bp, Artificial Sequence
  Description of Artificial Sequence: Synthetic oligonucleotide
  Target: ATXN2; (+) strand; PAM type: NRG; PAM sequence: AAG
gccaccgcgcccagccaagg

SEQ ID NO: 52347 - DNA, 20 bp, Artificial Sequence
  Description of Artificial Sequence: Synthetic oligonucleotide
  Target: ATXN2; (+) strand; PAM type: NRG; PAM sequence: TAG
agatattctttctcttttaa

SEQ ID NO: 52348 - DNA, 20 bp, Artificial Sequence
  Description of Artificial Sequence: Synthetic oligonucleotide
  Target: ATXN2; (+) strand; PAM type: NRG; PAM sequence: AGG
gatattctttctcttttaat

SEQ ID NO: 52349 - DNA, 20 bp, Artificial Sequence
  Description of Artificial Sequence: Synthetic oligonucleotide
  Target: ATXN2; (+) strand; PAM type: NRG; PAM sequence: AAG
ttttaataggtaaataaact

SEQ ID NO: 52350 - DNA, 20 bp, Artificial Sequence
  Description of Artificial Sequence: Synthetic oligonucleotide
  Target: ATXN2; (+) strand; PAM type: NRG; PAM sequence: GAG
taggtaaataaactaagcct

SEQ ID NO: 52351 - DNA, 20 bp, Artificial Sequence
  Description of Artificial Sequence: Synthetic oligonucleotide
  Target: ATXN2; (+) strand; PAM type: NRG; PAM sequence: GAG
ggtaaataaactaagcctga

SEQ ID NO: 52352 - DNA, 20 bp, Artificial Sequence
  Description of Artificial Sequence: Synthetic oligonucleotide
  Target: ATXN2; (+) strand; PAM type: NRG; PAM sequence: TGG
aaataaactaagcctgagag

SEQ ID NO: 52353 - DNA, 20 bp, Artificial Sequence
  Description of Artificial Sequence: Synthetic oligonucleotide
  Target: ATXN2; (+) strand; PAM type: NRG; PAM sequence: GAG
aactaagcctgagagtggct

SEQ ID NO: 52354 - DNA, 20 bp, Artificial Sequence
  Description of Artificial Sequence: Synthetic oligonucleotide
  Target: ATXN2; (+) strand; PAM type: NRG; PAM sequence: AAG
gcccattcaaacatgtgacc

SEQ ID NO: 52355 - DNA, 20 bp, Artificial Sequence
  Description of Artificial Sequence: Synthetic oligonucleotide
  Target: ATXN2; (+) strand; PAM type: NRG; PAM sequence: CAG
cattcaaacatgtgaccaag

SEQ ID NO: 52356 - DNA, 20 bp, Artificial Sequence
  Description of Artificial Sequence: Synthetic oligonucleotide
  Target: ATXN2; (+) strand; PAM type: NRG; PAM sequence: AAG
aaacatgtgaccaagcagtt

SEQ ID NO: 52357 - DNA, 20 bp, Artificial Sequence
  Description of Artificial Sequence: Synthetic oligonucleotide
  Target: ATXN2; (+) strand; PAM type: NRG; PAM sequence: AAG
cagttaagtgccaaccattc

SEQ ID NO: 52358 - DNA, 20 bp, Artificial Sequence
  Description of Artificial Sequence: Synthetic oligonucleotide
  Target: ATXN2; (+) strand; PAM type: NRG; PAM sequence: TAG
agtgccaaccattcaagaaa

SEQ ID NO: 52359 - DNA, 20 bp, Artificial Sequence
  Description of Artificial Sequence: Synthetic oligonucleotide
  Target: ATXN2; (+) strand; PAM type: NRG; PAM sequence: AGG
gtgccaaccattcaagaaat

SEQ ID NO: 52360 - DNA, 20 bp, Artificial Sequence
  Description of Artificial Sequence: Synthetic oligonucleotide
  Target: ATXN2; (+) strand; PAM type: NRG; PAM sequence: GGG
tgccaaccattcaagaaata

SEQ ID NO: 52361 - DNA, 20 bp, Artificial Sequence
  Description of Artificial Sequence: Synthetic oligonucleotide
  Target: ATXN2; (+) strand; PAM type: NRG; PAM sequence: TAG
agaaatagggatacaatcaa

SEQ ID NO: 52362 - DNA, 20 bp, Artificial Sequence
  Description of Artificial Sequence: Synthetic oligonucleotide
  Target: ATXN2; (+) strand; PAM type: NRG; PAM sequence: AAG
aatcaatagtgaacaaaaca

SEQ ID NO: 52363 - DNA, 20 bp, Artificial Sequence
  Description of Artificial Sequence: Synthetic oligonucleotide
  Target: ATXN2; (+) strand; PAM type: NRG; PAM sequence: TAG
aaacaaagttcctgctttca

SEQ ID NO: 52364 - DNA, 20 bp, Artificial Sequence
  Description of Artificial Sequence: Synthetic oligonucleotide
  Target: ATXN2; (+) strand; PAM type: NRG; PAM sequence: GAG
acaaagttcctgctttcata

SEQ ID NO: 52365 - DNA, 20 bp, Artificial Sequence
  Description of Artificial Sequence: Synthetic oligonucleotide
  Target: ATXN2; (+) strand; PAM type: NRG; PAM sequence: TAG
ctttcatagagcttaaattt

SEQ ID NO: 52366 - DNA, 20 bp, Artificial Sequence
  Description of Artificial Sequence: Synthetic oligonucleotide
  Target: ATXN2; (+) strand; PAM type: NRG; PAM sequence: AAG
agcttaaattttagttactg

SEQ ID NO: 52367 - DNA, 20 bp, Artificial Sequence
  Description of Artificial Sequence: Synthetic oligonucleotide
  Target: ATXN2; (+) strand; PAM type: NRG; PAM sequence: GAG
cttaaattttagttactgaa

SEQ ID NO: 52368 - DNA, 20 bp, Artificial Sequence
  Description of Artificial Sequence: Synthetic oligonucleotide
  Target: ATXN2; (+) strand; PAM type: NRG; PAM sequence: TGG
agttactgaagagtgaacca

SEQ ID NO: 52369 - DNA, 20 bp, Artificial Sequence
  Description of Artificial Sequence: Synthetic oligonucleotide
  Target: ATXN2; (+) strand; PAM type: NRG; PAM sequence: CAG
actgaagagtgaaccatggc

SEQ ID NO: 52370 - DNA, 20 bp, Artificial Sequence
  Description of Artificial Sequence: Synthetic oligonucleotide
  Target: ATXN2; (+) strand; PAM type: NRG; PAM sequence: AGG
ctgaagagtgaaccatggcc

SEQ ID NO: 52371 - DNA, 20 bp, Artificial Sequence
  Description of Artificial Sequence: Synthetic oligonucleotide
  Target: ATXN2; (+) strand; PAM type: NRG; PAM sequence: CGG
gagtgaaccatggccaggca

SEQ ID NO: 52372 - DNA, 20 bp, Artificial Sequence
  Description of Artificial Sequence: Synthetic oligonucleotide
  Target: ATXN2; (+) strand; PAM type: NRG; PAM sequence: TAG
tgaaccatggccaggcacgg

SEQ ID NO: 52373 - DNA, 20 bp, Artificial Sequence
  Description of Artificial Sequence: Synthetic oligonucleotide
  Target: ATXN2; (+) strand; PAM type: NRG; PAM sequence: CAG
gtagatcatgcctgtaatcc

SEQ ID NO: 52374 - DNA, 20 bp, Artificial Sequence
  Description of Artificial Sequence: Synthetic oligonucleotide
  Target: ATXN2; (+) strand; PAM type: NRG; PAM sequence: TGG
tgcctgtaatcccagcacgt

SEQ ID NO: 52375 - DNA, 20 bp, Artificial Sequence
  Description of Artificial Sequence: Synthetic oligonucleotide
  Target: ATXN2; (+) strand; PAM type: NRG; PAM sequence: GGG
gcctgtaatcccagcacgtt

SEQ ID NO: 52376 - DNA, 20 bp, Artificial Sequence
  Description of Artificial Sequence: Synthetic oligonucleotide
  Target: ATXN2; (+) strand; PAM type: NRG; PAM sequence: GAG
ctgtaatcccagcacgttgg

SEQ ID NO: 52377 - DNA, 20 bp, Artificial Sequence
  Description of Artificial Sequence: Synthetic oligonucleotide
  Target: ATXN2; (+) strand; PAM type: NRG; PAM sequence: AGG
tgtaatcccagcacgttggg

SEQ ID NO: 52378 - DNA, 20 bp, Artificial Sequence
  Description of Artificial Sequence: Synthetic oligonucleotide
  Target: ATXN2; (+) strand; PAM type: NRG; PAM sequence: CAG
tcccagcacgttgggaggcc

SEQ ID NO: 52379 - DNA, 20 bp, Artificial Sequence
  Description of Artificial Sequence: Synthetic oligonucleotide
  Target: ATXN2; (+) strand; PAM type: NRG; PAM sequence: AGG
cccagcacgttgggaggccc

SEQ ID NO: 52380 - DNA, 20 bp, Artificial Sequence
  Description of Artificial Sequence: Synthetic oligonucleotide
  Target: ATXN2; (+) strand; PAM type: NRG; PAM sequence: TGG
agcacgttgggaggcccagg

SEQ ID NO: 52381 - DNA, 20 bp, Artificial Sequence
  Description of Artificial Sequence: Synthetic oligonucleotide
  Target: ATXN2; (+) strand; PAM type: NRG; PAM sequence: GGG
gcacgttgggaggcccaggt

SEQ ID NO: 52382 - DNA, 20 bp, Artificial Sequence
  Description of Artificial Sequence: Synthetic oligonucleotide
  Target: ATXN2; (+) strand; PAM type: NRG; PAM sequence: CGG
cgttgggaggcccaggtggg

SEQ ID NO: 52383 - DNA, 20 bp, Artificial Sequence
  Description of Artificial Sequence: Synthetic oligonucleotide
  Target: ATXN2; (+) strand; PAM type: NRG; PAM sequence: GAG
cccaggtgggcggaccacct

SEQ ID NO: 52384 - DNA, 20 bp, Artificial Sequence
  Description of Artificial Sequence: Synthetic oligonucleotide
  Target: ATXN2; (+) strand; PAM type: NRG; PAM sequence: AGG
ccaggtgggcggaccacctg

SEQ ID NO: 52385 - DNA, 20 bp, Artificial Sequence
  Description of Artificial Sequence: Synthetic oligonucleotide
  Target: ATXN2; (+) strand; PAM type: NRG; PAM sequence: CAG
gtgggcggaccacctgaggt

SEQ ID NO: 52386 - DNA, 20 bp, Artificial Sequence
  Description of Artificial Sequence: Synthetic oligonucleotide
  Target: ATXN2; (+) strand; PAM type: NRG; PAM sequence: AGG
tgggcggaccacctgaggtc

SEQ ID NO: 52387 - DNA, 20 bp, Artificial Sequence
  Description of Artificial Sequence: Synthetic oligonucleotide
  Target: ATXN2; (+) strand; PAM type: NRG; PAM sequence: GAG
ggcggaccacctgaggtcag

SEQ ID NO: 52388 - DNA, 20 bp, Artificial Sequence
  Description of Artificial Sequence: Synthetic oligonucleotide
  Target: ATXN2; (+) strand; PAM type: NRG; PAM sequence: AAG
ccacctgaggtcaggagttc

SEQ ID NO: 52389 - DNA, 20 bp, Artificial Sequence
  Description of Artificial Sequence: Synthetic oligonucleotide
  Target: ATXN2; (+) strand; PAM type: NRG; PAM sequence: CAG
tgaggtcaggagttcaagac

SEQ ID NO: 52390 - DNA, 20 bp, Artificial Sequence
  Description of Artificial Sequence: Synthetic oligonucleotide
  Target: ATXN2; (+) strand; PAM type: NRG; PAM sequence: TGG
caagaccagcctgaacaaca

SEQ ID NO: 52391 - DNA, 20 bp, Artificial Sequence
  Description of Artificial Sequence: Synthetic oligonucleotide
  Target: ATXN2; (+) strand; PAM type: NRG; PAM sequence: TAG
tctactaaaaatataaaaat

SEQ ID NO: 52392 - DNA, 20 bp, Artificial Sequence
  Description of Artificial Sequence: Synthetic oligonucleotide
  Target: ATXN2; (+) strand; PAM type: NRG; PAM sequence: TGG
ctaaaaatataaaaattagc

SEQ ID NO: 52393 - DNA, 20 bp, Artificial Sequence
  Description of Artificial Sequence: Synthetic oligonucleotide
  Target: ATXN2; (+) strand; PAM type: NRG; PAM sequence: GGG
taaaaatataaaaattagct

SEQ ID NO: 52394 - DNA, 20 bp, Artificial Sequence
  Description of Artificial Sequence: Synthetic oligonucleotide
  Target: ATXN2; (+) strand; PAM type: NRG; PAM sequence: TGG
atataaaaattagctgggca

SEQ ID NO: 52395 - DNA, 20 bp, Artificial Sequence
  Description of Artificial Sequence: Synthetic oligonucleotide
  Target: ATXN2; (+) strand; PAM type: NRG; PAM sequence: TGG
taaaaattagctgggcatgg

SEQ ID NO: 52396 - DNA, 20 bp, Artificial Sequence
  Description of Artificial Sequence: Synthetic oligonucleotide
  Target: ATXN2; (+) strand; PAM type: NRG; PAM sequence: TGG
aaattagctgggcatggtgg

SEQ ID NO: 52397 - DNA, 20 bp, Artificial Sequence
  Description of Artificial Sequence: Synthetic oligonucleotide
  Target: ATXN2; (+) strand; PAM type: NRG; PAM sequence: GGG
aattagctgggcatggtggt

SEQ ID NO: 52398 - DNA, 20 bp, Artificial Sequence
  Description of Artificial Sequence: Synthetic oligonucleotide
  Target: ATXN2; (+) strand; PAM type: NRG; PAM sequence: CAG
tgcctgtaatcccaactatt

SEQ ID NO: 52399 - DNA, 20 bp, Artificial Sequence
  Description of Artificial Sequence: Synthetic oligonucleotide
  Target: ATXN2; (+) strand; PAM type: NRG; PAM sequence: AGG
gcctgtaatcccaactattc

SEQ ID NO: 52400 - DNA, 20 bp, Artificial Sequence
  Description of Artificial Sequence: Synthetic oligonucleotide
  Target: ATXN2; (+) strand; PAM type: NRG; PAM sequence: GAG
ctgtaatcccaactattcag

SEQ ID NO: 52401 - DNA, 20 bp, Artificial Sequence
  Description of Artificial Sequence: Synthetic oligonucleotide
  Target: ATXN2; (+) strand; PAM type: NRG; PAM sequence: AGG
tgtaatcccaactattcagg

SEQ ID NO: 52402 - DNA, 20 bp, Artificial Sequence
  Description of Artificial Sequence: Synthetic oligonucleotide
  Target: ATXN2; (+) strand; PAM type: NRG; PAM sequence: GAG
tcccaactattcaggaggct

SEQ ID NO: 52403 - DNA, 20 bp, Artificial Sequence
  Description of Artificial Sequence: Synthetic oligonucleotide
  Target: ATXN2; (+) strand; PAM type: NRG; PAM sequence: AGG
cccaactattcaggaggctg

SEQ ID NO: 52404 - DNA, 20 bp, Artificial Sequence
  Description of Artificial Sequence: Synthetic oligonucleotide
  Target: ATXN2; (+) strand; PAM type: NRG; PAM sequence: CAG
aactattcaggaggctgagg

SEQ ID NO: 52405 - DNA, 20 bp, Artificial Sequence
  Description of Artificial Sequence: Synthetic oligonucleotide
  Target: ATXN2; (+) strand; PAM type: NRG; PAM sequence: AGG
actattcaggaggctgaggc

SEQ ID NO: 52406 - DNA, 20 bp, Artificial Sequence
  Description of Artificial Sequence: Synthetic oligonucleotide
  Target: ATXN2; (+) strand; PAM type: NRG; PAM sequence: GAG
tattcaggaggctgaggcag

SEQ ID NO: 52407 - DNA, 20 bp, Artificial Sequence
  Description of Artificial Sequence: Synthetic oligonucleotide
  Target: ATXN2; (+) strand; PAM type: NRG; PAM sequence: CAG
gcaggagaatcacttgaaca

SEQ ID NO: 52408 - DNA, 20 bp, Artificial Sequence
  Description of Artificial Sequence: Synthetic oligonucleotide
  Target: ATXN2; (+) strand; PAM type: NRG; PAM sequence: AGG
caggagaatcacttgaacac

SEQ ID NO: 52409 - DNA, 20 bp, Artificial Sequence
  Description of Artificial Sequence: Synthetic oligonucleotide
  Target: ATXN2; (+) strand; PAM type: NRG; PAM sequence: GAG
ggagaatcacttgaacacag

SEQ ID NO: 52410 - DNA, 20 bp, Artificial Sequence
  Description of Artificial Sequence: Synthetic oligonucleotide
  Target: ATXN2; (+) strand; PAM type: NRG; PAM sequence: AGG
gagaatcacttgaacacagg

SEQ ID NO: 52411 - DNA, 20 bp, Artificial Sequence
  Description of Artificial Sequence: Synthetic oligonucleotide
  Target: ATXN2; (+) strand; PAM type: NRG; PAM sequence: TGG
aatcacttgaacacaggagg

SEQ ID NO: 52412 - DNA, 20 bp, Artificial Sequence
  Description of Artificial Sequence: Synthetic oligonucleotide
  Target: ATXN2; (+) strand; PAM type: NRG; PAM sequence: GAG
tcacttgaacacaggaggtg

SEQ ID NO: 52413 - DNA, 20 bp, Artificial Sequence
  Description of Artificial Sequence: Synthetic oligonucleotide
  Target: ATXN2; (+) strand; PAM type: NRG; PAM sequence: AGG
cacttgaacacaggaggtgg

SEQ ID NO: 52414 - DNA, 20 bp, Artificial Sequence
  Description of Artificial Sequence: Synthetic oligonucleotide
  Target: ATXN2; (+) strand; PAM type: NRG; PAM sequence: CAG
aacacaggaggtggaggttg

SEQ ID NO: 52415 - DNA, 20 bp, Artificial Sequence
  Description of Artificial Sequence: Synthetic oligonucleotide
  Target: ATXN2; (+) strand; PAM type: NRG; PAM sequence: GAG
caggaggtggaggttgcagt

SEQ ID NO: 52416 - DNA, 20 bp, Artificial Sequence
  Description of Artificial Sequence: Synthetic oligonucleotide
  Target: ATXN2; (+) strand; PAM type: NRG; PAM sequence: AAG
ggtggaggttgcagtgagcc

SEQ ID NO: 52417 - DNA, 20 bp, Artificial Sequence
  Description of Artificial Sequence: Synthetic oligonucleotide
  Target: ATXN2; (+) strand; PAM type: NRG; PAM sequence: CAG
aagatcgcaccattgcactc

SEQ ID NO: 52418 - DNA, 20 bp, Artificial Sequence
  Description of Artificial Sequence: Synthetic oligonucleotide
  Target: ATXN2; (+) strand; PAM type: NRG; PAM sequence: TGG
cgcaccattgcactccagcc

SEQ ID NO: 52419 - DNA, 20 bp, Artificial Sequence
  Description of Artificial Sequence: Synthetic oligonucleotide
  Target: ATXN2; (+) strand; PAM type: NRG; PAM sequence: GGG
gcaccattgcactccagcct

SEQ ID NO: 52420 - DNA, 20 bp, Artificial Sequence
  Description of Artificial Sequence: Synthetic oligonucleotide
  Target: ATXN2; (+) strand; PAM type: NRG; PAM sequence: CAG
gcactccagcctgggcaaca

SEQ ID NO: 52421 - DNA, 20 bp, Artificial Sequence
  Description of Artificial Sequence: Synthetic oligonucleotide
  Target: ATXN2; (+) strand; PAM type: NRG; PAM sequence: AAG
tccagcctgggcaacacagc

SEQ ID NO: 52422 - DNA, 20 bp, Artificial Sequence
  Description of Artificial Sequence: Synthetic oligonucleotide
  Target: ATXN2; (+) strand; PAM type: NRG; PAM sequence: CAG
aaaaaaaaaaaaaaaaaaaa

SEQ ID NO: 52423 - DNA, 20 bp, Artificial Sequence
  Description of Artificial Sequence: Synthetic oligonucleotide
  Target: ATXN2; (+) strand; PAM type: NRG; PAM sequence: CAG
aaaacagtgaaccatgattc

SEQ ID NO: 52424 - DNA, 20 bp, Artificial Sequence
  Description of Artificial Sequence: Synthetic oligonucleotide
  Target: ATXN2; (+) strand; PAM type: NRG; PAM sequence: TAG
agtgaaccatgattccagct

SEQ ID NO: 52425 - DNA, 20 bp, Artificial Sequence
  Description of Artificial Sequence: Synthetic oligonucleotide
  Target: ATXN2; (+) strand; PAM type: NRG; PAM sequence: TGG
accatgattccagcttagac

SEQ ID NO: 52426 - DNA, 20 bp, Artificial Sequence
  Description of Artificial Sequence: Synthetic oligonucleotide
  Target: ATXN2; (+) strand; PAM type: NRG; PAM sequence: GAG
catgattccagcttagactg

SEQ ID NO: 52427 - DNA, 20 bp, Artificial Sequence
  Description of Artificial Sequence: Synthetic oligonucleotide
  Target: ATXN2; (+) strand; PAM type: NRG; PAM sequence: CAG
ccagcttagactggagttgc

SEQ ID NO: 52428 - DNA, 20 bp, Artificial Sequence
  Description of Artificial Sequence: Synthetic oligonucleotide
  Target: ATXN2; (+) strand; PAM type: NRG; PAM sequence: AAG
ggagttgccagataaaatac

SEQ ID NO: 52429 - DNA, 20 bp, Artificial Sequence
  Description of Artificial Sequence: Synthetic oligonucleotide
  Target: ATXN2; (+) strand; PAM type: NRG; PAM sequence: CAG
cagataaaatacaagatgct

SEQ ID NO: 52430 - DNA, 20 bp, Artificial Sequence
  Description of Artificial Sequence: Synthetic oligonucleotide
  Target: ATXN2; (+) strand; PAM type: NRG; PAM sequence: TAG
gctcagttaaatttcaactt

SEQ ID NO: 52431 - DNA, 20 bp, Artificial Sequence
  Description of Artificial Sequence: Synthetic oligonucleotide
  Target: ATXN2; (+) strand; PAM type: NRG; PAM sequence: TGG
acacaattatactaaaaaac

SEQ ID NO: 52432 - DNA, 20 bp, Artificial Sequence
  Description of Artificial Sequence: Synthetic oligonucleotide
  Target: ATXN2; (+) strand; PAM type: NRG; PAM sequence: GAG
tcaaaaattcaaatttaact

SEQ ID NO: 52433 - DNA, 20 bp, Artificial Sequence
  Description of Artificial Sequence: Synthetic oligonucleotide
  Target: ATXN2; (+) strand; PAM type: NRG; PAM sequence: TAG
tttgccaaatctgacaaccc

SEQ ID NO: 52434 - DNA, 20 bp, Artificial Sequence
  Description of Artificial Sequence: Synthetic oligonucleotide
  Target: ATXN2; (+) strand; PAM type: NRG; PAM sequence: TAG
caaatctgacaaccctagct

SEQ ID NO: 52435 - DNA, 20 bp, Artificial Sequence
  Description of Artificial Sequence: Synthetic oligonucleotide
  Target: ATXN2; (+) strand; PAM type: NRG; PAM sequence: TGG
atccttttactgcgtttctc

SEQ ID NO: 52436 - DNA, 20 bp, Artificial Sequence
  Description of Artificial Sequence: Synthetic oligonucleotide
  Target: ATXN2; (+) strand; PAM type: NRG; PAM sequence: AAG
actgcgtttctctggctcta

SEQ ID NO: 52437 - DNA, 20 bp, Artificial Sequence
  Description of Artificial Sequence: Synthetic oligonucleotide
  Target: ATXN2; (+) strand; PAM type: NRG; PAM sequence: CAG
gcgtttctctggctctaaag

SEQ ID NO: 52438 - DNA, 20 bp, Artificial Sequence
  Description of Artificial Sequence: Synthetic oligonucleotide
  Target: ATXN2; (+) strand; PAM type: NRG; PAM sequence: TGG
attacttaaaaaaaaatttt

SEQ ID NO: 52439 - DNA, 20 bp, Artificial Sequence
  Description of Artificial Sequence: Synthetic oligonucleotide
  Target: ATXN2; (+) strand; PAM type: NRG; PAM sequence: TAG
cttaaaaaaaaatttttggc

SEQ ID NO: 52440 - DNA, 20 bp, Artificial Sequence
  Description of Artificial Sequence: Synthetic oligonucleotide
  Target: ATXN2; (+) strand; PAM type: NRG; PAM sequence: AGG
ttaaaaaaaaatttttggct

SEQ ID NO: 52441 - DNA, 20 bp, Artificial Sequence
  Description of Artificial Sequence: Synthetic oligonucleotide
  Target: ATXN2; (+) strand; PAM type: NRG; PAM sequence: CGG
aaaaaatttttggctaggca

SEQ ID NO: 52442 - DNA, 20 bp, Artificial Sequence
  Description of Artificial Sequence: Synthetic oligonucleotide
  Target: ATXN2; (+) strand; PAM type: NRG; PAM sequence: TGG
aaatttttggctaggcacgg

SEQ ID NO: 52443 - DNA, 20 bp, Artificial Sequence
  Description of Artificial Sequence: Synthetic oligonucleotide
  Target: ATXN2; (+) strand; PAM type: NRG; PAM sequence: CAG
gtggctcatccctgtaatcc

SEQ ID NO: 52444 - DNA, 20 bp, Artificial Sequence
  Description of Artificial Sequence: Synthetic oligonucleotide
  Target: ATXN2; (+) strand; PAM type: NRG; PAM sequence: TGG
ccctgtaatcccagcatttc

SEQ ID NO: 52445 - DNA, 20 bp, Artificial Sequence
  Description of Artificial Sequence: Synthetic oligonucleotide
  Target: ATXN2; (+) strand; PAM type: NRG; PAM sequence: AAG
tcccagcatttctggacacc

SEQ ID NO: 52446 - DNA, 20 bp, Artificial Sequence
  Description of Artificial Sequence: Synthetic oligonucleotide
  Target: ATXN2; (+) strand; PAM type: NRG; PAM sequence: AGG
cccagcatttctggacacca

SEQ ID NO: 52447 - DNA, 20 bp, Artificial Sequence
  Description of Artificial Sequence: Synthetic oligonucleotide
  Target: ATXN2; (+) strand; PAM type: NRG; PAM sequence: TGG
agcatttctggacaccaagg

SEQ ID NO: 52448 - DNA, 20 bp, Artificial Sequence
  Description of Artificial Sequence: Synthetic oligonucleotide
  Target: ATXN2; (+) strand; PAM type: NRG; PAM sequence: GGG
gcatttctggacaccaaggt

SEQ ID NO: 52449 - DNA, 20 bp, Artificial Sequence
  Description of Artificial Sequence: Synthetic oligonucleotide
  Target: ATXN2; (+) strand; PAM type: NRG; PAM sequence: TGG
tttctggacaccaaggtggg

SEQ ID NO: 52450 - DNA, 20 bp, Artificial Sequence
  Description of Artificial Sequence: Synthetic oligonucleotide
  Target: ATXN2; (+) strand; PAM type: NRG; PAM sequence: GAG
ccaaggtgggtggatcatct

SEQ ID NO: 52451 - DNA, 20 bp, Artificial Sequence
  Description of Artificial Sequence: Synthetic oligonucleotide
  Target: ATXN2; (+) strand; PAM type: NRG; PAM sequence: CAG
tgggtggatcatctgagctc

SEQ ID NO: 52452 - DNA, 20 bp, Artificial Sequence
  Description of Artificial Sequence: Synthetic oligonucleotide
  Target: ATXN2; (+) strand; PAM type: NRG; PAM sequence: GAG
ggtggatcatctgagctcca

SEQ ID NO: 52453 - DNA, 20 bp, Artificial Sequence
  Description of Artificial Sequence: Synthetic oligonucleotide
  Target: ATXN2; (+) strand; PAM type: NRG; PAM sequence: AAG
tcatctgagctccagagttc

SEQ ID NO: 52454 - DNA, 20 bp, Artificial Sequence
  Description of Artificial Sequence: Synthetic oligonucleotide
  Target: ATXN2; (+) strand; PAM type: NRG; PAM sequence: TAG
tgagctccagagttcaagac

SEQ ID NO: 52455 - DNA, 20 bp, Artificial Sequence
  Description of Artificial Sequence: Synthetic oligonucleotide
  Target: ATXN2; (+) strand; PAM type: NRG; PAM sequence: TGG
caagactagcctgaacaaca

SEQ ID NO: 52456 - DNA, 20 bp, Artificial Sequence
  Description of Artificial Sequence: Synthetic oligonucleotide
  Target: ATXN2; (+) strand; PAM type: NRG; PAM sequence: TAG
tcttcaaaaaatacaaaaat

SEQ ID NO: 52457 - DNA, 20 bp, Artificial Sequence
  Description of Artificial Sequence: Synthetic oligonucleotide
  Target: ATXN2; (+) strand; PAM type: NRG; PAM sequence: CAG
caaaaaatacaaaaattagc

SEQ ID NO: 52458 - DNA, 20 bp, Artificial Sequence
  Description of Artificial Sequence: Synthetic oligonucleotide
  Target: ATXN2; (+) strand; PAM type: NRG; PAM sequence: AGG
aaaaaatacaaaaattagcc

SEQ ID NO: 52459 - DNA, 20 bp, Artificial Sequence
  Description of Artificial Sequence: Synthetic oligonucleotide
  Target: ATXN2; (+) strand; PAM type: NRG; PAM sequence: TGG
atacaaaaattagccaggca

SEQ ID NO: 52460 - DNA, 20 bp, Artificial Sequence
  Description of Artificial Sequence: Synthetic oligonucleotide
  Target: ATXN2; (+) strand; PAM type: NRG; PAM sequence: TAG
caaaaattagccaggcatgg

SEQ ID NO: 52461 - DNA, 20 bp, Artificial Sequence
  Description of Artificial Sequence: Synthetic oligonucleotide
  Target: ATXN2; (+) strand; PAM type: NRG; PAM sequence: CAG
gtagcgtgctcctgtactcc

SEQ ID NO: 52462 - DNA, 20 bp, Artificial Sequence
  Description of Artificial Sequence: Synthetic oligonucleotide
  Target: ATXN2; (+) strand; PAM type: NRG; PAM sequence: CAG
ctcctgtactcccagctact

SEQ ID NO: 52463 - DNA, 20 bp, Artificial Sequence
  Description of Artificial Sequence: Synthetic oligonucleotide
  Target: ATXN2; (+) strand; PAM type: NRG; PAM sequence: AGG
tcctgtactcccagctactc

SEQ ID NO: 52464 - DNA, 20 bp, Artificial Sequence
  Description of Artificial Sequence: Synthetic oligonucleotide
  Target: ATXN2; (+) strand; PAM type: NRG; PAM sequence: GAG
ctgtactcccagctactcag

SEQ ID NO: 52465 - DNA, 20 bp, Artificial Sequence
  Description of Artificial Sequence: Synthetic oligonucleotide
  Target: ATXN2; (+) strand; PAM type: NRG; PAM sequence: AGG
tgtactcccagctactcagg

SEQ ID NO: 52466 - DNA, 20 bp, Artificial Sequence
  Description of Artificial Sequence: Synthetic oligonucleotide
  Target: ATXN2; (+) strand; PAM type: NRG; PAM sequence: GAG
tcccagctactcaggaggct

SEQ ID NO: 52467 - DNA, 20 bp, Artificial Sequence
  Description of Artificial Sequence: Synthetic oligonucleotide
  Target: ATXN2; (+) strand; PAM type: NRG; PAM sequence: AGG
cccagctactcaggaggctg

SEQ ID NO: 52468 - DNA, 20 bp, Artificial Sequence
  Description of Artificial Sequence: Synthetic oligonucleotide
  Target: ATXN2; (+) strand; PAM type: NRG; PAM sequence: TGG
agctactcaggaggctgagg

SEQ ID NO: 52469 - DNA, 20 bp, Artificial Sequence
  Description of Artificial Sequence: Synthetic oligonucleotide
  Target: ATXN2; (+) strand; PAM type: NRG; PAM sequence: GGG
gctactcaggaggctgaggt

SEQ ID NO: 52470 - DNA, 20 bp, Artificial Sequence
  Description of Artificial Sequence: Synthetic oligonucleotide
  Target: ATXN2; (+) strand; PAM type: NRG; PAM sequence: GAG
tactcaggaggctgaggtgg

SEQ ID NO: 52471 - DNA, 20 bp, Artificial Sequence
  Description of Artificial Sequence: Synthetic oligonucleotide
  Target: ATXN2; (+) strand; PAM type: NRG; PAM sequence: AGG
actcaggaggctgaggtggg

SEQ ID NO: 52472 - DNA, 20 bp, Artificial Sequence
  Description of Artificial Sequence: Synthetic oligonucleotide
  Target: ATXN2; (+) strand; PAM type: NRG; PAM sequence: GAG
ctgaggtgggaggatcgctt

SEQ ID NO: 52473 - DNA, 20 bp, Artificial Sequence
  Description of Artificial Sequence: Synthetic oligonucleotide
  Target: ATXN2; (+) strand; PAM type: NRG; PAM sequence: CAG
gtgggaggatcgcttgagcc

SEQ ID NO: 52474 - DNA, 20 bp, Artificial Sequence
  Description of Artificial Sequence: Synthetic oligonucleotide
  Target: ATXN2; (+) strand; PAM type: NRG; PAM sequence: AGG
tgggaggatcgcttgagccc

SEQ ID NO: 52475 - DNA, 20 bp, Artificial Sequence
  Description of Artificial Sequence: Synthetic oligonucleotide
  Target: ATXN2; (+) strand; PAM type: NRG; PAM sequence: CAG
gatcgcttgagcccaggaaa

SEQ ID NO: 52476 - DNA, 20 bp, Artificial Sequence
  Description of Artificial Sequence: Synthetic oligonucleotide
  Target: ATXN2; (+) strand; PAM type: NRG; PAM sequence: GAG
tcgcttgagcccaggaaaca

SEQ ID NO: 52477 - DNA, 20 bp, Artificial Sequence
  Description of Artificial Sequence: Synthetic oligonucleotide
  Target: ATXN2; (+) strand; PAM type: NRG; PAM sequence: AGG
cgcttgagcccaggaaacag

SEQ ID NO: 52478 - DNA, 20 bp, Artificial Sequence
  Description of Artificial Sequence: Synthetic oligonucleotide
  Target: ATXN2; (+) strand; PAM type: NRG; PAM sequence: CAG
agcccaggaaacagaggttg

SEQ ID NO: 52479 - DNA, 20 bp, Artificial Sequence
  Description of Artificial Sequence: Synthetic oligonucleotide
  Target: ATXN2; (+) strand; PAM type: NRG; PAM sequence: GAG
caggaaacagaggttgcagt

SEQ ID NO: 52480 - DNA, 20 bp, Artificial Sequence
  Description of Artificial Sequence: Synthetic oligonucleotide
  Target: ATXN2; (+) strand; PAM type: NRG; PAM sequence: GAG
aacagaggttgcagtgagcc

SEQ ID NO: 52481 - DNA, 20 bp, Artificial Sequence
  Description of Artificial Sequence: Synthetic oligonucleotide
  Target: ATXN2; (+) strand; PAM type: NRG; PAM sequence: TAG
gagactgcaccactacattc

SEQ ID NO: 52482 - DNA, 20 bp, Artificial Sequence
  Description of Artificial Sequence: Synthetic oligonucleotide
  Target: ATXN2; (+) strand; PAM type: NRG; PAM sequence: TGG
gcaccactacattctagcct

SEQ ID NO: 52483 - DNA, 20 bp, Artificial Sequence
  Description of Artificial Sequence: Synthetic oligonucleotide
  Target: ATXN2; (+) strand; PAM type: NRG; PAM sequence: CAG
ctacattctagccttggtga

SEQ ID NO: 52484 - DNA, 20 bp, Artificial Sequence
  Description of Artificial Sequence: Synthetic oligonucleotide
  Target: ATXN2; (+) strand; PAM type: NRG; PAM sequence: GAG
acattctagccttggtgaca

SEQ ID NO: 52485 - DNA, 20 bp, Artificial Sequence
  Description of Artificial Sequence: Synthetic oligonucleotide
  Target: ATXN2; (+) strand; PAM type: NRG; PAM sequence: TGG
cattgaactgttgctgctcg

SEQ ID NO: 52486 - DNA, 20 bp, Artificial Sequence
  Description of Artificial Sequence: Synthetic oligonucleotide
  Target: ATXN2; (+) strand; PAM type: NRG; PAM sequence: CAG
tgaactgttgctgctcgtgg

SEQ ID NO: 52487 - DNA, 20 bp, Artificial Sequence
  Description of Artificial Sequence: Synthetic oligonucleotide
  Target: ATXN2; (+) strand; PAM type: NRG; PAM sequence: GAG
aactgttgctgctcgtggca

SEQ ID NO: 52488 - DNA, 20 bp, Artificial Sequence
  Description of Artificial Sequence: Synthetic oligonucleotide
  Target: ATXN2; (+) strand; PAM type: NRG; PAM sequence: CAG
tgttgctgctcgtggcagag

SEQ ID NO: 52489 - DNA, 20 bp, Artificial Sequence
  Description of Artificial Sequence: Synthetic oligonucleotide
  Target: ATXN2; (+) strand; PAM type: NRG; PAM sequence: AGG
gttgctgctcgtggcagagc

SEQ ID NO: 52490 - DNA, 20 bp, Artificial Sequence
  Description of Artificial Sequence: Synthetic oligonucleotide
  Target: ATXN2; (+) strand; PAM type: NRG; PAM sequence: TAG
tgctcgtggcagagcaggac

SEQ ID NO: 52491 - DNA, 20 bp, Artificial Sequence
  Description of Artificial Sequence: Synthetic oligonucleotide
  Target: ATXN2; (+) strand; PAM type: NRG; PAM sequence: TAG
ggcagagcaggactagtcca

SEQ ID NO: 52492 - DNA, 20 bp, Artificial Sequence
  Description of Artificial Sequence: Synthetic oligonucleotide
  Target: ATXN2; (+) strand; PAM type: NRG; PAM sequence: AGG
gcagagcaggactagtccat

SEQ ID NO: 52493 - DNA, 20 bp, Artificial Sequence
  Description of Artificial Sequence: Synthetic oligonucleotide
  Target: ATXN2; (+) strand; PAM type: NRG; PAM sequence: CAG
tagtccataggcaatgtgcc

SEQ ID NO: 52494 - DNA, 20 bp, Artificial Sequence
  Description of Artificial Sequence: Synthetic oligonucleotide
  Target: ATXN2; (+) strand; PAM type: NRG; PAM sequence: GAG
gtccataggcaatgtgccca

SEQ ID NO: 52495 - DNA, 20 bp, Artificial Sequence
  Description of Artificial Sequence: Synthetic oligonucleotide
  Target: ATXN2; (+) strand; PAM type: NRG; PAM sequence: TGG
ataggcaatgtgcccagagt

SEQ ID NO: 52496 - DNA, 20 bp, Artificial Sequence
  Description of Artificial Sequence: Synthetic oligonucleotide
  Target: ATXN2; (+) strand; PAM type: NRG; PAM sequence: CGG
ttacattttgaattacaatg

SEQ ID NO: 52497 - DNA, 20 bp, Artificial Sequence
  Description of Artificial Sequence: Synthetic oligonucleotide
  Target: ATXN2; (+) strand; PAM type: NRG; PAM sequence: AAG
atatacattaactcaaacca

SEQ ID NO: 52498 - DNA, 20 bp, Artificial Sequence
  Description of Artificial Sequence: Synthetic oligonucleotide
  Target: ATXN2; (+) strand; PAM type: NRG; PAM sequence: TGG
ccaaagcttaaaacaattct

SEQ ID NO: 52499 - DNA, 20 bp, Artificial Sequence
  Description of Artificial Sequence: Synthetic oligonucleotide
  Target: ATXN2; (+) strand; PAM type: NRG; PAM sequence: CAG
aagcttaaaacaattcttgg

SEQ ID NO: 52500 - DNA, 20 bp, Artificial Sequence
  Description of Artificial Sequence: Synthetic oligonucleotide
  Target: ATXN2; (+) strand; PAM type: NRG; PAM sequence: TGG
ttaaaacaattcttggcagc

SEQ ID NO: 52501 - DNA, 20 bp, Artificial Sequence
  Description of Artificial Sequence: Synthetic oligonucleotide
  Target: ATXN2; (+) strand; PAM type: NRG; PAM sequence: GGG
taaaacaattcttggcagct

SEQ ID NO: 52502 - DNA, 20 bp, Artificial Sequence
  Description of Artificial Sequence: Synthetic oligonucleotide
  Target: ATXN2; (+) strand; PAM type: NRG; PAM sequence: CAG
caattcttggcagctgggtg

SEQ ID NO: 52503 - DNA, 20 bp, Artificial Sequence
  Description of Artificial Sequence: Synthetic oligonucleotide
  Target: ATXN2; (+) strand; PAM type: NRG; PAM sequence: TGG
ttcttggcagctgggtgcag

SEQ ID NO: 52504 - DNA, 20 bp, Artificial Sequence
  Description of Artificial Sequence: Synthetic oligonucleotide
  Target: ATXN2; (+) strand; PAM type: NRG; PAM sequence: CAG
gtggctcacacctgtaatcc

SEQ ID NO: 52505 - DNA, 20 bp, Artificial Sequence
  Description of Artificial Sequence: Synthetic oligonucleotide
  Target: ATXN2; (+) strand; PAM type: NRG; PAM sequence: TGG
cacctgtaatcccagcactt

SEQ ID NO: 52506 - DNA, 20 bp, Artificial Sequence
  Description of Artificial Sequence: Synthetic oligonucleotide
  Target: ATXN2; (+) strand; PAM type: NRG; PAM sequence: GGG
acctgtaatcccagcacttt

SEQ ID NO: 52507 - DNA, 20 bp, Artificial Sequence
  Description of Artificial Sequence: Synthetic oligonucleotide
  Target: ATXN2; (+) strand; PAM type: NRG; PAM sequence: GAG
ctgtaatcccagcactttgg

SEQ ID NO: 52508 - DNA, 20 bp, Artificial Sequence
  Description of Artificial Sequence: Synthetic oligonucleotide
  Target: ATXN2; (+) strand; PAM type: NRG; PAM sequence: GAG
atcccagcactttgggagtc

SEQ ID NO: 52509 - DNA, 20 bp, Artificial Sequence
  Description of Artificial Sequence: Synthetic oligonucleotide
  Target: ATXN2; (+) strand; PAM type: NRG; PAM sequence: AGG
tcccagcactttgggagtcg

SEQ ID NO: 52510 - DNA, 20 bp, Artificial Sequence
  Description of Artificial Sequence: Synthetic oligonucleotide
  Target: ATXN2; (+) strand; PAM type: NRG; PAM sequence: TGG
cagcactttgggagtcgagg

SEQ ID NO: 52511 - DNA, 20 bp, Artificial Sequence
  Description of Artificial Sequence: Synthetic oligonucleotide
  Target: ATXN2; (+) strand; PAM type: NRG; PAM sequence: GGG
agcactttgggagtcgaggt

SEQ ID NO: 52512 - DNA, 20 bp, Artificial Sequence
  Description of Artificial Sequence: Synthetic oligonucleotide
  Target: ATXN2; (+) strand; PAM type: NRG; PAM sequence: CAG
actttgggagtcgaggtggg

SEQ ID NO: 52513 - DNA, 20 bp, Artificial Sequence
  Description of Artificial Sequence: Synthetic oligonucleotide
  Target: ATXN2; (+) strand; PAM type: NRG; PAM sequence: GAG
agtcgaggtgggcagattac

SEQ ID NO: 52514 - DNA, 20 bp, Artificial Sequence
  Description of Artificial Sequence: Synthetic oligonucleotide
  Target: ATXN2; (+) strand; PAM type: NRG; PAM sequence: AGG
gtcgaggtgggcagattacg

SEQ ID NO: 52515 - DNA, 20 bp, Artificial Sequence
  Description of Artificial Sequence: Synthetic oligonucleotide
  Target: ATXN2; (+) strand; PAM type: NRG; PAM sequence: AAG
ggtgggcagattacgaggtc

SEQ ID NO: 52516 - DNA, 20 bp, Artificial Sequence
  Description of Artificial Sequence: Synthetic oligonucleotide
  Target: ATXN2; (+) strand; PAM type: NRG; PAM sequence: GAG
tgggcagattacgaggtcaa

SEQ ID NO: 52517 - DNA, 20 bp, Artificial Sequence
  Description of Artificial Sequence: Synthetic oligonucleotide
  Target: ATXN2; (+) strand; PAM type: NRG; PAM sequence: AAG
gattacgaggtcaagagatc

SEQ ID NO: 52518 - DNA, 20 bp, Artificial Sequence
  Description of Artificial Sequence: Synthetic oligonucleotide
  Target: ATXN2; (+) strand; PAM type: NRG; PAM sequence: TGG
tcaagagatcaagactatcc

SEQ ID NO: 52519 - DNA, 20 bp, Artificial Sequence
  Description of Artificial Sequence: Synthetic oligonucleotide
  Target: ATXN2; (+) strand; PAM type: NRG; PAM sequence: TGG
caagactatcctggccaaca

SEQ ID NO: 52520 - DNA, 20 bp, Artificial Sequence
  Description of Artificial Sequence: Synthetic oligonucleotide
  Target: ATXN2; (+) strand; PAM type: NRG; PAM sequence: TAG
tctactaaaaatacaaaaat

SEQ ID NO: 52521 - DNA, 20 bp, Artificial Sequence
  Description of Artificial Sequence: Synthetic oligonucleotide
  Target: ATXN2; (+) strand; PAM type: NRG; PAM sequence: AGG
ctactaaaaatacaaaaatt

SEQ ID NO: 52522 - DNA, 20 bp, Artificial Sequence
  Description of Artificial Sequence: Synthetic oligonucleotide
  Target: ATXN2; (+) strand; PAM type: NRG; PAM sequence: CGG
taaaaatacaaaaattaggc

SEQ ID NO: 52523 - DNA, 20 bp, Artificial Sequence
  Description of Artificial Sequence: Synthetic oligonucleotide
  Target: ATXN2; (+) strand; PAM type: NRG; PAM sequence: GGG
aaaaatacaaaaattaggcc

SEQ ID NO: 52524 - DNA, 20 bp, Artificial Sequence
  Description of Artificial Sequence: Synthetic oligonucleotide
  Target: ATXN2; (+) strand; PAM type: NRG; PAM sequence: CAG
tacaaaaattaggccgggca

SEQ ID NO: 52525 - DNA, 20 bp, Artificial Sequence
  Description of Artificial Sequence: Synthetic oligonucleotide
  Target: ATXN2; (+) strand; PAM type: NRG; PAM sequence: AGG
acaaaaattaggccgggcac

SEQ ID NO: 52526 - DNA, 20 bp, Artificial Sequence
  Description of Artificial Sequence: Synthetic oligonucleotide
  Target: ATXN2; (+) strand; PAM type: NRG; PAM sequence: GGG
caaaaattaggccgggcaca

SEQ ID NO: 52527 - DNA, 20 bp, Artificial Sequence
  Description of Artificial Sequence: Synthetic oligonucleotide
  Target: ATXN2; (+) strand; PAM type: NRG; PAM sequence: GGG
aaaaattaggccgggcacag

SEQ ID NO: 52528 - DNA, 20 bp, Artificial Sequence
  Description of Artificial Sequence: Synthetic oligonucleotide
  Target: ATXN2; (+) strand; PAM type: NRG; PAM sequence: CAG
ggggttcatgcctgtatccc

SEQ ID NO: 52529 - DNA, 20 bp, Artificial Sequence
  Description of Artificial Sequence: Synthetic oligonucleotide
  Target: ATXN2; (+) strand; PAM type: NRG; PAM sequence: TGG
tgcctgtatccccagcactt

SEQ ID NO: 52530 - DNA, 20 bp, Artificial Sequence
  Description of Artificial Sequence: Synthetic oligonucleotide
  Target: ATXN2; (+) strand; PAM type: NRG; PAM sequence: GGG
gcctgtatccccagcacttt

SEQ ID NO: 52531 - DNA, 20 bp, Artificial Sequence
  Description of Artificial Sequence: Synthetic oligonucleotide
  Target: ATXN2; (+) strand; PAM type: NRG; PAM sequence: GAG
ctgtatccccagcactttgg

SEQ ID NO: 52532 - DNA, 20 bp, Artificial Sequence
  Description of Artificial Sequence: Synthetic oligonucleotide
  Target: ATXN2; (+) strand; PAM type: NRG; PAM sequence: AGG
tgtatccccagcactttggg

SEQ ID NO: 52533 - DNA, 20 bp, Artificial Sequence
  Description of Artificial Sequence: Synthetic oligonucleotide
  Target: ATXN2; (+) strand; PAM type: NRG; PAM sequence: GAG
ccccagcactttgggaggcc

SEQ ID NO: 52534 - DNA, 20 bp, Artificial Sequence
  Description of Artificial Sequence: Synthetic oligonucleotide
  Target: ATXN2; (+) strand; PAM type: NRG; PAM sequence: AGG
cccagcactttgggaggccg

SEQ ID NO: 52535 - DNA, 20 bp, Artificial Sequence
  Description of Artificial Sequence: Synthetic oligonucleotide
  Target: ATXN2; (+) strand; PAM type: NRG; PAM sequence: AAG
gcactttgggaggccgaggc

SEQ ID NO: 52536 - DNA, 20 bp, Artificial Sequence
  Description of Artificial Sequence: Synthetic oligonucleotide
  Target: ATXN2; (+) strand; PAM type: NRG; PAM sequence: TGG
ctttgggaggccgaggcaag

SEQ ID NO: 52537 - DNA, 20 bp, Artificial Sequence
  Description of Artificial Sequence: Synthetic oligonucleotide
  Target: ATXN2; (+) strand; PAM type: NRG; PAM sequence: GAG
ccgaggcaagtggatcacct

SEQ ID NO: 52538 - DNA, 20 bp, Artificial Sequence
  Description of Artificial Sequence: Synthetic oligonucleotide
  Target: ATXN2; (+) strand; PAM type: NRG; PAM sequence: AGG
cgaggcaagtggatcacctg

SEQ ID NO: 52539 - DNA, 20 bp, Artificial Sequence
  Description of Artificial Sequence: Synthetic oligonucleotide
  Target: ATXN2; (+) strand; PAM type: NRG; PAM sequence: CAG
gcaagtggatcacctgaggt

SEQ ID NO: 52540 - DNA, 20 bp, Artificial Sequence
  Description of Artificial Sequence: Synthetic oligonucleotide
  Target: ATXN2; (+) strand; PAM type: NRG; PAM sequence: AGG
caagtggatcacctgaggtc

SEQ ID NO: 52541 - DNA, 20 bp, Artificial Sequence
  Description of Artificial Sequence: Synthetic oligonucleotide
  Target: ATXN2; (+) strand; PAM type: NRG; PAM sequence: GAG
agtggatcacctgaggtcag

SEQ ID NO: 52542 - DNA, 20 bp, Artificial Sequence
  Description of Artificial Sequence: Synthetic oligonucleotide
  Target: ATXN2; (+) strand; PAM type: NRG; PAM sequence: AAG
tcacctgaggtcaggagttc

SEQ ID NO: 52543 - DNA, 20 bp, Artificial Sequence
  Description of Artificial Sequence: Synthetic oligonucleotide
  Target: ATXN2; (+) strand; PAM type: NRG; PAM sequence: CAG
tgaggtcaggagttcaagac

SEQ ID NO: 52544 - DNA, 20 bp, Artificial Sequence
  Description of Artificial Sequence: Synthetic oligonucleotide
  Target: ATXN2; (+) strand; PAM type: NRG; PAM sequence: TGG
caagaccagcctgaccaaca

SEQ ID NO: 52545 - DNA, 20 bp, Artificial Sequence
  Description of Artificial Sequence: Synthetic oligonucleotide
  Target: ATXN2; (+) strand; PAM type: NRG; PAM sequence: GAG
agaccagcctgaccaacatg

SEQ ID NO: 52546 - DNA, 20 bp, Artificial Sequence
  Description of Artificial Sequence: Synthetic oligonucleotide
  Target: ATXN2; (+) strand; PAM type: NRG; PAM sequence: TAG
actaaaactaaatacaaaat

SEQ ID NO: 52547 - DNA, 20 bp, Artificial Sequence
  Description of Artificial Sequence: Synthetic oligonucleotide
  Target: ATXN2; (+) strand; PAM type: NRG; PAM sequence: CAG
aaactaaatacaaaattagc

SEQ ID NO: 52548 - DNA, 20 bp, Artificial Sequence
  Description of Artificial Sequence: Synthetic oligonucleotide
  Target: ATXN2; (+) strand; PAM type: NRG; PAM sequence: AGG
aactaaatacaaaattagcc

SEQ ID NO: 52549 - DNA, 20 bp, Artificial Sequence
  Description of Artificial Sequence: Synthetic oligonucleotide
  Target: ATXN2; (+) strand; PAM type: NRG; PAM sequence: TGG
aatacaaaattagccaggca

SEQ ID NO: 52550 - DNA, 20 bp, Artificial Sequence
  Description of Artificial Sequence: Synthetic oligonucleotide
  Target: ATXN2; (+) strand; PAM type: NRG; PAM sequence: TGG
acaaaattagccaggcatgg

SEQ ID NO: 52551 - DNA, 20 bp, Artificial Sequence
  Description of Artificial Sequence: Synthetic oligonucleotide
  Target: ATXN2; (+) strand; PAM type: NRG; PAM sequence: GAG
aaaattagccaggcatggtg

SEQ ID NO: 52552 - DNA, 20 bp, Artificial Sequence
  Description of Artificial Sequence: Synthetic oligonucleotide
  Target: ATXN2; (+) strand; PAM type: NRG; PAM sequence: CAG
gtggagcatgtctgtaatcc

SEQ ID NO: 52553 - DNA, 20 bp, Artificial Sequence
  Description of Artificial Sequence: Synthetic oligonucleotide
  Target: ATXN2; (+) strand; PAM type: NRG; PAM sequence: CAG
tgtctgtaatcccagctact

SEQ ID NO: 52554 - DNA, 20 bp, Artificial Sequence
  Description of Artificial Sequence: Synthetic oligonucleotide
  Target: ATXN2; (+) strand; PAM type: NRG; PAM sequence: AGG
gtctgtaatcccagctactc

SEQ ID NO: 52555 - DNA, 20 bp, Artificial Sequence
  Description of Artificial Sequence: Synthetic oligonucleotide
  Target: ATXN2; (+) strand; PAM type: NRG; PAM sequence: GAG
ctgtaatcccagctactcag

SEQ ID NO: 52556 - DNA, 20 bp, Artificial Sequence
  Description of Artificial Sequence: Synthetic oligonucleotide
  Target: ATXN2; (+) strand; PAM type: NRG; PAM sequence: AGG
tgtaatcccagctactcagg

SEQ ID NO: 52557 - DNA, 20 bp, Artificial Sequence
  Description of Artificial Sequence: Synthetic oligonucleotide
  Target: ATXN2; (+) strand; PAM type: NRG; PAM sequence: GAG
tcccagctactcaggaggct

SEQ ID NO: 52558 - DNA, 20 bp, Artificial Sequence
  Description of Artificial Sequence: Synthetic oligonucleotide
  Target: ATXN2; (+) strand; PAM type: NRG; PAM sequence: AGG
cccagctactcaggaggctg

SEQ ID NO: 52559 - DNA, 20 bp, Artificial Sequence
  Description of Artificial Sequence: Synthetic oligonucleotide
  Target: ATXN2; (+) strand; PAM type: NRG; PAM sequence: TAG
agctactcaggaggctgagg

SEQ ID NO: 52560 - DNA, 20 bp, Artificial Sequence
  Description of Artificial Sequence: Synthetic oligonucleotide
  Target: ATXN2; (+) strand; PAM type: NRG; PAM sequence: AGG
gctactcaggaggctgaggt

SEQ ID NO: 52561 - DNA, 20 bp, Artificial Sequence
  Description of Artificial Sequence: Synthetic oligonucleotide
  Target: ATXN2; (+) strand; PAM type: NRG; PAM sequence: GAG
tactcaggaggctgaggtag

SEQ ID NO: 52562 - DNA, 20 bp, Artificial Sequence
  Description of Artificial Sequence: Synthetic oligonucleotide
  Target: ATXN2; (+) strand; PAM type: NRG; PAM sequence: CGG
gtaggagaatcacttgaacc

SEQ ID NO: 52563 - DNA, 20 bp, Artificial Sequence
  Description of Artificial Sequence: Synthetic oligonucleotide
  Target: ATXN2; (+) strand; PAM type: NRG; PAM sequence: GGG
taggagaatcacttgaaccc

SEQ ID NO: 52564 - DNA, 20 bp, Artificial Sequence
  Description of Artificial Sequence: Synthetic oligonucleotide
  Target: ATXN2; (+) strand; PAM type: NRG; PAM sequence: GAG
ggagaatcacttgaacccgg

SEQ ID NO: 52565 - DNA, 20 bp, Artificial Sequence
  Description of Artificial Sequence: Synthetic oligonucleotide
  Target: ATXN2; (+) strand; PAM type: NRG; PAM sequence: AGG
gagaatcacttgaacccggg

SEQ ID NO: 52566 - DNA, 20 bp, Artificial Sequence
  Description of Artificial Sequence: Synthetic oligonucleotide
  Target: ATXN2; (+) strand; PAM type: NRG; PAM sequence: CAG
aatcacttgaacccgggagg

SEQ ID NO: 52567 - DNA, 20 bp, Artificial Sequence
  Description of Artificial Sequence: Synthetic oligonucleotide
  Target: ATXN2; (+) strand; PAM type: NRG; PAM sequence: CGG
cttgaacccgggaggcagat

SEQ ID NO: 52568 - DNA, 20 bp, Artificial Sequence
  Description of Artificial Sequence: Synthetic oligonucleotide
  Target: ATXN2; (+) strand; PAM type: NRG; PAM sequence: GGG
ttgaacccgggaggcagatc

SEQ ID NO: 52569 - DNA, 20 bp, Artificial Sequence
  Description of Artificial Sequence: Synthetic oligonucleotide
  Target: ATXN2; (+) strand; PAM type: NRG; PAM sequence: CAG
cagatcgggccattgcactc

SEQ ID NO: 52570 - DNA, 20 bp, Artificial Sequence
  Description of Artificial Sequence: Synthetic oligonucleotide
  Target: ATXN2; (+) strand; PAM type: NRG; PAM sequence: CGG
gggccattgcactccagcct

SEQ ID NO: 52571 - DNA, 20 bp, Artificial Sequence
  Description of Artificial Sequence: Synthetic oligonucleotide
  Target: ATXN2; (+) strand; PAM type: NRG; PAM sequence: AAG
gcactccagcctcggcaact

SEQ ID NO: 52572 - DNA, 20 bp, Artificial Sequence
  Description of Artificial Sequence: Synthetic oligonucleotide
  Target: ATXN2; (+) strand; PAM type: NRG; PAM sequence: GAG
actccagcctcggcaactaa

SEQ ID NO: 52573 - DNA, 20 bp, Artificial Sequence
  Description of Artificial Sequence: Synthetic oligonucleotide
  Target: ATXN2; (+) strand; PAM type: NRG; PAM sequence: AAG
aatgtgtttcacaatctact

SEQ ID NO: 52574 - DNA, 20 bp, Artificial Sequence
  Description of Artificial Sequence: Synthetic oligonucleotide
  Target: ATXN2; (+) strand; PAM type: NRG; PAM sequence: AGG
atgtgtttcacaatctacta

SEQ ID NO: 52575 - DNA, 20 bp, Artificial Sequence
  Description of Artificial Sequence: Synthetic oligonucleotide
  Target: ATXN2; (+) strand; PAM type: NRG; PAM sequence: GGG
tgtgtttcacaatctactaa

SEQ ID NO: 52576 - DNA, 20 bp, Artificial Sequence
  Description of Artificial Sequence: Synthetic oligonucleotide
  Target: ATXN2; (+) strand; PAM type: NRG; PAM sequence: GGG
gtgtttcacaatctactaag

SEQ ID NO: 52577 - DNA, 20 bp, Artificial Sequence
  Description of Artificial Sequence: Synthetic oligonucleotide
  Target: ATXN2; (+) strand; PAM type: NRG; PAM sequence: CAG
tactaaggggtcatgatctg

SEQ ID NO: 52578 - DNA, 20 bp, Artificial Sequence
  Description of Artificial Sequence: Synthetic oligonucleotide
  Target: ATXN2; (+) strand; PAM type: NRG; PAM sequence: TGG
cagattgaaaaatacttctt

SEQ ID NO: 52579 - DNA, 20 bp, Artificial Sequence
  Description of Artificial Sequence: Synthetic oligonucleotide
  Target: ATXN2; (+) strand; PAM type: NRG; PAM sequence: GGG
agattgaaaaatacttcttt

SEQ ID NO: 52580 - DNA, 20 bp, Artificial Sequence
  Description of Artificial Sequence: Synthetic oligonucleotide
  Target: ATXN2; (+) strand; PAM type: NRG; PAM sequence: GAG
attgaaaaatacttctttgg

SEQ ID NO: 52581 - DNA, 20 bp, Artificial Sequence
  Description of Artificial Sequence: Synthetic oligonucleotide
  Target: ATXN2; (+) strand; PAM type: NRG; PAM sequence: TGG
atataaaaaatcatttaacc

SEQ ID NO: 52582 - DNA, 20 bp, Artificial Sequence
  Description of Artificial Sequence: Synthetic oligonucleotide
  Target: ATXN2; (+) strand; PAM type: NRG; PAM sequence: GAG
atcatttaacctggtgttat

SEQ ID NO: 52583 - DNA, 20 bp, Artificial Sequence
  Description of Artificial Sequence: Synthetic oligonucleotide
  Target: ATXN2; (+) strand; PAM type: NRG; PAM sequence: GAG
gtgttatgagtcaccattat

SEQ ID NO: 52584 - DNA, 20 bp, Artificial Sequence
  Description of Artificial Sequence: Synthetic oligonucleotide
  Target: ATXN2; (+) strand; PAM type: NRG; PAM sequence: CAG
aactacactgtgctataaaa

SEQ ID NO: 52585 - DNA, 20 bp, Artificial Sequence
  Description of Artificial Sequence: Synthetic oligonucleotide
  Target: ATXN2; (+) strand; PAM type: NRG; PAM sequence: TAG
ctataaaacagtaatgccct

SEQ ID NO: 52586 - DNA, 20 bp, Artificial Sequence
  Description of Artificial Sequence: Synthetic oligonucleotide
  Target: ATXN2; (+) strand; PAM type: NRG; PAM sequence: AGG
tataaaacagtaatgccctt

SEQ ID NO: 52587 - DNA, 20 bp, Artificial Sequence
  Description of Artificial Sequence: Synthetic oligonucleotide
  Target: ATXN2; (+) strand; PAM type: NRG; PAM sequence: GGG
ataaaacagtaatgccctta

SEQ ID NO: 52588 - DNA, 20 bp, Artificial Sequence
  Description of Artificial Sequence: Synthetic oligonucleotide
  Target: ATXN2; (+) strand; PAM type: NRG; PAM sequence: AAG
cagtaatgcccttagggcct

SEQ ID NO: 52589 - DNA, 20 bp, Artificial Sequence
  Description of Artificial Sequence: Synthetic oligonucleotide
  Target: ATXN2; (+) strand; PAM type: NRG; PAM sequence: CAG
cccttagggcctaagatata

SEQ ID NO: 52590 - DNA, 20 bp, Artificial Sequence
  Description of Artificial Sequence: Synthetic oligonucleotide
  Target: ATXN2; (+) strand; PAM type: NRG; PAM sequence: CAG
gatatacagctataaactta

SEQ ID NO: 52591 - DNA, 20 bp, Artificial Sequence
  Description of Artificial Sequence: Synthetic oligonucleotide
  Target: ATXN2; (+) strand; PAM type: NRG; PAM sequence: CAG
aaacttacagtcaaaactcc

SEQ ID NO: 52592 - DNA, 20 bp, Artificial Sequence
  Description of Artificial Sequence: Synthetic oligonucleotide
  Target: ATXN2; (+) strand; PAM type: NRG; PAM sequence: AGG
aacttacagtcaaaactccc

SEQ ID NO: 52593 - DNA, 20 bp, Artificial Sequence
  Description of Artificial Sequence: Synthetic oligonucleotide
  Target: ATXN2; (+) strand; PAM type: NRG; PAM sequence: CGG
tacagtcaaaactcccaggc

SEQ ID NO: 52594 - DNA, 20 bp, Artificial Sequence
  Description of Artificial Sequence: Synthetic oligonucleotide
  Target: ATXN2; (+) strand; PAM type: NRG; PAM sequence: GGG
acagtcaaaactcccaggcc

SEQ ID NO: 52595 - DNA, 20 bp, Artificial Sequence
  Description of Artificial Sequence: Synthetic oligonucleotide
  Target: ATXN2; (+) strand; PAM type: NRG; PAM sequence: GAG
agtcaaaactcccaggccgg

SEQ ID NO: 52596 - DNA, 20 bp, Artificial Sequence
  Description of Artificial Sequence: Synthetic oligonucleotide
  Target: ATXN2; (+) strand; PAM type: NRG; PAM sequence: TGG
caaaactcccaggccgggag

SEQ ID NO: 52597 - DNA, 20 bp, Artificial Sequence
  Description of Artificial Sequence: Synthetic oligonucleotide
  Target: ATXN2; (+) strand; PAM type: NRG; PAM sequence: TGG
aactcccaggccgggagtgg

SEQ ID NO: 52598 - DNA, 20 bp, Artificial Sequence
  Description of Artificial Sequence: Synthetic oligonucleotide
  Target: ATXN2; (+) strand; PAM type: NRG; PAM sequence: CGG
gtggctcacgcctgtaatcc

SEQ ID NO: 52599 - DNA, 20 bp, Artificial Sequence
  Description of Artificial Sequence: Synthetic oligonucleotide
  Target: ATXN2; (+) strand; PAM type: NRG; PAM sequence: TGG
cgcctgtaatcccggcactt

SEQ ID NO: 52600 - DNA, 20 bp, Artificial Sequence
  Description of Artificial Sequence: Synthetic oligonucleotide
  Target: ATXN2; (+) strand; PAM type: NRG; PAM sequence: GGG
gcctgtaatcccggcacttt

SEQ ID NO: 52601 - DNA, 20 bp, Artificial Sequence
  Description of Artificial Sequence: Synthetic oligonucleotide
  Target: ATXN2; (+) strand; PAM type: NRG; PAM sequence: GAG
ctgtaatcccggcactttgg

SEQ ID NO: 52602 - DNA, 20 bp, Artificial Sequence
  Description of Artificial Sequence: Synthetic oligonucleotide
  Target: ATXN2; (+) strand; PAM type: NRG; PAM sequence: AGG
tgtaatcccggcactttggg

SEQ ID NO: 52603 - DNA, 20 bp, Artificial Sequence
  Description of Artificial Sequence: Synthetic oligonucleotide
  Target: ATXN2; (+) strand; PAM type: NRG; PAM sequence: TAG
tcccggcactttgggaggcc

SEQ ID NO: 52604 - DNA, 20 bp, Artificial Sequence
  Description of Artificial Sequence: Synthetic oligonucleotide
  Target: ATXN2; (+) strand; PAM type: NRG; PAM sequence: AGG
cccggcactttgggaggcct

SEQ ID NO: 52605 - DNA, 20 bp, Artificial Sequence
  Description of Artificial Sequence: Synthetic oligonucleotide
  Target: ATXN2; (+) strand; PAM type: NRG; PAM sequence: CAG
ggcactttgggaggcctagg

SEQ ID NO: 52606 - DNA, 20 bp, Artificial Sequence
  Description of Artificial Sequence: Synthetic oligonucleotide
  Target: ATXN2; (+) strand; PAM type: NRG; PAM sequence: AGG
gcactttgggaggcctaggc

SEQ ID NO: 52607 - DNA, 20 bp, Artificial Sequence
  Description of Artificial Sequence: Synthetic oligonucleotide
  Target: ATXN2; (+) strand; PAM type: NRG; PAM sequence: TGG
ctttgggaggcctaggcagg

SEQ ID NO: 52608 - DNA, 20 bp, Artificial Sequence
  Description of Artificial Sequence: Synthetic oligonucleotide
  Target: ATXN2; (+) strand; PAM type: NRG; PAM sequence: GAG
cctaggcaggtggatcatct

SEQ ID NO: 52609 - DNA, 20 bp, Artificial Sequence
  Description of Artificial Sequence: Synthetic oligonucleotide
  Target: ATXN2; (+) strand; PAM type: NRG; PAM sequence: AGG
ctaggcaggtggatcatctg

SEQ ID NO: 52610 - DNA, 20 bp, Artificial Sequence
  Description of Artificial Sequence: Synthetic oligonucleotide
  Target: ATXN2; (+) strand; PAM type: NRG; PAM sequence: CAG
gcaggtggatcatctgaggt

SEQ ID NO: 52611 - DNA, 20 bp, Artificial Sequence
  Description of Artificial Sequence: Synthetic oligonucleotide
  Target: ATXN2; (+) strand; PAM type: NRG; PAM sequence: AGG
caggtggatcatctgaggtc

SEQ ID NO: 52612 - DNA, 20 bp, Artificial Sequence
  Description of Artificial Sequence: Synthetic oligonucleotide
  Target: ATXN2; (+) strand; PAM type: NRG; PAM sequence: GAG
ggtggatcatctgaggtcag

SEQ ID NO: 52613 - DNA, 20 bp, Artificial Sequence
  Description of Artificial Sequence: Synthetic oligonucleotide
  Target: ATXN2; (+) strand; PAM type: NRG; PAM sequence: AAG
tcatctgaggtcaggagttc

SEQ ID NO: 52614 - DNA, 20 bp, Artificial Sequence
  Description of Artificial Sequence: Synthetic oligonucleotide
  Target: ATXN2; (+) strand; PAM type: NRG; PAM sequence: CGG
tgaggtcaggagttcaagac

SEQ ID NO: 52615 - DNA, 20 bp, Artificial Sequence
  Description of Artificial Sequence: Synthetic oligonucleotide
  Target: ATXN2; (+) strand; PAM type: NRG; PAM sequence: TGG
tcaggagttcaagaccggcc

SEQ ID NO: 52616 - DNA, 20 bp, Artificial Sequence
  Description of Artificial Sequence: Synthetic oligonucleotide
  Target: ATXN2; (+) strand; PAM type: NRG; PAM sequence: TGG
caagaccggcctggccaata

SEQ ID NO: 52617 - DNA, 20 bp, Artificial Sequence
  Description of Artificial Sequence: Synthetic oligonucleotide
  Target: ATXN2; (+) strand; PAM type: NRG; PAM sequence: CGG
ctaaaaatacaaaaattatc

SEQ ID NO: 52618 - DNA, 20 bp, Artificial Sequence
  Description of Artificial Sequence: Synthetic oligonucleotide
  Target: ATXN2; (+) strand; PAM type: NRG; PAM sequence: GGG
taaaaatacaaaaattatcc

SEQ ID NO: 52619 - DNA, 20 bp, Artificial Sequence
  Description of Artificial Sequence: Synthetic oligonucleotide
  Target: ATXN2; (+) strand; PAM type: NRG; PAM sequence: TGG
atacaaaaattatccgggtg

SEQ ID NO: 52620 - DNA, 20 bp, Artificial Sequence
  Description of Artificial Sequence: Synthetic oligonucleotide
  Target: ATXN2; (+) strand; PAM type: NRG; PAM sequence: TGG
caaaaattatccgggtgtgg

SEQ ID NO: 52621 - DNA, 20 bp, Artificial Sequence
  Description of Artificial Sequence: Synthetic oligonucleotide
  Target: ATXN2; (+) strand; PAM type: NRG; PAM sequence: CGG
aaattatccgggtgtggtgg

SEQ ID NO: 52622 - DNA, 20 bp, Artificial Sequence
  Description of Artificial Sequence: Synthetic oligonucleotide
  Target: ATXN2; (+) strand; PAM type: NRG; PAM sequence: GGG
aattatccgggtgtggtggc

SEQ ID NO: 52623 - DNA, 20 bp, Artificial Sequence
  Description of Artificial Sequence: Synthetic oligonucleotide
  Target: ATXN2; (+) strand; PAM type: NRG; PAM sequence: CAG
gtggcgggcacccgtaatcc

SEQ ID NO: 52624 - DNA, 20 bp, Artificial Sequence
  Description of Artificial Sequence: Synthetic oligonucleotide
  Target: ATXN2; (+) strand; PAM type: NRG; PAM sequence: CAG
cacccgtaatcccagctact

SEQ ID NO: 52625 - DNA, 20 bp, Artificial Sequence
  Description of Artificial Sequence: Synthetic oligonucleotide
  Target: ATXN2; (+) strand; PAM type: NRG; PAM sequence: AGG
acccgtaatcccagctactc

SEQ ID NO: 52626 - DNA, 20 bp, Artificial Sequence
  Description of Artificial Sequence: Synthetic oligonucleotide
  Target: ATXN2; (+) strand; PAM type: NRG; PAM sequence: GAG
ccgtaatcccagctactcag

SEQ ID NO: 52627 - DNA, 20 bp, Artificial Sequence
  Description of Artificial Sequence: Synthetic oligonucleotide
  Target: ATXN2; (+) strand; PAM type: NRG; PAM sequence: CAG
aatcccagctactcaggagt

SEQ ID NO: 52628 - DNA, 20 bp, Artificial Sequence
  Description of Artificial Sequence: Synthetic oligonucleotide
  Target: ATXN2; (+) strand; PAM type: NRG; PAM sequence: GAG
tcccagctactcaggagtca

SEQ ID NO: 52629 - DNA, 20 bp, Artificial Sequence
  Description of Artificial Sequence: Synthetic oligonucleotide
  Target: ATXN2; (+) strand; PAM type: NRG; PAM sequence: AGG
cccagctactcaggagtcag

SEQ ID NO: 52630 - DNA, 20 bp, Artificial Sequence
  Description of Artificial Sequence: Synthetic oligonucleotide
  Target: ATXN2; (+) strand; PAM type: NRG; PAM sequence: CAG
agctactcaggagtcagagg

SEQ ID NO: 52631 - DNA, 20 bp, Artificial Sequence
  Description of Artificial Sequence: Synthetic oligonucleotide
  Target: ATXN2; (+) strand; PAM type: NRG; PAM sequence: AGG
gctactcaggagtcagaggc

SEQ ID NO: 52632 - DNA, 20 bp, Artificial Sequence
  Description of Artificial Sequence: Synthetic oligonucleotide
  Target: ATXN2; (+) strand; PAM type: NRG; PAM sequence: TAG
gtcagaggcaggaaaatcgc

SEQ ID NO: 52633 - DNA, 20 bp, Artificial Sequence
  Description of Artificial Sequence: Synthetic oligonucleotide
  Target: ATXN2; (+) strand; PAM type: NRG; PAM sequence: AAG
agaggcaggaaaatcgctag

SEQ ID NO: 52634 - DNA, 20 bp, Artificial Sequence
  Description of Artificial Sequence: Synthetic oligonucleotide
  Target: ATXN2; (+) strand; PAM type: NRG; PAM sequence: TGG
gcaggaaaatcgctagaagc

SEQ ID NO: 52635 - DNA, 20 bp, Artificial Sequence
  Description of Artificial Sequence: Synthetic oligonucleotide
  Target: ATXN2; (+) strand; PAM type: NRG; PAM sequence: GGG
caggaaaatcgctagaagct

SEQ ID NO: 52636 - DNA, 20 bp, Artificial Sequence
  Description of Artificial Sequence: Synthetic oligonucleotide
  Target: ATXN2; (+) strand; PAM type: NRG; PAM sequence: GAG
ggaaaatcgctagaagctgg

SEQ ID NO: 52637 - DNA, 20 bp, Artificial Sequence
  Description of Artificial Sequence: Synthetic oligonucleotide
  Target: ATXN2; (+) strand; PAM type: NRG; PAM sequence: AGG
gaaaatcgctagaagctggg

SEQ ID NO: 52638 - DNA, 20 bp, Artificial Sequence
  Description of Artificial Sequence: Synthetic oligonucleotide
  Target: ATXN2; (+) strand; PAM type: NRG; PAM sequence: CAG
aatcgctagaagctgggagg

SEQ ID NO: 52639 - DNA, 20 bp, Artificial Sequence
  Description of Artificial Sequence: Synthetic oligonucleotide
  Target: ATXN2; (+) strand; PAM type: NRG; PAM sequence: GAG
tcgctagaagctgggaggca

SEQ ID NO: 52640 - DNA, 20 bp, Artificial Sequence
  Description of Artificial Sequence: Synthetic oligonucleotide
  Target: ATXN2; (+) strand; PAM type: NRG; PAM sequence: AGG
cgctagaagctgggaggcag

SEQ ID NO: 52641 - DNA, 20 bp, Artificial Sequence
  Description of Artificial Sequence: Synthetic oligonucleotide
  Target: ATXN2; (+) strand; PAM type: NRG; PAM sequence: CAG
aagctgggaggcagaggttg

SEQ ID NO: 52642 - DNA, 20 bp, Artificial Sequence
  Description of Artificial Sequence: Synthetic oligonucleotide
  Target: ATXN2; (+) strand; PAM type: NRG; PAM sequence: TGG
ctgggaggcagaggttgcag

SEQ ID NO: 52643 - DNA, 20 bp, Artificial Sequence
  Description of Artificial Sequence: Synthetic oligonucleotide
  Target: ATXN2; (+) strand; PAM type: NRG; PAM sequence: GGG
tgggaggcagaggttgcagt

SEQ ID NO: 52644 - DNA, 20 bp, Artificial Sequence
  Description of Artificial Sequence: Synthetic oligonucleotide
  Target: ATXN2; (+) strand; PAM type: NRG; PAM sequence: AAG
ggcagaggttgcagtgggcc

SEQ ID NO: 52645 - DNA, 20 bp, Artificial Sequence
  Description of Artificial Sequence: Synthetic oligonucleotide
  Target: ATXN2; (+) strand; PAM type: NRG; PAM sequence: CAG
aagattgtaccattgcactc

SEQ ID NO: 52646 - DNA, 20 bp, Artificial Sequence
  Description of Artificial Sequence: Synthetic oligonucleotide
  Target: ATXN2; (+) strand; PAM type: NRG; PAM sequence: TGG
tgtaccattgcactccagcc

SEQ ID NO: 52647 - DNA, 20 bp, Artificial Sequence
  Description of Artificial Sequence: Synthetic oligonucleotide
  Target: ATXN2; (+) strand; PAM type: NRG; PAM sequence: GGG
gtaccattgcactccagcct

SEQ ID NO: 52648 - DNA, 20 bp, Artificial Sequence
  Description of Artificial Sequence: Synthetic oligonucleotide
  Target: ATXN2; (+) strand; PAM type: NRG; PAM sequence: CAG
ttgcactccagcctgggcaa

SEQ ID NO: 52649 - DNA, 20 bp, Artificial Sequence
  Description of Artificial Sequence: Synthetic oligonucleotide
  Target: ATXN2; (+) strand; PAM type: NRG; PAM sequence: AAG
tccagcctgggcaacagaac

SEQ ID NO: 52650 - DNA, 20 bp, Artificial Sequence
  Description of Artificial Sequence: Synthetic oligonucleotide
  Target: ATXN2; (+) strand; PAM type: NRG; PAM sequence: AAG
gattctatgtcaaaaaaaaa

SEQ ID NO: 52651 - DNA, 20 bp, Artificial Sequence
  Description of Artificial Sequence: Synthetic oligonucleotide
  Target: ATXN2; (+) strand; PAM type: NRG; PAM sequence: CAG
ctatgtcaaaaaaaaaaagc

SEQ ID NO: 52652 - DNA, 20 bp, Artificial Sequence
  Description of Artificial Sequence: Synthetic oligonucleotide
  Target: ATXN2; (+) strand; PAM type: NRG; PAM sequence: AGG
tatgtcaaaaaaaaaaagcc

SEQ ID NO: 52653 - DNA, 20 bp, Artificial Sequence
  Description of Artificial Sequence: Synthetic oligonucleotide
  Target: ATXN2; (+) strand; PAM type: NRG; PAM sequence: CGG
caaaaaaaaaaagccaggtg

SEQ ID NO: 52654 - DNA, 20 bp, Artificial Sequence
  Description of Artificial Sequence: Synthetic oligonucleotide
  Target: ATXN2; (+) strand; PAM type: NRG; PAM sequence: TGG
aaaaaaaaagccaggtgcgg

SEQ ID NO: 52655 - DNA, 20 bp, Artificial Sequence
  Description of Artificial Sequence: Synthetic oligonucleotide
  Target: ATXN2; (+) strand; PAM type: NRG; PAM sequence: TGG
ggtgcggtggctcacgcctg

SEQ ID NO: 52656 - DNA, 20 bp, Artificial Sequence
  Description of Artificial Sequence: Synthetic oligonucleotide
  Target: ATXN2; (+) strand; PAM type: NRG; PAM sequence: CGG
gtggctcacgcctgtggtcc

SEQ ID NO: 52657 - DNA, 20 bp, Artificial Sequence
  Description of Artificial Sequence: Synthetic oligonucleotide
  Target: ATXN2; (+) strand; PAM type: NRG; PAM sequence: TGG
cgcctgtggtcccggcactt

SEQ ID NO: 52658 - DNA, 20 bp, Artificial Sequence
  Description of Artificial Sequence: Synthetic oligonucleotide
  Target: ATXN2; (+) strand; PAM type: NRG; PAM sequence: GGG
gcctgtggtcccggcacttt

SEQ ID NO: 52659 - DNA, 20 bp, Artificial Sequence
  Description of Artificial Sequence: Synthetic oligonucleotide
  Target: ATXN2; (+) strand; PAM type: NRG; PAM sequence: GAG
ctgtggtcccggcactttgg

SEQ ID NO: 52660 - DNA, 20 bp, Artificial Sequence
  Description of Artificial Sequence: Synthetic oligonucleotide
  Target: ATXN2; (+) strand; PAM type: NRG; PAM sequence: AGG
tgtggtcccggcactttggg

SEQ ID NO: 52661 - DNA, 20 bp, Artificial Sequence
  Description of Artificial Sequence: Synthetic oligonucleotide
  Target: ATXN2; (+) strand; PAM type: NRG; PAM sequence: AAG
cccggcactttgggaggctg

SEQ ID NO: 52662 - DNA, 20 bp, Artificial Sequence
  Description of Artificial Sequence: Synthetic oligonucleotide
  Target: ATXN2; (+) strand; PAM type: NRG; PAM sequence: CAG
ggcactttgggaggctgaag

SEQ ID NO: 52663 - DNA, 20 bp, Artificial Sequence
  Description of Artificial Sequence: Synthetic oligonucleotide
  Target: ATXN2; (+) strand; PAM type: NRG; PAM sequence: AGG
gcactttgggaggctgaagc

SEQ ID NO: 52664 - DNA, 20 bp, Artificial Sequence
  Description of Artificial Sequence: Synthetic oligonucleotide
  Target: ATXN2; (+) strand; PAM type: NRG; PAM sequence: CGG
ctttgggaggctgaagcagg

SEQ ID NO: 52665 - DNA, 20 bp, Artificial Sequence
  Description of Artificial Sequence: Synthetic oligonucleotide
  Target: ATXN2; (+) strand; PAM type: NRG; PAM sequence: GAG
ctgaagcaggcggatcacct

SEQ ID NO: 52666 - DNA, 20 bp, Artificial Sequence
  Description of Artificial Sequence: Synthetic oligonucleotide
  Target: ATXN2; (+) strand; PAM type: NRG; PAM sequence: AGG
tgaagcaggcggatcacctg

SEQ ID NO: 52667 - DNA, 20 bp, Artificial Sequence
  Description of Artificial Sequence: Synthetic oligonucleotide
  Target: ATXN2; (+) strand; PAM type: NRG; PAM sequence: CAG
gcaggcggatcacctgaggt

SEQ ID NO: 52668 - DNA, 20 bp, Artificial Sequence
  Description of Artificial Sequence: Synthetic oligonucleotide
  Target: ATXN2; (+) strand; PAM type: NRG; PAM sequence: AGG
caggcggatcacctgaggtc

SEQ ID NO: 52669 - DNA, 20 bp, Artificial Sequence
  Description of Artificial Sequence: Synthetic oligonucleotide
  Target: ATXN2; (+) strand; PAM type: NRG; PAM sequence: GAG
ggcggatcacctgaggtcag

SEQ ID NO: 52670 - DNA, 20 bp, Artificial Sequence
  Description of Artificial Sequence: Synthetic oligonucleotide
  Target: ATXN2; (+) strand; PAM type: NRG; PAM sequence: GAG
tcacctgaggtcaggagttc

SEQ ID NO: 52671 - DNA, 20 bp, Artificial Sequence
  Description of Artificial Sequence: Synthetic oligonucleotide
  Target: ATXN2; (+) strand; PAM type: NRG; PAM sequence: CAG
tgaggtcaggagttcgagac

SEQ ID NO: 52672 - DNA, 20 bp, Artificial Sequence
  Description of Artificial Sequence: Synthetic oligonucleotide
  Target: ATXN2; (+) strand; PAM type: NRG; PAM sequence: TGG
tcaggagttcgagaccagcc

SEQ ID NO: 52673 - DNA, 20 bp, Artificial Sequence
  Description of Artificial Sequence: Synthetic oligonucleotide
  Target: ATXN2; (+) strand; PAM type: NRG; PAM sequence: TGG
cgagaccagcctggccaaaa

SEQ ID NO: 52674 - DNA, 20 bp, Artificial Sequence
  Description of Artificial Sequence: Synthetic oligonucleotide
  Target: ATXN2; (+) strand; PAM type: NRG; PAM sequence: GGG
gagaccagcctggccaaaat

SEQ ID NO: 52675 - DNA, 20 bp, Artificial Sequence
  Description of Artificial Sequence: Synthetic oligonucleotide
  Target: ATXN2; (+) strand; PAM type: NRG; PAM sequence: GGG
agaccagcctggccaaaatg

SEQ ID NO: 52676 - DNA, 20 bp, Artificial Sequence
  Description of Artificial Sequence: Synthetic oligonucleotide
  Target: ATXN2; (+) strand; PAM type: NRG; PAM sequence: CGG
taaaaatacaaaaattaacc

SEQ ID NO: 52677 - DNA, 20 bp, Artificial Sequence
  Description of Artificial Sequence: Synthetic oligonucleotide
  Target: ATXN2; (+) strand; PAM type: NRG; PAM sequence: CAG
gtgaccaatatctgtactcc

SEQ ID NO: 52678 - DNA, 20 bp, Artificial Sequence
  Description of Artificial Sequence: Synthetic oligonucleotide
  Target: ATXN2; (+) strand; PAM type: NRG; PAM sequence: CAG
tatctgtactcccagctact

SEQ ID NO: 52679 - DNA, 20 bp, Artificial Sequence
  Description of Artificial Sequence: Synthetic oligonucleotide
  Target: ATXN2; (+) strand; PAM type: NRG; PAM sequence: AGG
atctgtactcccagctactc

SEQ ID NO: 52680 - DNA, 20 bp, Artificial Sequence
  Description of Artificial Sequence: Synthetic oligonucleotide
  Target: ATXN2; (+) strand; PAM type: NRG; PAM sequence: GAG
ctgtactcccagctactcag

SEQ ID NO: 52681 - DNA, 20 bp, Artificial Sequence
  Description of Artificial Sequence: Synthetic oligonucleotide
  Target: ATXN2; (+) strand; PAM type: NRG; PAM sequence: CAG
actcccagctactcaggagt

SEQ ID NO: 52682 - DNA, 20 bp, Artificial Sequence
  Description of Artificial Sequence: Synthetic oligonucleotide
  Target: ATXN2; (+) strand; PAM type: NRG; PAM sequence: AGG
ctcccagctactcaggagtc

SEQ ID NO: 52683 - DNA, 20 bp, Artificial Sequence
  Description of Artificial Sequence: Synthetic oligonucleotide
  Target: ATXN2; (+) strand; PAM type: NRG; PAM sequence: CAG
ccagctactcaggagtcagg

SEQ ID NO: 52684 - DNA, 20 bp, Artificial Sequence
  Description of Artificial Sequence: Synthetic oligonucleotide
  Target: ATXN2; (+) strand; PAM type: NRG; PAM sequence: AGG
cagctactcaggagtcaggc

SEQ ID NO: 52685 - DNA, 20 bp, Artificial Sequence
  Description of Artificial Sequence: Synthetic oligonucleotide
  Target: ATXN2; (+) strand; PAM type: NRG; PAM sequence: GAG
gctactcaggagtcaggcag

SEQ ID NO: 52686 - DNA, 20 bp, Artificial Sequence
  Description of Artificial Sequence: Synthetic oligonucleotide
  Target: ATXN2; (+) strand; PAM type: NRG; PAM sequence: TGG
gcaggagaactgcttgaacc

SEQ ID NO: 52687 - DNA, 20 bp, Artificial Sequence
  Description of Artificial Sequence: Synthetic oligonucleotide
  Target: ATXN2; (+) strand; PAM type: NRG; PAM sequence: GGG
caggagaactgcttgaacct

SEQ ID NO: 52688 - DNA, 20 bp, Artificial Sequence
  Description of Artificial Sequence: Synthetic oligonucleotide
  Target: ATXN2; (+) strand; PAM type: NRG; PAM sequence: GAG
ggagaactgcttgaacctgg

SEQ ID NO: 52689 - DNA, 20 bp, Artificial Sequence
  Description of Artificial Sequence: Synthetic oligonucleotide
  Target: ATXN2; (+) strand; PAM type: NRG; PAM sequence: AGG
gagaactgcttgaacctggg

SEQ ID NO: 52690 - DNA, 20 bp, Artificial Sequence
  Description of Artificial Sequence: Synthetic oligonucleotide
  Target: ATXN2; (+) strand; PAM type: NRG; PAM sequence: CGG
aactgcttgaacctgggagg

SEQ ID NO: 52691 - DNA, 20 bp, Artificial Sequence
  Description of Artificial Sequence: Synthetic oligonucleotide
  Target: ATXN2; (+) strand; PAM type: NRG; PAM sequence: CAG
gaacctgggaggcggaacta

SEQ ID NO: 52692 - DNA, 20 bp, Artificial Sequence
  Description of Artificial Sequence: Synthetic oligonucleotide
  Target: ATXN2; (+) strand; PAM type: NRG; PAM sequence: GAG
ctgggaggcggaactacagt

SEQ ID NO: 52693 - DNA, 20 bp, Artificial Sequence
  Description of Artificial Sequence: Synthetic oligonucleotide
  Target: ATXN2; (+) strand; PAM type: NRG; PAM sequence: CAG
ggaggcggaactacagtgag

SEQ ID NO: 52694 - DNA, 20 bp, Artificial Sequence
  Description of Artificial Sequence: Synthetic oligonucleotide
  Target: ATXN2; (+) strand; PAM type: NRG; PAM sequence: GAG
aggcggaactacagtgagca

SEQ ID NO: 52695 - DNA, 20 bp, Artificial Sequence
  Description of Artificial Sequence: Synthetic oligonucleotide
  Target: ATXN2; (+) strand; PAM type: NRG; PAM sequence: TGG
ggaactacagtgagcagaga

SEQ ID NO: 52696 - DNA, 20 bp, Artificial Sequence
  Description of Artificial Sequence: Synthetic oligonucleotide
  Target: ATXN2; (+) strand; PAM type: NRG; PAM sequence: CAG
gagatggcgccattgcactc

SEQ ID NO: 52697 - DNA, 20 bp, Artificial Sequence
  Description of Artificial Sequence: Synthetic oligonucleotide
  Target: ATXN2; (+) strand; PAM type: NRG; PAM sequence: TGG
ggcgccattgcactccagcc

SEQ ID NO: 52698 - DNA, 20 bp, Artificial Sequence
  Description of Artificial Sequence: Synthetic oligonucleotide
  Target: ATXN2; (+) strand; PAM type: NRG; PAM sequence: GGG
gcgccattgcactccagcct

SEQ ID NO: 52699 - DNA, 20 bp, Artificial Sequence
  Description of Artificial Sequence: Synthetic oligonucleotide
  Target: ATXN2; (+) strand; PAM type: NRG; PAM sequence: AAG
tgcactccagcctgggtgac

SEQ ID NO: 52700 - DNA, 20 bp, Artificial Sequence
  Description of Artificial Sequence: Synthetic oligonucleotide
  Target: ATXN2; (+) strand; PAM type: NRG; PAM sequence: GAG
cactccagcctgggtgacaa

SEQ ID NO: 52701 - DNA, 20 bp, Artificial Sequence
  Description of Artificial Sequence: Synthetic oligonucleotide
  Target: ATXN2; (+) strand; PAM type: NRG; PAM sequence: CAG
aaaaaaaaaaaaaaacctcc

SEQ ID NO: 52702 - DNA, 20 bp, Artificial Sequence
  Description of Artificial Sequence: Synthetic oligonucleotide
  Target: ATXN2; (+) strand; PAM type: NRG; PAM sequence: TGG
aaaaaaaaaacctcccagaa

SEQ ID NO: 52703 - DNA, 20 bp, Artificial Sequence
  Description of Artificial Sequence: Synthetic oligonucleotide
  Target: ATXN2; (+) strand; PAM type: NRG; PAM sequence: GAG
cccagaatggtatacttgtt

SEQ ID NO: 52704 - DNA, 20 bp, Artificial Sequence
  Description of Artificial Sequence: Synthetic oligonucleotide
  Target: ATXN2; (+) strand; PAM type: NRG; PAM sequence: TAG
gagctcttgtgtctgttttt

SEQ ID NO: 52705 - DNA, 20 bp, Artificial Sequence
  Description of Artificial Sequence: Synthetic oligonucleotide
  Target: ATXN2; (+) strand; PAM type: NRG; PAM sequence: TAG
ctcttgtgtctgttttttag

SEQ ID NO: 52706 - DNA, 20 bp, Artificial Sequence
  Description of Artificial Sequence: Synthetic oligonucleotide
  Target: ATXN2; (+) strand; PAM type: NRG; PAM sequence: TAG
ttttttagtagttcccattt

SEQ ID NO: 52707 - DNA, 20 bp, Artificial Sequence
  Description of Artificial Sequence: Synthetic oligonucleotide
  Target: ATXN2; (+) strand; PAM type: NRG; PAM sequence: TAG
tttagtagttcccattttag

SEQ ID NO: 52708 - DNA, 20 bp, Artificial Sequence
  Description of Artificial Sequence: Synthetic oligonucleotide
  Target: ATXN2; (+) strand; PAM type: NRG; PAM sequence: CAG
gttcccattttagtagttcc

SEQ ID NO: 52709 - DNA, 20 bp, Artificial Sequence
  Description of Artificial Sequence: Synthetic oligonucleotide
  Target: ATXN2; (+) strand; PAM type: NRG; PAM sequence: AGG
ttcccattttagtagttccc

SEQ ID NO: 52710 - DNA, 20 bp, Artificial Sequence
  Description of Artificial Sequence: Synthetic oligonucleotide
  Target: ATXN2; (+) strand; PAM type: NRG; PAM sequence: GAG
gctctttgctttgttttttt

SEQ ID NO: 52711 - DNA, 20 bp, Artificial Sequence
  Description of Artificial Sequence: Synthetic oligonucleotide
  Target: ATXN2; (+) strand; PAM type: NRG; PAM sequence: AAG
ttgctttgtttttttgagat

SEQ ID NO: 52712 - DNA, 20 bp, Artificial Sequence
  Description of Artificial Sequence: Synthetic oligonucleotide
  Target: ATXN2; (+) strand; PAM type: NRG; PAM sequence: AGG
tgctttgtttttttgagata

SEQ ID NO: 52713 - DNA, 20 bp, Artificial Sequence
  Description of Artificial Sequence: Synthetic oligonucleotide
  Target: ATXN2; (+) strand; PAM type: NRG; PAM sequence: CAG
taaggtctcattttaacgcc

SEQ ID NO: 52714 - DNA, 20 bp, Artificial Sequence
  Description of Artificial Sequence: Synthetic oligonucleotide
  Target: ATXN2; (+) strand; PAM type: NRG; PAM sequence: AGG
aaggtctcattttaacgccc

SEQ ID NO: 52715 - DNA, 20 bp, Artificial Sequence
  Description of Artificial Sequence: Synthetic oligonucleotide
  Target: ATXN2; (+) strand; PAM type: NRG; PAM sequence: TGG
tctcattttaacgcccaggc

SEQ ID NO: 52716 - DNA, 20 bp, Artificial Sequence
  Description of Artificial Sequence: Synthetic oligonucleotide
  Target: ATXN2; (+) strand; PAM type: NRG; PAM sequence: GAG
tcattttaacgcccaggctg

SEQ ID NO: 52717 - DNA, 20 bp, Artificial Sequence
  Description of Artificial Sequence: Synthetic oligonucleotide
  Target: ATXN2; (+) strand; PAM type: NRG; PAM sequence: CAG
ttaacgcccaggctggagtg

SEQ ID NO: 52718 - DNA, 20 bp, Artificial Sequence
  Description of Artificial Sequence: Synthetic oligonucleotide
  Target: ATXN2; (+) strand; PAM type: NRG; PAM sequence: TGG
acgcccaggctggagtgcag

SEQ ID NO: 52719 - DNA, 20 bp, Artificial Sequence
  Description of Artificial Sequence: Synthetic oligonucleotide
  Target: ATXN2; (+) strand; PAM type: NRG; PAM sequence: TGG
ggagtgcagtggtgcaatca

SEQ ID NO: 52720 - DNA, 20 bp, Artificial Sequence
  Description of Artificial Sequence: Synthetic oligonucleotide
  Target: ATXN2; (+) strand; PAM type: NRG; PAM sequence: CAG
tcatggctcacctcgacatc

SEQ ID NO: 52721 - DNA, 20 bp, Artificial Sequence
  Description of Artificial Sequence: Synthetic oligonucleotide
  Target: ATXN2; (+) strand; PAM type: NRG; PAM sequence: AAG
tcacctcgacatccagactt

SEQ ID NO: 52722 - DNA, 20 bp, Artificial Sequence
  Description of Artificial Sequence: Synthetic oligonucleotide
  Target: ATXN2; (+) strand; PAM type: NRG; PAM sequence: CAG
cttaagtgaaccacctgcct

SEQ ID NO: 52723 - DNA, 20 bp, Artificial Sequence
  Description of Artificial Sequence: Synthetic oligonucleotide
  Target: ATXN2; (+) strand; PAM type: NRG; PAM sequence: AAG
accacctgcctcagcctccc

SEQ ID NO: 52724 - DNA, 20 bp, Artificial Sequence
  Description of Artificial Sequence: Synthetic oligonucleotide
  Target: ATXN2; (+) strand; PAM type: NRG; PAM sequence: TAG
acctgcctcagcctcccaag

SEQ ID NO: 52725 - DNA, 20 bp, Artificial Sequence
  Description of Artificial Sequence: Synthetic oligonucleotide
  Target: ATXN2; (+) strand; PAM type: NRG; PAM sequence: GAG
cctcagcctcccaagtagct

SEQ ID NO: 52726 - DNA, 20 bp, Artificial Sequence
  Description of Artificial Sequence: Synthetic oligonucleotide
  Target: ATXN2; (+) strand; PAM type: NRG; PAM sequence: CAG
ctcccaagtagctgagacta

SEQ ID NO: 52727 - DNA, 20 bp, Artificial Sequence
  Description of Artificial Sequence: Synthetic oligonucleotide
  Target: ATXN2; (+) strand; PAM type: NRG; PAM sequence: AAG
ccaagtagctgagactacag

SEQ ID NO: 52728 - DNA, 20 bp, Artificial Sequence
  Description of Artificial Sequence: Synthetic oligonucleotide
  Target: ATXN2; (+) strand; PAM type: NRG; PAM sequence: TGG
cagaagtgcacgaccatgac

SEQ ID NO: 52729 - DNA, 20 bp, Artificial Sequence
  Description of Artificial Sequence: Synthetic oligonucleotide
  Target: ATXN2; (+) strand; PAM type: NRG; PAM sequence: GAG
ttgtattaatattttttgtt

SEQ ID NO: 52730 - DNA, 20 bp, Artificial Sequence
  Description of Artificial Sequence: Synthetic oligonucleotide
  Target: ATXN2; (+) strand; PAM type: NRG; PAM sequence: TGG
attaatattttttgttgaga

SEQ ID NO: 52731 - DNA, 20 bp, Artificial Sequence
  Description of Artificial Sequence: Synthetic oligonucleotide
  Target: ATXN2; (+) strand; PAM type: NRG; PAM sequence: GGG
ttaatattttttgttgagat

SEQ ID NO: 52732 - DNA, 20 bp, Artificial Sequence
  Description of Artificial Sequence: Synthetic oligonucleotide
  Target: ATXN2; (+) strand; PAM type: NRG; PAM sequence: GGG
taatattttttgttgagatg

SEQ ID NO: 52733 - DNA, 20 bp, Artificial Sequence
  Description of Artificial Sequence: Synthetic oligonucleotide
  Target: ATXN2; (+) strand; PAM type: NRG; PAM sequence: CAG
tggggtttccctgtgttgcc

SEQ ID NO: 52734 - DNA, 20 bp, Artificial Sequence
  Description of Artificial Sequence: Synthetic oligonucleotide
  Target: ATXN2; (+) strand; PAM type: NRG; PAM sequence: AGG
ggggtttccctgtgttgccc

SEQ ID NO: 52735 - DNA, 20 bp, Artificial Sequence
  Description of Artificial Sequence: Synthetic oligonucleotide
  Target: ATXN2; (+) strand; PAM type: NRG; PAM sequence: TGG
tttccctgtgttgcccaggc

SEQ ID NO: 52736 - DNA, 20 bp, Artificial Sequence
  Description of Artificial Sequence: Synthetic oligonucleotide
  Target: ATXN2; (+) strand; PAM type: NRG; PAM sequence: TGG
ccaggctggacttgaactcc

SEQ ID NO: 52737 - DNA, 20 bp, Artificial Sequence
  Description of Artificial Sequence: Synthetic oligonucleotide
  Target: ATXN2; (+) strand; PAM type: NRG; PAM sequence: GGG
caggctggacttgaactcct

SEQ ID NO: 52738 - DNA, 20 bp, Artificial Sequence
  Description of Artificial Sequence: Synthetic oligonucleotide
  Target: ATXN2; (+) strand; PAM type: NRG; PAM sequence: CAG
tggacttgaactcctgggct

SEQ ID NO: 52739 - DNA, 20 bp, Artificial Sequence
  Description of Artificial Sequence: Synthetic oligonucleotide
  Target: ATXN2; (+) strand; PAM type: NRG; PAM sequence: AGG
ggacttgaactcctgggctc

SEQ ID NO: 52740 - DNA, 20 bp, Artificial Sequence
  Description of Artificial Sequence: Synthetic oligonucleotide
  Target: ATXN2; (+) strand; PAM type: NRG; PAM sequence: CAG
ctcaggtaatctgcctgctt

SEQ ID NO: 52741 - DNA, 20 bp, Artificial Sequence
  Description of Artificial Sequence: Synthetic oligonucleotide
  Target: ATXN2; (+) strand; PAM type: NRG; PAM sequence: AAG
ctgcctgcttcagcctccca

SEQ ID NO: 52742 - DNA, 20 bp, Artificial Sequence
  Description of Artificial Sequence: Synthetic oligonucleotide
  Target: ATXN2; (+) strand; PAM type: NRG; PAM sequence: TGG
gcttcagcctcccaaagtgt

SEQ ID NO: 52743 - DNA, 20 bp, Artificial Sequence
  Description of Artificial Sequence: Synthetic oligonucleotide
  Target: ATXN2; (+) strand; PAM type: NRG; PAM sequence: GGG
cttcagcctcccaaagtgtt

SEQ ID NO: 52744 - DNA, 20 bp, Artificial Sequence
  Description of Artificial Sequence: Synthetic oligonucleotide
  Target: ATXN2; (+) strand; PAM type: NRG; PAM sequence: CAG
ctcccaaagtgttgggatta

SEQ ID NO: 52745 - DNA, 20 bp, Artificial Sequence
  Description of Artificial Sequence: Synthetic oligonucleotide
  Target: ATXN2; (+) strand; PAM type: NRG; PAM sequence: AGG
tcccaaagtgttgggattac

SEQ ID NO: 52746 - DNA, 20 bp, Artificial Sequence
  Description of Artificial Sequence: Synthetic oligonucleotide
  Target: ATXN2; (+) strand; PAM type: NRG; PAM sequence: GAG
agtgttgggattacaggtgt

SEQ ID NO: 52747 - DNA, 20 bp, Artificial Sequence
  Description of Artificial Sequence: Synthetic oligonucleotide
  Target: ATXN2; (+) strand; PAM type: NRG; PAM sequence: CAG
caggtgtgagccaccatgcc

SEQ ID NO: 52748 - DNA, 20 bp, Artificial Sequence
  Description of Artificial Sequence: Synthetic oligonucleotide
  Target: ATXN2; (+) strand; PAM type: NRG; PAM sequence: CAG
gagccaccatgcccagccac

SEQ ID NO: 52749 - DNA, 20 bp, Artificial Sequence
  Description of Artificial Sequence: Synthetic oligonucleotide
  Target: ATXN2; (+) strand; PAM type: NRG; PAM sequence: GAG
caaacttttttttttttttt

SEQ ID NO: 52750 - DNA, 20 bp, Artificial Sequence
  Description of Artificial Sequence: Synthetic oligonucleotide
  Target: ATXN2; (+) strand; PAM type: NRG; PAM sequence: CAG
ctttttttttttttttgaga

SEQ ID NO: 52751 - DNA, 20 bp, Artificial Sequence
  Description of Artificial Sequence: Synthetic oligonucleotide
  Target: ATXN2; (+) strand; PAM type: NRG; PAM sequence: GAG
ttttttttttttttgagaca

SEQ ID NO: 52752 - DNA, 20 bp, Artificial Sequence
  Description of Artificial Sequence: Synthetic oligonucleotide
  Target: ATXN2; (+) strand; PAM type: NRG; PAM sequence: TGG
cagagtctcactctgctctg

SEQ ID NO: 52753 - DNA, 20 bp, Artificial Sequence
  Description of Artificial Sequence: Synthetic oligonucleotide
  Target: ATXN2; (+) strand; PAM type: NRG; PAM sequence: CAG
tctcactctgctctgtggcc

SEQ ID NO: 52754 - DNA, 20 bp, Artificial Sequence
  Description of Artificial Sequence: Synthetic oligonucleotide
  Target: ATXN2; (+) strand; PAM type: NRG; PAM sequence: AGG
ctcactctgctctgtggccc

SEQ ID NO: 52755 - DNA, 20 bp, Artificial Sequence
  Description of Artificial Sequence: Synthetic oligonucleotide
  Target: ATXN2; (+) strand; PAM type: NRG; PAM sequence: TGG
ctctgctctgtggcccaggc

SEQ ID NO: 52756 - DNA, 20 bp, Artificial Sequence
  Description of Artificial Sequence: Synthetic oligonucleotide
  Target: ATXN2; (+) strand; PAM type: NRG; PAM sequence: GGG
tctgctctgtggcccaggct

SEQ ID NO: 52757 - DNA, 20 bp, Artificial Sequence
  Description of Artificial Sequence: Synthetic oligonucleotide
  Target: ATXN2; (+) strand; PAM type: NRG; PAM sequence: GGG
ctgctctgtggcccaggctg

SEQ ID NO: 52758 - DNA, 20 bp, Artificial Sequence
  Description of Artificial Sequence: Synthetic oligonucleotide
  Target: ATXN2; (+) strand; PAM type: NRG; PAM sequence: CAG
ctgtggcccaggctggggca

SEQ ID NO: 52759 - DNA, 20 bp, Artificial Sequence
  Description of Artificial Sequence: Synthetic oligonucleotide
  Target: ATXN2; (+) strand; PAM type: NRG; PAM sequence: TGG
tggcccaggctggggcacag

SEQ ID NO: 52760 - DNA, 20 bp, Artificial Sequence
  Description of Artificial Sequence: Synthetic oligonucleotide
  Target: ATXN2; (+) strand; PAM type: NRG; PAM sequence: GAG
ggggcacagtggcacaatct

SEQ ID NO: 52761 - DNA, 20 bp, Artificial Sequence
  Description of Artificial Sequence: Synthetic oligonucleotide
  Target: ATXN2; (+) strand; PAM type: NRG; PAM sequence: CGG
tcactgcaaccttcacctcc

SEQ ID NO: 52762 - DNA, 20 bp, Artificial Sequence
  Description of Artificial Sequence: Synthetic oligonucleotide
  Target: ATXN2; (+) strand; PAM type: NRG; PAM sequence: GGG
cactgcaaccttcacctccc

SEQ ID NO: 52763 - DNA, 20 bp, Artificial Sequence
  Description of Artificial Sequence: Synthetic oligonucleotide
  Target: ATXN2; (+) strand; PAM type: NRG; PAM sequence: AAG
aaccttcacctcccgggttc

SEQ ID NO: 52764 - DNA, 20 bp, Artificial Sequence
  Description of Artificial Sequence: Synthetic oligonucleotide
  Target: ATXN2; (+) strand; PAM type: NRG; PAM sequence: CAG
ttcaagcgattctcctgcct

SEQ ID NO: 52765 - DNA, 20 bp, Artificial Sequence
  Description of Artificial Sequence: Synthetic oligonucleotide
  Target: ATXN2; (+) strand; PAM type: NRG; PAM sequence: AAG
ttctcctgcctcagcctccc

SEQ ID NO: 52766 - DNA, 20 bp, Artificial Sequence
  Description of Artificial Sequence: Synthetic oligonucleotide
  Target: ATXN2; (+) strand; PAM type: NRG; PAM sequence: TAG
tcctgcctcagcctcccaag

SEQ ID NO: 52767 - DNA, 20 bp, Artificial Sequence
  Description of Artificial Sequence: Synthetic oligonucleotide
  Target: ATXN2; (+) strand; PAM type: NRG; PAM sequence: TGG
gcctcagcctcccaagtagc

SEQ ID NO: 52768 - DNA, 20 bp, Artificial Sequence
  Description of Artificial Sequence: Synthetic oligonucleotide
  Target: ATXN2; (+) strand; PAM type: NRG; PAM sequence: GGG
cctcagcctcccaagtagct

SEQ ID NO: 52769 - DNA, 20 bp, Artificial Sequence
  Description of Artificial Sequence: Synthetic oligonucleotide
  Target: ATXN2; (+) strand; PAM type: NRG; PAM sequence: CAG
ctcccaagtagctgggatta

SEQ ID NO: 52770 - DNA, 20 bp, Artificial Sequence
  Description of Artificial Sequence: Synthetic oligonucleotide
  Target: ATXN2; (+) strand; PAM type: NRG; PAM sequence: AGG
tcccaagtagctgggattac

SEQ ID NO: 52771 - DNA, 20 bp, Artificial Sequence
  Description of Artificial Sequence: Synthetic oligonucleotide
  Target: ATXN2; (+) strand; PAM type: NRG; PAM sequence: CAG
tgggattacaggcgcccgcc

SEQ ID NO: 52772 - DNA, 20 bp, Artificial Sequence
  Description of Artificial Sequence: Synthetic oligonucleotide
  Target: ATXN2; (+) strand; PAM type: NRG; PAM sequence: AAG
acaggcgcccgcccagcccc

SEQ ID NO: 52773 - DNA, 20 bp, Artificial Sequence
  Description of Artificial Sequence: Synthetic oligonucleotide
  Target: ATXN2; (+) strand; PAM type: NRG; PAM sequence: TGG
cgcccgcccagccccaagtc

SEQ ID NO: 52774 - DNA, 20 bp, Artificial Sequence
  Description of Artificial Sequence: Synthetic oligonucleotide
  Target: ATXN2; (+) strand; PAM type: NRG; PAM sequence: TAG
tttttttttttttttttttt

SEQ ID NO: 52775 - DNA, 20 bp, Artificial Sequence
  Description of Artificial Sequence: Synthetic oligonucleotide
  Target: ATXN2; (+) strand; PAM type: NRG; PAM sequence: CGG
tttttttttttttttttaga

SEQ ID NO: 52776 - DNA, 20 bp, Artificial Sequence
  Description of Artificial Sequence: Synthetic oligonucleotide
  Target: ATXN2; (+) strand; PAM type: NRG; PAM sequence: GAG
tttttttttttttttagacg

SEQ ID NO: 52777 - DNA, 20 bp, Artificial Sequence
  Description of Artificial Sequence: Synthetic oligonucleotide
  Target: ATXN2; (+) strand; PAM type: NRG; PAM sequence: CAG
acggagtctccctctgtcgt

SEQ ID NO: 52778 - DNA, 20 bp, Artificial Sequence
  Description of Artificial Sequence: Synthetic oligonucleotide
  Target: ATXN2; (+) strand; PAM type: NRG; PAM sequence: CAG
gtctccctctgtcgtcagtg

SEQ ID NO: 52779 - DNA, 20 bp, Artificial Sequence
  Description of Artificial Sequence: Synthetic oligonucleotide
  Target: ATXN2; (+) strand; PAM type: NRG; PAM sequence: TGG
tccctctgtcgtcagtgcag

SEQ ID NO: 52780 - DNA, 20 bp, Artificial Sequence
  Description of Artificial Sequence: Synthetic oligonucleotide
  Target: ATXN2; (+) strand; PAM type: NRG; PAM sequence: CGG
tcagtgcagtggcccgatct

SEQ ID NO: 52781 - DNA, 20 bp, Artificial Sequence
  Description of Artificial Sequence: Synthetic oligonucleotide
  Target: ATXN2; (+) strand; PAM type: NRG; PAM sequence: CGG
tcactgcaacctctgcctcc

SEQ ID NO: 52782 - DNA, 20 bp, Artificial Sequence
  Description of Artificial Sequence: Synthetic oligonucleotide
  Target: ATXN2; (+) strand; PAM type: NRG; PAM sequence: GGG
cactgcaacctctgcctccc

SEQ ID NO: 52783 - DNA, 20 bp, Artificial Sequence
  Description of Artificial Sequence: Synthetic oligonucleotide
  Target: ATXN2; (+) strand; PAM type: NRG; PAM sequence: AAG
aacctctgcctcccgggttc

SEQ ID NO: 52784 - DNA, 20 bp, Artificial Sequence
  Description of Artificial Sequence: Synthetic oligonucleotide
  Target: ATXN2; (+) strand; PAM type: NRG; PAM sequence: CAG
ttcaagcaattctcctgcct

SEQ ID NO: 52785 - DNA, 20 bp, Artificial Sequence
  Description of Artificial Sequence: Synthetic oligonucleotide
  Target: ATXN2; (+) strand; PAM type: NRG; PAM sequence: GAG
ttctcctgcctcagcctccc

SEQ ID NO: 52786 - DNA, 20 bp, Artificial Sequence
  Description of Artificial Sequence: Synthetic oligonucleotide
  Target: ATXN2; (+) strand; PAM type: NRG; PAM sequence: TAG
tcctgcctcagcctcccgag

SEQ ID NO: 52787 - DNA, 20 bp, Artificial Sequence
  Description of Artificial Sequence: Synthetic oligonucleotide
  Target: ATXN2; (+) strand; PAM type: NRG; PAM sequence: TGG
gcctcagcctcccgagtagc

SEQ ID NO: 52788 - DNA, 20 bp, Artificial Sequence
  Description of Artificial Sequence: Synthetic oligonucleotide
  Target: ATXN2; (+) strand; PAM type: NRG; PAM sequence: GGG
cctcagcctcccgagtagct

SEQ ID NO: 52789 - DNA, 20 bp, Artificial Sequence
  Description of Artificial Sequence: Synthetic oligonucleotide
  Target: ATXN2; (+) strand; PAM type: NRG; PAM sequence: CAG
ctcccgagtagctgggacta

SEQ ID NO: 52790 - DNA, 20 bp, Artificial Sequence
  Description of Artificial Sequence: Synthetic oligonucleotide
  Target: ATXN2; (+) strand; PAM type: NRG; PAM sequence: AGG
tcccgagtagctgggactac

SEQ ID NO: 52791 - DNA, 20 bp, Artificial Sequence
  Description of Artificial Sequence: Synthetic oligonucleotide
  Target: ATXN2; (+) strand; PAM type: NRG; PAM sequence: TAG
atttaatttttttgtatttt

SEQ ID NO: 52792 - DNA, 20 bp, Artificial Sequence
  Description of Artificial Sequence: Synthetic oligonucleotide
  Target: ATXN2; (+) strand; PAM type: NRG; PAM sequence: TAG
taatttttttgtatttttag

SEQ ID NO: 52793 - DNA, 20 bp, Artificial Sequence
  Description of Artificial Sequence: Synthetic oligonucleotide
  Target: ATXN2; (+) strand; PAM type: NRG; PAM sequence: GAG
atttttttgtatttttagta

SEQ ID NO: 52794 - DNA, 20 bp, Artificial Sequence
  Description of Artificial Sequence: Synthetic oligonucleotide
  Target: ATXN2; (+) strand; PAM type: NRG; PAM sequence: TGG
ttttgtatttttagtagaga

SEQ ID NO: 52795 - DNA, 20 bp, Artificial Sequence
  Description of Artificial Sequence: Synthetic oligonucleotide
  Target: ATXN2; (+) strand; PAM type: NRG; PAM sequence: GGG
tttgtatttttagtagagat

SEQ ID NO: 52796 - DNA, 20 bp, Artificial Sequence
  Description of Artificial Sequence: Synthetic oligonucleotide
  Target: ATXN2; (+) strand; PAM type: NRG; PAM sequence: GGG
ttgtatttttagtagagatg

SEQ ID NO: 52797 - DNA, 20 bp, Artificial Sequence
  Description of Artificial Sequence: Synthetic oligonucleotide
  Target: ATXN2; (+) strand; PAM type: NRG; PAM sequence: TGG
gagatggggtttcaccctgt

SEQ ID NO: 52798 - DNA, 20 bp, Artificial Sequence
  Description of Artificial Sequence: Synthetic oligonucleotide
  Target: ATXN2; (+) strand; PAM type: NRG; PAM sequence: CAG
tggggtttcaccctgttggc

SEQ ID NO: 52799 - DNA, 20 bp, Artificial Sequence
  Description of Artificial Sequence: Synthetic oligonucleotide
  Target: ATXN2; (+) strand; PAM type: NRG; PAM sequence: TGG
tttcaccctgttggccagaa

SEQ ID NO: 52800 - DNA, 20 bp, Artificial Sequence
  Description of Artificial Sequence: Synthetic oligonucleotide
  Target: ATXN2; (+) strand; PAM type: NRG; PAM sequence: AAG
ccgccctcctcaacctccca

SEQ ID NO: 52801 - DNA, 20 bp, Artificial Sequence
  Description of Artificial Sequence: Synthetic oligonucleotide
  Target: ATXN2; (+) strand; PAM type: NRG; PAM sequence: TGG
tcctcaacctcccaaagtgc

SEQ ID NO: 52802 - DNA, 20 bp, Artificial Sequence
  Description of Artificial Sequence: Synthetic oligonucleotide
  Target: ATXN2; (+) strand; PAM type: NRG; PAM sequence: GGG
cctcaacctcccaaagtgct

SEQ ID NO: 52803 - DNA, 20 bp, Artificial Sequence
  Description of Artificial Sequence: Synthetic oligonucleotide
  Target: ATXN2; (+) strand; PAM type: NRG; PAM sequence: CAG
ctcccaaagtgctgggatta

SEQ ID NO: 52804 - DNA, 20 bp, Artificial Sequence
  Description of Artificial Sequence: Synthetic oligonucleotide
  Target: ATXN2; (+) strand; PAM type: NRG; PAM sequence: AGG
tcccaaagtgctgggattac

SEQ ID NO: 52805 - DNA, 20 bp, Artificial Sequence
  Description of Artificial Sequence: Synthetic oligonucleotide
  Target: ATXN2; (+) strand; PAM type: NRG; PAM sequence: GGG
cccaaagtgctgggattaca

SEQ ID NO: 52806 - DNA, 20 bp, Artificial Sequence
  Description of Artificial Sequence: Synthetic oligonucleotide
  Target: ATXN2; (+) strand; PAM type: NRG; PAM sequence: GGG
ccaaagtgctgggattacag

SEQ ID NO: 52807 - DNA, 20 bp, Artificial Sequence
  Description of Artificial Sequence: Synthetic oligonucleotide
  Target: ATXN2; (+) strand; PAM type: NRG; PAM sequence: GAG
agtgctgggattacaggggt

SEQ ID NO: 52808 - DNA, 20 bp, Artificial Sequence
  Description of Artificial Sequence: Synthetic oligonucleotide
  Target: ATXN2; (+) strand; PAM type: NRG; PAM sequence: CGG
caggggtgagccaccacgcc

SEQ ID NO: 52809 - DNA, 20 bp, Artificial Sequence
  Description of Artificial Sequence: Synthetic oligonucleotide
  Target: ATXN2; (+) strand; PAM type: NRG; PAM sequence: CAG
ccggccctttttctgttttt

SEQ ID NO: 52810 - DNA, 20 bp, Artificial Sequence
  Description of Artificial Sequence: Synthetic oligonucleotide
  Target: ATXN2; (+) strand; PAM type: NRG; PAM sequence: TAG
gccctttttctgtttttcag

SEQ ID NO: 52811 - DNA, 20 bp, Artificial Sequence
  Description of Artificial Sequence: Synthetic oligonucleotide
  Target: ATXN2; (+) strand; PAM type: NRG; PAM sequence: GAG
cctttttctgtttttcagta

SEQ ID NO: 52812 - DNA, 20 bp, Artificial Sequence
  Description of Artificial Sequence: Synthetic oligonucleotide
  Target: ATXN2; (+) strand; PAM type: NRG; PAM sequence: CAG
tttctgtttttcagtagaga

SEQ ID NO: 52813 - DNA, 20 bp, Artificial Sequence
  Description of Artificial Sequence: Synthetic oligonucleotide
  Target: ATXN2; (+) strand; PAM type: NRG; PAM sequence: AGG
ttctgtttttcagtagagac

SEQ ID NO: 52814 - DNA, 20 bp, Artificial Sequence
  Description of Artificial Sequence: Synthetic oligonucleotide
  Target: ATXN2; (+) strand; PAM type: NRG; PAM sequence: GGG
tctgtttttcagtagagaca

SEQ ID NO: 52815 - DNA, 20 bp, Artificial Sequence
  Description of Artificial Sequence: Synthetic oligonucleotide
  Target: ATXN2; (+) strand; PAM type: NRG; PAM sequence: TGG
gagacagggtttcaccatgt

SEQ ID NO: 52816 - DNA, 20 bp, Artificial Sequence
  Description of Artificial Sequence: Synthetic oligonucleotide
  Target: ATXN2; (+) strand; PAM type: NRG; PAM sequence: CAG
cagggtttcaccatgttggc

SEQ ID NO: 52817 - DNA, 20 bp, Artificial Sequence
  Description of Artificial Sequence: Synthetic oligonucleotide
  Target: ATXN2; (+) strand; PAM type: NRG; PAM sequence: TGG
tttcaccatgttggccagac

SEQ ID NO: 52818 - DNA, 20 bp, Artificial Sequence
  Description of Artificial Sequence: Synthetic oligonucleotide
  Target: ATXN2; (+) strand; PAM type: NRG; PAM sequence: AAG
ggtctcgaactcctgacctc

SEQ ID NO: 52819 - DNA, 20 bp, Artificial Sequence
  Description of Artificial Sequence: Synthetic oligonucleotide
  Target: ATXN2; (+) strand; PAM type: NRG; PAM sequence: TGG
ctcaagtgatccaccctcct

SEQ ID NO: 52820 - DNA, 20 bp, Artificial Sequence
  Description of Artificial Sequence: Synthetic oligonucleotide
  Target: ATXN2; (+) strand; PAM type: NRG; PAM sequence: AAG
ccaccctccttggcctccca

SEQ ID NO: 52821 - DNA, 20 bp, Artificial Sequence
  Description of Artificial Sequence: Synthetic oligonucleotide
  Target: ATXN2; (+) strand; PAM type: NRG; PAM sequence: TGG
tccttggcctcccaaagtgc

SEQ ID NO: 52822 - DNA, 20 bp, Artificial Sequence
  Description of Artificial Sequence: Synthetic oligonucleotide
  Target: ATXN2; (+) strand; PAM type: NRG; PAM sequence: GGG
ccttggcctcccaaagtgct

SEQ ID NO: 52823 - DNA, 20 bp, Artificial Sequence
  Description of Artificial Sequence: Synthetic oligonucleotide
  Target: ATXN2; (+) strand; PAM type: NRG; PAM sequence: AAG
tcccaaagtgctgggattac

SEQ ID NO: 52824 - DNA, 20 bp, Artificial Sequence
  Description of Artificial Sequence: Synthetic oligonucleotide
  Target: ATXN2; (+) strand; PAM type: NRG; PAM sequence: GAG
agtgctgggattacaagcgt

SEQ ID NO: 52825 - DNA, 20 bp, Artificial Sequence
  Description of Artificial Sequence: Synthetic oligonucleotide
  Target: ATXN2; (+) strand; PAM type: NRG; PAM sequence: CAG
caagcgtgagccaccgcacc

SEQ ID NO: 52826 - DNA, 20 bp, Artificial Sequence
  Description of Artificial Sequence: Synthetic oligonucleotide
  Target: ATXN2; (+) strand; PAM type: NRG; PAM sequence: AAG
gtgagccaccgcacccagct

SEQ ID NO: 52827 - DNA, 20 bp, Artificial Sequence
  Description of Artificial Sequence: Synthetic oligonucleotide
  Target: ATXN2; (+) strand; PAM type: NRG; PAM sequence: CAG
cttgctgccaatatgtacat

SEQ ID NO: 52828 - DNA, 20 bp, Artificial Sequence
  Description of Artificial Sequence: Synthetic oligonucleotide
  Target: ATXN2; (+) strand; PAM type: NRG; PAM sequence: AAG
tgccaatatgtacatcagaa

SEQ ID NO: 52829 - DNA, 20 bp, Artificial Sequence
  Description of Artificial Sequence: Synthetic oligonucleotide
  Target: ATXN2; (+) strand; PAM type: NRG; PAM sequence: AAG
aatatgtacatcagaaaaga

SEQ ID NO: 52830 - DNA, 20 bp, Artificial Sequence
  Description of Artificial Sequence: Synthetic oligonucleotide
  Target: ATXN2; (+) strand; PAM type: NRG; PAM sequence: TAG
tgtacatcagaaaagaaagc

SEQ ID NO: 52831 - DNA, 20 bp, Artificial Sequence
  Description of Artificial Sequence: Synthetic oligonucleotide
  Target: ATXN2; (+) strand; PAM type: NRG; PAM sequence: TAG
catcagaaaagaaagctaga

SEQ ID NO: 52832 - DNA, 20 bp, Artificial Sequence
  Description of Artificial Sequence: Synthetic oligonucleotide
  Target: ATXN2; (+) strand; PAM type: NRG; PAM sequence: AAG
gctagatagaatcatgtgta

SEQ ID NO: 52833 - DNA, 20 bp, Artificial Sequence
  Description of Artificial Sequence: Synthetic oligonucleotide
  Target: ATXN2; (+) strand; PAM type: NRG; PAM sequence: AAG
tagaatcatgtgtaaagtaa

SEQ ID NO: 52834 - DNA, 20 bp, Artificial Sequence
  Description of Artificial Sequence: Synthetic oligonucleotide
  Target: ATXN2; (+) strand; PAM type: NRG; PAM sequence: AAG
gtgtaaagtaaaagttctca

SEQ ID NO: 52835 - DNA, 20 bp, Artificial Sequence
  Description of Artificial Sequence: Synthetic oligonucleotide
  Target: ATXN2; (+) strand; PAM type: NRG; PAM sequence: GAG
gtaaagtaaaagttctcaaa

SEQ ID NO: 52836 - DNA, 20 bp, Artificial Sequence
  Description of Artificial Sequence: Synthetic oligonucleotide
  Target: ATXN2; (+) strand; PAM type: NRG; PAM sequence: AGG
taaagtaaaagttctcaaag

SEQ ID NO: 52837 - DNA, 20 bp, Artificial Sequence
  Description of Artificial Sequence: Synthetic oligonucleotide
  Target: ATXN2; (+) strand; PAM type: NRG; PAM sequence: AAG
aagttctcaaagaggccata

SEQ ID NO: 52838 - DNA, 20 bp, Artificial Sequence
  Description of Artificial Sequence: Synthetic oligonucleotide
  Target: ATXN2; (+) strand; PAM type: NRG; PAM sequence: CAG
agaggccataaagaactctc

SEQ ID NO: 52839 - DNA, 20 bp, Artificial Sequence
  Description of Artificial Sequence: Synthetic oligonucleotide
  Target: ATXN2; (+) strand; PAM type: NRG; PAM sequence: CAG
ccataaagaactctccagac

SEQ ID NO: 52840 - DNA, 20 bp, Artificial Sequence
  Description of Artificial Sequence: Synthetic oligonucleotide
  Target: ATXN2; (+) strand; PAM type: NRG; PAM sequence: GAG
ataaagaactctccagacca

SEQ ID NO: 52841 - DNA, 20 bp, Artificial Sequence
  Description of Artificial Sequence: Synthetic oligonucleotide
  Target: ATXN2; (+) strand; PAM type: NRG; PAM sequence: AGG
taaagaactctccagaccag

SEQ ID NO: 52842 - DNA, 20 bp, Artificial Sequence
  Description of Artificial Sequence: Synthetic oligonucleotide
  Target: ATXN2; (+) strand; PAM type: NRG; PAM sequence: AAG
actctccagaccagaggcta

SEQ ID NO: 52843 - DNA, 20 bp, Artificial Sequence
  Description of Artificial Sequence: Synthetic oligonucleotide
  Target: ATXN2; (+) strand; PAM type: NRG; PAM sequence: CAG
ctccagaccagaggctaaag

SEQ ID NO: 52844 - DNA, 20 bp, Artificial Sequence
  Description of Artificial Sequence: Synthetic oligonucleotide
  Target: ATXN2; (+) strand; PAM type: NRG; PAM sequence: AGG
tccagaccagaggctaaagc

SEQ ID NO: 52845 - DNA, 20 bp, Artificial Sequence
  Description of Artificial Sequence: Synthetic oligonucleotide
  Target: ATXN2; (+) strand; PAM type: NRG; PAM sequence: GAG
cagaccagaggctaaagcag

SEQ ID NO: 52846 - DNA, 20 bp, Artificial Sequence
  Description of Artificial Sequence: Synthetic oligonucleotide
  Target: ATXN2; (+) strand; PAM type: NRG; PAM sequence: AGG
agaccagaggctaaagcagg

SEQ ID NO: 52847 - DNA, 20 bp, Artificial Sequence
  Description of Artificial Sequence: Synthetic oligonucleotide
  Target: ATXN2; (+) strand; PAM type: NRG; PAM sequence: CAG
cagaggctaaagcaggagga

SEQ ID NO: 52848 - DNA, 20 bp, Artificial Sequence
  Description of Artificial Sequence: Synthetic oligonucleotide
  Target: ATXN2; (+) strand; PAM type: NRG; PAM sequence: AAG
ctaaagcaggaggacagttt

SEQ ID NO: 52849 - DNA, 20 bp, Artificial Sequence
  Description of Artificial Sequence: Synthetic oligonucleotide
  Target: ATXN2; (+) strand; PAM type: NRG; PAM sequence: CAG
gcaggaggacagtttaagcc

SEQ ID NO: 52850 - DNA, 20 bp, Artificial Sequence
  Description of Artificial Sequence: Synthetic oligonucleotide
  Target: ATXN2; (+) strand; PAM type: NRG; PAM sequence: AAG
ggaggacagtttaagcccag

SEQ ID NO: 52851 - DNA, 20 bp, Artificial Sequence
  Description of Artificial Sequence: Synthetic oligonucleotide
  Target: ATXN2; (+) strand; PAM type: NRG; PAM sequence: TGG
gacagtttaagcccagaagt

SEQ ID NO: 52852 - DNA, 20 bp, Artificial Sequence
  Description of Artificial Sequence: Synthetic oligonucleotide
  Target: ATXN2; (+) strand; PAM type: NRG; PAM sequence: GAG
cagtttaagcccagaagttg

SEQ ID NO: 52853 - DNA, 20 bp, Artificial Sequence
  Description of Artificial Sequence: Synthetic oligonucleotide
  Target: ATXN2; (+) strand; PAM type: NRG; PAM sequence: AGG
agtttaagcccagaagttgg

SEQ ID NO: 52854 - DNA, 20 bp, Artificial Sequence
  Description of Artificial Sequence: Synthetic oligonucleotide
  Target: ATXN2; (+) strand; PAM type: NRG; PAM sequence: CAG
taagcccagaagttggaggc

SEQ ID NO: 52855 - DNA, 20 bp, Artificial Sequence
  Description of Artificial Sequence: Synthetic oligonucleotide
  Target: ATXN2; (+) strand; PAM type: NRG; PAM sequence: TGG
ccagaagttggaggccagcc

SEQ ID NO: 52856 - DNA, 20 bp, Artificial Sequence
  Description of Artificial Sequence: Synthetic oligonucleotide
  Target: ATXN2; (+) strand; PAM type: NRG; PAM sequence: GGG
cagaagttggaggccagcct

SEQ ID NO: 52857 - DNA, 20 bp, Artificial Sequence
  Description of Artificial Sequence: Synthetic oligonucleotide
  Target: ATXN2; (+) strand; PAM type: NRG; PAM sequence: AAG
gccagcctgggcaacataac

SEQ ID NO: 52858 - DNA, 20 bp, Artificial Sequence
  Description of Artificial Sequence: Synthetic oligonucleotide
  Target: ATXN2; (+) strand; PAM type: NRG; PAM sequence: AAG
ccaaaaaaaaaaaaaaaaaa

SEQ ID NO: 52859 - DNA, 20 bp, Artificial Sequence
  Description of Artificial Sequence: Synthetic oligonucleotide
  Target: ATXN2; (+) strand; PAM type: NRG; PAM sequence: AAG
cccctttctaaaatctgctc

SEQ ID NO: 52860 - DNA, 20 bp, Artificial Sequence
  Description of Artificial Sequence: Synthetic oligonucleotide
  Target: ATXN2; (+) strand; PAM type: NRG; PAM sequence: CAG
tctaaaatctgctcaagctt

SEQ ID NO: 52861 - DNA, 20 bp, Artificial Sequence
  Description of Artificial Sequence: Synthetic oligonucleotide
  Target: ATXN2; (+) strand; PAM type: NRG; PAM sequence: AAG
tctgctcaagcttcagtgaa

SEQ ID NO: 52862 - DNA, 20 bp, Artificial Sequence
  Description of Artificial Sequence: Synthetic oligonucleotide
  Target: ATXN2; (+) strand; PAM type: NRG; PAM sequence: TAG
agcttcagtgaaaagacatt

SEQ ID NO: 52863 - DNA, 20 bp, Artificial Sequence
  Description of Artificial Sequence: Synthetic oligonucleotide
  Target: ATXN2; (+) strand; PAM type: NRG; PAM sequence: CAG
cctgatttcgaaatgtgttt

SEQ ID NO: 52864 - DNA, 20 bp, Artificial Sequence
  Description of Artificial Sequence: Synthetic oligonucleotide
  Target: ATXN2; (+) strand; PAM type: NRG; PAM sequence: AGG
ctgatttcgaaatgtgtttc

SEQ ID NO: 52865 - DNA, 20 bp, Artificial Sequence
  Description of Artificial Sequence: Synthetic oligonucleotide
  Target: ATXN2; (+) strand; PAM type: NRG; PAM sequence: TAG
atgtgtttcaggaatgaaaa

SEQ ID NO: 52866 - DNA, 20 bp, Artificial Sequence
  Description of Artificial Sequence: Synthetic oligonucleotide
  Target: ATXN2; (+) strand; PAM type: NRG; PAM sequence: AAG
tgaaaatagttaactgcaca

SEQ ID NO: 52867 - DNA, 20 bp, Artificial Sequence
  Description of Artificial Sequence: Synthetic oligonucleotide
  Target: ATXN2; (+) strand; PAM type: NRG; PAM sequence: CAG
agttaactgcacaaagtcca

SEQ ID NO: 52868 - DNA, 20 bp, Artificial Sequence
  Description of Artificial Sequence: Synthetic oligonucleotide
  Target: ATXN2; (+) strand; PAM type: NRG; PAM sequence: AAG
caaatgtttataaacccgaa

SEQ ID NO: 52869 - DNA, 20 bp, Artificial Sequence
  Description of Artificial Sequence: Synthetic oligonucleotide
  Target: ATXN2; (+) strand; PAM type: NRG; PAM sequence: CAG
taaacccgaaaagaaaaatg

SEQ ID NO: 52870 - DNA, 20 bp, Artificial Sequence
  Description of Artificial Sequence: Synthetic oligonucleotide
  Target: ATXN2; (+) strand; PAM type: NRG; PAM sequence: AAG
aaaaaactaaaattataatc

SEQ ID NO: 52871 - DNA, 20 bp, Artificial Sequence
  Description of Artificial Sequence: Synthetic oligonucleotide
  Target: ATXN2; (+) strand; PAM type: NRG; PAM sequence: TAG
taatcaagattaattccact

SEQ ID NO: 52872 - DNA, 20 bp, Artificial Sequence
  Description of Artificial Sequence: Synthetic oligonucleotide
  Target: ATXN2; (+) strand; PAM type: NRG; PAM sequence: AAG
ttccacttagaaaaattatt

SEQ ID NO: 52873 - DNA, 20 bp, Artificial Sequence
  Description of Artificial Sequence: Synthetic oligonucleotide
  Target: ATXN2; (+) strand; PAM type: NRG; PAM sequence: AAG
tattttaacatgactttaaa

SEQ ID NO: 52874 - DNA, 20 bp, Artificial Sequence
  Description of Artificial Sequence: Synthetic oligonucleotide
  Target: ATXN2; (+) strand; PAM type: NRG; PAM sequence: TGG
tcaatgaaaaatatttgacc

SEQ ID NO: 52875 - DNA, 20 bp, Artificial Sequence
  Description of Artificial Sequence: Synthetic oligonucleotide
  Target: ATXN2; (+) strand; PAM type: NRG; PAM sequence: CAG
tgaaaaatatttgacctggc

SEQ ID NO: 52876 - DNA, 20 bp, Artificial Sequence
  Description of Artificial Sequence: Synthetic oligonucleotide
  Target: ATXN2; (+) strand; PAM type: NRG; PAM sequence: CGG
atatttgacctggccagcca

SEQ ID NO: 52877 - DNA, 20 bp, Artificial Sequence
  Description of Artificial Sequence: Synthetic oligonucleotide
  Target: ATXN2; (+) strand; PAM type: NRG; PAM sequence: AAG
gtgcctcacacatgtaatta

SEQ ID NO: 52878 - DNA, 20 bp, Artificial Sequence
  Description of Artificial Sequence: Synthetic oligonucleotide
  Target: ATXN2; (+) strand; PAM type: NRG; PAM sequence: TGG
cacatgtaattaaagcactt

SEQ ID NO: 52879 - DNA, 20 bp, Artificial Sequence
  Description of Artificial Sequence: Synthetic oligonucleotide
  Target: ATXN2; (+) strand; PAM type: NRG; PAM sequence: GGG
acatgtaattaaagcacttt

SEQ ID NO: 52880 - DNA, 20 bp, Artificial Sequence
  Description of Artificial Sequence: Synthetic oligonucleotide
  Target: ATXN2; (+) strand; PAM type: NRG; PAM sequence: TAG
ttaaagcactttgggaaaac

SEQ ID NO: 52881 - DNA, 20 bp, Artificial Sequence
  Description of Artificial Sequence: Synthetic oligonucleotide
  Target: ATXN2; (+) strand; PAM type: NRG; PAM sequence: AGG
taaagcactttgggaaaact

SEQ ID NO: 52882 - DNA, 20 bp, Artificial Sequence
  Description of Artificial Sequence: Synthetic oligonucleotide
  Target: ATXN2; (+) strand; PAM type: NRG; PAM sequence: TGG
agcactttgggaaaactagg

SEQ ID NO: 52883 - DNA, 20 bp, Artificial Sequence
  Description of Artificial Sequence: Synthetic oligonucleotide
  Target: ATXN2; (+) strand; PAM type: NRG; PAM sequence: GGG
gcactttgggaaaactaggt

SEQ ID NO: 52884 - DNA, 20 bp, Artificial Sequence
  Description of Artificial Sequence: Synthetic oligonucleotide
  Target: ATXN2; (+) strand; PAM type: NRG; PAM sequence: TGG
ctttgggaaaactaggtggg

SEQ ID NO: 52885 - DNA, 20 bp, Artificial Sequence
  Description of Artificial Sequence: Synthetic oligonucleotide
  Target: ATXN2; (+) strand; PAM type: NRG; PAM sequence: AAG
tgggtggatcatttgaattt

SEQ ID NO: 52886 - DNA, 20 bp, Artificial Sequence
  Description of Artificial Sequence: Synthetic oligonucleotide
  Target: ATXN2; (+) strand; PAM type: NRG; PAM sequence: GAG
ggtggatcatttgaatttaa

SEQ ID NO: 52887 - DNA, 20 bp, Artificial Sequence
  Description of Artificial Sequence: Synthetic oligonucleotide
  Target: ATXN2; (+) strand; PAM type: NRG; PAM sequence: GAG
tcatttgaatttaagagttt

SEQ ID NO: 52888 - DNA, 20 bp, Artificial Sequence
  Description of Artificial Sequence: Synthetic oligonucleotide
  Target: ATXN2; (+) strand; PAM type: NRG; PAM sequence: CAG
tgaatttaagagtttgagac

SEQ ID NO: 52889 - DNA, 20 bp, Artificial Sequence
  Description of Artificial Sequence: Synthetic oligonucleotide
  Target: ATXN2; (+) strand; PAM type: NRG; PAM sequence: TGG
ttaagagtttgagaccagcc

SEQ ID NO: 52890 - DNA, 20 bp, Artificial Sequence
  Description of Artificial Sequence: Synthetic oligonucleotide
  Target: ATXN2; (+) strand; PAM type: NRG; PAM sequence: GGG
taagagtttgagaccagcct

SEQ ID NO: 52891 - DNA, 20 bp, Artificial Sequence
  Description of Artificial Sequence: Synthetic oligonucleotide
  Target: ATXN2; (+) strand; PAM type: NRG; PAM sequence: TGG
tgagaccagcctgggcaaca

SEQ ID NO: 52892 - DNA, 20 bp, Artificial Sequence
  Description of Artificial Sequence: Synthetic oligonucleotide
  Target: ATXN2; (+) strand; PAM type: NRG; PAM sequence: AAG
tgtctctacaaaatatacaa

SEQ ID NO: 52893 - DNA, 20 bp, Artificial Sequence
  Description of Artificial Sequence: Synthetic oligonucleotide
  Target: ATXN2; (+) strand; PAM type: NRG; PAM sequence: CAG
tctacaaaatatacaaaagc

SEQ ID NO: 52894 - DNA, 20 bp, Artificial Sequence
  Description of Artificial Sequence: Synthetic oligonucleotide
  Target: ATXN2; (+) strand; PAM type: NRG; PAM sequence: AGG
ctacaaaatatacaaaagcc

SEQ ID NO: 52895 - DNA, 20 bp, Artificial Sequence
  Description of Artificial Sequence: Synthetic oligonucleotide
  Target: ATXN2; (+) strand; PAM type: NRG; PAM sequence: TGG
aaatatacaaaagccaggca

SEQ ID NO: 52896 - DNA, 20 bp, Artificial Sequence
  Description of Artificial Sequence: Synthetic oligonucleotide
  Target: ATXN2; (+) strand; PAM type: NRG; PAM sequence: TGG
tatacaaaagccaggcatgg

SEQ ID NO: 52897 - DNA, 20 bp, Artificial Sequence
  Description of Artificial Sequence: Synthetic oligonucleotide
  Target: ATXN2; (+) strand; PAM type: NRG; PAM sequence: TAG
ggcatggtggcatacacctg

SEQ ID NO: 52898 - DNA, 20 bp, Artificial Sequence
  Description of Artificial Sequence: Synthetic oligonucleotide
  Target: ATXN2; (+) strand; PAM type: NRG; PAM sequence: CAG
gtggcatacacctgtagttc

SEQ ID NO: 52899 - DNA, 20 bp, Artificial Sequence
  Description of Artificial Sequence: Synthetic oligonucleotide
  Target: ATXN2; (+) strand; PAM type: NRG; PAM sequence: CGG
cacctgtagttccagctact

SEQ ID NO: 52900 - DNA, 20 bp, Artificial Sequence
  Description of Artificial Sequence: Synthetic oligonucleotide
  Target: ATXN2; (+) strand; PAM type: NRG; PAM sequence: GGG
acctgtagttccagctactc

SEQ ID NO: 52901 - DNA, 20 bp, Artificial Sequence
  Description of Artificial Sequence: Synthetic oligonucleotide
  Target: ATXN2; (+) strand; PAM type: NRG; PAM sequence: GAG
ctgtagttccagctactcgg

SEQ ID NO: 52902 - DNA, 20 bp, Artificial Sequence
  Description of Artificial Sequence: Synthetic oligonucleotide
  Target: ATXN2; (+) strand; PAM type: NRG; PAM sequence: GAG
ttccagctactcgggagact

SEQ ID NO: 52903 - DNA, 20 bp, Artificial Sequence
  Description of Artificial Sequence: Synthetic oligonucleotide
  Target: ATXN2; (+) strand; PAM type: NRG; PAM sequence: AGG
tccagctactcgggagactg

SEQ ID NO: 52904 - DNA, 20 bp, Artificial Sequence
  Description of Artificial Sequence: Synthetic oligonucleotide
  Target: ATXN2; (+) strand; PAM type: NRG; PAM sequence: TAG
agctactcgggagactgagg

SEQ ID NO: 52905 - DNA, 20 bp, Artificial Sequence
  Description of Artificial Sequence: Synthetic oligonucleotide
  Target: ATXN2; (+) strand; PAM type: NRG; PAM sequence: AGG
gctactcgggagactgaggt

SEQ ID NO: 52906 - DNA, 20 bp, Artificial Sequence
  Description of Artificial Sequence: Synthetic oligonucleotide
  Target: ATXN2; (+) strand; PAM type: NRG; PAM sequence: GAG
tactcgggagactgaggtag

SEQ ID NO: 52907 - DNA, 20 bp, Artificial Sequence
  Description of Artificial Sequence: Synthetic oligonucleotide
  Target: ATXN2; (+) strand; PAM type: NRG; PAM sequence: AGG
actcgggagactgaggtagg

SEQ ID NO: 52908 - DNA, 20 bp, Artificial Sequence
  Description of Artificial Sequence: Synthetic oligonucleotide
  Target: ATXN2; (+) strand; PAM type: NRG; PAM sequence: GAG
ctgaggtaggaggactgctt

SEQ ID NO: 52909 - DNA, 20 bp, Artificial Sequence
  Description of Artificial Sequence: Synthetic oligonucleotide
  Target: ATXN2; (+) strand; PAM type: NRG; PAM sequence: CAG
gtaggaggactgcttgagcc

SEQ ID NO: 52910 - DNA, 20 bp, Artificial Sequence
  Description of Artificial Sequence: Synthetic oligonucleotide
  Target: ATXN2; (+) strand; PAM type: NRG; PAM sequence: AGG
taggaggactgcttgagccc

SEQ ID NO: 52911 - DNA, 20 bp, Artificial Sequence
  Description of Artificial Sequence: Synthetic oligonucleotide
  Target: ATXN2; (+) strand; PAM type: NRG; PAM sequence: GAG
ctgcttgagcccaggatgtt

SEQ ID NO: 52912 - DNA, 20 bp, Artificial Sequence
  Description of Artificial Sequence: Synthetic oligonucleotide
  Target: ATXN2; (+) strand; PAM type: NRG; PAM sequence: AGG
tgcttgagcccaggatgttg

SEQ ID NO: 52913 - DNA, 20 bp, Artificial Sequence
  Description of Artificial Sequence: Synthetic oligonucleotide
  Target: ATXN2; (+) strand; PAM type: NRG; PAM sequence: CAG
agcccaggatgttgaggctg

SEQ ID NO: 52914 - DNA, 20 bp, Artificial Sequence
  Description of Artificial Sequence: Synthetic oligonucleotide
  Target: ATXN2; (+) strand; PAM type: NRG; PAM sequence: GAG
caggatgttgaggctgcagt

SEQ ID NO: 52915 - DNA, 20 bp, Artificial Sequence
  Description of Artificial Sequence: Synthetic oligonucleotide
  Target: ATXN2; (+) strand; PAM type: NRG; PAM sequence: TGG
cataccactatactccaacc

SEQ ID NO: 52916 - DNA, 20 bp, Artificial Sequence
  Description of Artificial Sequence: Synthetic oligonucleotide
  Target: ATXN2; (+) strand; PAM type: NRG; PAM sequence: CAG
ctatactccaacctggccaa

SEQ ID NO: 52917 - DNA, 20 bp, Artificial Sequence
  Description of Artificial Sequence: Synthetic oligonucleotide
  Target: ATXN2; (+) strand; PAM type: NRG; PAM sequence: AGG
tatactccaacctggccaac

SEQ ID NO: 52918 - DNA, 20 bp, Artificial Sequence
  Description of Artificial Sequence: Synthetic oligonucleotide
  Target: ATXN2; (+) strand; PAM type: NRG; PAM sequence: GGG
atactccaacctggccaaca

SEQ ID NO: 52919 - DNA, 20 bp, Artificial Sequence
  Description of Artificial Sequence: Synthetic oligonucleotide
  Target: ATXN2; (+) strand; PAM type: NRG; PAM sequence: AAG
tccaacctggccaacagggt

SEQ ID NO: 52920 - DNA, 20 bp, Artificial Sequence
  Description of Artificial Sequence: Synthetic oligonucleotide
  Target: ATXN2; (+) strand; PAM type: NRG; PAM sequence: CAG
ctggccaacagggtaagact

SEQ ID NO: 52921 - DNA, 20 bp, Artificial Sequence
  Description of Artificial Sequence: Synthetic oligonucleotide
  Target: ATXN2; (+) strand; PAM type: NRG; PAM sequence: AAG
taagactcagtctcaaaaaa

SEQ ID NO: 52922 - DNA, 20 bp, Artificial Sequence
  Description of Artificial Sequence: Synthetic oligonucleotide
  Target: ATXN2; (+) strand; PAM type: NRG; PAM sequence: AGG
aagactcagtctcaaaaaaa

SEQ ID NO: 52923 - DNA, 20 bp, Artificial Sequence
  Description of Artificial Sequence: Synthetic oligonucleotide
  Target: ATXN2; (+) strand; PAM type: NRG; PAM sequence: TGG
tttaaaaaaaaactgatcat

SEQ ID NO: 52924 - DNA, 20 bp, Artificial Sequence
  Description of Artificial Sequence: Synthetic oligonucleotide
  Target: ATXN2; (+) strand; PAM type: NRG; PAM sequence: AAG
attggcaacactgttcaata

SEQ ID NO: 52925 - DNA, 20 bp, Artificial Sequence
  Description of Artificial Sequence: Synthetic oligonucleotide
  Target: ATXN2; (+) strand; PAM type: NRG; PAM sequence: AAG
actgttcaataaagcctctc

SEQ ID NO: 52926 - DNA, 20 bp, Artificial Sequence
  Description of Artificial Sequence: Synthetic oligonucleotide
  Target: ATXN2; (+) strand; PAM type: NRG; PAM sequence: AGG
ctgttcaataaagcctctca

SEQ ID NO: 52927 - DNA, 20 bp, Artificial Sequence
  Description of Artificial Sequence: Synthetic oligonucleotide
  Target: ATXN2; (+) strand; PAM type: NRG; PAM sequence: TGG
aataaagcctctcaaggcaa

SEQ ID NO: 52928 - DNA, 20 bp, Artificial Sequence
  Description of Artificial Sequence: Synthetic oligonucleotide
  Target: ATXN2; (+) strand; PAM type: NRG; PAM sequence: CAG
gcctctcaaggcaatggttt

SEQ ID NO: 52929 - DNA, 20 bp, Artificial Sequence
  Description of Artificial Sequence: Synthetic oligonucleotide
  Target: ATXN2; (+) strand; PAM type: NRG; PAM sequence: AGG
cctctcaaggcaatggtttc

SEQ ID NO: 52930 - DNA, 20 bp, Artificial Sequence
  Description of Artificial Sequence: Synthetic oligonucleotide
  Target: ATXN2; (+) strand; PAM type: NRG; PAM sequence: GAG
tctcaaggcaatggtttcag

SEQ ID NO: 52931 - DNA, 20 bp, Artificial Sequence
  Description of Artificial Sequence: Synthetic oligonucleotide
  Target: ATXN2; (+) strand; PAM type: NRG; PAM sequence: AAG
ttcaggagaccaacattcta

SEQ ID NO: 52932 - DNA, 20 bp, Artificial Sequence
  Description of Artificial Sequence: Synthetic oligonucleotide
  Target: ATXN2; (+) strand; PAM type: NRG; PAM sequence: CAG
aacattctaaagttctgata

SEQ ID NO: 52933 - DNA, 20 bp, Artificial Sequence
  Description of Artificial Sequence: Synthetic oligonucleotide
  Target: ATXN2; (+) strand; PAM type: NRG; PAM sequence: AAG
cgttcacttatattgccgac

SEQ ID NO: 52934 - DNA, 20 bp, Artificial Sequence
  Description of Artificial Sequence: Synthetic oligonucleotide
  Target: ATXN2; (+) strand; PAM type: NRG; PAM sequence: GAG
agcctcataccacaactaat

SEQ ID NO: 52935 - DNA, 20 bp, Artificial Sequence
  Description of Artificial Sequence: Synthetic oligonucleotide
  Target: ATXN2; (+) strand; PAM type: NRG; PAM sequence: AAG
cacaactaatgagttttaca

SEQ ID NO: 52936 - DNA, 20 bp, Artificial Sequence
  Description of Artificial Sequence: Synthetic oligonucleotide
  Target: ATXN2; (+) strand; PAM type: NRG; PAM sequence: TAG
gttttacaaagacttcatta

SEQ ID NO: 52937 - DNA, 20 bp, Artificial Sequence
  Description of Artificial Sequence: Synthetic oligonucleotide
  Target: ATXN2; (+) strand; PAM type: NRG; PAM sequence: TAG
tttattacattcccaaaatg

SEQ ID NO: 52938 - DNA, 20 bp, Artificial Sequence
  Description of Artificial Sequence: Synthetic oligonucleotide
  Target: ATXN2; (+) strand; PAM type: NRG; PAM sequence: TAG
ttacattcccaaaatgtagt

SEQ ID NO: 52939 - DNA, 20 bp, Artificial Sequence
  Description of Artificial Sequence: Synthetic oligonucleotide
  Target: ATXN2; (+) strand; PAM type: NRG; PAM sequence: TGG
atgtagttagctattaatca

SEQ ID NO: 52940 - DNA, 20 bp, Artificial Sequence
  Description of Artificial Sequence: Synthetic oligonucleotide
  Target: ATXN2; (+) strand; PAM type: NRG; PAM sequence: CGG
tggcacgaaactgacatttt

SEQ ID NO: 52941 - DNA, 20 bp, Artificial Sequence
  Description of Artificial Sequence: Synthetic oligonucleotide
  Target: ATXN2; (+) strand; PAM type: NRG; PAM sequence: GGG
ggcacgaaactgacattttc

SEQ ID NO: 52942 - DNA, 20 bp, Artificial Sequence
  Description of Artificial Sequence: Synthetic oligonucleotide
  Target: ATXN2; (+) strand; PAM type: NRG; PAM sequence: TGG
cgaaactgacattttcgggc

SEQ ID NO: 52943 - DNA, 20 bp, Artificial Sequence
  Description of Artificial Sequence: Synthetic oligonucleotide
  Target: ATXN2; (+) strand; PAM type: NRG; PAM sequence: CAG
tgacattttcgggctggaca

SEQ ID NO: 52944 - DNA, 20 bp, Artificial Sequence
  Description of Artificial Sequence: Synthetic oligonucleotide
  Target: ATXN2; (+) strand; PAM type: NRG; PAM sequence: TGG
cattttcgggctggacacag

SEQ ID NO: 52945 - DNA, 20 bp, Artificial Sequence
  Description of Artificial Sequence: Synthetic oligonucleotide
  Target: ATXN2; (+) strand; PAM type: NRG; PAM sequence: CAG
gtggctcacacctgtaacac

SEQ ID NO: 52946 - DNA, 20 bp, Artificial Sequence
  Description of Artificial Sequence: Synthetic oligonucleotide
  Target: ATXN2; (+) strand; PAM type: NRG; PAM sequence: TAG
cacctgtaacaccagcatgt

SEQ ID NO: 52947 - DNA, 20 bp, Artificial Sequence
  Description of Artificial Sequence: Synthetic oligonucleotide
  Target: ATXN2; (+) strand; PAM type: NRG; PAM sequence: AGG
acctgtaacaccagcatgtt

SEQ ID NO: 52948 - DNA, 20 bp, Artificial Sequence
  Description of Artificial Sequence: Synthetic oligonucleotide
  Target: ATXN2; (+) strand; PAM type: NRG; PAM sequence: GAG
ctgtaacaccagcatgttag

SEQ ID NO: 52949 - DNA, 20 bp, Artificial Sequence
  Description of Artificial Sequence: Synthetic oligonucleotide
  Target: ATXN2; (+) strand; PAM type: NRG; PAM sequence: AGG
tgtaacaccagcatgttagg

SEQ ID NO: 52950 - DNA, 20 bp, Artificial Sequence
  Description of Artificial Sequence: Synthetic oligonucleotide
  Target: ATXN2; (+) strand; PAM type: NRG; PAM sequence: AAG
accagcatgttaggaggcct

SEQ ID NO: 52951 - DNA, 20 bp, Artificial Sequence
  Description of Artificial Sequence: Synthetic oligonucleotide
  Target: ATXN2; (+) strand; PAM type: NRG; PAM sequence: TGG
agcatgttaggaggcctaag

SEQ ID NO: 52952 - DNA, 20 bp, Artificial Sequence
  Description of Artificial Sequence: Synthetic oligonucleotide
  Target: ATXN2; (+) strand; PAM type: NRG; PAM sequence: GGG
gcatgttaggaggcctaagt

SEQ ID NO: 52953 - DNA, 20 bp, Artificial Sequence
  Description of Artificial Sequence: Synthetic oligonucleotide
  Target: ATXN2; (+) strand; PAM type: NRG; PAM sequence: GGG
catgttaggaggcctaagtg

SEQ ID NO: 52954 - DNA, 20 bp, Artificial Sequence
  Description of Artificial Sequence: Synthetic oligonucleotide
  Target: ATXN2; (+) strand; PAM type: NRG; PAM sequence: TGG
gttaggaggcctaagtgggg

SEQ ID NO: 52955 - DNA, 20 bp, Artificial Sequence
  Description of Artificial Sequence: Synthetic oligonucleotide
  Target: ATXN2; (+) strand; PAM type: NRG; PAM sequence: GAG
ctaagtggggtggatcactc

SEQ ID NO: 52956 - DNA, 20 bp, Artificial Sequence
  Description of Artificial Sequence: Synthetic oligonucleotide
  Target: ATXN2; (+) strand; PAM type: NRG; PAM sequence: AGG
taagtggggtggatcactcg

SEQ ID NO: 52957 - DNA, 20 bp, Artificial Sequence
  Description of Artificial Sequence: Synthetic oligonucleotide
  Target: ATXN2; (+) strand; PAM type: NRG; PAM sequence: GAG
ggtggatcactcgaggccat

SEQ ID NO: 52958 - DNA, 20 bp, Artificial Sequence
  Description of Artificial Sequence: Synthetic oligonucleotide
  Target: ATXN2; (+) strand; PAM type: NRG; PAM sequence: AAG
tcactcgaggccatgagttc

SEQ ID NO: 52959 - DNA, 20 bp, Artificial Sequence
  Description of Artificial Sequence: Synthetic oligonucleotide
  Target: ATXN2; (+) strand; PAM type: NRG; PAM sequence: TGG
ccatgagttcaagatcaaca

SEQ ID NO: 52960 - DNA, 20 bp, Artificial Sequence
  Description of Artificial Sequence: Synthetic oligonucleotide
  Target: ATXN2; (+) strand; PAM type: NRG; PAM sequence: TAG
tactgaaaatacaaaaaaac

SEQ ID NO: 52961 - DNA, 20 bp, Artificial Sequence
  Description of Artificial Sequence: Synthetic oligonucleotide
  Target: ATXN2; (+) strand; PAM type: NRG; PAM sequence: AGG
actgaaaatacaaaaaaact

SEQ ID NO: 52962 - DNA, 20 bp, Artificial Sequence
  Description of Artificial Sequence: Synthetic oligonucleotide
  Target: ATXN2; (+) strand; PAM type: NRG; PAM sequence: CAG
gaaaatacaaaaaaactagg

SEQ ID NO: 52963 - DNA, 20 bp, Artificial Sequence
  Description of Artificial Sequence: Synthetic oligonucleotide
  Target: ATXN2; (+) strand; PAM type: NRG; PAM sequence: AGG
aaaatacaaaaaaactaggc

SEQ ID NO: 52964 - DNA, 20 bp, Artificial Sequence
  Description of Artificial Sequence: Synthetic oligonucleotide
  Target: ATXN2; (+) strand; PAM type: NRG; PAM sequence: TGG
aaaaaactaggcaggcactg

SEQ ID NO: 52965 - DNA, 20 bp, Artificial Sequence
  Description of Artificial Sequence: Synthetic oligonucleotide
  Target: ATXN2; (+) strand; PAM type: NRG; PAM sequence: GGG
aaaaactaggcaggcactgt

SEQ ID NO: 52966 - DNA, 20 bp, Artificial Sequence
  Description of Artificial Sequence: Synthetic oligonucleotide
  Target: ATXN2; (+) strand; PAM type: NRG; PAM sequence: GGG
aaaactaggcaggcactgtg

SEQ ID NO: 52967 - DNA, 20 bp, Artificial Sequence
  Description of Artificial Sequence: Synthetic oligonucleotide
  Target: ATXN2; (+) strand; PAM type: NRG; PAM sequence: CAG
gcaggcactgtggggcgcac

SEQ ID NO: 52968 - DNA, 20 bp, Artificial Sequence
  Description of Artificial Sequence: Synthetic oligonucleotide
  Target: ATXN2; (+) strand; PAM type: NRG; PAM sequence: TAG
ggcactgtggggcgcaccag

SEQ ID NO: 52969 - DNA, 20 bp, Artificial Sequence
  Description of Artificial Sequence: Synthetic oligonucleotide
  Target: ATXN2; (+) strand; PAM type: NRG; PAM sequence: TGG
caccagtagttccaactact

SEQ ID NO: 52970 - DNA, 20 bp, Artificial Sequence
  Description of Artificial Sequence: Synthetic oligonucleotide
  Target: ATXN2; (+) strand; PAM type: NRG; PAM sequence: GGG
accagtagttccaactactt

SEQ ID NO: 52971 - DNA, 20 bp, Artificial Sequence
  Description of Artificial Sequence: Synthetic oligonucleotide
  Target: ATXN2; (+) strand; PAM type: NRG; PAM sequence: GAG
cagtagttccaactacttgg

SEQ ID NO: 52972 - DNA, 20 bp, Artificial Sequence
  Description of Artificial Sequence: Synthetic oligonucleotide
  Target: ATXN2; (+) strand; PAM type: NRG; PAM sequence: AGG
agtagttccaactacttggg

SEQ ID NO: 52973 - DNA, 20 bp, Artificial Sequence
  Description of Artificial Sequence: Synthetic oligonucleotide
  Target: ATXN2; (+) strand; PAM type: NRG; PAM sequence: GAG
ttccaactacttgggaggct

SEQ ID NO: 52974 - DNA, 20 bp, Artificial Sequence
  Description of Artificial Sequence: Synthetic oligonucleotide
  Target: ATXN2; (+) strand; PAM type: NRG; PAM sequence: AGG
tccaactacttgggaggctg

SEQ ID NO: 52975 - DNA, 20 bp, Artificial Sequence
  Description of Artificial Sequence: Synthetic oligonucleotide
  Target: ATXN2; (+) strand; PAM type: NRG; PAM sequence: TGG
aactacttgggaggctgagg

SEQ ID NO: 52976 - DNA, 20 bp, Artificial Sequence
  Description of Artificial Sequence: Synthetic oligonucleotide
  Target: ATXN2; (+) strand; PAM type: NRG; PAM sequence: GGG
actacttgggaggctgaggt

SEQ ID NO: 52977 - DNA, 20 bp, Artificial Sequence
  Description of Artificial Sequence: Synthetic oligonucleotide
  Target: ATXN2; (+) strand; PAM type: NRG; PAM sequence: GAG
tacttgggaggctgaggtgg

SEQ ID NO: 52978 - DNA, 20 bp, Artificial Sequence
  Description of Artificial Sequence: Synthetic oligonucleotide
  Target: ATXN2; (+) strand; PAM type: NRG; PAM sequence: AGG
acttgggaggctgaggtggg

SEQ ID NO: 52979 - DNA, 20 bp, Artificial Sequence
  Description of Artificial Sequence: Synthetic oligonucleotide
  Target: ATXN2; (+) strand; PAM type: NRG; PAM sequence: TGG
gggaggctgaggtgggagga

SEQ ID NO: 52980 - DNA, 20 bp, Artificial Sequence
  Description of Artificial Sequence: Synthetic oligonucleotide
  Target: ATXN2; (+) strand; PAM type: NRG; PAM sequence: CGG
gtgggaggatggcttgaacc

SEQ ID NO: 52981 - DNA, 20 bp, Artificial Sequence
  Description of Artificial Sequence: Synthetic oligonucleotide
  Target: ATXN2; (+) strand; PAM type: NRG; PAM sequence: GGG
tgggaggatggcttgaaccc

SEQ ID NO: 52982 - DNA, 20 bp, Artificial Sequence
  Description of Artificial Sequence: Synthetic oligonucleotide
  Target: ATXN2; (+) strand; PAM type: NRG; PAM sequence: GAG
ggaggatggcttgaacccgg

SEQ ID NO: 52983 - DNA, 20 bp, Artificial Sequence
  Description of Artificial Sequence: Synthetic oligonucleotide
  Target: ATXN2; (+) strand; PAM type: NRG; PAM sequence: CAG
gatggcttgaacccgggaga

SEQ ID NO: 52984 - DNA, 20 bp, Artificial Sequence
  Description of Artificial Sequence: Synthetic oligonucleotide
  Target: ATXN2; (+) strand; PAM type: NRG; PAM sequence: GAG
tggcttgaacccgggagaca

SEQ ID NO: 52985 - DNA, 20 bp, Artificial Sequence
  Description of Artificial Sequence: Synthetic oligonucleotide
  Target: ATXN2; (+) strand; PAM type: NRG; PAM sequence: AGG
ggcttgaacccgggagacag

SEQ ID NO: 52986 - DNA, 20 bp, Artificial Sequence
  Description of Artificial Sequence: Synthetic oligonucleotide
  Target: ATXN2; (+) strand; PAM type: NRG; PAM sequence: CAG
aacccgggagacagaggttg

SEQ ID NO: 52987 - DNA, 20 bp, Artificial Sequence
  Description of Artificial Sequence: Synthetic oligonucleotide
  Target: ATXN2; (+) strand; PAM type: NRG; PAM sequence: GAG
cgggagacagaggttgcagt

SEQ ID NO: 52988 - DNA, 20 bp, Artificial Sequence
  Description of Artificial Sequence: Synthetic oligonucleotide
  Target: ATXN2; (+) strand; PAM type: NRG; PAM sequence: CAG
gtatttgcaacactgcactc

SEQ ID NO: 52989 - DNA, 20 bp, Artificial Sequence
  Description of Artificial Sequence: Synthetic oligonucleotide
  Target: ATXN2; (+) strand; PAM type: NRG; PAM sequence: TAG
gcaacactgcactccagcct

SEQ ID NO: 52990 - DNA, 20 bp, Artificial Sequence
  Description of Artificial Sequence: Synthetic oligonucleotide
  Target: ATXN2; (+) strand; PAM type: NRG; PAM sequence: CAG
ctgcactccagccttagcaa

SEQ ID NO: 52991 - DNA, 20 bp, Artificial Sequence
  Description of Artificial Sequence: Synthetic oligonucleotide
  Target: ATXN2; (+) strand; PAM type: NRG; PAM sequence: GAG
gcactccagccttagcaaca

SEQ ID NO: 52992 - DNA, 20 bp, Artificial Sequence
  Description of Artificial Sequence: Synthetic oligonucleotide
  Target: ATXN2; (+) strand; PAM type: NRG; PAM sequence: CAG
tccagccttagcaacagagc

SEQ ID NO: 52993 - DNA, 20 bp, Artificial Sequence
  Description of Artificial Sequence: Synthetic oligonucleotide
  Target: ATXN2; (+) strand; PAM type: NRG; PAM sequence: AAG
taaaacaaattgacattgta

SEQ ID NO: 52994 - DNA, 20 bp, Artificial Sequence
  Description of Artificial Sequence: Synthetic oligonucleotide
  Target: ATXN2; (+) strand; PAM type: NRG; PAM sequence: CAG
aaagtcacttgacacaactt

SEQ ID NO: 52995 - DNA, 20 bp, Artificial Sequence
  Description of Artificial Sequence: Synthetic oligonucleotide
  Target: ATXN2; (+) strand; PAM type: NRG; PAM sequence: AGG
aagtcacttgacacaacttc

SEQ ID NO: 52996 - DNA, 20 bp, Artificial Sequence
  Description of Artificial Sequence: Synthetic oligonucleotide
  Target: ATXN2; (+) strand; PAM type: NRG; PAM sequence: GGG
agtcacttgacacaacttca

SEQ ID NO: 52997 - DNA, 20 bp, Artificial Sequence
  Description of Artificial Sequence: Synthetic oligonucleotide
  Target: ATXN2; (+) strand; PAM type: NRG; PAM sequence: AAG
aacttcagggttaaaattac

SEQ ID NO: 52998 - DNA, 20 bp, Artificial Sequence
  Description of Artificial Sequence: Synthetic oligonucleotide
  Target: ATXN2; (+) strand; PAM type: NRG; PAM sequence: AAG
aaattacaagcaatctatgt

SEQ ID NO: 52999 - DNA, 20 bp, Artificial Sequence
  Description of Artificial Sequence: Synthetic oligonucleotide
  Target: ATXN2; (+) strand; PAM type: NRG; PAM sequence: GAG
aagaatctttaaatgttaat

SEQ ID NO: 53000 - DNA, 20 bp, Artificial Sequence
  Description of Artificial Sequence: Synthetic oligonucleotide
  Target: ATXN2; (+) strand; PAM type: NRG; PAM sequence: CAG
atgcaaacacaaataattac

SEQ ID NO: 53001 - DNA, 20 bp, Artificial Sequence
  Description of Artificial Sequence: Synthetic oligonucleotide
  Target: ATXN2; (+) strand; PAM type: NRG; PAM sequence: AAG
aataattaccagcaaataaa

SEQ ID NO: 53002 - DNA, 20 bp, Artificial Sequence
  Description of Artificial Sequence: Synthetic oligonucleotide
  Target: ATXN2; (+) strand; PAM type: NRG; PAM sequence: AAG
ttaccagcaaataaaaagtt

SEQ ID NO: 53003 - DNA, 20 bp, Artificial Sequence
  Description of Artificial Sequence: Synthetic oligonucleotide
  Target: ATXN2; (+) strand; PAM type: NRG; PAM sequence: AGG
taccagcaaataaaaagtta

SEQ ID NO: 53004 - DNA, 20 bp, Artificial Sequence
  Description of Artificial Sequence: Synthetic oligonucleotide
  Target: ATXN2; (+) strand; PAM type: NRG; PAM sequence: CAG
aaataaaaagttaaggttgc

SEQ ID NO: 53005 - DNA, 20 bp, Artificial Sequence
  Description of Artificial Sequence: Synthetic oligonucleotide
  Target: ATXN2; (+) strand; PAM type: NRG; PAM sequence: AGG
aataaaaagttaaggttgcc

SEQ ID NO: 53006 - DNA, 20 bp, Artificial Sequence
  Description of Artificial Sequence: Synthetic oligonucleotide
  Target: ATXN2; (+) strand; PAM type: NRG; PAM sequence: TGG
aaagttaaggttgccaggca

SEQ ID NO: 53007 - DNA, 20 bp, Artificial Sequence
  Description of Artificial Sequence: Synthetic oligonucleotide
  Target: ATXN2; (+) strand; PAM type: NRG; PAM sequence: GGG
aagttaaggttgccaggcat

SEQ ID NO: 53008 - DNA, 20 bp, Artificial Sequence
  Description of Artificial Sequence: Synthetic oligonucleotide
  Target: ATXN2; (+) strand; PAM type: NRG; PAM sequence: GAG
gttaaggttgccaggcatgg

SEQ ID NO: 53009 - DNA, 20 bp, Artificial Sequence
  Description of Artificial Sequence: Synthetic oligonucleotide
  Target: ATXN2; (+) strand; PAM type: NRG; PAM sequence: AGG
ttaaggttgccaggcatggg

SEQ ID NO: 53010 - DNA, 20 bp, Artificial Sequence
  Description of Artificial Sequence: Synthetic oligonucleotide
  Target: ATXN2; (+) strand; PAM type: NRG; PAM sequence: AAG
gttgccaggcatgggaggcc

SEQ ID NO: 53011 - DNA, 20 bp, Artificial Sequence
  Description of Artificial Sequence: Synthetic oligonucleotide
  Target: ATXN2; (+) strand; PAM type: NRG; PAM sequence: AGG
ttgccaggcatgggaggcca

SEQ ID NO: 53012 - DNA, 20 bp, Artificial Sequence
  Description of Artificial Sequence: Synthetic oligonucleotide
  Target: ATXN2; (+) strand; PAM type: NRG; PAM sequence: CAG
ccaggcatgggaggccaagg

SEQ ID NO: 53013 - DNA, 20 bp, Artificial Sequence
  Description of Artificial Sequence: Synthetic oligonucleotide
  Target: ATXN2; (+) strand; PAM type: NRG; PAM sequence: AGG
caggcatgggaggccaaggc

SEQ ID NO: 53014 - DNA, 20 bp, Artificial Sequence
  Description of Artificial Sequence: Synthetic oligonucleotide
  Target: ATXN2; (+) strand; PAM type: NRG; PAM sequence: TGG
gcatgggaggccaaggcagg

SEQ ID NO: 53015 - DNA, 20 bp, Artificial Sequence
  Description of Artificial Sequence: Synthetic oligonucleotide
  Target: ATXN2; (+) strand; PAM type: NRG; PAM sequence: GAG
ccaaggcaggtggatcactt

SEQ ID NO: 53016 - DNA, 20 bp, Artificial Sequence
  Description of Artificial Sequence: Synthetic oligonucleotide
  Target: ATXN2; (+) strand; PAM type: NRG; PAM sequence: AGG
caaggcaggtggatcacttg

SEQ ID NO: 53017 - DNA, 20 bp, Artificial Sequence
  Description of Artificial Sequence: Synthetic oligonucleotide
  Target: ATXN2; (+) strand; PAM type: NRG; PAM sequence: CAG
gcaggtggatcacttgaggc

SEQ ID NO: 53018 - DNA, 20 bp, Artificial Sequence
  Description of Artificial Sequence: Synthetic oligonucleotide
  Target: ATXN2; (+) strand; PAM type: NRG; PAM sequence: AAG
ggtggatcacttgaggccag

SEQ ID NO: 53019 - DNA, 20 bp, Artificial Sequence
  Description of Artificial Sequence: Synthetic oligonucleotide
  Target: ATXN2; (+) strand; PAM type: NRG; PAM sequence: CAG
tcacttgaggccagaagttc

SEQ ID NO: 53020 - DNA, 20 bp, Artificial Sequence
  Description of Artificial Sequence: Synthetic oligonucleotide
  Target: ATXN2; (+) strand; PAM type: NRG; PAM sequence: CAG
tgaggccagaagttccagac

SEQ ID NO: 53021 - DNA, 20 bp, Artificial Sequence
  Description of Artificial Sequence: Synthetic oligonucleotide
  Target: ATXN2; (+) strand; PAM type: NRG; PAM sequence: TGG
ccagaagttccagaccagcc

SEQ ID NO: 53022 - DNA, 20 bp, Artificial Sequence
  Description of Artificial Sequence: Synthetic oligonucleotide
  Target: ATXN2; (+) strand; PAM type: NRG; PAM sequence: TGG
ccagaccagcctggccaata

SEQ ID NO: 53023 - DNA, 20 bp, Artificial Sequence
  Description of Artificial Sequence: Synthetic oligonucleotide
  Target: ATXN2; (+) strand; PAM type: NRG; PAM sequence: TAG
ctctactaaaatacaaaaat

SEQ ID NO: 53024 - DNA, 20 bp, Artificial Sequence
  Description of Artificial Sequence: Synthetic oligonucleotide
  Target: ATXN2; (+) strand; PAM type: NRG; PAM sequence: CAG
actaaaatacaaaaattagc

SEQ ID NO: 53025 - DNA, 20 bp, Artificial Sequence
  Description of Artificial Sequence: Synthetic oligonucleotide
  Target: ATXN2; (+) strand; PAM type: NRG; PAM sequence: AGG
ctaaaatacaaaaattagcc

SEQ ID NO: 53026 - DNA, 20 bp, Artificial Sequence
  Description of Artificial Sequence: Synthetic oligonucleotide
  Target: ATXN2; (+) strand; PAM type: NRG; PAM sequence: GAG
aatacaaaaattagccaggc

SEQ ID NO: 53027 - DNA, 20 bp, Artificial Sequence
  Description of Artificial Sequence: Synthetic oligonucleotide
  Target: ATXN2; (+) strand; PAM type: NRG; PAM sequence: TGG
caaaaattagccaggcgaga

SEQ ID NO: 53028 - DNA, 20 bp, Artificial Sequence
  Description of Artificial Sequence: Synthetic oligonucleotide
  Target: ATXN2; (+) strand; PAM type: NRG; PAM sequence: CAG
ggcgagatggtgcgtgcctg

SEQ ID NO: 53029 - DNA, 20 bp, Artificial Sequence
  Description of Artificial Sequence: Synthetic oligonucleotide
  Target: ATXN2; (+) strand; PAM type: NRG; PAM sequence: CAG
atggtgcgtgcctgcagtcc

SEQ ID NO: 53030 - DNA, 20 bp, Artificial Sequence
  Description of Artificial Sequence: Synthetic oligonucleotide
  Target: ATXN2; (+) strand; PAM type: NRG; PAM sequence: CAG
tgcctgcagtcccagctact

SEQ ID NO: 53031 - DNA, 20 bp, Artificial Sequence
  Description of Artificial Sequence: Synthetic oligonucleotide
  Target: ATXN2; (+) strand; PAM type: NRG; PAM sequence: AGG
gcctgcagtcccagctactc

SEQ ID NO: 53032 - DNA, 20 bp, Artificial Sequence
  Description of Artificial Sequence: Synthetic oligonucleotide
  Target: ATXN2; (+) strand; PAM type: NRG; PAM sequence: GAG
ctgcagtcccagctactcag

SEQ ID NO: 53033 - DNA, 20 bp, Artificial Sequence
  Description of Artificial Sequence: Synthetic oligonucleotide
  Target: ATXN2; (+) strand; PAM type: NRG; PAM sequence: AGG
tgcagtcccagctactcagg

SEQ ID NO: 53034 - DNA, 20 bp, Artificial Sequence
  Description of Artificial Sequence: Synthetic oligonucleotide
  Target: ATXN2; (+) strand; PAM type: NRG; PAM sequence: GAG
tcccagctactcaggaggct

SEQ ID NO: 53035 - DNA, 20 bp, Artificial Sequence
  Description of Artificial Sequence: Synthetic oligonucleotide
  Target: ATXN2; (+) strand; PAM type: NRG; PAM sequence: AGG
cccagctactcaggaggctg

SEQ ID NO: 53036 - DNA, 20 bp, Artificial Sequence
  Description of Artificial Sequence: Synthetic oligonucleotide
  Target: ATXN2; (+) strand; PAM type: NRG; PAM sequence: CAG
agctactcaggaggctgagg

SEQ ID NO: 53037 - DNA, 20 bp, Artificial Sequence
  Description of Artificial Sequence: Synthetic oligonucleotide
  Target: ATXN2; (+) strand; PAM type: NRG; PAM sequence: TGG
gcagaaaaatcgctttaacc

SEQ ID NO: 53038 - DNA, 20 bp, Artificial Sequence
  Description of Artificial Sequence: Synthetic oligonucleotide
  Target: ATXN2; (+) strand; PAM type: NRG; PAM sequence: GGG
cagaaaaatcgctttaacct

SEQ ID NO: 53039 - DNA, 20 bp, Artificial Sequence
  Description of Artificial Sequence: Synthetic oligonucleotide
  Target: ATXN2; (+) strand; PAM type: NRG; PAM sequence: GAG
gaaaaatcgctttaacctgg

SEQ ID NO: 53040 - DNA, 20 bp, Artificial Sequence
  Description of Artificial Sequence: Synthetic oligonucleotide
  Target: ATXN2; (+) strand; PAM type: NRG; PAM sequence: AGG
aaaaatcgctttaacctggg

SEQ ID NO: 53041 - DNA, 20 bp, Artificial Sequence
  Description of Artificial Sequence: Synthetic oligonucleotide
  Target: ATXN2; (+) strand; PAM type: NRG; PAM sequence: CAG
aatcgctttaacctgggagg

SEQ ID NO: 53042 - DNA, 20 bp, Artificial Sequence
  Description of Artificial Sequence: Synthetic oligonucleotide
  Target: ATXN2; (+) strand; PAM type: NRG; PAM sequence: GAG
tcgctttaacctgggaggca

SEQ ID NO: 53043 - DNA, 20 bp, Artificial Sequence
  Description of Artificial Sequence: Synthetic oligonucleotide
  Target: ATXN2; (+) strand; PAM type: NRG; PAM sequence: AGG
cgctttaacctgggaggcag

SEQ ID NO: 53044 - DNA, 20 bp, Artificial Sequence
  Description of Artificial Sequence: Synthetic oligonucleotide
  Target: ATXN2; (+) strand; PAM type: NRG; PAM sequence: GAG
tgggaggcagaggttgcaat

SEQ ID NO: 53045 - DNA, 20 bp, Artificial Sequence
  Description of Artificial Sequence: Synthetic oligonucleotide
  Target: ATXN2; (+) strand; PAM type: NRG; PAM sequence: GAG
ggcagaggttgcaatgagcc

SEQ ID NO: 53046 - DNA, 20 bp, Artificial Sequence
  Description of Artificial Sequence: Synthetic oligonucleotide
  Target: ATXN2; (+) strand; PAM type: NRG; PAM sequence: CAG
gagatcgcaccactgcactc

SEQ ID NO: 53047 - DNA, 20 bp, Artificial Sequence
  Description of Artificial Sequence: Synthetic oligonucleotide
  Target: ATXN2; (+) strand; PAM type: NRG; PAM sequence: TAG
cgcaccactgcactccagcc

SEQ ID NO: 53048 - DNA, 20 bp, Artificial Sequence
  Description of Artificial Sequence: Synthetic oligonucleotide
  Target: ATXN2; (+) strand; PAM type: NRG; PAM sequence: AGG
gcaccactgcactccagcct

SEQ ID NO: 53049 - DNA, 20 bp, Artificial Sequence
  Description of Artificial Sequence: Synthetic oligonucleotide
  Target: ATXN2; (+) strand; PAM type: NRG; PAM sequence: CAG
ctgcactccagcctaggtga

SEQ ID NO: 53050 - DNA, 20 bp, Artificial Sequence
  Description of Artificial Sequence: Synthetic oligonucleotide
  Target: ATXN2; (+) strand; PAM type: NRG; PAM sequence: GAG
gcactccagcctaggtgaca

SEQ ID NO: 53051 - DNA, 20 bp, Artificial Sequence
  Description of Artificial Sequence: Synthetic oligonucleotide
  Target: ATXN2; (+) strand; PAM type: NRG; PAM sequence: GAG
tccagcctaggtgacagagc

SEQ ID NO: 53052 - DNA, 20 bp, Artificial Sequence
  Description of Artificial Sequence: Synthetic oligonucleotide
  Target: ATXN2; (+) strand; PAM type: NRG; PAM sequence: CGG
gacagagcgagactccgtct

SEQ ID NO: 53053 - DNA, 20 bp, Artificial Sequence
  Description of Artificial Sequence: Synthetic oligonucleotide
  Target: ATXN2; (+) strand; PAM type: NRG; PAM sequence: AAG
agactccgtctcggaaaaaa

SEQ ID NO: 53054 - DNA, 20 bp, Artificial Sequence
  Description of Artificial Sequence: Synthetic oligonucleotide
  Target: ATXN2; (+) strand; PAM type: NRG; PAM sequence: AAG
ggaaaaaaaagaaaaaaaaa

SEQ ID NO: 53055 - DNA, 20 bp, Artificial Sequence
  Description of Artificial Sequence: Synthetic oligonucleotide
  Target: ATXN2; (+) strand; PAM type: NRG; PAM sequence: AAG
aaaaagaaaaaaaaaaagtt

SEQ ID NO: 53056 - DNA, 20 bp, Artificial Sequence
  Description of Artificial Sequence: Synthetic oligonucleotide
  Target: ATXN2; (+) strand; PAM type: NRG; PAM sequence: AGG
aaaagaaaaaaaaaaagtta

SEQ ID NO: 53057 - DNA, 20 bp, Artificial Sequence
  Description of Artificial Sequence: Synthetic oligonucleotide
  Target: ATXN2; (+) strand; PAM type: NRG; PAM sequence: CAG
aaaaaaaaagttaaggttaa

SEQ ID NO: 53058 - DNA, 20 bp, Artificial Sequence
  Description of Artificial Sequence: Synthetic oligonucleotide
  Target: ATXN2; (+) strand; PAM type: NRG; PAM sequence: AAG
ttaaggttaacagctgtgac

SEQ ID NO: 53059 - DNA, 20 bp, Artificial Sequence
  Description of Artificial Sequence: Synthetic oligonucleotide
  Target: ATXN2; (+) strand; PAM type: NRG; PAM sequence: CAG
acaagttttcataaacaacc

SEQ ID NO: 53060 - DNA, 20 bp, Artificial Sequence
  Description of Artificial Sequence: Synthetic oligonucleotide
  Target: ATXN2; (+) strand; PAM type: NRG; PAM sequence: CAG
tcataaaaaaaataccaaac

SEQ ID NO: 53061 - DNA, 20 bp, Artificial Sequence
  Description of Artificial Sequence: Synthetic oligonucleotide
  Target: ATXN2; (+) strand; PAM type: NRG; PAM sequence: AGG
cataaaaaaaataccaaacc

SEQ ID NO: 53062 - DNA, 20 bp, Artificial Sequence
  Description of Artificial Sequence: Synthetic oligonucleotide
  Target: ATXN2; (+) strand; PAM type: NRG; PAM sequence: CGG
aaaaaaataccaaaccaggc

SEQ ID NO: 53063 - DNA, 20 bp, Artificial Sequence
  Description of Artificial Sequence: Synthetic oligonucleotide
  Target: ATXN2; (+) strand; PAM type: NRG; PAM sequence: CGG
ataccaaaccaggccggacg

SEQ ID NO: 53064 - DNA, 20 bp, Artificial Sequence
  Description of Artificial Sequence: Synthetic oligonucleotide
  Target: ATXN2; (+) strand; PAM type: NRG; PAM sequence: TGG
ccaaaccaggccggacgcgg

SEQ ID NO: 53065 - DNA, 20 bp, Artificial Sequence
  Description of Artificial Sequence: Synthetic oligonucleotide
  Target: ATXN2; (+) strand; PAM type: NRG; PAM sequence: CAG
gtggctcatgcctataatcc

SEQ ID NO: 53066 - DNA, 20 bp, Artificial Sequence
  Description of Artificial Sequence: Synthetic oligonucleotide
  Target: ATXN2; (+) strand; PAM type: NRG; PAM sequence: TGG
tgcctataatcccagcactt

SEQ ID NO: 53067 - DNA, 20 bp, Artificial Sequence
  Description of Artificial Sequence: Synthetic oligonucleotide
  Target: ATXN2; (+) strand; PAM type: NRG; PAM sequence: GGG
gcctataatcccagcacttt

SEQ ID NO: 53068 - DNA, 20 bp, Artificial Sequence
  Description of Artificial Sequence: Synthetic oligonucleotide
  Target: ATXN2; (+) strand; PAM type: NRG; PAM sequence: AAG
tataatcccagcactttggg

SEQ ID NO: 53069 - DNA, 20 bp, Artificial Sequence
  Description of Artificial Sequence: Synthetic oligonucleotide
  Target: ATXN2; (+) strand; PAM type: NRG; PAM sequence: GAG
tcccagcactttgggaagcc

SEQ ID NO: 53070 - DNA, 20 bp, Artificial Sequence
  Description of Artificial Sequence: Synthetic oligonucleotide
  Target: ATXN2; (+) strand; PAM type: NRG; PAM sequence: AGG
cccagcactttgggaagccg

SEQ ID NO: 53071 - DNA, 20 bp, Artificial Sequence
  Description of Artificial Sequence: Synthetic oligonucleotide
  Target: ATXN2; (+) strand; PAM type: NRG; PAM sequence: CGG
agcactttgggaagccgagg

SEQ ID NO: 53072 - DNA, 20 bp, Artificial Sequence
  Description of Artificial Sequence: Synthetic oligonucleotide
  Target: ATXN2; (+) strand; PAM type: NRG; PAM sequence: GGG
gcactttgggaagccgaggc

SEQ ID NO: 53073 - DNA, 20 bp, Artificial Sequence
  Description of Artificial Sequence: Synthetic oligonucleotide
  Target: ATXN2; (+) strand; PAM type: NRG; PAM sequence: CAG
ctttgggaagccgaggcggg

SEQ ID NO: 53074 - DNA, 20 bp, Artificial Sequence
  Description of Artificial Sequence: Synthetic oligonucleotide
  Target: ATXN2; (+) strand; PAM type: NRG; PAM sequence: AAG
gaagccgaggcgggcagatc

SEQ ID NO: 53075 - DNA, 20 bp, Artificial Sequence
  Description of Artificial Sequence: Synthetic oligonucleotide
  Target: ATXN2; (+) strand; PAM type: NRG; PAM sequence: GAG
agccgaggcgggcagatcaa

SEQ ID NO: 53076 - DNA, 20 bp, Artificial Sequence
  Description of Artificial Sequence: Synthetic oligonucleotide
  Target: ATXN2; (+) strand; PAM type: NRG; PAM sequence: AGG
gccgaggcgggcagatcaag

SEQ ID NO: 53077 - DNA, 20 bp, Artificial Sequence
  Description of Artificial Sequence: Synthetic oligonucleotide
  Target: ATXN2; (+) strand; PAM type: NRG; PAM sequence: CGG
aggcgggcagatcaagaggt

SEQ ID NO: 53078 - DNA, 20 bp, Artificial Sequence
  Description of Artificial Sequence: Synthetic oligonucleotide
  Target: ATXN2; (+) strand; PAM type: NRG; PAM sequence: GGG
ggcgggcagatcaagaggtc

SEQ ID NO: 53079 - DNA, 20 bp, Artificial Sequence
  Description of Artificial Sequence: Synthetic oligonucleotide
  Target: ATXN2; (+) strand; PAM type: NRG; PAM sequence: GAG
cgggcagatcaagaggtcgg

SEQ ID NO: 53080 - DNA, 20 bp, Artificial Sequence
  Description of Artificial Sequence: Synthetic oligonucleotide
  Target: ATXN2; (+) strand; PAM type: NRG; PAM sequence: GAG
gatcaagaggtcgggagatt

SEQ ID NO: 53081 - DNA, 20 bp, Artificial Sequence
  Description of Artificial Sequence: Synthetic oligonucleotide
  Target: ATXN2; (+) strand; PAM type: NRG; PAM sequence: TGG
tcgggagattgagacaatcc

SEQ ID NO: 53082 - DNA, 20 bp, Artificial Sequence
  Description of Artificial Sequence: Synthetic oligonucleotide
  Target: ATXN2; (+) strand; PAM type: NRG; PAM sequence: CAG
tgagacaatcctggctaaca

SEQ ID NO: 53083 - DNA, 20 bp, Artificial Sequence
  Description of Artificial Sequence: Synthetic oligonucleotide
  Target: ATXN2; (+) strand; PAM type: NRG; PAM sequence: TAG
ttaaaatgcataaaaaaaat

SEQ ID NO: 53084 - DNA, 20 bp, Artificial Sequence
  Description of Artificial Sequence: Synthetic oligonucleotide
  Target: ATXN2; (+) strand; PAM type: NRG; PAM sequence: CGG
aatgcataaaaaaaattagc

SEQ ID NO: 53085 - DNA, 20 bp, Artificial Sequence
  Description of Artificial Sequence: Synthetic oligonucleotide
  Target: ATXN2; (+) strand; PAM type: NRG; PAM sequence: GGG
atgcataaaaaaaattagcc

SEQ ID NO: 53086 - DNA, 20 bp, Artificial Sequence
  Description of Artificial Sequence: Synthetic oligonucleotide
  Target: ATXN2; (+) strand; PAM type: NRG; PAM sequence: TGG
taaaaaaaattagccgggca

SEQ ID NO: 53087 - DNA, 20 bp, Artificial Sequence
  Description of Artificial Sequence: Synthetic oligonucleotide
  Target: ATXN2; (+) strand; PAM type: NRG; PAM sequence: TGG
aaaaaattagccgggcatgg

SEQ ID NO: 53088 - DNA, 20 bp, Artificial Sequence
  Description of Artificial Sequence: Synthetic oligonucleotide
  Target: ATXN2; (+) strand; PAM type: NRG; PAM sequence: CGG
aaattagccgggcatggtgg

SEQ ID NO: 53089 - DNA, 20 bp, Artificial Sequence
  Description of Artificial Sequence: Synthetic oligonucleotide
  Target: ATXN2; (+) strand; PAM type: NRG; PAM sequence: GGG
aattagccgggcatggtggc

SEQ ID NO: 53090 - DNA, 20 bp, Artificial Sequence
  Description of Artificial Sequence: Synthetic oligonucleotide
  Target: ATXN2; (+) strand; PAM type: NRG; PAM sequence: TAG
ggcatggtggcgggcgcatg

SEQ ID NO: 53091 - DNA, 20 bp, Artificial Sequence
  Description of Artificial Sequence: Synthetic oligonucleotide
  Target: ATXN2; (+) strand; PAM type: NRG; PAM sequence: CAG
gtggcgggcgcatgtagtcc

SEQ ID NO: 53092 - DNA, 20 bp, Artificial Sequence
  Description of Artificial Sequence: Synthetic oligonucleotide
  Target: ATXN2; (+) strand; PAM type: NRG; PAM sequence: CGG
cgcatgtagtcccagctact

SEQ ID NO: 53093 - DNA, 20 bp, Artificial Sequence
  Description of Artificial Sequence: Synthetic oligonucleotide
  Target: ATXN2; (+) strand; PAM type: NRG; PAM sequence: GGG
gcatgtagtcccagctactc

SEQ ID NO: 53094 - DNA, 20 bp, Artificial Sequence
  Description of Artificial Sequence: Synthetic oligonucleotide
  Target: ATXN2; (+) strand; PAM type: NRG; PAM sequence: GAG
atgtagtcccagctactcgg

SEQ ID NO: 53095 - DNA, 20 bp, Artificial Sequence
  Description of Artificial Sequence: Synthetic oligonucleotide
  Target: ATXN2; (+) strand; PAM type: NRG; PAM sequence: AGG
tgtagtcccagctactcggg

SEQ ID NO: 53096 - DNA, 20 bp, Artificial Sequence
  Description of Artificial Sequence: Synthetic oligonucleotide
  Target: ATXN2; (+) strand; PAM type: NRG; PAM sequence: GAG
tcccagctactcgggaggct

SEQ ID NO: 53097 - DNA, 20 bp, Artificial Sequence
  Description of Artificial Sequence: Synthetic oligonucleotide
  Target: ATXN2; (+) strand; PAM type: NRG; PAM sequence: AGG
cccagctactcgggaggctg

SEQ ID NO: 53098 - DNA, 20 bp, Artificial Sequence
  Description of Artificial Sequence: Synthetic oligonucleotide
  Target: ATXN2; (+) strand; PAM type: NRG; PAM sequence: CAG
agctactcgggaggctgagg

SEQ ID NO: 53099 - DNA, 20 bp, Artificial Sequence
  Description of Artificial Sequence: Synthetic oligonucleotide
  Target: ATXN2; (+) strand; PAM type: NRG; PAM sequence: AGG
gctactcgggaggctgaggc

SEQ ID NO: 53100 - DNA, 20 bp, Artificial Sequence
  Description of Artificial Sequence: Synthetic oligonucleotide
  Target: ATXN2; (+) strand; PAM type: NRG; PAM sequence: GAG
tactcgggaggctgaggcag

SEQ ID NO: 53101 - DNA, 20 bp, Artificial Sequence
  Description of Artificial Sequence: Synthetic oligonucleotide
  Target: ATXN2; (+) strand; PAM type: NRG; PAM sequence: TGG
gggaggctgaggcaggagaa

SEQ ID NO: 53102 - DNA, 20 bp, Artificial Sequence
  Description of Artificial Sequence: Synthetic oligonucleotide
  Target: ATXN2; (+) strand; PAM type: NRG; PAM sequence: TGG
gcaggagaatggcatgaacc

SEQ ID NO: 53103 - DNA, 20 bp, Artificial Sequence
  Description of Artificial Sequence: Synthetic oligonucleotide
  Target: ATXN2; (+) strand; PAM type: NRG; PAM sequence: GGG
caggagaatggcatgaacct

SEQ ID NO: 53104 - DNA, 20 bp, Artificial Sequence
  Description of Artificial Sequence: Synthetic oligonucleotide
  Target: ATXN2; (+) strand; PAM type: NRG; PAM sequence: GAG
ggagaatggcatgaacctgg

SEQ ID NO: 53105 - DNA, 20 bp, Artificial Sequence
  Description of Artificial Sequence: Synthetic oligonucleotide
  Target: ATXN2; (+) strand; PAM type: NRG; PAM sequence: AGG
gagaatggcatgaacctggg

SEQ ID NO: 53106 - DNA, 20 bp, Artificial Sequence
  Description of Artificial Sequence: Synthetic oligonucleotide
  Target: ATXN2; (+) strand; PAM type: NRG; PAM sequence: TGG
aatggcatgaacctgggagg

SEQ ID NO: 53107 - DNA, 20 bp, Artificial Sequence
  Description of Artificial Sequence: Synthetic oligonucleotide
  Target: ATXN2; (+) strand; PAM type: NRG; PAM sequence: GAG
tggcatgaacctgggaggtg

SEQ ID NO: 53108 - DNA, 20 bp, Artificial Sequence
  Description of Artificial Sequence: Synthetic oligonucleotide
  Target: ATXN2; (+) strand; PAM type: NRG; PAM sequence: CAG
aacctgggaggtggagcttg

SEQ ID NO: 53109 - DNA, 20 bp, Artificial Sequence
  Description of Artificial Sequence: Synthetic oligonucleotide
  Target: ATXN2; (+) strand; PAM type: NRG; PAM sequence: GAG
tgggaggtggagcttgcagt

SEQ ID NO: 53110 - DNA, 20 bp, Artificial Sequence
  Description of Artificial Sequence: Synthetic oligonucleotide
  Target: ATXN2; (+) strand; PAM type: NRG; PAM sequence: GAG
ggtggagcttgcagtgagct

SEQ ID NO: 53111 - DNA, 20 bp, Artificial Sequence
  Description of Artificial Sequence: Synthetic oligonucleotide
  Target: ATXN2; (+) strand; PAM type: NRG; PAM sequence: TAG
gagattgtgtcaccgcactc

SEQ ID NO: 53112 - DNA, 20 bp, Artificial Sequence
  Description of Artificial Sequence: Synthetic oligonucleotide
  Target: ATXN2; (+) strand; PAM type: NRG; PAM sequence: TGG
tgtgtcaccgcactctagcc

SEQ ID NO: 53113 - DNA, 20 bp, Artificial Sequence
  Description of Artificial Sequence: Synthetic oligonucleotide
  Target: ATXN2; (+) strand; PAM type: NRG; PAM sequence: GGG
gtgtcaccgcactctagcct

SEQ ID NO: 53114 - DNA, 20 bp, Artificial Sequence
  Description of Artificial Sequence: Synthetic oligonucleotide
  Target: ATXN2; (+) strand; PAM type: NRG; PAM sequence: CAG
ccgcactctagcctgggcga

SEQ ID NO: 53115 - DNA, 20 bp, Artificial Sequence
  Description of Artificial Sequence: Synthetic oligonucleotide
  Target: ATXN2; (+) strand; PAM type: NRG; PAM sequence: GAG
gcactctagcctgggcgaca

SEQ ID NO: 53116 - DNA, 20 bp, Artificial Sequence
  Description of Artificial Sequence: Synthetic oligonucleotide
  Target: ATXN2; (+) strand; PAM type: NRG; PAM sequence: GAG
tctagcctgggcgacagagc

SEQ ID NO: 53117 - DNA, 20 bp, Artificial Sequence
  Description of Artificial Sequence: Synthetic oligonucleotide
  Target: ATXN2; (+) strand; PAM type: NRG; PAM sequence: TGG
aaaaaaaaactaaaccaaac

SEQ ID NO: 53118 - DNA, 20 bp, Artificial Sequence
  Description of Artificial Sequence: Synthetic oligonucleotide
  Target: ATXN2; (+) strand; PAM type: NRG; PAM sequence: CGG
aaactaaaccaaactggtca

SEQ ID NO: 53119 - DNA, 20 bp, Artificial Sequence
  Description of Artificial Sequence: Synthetic oligonucleotide
  Target: ATXN2; (+) strand; PAM type: NRG; PAM sequence: TGG
ctaaaccaaactggtcacgg

SEQ ID NO: 53120 - DNA, 20 bp, Artificial Sequence
  Description of Artificial Sequence: Synthetic oligonucleotide
  Target: ATXN2; (+) strand; PAM type: NRG; PAM sequence: CAG
gtggctcacacctgtaatcc

SEQ ID NO: 53121 - DNA, 20 bp, Artificial Sequence
  Description of Artificial Sequence: Synthetic oligonucleotide
  Target: ATXN2; (+) strand; PAM type: NRG; PAM sequence: TGG
cacctgtaatcccagcactt

SEQ ID NO: 53122 - DNA, 20 bp, Artificial Sequence
  Description of Artificial Sequence: Synthetic oligonucleotide
  Target: ATXN2; (+) strand; PAM type: NRG; PAM sequence: GGG
acctgtaatcccagcacttt

SEQ ID NO: 53123 - DNA, 20 bp, Artificial Sequence
  Description of Artificial Sequence: Synthetic oligonucleotide
  Target: ATXN2; (+) strand; PAM type: NRG; PAM sequence: GAG
ctgtaatcccagcactttgg

SEQ ID NO: 53124 - DNA, 20 bp, Artificial Sequence
  Description of Artificial Sequence: Synthetic oligonucleotide
  Target: ATXN2; (+) strand; PAM type: NRG; PAM sequence: AGG
tgtaatcccagcactttggg

SEQ ID NO: 53125 - DNA, 20 bp, Artificial Sequence
  Description of Artificial Sequence: Synthetic oligonucleotide
  Target: ATXN2; (+) strand; PAM type: NRG; PAM sequence: GAG
tcccagcactttgggaggac

SEQ ID NO: 53126 - DNA, 20 bp, Artificial Sequence
  Description of Artificial Sequence: Synthetic oligonucleotide
  Target: ATXN2; (+) strand; PAM type: NRG; PAM sequence: AGG
cccagcactttgggaggacg

SEQ ID NO: 53127 - DNA, 20 bp, Artificial Sequence
  Description of Artificial Sequence: Synthetic oligonucleotide
  Target: ATXN2; (+) strand; PAM type: NRG; PAM sequence: CGG
agcactttgggaggacgagg

SEQ ID NO: 53128 - DNA, 20 bp, Artificial Sequence
  Description of Artificial Sequence: Synthetic oligonucleotide
  Target: ATXN2; (+) strand; PAM type: NRG; PAM sequence: GGG
gcactttgggaggacgaggc

SEQ ID NO: 53129 - DNA, 20 bp, Artificial Sequence
  Description of Artificial Sequence: Synthetic oligonucleotide
  Target: ATXN2; (+) strand; PAM type: NRG; PAM sequence: TGG
ctttgggaggacgaggcggg

SEQ ID NO: 53130 - DNA, 20 bp, Artificial Sequence
  Description of Artificial Sequence: Synthetic oligonucleotide
  Target: ATXN2; (+) strand; PAM type: NRG; PAM sequence: AAG
acgaggcgggtggatcatct

SEQ ID NO: 53131 - DNA, 20 bp, Artificial Sequence
  Description of Artificial Sequence: Synthetic oligonucleotide
  Target: ATXN2; (+) strand; PAM type: NRG; PAM sequence: AGG
cgaggcgggtggatcatcta

SEQ ID NO: 53132 - DNA, 20 bp, Artificial Sequence
  Description of Artificial Sequence: Synthetic oligonucleotide
  Target: ATXN2; (+) strand; PAM type: NRG; PAM sequence: CAG
gcgggtggatcatctaaggt

SEQ ID NO: 53133 - DNA, 20 bp, Artificial Sequence
  Description of Artificial Sequence: Synthetic oligonucleotide
  Target: ATXN2; (+) strand; PAM type: NRG; PAM sequence: AGG
cgggtggatcatctaaggtc

SEQ ID NO: 53134 - DNA, 20 bp, Artificial Sequence
  Description of Artificial Sequence: Synthetic oligonucleotide
  Target: ATXN2; (+) strand; PAM type: NRG; PAM sequence: GAG
ggtggatcatctaaggtcag

SEQ ID NO: 53135 - DNA, 20 bp, Artificial Sequence
  Description of Artificial Sequence: Synthetic oligonucleotide
  Target: ATXN2; (+) strand; PAM type: NRG; PAM sequence: GAG
tcatctaaggtcaggagttc

SEQ ID NO: 53136 - DNA, 20 bp, Artificial Sequence
  Description of Artificial Sequence: Synthetic oligonucleotide
  Target: ATXN2; (+) strand; PAM type: NRG; PAM sequence: CAG
taaggtcaggagttcgagac

SEQ ID NO: 53137 - DNA, 20 bp, Artificial Sequence
  Description of Artificial Sequence: Synthetic oligonucleotide
  Target: ATXN2; (+) strand; PAM type: NRG; PAM sequence: TGG
tcaggagttcgagaccagcc

SEQ ID NO: 53138 - DNA, 20 bp, Artificial Sequence
  Description of Artificial Sequence: Synthetic oligonucleotide
  Target: ATXN2; (+) strand; PAM type: NRG; PAM sequence: TAG
tctactaaaaatacaaaaat

SEQ ID NO: 53139 - DNA, 20 bp, Artificial Sequence
  Description of Artificial Sequence: Synthetic oligonucleotide
  Target: ATXN2; (+) strand; PAM type: NRG; PAM sequence: CAG
ctaaaaatacaaaaattagc

SEQ ID NO: 53140 - DNA, 20 bp, Artificial Sequence
  Description of Artificial Sequence: Synthetic oligonucleotide
  Target: ATXN2; (+) strand; PAM type: NRG; PAM sequence: AGG
taaaaatacaaaaattagcc

SEQ ID NO: 53141 - DNA, 20 bp, Artificial Sequence
  Description of Artificial Sequence: Synthetic oligonucleotide
  Target: ATXN2; (+) strand; PAM type: NRG; PAM sequence: TGG
atacaaaaattagccaggca

SEQ ID NO: 53142 - DNA, 20 bp, Artificial Sequence
  Description of Artificial Sequence: Synthetic oligonucleotide
  Target: ATXN2; (+) strand; PAM type: NRG; PAM sequence: TGG
caaaaattagccaggcatgg

SEQ ID NO: 53143 - DNA, 20 bp, Artificial Sequence
  Description of Artificial Sequence: Synthetic oligonucleotide
  Target: ATXN2; (+) strand; PAM type: NRG; PAM sequence: CAG
tagccaggcatggtggcaca

SEQ ID NO: 53144 - DNA, 20 bp, Artificial Sequence
  Description of Artificial Sequence: Synthetic oligonucleotide
  Target: ATXN2; (+) strand; PAM type: NRG; PAM sequence: CAG
gtggcacacagctgttatcc

SEQ ID NO: 53145 - DNA, 20 bp, Artificial Sequence
  Description of Artificial Sequence: Synthetic oligonucleotide
  Target: ATXN2; (+) strand; PAM type: NRG; PAM sequence: CAG
cagctgttatcccagctact

SEQ ID NO: 53146 - DNA, 20 bp, Artificial Sequence
  Description of Artificial Sequence: Synthetic oligonucleotide
  Target: ATXN2; (+) strand; PAM type: NRG; PAM sequence: AGG
agctgttatcccagctactc

SEQ ID NO: 53147 - DNA, 20 bp, Artificial Sequence
  Description of Artificial Sequence: Synthetic oligonucleotide
  Target: ATXN2; (+) strand; PAM type: NRG; PAM sequence: GAG
ctgttatcccagctactcag

SEQ ID NO: 53148 - DNA, 20 bp, Artificial Sequence
  Description of Artificial Sequence: Synthetic oligonucleotide
  Target: ATXN2; (+) strand; PAM type: NRG; PAM sequence: AGG
tgttatcccagctactcagg

SEQ ID NO: 53149 - DNA, 20 bp, Artificial Sequence
  Description of Artificial Sequence: Synthetic oligonucleotide
  Target: ATXN2; (+) strand; PAM type: NRG; PAM sequence: GAG
tcccagctactcaggaggct

SEQ ID NO: 53150 - DNA, 20 bp, Artificial Sequence
  Description of Artificial Sequence: Synthetic oligonucleotide
  Target: ATXN2; (+) strand; PAM type: NRG; PAM sequence: AGG
cccagctactcaggaggctg

SEQ ID NO: 53151 - DNA, 20 bp, Artificial Sequence
  Description of Artificial Sequence: Synthetic oligonucleotide
  Target: ATXN2; (+) strand; PAM type: NRG; PAM sequence: CAG
agctactcaggaggctgagg

SEQ ID NO: 53152 - DNA, 20 bp, Artificial Sequence
  Description of Artificial Sequence: Synthetic oligonucleotide
  Target: ATXN2; (+) strand; PAM type: NRG; PAM sequence: AGG
gctactcaggaggctgaggc

SEQ ID NO: 53153 - DNA, 20 bp, Artificial Sequence
  Description of Artificial Sequence: Synthetic oligonucleotide
  Target: ATXN2; (+) strand; PAM type: NRG; PAM sequence: TAG
gcaggacaatcacttgaacc

SEQ ID NO: 53154 - DNA, 20 bp, Artificial Sequence
  Description of Artificial Sequence: Synthetic oligonucleotide
  Target: ATXN2; (+) strand; PAM type: NRG; PAM sequence: AGG
caggacaatcacttgaacct

SEQ ID NO: 53155 - DNA, 20 bp, Artificial Sequence
  Description of Artificial Sequence: Synthetic oligonucleotide
  Target: ATXN2; (+) strand; PAM type: NRG; PAM sequence: GAG
ggacaatcacttgaacctag

SEQ ID NO: 53156 - DNA, 20 bp, Artificial Sequence
  Description of Artificial Sequence: Synthetic oligonucleotide
  Target: ATXN2; (+) strand; PAM type: NRG; PAM sequence: AGG
gacaatcacttgaacctagg

SEQ ID NO: 53157 - DNA, 20 bp, Artificial Sequence
  Description of Artificial Sequence: Synthetic oligonucleotide
  Target: ATXN2; (+) strand; PAM type: NRG; PAM sequence: CGG
aatcacttgaacctaggagg

SEQ ID NO: 53158 - DNA, 20 bp, Artificial Sequence
  Description of Artificial Sequence: Synthetic oligonucleotide
  Target: ATXN2; (+) strand; PAM type: NRG; PAM sequence: GAG
tcacttgaacctaggaggcg

SEQ ID NO: 53159 - DNA, 20 bp, Artificial Sequence
  Description of Artificial Sequence: Synthetic oligonucleotide
  Target: ATXN2; (+) strand; PAM type: NRG; PAM sequence: AGG
cacttgaacctaggaggcgg

SEQ ID NO: 53160 - DNA, 20 bp, Artificial Sequence
  Description of Artificial Sequence: Synthetic oligonucleotide
  Target: ATXN2; (+) strand; PAM type: NRG; PAM sequence: CAG
aacctaggaggcggaggttg

SEQ ID NO: 53161 - DNA, 20 bp, Artificial Sequence
  Description of Artificial Sequence: Synthetic oligonucleotide
  Target: ATXN2; (+) strand; PAM type: NRG; PAM sequence: AAG
taggaggcggaggttgcagt

SEQ ID NO: 53162 - DNA, 20 bp, Artificial Sequence
  Description of Artificial Sequence: Synthetic oligonucleotide
  Target: ATXN2; (+) strand; PAM type: NRG; PAM sequence: GAG
ggcggaggttgcagtaagcc

SEQ ID NO: 53163 - DNA, 20 bp, Artificial Sequence
  Description of Artificial Sequence: Synthetic oligonucleotide
  Target: ATXN2; (+) strand; PAM type: NRG; PAM sequence: CAG
gagatcacatcactgcattc

SEQ ID NO: 53164 - DNA, 20 bp, Artificial Sequence
  Description of Artificial Sequence: Synthetic oligonucleotide
  Target: ATXN2; (+) strand; PAM type: NRG; PAM sequence: TGG
cacatcactgcattccagcc

SEQ ID NO: 53165 - DNA, 20 bp, Artificial Sequence
  Description of Artificial Sequence: Synthetic oligonucleotide
  Target: ATXN2; (+) strand; PAM type: NRG; PAM sequence: GGG
acatcactgcattccagcct

SEQ ID NO: 53166 - DNA, 20 bp, Artificial Sequence
  Description of Artificial Sequence: Synthetic oligonucleotide
  Target: ATXN2; (+) strand; PAM type: NRG; PAM sequence: CAG
ctgcattccagcctgggtga

SEQ ID NO: 53167 - DNA, 20 bp, Artificial Sequence
  Description of Artificial Sequence: Synthetic oligonucleotide
  Target: ATXN2; (+) strand; PAM type: NRG; PAM sequence: AGG
tgcattccagcctgggtgac

SEQ ID NO: 53168 - DNA, 20 bp, Artificial Sequence
  Description of Artificial Sequence: Synthetic oligonucleotide
  Target: ATXN2; (+) strand; PAM type: NRG; PAM sequence: GGG
gcattccagcctgggtgaca

SEQ ID NO: 53169 - DNA, 20 bp, Artificial Sequence
  Description of Artificial Sequence: Synthetic oligonucleotide
  Target: ATXN2; (+) strand; PAM type: NRG; PAM sequence: AAG
tccagcctgggtgacagggt

SEQ ID NO: 53170 - DNA, 20 bp, Artificial Sequence
  Description of Artificial Sequence: Synthetic oligonucleotide
  Target: ATXN2; (+) strand; PAM type: NRG; PAM sequence: CAG
ataataataatttaaaaaac

SEQ ID NO: 53171 - DNA, 20 bp, Artificial Sequence
  Description of Artificial Sequence: Synthetic oligonucleotide
  Target: ATXN2; (+) strand; PAM type: NRG; PAM sequence: CAG
taataatttaaaaaaccagc

SEQ ID NO: 53172 - DNA, 20 bp, Artificial Sequence
  Description of Artificial Sequence: Synthetic oligonucleotide
  Target: ATXN2; (+) strand; PAM type: NRG; PAM sequence: AGG
aataatttaaaaaaccagcc

SEQ ID NO: 53173 - DNA, 20 bp, Artificial Sequence
  Description of Artificial Sequence: Synthetic oligonucleotide
  Target: ATXN2; (+) strand; PAM type: NRG; PAM sequence: TAG
tttaaaaaaccagccaggca

SEQ ID NO: 53174 - DNA, 20 bp, Artificial Sequence
  Description of Artificial Sequence: Synthetic oligonucleotide
  Target: ATXN2; (+) strand; PAM type: NRG; PAM sequence: TGG
aaaaaaccagccaggcatag

SEQ ID NO: 53175 - DNA, 20 bp, Artificial Sequence
  Description of Artificial Sequence: Synthetic oligonucleotide
  Target: ATXN2; (+) strand; PAM type: NRG; PAM sequence: CAG
gtggctcacacctgtaatcc

SEQ ID NO: 53176 - DNA, 20 bp, Artificial Sequence
  Description of Artificial Sequence: Synthetic oligonucleotide
  Target: ATXN2; (+) strand; PAM type: NRG; PAM sequence: TGG
cacctgtaatcccagcacct

SEQ ID NO: 53177 - DNA, 20 bp, Artificial Sequence
  Description of Artificial Sequence: Synthetic oligonucleotide
  Target: ATXN2; (+) strand; PAM type: NRG; PAM sequence: GGG
acctgtaatcccagcacctt

SEQ ID NO: 53178 - DNA, 20 bp, Artificial Sequence
  Description of Artificial Sequence: Synthetic oligonucleotide
  Target: ATXN2; (+) strand; PAM type: NRG; PAM sequence: GAG
ctgtaatcccagcaccttgg

SEQ ID NO: 53179 - DNA, 20 bp, Artificial Sequence
  Description of Artificial Sequence: Synthetic oligonucleotide
  Target: ATXN2; (+) strand; PAM type: NRG; PAM sequence: AGG
tgtaatcccagcaccttggg

SEQ ID NO: 53180 - DNA, 20 bp, Artificial Sequence
  Description of Artificial Sequence: Synthetic oligonucleotide
  Target: ATXN2; (+) strand; PAM type: NRG; PAM sequence: AAG
tcccagcaccttgggaggcc

SEQ ID NO: 53181 - DNA, 20 bp, Artificial Sequence
  Description of Artificial Sequence: Synthetic oligonucleotide
  Target: ATXN2; (+) strand; PAM type: NRG; PAM sequence: AGG
cccagcaccttgggaggcca

SEQ ID NO: 53182 - DNA, 20 bp, Artificial Sequence
  Description of Artificial Sequence: Synthetic oligonucleotide
  Target: ATXN2; (+) strand; PAM type: NRG; PAM sequence: GAG
cagcaccttgggaggccaag

SEQ ID NO: 53183 - DNA, 20 bp, Artificial Sequence
  Description of Artificial Sequence: Synthetic oligonucleotide
  Target: ATXN2; (+) strand; PAM type: NRG; PAM sequence: AGG
agcaccttgggaggccaagg

SEQ ID NO: 53184 - DNA, 20 bp, Artificial Sequence
  Description of Artificial Sequence: Synthetic oligonucleotide
  Target: ATXN2; (+) strand; PAM type: NRG; PAM sequence: GGG
gcaccttgggaggccaagga

SEQ ID NO: 53185 - DNA, 20 bp, Artificial Sequence
  Description of Artificial Sequence: Synthetic oligonucleotide
  Target: ATXN2; (+) strand; PAM type: NRG; PAM sequence: GAG
ccaaggagggcaaattgttt

SEQ ID NO: 53186 - DNA, 20 bp, Artificial Sequence
  Description of Artificial Sequence: Synthetic oligonucleotide
  Target: ATXN2; (+) strand; PAM type: NRG; PAM sequence: AGG
caaggagggcaaattgtttg

SEQ ID NO: 53187 - DNA, 20 bp, Artificial Sequence
  Description of Artificial Sequence: Synthetic oligonucleotide
  Target: ATXN2; (+) strand; PAM type: NRG; PAM sequence: CAG
gagggcaaattgtttgaggt

SEQ ID NO: 53188 - DNA, 20 bp, Artificial Sequence
  Description of Artificial Sequence: Synthetic oligonucleotide
  Target: ATXN2; (+) strand; PAM type: NRG; PAM sequence: AGG
agggcaaattgtttgaggtc

SEQ ID NO: 53189 - DNA, 20 bp, Artificial Sequence
  Description of Artificial Sequence: Synthetic oligonucleotide
  Target: ATXN2; (+) strand; PAM type: NRG; PAM sequence: AAG
ttgtttgaggtcaggaattc

SEQ ID NO: 53190 - DNA, 20 bp, Artificial Sequence
  Description of Artificial Sequence: Synthetic oligonucleotide
  Target: ATXN2; (+) strand; PAM type: NRG; PAM sequence: AGG
tgtttgaggtcaggaattca

SEQ ID NO: 53191 - DNA, 20 bp, Artificial Sequence
  Description of Artificial Sequence: Synthetic oligonucleotide
  Target: ATXN2; (+) strand; PAM type: NRG; PAM sequence: TGG
tcaggaattcaaggccatcc

SEQ ID NO: 53192 - DNA, 20 bp, Artificial Sequence
  Description of Artificial Sequence: Synthetic oligonucleotide
  Target: ATXN2; (+) strand; PAM type: NRG; PAM sequence: GGG
caggaattcaaggccatcct

SEQ ID NO: 53193 - DNA, 20 bp, Artificial Sequence
  Description of Artificial Sequence: Synthetic oligonucleotide
  Target: ATXN2; (+) strand; PAM type: NRG; PAM sequence: CAG
ttcaaggccatcctgggcaa

SEQ ID NO: 53194 - DNA, 20 bp, Artificial Sequence
  Description of Artificial Sequence: Synthetic oligonucleotide
  Target: ATXN2; (+) strand; PAM type: NRG; PAM sequence: AGG
tcaaggccatcctgggcaac

SEQ ID NO: 53195 - DNA, 20 bp, Artificial Sequence
  Description of Artificial Sequence: Synthetic oligonucleotide
  Target: ATXN2; (+) strand; PAM type: NRG; PAM sequence: AAG
caaaataaaaacaaacaaaa

SEQ ID NO: 53196 - DNA, 20 bp, Artificial Sequence
  Description of Artificial Sequence: Synthetic oligonucleotide
  Target: ATXN2; (+) strand; PAM type: NRG; PAM sequence: TAG
ataaaaacaaacaaaaaagc

SEQ ID NO: 53197 - DNA, 20 bp, Artificial Sequence
  Description of Artificial Sequence: Synthetic oligonucleotide
  Target: ATXN2; (+) strand; PAM type: NRG; PAM sequence: AGG
taaaaacaaacaaaaaagct

SEQ ID NO: 53198 - DNA, 20 bp, Artificial Sequence
  Description of Artificial Sequence: Synthetic oligonucleotide
  Target: ATXN2; (+) strand; PAM type: NRG; PAM sequence: CAG
acaaacaaaaaagctaggcg

SEQ ID NO: 53199 - DNA, 20 bp, Artificial Sequence
  Description of Artificial Sequence: Synthetic oligonucleotide
  Target: ATXN2; (+) strand; PAM type: NRG; PAM sequence: TGG
aacaaaaaagctaggcgcag

SEQ ID NO: 53200 - DNA, 20 bp, Artificial Sequence
  Description of Artificial Sequence: Synthetic oligonucleotide
  Target: ATXN2; (+) strand; PAM type: NRG; PAM sequence: CAG
gtggcttatgcctgtaattc

SEQ ID NO: 53201 - DNA, 20 bp, Artificial Sequence
  Description of Artificial Sequence: Synthetic oligonucleotide
  Target: ATXN2; (+) strand; PAM type: NRG; PAM sequence: CAG
tgcctgtaattccagcactt

SEQ ID NO: 53202 - DNA, 20 bp, Artificial Sequence
  Description of Artificial Sequence: Synthetic oligonucleotide
  Target: ATXN2; (+) strand; PAM type: NRG; PAM sequence: AGG
gcctgtaattccagcacttc

SEQ ID NO: 53203 - DNA, 20 bp, Artificial Sequence
  Description of Artificial Sequence: Synthetic oligonucleotide
  Target: ATXN2; (+) strand; PAM type: NRG; PAM sequence: GAG
ctgtaattccagcacttcag

SEQ ID NO: 53204 - DNA, 20 bp, Artificial Sequence
  Description of Artificial Sequence: Synthetic oligonucleotide
  Target: ATXN2; (+) strand; PAM type: NRG; PAM sequence: AGG
tgtaattccagcacttcagg

SEQ ID NO: 53205 - DNA, 20 bp, Artificial Sequence
  Description of Artificial Sequence: Synthetic oligonucleotide
  Target: ATXN2; (+) strand; PAM type: NRG; PAM sequence: AAG
ttccagcacttcaggaggcc

SEQ ID NO: 53206 - DNA, 20 bp, Artificial Sequence
  Description of Artificial Sequence: Synthetic oligonucleotide
  Target: ATXN2; (+) strand; PAM type: NRG; PAM sequence: AGG
tccagcacttcaggaggcca

SEQ ID NO: 53207 - DNA, 20 bp, Artificial Sequence
  Description of Artificial Sequence: Synthetic oligonucleotide
  Target: ATXN2; (+) strand; PAM type: NRG; PAM sequence: TGG
cttcaggaggccaaggtata

SEQ ID NO: 53208 - DNA, 20 bp, Artificial Sequence
  Description of Artificial Sequence: Synthetic oligonucleotide
  Target: ATXN2; (+) strand; PAM type: NRG; PAM sequence: GAG
ccaaggtatatggatcacct

SEQ ID NO: 53209 - DNA, 20 bp, Artificial Sequence
  Description of Artificial Sequence: Synthetic oligonucleotide
  Target: ATXN2; (+) strand; PAM type: NRG; PAM sequence: AGG
caaggtatatggatcacctg

SEQ ID NO: 53210 - DNA, 20 bp, Artificial Sequence
  Description of Artificial Sequence: Synthetic oligonucleotide
  Target: ATXN2; (+) strand; PAM type: NRG; PAM sequence: CGG
gtatatggatcacctgaggt

SEQ ID NO: 53211 - DNA, 20 bp, Artificial Sequence
  Description of Artificial Sequence: Synthetic oligonucleotide
  Target: ATXN2; (+) strand; PAM type: NRG; PAM sequence: GGG
tatatggatcacctgaggtc

SEQ ID NO: 53212 - DNA, 20 bp, Artificial Sequence
  Description of Artificial Sequence: Synthetic oligonucleotide
  Target: ATXN2; (+) strand; PAM type: NRG; PAM sequence: GAG
tatggatcacctgaggtcgg

SEQ ID NO: 53213 - DNA, 20 bp, Artificial Sequence
  Description of Artificial Sequence: Synthetic oligonucleotide
  Target: ATXN2; (+) strand; PAM type: NRG; PAM sequence: GAG
tcacctgaggtcgggagttc

SEQ ID NO: 53214 - DNA, 20 bp, Artificial Sequence
  Description of Artificial Sequence: Synthetic oligonucleotide
  Target: ATXN2; (+) strand; PAM type: NRG; PAM sequence: CAG
tgaggtcgggagttcgagac

SEQ ID NO: 53215 - DNA, 20 bp, Artificial Sequence
  Description of Artificial Sequence: Synthetic oligonucleotide
  Target: ATXN2; (+) strand; PAM type: NRG; PAM sequence: TGG
tcgggagttcgagaccagcc

SEQ ID NO: 53216 - DNA, 20 bp, Artificial Sequence
  Description of Artificial Sequence: Synthetic oligonucleotide
  Target: ATXN2; (+) strand; PAM type: NRG; PAM sequence: TAG
tctaccaataatacaaaaat

SEQ ID NO: 53217 - DNA, 20 bp, Artificial Sequence
  Description of Artificial Sequence: Synthetic oligonucleotide
  Target: ATXN2; (+) strand; PAM type: NRG; PAM sequence: CAG
ccaataatacaaaaattagc

SEQ ID NO: 53218 - DNA, 20 bp, Artificial Sequence
  Description of Artificial Sequence: Synthetic oligonucleotide
  Target: ATXN2; (+) strand; PAM type: NRG; PAM sequence: AGG
caataatacaaaaattagcc

SEQ ID NO: 53219 - DNA, 20 bp, Artificial Sequence
  Description of Artificial Sequence: Synthetic oligonucleotide
  Target: ATXN2; (+) strand; PAM type: NRG; PAM sequence: TAG
atacaaaaattagccaggtg

SEQ ID NO: 53220 - DNA, 20 bp, Artificial Sequence
  Description of Artificial Sequence: Synthetic oligonucleotide
  Target: ATXN2; (+) strand; PAM type: NRG; PAM sequence: TGG
caaaaattagccaggtgtag

SEQ ID NO: 53221 - DNA, 20 bp, Artificial Sequence
  Description of Artificial Sequence: Synthetic oligonucleotide
  Target: ATXN2; (+) strand; PAM type: NRG; PAM sequence: CAG
gtggcgcatgcctataatcc

SEQ ID NO: 53222 - DNA, 20 bp, Artificial Sequence
  Description of Artificial Sequence: Synthetic oligonucleotide
  Target: ATXN2; (+) strand; PAM type: NRG; PAM sequence: CGG
tgcctataatcccagctact

SEQ ID NO: 53223 - DNA, 20 bp, Artificial Sequence
  Description of Artificial Sequence: Synthetic oligonucleotide
  Target: ATXN2; (+) strand; PAM type: NRG; PAM sequence: GGG
gcctataatcccagctactc

SEQ ID NO: 53224 - DNA, 20 bp, Artificial Sequence
  Description of Artificial Sequence: Synthetic oligonucleotide
  Target: ATXN2; (+) strand; PAM type: NRG; PAM sequence: GAG
ctataatcccagctactcgg

SEQ ID NO: 53225 - DNA, 20 bp, Artificial Sequence
  Description of Artificial Sequence: Synthetic oligonucleotide
  Target: ATXN2; (+) strand; PAM type: NRG; PAM sequence: AGG
tataatcccagctactcggg

SEQ ID NO: 53226 - DNA, 20 bp, Artificial Sequence
  Description of Artificial Sequence: Synthetic oligonucleotide
  Target: ATXN2; (+) strand; PAM type: NRG; PAM sequence: GAG
tcccagctactcgggaggct

SEQ ID NO: 53227 - DNA, 20 bp, Artificial Sequence
  Description of Artificial Sequence: Synthetic oligonucleotide
  Target: ATXN2; (+) strand; PAM type: NRG; PAM sequence: AGG
cccagctactcgggaggctg

SEQ ID NO: 53228 - DNA, 20 bp, Artificial Sequence
  Description of Artificial Sequence: Synthetic oligonucleotide
  Target: ATXN2; (+) strand; PAM type: NRG; PAM sequence: GAG
tactcgggaggctgaggcat

SEQ ID NO: 53229 - DNA, 20 bp, Artificial Sequence
  Description of Artificial Sequence: Synthetic oligonucleotide
  Target: ATXN2; (+) strand; PAM type: NRG; PAM sequence: AAG
catgagaatcatttgaacgc

SEQ ID NO: 53230 - DNA, 20 bp, Artificial Sequence
  Description of Artificial Sequence: Synthetic oligonucleotide
  Target: ATXN2; (+) strand; PAM type: NRG; PAM sequence: GAG
tgagaatcatttgaacgcaa

SEQ ID NO: 53231 - DNA, 20 bp, Artificial Sequence
  Description of Artificial Sequence: Synthetic oligonucleotide
  Target: ATXN2; (+) strand; PAM type: NRG; PAM sequence: AGG
gagaatcatttgaacgcaag

SEQ ID NO: 53232 - DNA, 20 bp, Artificial Sequence
  Description of Artificial Sequence: Synthetic oligonucleotide
  Target: ATXN2; (+) strand; PAM type: NRG; PAM sequence: CAG
aatcatttgaacgcaagagg

SEQ ID NO: 53233 - DNA, 20 bp, Artificial Sequence
  Description of Artificial Sequence: Synthetic oligonucleotide
  Target: ATXN2; (+) strand; PAM type: NRG; PAM sequence: GAG
tcatttgaacgcaagaggca

SEQ ID NO: 53234 - DNA, 20 bp, Artificial Sequence
  Description of Artificial Sequence: Synthetic oligonucleotide
  Target: ATXN2; (+) strand; PAM type: NRG; PAM sequence: AGG
catttgaacgcaagaggcag

SEQ ID NO: 53235 - DNA, 20 bp, Artificial Sequence
  Description of Artificial Sequence: Synthetic oligonucleotide
  Target: ATXN2; (+) strand; PAM type: NRG; PAM sequence: GAG
caagaggcagaggttgcact

SEQ ID NO: 53236 - DNA, 20 bp, Artificial Sequence
  Description of Artificial Sequence: Synthetic oligonucleotide
  Target: ATXN2; (+) strand; PAM type: NRG; PAM sequence: TAG
cctgccactgcaccccaccc

SEQ ID NO: 53237 - DNA, 20 bp, Artificial Sequence
  Description of Artificial Sequence: Synthetic oligonucleotide
  Target: ATXN2; (+) strand; PAM type: NRG; PAM sequence: AGG
ctgccactgcaccccaccct

SEQ ID NO: 53238 - DNA, 20 bp, Artificial Sequence
  Description of Artificial Sequence: Synthetic oligonucleotide
  Target: ATXN2; (+) strand; PAM type: NRG; PAM sequence: CAG
ctgcaccccaccctaggcaa

SEQ ID NO: 53239 - DNA, 20 bp, Artificial Sequence
  Description of Artificial Sequence: Synthetic oligonucleotide
  Target: ATXN2; (+) strand; PAM type: NRG; PAM sequence: GAG
gcaccccaccctaggcaaca

SEQ ID NO: 53240 - DNA, 20 bp, Artificial Sequence
  Description of Artificial Sequence: Synthetic oligonucleotide
  Target: ATXN2; (+) strand; PAM type: NRG; PAM sequence: TGG
gagtgaaacaaaaattttgc

SEQ ID NO: 53241 - DNA, 20 bp, Artificial Sequence
  Description of Artificial Sequence: Synthetic oligonucleotide
  Target: ATXN2; (+) strand; PAM type: NRG; PAM sequence: GGG
agtgaaacaaaaattttgct

SEQ ID NO: 53242 - DNA, 20 bp, Artificial Sequence
  Description of Artificial Sequence: Synthetic oligonucleotide
  Target: ATXN2; (+) strand; PAM type: NRG; PAM sequence: TAG
aacaaaaattttgctgggca

SEQ ID NO: 53243 - DNA, 20 bp, Artificial Sequence
  Description of Artificial Sequence: Synthetic oligonucleotide
  Target: ATXN2; (+) strand; PAM type: NRG; PAM sequence: TGG
aaaaattttgctgggcatag

SEQ ID NO: 53244 - DNA, 20 bp, Artificial Sequence
  Description of Artificial Sequence: Synthetic oligonucleotide
  Target: ATXN2; (+) strand; PAM type: NRG; PAM sequence: TGG
ggcatagtggcgcatgcctg

SEQ ID NO: 53245 - DNA, 20 bp, Artificial Sequence
  Description of Artificial Sequence: Synthetic oligonucleotide
  Target: ATXN2; (+) strand; PAM type: NRG; PAM sequence: CAG
gtggcgcatgcctgtggtcc

SEQ ID NO: 53246 - DNA, 20 bp, Artificial Sequence
  Description of Artificial Sequence: Synthetic oligonucleotide
  Target: ATXN2; (+) strand; PAM type: NRG; PAM sequence: CAG
tgcctgtggtcccagctact

SEQ ID NO: 53247 - DNA, 20 bp, Artificial Sequence
  Description of Artificial Sequence: Synthetic oligonucleotide
  Target: ATXN2; (+) strand; PAM type: NRG; PAM sequence: AGG
gcctgtggtcccagctactc

SEQ ID NO: 53248 - DNA, 20 bp, Artificial Sequence
  Description of Artificial Sequence: Synthetic oligonucleotide
  Target: ATXN2; (+) strand; PAM type: NRG; PAM sequence: GAG
ctgtggtcccagctactcag

SEQ ID NO: 53249 - DNA, 20 bp, Artificial Sequence
  Description of Artificial Sequence: Synthetic oligonucleotide
  Target: ATXN2; (+) strand; PAM type: NRG; PAM sequence: AGG
tgtggtcccagctactcagg

SEQ ID NO: 53250 - DNA, 20 bp, Artificial Sequence
  Description of Artificial Sequence: Synthetic oligonucleotide
  Target: ATXN2; (+) strand; PAM type: NRG; PAM sequence: GAG
tcccagctactcaggaggct

SEQ ID NO: 53251 - DNA, 20 bp, Artificial Sequence
  Description of Artificial Sequence: Synthetic oligonucleotide
  Target: ATXN2; (+) strand; PAM type: NRG; PAM sequence: TAG
agctactcaggaggctgaga

SEQ ID NO: 53252 - DNA, 20 bp, Artificial Sequence
  Description of Artificial Sequence: Synthetic oligonucleotide
  Target: ATXN2; (+) strand; PAM type: NRG; PAM sequence: AGG
gctactcaggaggctgagat

SEQ ID NO: 53253 - DNA, 20 bp, Artificial Sequence
  Description of Artificial Sequence: Synthetic oligonucleotide
  Target: ATXN2; (+) strand; PAM type: NRG; PAM sequence: GAG
tactcaggaggctgagatag

SEQ ID NO: 53254 - DNA, 20 bp, Artificial Sequence
  Description of Artificial Sequence: Synthetic oligonucleotide
  Target: ATXN2; (+) strand; PAM type: NRG; PAM sequence: AGG
actcaggaggctgagatagg

SEQ ID NO: 53255 - DNA, 20 bp, Artificial Sequence
  Description of Artificial Sequence: Synthetic oligonucleotide
  Target: ATXN2; (+) strand; PAM type: NRG; PAM sequence: TGG
gctgagataggaggatcact

SEQ ID NO: 53256 - DNA, 20 bp, Artificial Sequence
  Description of Artificial Sequence: Synthetic oligonucleotide
  Target: ATXN2; (+) strand; PAM type: NRG; PAM sequence: GGG
ctgagataggaggatcactt

SEQ ID NO: 53257 - DNA, 20 bp, Artificial Sequence
  Description of Artificial Sequence: Synthetic oligonucleotide
  Target: ATXN2; (+) strand; PAM type: NRG; PAM sequence: GAG
taggaggatcacttgggcct

SEQ ID NO: 53258 - DNA, 20 bp, Artificial Sequence
  Description of Artificial Sequence: Synthetic oligonucleotide
  Target: ATXN2; (+) strand; PAM type: NRG; PAM sequence: GAG
tcacttgggcctgagaactc

SEQ ID NO: 53259 - DNA, 20 bp, Artificial Sequence
  Description of Artificial Sequence: Synthetic oligonucleotide
  Target: ATXN2; (+) strand; PAM type: NRG; PAM sequence: AGG
cacttgggcctgagaactcg

SEQ ID NO: 53260 - DNA, 20 bp, Artificial Sequence
  Description of Artificial Sequence: Synthetic oligonucleotide
  Target: ATXN2; (+) strand; PAM type: NRG; PAM sequence: GAG
tgagaactcgaggttgcaat

SEQ ID NO: 53261 - DNA, 20 bp, Artificial Sequence
  Description of Artificial Sequence: Synthetic oligonucleotide
  Target: ATXN2; (+) strand; PAM type: NRG; PAM sequence: TGG
gaggttgcaatgagccatga

SEQ ID NO: 53262 - DNA, 20 bp, Artificial Sequence
  Description of Artificial Sequence: Synthetic oligonucleotide
  Target: ATXN2; (+) strand; PAM type: NRG; PAM sequence: TGG
ggcaccactgcactcccgcc

SEQ ID NO: 53263 - DNA, 20 bp, Artificial Sequence
  Description of Artificial Sequence: Synthetic oligonucleotide
  Target: ATXN2; (+) strand; PAM type: NRG; PAM sequence: GGG
gcaccactgcactcccgcct

SEQ ID NO: 53264 - DNA, 20 bp, Artificial Sequence
  Description of Artificial Sequence: Synthetic oligonucleotide
  Target: ATXN2; (+) strand; PAM type: NRG; PAM sequence: CAG
ctgcactcccgcctgggtga

SEQ ID NO: 53265 - DNA, 20 bp, Artificial Sequence
  Description of Artificial Sequence: Synthetic oligonucleotide
  Target: ATXN2; (+) strand; PAM type: NRG; PAM sequence: GAG
gcactcccgcctgggtgaca

SEQ ID NO: 53266 - DNA, 20 bp, Artificial Sequence
  Description of Artificial Sequence: Synthetic oligonucleotide
  Target: ATXN2; (+) strand; PAM type: NRG; PAM sequence: TAG
tcccgcctgggtgacagagc

SEQ ID NO: 53267 - DNA, 20 bp, Artificial Sequence
  Description of Artificial Sequence: Synthetic oligonucleotide
  Target: ATXN2; (+) strand; PAM type: NRG; PAM sequence: AAG
agaacctgtctcaaaaaaat

SEQ ID NO: 53268 - DNA, 20 bp, Artificial Sequence
  Description of Artificial Sequence: Synthetic oligonucleotide
  Target: ATXN2; (+) strand; PAM type: NRG; PAM sequence: AGG
gaacctgtctcaaaaaaata

SEQ ID NO: 53269 - DNA, 20 bp, Artificial Sequence
  Description of Artificial Sequence: Synthetic oligonucleotide
  Target: ATXN2; (+) strand; PAM type: NRG; PAM sequence: GAG
ctgtctcaaaaaaataaggc

SEQ ID NO: 53270 - DNA, 20 bp, Artificial Sequence
  Description of Artificial Sequence: Synthetic oligonucleotide
  Target: ATXN2; (+) strand; PAM type: NRG; PAM sequence: AGG
tgtctcaaaaaaataaggcg

SEQ ID NO: 53271 - DNA, 20 bp, Artificial Sequence
  Description of Artificial Sequence: Synthetic oligonucleotide
  Target: ATXN2; (+) strand; PAM type: NRG; PAM sequence: CAG
caaaaaaataaggcgaggcg

SEQ ID NO: 53272 - DNA, 20 bp, Artificial Sequence
  Description of Artificial Sequence: Synthetic oligonucleotide
  Target: ATXN2; (+) strand; PAM type: NRG; PAM sequence: TGG
aaaaataaggcgaggcgcag

SEQ ID NO: 53273 - DNA, 20 bp, Artificial Sequence
  Description of Artificial Sequence: Synthetic oligonucleotide
  Target: ATXN2; (+) strand; PAM type: NRG; PAM sequence: TGG
atgctgtaatcccaaaactt

SEQ ID NO: 53274 - DNA, 20 bp, Artificial Sequence
  Description of Artificial Sequence: Synthetic oligonucleotide
  Target: ATXN2; (+) strand; PAM type: NRG; PAM sequence: GGG
tgctgtaatcccaaaacttt

SEQ ID NO: 53275 - DNA, 20 bp, Artificial Sequence
  Description of Artificial Sequence: Synthetic oligonucleotide
  Target: ATXN2; (+) strand; PAM type: NRG; PAM sequence: GAG
ctgtaatcccaaaactttgg

SEQ ID NO: 53276 - DNA, 20 bp, Artificial Sequence
  Description of Artificial Sequence: Synthetic oligonucleotide
  Target: ATXN2; (+) strand; PAM type: NRG; PAM sequence: AGG
tgtaatcccaaaactttggg

SEQ ID NO: 53277 - DNA, 20 bp, Artificial Sequence
  Description of Artificial Sequence: Synthetic oligonucleotide
  Target: ATXN2; (+) strand; PAM type: NRG; PAM sequence: AAG
tcccaaaactttgggaggcc

SEQ ID NO: 53278 - DNA, 20 bp, Artificial Sequence
  Description of Artificial Sequence: Synthetic oligonucleotide
  Target: ATXN2; (+) strand; PAM type: NRG; PAM sequence: CAG
aaaactttgggaggccaaga

SEQ ID NO: 53279 - DNA, 20 bp, Artificial Sequence
  Description of Artificial Sequence: Synthetic oligonucleotide
  Target: ATXN2; (+) strand; PAM type: NRG; PAM sequence: AGG
aaactttgggaggccaagac

SEQ ID NO: 53280 - DNA, 20 bp, Artificial Sequence
  Description of Artificial Sequence: Synthetic oligonucleotide
  Target: ATXN2; (+) strand; PAM type: NRG; PAM sequence: CAG
ctttgggaggccaagacagg

SEQ ID NO: 53281 - DNA, 20 bp, Artificial Sequence
  Description of Artificial Sequence: Synthetic oligonucleotide
  Target: ATXN2; (+) strand; PAM type: NRG; PAM sequence: AAG
ccaagacaggcagatcacct

SEQ ID NO: 53282 - DNA, 20 bp, Artificial Sequence
  Description of Artificial Sequence: Synthetic oligonucleotide
  Target: ATXN2; (+) strand; PAM type: NRG; PAM sequence: AGG
caagacaggcagatcaccta

SEQ ID NO: 53283 - DNA, 20 bp, Artificial Sequence
  Description of Artificial Sequence: Synthetic oligonucleotide
  Target: ATXN2; (+) strand; PAM type: NRG; PAM sequence: CAG
acaggcagatcacctaaggt

SEQ ID NO: 53284 - DNA, 20 bp, Artificial Sequence
  Description of Artificial Sequence: Synthetic oligonucleotide
  Target: ATXN2; (+) strand; PAM type: NRG; PAM sequence: AGG
caggcagatcacctaaggtc

SEQ ID NO: 53285 - DNA, 20 bp, Artificial Sequence
  Description of Artificial Sequence: Synthetic oligonucleotide
  Target: ATXN2; (+) strand; PAM type: NRG; PAM sequence: GAG
ggcagatcacctaaggtcag

SEQ ID NO: 53286 - DNA, 20 bp, Artificial Sequence
  Description of Artificial Sequence: Synthetic oligonucleotide
  Target: ATXN2; (+) strand; PAM type: NRG; PAM sequence: AAG
tcacctaaggtcaggagttc

SEQ ID NO: 53287 - DNA, 20 bp, Artificial Sequence
  Description of Artificial Sequence: Synthetic oligonucleotide
  Target: ATXN2; (+) strand; PAM type: NRG; PAM sequence: GAG
taaggtcaggagttcaagac

SEQ ID NO: 53288 - DNA, 20 bp, Artificial Sequence
  Description of Artificial Sequence: Synthetic oligonucleotide
  Target: ATXN2; (+) strand; PAM type: NRG; PAM sequence: TGG
tcaggagttcaagacgagcc

SEQ ID NO: 53289 - DNA, 20 bp, Artificial Sequence
  Description of Artificial Sequence: Synthetic oligonucleotide
  Target: ATXN2; (+) strand; PAM type: NRG; PAM sequence: TGG
caagacgagcctggccaaca

SEQ ID NO: 53290 - DNA, 20 bp, Artificial Sequence
  Description of Artificial Sequence: Synthetic oligonucleotide
  Target: ATXN2; (+) strand; PAM type: NRG; PAM sequence: CAG
aaaaaaatacaaaaatttgc

SEQ ID NO: 53291 - DNA, 20 bp, Artificial Sequence
  Description of Artificial Sequence: Synthetic oligonucleotide
  Target: ATXN2; (+) strand; PAM type: NRG; PAM sequence: AGG
aaaaaatacaaaaatttgcc

SEQ ID NO: 53292 - DNA, 20 bp, Artificial Sequence
  Description of Artificial Sequence: Synthetic oligonucleotide
  Target: ATXN2; (+) strand; PAM type: NRG; PAM sequence: TAG
atacaaaaatttgccaggtg

SEQ ID NO: 53293 - DNA, 20 bp, Artificial Sequence
  Description of Artificial Sequence: Synthetic oligonucleotide
  Target: ATXN2; (+) strand; PAM type: NRG; PAM sequence: TGG
caaaaatttgccaggtgtag

SEQ ID NO: 53294 - DNA, 20 bp, Artificial Sequence
  Description of Artificial Sequence: Synthetic oligonucleotide
  Target: ATXN2; (+) strand; PAM type: NRG; PAM sequence: CAG
gtggtgcatgcctgtaatcc

SEQ ID NO: 53295 - DNA, 20 bp, Artificial Sequence
  Description of Artificial Sequence: Synthetic oligonucleotide
  Target: ATXN2; (+) strand; PAM type: NRG; PAM sequence: CAG
tgcctgtaatcccagctact

SEQ ID NO: 53296 - DNA, 20 bp, Artificial Sequence
  Description of Artificial Sequence: Synthetic oligonucleotide
  Target: ATXN2; (+) strand; PAM type: NRG; PAM sequence: AGG
gcctgtaatcccagctactc

SEQ ID NO: 53297 - DNA, 20 bp, Artificial Sequence
  Description of Artificial Sequence: Synthetic oligonucleotide
  Target: ATXN2; (+) strand; PAM type: NRG; PAM sequence: GAG
ctgtaatcccagctactcag

SEQ ID NO: 53298 - DNA, 20 bp, Artificial Sequence
  Description of Artificial Sequence: Synthetic oligonucleotide
  Target: ATXN2; (+) strand; PAM type: NRG; PAM sequence: AGG
tgtaatcccagctactcagg

SEQ ID NO: 53299 - DNA, 20 bp, Artificial Sequence
  Description of Artificial Sequence: Synthetic oligonucleotide
  Target: ATXN2; (+) strand; PAM type: NRG; PAM sequence: GAG
tcccagctactcaggaggct

SEQ ID NO: 53300 - DNA, 20 bp, Artificial Sequence
  Description of Artificial Sequence: Synthetic oligonucleotide
  Target: ATXN2; (+) strand; PAM type: NRG; PAM sequence: AGG
cccagctactcaggaggctg

SEQ ID NO: 53301 - DNA, 20 bp, Artificial Sequence
  Description of Artificial Sequence: Synthetic oligonucleotide
  Target: ATXN2; (+) strand; PAM type: NRG; PAM sequence: CAG
agctactcaggaggctgagg

SEQ ID NO: 53302 - DNA, 20 bp, Artificial Sequence
  Description of Artificial Sequence: Synthetic oligonucleotide
  Target: ATXN2; (+) strand; PAM type: NRG; PAM sequence: AGG
gctactcaggaggctgaggc

SEQ ID NO: 53303 - DNA, 20 bp, Artificial Sequence
  Description of Artificial Sequence: Synthetic oligonucleotide
  Target: ATXN2; (+) strand; PAM type: NRG; PAM sequence: GAG
tactcaggaggctgaggcag

SEQ ID NO: 53304 - DNA, 20 bp, Artificial Sequence
  Description of Artificial Sequence: Synthetic oligonucleotide
  Target: ATXN2; (+) strand; PAM type: NRG; PAM sequence: TGG
ggctgaggcaggagaatcac

SEQ ID NO: 53305 - DNA, 20 bp, Artificial Sequence
  Description of Artificial Sequence: Synthetic oligonucleotide
  Target: ATXN2; (+) strand; PAM type: NRG; PAM sequence: TGG
gcaggagaatcactggaacc

SEQ ID NO: 53306 - DNA, 20 bp, Artificial Sequence
  Description of Artificial Sequence: Synthetic oligonucleotide
  Target: ATXN2; (+) strand; PAM type: NRG; PAM sequence: GGG
caggagaatcactggaacct

SEQ ID NO: 53307 - DNA, 20 bp, Artificial Sequence
  Description of Artificial Sequence: Synthetic oligonucleotide
  Target: ATXN2; (+) strand; PAM type: NRG; PAM sequence: AAG
gagaatcactggaacctggg

SEQ ID NO: 53308 - DNA, 20 bp, Artificial Sequence
  Description of Artificial Sequence: Synthetic oligonucleotide
  Target: ATXN2; (+) strand; PAM type: NRG; PAM sequence: TGG
aatcactggaacctgggaag

SEQ ID NO: 53309 - DNA, 20 bp, Artificial Sequence
  Description of Artificial Sequence: Synthetic oligonucleotide
  Target: ATXN2; (+) strand; PAM type: NRG; PAM sequence: GAG
tcactggaacctgggaagtg

SEQ ID NO: 53310 - DNA, 20 bp, Artificial Sequence
  Description of Artificial Sequence: Synthetic oligonucleotide
  Target: ATXN2; (+) strand; PAM type: NRG; PAM sequence: AGG
cactggaacctgggaagtgg

SEQ ID NO: 53311 - DNA, 20 bp, Artificial Sequence
  Description of Artificial Sequence: Synthetic oligonucleotide
  Target: ATXN2; (+) strand; PAM type: NRG; PAM sequence: CAG
aacctgggaagtggaggtta

SEQ ID NO: 53312 - DNA, 20 bp, Artificial Sequence
  Description of Artificial Sequence: Synthetic oligonucleotide
  Target: ATXN2; (+) strand; PAM type: NRG; PAM sequence: GAG
tgggaagtggaggttacagt

SEQ ID NO: 53313 - DNA, 20 bp, Artificial Sequence
  Description of Artificial Sequence: Synthetic oligonucleotide
  Target: ATXN2; (+) strand; PAM type: NRG; PAM sequence: GAG
agtggaggttacagtgagcc

SEQ ID NO: 53314 - DNA, 20 bp, Artificial Sequence
  Description of Artificial Sequence: Synthetic oligonucleotide
  Target: ATXN2; (+) strand; PAM type: NRG; PAM sequence: CAG
gagattatgccactgctttc

SEQ ID NO: 53315 - DNA, 20 bp, Artificial Sequence
  Description of Artificial Sequence: Synthetic oligonucleotide
  Target: ATXN2; (+) strand; PAM type: NRG; PAM sequence: TGG
tatgccactgctttccagac

SEQ ID NO: 53316 - DNA, 20 bp, Artificial Sequence
  Description of Artificial Sequence: Synthetic oligonucleotide
  Target: ATXN2; (+) strand; PAM type: NRG; PAM sequence: GGG
atgccactgctttccagact

SEQ ID NO: 53317 - DNA, 20 bp, Artificial Sequence
  Description of Artificial Sequence: Synthetic oligonucleotide
  Target: ATXN2; (+) strand; PAM type: NRG; PAM sequence: CAG
ctgctttccagactgggtga

SEQ ID NO: 53318 - DNA, 20 bp, Artificial Sequence
  Description of Artificial Sequence: Synthetic oligonucleotide
  Target: ATXN2; (+) strand; PAM type: NRG; PAM sequence: GAG
gctttccagactgggtgaca

SEQ ID NO: 53319 - DNA, 20 bp, Artificial Sequence
  Description of Artificial Sequence: Synthetic oligonucleotide
  Target: ATXN2; (+) strand; PAM type: NRG; PAM sequence: GAG
tccagactgggtgacagagt

SEQ ID NO: 53320 - DNA, 20 bp, Artificial Sequence
  Description of Artificial Sequence: Synthetic oligonucleotide
  Target: ATXN2; (+) strand; PAM type: NRG; PAM sequence: AAG
ctcaaaataaataaataacc

SEQ ID NO: 53321 - DNA, 20 bp, Artificial Sequence
  Description of Artificial Sequence: Synthetic oligonucleotide
  Target: ATXN2; (+) strand; PAM type: NRG; PAM sequence: AGG
tcaaaataaataaataacca

SEQ ID NO: 53322 - DNA, 20 bp, Artificial Sequence
  Description of Artificial Sequence: Synthetic oligonucleotide
  Target: ATXN2; (+) strand; PAM type: NRG; PAM sequence: TAG
ccaaggatttaacatttatg

SEQ ID NO: 53323 - DNA, 20 bp, Artificial Sequence
  Description of Artificial Sequence: Synthetic oligonucleotide
  Target: ATXN2; (+) strand; PAM type: NRG; PAM sequence: AAG
atgtagatttcacaccacgt

SEQ ID NO: 53324 - DNA, 20 bp, Artificial Sequence
  Description of Artificial Sequence: Synthetic oligonucleotide
  Target: ATXN2; (+) strand; PAM type: NRG; PAM sequence: CAG
gatttcacaccacgtaagta

SEQ ID NO: 53325 - DNA, 20 bp, Artificial Sequence
  Description of Artificial Sequence: Synthetic oligonucleotide
  Target: ATXN2; (+) strand; PAM type: NRG; PAM sequence: AAG
aaccacatacattaaaaaca

SEQ ID NO: 53326 - DNA, 20 bp, Artificial Sequence
  Description of Artificial Sequence: Synthetic oligonucleotide
  Target: ATXN2; (+) strand; PAM type: NRG; PAM sequence: AAG
catacattaaaaacaaagaa

SEQ ID NO: 53327 - DNA, 20 bp, Artificial Sequence
  Description of Artificial Sequence: Synthetic oligonucleotide
  Target: ATXN2; (+) strand; PAM type: NRG; PAM sequence: TAG
taaaaacaaagaaaagaaaa

SEQ ID NO: 53328 - DNA, 20 bp, Artificial Sequence
  Description of Artificial Sequence: Synthetic oligonucleotide
  Target: ATXN2; (+) strand; PAM type: NRG; PAM sequence: TAG
agaaaatagacctcctattt

SEQ ID NO: 53329 - DNA, 20 bp, Artificial Sequence
  Description of Artificial Sequence: Synthetic oligonucleotide
  Target: ATXN2; (+) strand; PAM type: NRG; PAM sequence: AAG
aatagacctcctattttagc

SEQ ID NO: 53330 - DNA, 20 bp, Artificial Sequence
  Description of Artificial Sequence: Synthetic oligonucleotide
  Target: ATXN2; (+) strand; PAM type: NRG; PAM sequence: AAG
tattttagcaagccaaaatc

SEQ ID NO: 53331 - DNA, 20 bp, Artificial Sequence
  Description of Artificial Sequence: Synthetic oligonucleotide
  Target: ATXN2; (+) strand; PAM type: NRG; PAM sequence: AGG
attttagcaagccaaaatca

SEQ ID NO: 53332 - DNA, 20 bp, Artificial Sequence
  Description of Artificial Sequence: Synthetic oligonucleotide
  Target: ATXN2; (+) strand; PAM type: NRG; PAM sequence: AAG
gccaaaatcaaggttacaaa

SEQ ID NO: 53333 - DNA, 20 bp, Artificial Sequence
  Description of Artificial Sequence: Synthetic oligonucleotide
  Target: ATXN2; (+) strand; PAM type: NRG; PAM sequence: AAG
ggttacaaaaagatatcctg

SEQ ID NO: 53334 - DNA, 20 bp, Artificial Sequence
  Description of Artificial Sequence: Synthetic oligonucleotide
  Target: ATXN2; (+) strand; PAM type: NRG; PAM sequence: AGG
gttacaaaaagatatcctga

SEQ ID NO: 53335 - DNA, 20 bp, Artificial Sequence
  Description of Artificial Sequence: Synthetic oligonucleotide
  Target: ATXN2; (+) strand; PAM type: NRG; PAM sequence: GGG
ttacaaaaagatatcctgaa

SEQ ID NO: 53336 - DNA, 20 bp, Artificial Sequence
  Description of Artificial Sequence: Synthetic oligonucleotide
  Target: ATXN2; (+) strand; PAM type: NRG; PAM sequence: AAG
aaaaagatatcctgaagggc

SEQ ID NO: 53337 - DNA, 20 bp, Artificial Sequence
  Description of Artificial Sequence: Synthetic oligonucleotide
  Target: ATXN2; (+) strand; PAM type: NRG; PAM sequence: AAG
gtgactgtattccataaaac

SEQ ID NO: 53338 - DNA, 20 bp, Artificial Sequence
  Description of Artificial Sequence: Synthetic oligonucleotide
  Target: ATXN2; (+) strand; PAM type: NRG; PAM sequence: TAG
attccataaaacaagcctgt

SEQ ID NO: 53339 - DNA, 20 bp, Artificial Sequence
  Description of Artificial Sequence: Synthetic oligonucleotide
  Target: ATXN2; (+) strand; PAM type: NRG; PAM sequence: AGG
ttccataaaacaagcctgtt

SEQ ID NO: 53340 - DNA, 20 bp, Artificial Sequence
  Description of Artificial Sequence: Synthetic oligonucleotide
  Target: ATXN2; (+) strand; PAM type: NRG; PAM sequence: GGG
tccataaaacaagcctgtta

SEQ ID NO: 53341 - DNA, 20 bp, Artificial Sequence
  Description of Artificial Sequence: Synthetic oligonucleotide
  Target: ATXN2; (+) strand; PAM type: NRG; PAM sequence: GGG
ccataaaacaagcctgttag

SEQ ID NO: 53342 - DNA, 20 bp, Artificial Sequence
  Description of Artificial Sequence: Synthetic oligonucleotide
  Target: ATXN2; (+) strand; PAM type: NRG; PAM sequence: GGG
cataaaacaagcctgttagg

SEQ ID NO: 53343 - DNA, 20 bp, Artificial Sequence
  Description of Artificial Sequence: Synthetic oligonucleotide
  Target: ATXN2; (+) strand; PAM type: NRG; PAM sequence: CGG
aaacaagcctgttagggggc

SEQ ID NO: 53344 - DNA, 20 bp, Artificial Sequence
  Description of Artificial Sequence: Synthetic oligonucleotide
  Target: ATXN2; (+) strand; PAM type: NRG; PAM sequence: CAG
gcctgttagggggccggacg

SEQ ID NO: 53345 - DNA, 20 bp, Artificial Sequence
  Description of Artificial Sequence: Synthetic oligonucleotide
  Target: ATXN2; (+) strand; PAM type: NRG; PAM sequence: CAG
tgttagggggccggacgcag

SEQ ID NO: 53346 - DNA, 20 bp, Artificial Sequence
  Description of Artificial Sequence: Synthetic oligonucleotide
  Target: ATXN2; (+) strand; PAM type: NRG; PAM sequence: CAG
gcagctcacgcctgtaattc

SEQ ID NO: 53347 - DNA, 20 bp, Artificial Sequence
  Description of Artificial Sequence: Synthetic oligonucleotide
  Target: ATXN2; (+) strand; PAM type: NRG; PAM sequence: TGG
cgcctgtaattccagcactt

SEQ ID NO: 53348 - DNA, 20 bp, Artificial Sequence
  Description of Artificial Sequence: Synthetic oligonucleotide
  Target: ATXN2; (+) strand; PAM type: NRG; PAM sequence: GGG
gcctgtaattccagcacttt

SEQ ID NO: 53349 - DNA, 20 bp, Artificial Sequence
  Description of Artificial Sequence: Synthetic oligonucleotide
  Target: ATXN2; (+) strand; PAM type: NRG; PAM sequence: GAG
ctgtaattccagcactttgg

SEQ ID NO: 53350 - DNA, 20 bp, Artificial Sequence
  Description of Artificial Sequence: Synthetic oligonucleotide
  Target: ATXN2; (+) strand; PAM type: NRG; PAM sequence: AGG
tgtaattccagcactttggg

SEQ ID NO: 53351 - DNA, 20 bp, Artificial Sequence
  Description of Artificial Sequence: Synthetic oligonucleotide
  Target: ATXN2; (+) strand; PAM type: NRG; PAM sequence: TGG
ccagcactttgggaggctgt

SEQ ID NO: 53352 - DNA, 20 bp, Artificial Sequence
  Description of Artificial Sequence: Synthetic oligonucleotide
  Target: ATXN2; (+) strand; PAM type: NRG; PAM sequence: GGG
cagcactttgggaggctgtt

SEQ ID NO: 53353 - DNA, 20 bp, Artificial Sequence
  Description of Artificial Sequence: Synthetic oligonucleotide
  Target: ATXN2; (+) strand; PAM type: NRG; PAM sequence: CGG
cactttgggaggctgttggg

SEQ ID NO: 53354 - DNA, 20 bp, Artificial Sequence
  Description of Artificial Sequence: Synthetic oligonucleotide
  Target: ATXN2; (+) strand; PAM type: NRG; PAM sequence: AAG
gaggctgttgggcggatcac

SEQ ID NO: 53355 - DNA, 20 bp, Artificial Sequence
  Description of Artificial Sequence: Synthetic oligonucleotide
  Target: ATXN2; (+) strand; PAM type: NRG; PAM sequence: AGG
aggctgttgggcggatcaca

SEQ ID NO: 53356 - DNA, 20 bp, Artificial Sequence
  Description of Artificial Sequence: Synthetic oligonucleotide
  Target: ATXN2; (+) strand; PAM type: NRG; PAM sequence: CAG
tgttgggcggatcacaaggt

SEQ ID NO: 53357 - DNA, 20 bp, Artificial Sequence
  Description of Artificial Sequence: Synthetic oligonucleotide
  Target: ATXN2; (+) strand; PAM type: NRG; PAM sequence: AGG
gttgggcggatcacaaggtc

SEQ ID NO: 53358 - DNA, 20 bp, Artificial Sequence
  Description of Artificial Sequence: Synthetic oligonucleotide
  Target: ATXN2; (+) strand; PAM type: NRG; PAM sequence: GAG
tgggcggatcacaaggtcag

SEQ ID NO: 53359 - DNA, 20 bp, Artificial Sequence
  Description of Artificial Sequence: Synthetic oligonucleotide
  Target: ATXN2; (+) strand; PAM type: NRG; PAM sequence: TGG
tcaggagatcgacaccatcc

SEQ ID NO: 53360 - DNA, 20 bp, Artificial Sequence
  Description of Artificial Sequence: Synthetic oligonucleotide
  Target: ATXN2; (+) strand; PAM type: NRG; PAM sequence: TGG
cgacaccatcctggccaaca

SEQ ID NO: 53361 - DNA, 20 bp, Artificial Sequence
  Description of Artificial Sequence: Synthetic oligonucleotide
  Target: ATXN2; (+) strand; PAM type: NRG; PAM sequence: TAG
tctactaaaaatacaaaaat

SEQ ID NO: 53362 - DNA, 20 bp, Artificial Sequence
  Description of Artificial Sequence: Synthetic oligonucleotide
  Target: ATXN2; (+) strand; PAM type: NRG; PAM sequence: TGG
ctaaaaatacaaaaattagc

SEQ ID NO: 53363 - DNA, 20 bp, Artificial Sequence
  Description of Artificial Sequence: Synthetic oligonucleotide
  Target: ATXN2; (+) strand; PAM type: NRG; PAM sequence: GGG
taaaaatacaaaaattagct

SEQ ID NO: 53364 - DNA, 20 bp, Artificial Sequence
  Description of Artificial Sequence: Synthetic oligonucleotide
  Target: ATXN2; (+) strand; PAM type: NRG; PAM sequence: CAG
caaaaattagctgggcatca

SEQ ID NO: 53365 - DNA, 20 bp, Artificial Sequence
  Description of Artificial Sequence: Synthetic oligonucleotide
  Target: ATXN2; (+) strand; PAM type: NRG; PAM sequence: TAG
ggcatcacagtgtgcgcctg

SEQ ID NO: 53366 - DNA, 20 bp, Artificial Sequence
  Description of Artificial Sequence: Synthetic oligonucleotide
  Target: ATXN2; (+) strand; PAM type: NRG; PAM sequence: TGG
cgcctgtagtaccaactaca

SEQ ID NO: 53367 - DNA, 20 bp, Artificial Sequence
  Description of Artificial Sequence: Synthetic oligonucleotide
  Target: ATXN2; (+) strand; PAM type: NRG; PAM sequence: GGG
gcctgtagtaccaactacat

SEQ ID NO: 53368 - DNA, 20 bp, Artificial Sequence
  Description of Artificial Sequence: Synthetic oligonucleotide
  Target: ATXN2; (+) strand; PAM type: NRG; PAM sequence: GAG
ctgtagtaccaactacatgg

SEQ ID NO: 53369 - DNA, 20 bp, Artificial Sequence
  Description of Artificial Sequence: Synthetic oligonucleotide
  Target: ATXN2; (+) strand; PAM type: NRG; PAM sequence: AGG
tgtagtaccaactacatggg

SEQ ID NO: 53370 - DNA, 20 bp, Artificial Sequence
  Description of Artificial Sequence: Synthetic oligonucleotide
  Target: ATXN2; (+) strand; PAM type: NRG; PAM sequence: AAG
taccaactacatgggaggct

SEQ ID NO: 53371 - DNA, 20 bp, Artificial Sequence
  Description of Artificial Sequence: Synthetic oligonucleotide
  Target: ATXN2; (+) strand; PAM type: NRG; PAM sequence: AGG
accaactacatgggaggcta

SEQ ID NO: 53372 - DNA, 20 bp, Artificial Sequence
  Description of Artificial Sequence: Synthetic oligonucleotide
  Target: ATXN2; (+) strand; PAM type: NRG; PAM sequence: CAG
aactacatgggaggctaagg

SEQ ID NO: 53373 - DNA, 20 bp, Artificial Sequence
  Description of Artificial Sequence: Synthetic oligonucleotide
  Target: ATXN2; (+) strand; PAM type: NRG; PAM sequence: AGG
actacatgggaggctaaggc

SEQ ID NO: 53374 - DNA, 20 bp, Artificial Sequence
  Description of Artificial Sequence: Synthetic oligonucleotide
  Target: ATXN2; (+) strand; PAM type: NRG; PAM sequence: GAG
tacatgggaggctaaggcag

SEQ ID NO: 53375 - DNA, 20 bp, Artificial Sequence
  Description of Artificial Sequence: Synthetic oligonucleotide
  Target: ATXN2; (+) strand; PAM type: NRG; PAM sequence: CGG
gcaggagaatcgcttgaacc

SEQ ID NO: 53376 - DNA, 20 bp, Artificial Sequence
  Description of Artificial Sequence: Synthetic oligonucleotide
  Target: ATXN2; (+) strand; PAM type: NRG; PAM sequence: GGG
caggagaatcgcttgaaccc

SEQ ID NO: 53377 - DNA, 20 bp, Artificial Sequence
  Description of Artificial Sequence: Synthetic oligonucleotide
  Target: ATXN2; (+) strand; PAM type: NRG; PAM sequence: GAG
ggagaatcgcttgaacccgg

SEQ ID NO: 53378 - DNA, 20 bp, Artificial Sequence
  Description of Artificial Sequence: Synthetic oligonucleotide
  Target: ATXN2; (+) strand; PAM type: NRG; PAM sequence: AGG
gagaatcgcttgaacccggg

SEQ ID NO: 53379 - DNA, 20 bp, Artificial Sequence
  Description of Artificial Sequence: Synthetic oligonucleotide
  Target: ATXN2; (+) strand; PAM type: NRG; PAM sequence: CAG
aatcgcttgaacccgggagg

SEQ ID NO: 53380 - DNA, 20 bp, Artificial Sequence
  Description of Artificial Sequence: Synthetic oligonucleotide
  Target: ATXN2; (+) strand; PAM type: NRG; PAM sequence: GAG
tcgcttgaacccgggaggca

SEQ ID NO: 53381 - DNA, 20 bp, Artificial Sequence
  Description of Artificial Sequence: Synthetic oligonucleotide
  Target: ATXN2; (+) strand; PAM type: NRG; PAM sequence: AGG
cgcttgaacccgggaggcag

SEQ ID NO: 53382 - DNA, 20 bp, Artificial Sequence
  Description of Artificial Sequence: Synthetic oligonucleotide
  Target: ATXN2; (+) strand; PAM type: NRG; PAM sequence: CAG
aacccgggaggcagaggttg

SEQ ID NO: 53383 - DNA, 20 bp, Artificial Sequence
  Description of Artificial Sequence: Synthetic oligonucleotide
  Target: ATXN2; (+) strand; PAM type: NRG; PAM sequence: GAG
cgggaggcagaggttgcagt

SEQ ID NO: 53384 - DNA, 20 bp, Artificial Sequence
  Description of Artificial Sequence: Synthetic oligonucleotide
  Target: ATXN2; (+) strand; PAM type: NRG; PAM sequence: GAG
ggcagaggttgcagtgagct

SEQ ID NO: 53385 - DNA, 20 bp, Artificial Sequence
  Description of Artificial Sequence: Synthetic oligonucleotide
  Target: ATXN2; (+) strand; PAM type: NRG; PAM sequence: CAG
gagatcgtgccactgcactc

SEQ ID NO: 53386 - DNA, 20 bp, Artificial Sequence
  Description of Artificial Sequence: Synthetic oligonucleotide
  Target: ATXN2; (+) strand; PAM type: NRG; PAM sequence: TGG
cgtgccactgcactccagcc

SEQ ID NO: 53387 - DNA, 20 bp, Artificial Sequence
  Description of Artificial Sequence: Synthetic oligonucleotide
  Target: ATXN2; (+) strand; PAM type: NRG; PAM sequence: CAG
actgcactccagcctggtga

SEQ ID NO: 53388 - DNA, 20 bp, Artificial Sequence
  Description of Artificial Sequence: Synthetic oligonucleotide
  Target: ATXN2; (+) strand; PAM type: NRG; PAM sequence: GAG
tgcactccagcctggtgaca

SEQ ID NO: 53389 - DNA, 20 bp, Artificial Sequence
  Description of Artificial Sequence: Synthetic oligonucleotide
  Target: ATXN2; (+) strand; PAM type: NRG; PAM sequence: GAG
ctccagcctggtgacagagc

SEQ ID NO: 53390 - DNA, 20 bp, Artificial Sequence
  Description of Artificial Sequence: Synthetic oligonucleotide
  Target: ATXN2; (+) strand; PAM type: NRG; PAM sequence: CAG
tctaattaaaaaaaaaaaaa

SEQ ID NO: 53391 - DNA, 20 bp, Artificial Sequence
  Description of Artificial Sequence: Synthetic oligonucleotide
  Target: ATXN2; (+) strand; PAM type: NRG; PAM sequence: AGG
ctaattaaaaaaaaaaaaac

SEQ ID NO: 53392 - DNA, 20 bp, Artificial Sequence
  Description of Artificial Sequence: Synthetic oligonucleotide
  Target: ATXN2; (+) strand; PAM type: NRG; PAM sequence: TAG
aaaaaaaaaaacaggcctgt

SEQ ID NO: 53393 - DNA, 20 bp, Artificial Sequence
  Description of Artificial Sequence: Synthetic oligonucleotide
  Target: ATXN2; (+) strand; PAM type: NRG; PAM sequence: AGG
aaaaaaaaaacaggcctgtt

SEQ ID NO: 53394 - DNA, 20 bp, Artificial Sequence
  Description of Artificial Sequence: Synthetic oligonucleotide
  Target: ATXN2; (+) strand; PAM type: NRG; PAM sequence: CAG
aaaacaggcctgttaggaac

SEQ ID NO: 53395 - DNA, 20 bp, Artificial Sequence
  Description of Artificial Sequence: Synthetic oligonucleotide
  Target: ATXN2; (+) strand; PAM type: NRG; PAM sequence: CAG
ttaggaaccagactgcacaa

SEQ ID NO: 53396 - DNA, 20 bp, Artificial Sequence
  Description of Artificial Sequence: Synthetic oligonucleotide
  Target: ATXN2; (+) strand; PAM type: NRG; PAM sequence: AGG
taggaaccagactgcacaac

SEQ ID NO: 53397 - DNA, 20 bp, Artificial Sequence
  Description of Artificial Sequence: Synthetic oligonucleotide
  Target: ATXN2; (+) strand; PAM type: NRG; PAM sequence: GAG
ggaaccagactgcacaacag

SEQ ID NO: 53398 - DNA, 20 bp, Artificial Sequence
  Description of Artificial Sequence: Synthetic oligonucleotide
  Target: ATXN2; (+) strand; PAM type: NRG; PAM sequence: GAG
ctgcacaacaggagctgtgt

SEQ ID NO: 53399 - DNA, 20 bp, Artificial Sequence
  Description of Artificial Sequence: Synthetic oligonucleotide
  Target: ATXN2; (+) strand; PAM type: NRG; PAM sequence: TAG
aacaggagctgtgtgagcat

SEQ ID NO: 53400 - DNA, 20 bp, Artificial Sequence
  Description of Artificial Sequence: Synthetic oligonucleotide
  Target: ATXN2; (+) strand; PAM type: NRG; PAM sequence: GAG
ctgtgtgagcattagcacct

SEQ ID NO: 53401 - DNA, 20 bp, Artificial Sequence
  Description of Artificial Sequence: Synthetic oligonucleotide
  Target: ATXN2; (+) strand; PAM type: NRG; PAM sequence: TAG
agcacctgagccccacctgt

SEQ ID NO: 53402 - DNA, 20 bp, Artificial Sequence
  Description of Artificial Sequence: Synthetic oligonucleotide
  Target: ATXN2; (+) strand; PAM type: NRG; PAM sequence: CAG
ctgagccccacctgttagat

SEQ ID NO: 53403 - DNA, 20 bp, Artificial Sequence
  Description of Artificial Sequence: Synthetic oligonucleotide
  Target: ATXN2; (+) strand; PAM type: NRG; PAM sequence: AGG
tgagccccacctgttagatc

SEQ ID NO: 53404 - DNA, 20 bp, Artificial Sequence
  Description of Artificial Sequence: Synthetic oligonucleotide
  Target: ATXN2; (+) strand; PAM type: NRG; PAM sequence: CAG
cccacctgttagatcaggtg

SEQ ID NO: 53405 - DNA, 20 bp, Artificial Sequence
  Description of Artificial Sequence: Synthetic oligonucleotide
  Target: ATXN2; (+) strand; PAM type: NRG; PAM sequence: TAG
tgttagatcaggtgcagcat

SEQ ID NO: 53406 - DNA, 20 bp, Artificial Sequence
  Description of Artificial Sequence: Synthetic oligonucleotide
  Target: ATXN2; (+) strand; PAM type: NRG; PAM sequence: AGG
gttagatcaggtgcagcatt

SEQ ID NO: 53407 - DNA, 20 bp, Artificial Sequence
  Description of Artificial Sequence: Synthetic oligonucleotide
  Target: ATXN2; (+) strand; PAM type: NRG; PAM sequence: TAG
ggtgcagcattaggttctta

SEQ ID NO: 53408 - DNA, 20 bp, Artificial Sequence
  Description of Artificial Sequence: Synthetic oligonucleotide
  Target: ATXN2; (+) strand; PAM type: NRG; PAM sequence: AAG
gcagcattaggttcttatag

SEQ ID NO: 53409 - DNA, 20 bp, Artificial Sequence
  Description of Artificial Sequence: Synthetic oligonucleotide
  Target: ATXN2; (+) strand; PAM type: NRG; PAM sequence: TGG
tatagaagcacaaaccctac

SEQ ID NO: 53410 - DNA, 20 bp, Artificial Sequence
  Description of Artificial Sequence: Synthetic oligonucleotide
  Target: ATXN2; (+) strand; PAM type: NRG; PAM sequence: GGG
atagaagcacaaaccctact

SEQ ID NO: 53411 - DNA, 20 bp, Artificial Sequence
  Description of Artificial Sequence: Synthetic oligonucleotide
  Target: ATXN2; (+) strand; PAM type: NRG; PAM sequence: TAG
accctactgggaactgcata

SEQ ID NO: 53412 - DNA, 20 bp, Artificial Sequence
  Description of Artificial Sequence: Synthetic oligonucleotide
  Target: ATXN2; (+) strand; PAM type: NRG; PAM sequence: AAG
tactgggaactgcatatagc

SEQ ID NO: 53413 - DNA, 20 bp, Artificial Sequence
  Description of Artificial Sequence: Synthetic oligonucleotide
  Target: ATXN2; (+) strand; PAM type: NRG; PAM sequence: GAG
ctgggaactgcatatagcaa

SEQ ID NO: 53414 - DNA, 20 bp, Artificial Sequence
  Description of Artificial Sequence: Synthetic oligonucleotide
  Target: ATXN2; (+) strand; PAM type: NRG; PAM sequence: TAG
actgcatatagcaagagatg

SEQ ID NO: 53415 - DNA, 20 bp, Artificial Sequence
  Description of Artificial Sequence: Synthetic oligonucleotide
  Target: ATXN2; (+) strand; PAM type: NRG; PAM sequence: AGG
ctgcatatagcaagagatgt

SEQ ID NO: 53416 - DNA, 20 bp, Artificial Sequence
  Description of Artificial Sequence: Synthetic oligonucleotide
  Target: ATXN2; (+) strand; PAM type: NRG; PAM sequence: GAG
gtaggttgtatgctctttat

SEQ ID NO: 53417 - DNA, 20 bp, Artificial Sequence
  Description of Artificial Sequence: Synthetic oligonucleotide
  Target: ATXN2; (+) strand; PAM type: NRG; PAM sequence: GAG
taacaaatgcataatgatct

SEQ ID NO: 53418 - DNA, 20 bp, Artificial Sequence
  Description of Artificial Sequence: Synthetic oligonucleotide
  Target: ATXN2; (+) strand; PAM type: NRG; PAM sequence: AGG
aacaaatgcataatgatctg

SEQ ID NO: 53419 - DNA, 20 bp, Artificial Sequence
  Description of Artificial Sequence: Synthetic oligonucleotide
  Target: ATXN2; (+) strand; PAM type: NRG; PAM sequence: TGG
aaatgcataatgatctgagg

SEQ ID NO: 53420 - DNA, 20 bp, Artificial Sequence
  Description of Artificial Sequence: Synthetic oligonucleotide
  Target: ATXN2; (+) strand; PAM type: NRG; PAM sequence: TAG
tggaacaatttttttttttt

SEQ ID NO: 53421 - DNA, 20 bp, Artificial Sequence
  Description of Artificial Sequence: Synthetic oligonucleotide
  Target: ATXN2; (+) strand; PAM type: NRG; PAM sequence: CGG
acaatttttttttttttaga

SEQ ID NO: 53422 - DNA, 20 bp, Artificial Sequence
  Description of Artificial Sequence: Synthetic oligonucleotide
  Target: ATXN2; (+) strand; PAM type: NRG; PAM sequence: GAG
aatttttttttttttagacg

SEQ ID NO: 53423 - DNA, 20 bp, Artificial Sequence
  Description of Artificial Sequence: Synthetic oligonucleotide
  Target: ATXN2; (+) strand; PAM type: NRG; PAM sequence: CAG
cggagtctcactttgtcccc

SEQ ID NO: 53424 - DNA, 20 bp, Artificial Sequence
  Description of Artificial Sequence: Synthetic oligonucleotide
  Target: ATXN2; (+) strand; PAM type: NRG; PAM sequence: AGG
ggagtctcactttgtccccc

SEQ ID NO: 53425 - DNA, 20 bp, Artificial Sequence
  Description of Artificial Sequence: Synthetic oligonucleotide
  Target: ATXN2; (+) strand; PAM type: NRG; PAM sequence: AAG
tcactttgtcccccaggctg

SEQ ID NO: 53426 - DNA, 20 bp, Artificial Sequence
  Description of Artificial Sequence: Synthetic oligonucleotide
  Target: ATXN2; (+) strand; PAM type: NRG; PAM sequence: CAG
ttgtcccccaggctgaagta

SEQ ID NO: 53427 - DNA, 20 bp, Artificial Sequence
  Description of Artificial Sequence: Synthetic oligonucleotide
  Target: ATXN2; (+) strand; PAM type: NRG; PAM sequence: TGG
tcccccaggctgaagtacag

SEQ ID NO: 53428 - DNA, 20 bp, Artificial Sequence
  Description of Artificial Sequence: Synthetic oligonucleotide
  Target: ATXN2; (+) strand; PAM type: NRG; PAM sequence: CAG
gaagtacagtggtgctatct

SEQ ID NO: 53429 - DNA, 20 bp, Artificial Sequence
  Description of Artificial Sequence: Synthetic oligonucleotide
  Target: ATXN2; (+) strand; PAM type: NRG; PAM sequence: AAG
gtgctatctcagctcactgc

SEQ ID NO: 53430 - DNA, 20 bp, Artificial Sequence
  Description of Artificial Sequence: Synthetic oligonucleotide
  Target: ATXN2; (+) strand; PAM type: NRG; PAM sequence: CGG
tcactgcaagctctgcctcc

SEQ ID NO: 53431 - DNA, 20 bp, Artificial Sequence
  Description of Artificial Sequence: Synthetic oligonucleotide
  Target: ATXN2; (+) strand; PAM type: NRG; PAM sequence: GGG
cactgcaagctctgcctccc

SEQ ID NO: 53432 - DNA, 20 bp, Artificial Sequence
  Description of Artificial Sequence: Synthetic oligonucleotide
  Target: ATXN2; (+) strand; PAM type: NRG; PAM sequence: CGG
ttcatgccattctcttgcct

SEQ ID NO: 53433 - DNA, 20 bp, Artificial Sequence
  Description of Artificial Sequence: Synthetic oligonucleotide
  Target: ATXN2; (+) strand; PAM type: NRG; PAM sequence: CGG
cattctcttgcctcggcctc

SEQ ID NO: 53434 - DNA, 20 bp, Artificial Sequence
  Description of Artificial Sequence: Synthetic oligonucleotide
  Target: ATXN2; (+) strand; PAM type: NRG; PAM sequence: GAG
ttctcttgcctcggcctccg

SEQ ID NO: 53435 - DNA, 20 bp, Artificial Sequence
  Description of Artificial Sequence: Synthetic oligonucleotide
  Target: ATXN2; (+) strand; PAM type: NRG; PAM sequence: TAG
tcttgcctcggcctccggag

SEQ ID NO: 53436 - DNA, 20 bp, Artificial Sequence
  Description of Artificial Sequence: Synthetic oligonucleotide
  Target: ATXN2; (+) strand; PAM type: NRG; PAM sequence: CAG
ctccggagtagctgtgacta

SEQ ID NO: 53437 - DNA, 20 bp, Artificial Sequence
  Description of Artificial Sequence: Synthetic oligonucleotide
  Target: ATXN2; (+) strand; PAM type: NRG; PAM sequence: AGG
tccggagtagctgtgactac

SEQ ID NO: 53438 - DNA, 20 bp, Artificial Sequence
  Description of Artificial Sequence: Synthetic oligonucleotide
  Target: ATXN2; (+) strand; PAM type: NRG; PAM sequence: CAG
caggcgccctccaccgcgcc

SEQ ID NO: 53439 - DNA, 20 bp, Artificial Sequence
  Description of Artificial Sequence: Synthetic oligonucleotide
  Target: ATXN2; (+) strand; PAM type: NRG; PAM sequence: TAG
agctaatttttttgtatttt

SEQ ID NO: 53440 - DNA, 20 bp, Artificial Sequence
  Description of Artificial Sequence: Synthetic oligonucleotide
  Target: ATXN2; (+) strand; PAM type: NRG; PAM sequence: TAG
taatttttttgtatttttag

SEQ ID NO: 53441 - DNA, 20 bp, Artificial Sequence
  Description of Artificial Sequence: Synthetic oligonucleotide
  Target: ATXN2; (+) strand; PAM type: NRG; PAM sequence: GAG
atttttttgtatttttagta

SEQ ID NO: 53442 - DNA, 20 bp, Artificial Sequence
  Description of Artificial Sequence: Synthetic oligonucleotide
  Target: ATXN2; (+) strand; PAM type: NRG; PAM sequence: AGG
tttttttgtatttttagtag

SEQ ID NO: 53443 - DNA, 20 bp, Artificial Sequence
  Description of Artificial Sequence: Synthetic oligonucleotide
  Target: ATXN2; (+) strand; PAM type: NRG; PAM sequence: GGG
ttttttgtatttttagtaga

SEQ ID NO: 53444 - DNA, 20 bp, Artificial Sequence
  Description of Artificial Sequence: Synthetic oligonucleotide
  Target: ATXN2; (+) strand; PAM type: NRG; PAM sequence: GGG
tttttgtatttttagtagag

SEQ ID NO: 53445 - DNA, 20 bp, Artificial Sequence
  Description of Artificial Sequence: Synthetic oligonucleotide
  Target: ATXN2; (+) strand; PAM type: NRG; PAM sequence: GGG
ttttgtatttttagtagagg

SEQ ID NO: 53446 - DNA, 20 bp, Artificial Sequence
  Description of Artificial Sequence: Synthetic oligonucleotide
  Target: ATXN2; (+) strand; PAM type: NRG; PAM sequence: GGG
tttgtatttttagtagaggg

SEQ ID NO: 53447 - DNA, 20 bp, Artificial Sequence
  Description of Artificial Sequence: Synthetic oligonucleotide
  Target: ATXN2; (+) strand; PAM type: NRG; PAM sequence: TAG
agaggggggtttcaccatgt

SEQ ID NO: 53448 - DNA, 20 bp, Artificial Sequence
  Description of Artificial Sequence: Synthetic oligonucleotide
  Target: ATXN2; (+) strand; PAM type: NRG; PAM sequence: CAG
gggggtttcaccatgttagc

SEQ ID NO: 53449 - DNA, 20 bp, Artificial Sequence
  Description of Artificial Sequence: Synthetic oligonucleotide
  Target: ATXN2; (+) strand; PAM type: NRG; PAM sequence: AGG
ggggtttcaccatgttagcc

SEQ ID NO: 53450 - DNA, 20 bp, Artificial Sequence
  Description of Artificial Sequence: Synthetic oligonucleotide
  Target: ATXN2; (+) strand; PAM type: NRG; PAM sequence: TGG
tttcaccatgttagccagga

SEQ ID NO: 53451 - DNA, 20 bp, Artificial Sequence
  Description of Artificial Sequence: Synthetic oligonucleotide
  Target: ATXN2; (+) strand; PAM type: NRG; PAM sequence: CGG
acctcgtgatctgcccgcct

SEQ ID NO: 53452 - DNA, 20 bp, Artificial Sequence
  Description of Artificial Sequence: Synthetic oligonucleotide
  Target: ATXN2; (+) strand; PAM type: NRG; PAM sequence: AAG
ctgcccgcctcggcctccca

SEQ ID NO: 53453 - DNA, 20 bp, Artificial Sequence
  Description of Artificial Sequence: Synthetic oligonucleotide
  Target: ATXN2; (+) strand; PAM type: NRG; PAM sequence: TGG
gcctcggcctcccaaagtgc

SEQ ID NO: 53454 - DNA, 20 bp, Artificial Sequence
  Description of Artificial Sequence: Synthetic oligonucleotide
  Target: ATXN2; (+) strand; PAM type: NRG; PAM sequence: GGG
cctcggcctcccaaagtgct

SEQ ID NO: 53455 - DNA, 20 bp, Artificial Sequence
  Description of Artificial Sequence: Synthetic oligonucleotide
  Target: ATXN2; (+) strand; PAM type: NRG; PAM sequence: CAG
ctcccaaagtgctgggatta

SEQ ID NO: 53456 - DNA, 20 bp, Artificial Sequence
  Description of Artificial Sequence: Synthetic oligonucleotide
  Target: ATXN2; (+) strand; PAM type: NRG; PAM sequence: AGG
tcccaaagtgctgggattac

SEQ ID NO: 53457 - DNA, 20 bp, Artificial Sequence
  Description of Artificial Sequence: Synthetic oligonucleotide
  Target: ATXN2; (+) strand; PAM type: NRG; PAM sequence: GAG
agtgctgggattacaggcgt

SEQ ID NO: 53458 - DNA, 20 bp, Artificial Sequence
  Description of Artificial Sequence: Synthetic oligonucleotide
  Target: ATXN2; (+) strand; PAM type: NRG; PAM sequence: CGG
caggcgtgagccaccgtgcc

SEQ ID NO: 53459 - DNA, 20 bp, Artificial Sequence
  Description of Artificial Sequence: Synthetic oligonucleotide
  Target: ATXN2; (+) strand; PAM type: NRG; PAM sequence: CGG
cgtgagccaccgtgcccggc

SEQ ID NO: 53460 - DNA, 20 bp, Artificial Sequence
  Description of Artificial Sequence: Synthetic oligonucleotide
  Target: ATXN2; (+) strand; PAM type: NRG; PAM sequence: TGG
gagccaccgtgcccggccgg

SEQ ID NO: 53461 - DNA, 20 bp, Artificial Sequence
  Description of Artificial Sequence: Synthetic oligonucleotide
  Target: ATXN2; (+) strand; PAM type: NRG; PAM sequence: CAG
accgtgcccggccggtggaa

SEQ ID NO: 53462 - DNA, 20 bp, Artificial Sequence
  Description of Artificial Sequence: Synthetic oligonucleotide
  Target: ATXN2; (+) strand; PAM type: NRG; PAM sequence: TGG
aaaatcatcccctgccccta

SEQ ID NO: 53463 - DNA, 20 bp, Artificial Sequence
  Description of Artificial Sequence: Synthetic oligonucleotide
  Target: ATXN2; (+) strand; PAM type: NRG; PAM sequence: CGG
aaaaccatcttccacaaaac

SEQ ID NO: 53464 - DNA, 20 bp, Artificial Sequence
  Description of Artificial Sequence: Synthetic oligonucleotide
  Target: ATXN2; (+) strand; PAM type: NRG; PAM sequence: TAG
tcttccacaaaaccggtccc

SEQ ID NO: 53465 - DNA, 20 bp, Artificial Sequence
  Description of Artificial Sequence: Synthetic oligonucleotide
  Target: ATXN2; (+) strand; PAM type: NRG; PAM sequence: AAG
aaccggtccctagtgttaaa

SEQ ID NO: 53466 - DNA, 20 bp, Artificial Sequence
  Description of Artificial Sequence: Synthetic oligonucleotide
  Target: ATXN2; (+) strand; PAM type: NRG; PAM sequence: AGG
accggtccctagtgttaaaa

SEQ ID NO: 53467 - DNA, 20 bp, Artificial Sequence
  Description of Artificial Sequence: Synthetic oligonucleotide
  Target: ATXN2; (+) strand; PAM type: NRG; PAM sequence: GAG
tccctagtgttaaaaaggtt

SEQ ID NO: 53468 - DNA, 20 bp, Artificial Sequence
  Description of Artificial Sequence: Synthetic oligonucleotide
  Target: ATXN2; (+) strand; PAM type: NRG; PAM sequence: AGG
ccctagtgttaaaaaggttg

SEQ ID NO: 53469 - DNA, 20 bp, Artificial Sequence
  Description of Artificial Sequence: Synthetic oligonucleotide
  Target: ATXN2; (+) strand; PAM type: NRG; PAM sequence: CAG
gaccattgccttaaaataca

SEQ ID NO: 53470 - DNA, 20 bp, Artificial Sequence
  Description of Artificial Sequence: Synthetic oligonucleotide
  Target: ATXN2; (+) strand; PAM type: NRG; PAM sequence: AAG
attacgtttctatttatttc

SEQ ID NO: 53471 - DNA, 20 bp, Artificial Sequence
  Description of Artificial Sequence: Synthetic oligonucleotide
  Target: ATXN2; (+) strand; PAM type: NRG; PAM sequence: AGG
ttacgtttctatttatttca

SEQ ID NO: 53472 - DNA, 20 bp, Artificial Sequence
  Description of Artificial Sequence: Synthetic oligonucleotide
  Target: ATXN2; (+) strand; PAM type: NRG; PAM sequence: GGG
tacgtttctatttatttcaa

SEQ ID NO: 53473 - DNA, 20 bp, Artificial Sequence
  Description of Artificial Sequence: Synthetic oligonucleotide
  Target: ATXN2; (+) strand; PAM type: NRG; PAM sequence: GAG
cgtttctatttatttcaagg

SEQ ID NO: 53474 - DNA, 20 bp, Artificial Sequence
  Description of Artificial Sequence: Synthetic oligonucleotide
  Target: ATXN2; (+) strand; PAM type: NRG; PAM sequence: AGG
gtttctatttatttcaaggg

SEQ ID NO: 53475 - DNA, 20 bp, Artificial Sequence
  Description of Artificial Sequence: Synthetic oligonucleotide
  Target: ATXN2; (+) strand; PAM type: NRG; PAM sequence: GGG
tttctatttatttcaaggga

SEQ ID NO: 53476 - DNA, 20 bp, Artificial Sequence
  Description of Artificial Sequence: Synthetic oligonucleotide
  Target: ATXN2; (+) strand; PAM type: NRG; PAM sequence: GGG
ttctatttatttcaagggag

SEQ ID NO: 53477 - DNA, 20 bp, Artificial Sequence
  Description of Artificial Sequence: Synthetic oligonucleotide
  Target: ATXN2; (+) strand; PAM type: NRG; PAM sequence: CAG
ttatttcaagggaggggccc

SEQ ID NO: 53478 - DNA, 20 bp, Artificial Sequence
  Description of Artificial Sequence: Synthetic oligonucleotide
  Target: ATXN2; (+) strand; PAM type: NRG; PAM sequence: AAG
aaaatttaaaaataaaaata

SEQ ID NO: 53479 - DNA, 20 bp, Artificial Sequence
  Description of Artificial Sequence: Synthetic oligonucleotide
  Target: ATXN2; (+) strand; PAM type: NRG; PAM sequence: AGG
aaatttaaaaataaaaataa

SEQ ID NO: 53480 - DNA, 20 bp, Artificial Sequence
  Description of Artificial Sequence: Synthetic oligonucleotide
  Target: ATXN2; (+) strand; PAM type: NRG; PAM sequence: GGG
aatttaaaaataaaaataaa

SEQ ID NO: 53481 - DNA, 20 bp, Artificial Sequence
  Description of Artificial Sequence: Synthetic oligonucleotide
  Target: ATXN2; (+) strand; PAM type: NRG; PAM sequence: GAG
tttaaaaataaaaataaagg

SEQ ID NO: 53482 - DNA, 20 bp, Artificial Sequence
  Description of Artificial Sequence: Synthetic oligonucleotide
  Target: ATXN2; (+) strand; PAM type: NRG; PAM sequence: AGG
ttaaaaataaaaataaaggg

SEQ ID NO: 53483 - DNA, 20 bp, Artificial Sequence
  Description of Artificial Sequence: Synthetic oligonucleotide
  Target: ATXN2; (+) strand; PAM type: NRG; PAM sequence: GGG
taaaaataaaaataaaggga

SEQ ID NO: 53484 - DNA, 20 bp, Artificial Sequence
  Description of Artificial Sequence: Synthetic oligonucleotide
  Target: ATXN2; (+) strand; PAM type: NRG; PAM sequence: GGG
aaaaataaaaataaagggag

SEQ ID NO: 53485 - DNA, 20 bp, Artificial Sequence
  Description of Artificial Sequence: Synthetic oligonucleotide
  Target: ATXN2; (+) strand; PAM type: NRG; PAM sequence: GGG
aaaataaaaataaagggagg

SEQ ID NO: 53486 - DNA, 20 bp, Artificial Sequence
  Description of Artificial Sequence: Synthetic oligonucleotide
  Target: ATXN2; (+) strand; PAM type: NRG; PAM sequence: CGG
aaaaataaagggagggggct

SEQ ID NO: 53487 - DNA, 20 bp, Artificial Sequence
  Description of Artificial Sequence: Synthetic oligonucleotide
  Target: ATXN2; (+) strand; PAM type: NRG; PAM sequence: CAG
taaagggagggggctcggtg

SEQ ID NO: 53488 - DNA, 20 bp, Artificial Sequence
  Description of Artificial Sequence: Synthetic oligonucleotide
  Target: ATXN2; (+) strand; PAM type: NRG; PAM sequence: TGG
agggagggggctcggtgcag

SEQ ID NO: 53489 - DNA, 20 bp, Artificial Sequence
  Description of Artificial Sequence: Synthetic oligonucleotide
  Target: ATXN2; (+) strand; PAM type: NRG; PAM sequence: CAG
gtggctcacacctgtaatct

SEQ ID NO: 53490 - DNA, 20 bp, Artificial Sequence
  Description of Artificial Sequence: Synthetic oligonucleotide
  Target: ATXN2; (+) strand; PAM type: NRG; PAM sequence: TGG
cacctgtaatctcagcactt

SEQ ID NO: 53491 - DNA, 20 bp, Artificial Sequence
  Description of Artificial Sequence: Synthetic oligonucleotide
  Target: ATXN2; (+) strand; PAM type: NRG; PAM sequence: GGG
acctgtaatctcagcacttt

SEQ ID NO: 53492 - DNA, 20 bp, Artificial Sequence
  Description of Artificial Sequence: Synthetic oligonucleotide
  Target: ATXN2; (+) strand; PAM type: NRG; PAM sequence: AAG
tgtaatctcagcactttggg

SEQ ID NO: 53493 - DNA, 20 bp, Artificial Sequence
  Description of Artificial Sequence: Synthetic oligonucleotide
  Target: ATXN2; (+) strand; PAM type: NRG; PAM sequence: GAG
tctcagcactttgggaagct

SEQ ID NO: 53494 - DNA, 20 bp, Artificial Sequence
  Description of Artificial Sequence: Synthetic oligonucleotide
  Target: ATXN2; (+) strand; PAM type: NRG; PAM sequence: AGG
ctcagcactttgggaagctg

SEQ ID NO: 53495 - DNA, 20 bp, Artificial Sequence
  Description of Artificial Sequence: Synthetic oligonucleotide
  Target: ATXN2; (+) strand; PAM type: NRG; PAM sequence: CAG
agcactttgggaagctgagg

SEQ ID NO: 53496 - DNA, 20 bp, Artificial Sequence
  Description of Artificial Sequence: Synthetic oligonucleotide
  Target: ATXN2; (+) strand; PAM type: NRG; PAM sequence: AGG
gcactttgggaagctgaggc

SEQ ID NO: 53497 - DNA, 20 bp, Artificial Sequence
  Description of Artificial Sequence: Synthetic oligonucleotide
  Target: ATXN2; (+) strand; PAM type: NRG; PAM sequence: GAG
actttgggaagctgaggcag

SEQ ID NO: 53498 - DNA, 20 bp, Artificial Sequence
  Description of Artificial Sequence: Synthetic oligonucleotide
  Target: ATXN2; (+) strand; PAM type: NRG; PAM sequence: AGG
ctttgggaagctgaggcagg

SEQ ID NO: 53499 - DNA, 20 bp, Artificial Sequence
  Description of Artificial Sequence: Synthetic oligonucleotide
  Target: ATXN2; (+) strand; PAM type: NRG; PAM sequence: GAG
ctgaggcaggaggatcactt

SEQ ID NO: 53500 - DNA, 20 bp, Artificial Sequence
  Description of Artificial Sequence: Synthetic oligonucleotide
  Target: ATXN2; (+) strand; PAM type: NRG; PAM sequence: CAG
gcaggaggatcacttgagcc

SEQ ID NO: 53501 - DNA, 20 bp, Artificial Sequence
  Description of Artificial Sequence: Synthetic oligonucleotide
  Target: ATXN2; (+) strand; PAM type: NRG; PAM sequence: AGG
caggaggatcacttgagccc

SEQ ID NO: 53502 - DNA, 20 bp, Artificial Sequence
  Description of Artificial Sequence: Synthetic oligonucleotide
  Target: ATXN2; (+) strand; PAM type: NRG; PAM sequence: GAG
ggaggatcacttgagcccag

SEQ ID NO: 53503 - DNA, 20 bp, Artificial Sequence
  Description of Artificial Sequence: Synthetic oligonucleotide
  Target: ATXN2; (+) strand; PAM type: NRG; PAM sequence: GAG
tcacttgagcccaggagttt

SEQ ID NO: 53504 - DNA, 20 bp, Artificial Sequence
  Description of Artificial Sequence: Synthetic oligonucleotide
  Target: ATXN2; (+) strand; PAM type: NRG; PAM sequence: TGG
ccaggagtttgagaccaatc

SEQ ID NO: 53505 - DNA, 20 bp, Artificial Sequence
  Description of Artificial Sequence: Synthetic oligonucleotide
  Target: ATXN2; (+) strand; PAM type: NRG; PAM sequence: GGG
caggagtttgagaccaatct

SEQ ID NO: 53506 - DNA, 20 bp, Artificial Sequence
  Description of Artificial Sequence: Synthetic oligonucleotide
  Target: ATXN2; (+) strand; PAM type: NRG; PAM sequence: TGG
tgagaccaatctgggcaaca

SEQ ID NO: 53507 - DNA, 20 bp, Artificial Sequence
  Description of Artificial Sequence: Synthetic oligonucleotide
  Target: ATXN2; (+) strand; PAM type: NRG; PAM sequence: CAG
gaccaatctgggcaacatgg

SEQ ID NO: 53508 - DNA, 20 bp, Artificial Sequence
  Description of Artificial Sequence: Synthetic oligonucleotide
  Target: ATXN2; (+) strand; PAM type: NRG; PAM sequence: AGG
accaatctgggcaacatggc

SEQ ID NO: 53509 - DNA, 20 bp, Artificial Sequence
  Description of Artificial Sequence: Synthetic oligonucleotide
  Target: ATXN2; (+) strand; PAM type: NRG; PAM sequence: TAG
tctacaaaaaatttaaatgt

SEQ ID NO: 53510 - DNA, 20 bp, Artificial Sequence
  Description of Artificial Sequence: Synthetic oligonucleotide
  Target: ATXN2; (+) strand; PAM type: NRG; PAM sequence: CAG
caaaaaatttaaatgttagc

SEQ ID NO: 53511 - DNA, 20 bp, Artificial Sequence
  Description of Artificial Sequence: Synthetic oligonucleotide
  Target: ATXN2; (+) strand; PAM type: NRG; PAM sequence: TGG
aaatttaaatgttagccagc

SEQ ID NO: 53512 - DNA, 20 bp, Artificial Sequence
  Description of Artificial Sequence: Synthetic oligonucleotide
  Target: ATXN2; (+) strand; PAM type: NRG; PAM sequence: TAG
agccagctggtgtacacctg

SEQ ID NO: 53513 - DNA, 20 bp, Artificial Sequence
  Description of Artificial Sequence: Synthetic oligonucleotide
  Target: ATXN2; (+) strand; PAM type: NRG; PAM sequence: CAG
ctggtgtacacctgtagttc

SEQ ID NO: 53514 - DNA, 20 bp, Artificial Sequence
  Description of Artificial Sequence: Synthetic oligonucleotide
  Target: ATXN2; (+) strand; PAM type: NRG; PAM sequence: CAG
cacctgtagttccagctact

SEQ ID NO: 53515 - DNA, 20 bp, Artificial Sequence
  Description of Artificial Sequence: Synthetic oligonucleotide
  Target: ATXN2; (+) strand; PAM type: NRG; PAM sequence: AGG
acctgtagttccagctactc

SEQ ID NO: 53516 - DNA, 20 bp, Artificial Sequence
  Description of Artificial Sequence: Synthetic oligonucleotide
  Target: ATXN2; (+) strand; PAM type: NRG; PAM sequence: GAG
ctgtagttccagctactcag

SEQ ID NO: 53517 - DNA, 20 bp, Artificial Sequence
  Description of Artificial Sequence: Synthetic oligonucleotide
  Target: ATXN2; (+) strand; PAM type: NRG; PAM sequence: AGG
tgtagttccagctactcagg

SEQ ID NO: 53518 - DNA, 20 bp, Artificial Sequence
  Description of Artificial Sequence: Synthetic oligonucleotide
  Target: ATXN2; (+) strand; PAM type: NRG; PAM sequence: AAG
ttccagctactcaggaggct

SEQ ID NO: 53519 - DNA, 20 bp, Artificial Sequence
  Description of Artificial Sequence: Synthetic oligonucleotide
  Target: ATXN2; (+) strand; PAM type: NRG; PAM sequence: CAG
agctactcaggaggctaaga

SEQ ID NO: 53520 - DNA, 20 bp, Artificial Sequence
  Description of Artificial Sequence: Synthetic oligonucleotide
  Target: ATXN2; (+) strand; PAM type: NRG; PAM sequence: AGG
gctactcaggaggctaagac

SEQ ID NO: 53521 - DNA, 20 bp, Artificial Sequence
  Description of Artificial Sequence: Synthetic oligonucleotide
  Target: ATXN2; (+) strand; PAM type: NRG; PAM sequence: GAG
tactcaggaggctaagacag

SEQ ID NO: 53522 - DNA, 20 bp, Artificial Sequence
  Description of Artificial Sequence: Synthetic oligonucleotide
  Target: ATXN2; (+) strand; PAM type: NRG; PAM sequence: TGG
gctaagacaggagaaatgct

SEQ ID NO: 53523 - DNA, 20 bp, Artificial Sequence
  Description of Artificial Sequence: Synthetic oligonucleotide
  Target: ATXN2; (+) strand; PAM type: NRG; PAM sequence: TAG
aggagaaatgcttggcccca

SEQ ID NO: 53524 - DNA, 20 bp, Artificial Sequence
  Description of Artificial Sequence: Synthetic oligonucleotide
  Target: ATXN2; (+) strand; PAM type: NRG; PAM sequence: GAG
aatgcttggccccatagatt

SEQ ID NO: 53525 - DNA, 20 bp, Artificial Sequence
  Description of Artificial Sequence: Synthetic oligonucleotide
  Target: ATXN2; (+) strand; PAM type: NRG; PAM sequence: AGG
atgcttggccccatagattg

SEQ ID NO: 53526 - DNA, 20 bp, Artificial Sequence
  Description of Artificial Sequence: Synthetic oligonucleotide
  Target: ATXN2; (+) strand; PAM type: NRG; PAM sequence: CAG
catagattgaggctgcactc

SEQ ID NO: 53527 - DNA, 20 bp, Artificial Sequence
  Description of Artificial Sequence: Synthetic oligonucleotide
  Target: ATXN2; (+) strand; PAM type: NRG; PAM sequence: TGG
attgaggctgcactccagcc

SEQ ID NO: 53528 - DNA, 20 bp, Artificial Sequence
  Description of Artificial Sequence: Synthetic oligonucleotide
  Target: ATXN2; (+) strand; PAM type: NRG; PAM sequence: GGG
ttgaggctgcactccagcct

SEQ ID NO: 53529 - DNA, 20 bp, Artificial Sequence
  Description of Artificial Sequence: Synthetic oligonucleotide
  Target: ATXN2; (+) strand; PAM type: NRG; PAM sequence: CAG
ctgcactccagcctgggtga

SEQ ID NO: 53530 - DNA, 20 bp, Artificial Sequence
  Description of Artificial Sequence: Synthetic oligonucleotide
  Target: ATXN2; (+) strand; PAM type: NRG; PAM sequence: GAG
gcactccagcctgggtgaca

SEQ ID NO: 53531 - DNA, 20 bp, Artificial Sequence
  Description of Artificial Sequence: Synthetic oligonucleotide
  Target: ATXN2; (+) strand; PAM type: NRG; PAM sequence: AGG
cactccagcctgggtgacag

SEQ ID NO: 53532 - DNA, 20 bp, Artificial Sequence
  Description of Artificial Sequence: Synthetic oligonucleotide
  Target: ATXN2; (+) strand; PAM type: NRG; PAM sequence: GGG
actccagcctgggtgacaga

SEQ ID NO: 53533 - DNA, 20 bp, Artificial Sequence
  Description of Artificial Sequence: Synthetic oligonucleotide
  Target: ATXN2; (+) strand; PAM type: NRG; PAM sequence: GAG
tccagcctgggtgacagagg

SEQ ID NO: 53534 - DNA, 20 bp, Artificial Sequence
  Description of Artificial Sequence: Synthetic oligonucleotide
  Target: ATXN2; (+) strand; PAM type: NRG; PAM sequence: AAG
tgactctaaaaaaataaata

SEQ ID NO: 53535 - DNA, 20 bp, Artificial Sequence
  Description of Artificial Sequence: Synthetic oligonucleotide
  Target: ATXN2; (+) strand; PAM type: NRG; PAM sequence: AGG
gactctaaaaaaataaataa

SEQ ID NO: 53536 - DNA, 20 bp, Artificial Sequence
  Description of Artificial Sequence: Synthetic oligonucleotide
  Target: ATXN2; (+) strand; PAM type: NRG; PAM sequence: GGG
actctaaaaaaataaataaa

SEQ ID NO: 53537 - DNA, 20 bp, Artificial Sequence
  Description of Artificial Sequence: Synthetic oligonucleotide
  Target: ATXN2; (+) strand; PAM type: NRG; PAM sequence: GAG
tctaaaaaaataaataaagg

SEQ ID NO: 53538 - DNA, 20 bp, Artificial Sequence
  Description of Artificial Sequence: Synthetic oligonucleotide
  Target: ATXN2; (+) strand; PAM type: NRG; PAM sequence: GAG
taaaaaaataaataaaggga

SEQ ID NO: 53539 - DNA, 20 bp, Artificial Sequence
  Description of Artificial Sequence: Synthetic oligonucleotide
  Target: ATXN2; (+) strand; PAM type: NRG; PAM sequence: AGG
aaaaaaataaataaagggag

SEQ ID NO: 53540 - DNA, 20 bp, Artificial Sequence
  Description of Artificial Sequence: Synthetic oligonucleotide
  Target: ATXN2; (+) strand; PAM type: NRG; PAM sequence: TGG
aaatcctacaaatattgctt

SEQ ID NO: 53541 - DNA, 20 bp, Artificial Sequence
  Description of Artificial Sequence: Synthetic oligonucleotide
  Target: ATXN2; (+) strand; PAM type: NRG; PAM sequence: GGG
aatcctacaaatattgcttt

SEQ ID NO: 53542 - DNA, 20 bp, Artificial Sequence
  Description of Artificial Sequence: Synthetic oligonucleotide
  Target: ATXN2; (+) strand; PAM type: NRG; PAM sequence: AAG
ctacaaatattgctttgggc

SEQ ID NO: 53543 - DNA, 20 bp, Artificial Sequence
  Description of Artificial Sequence: Synthetic oligonucleotide
  Target: ATXN2; (+) strand; PAM type: NRG; PAM sequence: AAG
gcaagtcccctaatctctca

SEQ ID NO: 53544 - DNA, 20 bp, Artificial Sequence
  Description of Artificial Sequence: Synthetic oligonucleotide
  Target: ATXN2; (+) strand; PAM type: NRG; PAM sequence: TAG
tcccctaatctctcaaagct

SEQ ID NO: 53545 - DNA, 20 bp, Artificial Sequence
  Description of Artificial Sequence: Synthetic oligonucleotide
  Target: ATXN2; (+) strand; PAM type: NRG; PAM sequence: GAG
ccctaatctctcaaagctta

SEQ ID NO: 53546 - DNA, 20 bp, Artificial Sequence
  Description of Artificial Sequence: Synthetic oligonucleotide
  Target: ATXN2; (+) strand; PAM type: NRG; PAM sequence: AAG
agtttttgccttccattttt

SEQ ID NO: 53547 - DNA, 20 bp, Artificial Sequence
  Description of Artificial Sequence: Synthetic oligonucleotide
  Target: ATXN2; (+) strand; PAM type: NRG; PAM sequence: TAG
tgccttccatttttaagatt

SEQ ID NO: 53548 - DNA, 20 bp, Artificial Sequence
  Description of Artificial Sequence: Synthetic oligonucleotide
  Target: ATXN2; (+) strand; PAM type: NRG; PAM sequence: AGG
gccttccatttttaagattt

SEQ ID NO: 53549 - DNA, 20 bp, Artificial Sequence
  Description of Artificial Sequence: Synthetic oligonucleotide
  Target: ATXN2; (+) strand; PAM type: NRG; PAM sequence: AAG
tgttgttgttactgtttttt

SEQ ID NO: 53550 - DNA, 20 bp, Artificial Sequence
  Description of Artificial Sequence: Synthetic oligonucleotide
  Target: ATXN2; (+) strand; PAM type: NRG; PAM sequence: GAG
ttgttgttactgttttttaa

SEQ ID NO: 53551 - DNA, 20 bp, Artificial Sequence
  Description of Artificial Sequence: Synthetic oligonucleotide
  Target: ATXN2; (+) strand; PAM type: NRG; PAM sequence: CAG
tgttactgttttttaagaga

SEQ ID NO: 53552 - DNA, 20 bp, Artificial Sequence
  Description of Artificial Sequence: Synthetic oligonucleotide
  Target: ATXN2; (+) strand; PAM type: NRG; PAM sequence: AGG
gttactgttttttaagagac

SEQ ID NO: 53553 - DNA, 20 bp, Artificial Sequence
  Description of Artificial Sequence: Synthetic oligonucleotide
  Target: ATXN2; (+) strand; PAM type: NRG; PAM sequence: GGG
ttactgttttttaagagaca

SEQ ID NO: 53554 - DNA, 20 bp, Artificial Sequence
  Description of Artificial Sequence: Synthetic oligonucleotide
  Target: ATXN2; (+) strand; PAM type: NRG; PAM sequence: TAG
ctgttttttaagagacaggg

SEQ ID NO: 53555 - DNA, 20 bp, Artificial Sequence
  Description of Artificial Sequence: Synthetic oligonucleotide
  Target: ATXN2; (+) strand; PAM type: NRG; PAM sequence: AGG
tgttttttaagagacagggt

SEQ ID NO: 53556 - DNA, 20 bp, Artificial Sequence
  Description of Artificial Sequence: Synthetic oligonucleotide
  Target: ATXN2; (+) strand; PAM type: NRG; PAM sequence: CGG
gagacagggtaggctgcgca

SEQ ID NO: 53557 - DNA, 20 bp, Artificial Sequence
  Description of Artificial Sequence: Synthetic oligonucleotide
  Target: ATXN2; (+) strand; PAM type: NRG; PAM sequence: TGG
acagggtaggctgcgcacgg

SEQ ID NO: 53558 - DNA, 20 bp, Artificial Sequence
  Description of Artificial Sequence: Synthetic oligonucleotide
  Target: ATXN2; (+) strand; PAM type: NRG; PAM sequence: CAG
gtggctcatgcctataatcc

SEQ ID NO: 53559 - DNA, 20 bp, Artificial Sequence
  Description of Artificial Sequence: Synthetic oligonucleotide
  Target: ATXN2; (+) strand; PAM type: NRG; PAM sequence: TGG
tgcctataatcccagcactt

SEQ ID NO: 53560 - DNA, 20 bp, Artificial Sequence
  Description of Artificial Sequence: Synthetic oligonucleotide
  Target: ATXN2; (+) strand; PAM type: NRG; PAM sequence: GGG
gcctataatcccagcacttt

SEQ ID NO: 53561 - DNA, 20 bp, Artificial Sequence
  Description of Artificial Sequence: Synthetic oligonucleotide
  Target: ATXN2; (+) strand; PAM type: NRG; PAM sequence: GAG
ctataatcccagcactttgg

SEQ ID NO: 53562 - DNA, 20 bp, Artificial Sequence
  Description of Artificial Sequence: Synthetic oligonucleotide
  Target: ATXN2; (+) strand; PAM type: NRG; PAM sequence: AGG
tataatcccagcactttggg

SEQ ID NO: 53563 - DNA, 20 bp, Artificial Sequence
  Description of Artificial Sequence: Synthetic oligonucleotide
  Target: ATXN2; (+) strand; PAM type: NRG; PAM sequence: AAG
tcccagcactttgggaggcc

SEQ ID NO: 53564 - DNA, 20 bp, Artificial Sequence
  Description of Artificial Sequence: Synthetic oligonucleotide
  Target: ATXN2; (+) strand; PAM type: NRG; PAM sequence: AGG
cccagcactttgggaggcca

SEQ ID NO: 53565 - DNA, 20 bp, Artificial Sequence
  Description of Artificial Sequence: Synthetic oligonucleotide
  Target: ATXN2; (+) strand; PAM type: NRG; PAM sequence: CAG
agcactttgggaggccaagg

SEQ ID NO: 53566 - DNA, 20 bp, Artificial Sequence
  Description of Artificial Sequence: Synthetic oligonucleotide
  Target: ATXN2; (+) strand; PAM type: NRG; PAM sequence: AGG
gcactttgggaggccaaggc

SEQ ID NO: 53567 - DNA, 20 bp, Artificial Sequence
  Description of Artificial Sequence: Synthetic oligonucleotide
  Target: ATXN2; (+) strand; PAM type: NRG; PAM sequence: TGG
ctttgggaggccaaggcagg

SEQ ID NO: 53568 - DNA, 20 bp, Artificial Sequence
  Description of Artificial Sequence: Synthetic oligonucleotide
  Target: ATXN2; (+) strand; PAM type: NRG; PAM sequence: AAG
ccaaggcaggtggatcgctt

SEQ ID NO: 53569 - DNA, 20 bp, Artificial Sequence
  Description of Artificial Sequence: Synthetic oligonucleotide
  Target: ATXN2; (+) strand; PAM type: NRG; PAM sequence: AGG
caaggcaggtggatcgctta

SEQ ID NO: 53570 - DNA, 20 bp, Artificial Sequence
  Description of Artificial Sequence: Synthetic oligonucleotide
  Target: ATXN2; (+) strand; PAM type: NRG; PAM sequence: CAG
gcaggtggatcgcttaaggt

SEQ ID NO: 53571 - DNA, 20 bp, Artificial Sequence
  Description of Artificial Sequence: Synthetic oligonucleotide
  Target: ATXN2; (+) strand; PAM type: NRG; PAM sequence: AGG
caggtggatcgcttaaggtc

SEQ ID NO: 53572 - DNA, 20 bp, Artificial Sequence
  Description of Artificial Sequence: Synthetic oligonucleotide
  Target: ATXN2; (+) strand; PAM type: NRG; PAM sequence: GAG
ggtggatcgcttaaggtcag

SEQ ID NO: 53573 - DNA, 20 bp, Artificial Sequence
  Description of Artificial Sequence: Synthetic oligonucleotide
  Target: ATXN2; (+) strand; PAM type: NRG; PAM sequence: GAG
tcgcttaaggtcaggagttc

SEQ ID NO: 53574 - DNA, 20 bp, Artificial Sequence
  Description of Artificial Sequence: Synthetic oligonucleotide
  Target: ATXN2; (+) strand; PAM type: NRG; PAM sequence: GAG
taaggtcaggagttcgagat

SEQ ID NO: 53575 - DNA, 20 bp, Artificial Sequence
  Description of Artificial Sequence: Synthetic oligonucleotide
  Target: ATXN2; (+) strand; PAM type: NRG; PAM sequence: TGG
cgagatgagcctaaccaaca

SEQ ID NO: 53576 - DNA, 20 bp, Artificial Sequence
  Description of Artificial Sequence: Synthetic oligonucleotide
  Target: ATXN2; (+) strand; PAM type: NRG; PAM sequence: TAG
tctgctaaaaatacaaaaat

SEQ ID NO: 53577 - DNA, 20 bp, Artificial Sequence
  Description of Artificial Sequence: Synthetic oligonucleotide
  Target: ATXN2; (+) strand; PAM type: NRG; PAM sequence: GAG
taaaaatacaaaaattagct

SEQ ID NO: 53578 - DNA, 20 bp, Artificial Sequence
  Description of Artificial Sequence: Synthetic oligonucleotide
  Target: ATXN2; (+) strand; PAM type: NRG; PAM sequence: TGG
aaatacaaaaattagctgag

SEQ ID NO: 53579 - DNA, 20 bp, Artificial Sequence
  Description of Artificial Sequence: Synthetic oligonucleotide
  Target: ATXN2; (+) strand; PAM type: NRG; PAM sequence: GGG
aatacaaaaattagctgagt

SEQ ID NO: 53580 - DNA, 20 bp, Artificial Sequence
  Description of Artificial Sequence: Synthetic oligonucleotide
  Target: ATXN2; (+) strand; PAM type: NRG; PAM sequence: GGG
atacaaaaattagctgagtg

SEQ ID NO: 53581 - DNA, 20 bp, Artificial Sequence
  Description of Artificial Sequence: Synthetic oligonucleotide
  Target: ATXN2; (+) strand; PAM type: NRG; PAM sequence: TAG
caaaaattagctgagtgggg

SEQ ID NO: 53582 - DNA, 20 bp, Artificial Sequence
  Description of Artificial Sequence: Synthetic oligonucleotide
  Target: ATXN2; (+) strand; PAM type: NRG; PAM sequence: CAG
aaattagctgagtggggtag

SEQ ID NO: 53583 - DNA, 20 bp, Artificial Sequence
  Description of Artificial Sequence: Synthetic oligonucleotide
  Target: ATXN2; (+) strand; PAM type: NRG; PAM sequence: AGG
aattagctgagtggggtagc

SEQ ID NO: 53584 - DNA, 20 bp, Artificial Sequence
  Description of Artificial Sequence: Synthetic oligonucleotide
  Target: ATXN2; (+) strand; PAM type: NRG; PAM sequence: CAG
gtagcaggcacctgtaatct

SEQ ID NO: 53585 - DNA, 20 bp, Artificial Sequence
  Description of Artificial Sequence: Synthetic oligonucleotide
  Target: ATXN2; (+) strand; PAM type: NRG; PAM sequence: CAG
cacctgtaatctcagctact

SEQ ID NO: 53586 - DNA, 20 bp, Artificial Sequence
  Description of Artificial Sequence: Synthetic oligonucleotide
  Target: ATXN2; (+) strand; PAM type: NRG; PAM sequence: AAG
ctgtaatctcagctactcag

SEQ ID NO: 53587 - DNA, 20 bp, Artificial Sequence
  Description of Artificial Sequence: Synthetic oligonucleotide
  Target: ATXN2; (+) strand; PAM type: NRG; PAM sequence: AGG
tgtaatctcagctactcaga

SEQ ID NO: 53588 - DNA, 20 bp, Artificial Sequence
  Description of Artificial Sequence: Synthetic oligonucleotide
  Target: ATXN2; (+) strand; PAM type: NRG; PAM sequence: GAG
tctcagctactcagaaggct

SEQ ID NO: 53589 - DNA, 20 bp, Artificial Sequence
  Description of Artificial Sequence: Synthetic oligonucleotide
  Target: ATXN2; (+) strand; PAM type: NRG; PAM sequence: AGG
ctcagctactcagaaggctg

SEQ ID NO: 53590 - DNA, 20 bp, Artificial Sequence
  Description of Artificial Sequence: Synthetic oligonucleotide
  Target: ATXN2; (+) strand; PAM type: NRG; PAM sequence: CAG
agctactcagaaggctgagg

SEQ ID NO: 53591 - DNA, 20 bp, Artificial Sequence
  Description of Artificial Sequence: Synthetic oligonucleotide
  Target: ATXN2; (+) strand; PAM type: NRG; PAM sequence: AGG
gctactcagaaggctgaggc

SEQ ID NO: 53592 - DNA, 20 bp, Artificial Sequence
  Description of Artificial Sequence: Synthetic oligonucleotide
  Target: ATXN2; (+) strand; PAM type: NRG; PAM sequence: GAG
tactcagaaggctgaggcag

SEQ ID NO: 53593 - DNA, 20 bp, Artificial Sequence
  Description of Artificial Sequence: Synthetic oligonucleotide
  Target: ATXN2; (+) strand; PAM type: NRG; PAM sequence: CGG
gcaggagaatcgcttgaacc

SEQ ID NO: 53594 - DNA, 20 bp, Artificial Sequence
  Description of Artificial Sequence: Synthetic oligonucleotide
  Target: ATXN2; (+) strand; PAM type: NRG; PAM sequence: GGG
caggagaatcgcttgaaccc

SEQ ID NO: 53595 - DNA, 20 bp, Artificial Sequence
  Description of Artificial Sequence: Synthetic oligonucleotide
  Target: ATXN2; (+) strand; PAM type: NRG; PAM sequence: CAG
aatcgcttgaacccgggaaa

SEQ ID NO: 53596 - DNA, 20 bp, Artificial Sequence
  Description of Artificial Sequence: Synthetic oligonucleotide
  Target: ATXN2; (+) strand; PAM type: NRG; PAM sequence: GAG
tcgcttgaacccgggaaaca

SEQ ID NO: 53597 - DNA, 20 bp, Artificial Sequence
  Description of Artificial Sequence: Synthetic oligonucleotide
  Target: ATXN2; (+) strand; PAM type: NRG; PAM sequence: AGG
cgcttgaacccgggaaacag

SEQ ID NO: 53598 - DNA, 20 bp, Artificial Sequence
  Description of Artificial Sequence: Synthetic oligonucleotide
  Target: ATXN2; (+) strand; PAM type: NRG; PAM sequence: CAG
aacccgggaaacagaggttg

SEQ ID NO: 53599 - DNA, 20 bp, Artificial Sequence
  Description of Artificial Sequence: Synthetic oligonucleotide
  Target: ATXN2; (+) strand; PAM type: NRG; PAM sequence: GAG
cgggaaacagaggttgcagt

SEQ ID NO: 53600 - DNA, 20 bp, Artificial Sequence
  Description of Artificial Sequence: Synthetic oligonucleotide
  Target: ATXN2; (+) strand; PAM type: NRG; PAM sequence: GAG
aacagaggttgcagtgagct

SEQ ID NO: 53601 - DNA, 20 bp, Artificial Sequence
  Description of Artificial Sequence: Synthetic oligonucleotide
  Target: ATXN2; (+) strand; PAM type: NRG; PAM sequence: CAG
gagattgcaccactgcactc

SEQ ID NO: 53602 - DNA, 20 bp, Artificial Sequence
  Description of Artificial Sequence: Synthetic oligonucleotide
  Target: ATXN2; (+) strand; PAM type: NRG; PAM sequence: TGG
tgcaccactgcactccagcc

SEQ ID NO: 53603 - DNA, 20 bp, Artificial Sequence
  Description of Artificial Sequence: Synthetic oligonucleotide
  Target: ATXN2; (+) strand; PAM type: NRG; PAM sequence: GGG
gcaccactgcactccagcct

SEQ ID NO: 53604 - DNA, 20 bp, Artificial Sequence
  Description of Artificial Sequence: Synthetic oligonucleotide
  Target: ATXN2; (+) strand; PAM type: NRG; PAM sequence: AAG
cactgcactccagcctggga

SEQ ID NO: 53605 - DNA, 20 bp, Artificial Sequence
  Description of Artificial Sequence: Synthetic oligonucleotide
  Target: ATXN2; (+) strand; PAM type: NRG; PAM sequence: GAG
ctgcactccagcctgggaaa

SEQ ID NO: 53606 - DNA, 20 bp, Artificial Sequence
  Description of Artificial Sequence: Synthetic oligonucleotide
  Target: ATXN2; (+) strand; PAM type: NRG; PAM sequence: TAG
caaaaaaaaaaaaaacacct

SEQ ID NO: 53607 - DNA, 20 bp, Artificial Sequence
  Description of Artificial Sequence: Synthetic oligonucleotide
  Target: ATXN2; (+) strand; PAM type: NRG; PAM sequence: GAG
aaaaaaacaccttagctcat

SEQ ID NO: 53608 - DNA, 20 bp, Artificial Sequence
  Description of Artificial Sequence: Synthetic oligonucleotide
  Target: ATXN2; (+) strand; PAM type: NRG; PAM sequence: AGG
aaaaaacaccttagctcatg

SEQ ID NO: 53609 - DNA, 20 bp, Artificial Sequence
  Description of Artificial Sequence: Synthetic oligonucleotide
  Target: ATXN2; (+) strand; PAM type: NRG; PAM sequence: TGG
aacaccttagctcatgaggc

SEQ ID NO: 53610 - DNA, 20 bp, Artificial Sequence
  Description of Artificial Sequence: Synthetic oligonucleotide
  Target: ATXN2; (+) strand; PAM type: NRG; PAM sequence: GGG
acaccttagctcatgaggct

SEQ ID NO: 53611 - DNA, 20 bp, Artificial Sequence
  Description of Artificial Sequence: Synthetic oligonucleotide
  Target: ATXN2; (+) strand; PAM type: NRG; PAM sequence: CGG
ccttagctcatgaggctggg

SEQ ID NO: 53612 - DNA, 20 bp, Artificial Sequence
  Description of Artificial Sequence: Synthetic oligonucleotide
  Target: ATXN2; (+) strand; PAM type: NRG; PAM sequence: GGG
cttagctcatgaggctgggc

SEQ ID NO: 53613 - DNA, 20 bp, Artificial Sequence
  Description of Artificial Sequence: Synthetic oligonucleotide
  Target: ATXN2; (+) strand; PAM type: NRG; PAM sequence: GGG
ttagctcatgaggctgggcg

SEQ ID NO: 53614 - DNA, 20 bp, Artificial Sequence
  Description of Artificial Sequence: Synthetic oligonucleotide
  Target: ATXN2; (+) strand; PAM type: NRG; PAM sequence: GGG
tagctcatgaggctgggcgg

SEQ ID NO: 53615 - DNA, 20 bp, Artificial Sequence
  Description of Artificial Sequence: Synthetic oligonucleotide
  Target: ATXN2; (+) strand; PAM type: NRG; PAM sequence: TGG
ctcatgaggctgggcggggg

SEQ ID NO: 53616 - DNA, 20 bp, Artificial Sequence
  Description of Artificial Sequence: Synthetic oligonucleotide
  Target: ATXN2; (+) strand; PAM type: NRG; PAM sequence: CAG
gtggctcacgcctgtaatcc

SEQ ID NO: 53617 - DNA, 20 bp, Artificial Sequence
  Description of Artificial Sequence: Synthetic oligonucleotide
  Target: ATXN2; (+) strand; PAM type: NRG; PAM sequence: TGG
cgcctgtaatcccagcactt

SEQ ID NO: 53618 - DNA, 20 bp, Artificial Sequence
  Description of Artificial Sequence: Synthetic oligonucleotide
  Target: ATXN2; (+) strand; PAM type: NRG; PAM sequence: GGG
gcctgtaatcccagcacttt

SEQ ID NO: 53619 - DNA, 20 bp, Artificial Sequence
  Description of Artificial Sequence: Synthetic oligonucleotide
  Target: ATXN2; (+) strand; PAM type: NRG; PAM sequence: GAG
ctgtaatcccagcactttgg

SEQ ID NO: 53620 - DNA, 20 bp, Artificial Sequence
  Description of Artificial Sequence: Synthetic oligonucleotide
  Target: ATXN2; (+) strand; PAM type: NRG; PAM sequence: AGG
tgtaatcccagcactttggg

SEQ ID NO: 53621 - DNA, 20 bp, Artificial Sequence
  Description of Artificial Sequence: Synthetic oligonucleotide
  Target: ATXN2; (+) strand; PAM type: NRG; PAM sequence: GAG
tcccagcactttgggaggcc

SEQ ID NO: 53622 - DNA, 20 bp, Artificial Sequence
  Description of Artificial Sequence: Synthetic oligonucleotide
  Target: ATXN2; (+) strand; PAM type: NRG; PAM sequence: AGG
cccagcactttgggaggccg

SEQ ID NO: 53623 - DNA, 20 bp, Artificial Sequence
  Description of Artificial Sequence: Synthetic oligonucleotide
  Target: ATXN2; (+) strand; PAM type: NRG; PAM sequence: AAG
gcactttgggaggccgaggc

SEQ ID NO: 53624 - DNA, 20 bp, Artificial Sequence
  Description of Artificial Sequence: Synthetic oligonucleotide
  Target: ATXN2; (+) strand; PAM type: NRG; PAM sequence: GAG
ccgaggcaagcgaatcacct

SEQ ID NO: 53625 - DNA, 20 bp, Artificial Sequence
  Description of Artificial Sequence: Synthetic oligonucleotide
  Target: ATXN2; (+) strand; PAM type: NRG; PAM sequence: AGG
cgaggcaagcgaatcacctg

SEQ ID NO: 53626 - DNA, 20 bp, Artificial Sequence
  Description of Artificial Sequence: Synthetic oligonucleotide
  Target: ATXN2; (+) strand; PAM type: NRG; PAM sequence: CAG
gcaagcgaatcacctgaggt

SEQ ID NO: 53627 - DNA, 20 bp, Artificial Sequence
  Description of Artificial Sequence: Synthetic oligonucleotide
  Target: ATXN2; (+) strand; PAM type: NRG; PAM sequence: AGG
caagcgaatcacctgaggtc

SEQ ID NO: 53628 - DNA, 20 bp, Artificial Sequence
  Description of Artificial Sequence: Synthetic oligonucleotide
  Target: ATXN2; (+) strand; PAM type: NRG; PAM sequence: GAG
agcgaatcacctgaggtcag

SEQ ID NO: 53629 - DNA, 20 bp, Artificial Sequence
  Description of Artificial Sequence: Synthetic oligonucleotide
  Target: ATXN2; (+) strand; PAM type: NRG; PAM sequence: AAG
tcacctgaggtcaggagttc

SEQ ID NO: 53630 - DNA, 20 bp, Artificial Sequence
  Description of Artificial Sequence: Synthetic oligonucleotide
  Target: ATXN2; (+) strand; PAM type: NRG; PAM sequence: GAG
acctgaggtcaggagttcaa

SEQ ID NO: 53631 - DNA, 20 bp, Artificial Sequence
  Description of Artificial Sequence: Synthetic oligonucleotide
  Target: ATXN2; (+) strand; PAM type: NRG; PAM sequence: CAG
tgaggtcaggagttcaagag

SEQ ID NO: 53632 - DNA, 20 bp, Artificial Sequence
  Description of Artificial Sequence: Synthetic oligonucleotide
  Target: ATXN2; (+) strand; PAM type: NRG; PAM sequence: TGG
tcaggagttcaagagcagcc

SEQ ID NO: 53633 - DNA, 20 bp, Artificial Sequence
  Description of Artificial Sequence: Synthetic oligonucleotide
  Target: ATXN2; (+) strand; PAM type: NRG; PAM sequence: TGG
caagagcagcctggccaaca

SEQ ID NO: 53634 - DNA, 20 bp, Artificial Sequence
  Description of Artificial Sequence: Synthetic oligonucleotide
  Target: ATXN2; (+) strand; PAM type: NRG; PAM sequence: TAG
tctactaaaaatgcaaaact

SEQ ID NO: 53635 - DNA, 20 bp, Artificial Sequence
  Description of Artificial Sequence: Synthetic oligonucleotide
  Target: ATXN2; (+) strand; PAM type: NRG; PAM sequence: CAG
ctaaaaatgcaaaacttagc

SEQ ID NO: 53636 - DNA, 20 bp, Artificial Sequence
  Description of Artificial Sequence: Synthetic oligonucleotide
  Target: ATXN2; (+) strand; PAM type: NRG; PAM sequence: AGG
taaaaatgcaaaacttagcc

SEQ ID NO: 53637 - DNA, 20 bp, Artificial Sequence
  Description of Artificial Sequence: Synthetic oligonucleotide
  Target: ATXN2; (+) strand; PAM type: NRG; PAM sequence: TGG
atgcaaaacttagccaggca

SEQ ID NO: 53638 - DNA, 20 bp, Artificial Sequence
  Description of Artificial Sequence: Synthetic oligonucleotide
  Target: ATXN2; (+) strand; PAM type: NRG; PAM sequence: TGG
caaaacttagccaggcatgg

SEQ ID NO: 53639 - DNA, 20 bp, Artificial Sequence
  Description of Artificial Sequence: Synthetic oligonucleotide
  Target: ATXN2; (+) strand; PAM type: NRG; PAM sequence: CGG
aacttagccaggcatggtgg

SEQ ID NO: 53640 - DNA, 20 bp, Artificial Sequence
  Description of Artificial Sequence: Synthetic oligonucleotide
  Target: ATXN2; (+) strand; PAM type: NRG; PAM sequence: GGG
acttagccaggcatggtggc

SEQ ID NO: 53641 - DNA, 20 bp, Artificial Sequence
  Description of Artificial Sequence: Synthetic oligonucleotide
  Target: ATXN2; (+) strand; PAM type: NRG; PAM sequence: CAG
gtggcgggtgcctgtaatcc

SEQ ID NO: 53642 - DNA, 20 bp, Artificial Sequence
  Description of Artificial Sequence: Synthetic oligonucleotide
  Target: ATXN2; (+) strand; PAM type: NRG; PAM sequence: CGG
tgcctgtaatcccagctatt

SEQ ID NO: 53643 - DNA, 20 bp, Artificial Sequence
  Description of Artificial Sequence: Synthetic oligonucleotide
  Target: ATXN2; (+) strand; PAM type: NRG; PAM sequence: GGG
gcctgtaatcccagctattc

SEQ ID NO: 53644 - DNA, 20 bp, Artificial Sequence
  Description of Artificial Sequence: Synthetic oligonucleotide
  Target: ATXN2; (+) strand; PAM type: NRG; PAM sequence: GAG
ctgtaatcccagctattcgg

SEQ ID NO: 53645 - DNA, 20 bp, Artificial Sequence
  Description of Artificial Sequence: Synthetic oligonucleotide
  Target: ATXN2; (+) strand; PAM type: NRG; PAM sequence: AGG
tgtaatcccagctattcggg

SEQ ID NO: 53646 - DNA, 20 bp, Artificial Sequence
  Description of Artificial Sequence: Synthetic oligonucleotide
  Target: ATXN2; (+) strand; PAM type: NRG; PAM sequence: GGG
gtaatcccagctattcggga

SEQ ID NO: 53647 - DNA, 20 bp, Artificial Sequence
  Description of Artificial Sequence: Synthetic oligonucleotide
  Target: ATXN2; (+) strand; PAM type: NRG; PAM sequence: AAG
cccagctattcgggagggct

SEQ ID NO: 53648 - DNA, 20 bp, Artificial Sequence
  Description of Artificial Sequence: Synthetic oligonucleotide
  Target: ATXN2; (+) strand; PAM type: NRG; PAM sequence: AGG
ccagctattcgggagggcta

SEQ ID NO: 53649 - DNA, 20 bp, Artificial Sequence
  Description of Artificial Sequence: Synthetic oligonucleotide
  Target: ATXN2; (+) strand; PAM type: NRG; PAM sequence: CAG
gctattcgggagggctaagg

SEQ ID NO: 53650 - DNA, 20 bp, Artificial Sequence
  Description of Artificial Sequence: Synthetic oligonucleotide
  Target: ATXN2; (+) strand; PAM type: NRG; PAM sequence: AGG
ctattcgggagggctaaggc

SEQ ID NO: 53651 - DNA, 20 bp, Artificial Sequence
  Description of Artificial Sequence: Synthetic oligonucleotide
  Target: ATXN2; (+) strand; PAM type: NRG; PAM sequence: GAG
attcgggagggctaaggcag

SEQ ID NO: 53652 - DNA, 20 bp, Artificial Sequence
  Description of Artificial Sequence: Synthetic oligonucleotide
  Target: ATXN2; (+) strand; PAM type: NRG; PAM sequence: TGG
gcaggagaattgcttgaacc

SEQ ID NO: 53653 - DNA, 20 bp, Artificial Sequence
  Description of Artificial Sequence: Synthetic oligonucleotide
  Target: ATXN2; (+) strand; PAM type: NRG; PAM sequence: GGG
caggagaattgcttgaacct

SEQ ID NO: 53654 - DNA, 20 bp, Artificial Sequence
  Description of Artificial Sequence: Synthetic oligonucleotide
  Target: ATXN2; (+) strand; PAM type: NRG; PAM sequence: GAG
ggagaattgcttgaacctgg

SEQ ID NO: 53655 - DNA, 20 bp, Artificial Sequence
  Description of Artificial Sequence: Synthetic oligonucleotide
  Target: ATXN2; (+) strand; PAM type: NRG; PAM sequence: AGG
gagaattgcttgaacctggg

SEQ ID NO: 53656 - DNA, 20 bp, Artificial Sequence
  Description of Artificial Sequence: Synthetic oligonucleotide
  Target: ATXN2; (+) strand; PAM type: NRG; PAM sequence: CGG
aattgcttgaacctgggagg

SEQ ID NO: 53657 - DNA, 20 bp, Artificial Sequence
  Description of Artificial Sequence: Synthetic oligonucleotide
  Target: ATXN2; (+) strand; PAM type: NRG; PAM sequence: GAG
ttgcttgaacctgggaggcg

SEQ ID NO: 53658 - DNA, 20 bp, Artificial Sequence
  Description of Artificial Sequence: Synthetic oligonucleotide
  Target: ATXN2; (+) strand; PAM type: NRG; PAM sequence: AGG
tgcttgaacctgggaggcgg

SEQ ID NO: 53659 - DNA, 20 bp, Artificial Sequence
  Description of Artificial Sequence: Synthetic oligonucleotide
  Target: ATXN2; (+) strand; PAM type: NRG; PAM sequence: CAG
aacctgggaggcggaggttg

SEQ ID NO: 53660 - DNA, 20 bp, Artificial Sequence
  Description of Artificial Sequence: Synthetic oligonucleotide
  Target: ATXN2; (+) strand; PAM type: NRG; PAM sequence: GAG
tgggaggcggaggttgcagt

SEQ ID NO: 53661 - DNA, 20 bp, Artificial Sequence
  Description of Artificial Sequence: Synthetic oligonucleotide
  Target: ATXN2; (+) strand; PAM type: NRG; PAM sequence: AAG
ggcggaggttgcagtgagcc

SEQ ID NO: 53662 - DNA, 20 bp, Artificial Sequence
  Description of Artificial Sequence: Synthetic oligonucleotide
  Target: ATXN2; (+) strand; PAM type: NRG; PAM sequence: CAG
aagatcacgccactgcactc

SEQ ID NO: 53663 - DNA, 20 bp, Artificial Sequence
  Description of Artificial Sequence: Synthetic oligonucleotide
  Target: ATXN2; (+) strand; PAM type: NRG; PAM sequence: TGG
cacgccactgcactccagcc

SEQ ID NO: 53664 - DNA, 20 bp, Artificial Sequence
  Description of Artificial Sequence: Synthetic oligonucleotide
  Target: ATXN2; (+) strand; PAM type: NRG; PAM sequence: GGG
acgccactgcactccagcct

SEQ ID NO: 53665 - DNA, 20 bp, Artificial Sequence
  Description of Artificial Sequence: Synthetic oligonucleotide
  Target: ATXN2; (+) strand; PAM type: NRG; PAM sequence: CAG
ctgcactccagcctgggcga

SEQ ID NO: 53666 - DNA, 20 bp, Artificial Sequence
  Description of Artificial Sequence: Synthetic oligonucleotide
  Target: ATXN2; (+) strand; PAM type: NRG; PAM sequence: GAG
gcactccagcctgggcgaca

SEQ ID NO: 53667 - DNA, 20 bp, Artificial Sequence
  Description of Artificial Sequence: Synthetic oligonucleotide
  Target: ATXN2; (+) strand; PAM type: NRG; PAM sequence: TAG
aaaacaaacaaaaaaaccct

SEQ ID NO: 53668 - DNA, 20 bp, Artificial Sequence
  Description of Artificial Sequence: Synthetic oligonucleotide
  Target: ATXN2; (+) strand; PAM type: NRG; PAM sequence: TGG
caaacaaaaaaacccttaga

SEQ ID NO: 53669 - DNA, 20 bp, Artificial Sequence
  Description of Artificial Sequence: Synthetic oligonucleotide
  Target: ATXN2; (+) strand; PAM type: NRG; PAM sequence: CAG
aaaaaacccttagatggtaa

SEQ ID NO: 53670 - DNA, 20 bp, Artificial Sequence
  Description of Artificial Sequence: Synthetic oligonucleotide
  Target: ATXN2; (+) strand; PAM type: NRG; PAM sequence: TAG
agatggtaacagtaacatca

SEQ ID NO: 53671 - DNA, 20 bp, Artificial Sequence
  Description of Artificial Sequence: Synthetic oligonucleotide
  Target: ATXN2; (+) strand; PAM type: NRG; PAM sequence: CAG
cagtaacatcatagatgacc

SEQ ID NO: 53672 - DNA, 20 bp, Artificial Sequence
  Description of Artificial Sequence: Synthetic oligonucleotide
  Target: ATXN2; (+) strand; PAM type: NRG; PAM sequence: TGG
tagatgacccagatatcctt

SEQ ID NO: 53673 - DNA, 20 bp, Artificial Sequence
  Description of Artificial Sequence: Synthetic oligonucleotide
  Target: ATXN2; (+) strand; PAM type: NRG; PAM sequence: AAG
gaaaaaaacaaaaaaaacac

SEQ ID NO: 53674 - DNA, 20 bp, Artificial Sequence
  Description of Artificial Sequence: Synthetic oligonucleotide
  Target: ATXN2; (+) strand; PAM type: NRG; PAM sequence: AAG
cacaagtactttcatttaaa

SEQ ID NO: 53675 - DNA, 20 bp, Artificial Sequence
  Description of Artificial Sequence: Synthetic oligonucleotide
  Target: ATXN2; (+) strand; PAM type: NRG; PAM sequence: CGG
tactttcatttaaaaagata

SEQ ID NO: 53676 - DNA, 20 bp, Artificial Sequence
  Description of Artificial Sequence: Synthetic oligonucleotide
  Target: ATXN2; (+) strand; PAM type: NRG; PAM sequence: CAG
tttcatttaaaaagatacgg

SEQ ID NO: 53677 - DNA, 20 bp, Artificial Sequence
  Description of Artificial Sequence: Synthetic oligonucleotide
  Target: ATXN2; (+) strand; PAM type: NRG; PAM sequence: CGG
catttaaaaagatacggcag

SEQ ID NO: 53678 - DNA, 20 bp, Artificial Sequence
  Description of Artificial Sequence: Synthetic oligonucleotide
  Target: ATXN2; (+) strand; PAM type: NRG; PAM sequence: AAG
aaaaagatacggcagcggcc

SEQ ID NO: 53679 - DNA, 20 bp, Artificial Sequence
  Description of Artificial Sequence: Synthetic oligonucleotide
  Target: ATXN2; (+) strand; PAM type: NRG; PAM sequence: CGG
gatacggcagcggccaagca

SEQ ID NO: 53680 - DNA, 20 bp, Artificial Sequence
  Description of Artificial Sequence: Synthetic oligonucleotide
  Target: ATXN2; (+) strand; PAM type: NRG; PAM sequence: TGG
acggcagcggccaagcacgg

SEQ ID NO: 53681 - DNA, 20 bp, Artificial Sequence
  Description of Artificial Sequence: Synthetic oligonucleotide
  Target: ATXN2; (+) strand; PAM type: NRG; PAM sequence: CAG
gtggctcatgcctgtaatcc

SEQ ID NO: 53682 - DNA, 20 bp, Artificial Sequence
  Description of Artificial Sequence: Synthetic oligonucleotide
  Target: ATXN2; (+) strand; PAM type: NRG; PAM sequence: TGG
tgcctgtaatcccagaactt

SEQ ID NO: 53683 - DNA, 20 bp, Artificial Sequence
  Description of Artificial Sequence: Synthetic oligonucleotide
  Target: ATXN2; (+) strand; PAM type: NRG; PAM sequence: GGG
gcctgtaatcccagaacttt

SEQ ID NO: 53684 - DNA, 20 bp, Artificial Sequence
  Description of Artificial Sequence: Synthetic oligonucleotide
  Target: ATXN2; (+) strand; PAM type: NRG; PAM sequence: GAG
ctgtaatcccagaactttgg

SEQ ID NO: 53685 - DNA, 20 bp, Artificial Sequence
  Description of Artificial Sequence: Synthetic oligonucleotide
  Target: ATXN2; (+) strand; PAM type: NRG; PAM sequence: AGG
tgtaatcccagaactttggg

SEQ ID NO: 53686 - DNA, 20 bp, Artificial Sequence
  Description of Artificial Sequence: Synthetic oligonucleotide
  Target: ATXN2; (+) strand; PAM type: NRG; PAM sequence: GAG
tcccagaactttgggaggct

SEQ ID NO: 53687 - DNA, 20 bp, Artificial Sequence
  Description of Artificial Sequence: Synthetic oligonucleotide
  Target: ATXN2; (+) strand; PAM type: NRG; PAM sequence: AGG
cccagaactttgggaggctg

SEQ ID NO: 53688 - DNA, 20 bp, Artificial Sequence
  Description of Artificial Sequence: Synthetic oligonucleotide
  Target: ATXN2; (+) strand; PAM type: NRG; PAM sequence: CAG
agaactttgggaggctgagg

SEQ ID NO: 53689 - DNA, 20 bp, Artificial Sequence
  Description of Artificial Sequence: Synthetic oligonucleotide
  Target: ATXN2; (+) strand; PAM type: NRG; PAM sequence: AGG
gaactttgggaggctgaggc

SEQ ID NO: 53690 - DNA, 20 bp, Artificial Sequence
  Description of Artificial Sequence: Synthetic oligonucleotide
  Target: ATXN2; (+) strand; PAM type: NRG; PAM sequence: TGG
ctttgggaggctgaggcagg

SEQ ID NO: 53691 - DNA, 20 bp, Artificial Sequence
  Description of Artificial Sequence: Synthetic oligonucleotide
  Target: ATXN2; (+) strand; PAM type: NRG; PAM sequence: GAG
ctgaggcaggtggatcacct

SEQ ID NO: 53692 - DNA, 20 bp, Artificial Sequence
  Description of Artificial Sequence: Synthetic oligonucleotide
  Target: ATXN2; (+) strand; PAM type: NRG; PAM sequence: AGG
tgaggcaggtggatcacctg

SEQ ID NO: 53693 - DNA, 20 bp, Artificial Sequence
  Description of Artificial Sequence: Synthetic oligonucleotide
  Target: ATXN2; (+) strand; PAM type: NRG; PAM sequence: CAG
gcaggtggatcacctgaggt

SEQ ID NO: 53694 - DNA, 20 bp, Artificial Sequence
  Description of Artificial Sequence: Synthetic oligonucleotide
  Target: ATXN2; (+) strand; PAM type: NRG; PAM sequence: AGG
caggtggatcacctgaggtc

SEQ ID NO: 53695 - DNA, 20 bp, Artificial Sequence
  Description of Artificial Sequence: Synthetic oligonucleotide
  Target: ATXN2; (+) strand; PAM type: NRG; PAM sequence: GAG
ggtggatcacctgaggtcag

SEQ ID NO: 53696 - DNA, 20 bp, Artificial Sequence
  Description of Artificial Sequence: Synthetic oligonucleotide
  Target: ATXN2; (+) strand; PAM type: NRG; PAM sequence: GAG
tcacctgaggtcaggagttt

SEQ ID NO: 53697 - DNA, 20 bp, Artificial Sequence
  Description of Artificial Sequence: Synthetic oligonucleotide
  Target: ATXN2; (+) strand; PAM type: NRG; PAM sequence: TAG
tcaggagtttgagaccattc

SEQ ID NO: 53698 - DNA, 20 bp, Artificial Sequence
  Description of Artificial Sequence: Synthetic oligonucleotide
  Target: ATXN2; (+) strand; PAM type: NRG; PAM sequence: TGG
tgagaccattctagccaaca

SEQ ID NO: 53699 - DNA, 20 bp, Artificial Sequence
  Description of Artificial Sequence: Synthetic oligonucleotide
  Target: ATXN2; (+) strand; PAM type: NRG; PAM sequence: TAG
tctactaaaaatacaaaaat

SEQ ID NO: 53700 - DNA, 20 bp, Artificial Sequence
  Description of Artificial Sequence: Synthetic oligonucleotide
  Target: ATXN2; (+) strand; PAM type: NRG; PAM sequence: CAG
ctaaaaatacaaaaattagc

SEQ ID NO: 53701 - DNA, 20 bp, Artificial Sequence
  Description of Artificial Sequence: Synthetic oligonucleotide
  Target: ATXN2; (+) strand; PAM type: NRG; PAM sequence: AGG
taaaaatacaaaaattagcc

SEQ ID NO: 53702 - DNA, 20 bp, Artificial Sequence
  Description of Artificial Sequence: Synthetic oligonucleotide
  Target: ATXN2; (+) strand; PAM type: NRG; PAM sequence: TGG
atacaaaaattagccaggcg

SEQ ID NO: 53703 - DNA, 20 bp, Artificial Sequence
  Description of Artificial Sequence: Synthetic oligonucleotide
  Target: ATXN2; (+) strand; PAM type: NRG; PAM sequence: TGG
caaaaattagccaggcgtgg

SEQ ID NO: 53704 - DNA, 20 bp, Artificial Sequence
  Description of Artificial Sequence: Synthetic oligonucleotide
  Target: ATXN2; (+) strand; PAM type: NRG; PAM sequence: TAG
ggcgtggtggtgtgcgcatg

SEQ ID NO: 53705 - DNA, 20 bp, Artificial Sequence
  Description of Artificial Sequence: Synthetic oligonucleotide
  Target: ATXN2; (+) strand; PAM type: NRG; PAM sequence: CAG
gtggtgtgcgcatgtagacc

SEQ ID NO: 53706 - DNA, 20 bp, Artificial Sequence
  Description of Artificial Sequence: Synthetic oligonucleotide
  Target: ATXN2; (+) strand; PAM type: NRG; PAM sequence: CAG
cgcatgtagacccagctact

SEQ ID NO: 53707 - DNA, 20 bp, Artificial Sequence
  Description of Artificial Sequence: Synthetic oligonucleotide
  Target: ATXN2; (+) strand; PAM type: NRG; PAM sequence: AGG
gcatgtagacccagctactc

SEQ ID NO: 53708 - DNA, 20 bp, Artificial Sequence
  Description of Artificial Sequence: Synthetic oligonucleotide
  Target: ATXN2; (+) strand; PAM type: NRG; PAM sequence: GAG
atgtagacccagctactcag

SEQ ID NO: 53709 - DNA, 20 bp, Artificial Sequence
  Description of Artificial Sequence: Synthetic oligonucleotide
  Target: ATXN2; (+) strand; PAM type: NRG; PAM sequence: AGG
tgtagacccagctactcagg

SEQ ID NO: 53710 - DNA, 20 bp, Artificial Sequence
  Description of Artificial Sequence: Synthetic oligonucleotide
  Target: ATXN2; (+) strand; PAM type: NRG; PAM sequence: GAG
acccagctactcaggaggct

SEQ ID NO: 53711 - DNA, 20 bp, Artificial Sequence
  Description of Artificial Sequence: Synthetic oligonucleotide
  Target: ATXN2; (+) strand; PAM type: NRG; PAM sequence: AGG
cccagctactcaggaggctg

SEQ ID NO: 53712 - DNA, 20 bp, Artificial Sequence
  Description of Artificial Sequence: Synthetic oligonucleotide
  Target: ATXN2; (+) strand; PAM type: NRG; PAM sequence: CAG
agctactcaggaggctgagg

SEQ ID NO: 53713 - DNA, 20 bp, Artificial Sequence
  Description of Artificial Sequence: Synthetic oligonucleotide
  Target: ATXN2; (+) strand; PAM type: NRG; PAM sequence: AGG
gctactcaggaggctgaggc

SEQ ID NO: 53714 - DNA, 20 bp, Artificial Sequence
  Description of Artificial Sequence: Synthetic oligonucleotide
  Target: ATXN2; (+) strand; PAM type: NRG; PAM sequence: GAG
tactcaggaggctgaggcag

SEQ ID NO: 53715 - DNA, 20 bp, Artificial Sequence
  Description of Artificial Sequence: Synthetic oligonucleotide
  Target: ATXN2; (+) strand; PAM type: NRG; PAM sequence: CGG
gcaggagaatcacttgaacc

SEQ ID NO: 53716 - DNA, 20 bp, Artificial Sequence
  Description of Artificial Sequence: Synthetic oligonucleotide
  Target: ATXN2; (+) strand; PAM type: NRG; PAM sequence: GGG
caggagaatcacttgaaccc

SEQ ID NO: 53717 - DNA, 20 bp, Artificial Sequence
  Description of Artificial Sequence: Synthetic oligonucleotide
  Target: ATXN2; (+) strand; PAM type: NRG; PAM sequence: GAG
ggagaatcacttgaacccgg

SEQ ID NO: 53718 - DNA, 20 bp, Artificial Sequence
  Description of Artificial Sequence: Synthetic oligonucleotide
  Target: ATXN2; (+) strand; PAM type: NRG; PAM sequence: AGG
gagaatcacttgaacccggg

SEQ ID NO: 53719 - DNA, 20 bp, Artificial Sequence
  Description of Artificial Sequence: Synthetic oligonucleotide
  Target: ATXN2; (+) strand; PAM type: NRG; PAM sequence: AAG
tcacttgaacccgggaggca

SEQ ID NO: 53720 - DNA, 20 bp, Artificial Sequence
  Description of Artificial Sequence: Synthetic oligonucleotide
  Target: ATXN2; (+) strand; PAM type: NRG; PAM sequence: AGG
cacttgaacccgggaggcaa

SEQ ID NO: 53721 - DNA, 20 bp, Artificial Sequence
  Description of Artificial Sequence: Synthetic oligonucleotide
  Target: ATXN2; (+) strand; PAM type: NRG; PAM sequence: CAG
aacccgggaggcaaaggttg

SEQ ID NO: 53722 - DNA, 20 bp, Artificial Sequence
  Description of Artificial Sequence: Synthetic oligonucleotide
  Target: ATXN2; (+) strand; PAM type: NRG; PAM sequence: AAG
cgggaggcaaaggttgcagt

SEQ ID NO: 53723 - DNA, 20 bp, Artificial Sequence
  Description of Artificial Sequence: Synthetic oligonucleotide
  Target: ATXN2; (+) strand; PAM type: NRG; PAM sequence: CAG
gaggcaaaggttgcagtaag

SEQ ID NO: 53724 - DNA, 20 bp, Artificial Sequence
  Description of Artificial Sequence: Synthetic oligonucleotide
  Target: ATXN2; (+) strand; PAM type: NRG; PAM sequence: GAG
ggcaaaggttgcagtaagca

SEQ ID NO: 53725 - DNA, 20 bp, Artificial Sequence
  Description of Artificial Sequence: Synthetic oligonucleotide
  Target: ATXN2; (+) strand; PAM type: NRG; PAM sequence: CAG
gagatcgtgccactgcactc

SEQ ID NO: 53726 - DNA, 20 bp, Artificial Sequence
  Description of Artificial Sequence: Synthetic oligonucleotide
  Target: ATXN2; (+) strand; PAM type: NRG; PAM sequence: TGG
cgtgccactgcactccagcc

SEQ ID NO: 53727 - DNA, 20 bp, Artificial Sequence
  Description of Artificial Sequence: Synthetic oligonucleotide
  Target: ATXN2; (+) strand; PAM type: NRG; PAM sequence: GGG
gtgccactgcactccagcct

SEQ ID NO: 53728 - DNA, 20 bp, Artificial Sequence
  Description of Artificial Sequence: Synthetic oligonucleotide
  Target: ATXN2; (+) strand; PAM type: NRG; PAM sequence: CAG
ctgcactccagcctgggcga

SEQ ID NO: 53729 - DNA, 20 bp, Artificial Sequence
  Description of Artificial Sequence: Synthetic oligonucleotide
  Target: ATXN2; (+) strand; PAM type: NRG; PAM sequence: GAG
gcactccagcctgggcgaca

SEQ ID NO: 53730 - DNA, 20 bp, Artificial Sequence
  Description of Artificial Sequence: Synthetic oligonucleotide
  Target: ATXN2; (+) strand; PAM type: NRG; PAM sequence: AAG
tccagcctgggcgacagagc

SEQ ID NO: 53731 - DNA, 20 bp, Artificial Sequence
  Description of Artificial Sequence: Synthetic oligonucleotide
  Target: ATXN2; (+) strand; PAM type: NRG; PAM sequence: AAG
aaaaaaaaaaaaaaaaaaaa

SEQ ID NO: 53732 - DNA, 20 bp, Artificial Sequence
  Description of Artificial Sequence: Synthetic oligonucleotide
  Target: ATXN2; (+) strand; PAM type: NRG; PAM sequence: TAG
aaaaaaaaaaaaaaagataa

SEQ ID NO: 53733 - DNA, 20 bp, Artificial Sequence
  Description of Artificial Sequence: Synthetic oligonucleotide
  Target: ATXN2; (+) strand; PAM type: NRG; PAM sequence: AGG
aaaaaaaaaaaaaagataat

SEQ ID NO: 53734 - DNA, 20 bp, Artificial Sequence
  Description of Artificial Sequence: Synthetic oligonucleotide
  Target: ATXN2; (+) strand; PAM type: NRG; PAM sequence: AAG
aactgtttacatctccgttg

SEQ ID NO: 53735 - DNA, 20 bp, Artificial Sequence
  Description of Artificial Sequence: Synthetic oligonucleotide
  Target: ATXN2; (+) strand; PAM type: NRG; PAM sequence: TAG
gttgtcacaatcacttgaaa

SEQ ID NO: 53736 - DNA, 20 bp, Artificial Sequence
  Description of Artificial Sequence: Synthetic oligonucleotide
  Target: ATXN2; (+) strand; PAM type: NRG; PAM sequence: TAG
gaaatagctaaaaaaaaaaa

SEQ ID NO: 53737 - DNA, 20 bp, Artificial Sequence
  Description of Artificial Sequence: Synthetic oligonucleotide
  Target: ATXN2; (+) strand; PAM type: NRG; PAM sequence: AGG
aaatagctaaaaaaaaaaat

SEQ ID NO: 53738 - DNA, 20 bp, Artificial Sequence
  Description of Artificial Sequence: Synthetic oligonucleotide
  Target: ATXN2; (+) strand; PAM type: NRG; PAM sequence: GGG
aatagctaaaaaaaaaaata

SEQ ID NO: 53739 - DNA, 20 bp, Artificial Sequence
  Description of Artificial Sequence: Synthetic oligonucleotide
  Target: ATXN2; (+) strand; PAM type: NRG; PAM sequence: TAG
caacatcaaaatactatcac

SEQ ID NO: 53740 - DNA, 20 bp, Artificial Sequence
  Description of Artificial Sequence: Synthetic oligonucleotide
  Target: ATXN2; (+) strand; PAM type: NRG; PAM sequence: CAG
aatactatcactagtcaaaa

SEQ ID NO: 53741 - DNA, 20 bp, Artificial Sequence
  Description of Artificial Sequence: Synthetic oligonucleotide
  Target: ATXN2; (+) strand; PAM type: NRG; PAM sequence: TAG
aaaacagaaaattgtaattc

SEQ ID NO: 53742 - DNA, 20 bp, Artificial Sequence
  Description of Artificial Sequence: Synthetic oligonucleotide
  Target: ATXN2; (+) strand; PAM type: NRG; PAM sequence: GAG
aacagaaaattgtaattcta

SEQ ID NO: 53743 - DNA, 20 bp, Artificial Sequence
  Description of Artificial Sequence: Synthetic oligonucleotide
  Target: ATXN2; (+) strand; PAM type: NRG; PAM sequence: AAG
aaaccttaaaattcgtttca

SEQ ID NO: 53744 - DNA, 20 bp, Artificial Sequence
  Description of Artificial Sequence: Synthetic oligonucleotide
  Target: ATXN2; (+) strand; PAM type: NRG; PAM sequence: AAG
taaaaaaacaatactttgct

SEQ ID NO: 53745 - DNA, 20 bp, Artificial Sequence
  Description of Artificial Sequence: Synthetic oligonucleotide
  Target: ATXN2; (+) strand; PAM type: NRG; PAM sequence: AGG
aaaaaaacaatactttgcta

SEQ ID NO: 53746 - DNA, 20 bp, Artificial Sequence
  Description of Artificial Sequence: Synthetic oligonucleotide
  Target: ATXN2; (+) strand; PAM type: NRG; PAM sequence: CAG
acaatactttgctaaggtga

SEQ ID NO: 53747 - DNA, 20 bp, Artificial Sequence
  Description of Artificial Sequence: Synthetic oligonucleotide
  Target: ATXN2; (+) strand; PAM type: NRG; PAM sequence: CGG
ctaaggtgacagttctaaca

SEQ ID NO: 53748 - DNA, 20 bp, Artificial Sequence
  Description of Artificial Sequence: Synthetic oligonucleotide
  Target: ATXN2; (+) strand; PAM type: NRG; PAM sequence: TAG
tgacagttctaacacggctg

SEQ ID NO: 53749 - DNA, 20 bp, Artificial Sequence
  Description of Artificial Sequence: Synthetic oligonucleotide
  Target: ATXN2; (+) strand; PAM type: NRG; PAM sequence: TAG
ctaacacggctgtagctatt

SEQ ID NO: 53750 - DNA, 20 bp, Artificial Sequence
  Description of Artificial Sequence: Synthetic oligonucleotide
  Target: ATXN2; (+) strand; PAM type: NRG; PAM sequence: AGG
taacacggctgtagctattt

SEQ ID NO: 53751 - DNA, 20 bp, Artificial Sequence
  Description of Artificial Sequence: Synthetic oligonucleotide
  Target: ATXN2; (+) strand; PAM type: NRG; PAM sequence: GAG
gctatttaggacaaaaaaat

SEQ ID NO: 53752 - DNA, 20 bp, Artificial Sequence
  Description of Artificial Sequence: Synthetic oligonucleotide
  Target: ATXN2; (+) strand; PAM type: NRG; PAM sequence: GAG
tttgtttgtttgtttgtttt

SEQ ID NO: 53753 - DNA, 20 bp, Artificial Sequence
  Description of Artificial Sequence: Synthetic oligonucleotide
  Target: ATXN2; (+) strand; PAM type: NRG; PAM sequence: CAG
tttgtttgtttgttttgaga

SEQ ID NO: 53754 - DNA, 20 bp, Artificial Sequence
  Description of Artificial Sequence: Synthetic oligonucleotide
  Target: ATXN2; (+) strand; PAM type: NRG; PAM sequence: GAG
tgtttgtttgttttgagaca

SEQ ID NO: 53755 - DNA, 20 bp, Artificial Sequence
  Description of Artificial Sequence: Synthetic oligonucleotide
  Target: ATXN2; (+) strand; PAM type: NRG; PAM sequence: CAG
cagagtctcgctctgttgcc

SEQ ID NO: 53756 - DNA, 20 bp, Artificial Sequence
  Description of Artificial Sequence: Synthetic oligonucleotide
  Target: ATXN2; (+) strand; PAM type: NRG; PAM sequence: AGG
agagtctcgctctgttgccc

SEQ ID NO: 53757 - DNA, 20 bp, Artificial Sequence
  Description of Artificial Sequence: Synthetic oligonucleotide
  Target: ATXN2; (+) strand; PAM type: NRG; PAM sequence: TGG
tctcgctctgttgcccaggc

SEQ ID NO: 53758 - DNA, 20 bp, Artificial Sequence
  Description of Artificial Sequence: Synthetic oligonucleotide
  Target: ATXN2; (+) strand; PAM type: NRG; PAM sequence: GAG
tcgctctgttgcccaggctg

SEQ ID NO: 53759 - DNA, 20 bp, Artificial Sequence
  Description of Artificial Sequence: Synthetic oligonucleotide
  Target: ATXN2; (+) strand; PAM type: NRG; PAM sequence: TGG
ttgcccaggctggagtgtaa

SEQ ID NO: 53760 - DNA, 20 bp, Artificial Sequence
  Description of Artificial Sequence: Synthetic oligonucleotide
  Target: ATXN2; (+) strand; PAM type: NRG; PAM sequence: CAG
ggagtgtaatggcatgatct

SEQ ID NO: 53761 - DNA, 20 bp, Artificial Sequence
  Description of Artificial Sequence: Synthetic oligonucleotide
  Target: ATXN2; (+) strand; PAM type: NRG; PAM sequence: CGG
tccgcactcattgcaacctc

SEQ ID NO: 53762 - DNA, 20 bp, Artificial Sequence
  Description of Artificial Sequence: Synthetic oligonucleotide
  Target: ATXN2; (+) strand; PAM type: NRG; PAM sequence: GGG
ccgcactcattgcaacctcc

SEQ ID NO: 53763 - DNA, 20 bp, Artificial Sequence
  Description of Artificial Sequence: Synthetic oligonucleotide
  Target: ATXN2; (+) strand; PAM type: NRG; PAM sequence: AAG
tcattgcaacctccgggatc

SEQ ID NO: 53764 - DNA, 20 bp, Artificial Sequence
  Description of Artificial Sequence: Synthetic oligonucleotide
  Target: ATXN2; (+) strand; PAM type: NRG; PAM sequence: CAG
atcaagcaattctcttccct

SEQ ID NO: 53765 - DNA, 20 bp, Artificial Sequence
  Description of Artificial Sequence: Synthetic oligonucleotide
  Target: ATXN2; (+) strand; PAM type: NRG; PAM sequence: AAG
ttctcttccctcagcctccc

SEQ ID NO: 53766 - DNA, 20 bp, Artificial Sequence
  Description of Artificial Sequence: Synthetic oligonucleotide
  Target: ATXN2; (+) strand; PAM type: NRG; PAM sequence: AAG
tcttccctcagcctcccaag

SEQ ID NO: 53767 - DNA, 20 bp, Artificial Sequence
  Description of Artificial Sequence: Synthetic oligonucleotide
  Target: ATXN2; (+) strand; PAM type: NRG; PAM sequence: TGG
ccctcagcctcccaagaagc

SEQ ID NO: 53768 - DNA, 20 bp, Artificial Sequence
  Description of Artificial Sequence: Synthetic oligonucleotide
  Target: ATXN2; (+) strand; PAM type: NRG; PAM sequence: GGG
cctcagcctcccaagaagct

SEQ ID NO: 53769 - DNA, 20 bp, Artificial Sequence
  Description of Artificial Sequence: Synthetic oligonucleotide
  Target: ATXN2; (+) strand; PAM type: NRG; PAM sequence: CAG
ctcccaagaagctgggatta

SEQ ID NO: 53770 - DNA, 20 bp, Artificial Sequence
  Description of Artificial Sequence: Synthetic oligonucleotide
  Target: ATXN2; (+) strand; PAM type: NRG; PAM sequence: AGG
tcccaagaagctgggattac

SEQ ID NO: 53771 - DNA, 20 bp, Artificial Sequence
  Description of Artificial Sequence: Synthetic oligonucleotide
  Target: ATXN2; (+) strand; PAM type: NRG; PAM sequence: CGG
caggcgcccaccaccatgcc

SEQ ID NO: 53772 - DNA, 20 bp, Artificial Sequence
  Description of Artificial Sequence: Synthetic oligonucleotide
  Target: ATXN2; (+) strand; PAM type: NRG; PAM sequence: TAG
ccggctaatttttgtatttt

SEQ ID NO: 53773 - DNA, 20 bp, Artificial Sequence
  Description of Artificial Sequence: Synthetic oligonucleotide
  Target: ATXN2; (+) strand; PAM type: NRG; PAM sequence: TAG
gctaatttttgtatttttag

SEQ ID NO: 53774 - DNA, 20 bp, Artificial Sequence
  Description of Artificial Sequence: Synthetic oligonucleotide
  Target: ATXN2; (+) strand; PAM type: NRG; PAM sequence: GAG
taatttttgtatttttagta

SEQ ID NO: 53775 - DNA, 20 bp, Artificial Sequence
  Description of Artificial Sequence: Synthetic oligonucleotide
  Target: ATXN2; (+) strand; PAM type: NRG; PAM sequence: TGG
ttttgtatttttagtagaga

SEQ ID NO: 53776 - DNA, 20 bp, Artificial Sequence
  Description of Artificial Sequence: Synthetic oligonucleotide
  Target: ATXN2; (+) strand; PAM type: NRG; PAM sequence: GGG
tttgtatttttagtagagat

SEQ ID NO: 53777 - DNA, 20 bp, Artificial Sequence
  Description of Artificial Sequence: Synthetic oligonucleotide
  Target: ATXN2; (+) strand; PAM type: NRG; PAM sequence: GGG
ttgtatttttagtagagatg

SEQ ID NO: 53778 - DNA, 20 bp, Artificial Sequence
  Description of Artificial Sequence: Synthetic oligonucleotide
  Target: ATXN2; (+) strand; PAM type: NRG; PAM sequence: GGG
tgtatttttagtagagatgg

SEQ ID NO: 53779 - DNA, 20 bp, Artificial Sequence
  Description of Artificial Sequence: Synthetic oligonucleotide
  Target: ATXN2; (+) strand; PAM type: NRG; PAM sequence: TGG
agatgggggtttcaccatgt

SEQ ID NO: 53780 - DNA, 20 bp, Artificial Sequence
  Description of Artificial Sequence: Synthetic oligonucleotide
  Target: ATXN2; (+) strand; PAM type: NRG; PAM sequence: CAG
gggggtttcaccatgttggc

SEQ ID NO: 53781 - DNA, 20 bp, Artificial Sequence
  Description of Artificial Sequence: Synthetic oligonucleotide
  Target: ATXN2; (+) strand; PAM type: NRG; PAM sequence: TAG
tttcaccatgttggccagac

SEQ ID NO: 53782 - DNA, 20 bp, Artificial Sequence
  Description of Artificial Sequence: Synthetic oligonucleotide
  Target: ATXN2; (+) strand; PAM type: NRG; PAM sequence: CAG
tagtctcaaactcctgaccc

SEQ ID NO: 53783 - DNA, 20 bp, Artificial Sequence
  Description of Artificial Sequence: Synthetic oligonucleotide
  Target: ATXN2; (+) strand; PAM type: NRG; PAM sequence: AGG
agtctcaaactcctgacccc

SEQ ID NO: 53784 - DNA, 20 bp, Artificial Sequence
  Description of Artificial Sequence: Synthetic oligonucleotide
  Target: ATXN2; (+) strand; PAM type: NRG; PAM sequence: CAG
cccaggtgatccacccgcct

SEQ ID NO: 53785 - DNA, 20 bp, Artificial Sequence
  Description of Artificial Sequence: Synthetic oligonucleotide
  Target: ATXN2; (+) strand; PAM type: NRG; PAM sequence: AAG
ccacccgcctcagcctccta

SEQ ID NO: 53786 - DNA, 20 bp, Artificial Sequence
  Description of Artificial Sequence: Synthetic oligonucleotide
  Target: ATXN2; (+) strand; PAM type: NRG; PAM sequence: TGG
gcctcagcctcctaaagtgc

SEQ ID NO: 53787 - DNA, 20 bp, Artificial Sequence
  Description of Artificial Sequence: Synthetic oligonucleotide
  Target: ATXN2; (+) strand; PAM type: NRG; PAM sequence: GGG
cctcagcctcctaaagtgct

SEQ ID NO: 53788 - DNA, 20 bp, Artificial Sequence
  Description of Artificial Sequence: Synthetic oligonucleotide
  Target: ATXN2; (+) strand; PAM type: NRG; PAM sequence: CAG
ctcctaaagtgctgggatta

SEQ ID NO: 53789 - DNA, 20 bp, Artificial Sequence
  Description of Artificial Sequence: Synthetic oligonucleotide
  Target: ATXN2; (+) strand; PAM type: NRG; PAM sequence: AGG
tcctaaagtgctgggattac

SEQ ID NO: 53790 - DNA, 20 bp, Artificial Sequence
  Description of Artificial Sequence: Synthetic oligonucleotide
  Target: ATXN2; (+) strand; PAM type: NRG; PAM sequence: GAG
agtgctgggattacaggtat

SEQ ID NO: 53791 - DNA, 20 bp, Artificial Sequence
  Description of Artificial Sequence: Synthetic oligonucleotide
  Target: ATXN2; (+) strand; PAM type: NRG; PAM sequence: TGG
caggtatgagccaccgcgcc

SEQ ID NO: 53792 - DNA, 20 bp, Artificial Sequence
  Description of Artificial Sequence: Synthetic oligonucleotide
  Target: ATXN2; (+) strand; PAM type: NRG; PAM sequence: GAG
gagccaccgcgcctggcctt

SEQ ID NO: 53793 - DNA, 20 bp, Artificial Sequence
  Description of Artificial Sequence: Synthetic oligonucleotide
  Target: ATXN2; (+) strand; PAM type: NRG; PAM sequence: AAG
tggccttgagatcctccttt

SEQ ID NO: 53794 - DNA, 20 bp, Artificial Sequence
  Description of Artificial Sequence: Synthetic oligonucleotide
  Target: ATXN2; (+) strand; PAM type: NRG; PAM sequence: TGG
ctcctttaagtcaaaatata

SEQ ID NO: 53795 - DNA, 20 bp, Artificial Sequence
  Description of Artificial Sequence: Synthetic oligonucleotide
  Target: ATXN2; (+) strand; PAM type: NRG; PAM sequence: TAG
caaaatatatggctattaaa

SEQ ID NO: 53796 - DNA, 20 bp, Artificial Sequence
  Description of Artificial Sequence: Synthetic oligonucleotide
  Target: ATXN2; (+) strand; PAM type: NRG; PAM sequence: GAG
ctattaaatagctacaatat

SEQ ID NO: 53797 - DNA, 20 bp, Artificial Sequence
  Description of Artificial Sequence: Synthetic oligonucleotide
  Target: ATXN2; (+) strand; PAM type: NRG; PAM sequence: TAG
atgagttaacatcccttatg

SEQ ID NO: 53798 - DNA, 20 bp, Artificial Sequence
  Description of Artificial Sequence: Synthetic oligonucleotide
  Target: ATXN2; (+) strand; PAM type: NRG; PAM sequence: AAG
agttaacatcccttatgtag

SEQ ID NO: 53799 - DNA, 20 bp, Artificial Sequence
  Description of Artificial Sequence: Synthetic oligonucleotide
  Target: ATXN2; (+) strand; PAM type: NRG; PAM sequence: TAG
aagtataaaccattgctaat

SEQ ID NO: 53800 - DNA, 20 bp, Artificial Sequence
  Description of Artificial Sequence: Synthetic oligonucleotide
  Target: ATXN2; (+) strand; PAM type: NRG; PAM sequence: GAG
gtataaaccattgctaatta

SEQ ID NO: 53801 - DNA, 20 bp, Artificial Sequence
  Description of Artificial Sequence: Synthetic oligonucleotide
  Target: ATXN2; (+) strand; PAM type: NRG; PAM sequence: AAG
tagagtaacactgaaaatac

SEQ ID NO: 53802 - DNA, 20 bp, Artificial Sequence
  Description of Artificial Sequence: Synthetic oligonucleotide
  Target: ATXN2; (+) strand; PAM type: NRG; PAM sequence: AAG
agtttacatttaaccaaaaa

SEQ ID NO: 53803 - DNA, 20 bp, Artificial Sequence
  Description of Artificial Sequence: Synthetic oligonucleotide
  Target: ATXN2; (+) strand; PAM type: NRG; PAM sequence: AGG
gtttacatttaaccaaaaaa

SEQ ID NO: 53804 - DNA, 20 bp, Artificial Sequence
  Description of Artificial Sequence: Synthetic oligonucleotide
  Target: ATXN2; (+) strand; PAM type: NRG; PAM sequence: CAG
atcccatgttttcactgttt

SEQ ID NO: 53805 - DNA, 20 bp, Artificial Sequence
  Description of Artificial Sequence: Synthetic oligonucleotide
  Target: ATXN2; (+) strand; PAM type: NRG; PAM sequence: TGG
gttttcactgtttcagaatg

SEQ ID NO: 53806 - DNA, 20 bp, Artificial Sequence
  Description of Artificial Sequence: Synthetic oligonucleotide
  Target: ATXN2; (+) strand; PAM type: NRG; PAM sequence: AAG
tttcagaatgtggaatcttt

SEQ ID NO: 53807 - DNA, 20 bp, Artificial Sequence
  Description of Artificial Sequence: Synthetic oligonucleotide
  Target: ATXN2; (+) strand; PAM type: NRG; PAM sequence: CAG
gtggaatctttaagcaacta

SEQ ID NO: 53808 - DNA, 20 bp, Artificial Sequence
  Description of Artificial Sequence: Synthetic oligonucleotide
  Target: ATXN2; (+) strand; PAM type: NRG; PAM sequence: AGG
tggaatctttaagcaactac

SEQ ID NO: 53809 - DNA, 20 bp, Artificial Sequence
  Description of Artificial Sequence: Synthetic oligonucleotide
  Target: ATXN2; (+) strand; PAM type: NRG; PAM sequence: AAG
ttttctcttaaaaaaaaaaa

SEQ ID NO: 53810 - DNA, 20 bp, Artificial Sequence
  Description of Artificial Sequence: Synthetic oligonucleotide
  Target: ATXN2; (+) strand; PAM type: NRG; PAM sequence: AAG
cttaaaaaaaaaaaaagaaa

SEQ ID NO: 53811 - DNA, 20 bp, Artificial Sequence
  Description of Artificial Sequence: Synthetic oligonucleotide
  Target: ATXN2; (+) strand; PAM type: NRG; PAM sequence: AAG
aaaaaaaaaagaaaaagaaa

SEQ ID NO: 53812 - DNA, 20 bp, Artificial Sequence
  Description of Artificial Sequence: Synthetic oligonucleotide
  Target: ATXN2; (+) strand; PAM type: NRG; PAM sequence: AAG
gaaaaagaaaaagaaaacca

SEQ ID NO: 53813 - DNA, 20 bp, Artificial Sequence
  Description of Artificial Sequence: Synthetic oligonucleotide
  Target: ATXN2; (+) strand; PAM type: NRG; PAM sequence: AAG
aagaaaaagaaaaccaaagc

SEQ ID NO: 53814 - DNA, 20 bp, Artificial Sequence
  Description of Artificial Sequence: Synthetic oligonucleotide
  Target: ATXN2; (+) strand; PAM type: NRG; PAM sequence: TGG
aagaaaaccaaagcaagttt

SEQ ID NO: 53815 - DNA, 20 bp, Artificial Sequence
  Description of Artificial Sequence: Synthetic oligonucleotide
  Target: ATXN2; (+) strand; PAM type: NRG; PAM sequence: AAG
agttttggcccaaacttaaa

SEQ ID NO: 53816 - DNA, 20 bp, Artificial Sequence
  Description of Artificial Sequence: Synthetic oligonucleotide
  Target: ATXN2; (+) strand; PAM type: NRG; PAM sequence: TAG
gaaacaaaaactaaactaat

SEQ ID NO: 53817 - DNA, 20 bp, Artificial Sequence
  Description of Artificial Sequence: Synthetic oligonucleotide
  Target: ATXN2; (+) strand; PAM type: NRG; PAM sequence: AGG
aaacaaaaactaaactaatt

SEQ ID NO: 53818 - DNA, 20 bp, Artificial Sequence
  Description of Artificial Sequence: Synthetic oligonucleotide
  Target: ATXN2; (+) strand; PAM type: NRG; PAM sequence: AAG
actaattaggtaaaatacgt

SEQ ID NO: 53819 - DNA, 20 bp, Artificial Sequence
  Description of Artificial Sequence: Synthetic oligonucleotide
  Target: ATXN2; (+) strand; PAM type: NRG; PAM sequence: AAG
ggtaaaatacgtaagcccaa

SEQ ID NO: 53820 - DNA, 20 bp, Artificial Sequence
  Description of Artificial Sequence: Synthetic oligonucleotide
  Target: ATXN2; (+) strand; PAM type: NRG; PAM sequence: TGG
aaaaacaaaacatgtctctt

SEQ ID NO: 53821 - DNA, 20 bp, Artificial Sequence
  Description of Artificial Sequence: Synthetic oligonucleotide
  Target: ATXN2; (+) strand; PAM type: NRG; PAM sequence: TAG
acaaaacatgtctctttggt

SEQ ID NO: 53822 - DNA, 20 bp, Artificial Sequence
  Description of Artificial Sequence: Synthetic oligonucleotide
  Target: ATXN2; (+) strand; PAM type: NRG; PAM sequence: TAG
catgtctctttggttagtaa

SEQ ID NO: 53823 - DNA, 20 bp, Artificial Sequence
  Description of Artificial Sequence: Synthetic oligonucleotide
  Target: ATXN2; (+) strand; PAM type: NRG; PAM sequence: TGG
tcaatgtcaattaacttttt

SEQ ID NO: 53824 - DNA, 20 bp, Artificial Sequence
  Description of Artificial Sequence: Synthetic oligonucleotide
  Target: ATXN2; (+) strand; PAM type: NRG; PAM sequence: CAG
taacttttttggtctaactt

SEQ ID NO: 53825 - DNA, 20 bp, Artificial Sequence
  Description of Artificial Sequence: Synthetic oligonucleotide
  Target: ATXN2; (+) strand; PAM type: NRG; PAM sequence: GAG
acttttttggtctaacttca

SEQ ID NO: 53826 - DNA, 20 bp, Artificial Sequence
  Description of Artificial Sequence: Synthetic oligonucleotide
  Target: ATXN2; (+) strand; PAM type: NRG; PAM sequence: TGG
ttttggtctaacttcagaga

SEQ ID NO: 53827 - DNA, 20 bp, Artificial Sequence
  Description of Artificial Sequence: Synthetic oligonucleotide
  Target: ATXN2; (+) strand; PAM type: NRG; PAM sequence: TAG
ggtctaacttcagagatggt

SEQ ID NO: 53828 - DNA, 20 bp, Artificial Sequence
  Description of Artificial Sequence: Synthetic oligonucleotide
  Target: ATXN2; (+) strand; PAM type: NRG; PAM sequence: AAG
tagtatcaatgtgcacataa

SEQ ID NO: 53829 - DNA, 20 bp, Artificial Sequence
  Description of Artificial Sequence: Synthetic oligonucleotide
  Target: ATXN2; (+) strand; PAM type: NRG; PAM sequence: AAG
gtgcacataaaagaataaca

SEQ ID NO: 53830 - DNA, 20 bp, Artificial Sequence
  Description of Artificial Sequence: Synthetic oligonucleotide
  Target: ATXN2; (+) strand; PAM type: NRG; PAM sequence: AGG
tgcacataaaagaataacaa

SEQ ID NO: 53831 - DNA, 20 bp, Artificial Sequence
  Description of Artificial Sequence: Synthetic oligonucleotide
  Target: ATXN2; (+) strand; PAM type: NRG; PAM sequence: AAG
aaccttataaattactaatg

SEQ ID NO: 53832 - DNA, 20 bp, Artificial Sequence
  Description of Artificial Sequence: Synthetic oligonucleotide
  Target: ATXN2; (+) strand; PAM type: NRG; PAM sequence: TAG
agccacatgactaattaacc

SEQ ID NO: 53833 - DNA, 20 bp, Artificial Sequence
  Description of Artificial Sequence: Synthetic oligonucleotide
  Target: ATXN2; (+) strand; PAM type: NRG; PAM sequence: AAG
gactaattaacctagataaa

SEQ ID NO: 53834 - DNA, 20 bp, Artificial Sequence
  Description of Artificial Sequence: Synthetic oligonucleotide
  Target: ATXN2; (+) strand; PAM type: NRG; PAM sequence: CGG
taacctagataaaaagcaaa

SEQ ID NO: 53835 - DNA, 20 bp, Artificial Sequence
  Description of Artificial Sequence: Synthetic oligonucleotide
  Target: ATXN2; (+) strand; PAM type: NRG; PAM sequence: TAG
tcaaatctttgctcaaatgt

SEQ ID NO: 53836 - DNA, 20 bp, Artificial Sequence
  Description of Artificial Sequence: Synthetic oligonucleotide
  Target: ATXN2; (+) strand; PAM type: NRG; PAM sequence: AAG
caaatgttagctcctcaatt

SEQ ID NO: 53837 - DNA, 20 bp, Artificial Sequence
  Description of Artificial Sequence: Synthetic oligonucleotide
  Target: ATXN2; (+) strand; PAM type: NRG; PAM sequence: TAG
tctgctttcttctaattcca

SEQ ID NO: 53838 - DNA, 20 bp, Artificial Sequence
  Description of Artificial Sequence: Synthetic oligonucleotide
  Target: ATXN2; (+) strand; PAM type: NRG; PAM sequence: TAG
ctcttatacactattataca

SEQ ID NO: 53839 - DNA, 20 bp, Artificial Sequence
  Description of Artificial Sequence: Synthetic oligonucleotide
  Target: ATXN2; (+) strand; PAM type: NRG; PAM sequence: AGG
tcttatacactattatacat

SEQ ID NO: 53840 - DNA, 20 bp, Artificial Sequence
  Description of Artificial Sequence: Synthetic oligonucleotide
  Target: ATXN2; (+) strand; PAM type: NRG; PAM sequence: TGG
atacactattatacataggc

SEQ ID NO: 53841 - DNA, 20 bp, Artificial Sequence
  Description of Artificial Sequence: Synthetic oligonucleotide
  Target: ATXN2; (+) strand; PAM type: NRG; PAM sequence: TAG
ttaatgtctcattgtctgcc

SEQ ID NO: 53842 - DNA, 20 bp, Artificial Sequence
  Description of Artificial Sequence: Synthetic oligonucleotide
  Target: ATXN2; (+) strand; PAM type: NRG; PAM sequence: TAG
cattgtctgcctagtcacat

SEQ ID NO: 53843 - DNA, 20 bp, Artificial Sequence
  Description of Artificial Sequence: Synthetic oligonucleotide
  Target: ATXN2; (+) strand; PAM type: NRG; PAM sequence: AAG
cattagaatgtaaactccaa

SEQ ID NO: 53844 - DNA, 20 bp, Artificial Sequence
  Description of Artificial Sequence: Synthetic oligonucleotide
  Target: ATXN2; (+) strand; PAM type: NRG; PAM sequence: AGG
attagaatgtaaactccaaa

SEQ ID NO: 53845 - DNA, 20 bp, Artificial Sequence
  Description of Artificial Sequence: Synthetic oligonucleotide
  Target: ATXN2; (+) strand; PAM type: NRG; PAM sequence: TAG
tcccaaaaaccccatgtaca

SEQ ID NO: 53846 - DNA, 20 bp, Artificial Sequence
  Description of Artificial Sequence: Synthetic oligonucleotide
  Target: ATXN2; (+) strand; PAM type: NRG; PAM sequence: AAG
tgtacatagatgcttcaata

SEQ ID NO: 53847 - DNA, 20 bp, Artificial Sequence
  Description of Artificial Sequence: Synthetic oligonucleotide
  Target: ATXN2; (+) strand; PAM type: NRG; PAM sequence: TAG
caataaagctgtattcaacg

SEQ ID NO: 53848 - DNA, 20 bp, Artificial Sequence
  Description of Artificial Sequence: Synthetic oligonucleotide
  Target: ATXN2; (+) strand; PAM type: NRG; PAM sequence: TAG
tgtattcaacgtagatattt

SEQ ID NO: 53849 - DNA, 20 bp, Artificial Sequence
  Description of Artificial Sequence: Synthetic oligonucleotide
  Target: ATXN2; (+) strand; PAM type: NRG; PAM sequence: AGG
gtattcaacgtagatatttt

SEQ ID NO: 53850 - DNA, 20 bp, Artificial Sequence
  Description of Artificial Sequence: Synthetic oligonucleotide
  Target: ATXN2; (+) strand; PAM type: NRG; PAM sequence: AAG
gatattttaggcccttctac

SEQ ID NO: 53851 - DNA, 20 bp, Artificial Sequence
  Description of Artificial Sequence: Synthetic oligonucleotide
  Target: ATXN2; (+) strand; PAM type: NRG; PAM sequence: AAG
tacaagatatttaactgcaa

SEQ ID NO: 53852 - DNA, 20 bp, Artificial Sequence
  Description of Artificial Sequence: Synthetic oligonucleotide
  Target: ATXN2; (+) strand; PAM type: NRG; PAM sequence: CAG
atttaactgcaaaagatgaa

SEQ ID NO: 53853 - DNA, 20 bp, Artificial Sequence
  Description of Artificial Sequence: Synthetic oligonucleotide
  Target: ATXN2; (+) strand; PAM type: NRG; PAM sequence: TGG
cagtctcactgaaatttaaa

SEQ ID NO: 53854 - DNA, 20 bp, Artificial Sequence
  Description of Artificial Sequence: Synthetic oligonucleotide
  Target: ATXN2; (+) strand; PAM type: NRG; PAM sequence: AAG
tctcactgaaatttaaatgg

SEQ ID NO: 53855 - DNA, 20 bp, Artificial Sequence
  Description of Artificial Sequence: Synthetic oligonucleotide
  Target: ATXN2; (+) strand; PAM type: NRG; PAM sequence: CAG
tgaacaactacattaaatca

SEQ ID NO: 53856 - DNA, 20 bp, Artificial Sequence
  Description of Artificial Sequence: Synthetic oligonucleotide
  Target: ATXN2; (+) strand; PAM type: NRG; PAM sequence: GAG
agcacatttttttttttttt

SEQ ID NO: 53857 - DNA, 20 bp, Artificial Sequence
  Description of Artificial Sequence: Synthetic oligonucleotide
  Target: ATXN2; (+) strand; PAM type: NRG; PAM sequence: TAG
cattttttttttttttgaga

SEQ ID NO: 53858 - DNA, 20 bp, Artificial Sequence
  Description of Artificial Sequence: Synthetic oligonucleotide
  Target: ATXN2; (+) strand; PAM type: NRG; PAM sequence: GAG
ttttttttttttttgagata

SEQ ID NO: 53859 - DNA, 20 bp, Artificial Sequence
  Description of Artificial Sequence: Synthetic oligonucleotide
  Target: ATXN2; (+) strand; PAM type: NRG; PAM sequence: CAG
tagagtctcactctgtctcc

SEQ ID NO: 53860 - DNA, 20 bp, Artificial Sequence
  Description of Artificial Sequence: Synthetic oligonucleotide
  Target: ATXN2; (+) strand; PAM type: NRG; PAM sequence: AGG
agagtctcactctgtctccc

SEQ ID NO: 53861 - DNA, 20 bp, Artificial Sequence
  Description of Artificial Sequence: Synthetic oligonucleotide
  Target: ATXN2; (+) strand; PAM type: NRG; PAM sequence: TGG
tctcactctgtctcccaggc

SEQ ID NO: 53862 - DNA, 20 bp, Artificial Sequence
  Description of Artificial Sequence: Synthetic oligonucleotide
  Target: ATXN2; (+) strand; PAM type: NRG; PAM sequence: GAG
tcactctgtctcccaggctg

SEQ ID NO: 53863 - DNA, 20 bp, Artificial Sequence
  Description of Artificial Sequence: Synthetic oligonucleotide
  Target: ATXN2; (+) strand; PAM type: NRG; PAM sequence: CAG
ctgtctcccaggctggagtg

SEQ ID NO: 53864 - DNA, 20 bp, Artificial Sequence
  Description of Artificial Sequence: Synthetic oligonucleotide
  Target: ATXN2; (+) strand; PAM type: NRG; PAM sequence: TGG
tctcccaggctggagtgcag

SEQ ID NO: 53865 - DNA, 20 bp, Artificial Sequence
  Description of Artificial Sequence: Synthetic oligonucleotide
  Target: ATXN2; (+) strand; PAM type: NRG; PAM sequence: CAG
ggagtgcagtggcacaatct

SEQ ID NO: 53866 - DNA, 20 bp, Artificial Sequence
  Description of Artificial Sequence: Synthetic oligonucleotide
  Target: ATXN2; (+) strand; PAM type: NRG; PAM sequence: TGG
tgactgcaacctccgcctcc

SEQ ID NO: 53867 - DNA, 20 bp, Artificial Sequence
  Description of Artificial Sequence: Synthetic oligonucleotide
  Target: ATXN2; (+) strand; PAM type: NRG; PAM sequence: GGG
gactgcaacctccgcctcct

SEQ ID NO: 53868 - DNA, 20 bp, Artificial Sequence
  Description of Artificial Sequence: Synthetic oligonucleotide
  Target: ATXN2; (+) strand; PAM type: NRG; PAM sequence: AAG
aacctccgcctcctgggctc

SEQ ID NO: 53869 - DNA, 20 bp, Artificial Sequence
  Description of Artificial Sequence: Synthetic oligonucleotide
  Target: ATXN2; (+) strand; PAM type: NRG; PAM sequence: CAG
ctcaagtgatgctcctgcct

SEQ ID NO: 53870 - DNA, 20 bp, Artificial Sequence
  Description of Artificial Sequence: Synthetic oligonucleotide
  Target: ATXN2; (+) strand; PAM type: NRG; PAM sequence: AAG
tgctcctgcctcagcctccc

SEQ ID NO: 53871 - DNA, 20 bp, Artificial Sequence
  Description of Artificial Sequence: Synthetic oligonucleotide
  Target: ATXN2; (+) strand; PAM type: NRG; PAM sequence: TAG
tcctgcctcagcctcccaag

SEQ ID NO: 53872 - DNA, 20 bp, Artificial Sequence
  Description of Artificial Sequence: Synthetic oligonucleotide
  Target: ATXN2; (+) strand; PAM type: NRG; PAM sequence: TGG
gcctcagcctcccaagtagc

SEQ ID NO: 53873 - DNA, 20 bp, Artificial Sequence
  Description of Artificial Sequence: Synthetic oligonucleotide
  Target: ATXN2; (+) strand; PAM type: NRG; PAM sequence: GGG
cctcagcctcccaagtagct

SEQ ID NO: 53874 - DNA, 20 bp, Artificial Sequence
  Description of Artificial Sequence: Synthetic oligonucleotide
  Target: ATXN2; (+) strand; PAM type: NRG; PAM sequence: CAG
ctcccaagtagctgggatta

SEQ ID NO: 53875 - DNA, 20 bp, Artificial Sequence
  Description of Artificial Sequence: Synthetic oligonucleotide
  Target: ATXN2; (+) strand; PAM type: NRG; PAM sequence: AGG
tcccaagtagctgggattac

SEQ ID NO: 53876 - DNA, 20 bp, Artificial Sequence
  Description of Artificial Sequence: Synthetic oligonucleotide
  Target: ATXN2; (+) strand; PAM type: NRG; PAM sequence: TGG
tagctgggattacaggcgcc

SEQ ID NO: 53877 - DNA, 20 bp, Artificial Sequence
  Description of Artificial Sequence: Synthetic oligonucleotide
  Target: ATXN2; (+) strand; PAM type: NRG; PAM sequence: CAG
attacaggcgcctggctaaa

SEQ ID NO: 53878 - DNA, 20 bp, Artificial Sequence
  Description of Artificial Sequence: Synthetic oligonucleotide
  Target: ATXN2; (+) strand; PAM type: NRG; PAM sequence: AAG
ggctaaacagcacaattttt

SEQ ID NO: 53879 - DNA, 20 bp, Artificial Sequence
  Description of Artificial Sequence: Synthetic oligonucleotide
  Target: ATXN2; (+) strand; PAM type: NRG; PAM sequence: AAG
tttttaagttgcaatgcctc

SEQ ID NO: 53880 - DNA, 20 bp, Artificial Sequence
  Description of Artificial Sequence: Synthetic oligonucleotide
  Target: ATXN2; (+) strand; PAM type: NRG; PAM sequence: GAG
tttaagttgcaatgcctcaa

SEQ ID NO: 53881 - DNA, 20 bp, Artificial Sequence
  Description of Artificial Sequence: Synthetic oligonucleotide
  Target: ATXN2; (+) strand; PAM type: NRG; PAM sequence: AAG
agttgcaatgcctcaagaga

SEQ ID NO: 53882 - DNA, 20 bp, Artificial Sequence
  Description of Artificial Sequence: Synthetic oligonucleotide
  Target: ATXN2; (+) strand; PAM type: NRG; PAM sequence: AAG
tgcaatgcctcaagagaaag

SEQ ID NO: 53883 - DNA, 20 bp, Artificial Sequence
  Description of Artificial Sequence: Synthetic oligonucleotide
  Target: ATXN2; (+) strand; PAM type: NRG; PAM sequence: CAG
aatgcctcaagagaaagaag

SEQ ID NO: 53884 - DNA, 20 bp, Artificial Sequence
  Description of Artificial Sequence: Synthetic oligonucleotide
  Target: ATXN2; (+) strand; PAM type: NRG; PAM sequence: AAG
aaagaagcagtaaaaatact

SEQ ID NO: 53885 - DNA, 20 bp, Artificial Sequence
  Description of Artificial Sequence: Synthetic oligonucleotide
  Target: ATXN2; (+) strand; PAM type: NRG; PAM sequence: AAG
actaagctgaaaatcactaa

SEQ ID NO: 53886 - DNA, 20 bp, Artificial Sequence
  Description of Artificial Sequence: Synthetic oligonucleotide
  Target: ATXN2; (+) strand; PAM type: NRG; PAM sequence: CAG
taaaagaaaaatattttatt

SEQ ID NO: 53887 - DNA, 20 bp, Artificial Sequence
  Description of Artificial Sequence: Synthetic oligonucleotide
  Target: ATXN2; (+) strand; PAM type: NRG; PAM sequence: AAG
cagactgaatcctgtatccc

SEQ ID NO: 53888 - DNA, 20 bp, Artificial Sequence
  Description of Artificial Sequence: Synthetic oligonucleotide
  Target: ATXN2; (+) strand; PAM type: NRG; PAM sequence: TAG
aattctaatgtcatattatt

SEQ ID NO: 53889 - DNA, 20 bp, Artificial Sequence
  Description of Artificial Sequence: Synthetic oligonucleotide
  Target: ATXN2; (+) strand; PAM type: NRG; PAM sequence: AGG
attctaatgtcatattattt

SEQ ID NO: 53890 - DNA, 20 bp, Artificial Sequence
  Description of Artificial Sequence: Synthetic oligonucleotide
  Target: ATXN2; (+) strand; PAM type: NRG; PAM sequence: TAG
aatgtcatattatttaggtt

SEQ ID NO: 53891 - DNA, 20 bp, Artificial Sequence
  Description of Artificial Sequence: Synthetic oligonucleotide
  Target: ATXN2; (+) strand; PAM type: NRG; PAM sequence: AGG
atgtcatattatttaggttt

SEQ ID NO: 53892 - DNA, 20 bp, Artificial Sequence
  Description of Artificial Sequence: Synthetic oligonucleotide
  Target: ATXN2; (+) strand; PAM type: NRG; PAM sequence: TAG
atattatttaggtttaggaa

SEQ ID NO: 53893 - DNA, 20 bp, Artificial Sequence
  Description of Artificial Sequence: Synthetic oligonucleotide
  Target: ATXN2; (+) strand; PAM type: NRG; PAM sequence: GAG
attatttaggtttaggaata

SEQ ID NO: 53894 - DNA, 20 bp, Artificial Sequence
  Description of Artificial Sequence: Synthetic oligonucleotide
  Target: ATXN2; (+) strand; PAM type: NRG; PAM sequence: TGG
atccatatttttatttttaa

SEQ ID NO: 53895 - DNA, 20 bp, Artificial Sequence
  Description of Artificial Sequence: Synthetic oligonucleotide
  Target: ATXN2; (+) strand; PAM type: NRG; PAM sequence: GGG
tccatatttttatttttaat

SEQ ID NO: 53896 - DNA, 20 bp, Artificial Sequence
  Description of Artificial Sequence: Synthetic oligonucleotide
  Target: ATXN2; (+) strand; PAM type: NRG; PAM sequence: GGG
ccatatttttatttttaatg

SEQ ID NO: 53897 - DNA, 20 bp, Artificial Sequence
  Description of Artificial Sequence: Synthetic oligonucleotide
  Target: ATXN2; (+) strand; PAM type: NRG; PAM sequence: AAG
tatttttatttttaatgggg

SEQ ID NO: 53898 - DNA, 20 bp, Artificial Sequence
  Description of Artificial Sequence: Synthetic oligonucleotide
  Target: ATXN2; (+) strand; PAM type: NRG; PAM sequence: AGG
atttttatttttaatgggga

SEQ ID NO: 53899 - DNA, 20 bp, Artificial Sequence
  Description of Artificial Sequence: Synthetic oligonucleotide
  Target: ATXN2; (+) strand; PAM type: NRG; PAM sequence: GGG
tttttatttttaatggggaa

SEQ ID NO: 53900 - DNA, 20 bp, Artificial Sequence
  Description of Artificial Sequence: Synthetic oligonucleotide
  Target: ATXN2; (+) strand; PAM type: NRG; PAM sequence: TAG
ttttaatggggaagggaatg

SEQ ID NO: 53901 - DNA, 20 bp, Artificial Sequence
  Description of Artificial Sequence: Synthetic oligonucleotide
  Target: ATXN2; (+) strand; PAM type: NRG; PAM sequence: AAG
taatggggaagggaatgtag

SEQ ID NO: 53902 - DNA, 20 bp, Artificial Sequence
  Description of Artificial Sequence: Synthetic oligonucleotide
  Target: ATXN2; (+) strand; PAM type: NRG; PAM sequence: AAG
tggggaagggaatgtagaag

SEQ ID NO: 53903 - DNA, 20 bp, Artificial Sequence
  Description of Artificial Sequence: Synthetic oligonucleotide
  Target: ATXN2; (+) strand; PAM type: NRG; PAM sequence: AAG
ggaagggaatgtagaagaag

SEQ ID NO: 53904 - DNA, 20 bp, Artificial Sequence
  Description of Artificial Sequence: Synthetic oligonucleotide
  Target: ATXN2; (+) strand; PAM type: NRG; PAM sequence: GAG
aagggaatgtagaagaagaa

SEQ ID NO: 53905 - DNA, 20 bp, Artificial Sequence
  Description of Artificial Sequence: Synthetic oligonucleotide
  Target: ATXN2; (+) strand; PAM type: NRG; PAM sequence: CAG
gtagaagaagaagagtcaac

SEQ ID NO: 53906 - DNA, 20 bp, Artificial Sequence
  Description of Artificial Sequence: Synthetic oligonucleotide
  Target: ATXN2; (+) strand; PAM type: NRG; PAM sequence: TAG
caaccagcgaaaattcccaa

SEQ ID NO: 53907 - DNA, 20 bp, Artificial Sequence
  Description of Artificial Sequence: Synthetic oligonucleotide
  Target: ATXN2; (+) strand; PAM type: NRG; PAM sequence: AAG
agtgccatgaaattacaaaa

SEQ ID NO: 53908 - DNA, 20 bp, Artificial Sequence
  Description of Artificial Sequence: Synthetic oligonucleotide
  Target: ATXN2; (+) strand; PAM type: NRG; PAM sequence: TGG
aaaagttaccaaaaataact

SEQ ID NO: 53909 - DNA, 20 bp, Artificial Sequence
  Description of Artificial Sequence: Synthetic oligonucleotide
  Target: ATXN2; (+) strand; PAM type: NRG; PAM sequence: TAG
taccaaaaataacttggtca

SEQ ID NO: 53910 - DNA, 20 bp, Artificial Sequence
  Description of Artificial Sequence: Synthetic oligonucleotide
  Target: ATXN2; (+) strand; PAM type: NRG; PAM sequence: AGG
accaaaaataacttggtcat

SEQ ID NO: 53911 - DNA, 20 bp, Artificial Sequence
  Description of Artificial Sequence: Synthetic oligonucleotide
  Target: ATXN2; (+) strand; PAM type: NRG; PAM sequence: TAG
aaaataacttggtcataggc

SEQ ID NO: 53912 - DNA, 20 bp, Artificial Sequence
  Description of Artificial Sequence: Synthetic oligonucleotide
  Target: ATXN2; (+) strand; PAM type: NRG; PAM sequence: CAG
ataacttggtcataggctag

SEQ ID NO: 53913 - DNA, 20 bp, Artificial Sequence
  Description of Artificial Sequence: Synthetic oligonucleotide
  Target: ATXN2; (+) strand; PAM type: NRG; PAM sequence: CAG
cagctaataaaaaacacttt

SEQ ID NO: 53914 - DNA, 20 bp, Artificial Sequence
  Description of Artificial Sequence: Synthetic oligonucleotide
  Target: ATXN2; (+) strand; PAM type: NRG; PAM sequence: AAG
aaaaacactttcagatgaaa

SEQ ID NO: 53915 - DNA, 20 bp, Artificial Sequence
  Description of Artificial Sequence: Synthetic oligonucleotide
  Target: ATXN2; (+) strand; PAM type: NRG; PAM sequence: AAG
acactttcagatgaaaaaga

SEQ ID NO: 53916 - DNA, 20 bp, Artificial Sequence
  Description of Artificial Sequence: Synthetic oligonucleotide
  Target: ATXN2; (+) strand; PAM type: NRG; PAM sequence: AGG
cactttcagatgaaaaagaa

SEQ ID NO: 53917 - DNA, 20 bp, Artificial Sequence
  Description of Artificial Sequence: Synthetic oligonucleotide
  Target: ATXN2; (+) strand; PAM type: NRG; PAM sequence: AAG
aaaggttaacaacaacaaca

SEQ ID NO: 53918 - DNA, 20 bp, Artificial Sequence
  Description of Artificial Sequence: Synthetic oligonucleotide
  Target: ATXN2; (+) strand; PAM type: NRG; PAM sequence: TAG
taacaacaacaacaaagctt

SEQ ID NO: 53919 - DNA, 20 bp, Artificial Sequence
  Description of Artificial Sequence: Synthetic oligonucleotide
  Target: ATXN2; (+) strand; PAM type: NRG; PAM sequence: CAG
acaacaacaaagctttagaa

SEQ ID NO: 53920 - DNA, 20 bp, Artificial Sequence
  Description of Artificial Sequence: Synthetic oligonucleotide
  Target: ATXN2; (+) strand; PAM type: NRG; PAM sequence: CAG
aaagctttagaacagttcct

SEQ ID NO: 53921 - DNA, 20 bp, Artificial Sequence
  Description of Artificial Sequence: Synthetic oligonucleotide
  Target: ATXN2; (+) strand; PAM type: NRG; PAM sequence: AGG
aagctttagaacagttcctc

SEQ ID NO: 53922 - DNA, 20 bp, Artificial Sequence
  Description of Artificial Sequence: Synthetic oligonucleotide
  Target: ATXN2; (+) strand; PAM type: NRG; PAM sequence: CAG
tttcattcctgcactttact

SEQ ID NO: 53923 - DNA, 20 bp, Artificial Sequence
  Description of Artificial Sequence: Synthetic oligonucleotide
  Target: ATXN2; (+) strand; PAM type: NRG; PAM sequence: CAG
tgcactttactcagtactat

SEQ ID NO: 53924 - DNA, 20 bp, Artificial Sequence
  Description of Artificial Sequence: Synthetic oligonucleotide
  Target: ATXN2; (+) strand; PAM type: NRG; PAM sequence: CAG
actcagtactatcagcacga

SEQ ID NO: 53925 - DNA, 20 bp, Artificial Sequence
  Description of Artificial Sequence: Synthetic oligonucleotide
  Target: ATXN2; (+) strand; PAM type: NRG; PAM sequence: AAG
atcagcacgacagataaacc

SEQ ID NO: 53926 - DNA, 20 bp, Artificial Sequence
  Description of Artificial Sequence: Synthetic oligonucleotide
  Target: ATXN2; (+) strand; PAM type: NRG; PAM sequence: TGG
agtaccctcattaataataa

SEQ ID NO: 53927 - DNA, 20 bp, Artificial Sequence
  Description of Artificial Sequence: Synthetic oligonucleotide
  Target: ATXN2; (+) strand; PAM type: NRG; PAM sequence: CAG
ctcattaataataatggtta

SEQ ID NO: 53928 - DNA, 20 bp, Artificial Sequence
  Description of Artificial Sequence: Synthetic oligonucleotide
  Target: ATXN2; (+) strand; PAM type: NRG; PAM sequence: AGG
tcattaataataatggttac

SEQ ID NO: 53929 - DNA, 20 bp, Artificial Sequence
  Description of Artificial Sequence: Synthetic oligonucleotide
  Target: ATXN2; (+) strand; PAM type: NRG; PAM sequence: CAG
atattaccttattaaatcct

SEQ ID NO: 53930 - DNA, 20 bp, Artificial Sequence
  Description of Artificial Sequence: Synthetic oligonucleotide
  Target: ATXN2; (+) strand; PAM type: NRG; PAM sequence: GAG
attaccttattaaatcctca

SEQ ID NO: 53931 - DNA, 20 bp, Artificial Sequence
  Description of Artificial Sequence: Synthetic oligonucleotide
  Target: ATXN2; (+) strand; PAM type: NRG; PAM sequence: AGG
ttaccttattaaatcctcag

SEQ ID NO: 53932 - DNA, 20 bp, Artificial Sequence
  Description of Artificial Sequence: Synthetic oligonucleotide
  Target: ATXN2; (+) strand; PAM type: NRG; PAM sequence: CAG
aaactcaaatatcaataatc

SEQ ID NO: 53933 - DNA, 20 bp, Artificial Sequence
  Description of Artificial Sequence: Synthetic oligonucleotide
  Target: ATXN2; (+) strand; PAM type: NRG; PAM sequence: AAG
aataatccagtaactaacaa

SEQ ID NO: 53934 - DNA, 20 bp, Artificial Sequence
  Description of Artificial Sequence: Synthetic oligonucleotide
  Target: ATXN2; (+) strand; PAM type: NRG; PAM sequence: CAG
ttaataatatatgcacttga

SEQ ID NO: 53935 - DNA, 20 bp, Artificial Sequence
  Description of Artificial Sequence: Synthetic oligonucleotide
  Target: ATXN2; (+) strand; PAM type: NRG; PAM sequence: AAG
acaatatttgacaaactaca

SEQ ID NO: 53936 - DNA, 20 bp, Artificial Sequence
  Description of Artificial Sequence: Synthetic oligonucleotide
  Target: ATXN2; (+) strand; PAM type: NRG; PAM sequence: TGG
actacaaagaaaccattcca

SEQ ID NO: 53937 - DNA, 20 bp, Artificial Sequence
  Description of Artificial Sequence: Synthetic oligonucleotide
  Target: ATXN2; (+) strand; PAM type: NRG; PAM sequence: AAG
acaaagaaaccattccatgg

SEQ ID NO: 53938 - DNA, 20 bp, Artificial Sequence
  Description of Artificial Sequence: Synthetic oligonucleotide
  Target: ATXN2; (+) strand; PAM type: NRG; PAM sequence: GAG
aaagaaaccattccatggaa

SEQ ID NO: 53939 - DNA, 20 bp, Artificial Sequence
  Description of Artificial Sequence: Synthetic oligonucleotide
  Target: ATXN2; (+) strand; PAM type: NRG; PAM sequence: TGG
aagagcaaccttcttgacac

SEQ ID NO: 53940 - DNA, 20 bp, Artificial Sequence
  Description of Artificial Sequence: Synthetic oligonucleotide
  Target: ATXN2; (+) strand; PAM type: NRG; PAM sequence: AAG
agcaaccttcttgacactgg

SEQ ID NO: 53941 - DNA, 20 bp, Artificial Sequence
  Description of Artificial Sequence: Synthetic oligonucleotide
  Target: ATXN2; (+) strand; PAM type: NRG; PAM sequence: AAG
cttgacactggaagtaatac

SEQ ID NO: 53942 - DNA, 20 bp, Artificial Sequence
  Description of Artificial Sequence: Synthetic oligonucleotide
  Target: ATXN2; (+) strand; PAM type: NRG; PAM sequence: AAG
gaagtaatacaagtcttcta

SEQ ID NO: 53943 - DNA, 20 bp, Artificial Sequence
  Description of Artificial Sequence: Synthetic oligonucleotide
  Target: ATXN2; (+) strand; PAM type: NRG; PAM sequence: TAG
acaagtcttctaaagaataa

SEQ ID NO: 53944 - DNA, 20 bp, Artificial Sequence
  Description of Artificial Sequence: Synthetic oligonucleotide
  Target: ATXN2; (+) strand; PAM type: NRG; PAM sequence: GAG
aagtcttctaaagaataata

SEQ ID NO: 53945 - DNA, 20 bp, Artificial Sequence
  Description of Artificial Sequence: Synthetic oligonucleotide
  Target: ATXN2; (+) strand; PAM type: NRG; PAM sequence: TAG
aaagaataatagagcaccgc

SEQ ID NO: 53946 - DNA, 20 bp, Artificial Sequence
  Description of Artificial Sequence: Synthetic oligonucleotide
  Target: ATXN2; (+) strand; PAM type: NRG; PAM sequence: AAG
aataatagagcaccgctagc

SEQ ID NO: 53947 - DNA, 20 bp, Artificial Sequence
  Description of Artificial Sequence: Synthetic oligonucleotide
  Target: ATXN2; (+) strand; PAM type: NRG; PAM sequence: GAG
taatagagcaccgctagcaa

SEQ ID NO: 53948 - DNA, 20 bp, Artificial Sequence
  Description of Artificial Sequence: Synthetic oligonucleotide
  Target: ATXN2; (+) strand; PAM type: NRG; PAM sequence: AAG
caagagccataaaaatcctg

SEQ ID NO: 53949 - DNA, 20 bp, Artificial Sequence
  Description of Artificial Sequence: Synthetic oligonucleotide
  Target: ATXN2; (+) strand; PAM type: NRG; PAM sequence: TAG
aatcctgaagccctctgaac

SEQ ID NO: 53950 - DNA, 20 bp, Artificial Sequence
  Description of Artificial Sequence: Synthetic oligonucleotide
  Target: ATXN2; (+) strand; PAM type: NRG; PAM sequence: TGG
tgaactagtaaaaccactct

SEQ ID NO: 53951 - DNA, 20 bp, Artificial Sequence
  Description of Artificial Sequence: Synthetic oligonucleotide
  Target: ATXN2; (+) strand; PAM type: NRG; PAM sequence: AAG
cactcttggtaactttctct

SEQ ID NO: 53952 - DNA, 20 bp, Artificial Sequence
  Description of Artificial Sequence: Synthetic oligonucleotide
  Target: ATXN2; (+) strand; PAM type: NRG; PAM sequence: AGG
actcttggtaactttctcta

SEQ ID NO: 53953 - DNA, 20 bp, Artificial Sequence
  Description of Artificial Sequence: Synthetic oligonucleotide
  Target: ATXN2; (+) strand; PAM type: NRG; PAM sequence: AAG
ctaaggaaataattacactg

SEQ ID NO: 53954 - DNA, 20 bp, Artificial Sequence
  Description of Artificial Sequence: Synthetic oligonucleotide
  Target: ATXN2; (+) strand; PAM type: NRG; PAM sequence: AAG
aataattacactgaagcaaa

SEQ ID NO: 53955 - DNA, 20 bp, Artificial Sequence
  Description of Artificial Sequence: Synthetic oligonucleotide
  Target: ATXN2; (+) strand; PAM type: NRG; PAM sequence: AAG
caccactatctataacaaaa

SEQ ID NO: 53956 - DNA, 20 bp, Artificial Sequence
  Description of Artificial Sequence: Synthetic oligonucleotide
  Target: ATXN2; (+) strand; PAM type: NRG; PAM sequence: TGG
cactatctataacaaaaaag

SEQ ID NO: 53957 - DNA, 20 bp, Artificial Sequence
  Description of Artificial Sequence: Synthetic oligonucleotide
  Target: ATXN2; (+) strand; PAM type: NRG; PAM sequence: TAG
ggaaacccaattcccaacaa

SEQ ID NO: 53958 - DNA, 20 bp, Artificial Sequence
  Description of Artificial Sequence: Synthetic oligonucleotide
  Target: ATXN2; (+) strand; PAM type: NRG; PAM sequence: TGG
cccaattcccaacaatagaa

SEQ ID NO: 53959 - DNA, 20 bp, Artificial Sequence
  Description of Artificial Sequence: Synthetic oligonucleotide
  Target: ATXN2; (+) strand; PAM type: NRG; PAM sequence: AAG
ttcccaacaatagaatggtt

SEQ ID NO: 53960 - DNA, 20 bp, Artificial Sequence
  Description of Artificial Sequence: Synthetic oligonucleotide
  Target: ATXN2; (+) strand; PAM type: NRG; PAM sequence: CAG
atggttaagtaaaaacctta

SEQ ID NO: 53961 - DNA, 20 bp, Artificial Sequence
  Description of Artificial Sequence: Synthetic oligonucleotide
  Target: ATXN2; (+) strand; PAM type: NRG; PAM sequence: CGG
ttaagtaaaaaccttacagc

SEQ ID NO: 53962 - DNA, 20 bp, Artificial Sequence
  Description of Artificial Sequence: Synthetic oligonucleotide
  Target: ATXN2; (+) strand; PAM type: NRG; PAM sequence: GGG
taagtaaaaaccttacagcc

SEQ ID NO: 53963 - DNA, 20 bp, Artificial Sequence
  Description of Artificial Sequence: Synthetic oligonucleotide
  Target: ATXN2; (+) strand; PAM type: NRG; PAM sequence: CAG
aaaaaccttacagccgggcg

SEQ ID NO: 53964 - DNA, 20 bp, Artificial Sequence
  Description of Artificial Sequence: Synthetic oligonucleotide
  Target: ATXN2; (+) strand; PAM type: NRG; PAM sequence: TGG
aaccttacagccgggcgcag

SEQ ID NO: 53965 - DNA, 20 bp, Artificial Sequence
  Description of Artificial Sequence: Synthetic oligonucleotide
  Target: ATXN2; (+) strand; PAM type: NRG; PAM sequence: CAG
gtggctcacgcctgcaatcc

SEQ ID NO: 53966 - DNA, 20 bp, Artificial Sequence
  Description of Artificial Sequence: Synthetic oligonucleotide
  Target: ATXN2; (+) strand; PAM type: NRG; PAM sequence: TGG
cgcctgcaatcccagcactt

SEQ ID NO: 53967 - DNA, 20 bp, Artificial Sequence
  Description of Artificial Sequence: Synthetic oligonucleotide
  Target: ATXN2; (+) strand; PAM type: NRG; PAM sequence: GGG
gcctgcaatcccagcacttt

SEQ ID NO: 53968 - DNA, 20 bp, Artificial Sequence
  Description of Artificial Sequence: Synthetic oligonucleotide
  Target: ATXN2; (+) strand; PAM type: NRG; PAM sequence: GAG
ctgcaatcccagcactttgg

SEQ ID NO: 53969 - DNA, 20 bp, Artificial Sequence
  Description of Artificial Sequence: Synthetic oligonucleotide
  Target: ATXN2; (+) strand; PAM type: NRG; PAM sequence: AGG
tgcaatcccagcactttggg

SEQ ID NO: 53970 - DNA, 20 bp, Artificial Sequence
  Description of Artificial Sequence: Synthetic oligonucleotide
  Target: ATXN2; (+) strand; PAM type: NRG; PAM sequence: GAG
tcccagcactttgggaggcc

SEQ ID NO: 53971 - DNA, 20 bp, Artificial Sequence
  Description of Artificial Sequence: Synthetic oligonucleotide
  Target: ATXN2; (+) strand; PAM type: NRG; PAM sequence: AGG
cccagcactttgggaggccg

SEQ ID NO: 53972 - DNA, 20 bp, Artificial Sequence
  Description of Artificial Sequence: Synthetic oligonucleotide
  Target: ATXN2; (+) strand; PAM type: NRG; PAM sequence: CGG
agcactttgggaggccgagg

SEQ ID NO: 53973 - DNA, 20 bp, Artificial Sequence
  Description of Artificial Sequence: Synthetic oligonucleotide
  Target: ATXN2; (+) strand; PAM type: NRG; PAM sequence: GGG
gcactttgggaggccgaggc

SEQ ID NO: 53974 - DNA, 20 bp, Artificial Sequence
  Description of Artificial Sequence: Synthetic oligonucleotide
  Target: ATXN2; (+) strand; PAM type: NRG; PAM sequence: GAG
ccgaggcgggcgcatcacct

SEQ ID NO: 53975 - DNA, 20 bp, Artificial Sequence
  Description of Artificial Sequence: Synthetic oligonucleotide
  Target: ATXN2; (+) strand; PAM type: NRG; PAM sequence: AGG
cgaggcgggcgcatcacctg

SEQ ID NO: 53976 - DNA, 20 bp, Artificial Sequence
  Description of Artificial Sequence: Synthetic oligonucleotide
  Target: ATXN2; (+) strand; PAM type: NRG; PAM sequence: CGG
gcgggcgcatcacctgaggt

SEQ ID NO: 53977 - DNA, 20 bp, Artificial Sequence
  Description of Artificial Sequence: Synthetic oligonucleotide
  Target: ATXN2; (+) strand; PAM type: NRG; PAM sequence: TAG
ggcgcatcacctgaggtcgg

SEQ ID NO: 53978 - DNA, 20 bp, Artificial Sequence
  Description of Artificial Sequence: Synthetic oligonucleotide
  Target: ATXN2; (+) strand; PAM type: NRG; PAM sequence: GAG
tcacctgaggtcggtagtac

SEQ ID NO: 53979 - DNA, 20 bp, Artificial Sequence
  Description of Artificial Sequence: Synthetic oligonucleotide
  Target: ATXN2; (+) strand; PAM type: NRG; PAM sequence: TGG
tcggtagtacgagaccaaac

SEQ ID NO: 53980 - DNA, 20 bp, Artificial Sequence
  Description of Artificial Sequence: Synthetic oligonucleotide
  Target: ATXN2; (+) strand; PAM type: NRG; PAM sequence: TGG
cgagaccaaactggccaaca

SEQ ID NO: 53981 - DNA, 20 bp, Artificial Sequence
  Description of Artificial Sequence: Synthetic oligonucleotide
  Target: ATXN2; (+) strand; PAM type: NRG; PAM sequence: TAG
tctaccaaaaatacaaaaat

SEQ ID NO: 53982 - DNA, 20 bp, Artificial Sequence
  Description of Artificial Sequence: Synthetic oligonucleotide
  Target: ATXN2; (+) strand; PAM type: NRG; PAM sequence: AAG
caaaaatacaaaaattagcc

SEQ ID NO: 53983 - DNA, 20 bp, Artificial Sequence
  Description of Artificial Sequence: Synthetic oligonucleotide
  Target: ATXN2; (+) strand; PAM type: NRG; PAM sequence: TGG
atacaaaaattagccaagcg

SEQ ID NO: 53984 - DNA, 20 bp, Artificial Sequence
  Description of Artificial Sequence: Synthetic oligonucleotide
  Target: ATXN2; (+) strand; PAM type: NRG; PAM sequence: TGG
caaaaattagccaagcgtgg

SEQ ID NO: 53985 - DNA, 20 bp, Artificial Sequence
  Description of Artificial Sequence: Synthetic oligonucleotide
  Target: ATXN2; (+) strand; PAM type: NRG; PAM sequence: TAG
agcgtggtggaacattcctg

SEQ ID NO: 53986 - DNA, 20 bp, Artificial Sequence
  Description of Artificial Sequence: Synthetic oligonucleotide
  Target: ATXN2; (+) strand; PAM type: NRG; PAM sequence: CAG
gtggaacattcctgtagccc

SEQ ID NO: 53987 - DNA, 20 bp, Artificial Sequence
  Description of Artificial Sequence: Synthetic oligonucleotide
  Target: ATXN2; (+) strand; PAM type: NRG; PAM sequence: AAG
tcctgtagccccagctactc

SEQ ID NO: 53988 - DNA, 20 bp, Artificial Sequence
  Description of Artificial Sequence: Synthetic oligonucleotide
  Target: ATXN2; (+) strand; PAM type: NRG; PAM sequence: GAG
ctgtagccccagctactcaa

SEQ ID NO: 53989 - DNA, 20 bp, Artificial Sequence
  Description of Artificial Sequence: Synthetic oligonucleotide
  Target: ATXN2; (+) strand; PAM type: NRG; PAM sequence: AGG
tgtagccccagctactcaag

SEQ ID NO: 53990 - DNA, 20 bp, Artificial Sequence
  Description of Artificial Sequence: Synthetic oligonucleotide
  Target: ATXN2; (+) strand; PAM type: NRG; PAM sequence: GAG
ccccagctactcaagaggct

SEQ ID NO: 53991 - DNA, 20 bp, Artificial Sequence
  Description of Artificial Sequence: Synthetic oligonucleotide
  Target: ATXN2; (+) strand; PAM type: NRG; PAM sequence: AGG
cccagctactcaagaggctg

SEQ ID NO: 53992 - DNA, 20 bp, Artificial Sequence
  Description of Artificial Sequence: Synthetic oligonucleotide
  Target: ATXN2; (+) strand; PAM type: NRG; PAM sequence: TGG
agctactcaagaggctgagg

SEQ ID NO: 53993 - DNA, 20 bp, Artificial Sequence
  Description of Artificial Sequence: Synthetic oligonucleotide
  Target: ATXN2; (+) strand; PAM type: NRG; PAM sequence: GGG
gctactcaagaggctgaggt

SEQ ID NO: 53994 - DNA, 20 bp, Artificial Sequence
  Description of Artificial Sequence: Synthetic oligonucleotide
  Target: ATXN2; (+) strand; PAM type: NRG; PAM sequence: GAG
tactcaagaggctgaggtgg

SEQ ID NO: 53995 - DNA, 20 bp, Artificial Sequence
  Description of Artificial Sequence: Synthetic oligonucleotide
  Target: ATXN2; (+) strand; PAM type: NRG; PAM sequence: CAG
gtgggagaatcgcttgaacc

SEQ ID NO: 53996 - DNA, 20 bp, Artificial Sequence
  Description of Artificial Sequence: Synthetic oligonucleotide
  Target: ATXN2; (+) strand; PAM type: NRG; PAM sequence: AGG
tgggagaatcgcttgaaccc

SEQ ID NO: 53997 - DNA, 20 bp, Artificial Sequence
  Description of Artificial Sequence: Synthetic oligonucleotide
  Target: ATXN2; (+) strand; PAM type: NRG; PAM sequence: GAG
ggagaatcgcttgaacccag

SEQ ID NO: 53998 - DNA, 20 bp, Artificial Sequence
  Description of Artificial Sequence: Synthetic oligonucleotide
  Target: ATXN2; (+) strand; PAM type: NRG; PAM sequence: CAG
aatcgcttgaacccaggagt

SEQ ID NO: 53999 - DNA, 20 bp, Artificial Sequence
  Description of Artificial Sequence: Synthetic oligonucleotide
  Target: ATXN2; (+) strand; PAM type: NRG; PAM sequence: GAG
tcgcttgaacccaggagtca

SEQ ID NO: 54000 - DNA, 20 bp, Artificial Sequence
  Description of Artificial Sequence: Synthetic oligonucleotide
  Target: ATXN2; (+) strand; PAM type: NRG; PAM sequence: AGG
cgcttgaacccaggagtcag

SEQ ID NO: 54001 - DNA, 20 bp, Artificial Sequence
  Description of Artificial Sequence: Synthetic oligonucleotide
  Target: ATXN2; (+) strand; PAM type: NRG; PAM sequence: CAG
aacccaggagtcagaggctg

SEQ ID NO: 54002 - DNA, 20 bp, Artificial Sequence
  Description of Artificial Sequence: Synthetic oligonucleotide
  Target: ATXN2; (+) strand; PAM type: NRG; PAM sequence: GAG
caggagtcagaggctgcagt

SEQ ID NO: 54003 - DNA, 20 bp, Artificial Sequence
  Description of Artificial Sequence: Synthetic oligonucleotide
  Target: ATXN2; (+) strand; PAM type: NRG; PAM sequence: GAG
gtcagaggctgcagtgagct

SEQ ID NO: 54004 - DNA, 20 bp, Artificial Sequence
  Description of Artificial Sequence: Synthetic oligonucleotide
  Target: ATXN2; (+) strand; PAM type: NRG; PAM sequence: CAG
gagatcgtaccactgcactt

SEQ ID NO: 54005 - DNA, 20 bp, Artificial Sequence
  Description of Artificial Sequence: Synthetic oligonucleotide
  Target: ATXN2; (+) strand; PAM type: NRG; PAM sequence: TGG
cgtaccactgcacttcagac

SEQ ID NO: 54006 - DNA, 20 bp, Artificial Sequence
  Description of Artificial Sequence: Synthetic oligonucleotide
  Target: ATXN2; (+) strand; PAM type: NRG; PAM sequence: GGG
gtaccactgcacttcagact

SEQ ID NO: 54007 - DNA, 20 bp, Artificial Sequence
  Description of Artificial Sequence: Synthetic oligonucleotide
  Target: ATXN2; (+) strand; PAM type: NRG; PAM sequence: GAG
cttcagactgggcaaacacc

SEQ ID NO: 54008 - DNA, 20 bp, Artificial Sequence
  Description of Artificial Sequence: Synthetic oligonucleotide
  Target: ATXN2; (+) strand; PAM type: NRG; PAM sequence: CAG
tacatttacaatacaacgtt

SEQ ID NO: 54009 - DNA, 20 bp, Artificial Sequence
  Description of Artificial Sequence: Synthetic oligonucleotide
  Target: ATXN2; (+) strand; PAM type: NRG; PAM sequence: AGG
acatttacaatacaacgttc

SEQ ID NO: 54010 - DNA, 20 bp, Artificial Sequence
  Description of Artificial Sequence: Synthetic oligonucleotide
  Target: ATXN2; (+) strand; PAM type: NRG; PAM sequence: GGG
catttacaatacaacgttca

SEQ ID NO: 54011 - DNA, 20 bp, Artificial Sequence
  Description of Artificial Sequence: Synthetic oligonucleotide
  Target: ATXN2; (+) strand; PAM type: NRG; PAM sequence: GGG
atttacaatacaacgttcag

SEQ ID NO: 54012 - DNA, 20 bp, Artificial Sequence
  Description of Artificial Sequence: Synthetic oligonucleotide
  Target: ATXN2; (+) strand; PAM type: NRG; PAM sequence: AAG
atacaacgttcaggggaaaa

SEQ ID NO: 54013 - DNA, 20 bp, Artificial Sequence
  Description of Artificial Sequence: Synthetic oligonucleotide
  Target: ATXN2; (+) strand; PAM type: NRG; PAM sequence: AAG
ctctactacataaaaatgaa

SEQ ID NO: 54014 - DNA, 20 bp, Artificial Sequence
  Description of Artificial Sequence: Synthetic oligonucleotide
  Target: ATXN2; (+) strand; PAM type: NRG; PAM sequence: AGG
tctactacataaaaatgaaa

SEQ ID NO: 54015 - DNA, 20 bp, Artificial Sequence
  Description of Artificial Sequence: Synthetic oligonucleotide
  Target: ATXN2; (+) strand; PAM type: NRG; PAM sequence: AAG
cataaaaatgaaaaggtaaa

SEQ ID NO: 54016 - DNA, 20 bp, Artificial Sequence
  Description of Artificial Sequence: Synthetic oligonucleotide
  Target: ATXN2; (+) strand; PAM type: NRG; PAM sequence: AAG
aaaaggtaaaaagcaaaaat

SEQ ID NO: 54017 - DNA, 20 bp, Artificial Sequence
  Description of Artificial Sequence: Synthetic oligonucleotide
  Target: ATXN2; (+) strand; PAM type: NRG; PAM sequence: TAG
taaaaagcaaaaataagaat

SEQ ID NO: 54018 - DNA, 20 bp, Artificial Sequence
  Description of Artificial Sequence: Synthetic oligonucleotide
  Target: ATXN2; (+) strand; PAM type: NRG; PAM sequence: TGG
aaaaataagaattagactga

SEQ ID NO: 54019 - DNA, 20 bp, Artificial Sequence
  Description of Artificial Sequence: Synthetic oligonucleotide
  Target: ATXN2; (+) strand; PAM type: NRG; PAM sequence: TGG
ataagaattagactgatggt

SEQ ID NO: 54020 - DNA, 20 bp, Artificial Sequence
  Description of Artificial Sequence: Synthetic oligonucleotide
  Target: ATXN2; (+) strand; PAM type: NRG; PAM sequence: GGG
taagaattagactgatggtt

SEQ ID NO: 54021 - DNA, 20 bp, Artificial Sequence
  Description of Artificial Sequence: Synthetic oligonucleotide
  Target: ATXN2; (+) strand; PAM type: NRG; PAM sequence: GGG
aagaattagactgatggttg

SEQ ID NO: 54022 - DNA, 20 bp, Artificial Sequence
  Description of Artificial Sequence: Synthetic oligonucleotide
  Target: ATXN2; (+) strand; PAM type: NRG; PAM sequence: GGG
agaattagactgatggttgg

SEQ ID NO: 54023 - DNA, 20 bp, Artificial Sequence
  Description of Artificial Sequence: Synthetic oligonucleotide
  Target: ATXN2; (+) strand; PAM type: NRG; PAM sequence: CAG
attagactgatggttggggg

SEQ ID NO: 54024 - DNA, 20 bp, Artificial Sequence
  Description of Artificial Sequence: Synthetic oligonucleotide
  Target: ATXN2; (+) strand; PAM type: NRG; PAM sequence: TGG
agactgatggttgggggcag

SEQ ID NO: 54025 - DNA, 20 bp, Artificial Sequence
  Description of Artificial Sequence: Synthetic oligonucleotide
  Target: ATXN2; (+) strand; PAM type: NRG; PAM sequence: TGG
ctcattcctgcctgtaatcc

SEQ ID NO: 54026 - DNA, 20 bp, Artificial Sequence
  Description of Artificial Sequence: Synthetic oligonucleotide
  Target: ATXN2; (+) strand; PAM type: NRG; PAM sequence: TGG
tgcctgtaatcctggcactt

SEQ ID NO: 54027 - DNA, 20 bp, Artificial Sequence
  Description of Artificial Sequence: Synthetic oligonucleotide
  Target: ATXN2; (+) strand; PAM type: NRG; PAM sequence: GGG
gcctgtaatcctggcacttt

SEQ ID NO: 54028 - DNA, 20 bp, Artificial Sequence
  Description of Artificial Sequence: Synthetic oligonucleotide
  Target: ATXN2; (+) strand; PAM type: NRG; PAM sequence: GAG
ctgtaatcctggcactttgg

SEQ ID NO: 54029 - DNA, 20 bp, Artificial Sequence
  Description of Artificial Sequence: Synthetic oligonucleotide
  Target: ATXN2; (+) strand; PAM type: NRG; PAM sequence: AGG
tgtaatcctggcactttggg

SEQ ID NO: 54030 - DNA, 20 bp, Artificial Sequence
  Description of Artificial Sequence: Synthetic oligonucleotide
  Target: ATXN2; (+) strand; PAM type: NRG; PAM sequence: GAG
tcctggcactttgggaggcc

SEQ ID NO: 54031 - DNA, 20 bp, Artificial Sequence
  Description of Artificial Sequence: Synthetic oligonucleotide
  Target: ATXN2; (+) strand; PAM type: NRG; PAM sequence: AGG
cctggcactttgggaggccg

SEQ ID NO: 54032 - DNA, 20 bp, Artificial Sequence
  Description of Artificial Sequence: Synthetic oligonucleotide
  Target: ATXN2; (+) strand; PAM type: NRG; PAM sequence: TGG
gcactttgggaggccgaggc

SEQ ID NO: 54033 - DNA, 20 bp, Artificial Sequence
  Description of Artificial Sequence: Synthetic oligonucleotide
  Target: ATXN2; (+) strand; PAM type: NRG; PAM sequence: GAG
ccgaggctggcgaatcactt

SEQ ID NO: 54034 - DNA, 20 bp, Artificial Sequence
  Description of Artificial Sequence: Synthetic oligonucleotide
  Target: ATXN2; (+) strand; PAM type: NRG; PAM sequence: AGG
cgaggctggcgaatcacttg

SEQ ID NO: 54035 - DNA, 20 bp, Artificial Sequence
  Description of Artificial Sequence: Synthetic oligonucleotide
  Target: ATXN2; (+) strand; PAM type: NRG; PAM sequence: CAG
gctggcgaatcacttgaggt

SEQ ID NO: 54036 - DNA, 20 bp, Artificial Sequence
  Description of Artificial Sequence: Synthetic oligonucleotide
  Target: ATXN2; (+) strand; PAM type: NRG; PAM sequence: AGG
ctggcgaatcacttgaggtc

SEQ ID NO: 54037 - DNA, 20 bp, Artificial Sequence
  Description of Artificial Sequence: Synthetic oligonucleotide
  Target: ATXN2; (+) strand; PAM type: NRG; PAM sequence: GAG
ggcgaatcacttgaggtcag

SEQ ID NO: 54038 - DNA, 20 bp, Artificial Sequence
  Description of Artificial Sequence: Synthetic oligonucleotide
  Target: ATXN2; (+) strand; PAM type: NRG; PAM sequence: AGG
gcgaatcacttgaggtcagg

SEQ ID NO: 54039 - DNA, 20 bp, Artificial Sequence
  Description of Artificial Sequence: Synthetic oligonucleotide
  Target: ATXN2; (+) strand; PAM type: NRG; PAM sequence: GAG
gaatcacttgaggtcaggag

SEQ ID NO: 54040 - DNA, 20 bp, Artificial Sequence
  Description of Artificial Sequence: Synthetic oligonucleotide
  Target: ATXN2; (+) strand; PAM type: NRG; PAM sequence: GAG
cttgaggtcaggaggagttc

SEQ ID NO: 54041 - DNA, 20 bp, Artificial Sequence
  Description of Artificial Sequence: Synthetic oligonucleotide
  Target: ATXN2; (+) strand; PAM type: NRG; PAM sequence: CAG
ggtcaggaggagttcgagac

SEQ ID NO: 54042 - DNA, 20 bp, Artificial Sequence
  Description of Artificial Sequence: Synthetic oligonucleotide
  Target: ATXN2; (+) strand; PAM type: NRG; PAM sequence: TGG
ggaggagttcgagaccagcc

SEQ ID NO: 54043 - DNA, 20 bp, Artificial Sequence
  Description of Artificial Sequence: Synthetic oligonucleotide
  Target: ATXN2; (+) strand; PAM type: NRG; PAM sequence: TGG
cgagaccagcctggccaaca

SEQ ID NO: 54044 - DNA, 20 bp, Artificial Sequence
  Description of Artificial Sequence: Synthetic oligonucleotide
  Target: ATXN2; (+) strand; PAM type: NRG; PAM sequence: TGG
tctactaaaaatacaaaaat

SEQ ID NO: 54045 - DNA, 20 bp, Artificial Sequence
  Description of Artificial Sequence: Synthetic oligonucleotide
  Target: ATXN2; (+) strand; PAM type: NRG; PAM sequence: CAG
ctaaaaatacaaaaattggc

SEQ ID NO: 54046 - DNA, 20 bp, Artificial Sequence
  Description of Artificial Sequence: Synthetic oligonucleotide
  Target: ATXN2; (+) strand; PAM type: NRG; PAM sequence: AGG
taaaaatacaaaaattggcc

SEQ ID NO: 54047 - DNA, 20 bp, Artificial Sequence
  Description of Artificial Sequence: Synthetic oligonucleotide
  Target: ATXN2; (+) strand; PAM type: NRG; PAM sequence: GGG
aaaaatacaaaaattggcca

SEQ ID NO: 54048 - DNA, 20 bp, Artificial Sequence
  Description of Artificial Sequence: Synthetic oligonucleotide
  Target: ATXN2; (+) strand; PAM type: NRG; PAM sequence: GGG
aaaatacaaaaattggccag

SEQ ID NO: 54049 - DNA, 20 bp, Artificial Sequence
  Description of Artificial Sequence: Synthetic oligonucleotide
  Target: ATXN2; (+) strand; PAM type: NRG; PAM sequence: CAG
atacaaaaattggccagggg

SEQ ID NO: 54050 - DNA, 20 bp, Artificial Sequence
  Description of Artificial Sequence: Synthetic oligonucleotide
  Target: ATXN2; (+) strand; PAM type: NRG; PAM sequence: TAG
caaaaattggccaggggcag

SEQ ID NO: 54051 - DNA, 20 bp, Artificial Sequence
  Description of Artificial Sequence: Synthetic oligonucleotide
  Target: ATXN2; (+) strand; PAM type: NRG; PAM sequence: CAG
gtagctcacgcctgtaatcc

SEQ ID NO: 54052 - DNA, 20 bp, Artificial Sequence
  Description of Artificial Sequence: Synthetic oligonucleotide
  Target: ATXN2; (+) strand; PAM type: NRG; PAM sequence: TGG
cgcctgtaatcccagcactt

SEQ ID NO: 54053 - DNA, 20 bp, Artificial Sequence
  Description of Artificial Sequence: Synthetic oligonucleotide
  Target: ATXN2; (+) strand; PAM type: NRG; PAM sequence: GGG
gcctgtaatcccagcacttt

SEQ ID NO: 54054 - DNA, 20 bp, Artificial Sequence
  Description of Artificial Sequence: Synthetic oligonucleotide
  Target: ATXN2; (+) strand; PAM type: NRG; PAM sequence: GAG
ctgtaatcccagcactttgg

SEQ ID NO: 54055 - DNA, 20 bp, Artificial Sequence
  Description of Artificial Sequence: Synthetic oligonucleotide
  Target: ATXN2; (+) strand; PAM type: NRG; PAM sequence: AGG
tgtaatcccagcactttggg

SEQ ID NO: 54056 - DNA, 20 bp, Artificial Sequence
  Description of Artificial Sequence: Synthetic oligonucleotide
  Target: ATXN2; (+) strand; PAM type: NRG; PAM sequence: AAG
tcccagcactttgggaggcc

SEQ ID NO: 54057 - DNA, 20 bp, Artificial Sequence
  Description of Artificial Sequence: Synthetic oligonucleotide
  Target: ATXN2; (+) strand; PAM type: NRG; PAM sequence: AGG
cccagcactttgggaggcca

SEQ ID NO: 54058 - DNA, 20 bp, Artificial Sequence
  Description of Artificial Sequence: Synthetic oligonucleotide
  Target: ATXN2; (+) strand; PAM type: NRG; PAM sequence: CAG
agcactttgggaggccaagg

SEQ ID NO: 54059 - DNA, 20 bp, Artificial Sequence
  Description of Artificial Sequence: Synthetic oligonucleotide
  Target: ATXN2; (+) strand; PAM type: NRG; PAM sequence: AGG
gcactttgggaggccaaggc

SEQ ID NO: 54060 - DNA, 20 bp, Artificial Sequence
  Description of Artificial Sequence: Synthetic oligonucleotide
  Target: ATXN2; (+) strand; PAM type: NRG; PAM sequence: CGG
ctttgggaggccaaggcagg

SEQ ID NO: 54061 - DNA, 20 bp, Artificial Sequence
  Description of Artificial Sequence: Synthetic oligonucleotide
  Target: ATXN2; (+) strand; PAM type: NRG; PAM sequence: GAG
ccaaggcaggcggatcactt

SEQ ID NO: 54062 - DNA, 20 bp, Artificial Sequence
  Description of Artificial Sequence: Synthetic oligonucleotide
  Target: ATXN2; (+) strand; PAM type: NRG; PAM sequence: AGG
caaggcaggcggatcacttg

SEQ ID NO: 54063 - DNA, 20 bp, Artificial Sequence
  Description of Artificial Sequence: Synthetic oligonucleotide
  Target: ATXN2; (+) strand; PAM type: NRG; PAM sequence: CAG
gcaggcggatcacttgaggt

SEQ ID NO: 54064 - DNA, 20 bp, Artificial Sequence
  Description of Artificial Sequence: Synthetic oligonucleotide
  Target: ATXN2; (+) strand; PAM type: NRG; PAM sequence: AGG
caggcggatcacttgaggtc

SEQ ID NO: 54065 - DNA, 20 bp, Artificial Sequence
  Description of Artificial Sequence: Synthetic oligonucleotide
  Target: ATXN2; (+) strand; PAM type: NRG; PAM sequence: GAG
ggcggatcacttgaggtcag

SEQ ID NO: 54066 - DNA, 20 bp, Artificial Sequence
  Description of Artificial Sequence: Synthetic oligonucleotide
  Target: ATXN2; (+) strand; PAM type: NRG; PAM sequence: GAG
tcacttgaggtcaggagttc

SEQ ID NO: 54067 - DNA, 20 bp, Artificial Sequence
  Description of Artificial Sequence: Synthetic oligonucleotide
  Target: ATXN2; (+) strand; PAM type: NRG; PAM sequence: CAG
tgaggtcaggagttcgagac

SEQ ID NO: 54068 - DNA, 20 bp, Artificial Sequence
  Description of Artificial Sequence: Synthetic oligonucleotide
  Target: ATXN2; (+) strand; PAM type: NRG; PAM sequence: TGG
tcaggagttcgagaccagcc

SEQ ID NO: 54069 - DNA, 20 bp, Artificial Sequence
  Description of Artificial Sequence: Synthetic oligonucleotide
  Target: ATXN2; (+) strand; PAM type: NRG; PAM sequence: TGG
cgagaccagcctggccaaca

SEQ ID NO: 54070 - DNA, 20 bp, Artificial Sequence
  Description of Artificial Sequence: Synthetic oligonucleotide
  Target: ATXN2; (+) strand; PAM type: NRG; PAM sequence: TAG
cactaaaaatacaaaaaaat

SEQ ID NO: 54071 - DNA, 20 bp, Artificial Sequence
  Description of Artificial Sequence: Synthetic oligonucleotide
  Target: ATXN2; (+) strand; PAM type: NRG; PAM sequence: CAG
aaaaatacaaaaaaattagc

SEQ ID NO: 54072 - DNA, 20 bp, Artificial Sequence
  Description of Artificial Sequence: Synthetic oligonucleotide
  Target: ATXN2; (+) strand; PAM type: NRG; PAM sequence: AGG
aaaatacaaaaaaattagcc

SEQ ID NO: 54073 - DNA, 20 bp, Artificial Sequence
  Description of Artificial Sequence: Synthetic oligonucleotide
  Target: ATXN2; (+) strand; PAM type: NRG; PAM sequence: TGG
acaaaaaaattagccaggtg

SEQ ID NO: 54074 - DNA, 20 bp, Artificial Sequence
  Description of Artificial Sequence: Synthetic oligonucleotide
  Target: ATXN2; (+) strand; PAM type: NRG; PAM sequence: TAG
aaaaaattagccaggtgtgg

SEQ ID NO: 54075 - DNA, 20 bp, Artificial Sequence
  Description of Artificial Sequence: Synthetic oligonucleotide
  Target: ATXN2; (+) strand; PAM type: NRG; PAM sequence: CAG
gtagcacgaacctgtaatcc

SEQ ID NO: 54076 - DNA, 20 bp, Artificial Sequence
  Description of Artificial Sequence: Synthetic oligonucleotide
  Target: ATXN2; (+) strand; PAM type: NRG; PAM sequence: TGG
gaacctgtaatcccagctac

SEQ ID NO: 54077 - DNA, 20 bp, Artificial Sequence
  Description of Artificial Sequence: Synthetic oligonucleotide
  Target: ATXN2; (+) strand; PAM type: NRG; PAM sequence: GGG
aacctgtaatcccagctact

SEQ ID NO: 54078 - DNA, 20 bp, Artificial Sequence
  Description of Artificial Sequence: Synthetic oligonucleotide
  Target: ATXN2; (+) strand; PAM type: NRG; PAM sequence: GGG
acctgtaatcccagctactg

SEQ ID NO: 54079 - DNA, 20 bp, Artificial Sequence
  Description of Artificial Sequence: Synthetic oligonucleotide
  Target: ATXN2; (+) strand; PAM type: NRG; PAM sequence: GAG
ctgtaatcccagctactggg

SEQ ID NO: 54080 - DNA, 20 bp, Artificial Sequence
  Description of Artificial Sequence: Synthetic oligonucleotide
  Target: ATXN2; (+) strand; PAM type: NRG; PAM sequence: AGG
tgtaatcccagctactgggg

SEQ ID NO: 54081 - DNA, 20 bp, Artificial Sequence
  Description of Artificial Sequence: Synthetic oligonucleotide
  Target: ATXN2; (+) strand; PAM type: NRG; PAM sequence: GAG
tcccagctactggggaggct

SEQ ID NO: 54082 - DNA, 20 bp, Artificial Sequence
  Description of Artificial Sequence: Synthetic oligonucleotide
  Target: ATXN2; (+) strand; PAM type: NRG; PAM sequence: AGG
cccagctactggggaggctg

SEQ ID NO: 54083 - DNA, 20 bp, Artificial Sequence
  Description of Artificial Sequence: Synthetic oligonucleotide
  Target: ATXN2; (+) strand; PAM type: NRG; PAM sequence: TGG
gctactggggaggctgaggc

SEQ ID NO: 54084 - DNA, 20 bp, Artificial Sequence
  Description of Artificial Sequence: Synthetic oligonucleotide
  Target: ATXN2; (+) strand; PAM type: NRG; PAM sequence: GAG
tactggggaggctgaggctg

SEQ ID NO: 54085 - DNA, 20 bp, Artificial Sequence
  Description of Artificial Sequence: Synthetic oligonucleotide
  Target: ATXN2; (+) strand; PAM type: NRG; PAM sequence: CAG
gagaatcacttaaatgaacc

SEQ ID NO: 54086 - DNA, 20 bp, Artificial Sequence
  Description of Artificial Sequence: Synthetic oligonucleotide
  Target: ATXN2; (+) strand; PAM type: NRG; PAM sequence: AGG
agaatcacttaaatgaaccc

SEQ ID NO: 54087 - DNA, 20 bp, Artificial Sequence
  Description of Artificial Sequence: Synthetic oligonucleotide
  Target: ATXN2; (+) strand; PAM type: NRG; PAM sequence: GAG
aatcacttaaatgaacccag

SEQ ID NO: 54088 - DNA, 20 bp, Artificial Sequence
  Description of Artificial Sequence: Synthetic oligonucleotide
  Target: ATXN2; (+) strand; PAM type: NRG; PAM sequence: CAG
acttaaatgaacccaggaga

SEQ ID NO: 54089 - DNA, 20 bp, Artificial Sequence
  Description of Artificial Sequence: Synthetic oligonucleotide
  Target: ATXN2; (+) strand; PAM type: NRG; PAM sequence: GAG
ttaaatgaacccaggagaca

SEQ ID NO: 54090 - DNA, 20 bp, Artificial Sequence
  Description of Artificial Sequence: Synthetic oligonucleotide
  Target: ATXN2; (+) strand; PAM type: NRG; PAM sequence: CAG
aacccaggagacagagactg

SEQ ID NO: 54091 - DNA, 20 bp, Artificial Sequence
  Description of Artificial Sequence: Synthetic oligonucleotide
  Target: ATXN2; (+) strand; PAM type: NRG; PAM sequence: AAG
caggagacagagactgcagt

SEQ ID NO: 54092 - DNA, 20 bp, Artificial Sequence
  Description of Artificial Sequence: Synthetic oligonucleotide
  Target: ATXN2; (+) strand; PAM type: NRG; PAM sequence: GAG
gacagagactgcagtaagct

SEQ ID NO: 54093 - DNA, 20 bp, Artificial Sequence
  Description of Artificial Sequence: Synthetic oligonucleotide
  Target: ATXN2; (+) strand; PAM type: NRG; PAM sequence: CAG
agactgcagtaagctgagat

SEQ ID NO: 54094 - DNA, 20 bp, Artificial Sequence
  Description of Artificial Sequence: Synthetic oligonucleotide
  Target: ATXN2; (+) strand; PAM type: NRG; PAM sequence: AGG
gactgcagtaagctgagatc

SEQ ID NO: 54095 - DNA, 20 bp, Artificial Sequence
  Description of Artificial Sequence: Synthetic oligonucleotide
  Target: ATXN2; (+) strand; PAM type: NRG; PAM sequence: CAG
gagatcaggccactgcactc

SEQ ID NO: 54096 - DNA, 20 bp, Artificial Sequence
  Description of Artificial Sequence: Synthetic oligonucleotide
  Target: ATXN2; (+) strand; PAM type: NRG; PAM sequence: TGG
caggccactgcactccagcc

SEQ ID NO: 54097 - DNA, 20 bp, Artificial Sequence
  Description of Artificial Sequence: Synthetic oligonucleotide
  Target: ATXN2; (+) strand; PAM type: NRG; PAM sequence: GGG
aggccactgcactccagcct

SEQ ID NO: 54098 - DNA, 20 bp, Artificial Sequence
  Description of Artificial Sequence: Synthetic oligonucleotide
  Target: ATXN2; (+) strand; PAM type: NRG; PAM sequence: CAG
ctgcactccagcctgggcga

SEQ ID NO: 54099 - DNA, 20 bp, Artificial Sequence
  Description of Artificial Sequence: Synthetic oligonucleotide
  Target: ATXN2; (+) strand; PAM type: NRG; PAM sequence: GAG
gcactccagcctgggcgaca

SEQ ID NO: 54100 - DNA, 20 bp, Artificial Sequence
  Description of Artificial Sequence: Synthetic oligonucleotide
  Target: ATXN2; (+) strand; PAM type: NRG; PAM sequence: GAG
tccagcctgggcgacagagt

SEQ ID NO: 54101 - DNA, 20 bp, Artificial Sequence
  Description of Artificial Sequence: Synthetic oligonucleotide
  Target: ATXN2; (+) strand; PAM type: NRG; PAM sequence: TAG
cacacacacacacacaaaat

SEQ ID NO: 54102 - DNA, 20 bp, Artificial Sequence
  Description of Artificial Sequence: Synthetic oligonucleotide
  Target: ATXN2; (+) strand; PAM type: NRG; PAM sequence: CAG
acacacacaaaattagatta

SEQ ID NO: 54103 - DNA, 20 bp, Artificial Sequence
  Description of Artificial Sequence: Synthetic oligonucleotide
  Target: ATXN2; (+) strand; PAM type: NRG; PAM sequence: CAG
ttacattatctttcctaaaa

SEQ ID NO: 54104 - DNA, 20 bp, Artificial Sequence
  Description of Artificial Sequence: Synthetic oligonucleotide
  Target: ATXN2; (+) strand; PAM type: NRG; PAM sequence: AAG
cttcaaaaatatatataaca

SEQ ID NO: 54105 - DNA, 20 bp, Artificial Sequence
  Description of Artificial Sequence: Synthetic oligonucleotide
  Target: ATXN2; (+) strand; PAM type: NRG; PAM sequence: AAG
acaaaataaatcacttctga

SEQ ID NO: 54106 - DNA, 20 bp, Artificial Sequence
  Description of Artificial Sequence: Synthetic oligonucleotide
  Target: ATXN2; (+) strand; PAM type: NRG; PAM sequence: AAG
tattcacacacacacacaca

SEQ ID NO: 54107 - DNA, 20 bp, Artificial Sequence
  Description of Artificial Sequence: Synthetic oligonucleotide
  Target: ATXN2; (+) strand; PAM type: NRG; PAM sequence: AAG
aaattatgaaatgtttctta

SEQ ID NO: 54108 - DNA, 20 bp, Artificial Sequence
  Description of Artificial Sequence: Synthetic oligonucleotide
  Target: ATXN2; (+) strand; PAM type: NRG; PAM sequence: CAG
ttatgaaatgtttcttaaag

SEQ ID NO: 54109 - DNA, 20 bp, Artificial Sequence
  Description of Artificial Sequence: Synthetic oligonucleotide
  Target: ATXN2; (+) strand; PAM type: NRG; PAM sequence: CAG
ttaaagcagatgtgaatttc

SEQ ID NO: 54110 - DNA, 20 bp, Artificial Sequence
  Description of Artificial Sequence: Synthetic oligonucleotide
  Target: ATXN2; (+) strand; PAM type: NRG; PAM sequence: AAG
atgtgaatttccagactttc

SEQ ID NO: 54111 - DNA, 20 bp, Artificial Sequence
  Description of Artificial Sequence: Synthetic oligonucleotide
  Target: ATXN2; (+) strand; PAM type: NRG; PAM sequence: CAG
ttttttttcacccttgctct

SEQ ID NO: 54112 - DNA, 20 bp, Artificial Sequence
  Description of Artificial Sequence: Synthetic oligonucleotide
  Target: ATXN2; (+) strand; PAM type: NRG; PAM sequence: GAG
ttttttcacccttgctctca

SEQ ID NO: 54113 - DNA, 20 bp, Artificial Sequence
  Description of Artificial Sequence: Synthetic oligonucleotide
  Target: ATXN2; (+) strand; PAM type: NRG; PAM sequence: AAG
ctgttgatacgcacaaacct

SEQ ID NO: 54114 - DNA, 20 bp, Artificial Sequence
  Description of Artificial Sequence: Synthetic oligonucleotide
  Target: ATXN2; (+) strand; PAM type: NRG; PAM sequence: GAG
tgatacgcacaaacctaagt

SEQ ID NO: 54115 - DNA, 20 bp, Artificial Sequence
  Description of Artificial Sequence: Synthetic oligonucleotide
  Target: ATXN2; (+) strand; PAM type: NRG; PAM sequence: AGG
gatacgcacaaacctaagtg

SEQ ID NO: 54116 - DNA, 20 bp, Artificial Sequence
  Description of Artificial Sequence: Synthetic oligonucleotide
  Target: ATXN2; (+) strand; PAM type: NRG; PAM sequence: GAG
tacgcacaaacctaagtgag

SEQ ID NO: 54117 - DNA, 20 bp, Artificial Sequence
  Description of Artificial Sequence: Synthetic oligonucleotide
  Target: ATXN2; (+) strand; PAM type: NRG; PAM sequence: TAG
aaacctaagtgaggagattc

SEQ ID NO: 54118 - DNA, 20 bp, Artificial Sequence
  Description of Artificial Sequence: Synthetic oligonucleotide
  Target: ATXN2; (+) strand; PAM type: NRG; PAM sequence: AAG
cctaagtgaggagattctag

SEQ ID NO: 54119 - DNA, 20 bp, Artificial Sequence
  Description of Artificial Sequence: Synthetic oligonucleotide
  Target: ATXN2; (+) strand; PAM type: NRG; PAM sequence: AAG
agaagctgaaacttatttac

SEQ ID NO: 54120 - DNA, 20 bp, Artificial Sequence
  Description of Artificial Sequence: Synthetic oligonucleotide
  Target: ATXN2; (+) strand; PAM type: NRG; PAM sequence: AGG
gaagctgaaacttatttaca

SEQ ID NO: 54121 - DNA, 20 bp, Artificial Sequence
  Description of Artificial Sequence: Synthetic oligonucleotide
  Target: ATXN2; (+) strand; PAM type: NRG; PAM sequence: CAG
aaacttatttacaaggaatg

SEQ ID NO: 54122 - DNA, 20 bp, Artificial Sequence
  Description of Artificial Sequence: Synthetic oligonucleotide
  Target: ATXN2; (+) strand; PAM type: NRG; PAM sequence: AGG
aacttatttacaaggaatgc

SEQ ID NO: 54123 - DNA, 20 bp, Artificial Sequence
  Description of Artificial Sequence: Synthetic oligonucleotide
  Target: ATXN2; (+) strand; PAM type: NRG; PAM sequence: AAG
tatttacaaggaatgcagga

SEQ ID NO: 54124 - DNA, 20 bp, Artificial Sequence
  Description of Artificial Sequence: Synthetic oligonucleotide
  Target: ATXN2; (+) strand; PAM type: NRG; PAM sequence: AAG
aggaaagtgattcaaattca

SEQ ID NO: 54125 - DNA, 20 bp, Artificial Sequence
  Description of Artificial Sequence: Synthetic oligonucleotide
  Target: ATXN2; (+) strand; PAM type: NRG; PAM sequence: AAG
caaattcaaagtaattctac

SEQ ID NO: 54126 - DNA, 20 bp, Artificial Sequence
  Description of Artificial Sequence: Synthetic oligonucleotide
  Target: ATXN2; (+) strand; PAM type: NRG; PAM sequence: AAG
agtacattaacgatctgttc

SEQ ID NO: 54127 - DNA, 20 bp, Artificial Sequence
  Description of Artificial Sequence: Synthetic oligonucleotide
  Target: ATXN2; (+) strand; PAM type: NRG; PAM sequence: CAG
cacattacacaaatccaaca

SEQ ID NO: 54128 - DNA, 20 bp, Artificial Sequence
  Description of Artificial Sequence: Synthetic oligonucleotide
  Target: ATXN2; (+) strand; PAM type: NRG; PAM sequence: CAG
acaaaatttcacctattcat

SEQ ID NO: 54129 - DNA, 20 bp, Artificial Sequence
  Description of Artificial Sequence: Synthetic oligonucleotide
  Target: ATXN2; (+) strand; PAM type: NRG; PAM sequence: AAG
aatttcacctattcatcaga

SEQ ID NO: 54130 - DNA, 20 bp, Artificial Sequence
  Description of Artificial Sequence: Synthetic oligonucleotide
  Target: ATXN2; (+) strand; PAM type: NRG; PAM sequence: AAG
acctattcatcagaaagaat

SEQ ID NO: 54131 - DNA, 20 bp, Artificial Sequence
  Description of Artificial Sequence: Synthetic oligonucleotide
  Target: ATXN2; (+) strand; PAM type: NRG; PAM sequence: AGG
cctattcatcagaaagaata

SEQ ID NO: 54132 - DNA, 20 bp, Artificial Sequence
  Description of Artificial Sequence: Synthetic oligonucleotide
  Target: ATXN2; (+) strand; PAM type: NRG; PAM sequence: GGG
ctattcatcagaaagaataa

SEQ ID NO: 54133 - DNA, 20 bp, Artificial Sequence
  Description of Artificial Sequence: Synthetic oligonucleotide
  Target: ATXN2; (+) strand; PAM type: NRG; PAM sequence: TAG
aaagaataagggctgccatt

SEQ ID NO: 54134 - DNA, 20 bp, Artificial Sequence
  Description of Artificial Sequence: Synthetic oligonucleotide
  Target: ATXN2; (+) strand; PAM type: NRG; PAM sequence: AGG
aagaataagggctgccattt

SEQ ID NO: 54135 - DNA, 20 bp, Artificial Sequence
  Description of Artificial Sequence: Synthetic oligonucleotide
  Target: ATXN2; (+) strand; PAM type: NRG; PAM sequence: AAG
agggctgccatttaggtctc

SEQ ID NO: 54136 - DNA, 20 bp, Artificial Sequence
  Description of Artificial Sequence: Synthetic oligonucleotide
  Target: ATXN2; (+) strand; PAM type: NRG; PAM sequence: AAG
gccatttaggtctcaagtaa

SEQ ID NO: 54137 - DNA, 20 bp, Artificial Sequence
  Description of Artificial Sequence: Synthetic oligonucleotide
  Target: ATXN2; (+) strand; PAM type: NRG; PAM sequence: AAG
gtctcaagtaaaagaactta

SEQ ID NO: 54138 - DNA, 20 bp, Artificial Sequence
  Description of Artificial Sequence: Synthetic oligonucleotide
  Target: ATXN2; (+) strand; PAM type: NRG; PAM sequence: AAG
caagtaaaagaacttaaagc

SEQ ID NO: 54139 - DNA, 20 bp, Artificial Sequence
  Description of Artificial Sequence: Synthetic oligonucleotide
  Target: ATXN2; (+) strand; PAM type: NRG; PAM sequence: AGG
aagtaaaagaacttaaagca

SEQ ID NO: 54140 - DNA, 20 bp, Artificial Sequence
  Description of Artificial Sequence: Synthetic oligonucleotide
  Target: ATXN2; (+) strand; PAM type: NRG; PAM sequence: AAG
attaaccttaaattgttgta

SEQ ID NO: 54141 - DNA, 20 bp, Artificial Sequence
  Description of Artificial Sequence: Synthetic oligonucleotide
  Target: ATXN2; (+) strand; PAM type: NRG; PAM sequence: AAG
ttaaattgttgtaaagcctc

SEQ ID NO: 54142 - DNA, 20 bp, Artificial Sequence
  Description of Artificial Sequence: Synthetic oligonucleotide
  Target: ATXN2; (+) strand; PAM type: NRG; PAM sequence: AGG
taaattgttgtaaagcctca

SEQ ID NO: 54143 - DNA, 20 bp, Artificial Sequence
  Description of Artificial Sequence: Synthetic oligonucleotide
  Target: ATXN2; (+) strand; PAM type: NRG; PAM sequence: CAG
tgttgtaaagcctcaaggaa

SEQ ID NO: 54144 - DNA, 20 bp, Artificial Sequence
  Description of Artificial Sequence: Synthetic oligonucleotide
  Target: ATXN2; (+) strand; PAM type: NRG; PAM sequence: AAG
aagcctcaaggaacagaaaa

SEQ ID NO: 54145 - DNA, 20 bp, Artificial Sequence
  Description of Artificial Sequence: Synthetic oligonucleotide
  Target: ATXN2; (+) strand; PAM type: NRG; PAM sequence: TGG
ggaacagaaaaaagaccttg

SEQ ID NO: 54146 - DNA, 20 bp, Artificial Sequence
  Description of Artificial Sequence: Synthetic oligonucleotide
  Target: ATXN2; (+) strand; PAM type: NRG; PAM sequence: CAG
ctttgatcactcaaactact

SEQ ID NO: 54147 - DNA, 20 bp, Artificial Sequence
  Description of Artificial Sequence: Synthetic oligonucleotide
  Target: ATXN2; (+) strand; PAM type: NRG; PAM sequence: AGG
tttgatcactcaaactactc

SEQ ID NO: 54148 - DNA, 20 bp, Artificial Sequence
  Description of Artificial Sequence: Synthetic oligonucleotide
  Target: ATXN2; (+) strand; PAM type: NRG; PAM sequence: GAG
tgatcactcaaactactcag

SEQ ID NO: 54149 - DNA, 20 bp, Artificial Sequence
  Description of Artificial Sequence: Synthetic oligonucleotide
  Target: ATXN2; (+) strand; PAM type: NRG; PAM sequence: AAG
tctcttataatctaattttt

SEQ ID NO: 54150 - DNA, 20 bp, Artificial Sequence
  Description of Artificial Sequence: Synthetic oligonucleotide
  Target: ATXN2; (+) strand; PAM type: NRG; PAM sequence: TAG
tataatctaatttttaagcc

SEQ ID NO: 54151 - DNA, 20 bp, Artificial Sequence
  Description of Artificial Sequence: Synthetic oligonucleotide
  Target: ATXN2; (+) strand; PAM type: NRG; PAM sequence: TAG
aatctaatttttaagcctag

SEQ ID NO: 54152 - DNA, 20 bp, Artificial Sequence
  Description of Artificial Sequence: Synthetic oligonucleotide
  Target: ATXN2; (+) strand; PAM type: NRG; PAM sequence: TAG
tcaatgcaacttaataacct

SEQ ID NO: 54153 - DNA, 20 bp, Artificial Sequence
  Description of Artificial Sequence: Synthetic oligonucleotide
  Target: ATXN2; (+) strand; PAM type: NRG; PAM sequence: AAG
caaatctcttcctaatacct

SEQ ID NO: 54154 - DNA, 20 bp, Artificial Sequence
  Description of Artificial Sequence: Synthetic oligonucleotide
  Target: ATXN2; (+) strand; PAM type: NRG; PAM sequence: AAG
tctcttcctaatacctaaga

SEQ ID NO: 54155 - DNA, 20 bp, Artificial Sequence
  Description of Artificial Sequence: Synthetic oligonucleotide
  Target: ATXN2; (+) strand; PAM type: NRG; PAM sequence: CAG
aatacctaagaaagtaaaaa

SEQ ID NO: 54156 - DNA, 20 bp, Artificial Sequence
  Description of Artificial Sequence: Synthetic oligonucleotide
  Target: ATXN2; (+) strand; PAM type: NRG; PAM sequence: AAG
gaatacatccttttctataa

SEQ ID NO: 54157 - DNA, 20 bp, Artificial Sequence
  Description of Artificial Sequence: Synthetic oligonucleotide
  Target: ATXN2; (+) strand; PAM type: NRG; PAM sequence: TAG
taaattttttcatttttcgc

SEQ ID NO: 54158 - DNA, 20 bp, Artificial Sequence
  Description of Artificial Sequence: Synthetic oligonucleotide
  Target: ATXN2; (+) strand; PAM type: NRG; PAM sequence: AAG
ttcgctagatgccaacgaaa

SEQ ID NO: 54159 - DNA, 20 bp, Artificial Sequence
  Description of Artificial Sequence: Synthetic oligonucleotide
  Target: ATXN2; (+) strand; PAM type: NRG; PAM sequence: AGG
tcgctagatgccaacgaaaa

SEQ ID NO: 54160 - DNA, 20 bp, Artificial Sequence
  Description of Artificial Sequence: Synthetic oligonucleotide
  Target: ATXN2; (+) strand; PAM type: NRG; PAM sequence: GGG
cgctagatgccaacgaaaaa

SEQ ID NO: 54161 - DNA, 20 bp, Artificial Sequence
  Description of Artificial Sequence: Synthetic oligonucleotide
  Target: ATXN2; (+) strand; PAM type: NRG; PAM sequence: AAG
ccaacgaaaaagggaaactg

SEQ ID NO: 54162 - DNA, 20 bp, Artificial Sequence
  Description of Artificial Sequence: Synthetic oligonucleotide
  Target: ATXN2; (+) strand; PAM type: NRG; PAM sequence: TGG
gaaactgaagttaccctact

SEQ ID NO: 54163 - DNA, 20 bp, Artificial Sequence
  Description of Artificial Sequence: Synthetic oligonucleotide
  Target: ATXN2; (+) strand; PAM type: NRG; PAM sequence: GGG
aaactgaagttaccctactt

SEQ ID NO: 54164 - DNA, 20 bp, Artificial Sequence
  Description of Artificial Sequence: Synthetic oligonucleotide
  Target: ATXN2; (+) strand; PAM type: NRG; PAM sequence: GGG
aactgaagttaccctacttg

SEQ ID NO: 54165 - DNA, 20 bp, Artificial Sequence
  Description of Artificial Sequence: Synthetic oligonucleotide
  Target: ATXN2; (+) strand; PAM type: NRG; PAM sequence: TAG
aacgatcacttcatctgaac

SEQ ID NO: 54166 - DNA, 20 bp, Artificial Sequence
  Description of Artificial Sequence: Synthetic oligonucleotide
  Target: ATXN2; (+) strand; PAM type: NRG; PAM sequence: TGG
tcacttcatctgaactagtt

SEQ ID NO: 54167 - DNA, 20 bp, Artificial Sequence
  Description of Artificial Sequence: Synthetic oligonucleotide
  Target: ATXN2; (+) strand; PAM type: NRG; PAM sequence: AAG
tcatctgaactagtttggct

SEQ ID NO: 54168 - DNA, 20 bp, Artificial Sequence
  Description of Artificial Sequence: Synthetic oligonucleotide
  Target: ATXN2; (+) strand; PAM type: NRG; PAM sequence: TAG
tctgaactagtttggctaag

SEQ ID NO: 54169 - DNA, 20 bp, Artificial Sequence
  Description of Artificial Sequence: Synthetic oligonucleotide
  Target: ATXN2; (+) strand; PAM type: NRG; PAM sequence: TGG
tagtttggctaagtagtgtt

SEQ ID NO: 54170 - DNA, 20 bp, Artificial Sequence
  Description of Artificial Sequence: Synthetic oligonucleotide
  Target: ATXN2; (+) strand; PAM type: NRG; PAM sequence: GGG
agtttggctaagtagtgttt

SEQ ID NO: 54171 - DNA, 20 bp, Artificial Sequence
  Description of Artificial Sequence: Synthetic oligonucleotide
  Target: ATXN2; (+) strand; PAM type: NRG; PAM sequence: CAG
aagtagtgtttgggatgctt

SEQ ID NO: 54172 - DNA, 20 bp, Artificial Sequence
  Description of Artificial Sequence: Synthetic oligonucleotide
  Target: ATXN2; (+) strand; PAM type: NRG; PAM sequence: CAG
tgtttgggatgcttcagact

SEQ ID NO: 54173 - DNA, 20 bp, Artificial Sequence
  Description of Artificial Sequence: Synthetic oligonucleotide
  Target: ATXN2; (+) strand; PAM type: NRG; PAM sequence: GAG
tttgggatgcttcagactca

SEQ ID NO: 54174 - DNA, 20 bp, Artificial Sequence
  Description of Artificial Sequence: Synthetic oligonucleotide
  Target: ATXN2; (+) strand; PAM type: NRG; PAM sequence: AAG
gggatgcttcagactcagag

SEQ ID NO: 54175 - DNA, 20 bp, Artificial Sequence
  Description of Artificial Sequence: Synthetic oligonucleotide
  Target: ATXN2; (+) strand; PAM type: NRG; PAM sequence: AGG
ggatgcttcagactcagaga

SEQ ID NO: 54176 - DNA, 20 bp, Artificial Sequence
  Description of Artificial Sequence: Synthetic oligonucleotide
  Target: ATXN2; (+) strand; PAM type: NRG; PAM sequence: GGG
gatgcttcagactcagagaa

SEQ ID NO: 54177 - DNA, 20 bp, Artificial Sequence
  Description of Artificial Sequence: Synthetic oligonucleotide
  Target: ATXN2; (+) strand; PAM type: NRG; PAM sequence: GGG
atgcttcagactcagagaag

SEQ ID NO: 54178 - DNA, 20 bp, Artificial Sequence
  Description of Artificial Sequence: Synthetic oligonucleotide
  Target: ATXN2; (+) strand; PAM type: NRG; PAM sequence: AAG
cttcagactcagagaagggg

SEQ ID NO: 54179 - DNA, 20 bp, Artificial Sequence
  Description of Artificial Sequence: Synthetic oligonucleotide
  Target: ATXN2; (+) strand; PAM type: NRG; PAM sequence: AGG
ttcagactcagagaagggga

SEQ ID NO: 54180 - DNA, 20 bp, Artificial Sequence
  Description of Artificial Sequence: Synthetic oligonucleotide
  Target: ATXN2; (+) strand; PAM type: NRG; PAM sequence: GGG
tcagactcagagaaggggaa

SEQ ID NO: 54181 - DNA, 20 bp, Artificial Sequence
  Description of Artificial Sequence: Synthetic oligonucleotide
  Target: ATXN2; (+) strand; PAM type: NRG; PAM sequence: GGG
cagactcagagaaggggaag

SEQ ID NO: 54182 - DNA, 20 bp, Artificial Sequence
  Description of Artificial Sequence: Synthetic oligonucleotide
  Target: ATXN2; (+) strand; PAM type: NRG; PAM sequence: GGG
agactcagagaaggggaagg

SEQ ID NO: 54183 - DNA, 20 bp, Artificial Sequence
  Description of Artificial Sequence: Synthetic oligonucleotide
  Target: ATXN2; (+) strand; PAM type: NRG; PAM sequence: GGG
gactcagagaaggggaaggg

SEQ ID NO: 54184 - DNA, 20 bp, Artificial Sequence
  Description of Artificial Sequence: Synthetic oligonucleotide
  Target: ATXN2; (+) strand; PAM type: NRG; PAM sequence: GGG
actcagagaaggggaagggg

SEQ ID NO: 54185 - DNA, 20 bp, Artificial Sequence
  Description of Artificial Sequence: Synthetic oligonucleotide
  Target: ATXN2; (+) strand; PAM type: NRG; PAM sequence: CGG
cagagaaggggaaggggggg

SEQ ID NO: 54186 - DNA, 20 bp, Artificial Sequence
  Description of Artificial Sequence: Synthetic oligonucleotide
  Target: ATXN2; (+) strand; PAM type: NRG; PAM sequence: GGG
agagaaggggaagggggggc

SEQ ID NO: 54187 - DNA, 20 bp, Artificial Sequence
  Description of Artificial Sequence: Synthetic oligonucleotide
  Target: ATXN2; (+) strand; PAM type: NRG; PAM sequence: GGG
gagaaggggaagggggggcg

SEQ ID NO: 54188 - DNA, 20 bp, Artificial Sequence
  Description of Artificial Sequence: Synthetic oligonucleotide
  Target: ATXN2; (+) strand; PAM type: NRG; PAM sequence: AAG
aagggggggcggggcgtgta

SEQ ID NO: 54189 - DNA, 20 bp, Artificial Sequence
  Description of Artificial Sequence: Synthetic oligonucleotide
  Target: ATXN2; (+) strand; PAM type: NRG; PAM sequence: AAG
gactgtttccgccccctttg

SEQ ID NO: 54190 - DNA, 20 bp, Artificial Sequence
  Description of Artificial Sequence: Synthetic oligonucleotide
  Target: ATXN2; (+) strand; PAM type: NRG; PAM sequence: AGG
actgtttccgccccctttga

SEQ ID NO: 54191 - DNA, 20 bp, Artificial Sequence
  Description of Artificial Sequence: Synthetic oligonucleotide
  Target: ATXN2; (+) strand; PAM type: NRG; PAM sequence: CAG
gtttccgccccctttgaagg

SEQ ID NO: 54192 - DNA, 20 bp, Artificial Sequence
  Description of Artificial Sequence: Synthetic oligonucleotide
  Target: ATXN2; (+) strand; PAM type: NRG; PAM sequence: CAG
tccgccccctttgaaggcag

SEQ ID NO: 54193 - DNA, 20 bp, Artificial Sequence
  Description of Artificial Sequence: Synthetic oligonucleotide
  Target: ATXN2; (+) strand; PAM type: NRG; PAM sequence: CAG
cagcagaattccttaaaaac

SEQ ID NO: 54194 - DNA, 20 bp, Artificial Sequence
  Description of Artificial Sequence: Synthetic oligonucleotide
  Target: ATXN2; (+) strand; PAM type: NRG; PAM sequence: TGG
aaccagctgattcctcttga

SEQ ID NO: 54195 - DNA, 20 bp, Artificial Sequence
  Description of Artificial Sequence: Synthetic oligonucleotide
  Target: ATXN2; (+) strand; PAM type: NRG; PAM sequence: GGG
accagctgattcctcttgat

SEQ ID NO: 54196 - DNA, 20 bp, Artificial Sequence
  Description of Artificial Sequence: Synthetic oligonucleotide
  Target: ATXN2; (+) strand; PAM type: NRG; PAM sequence: GGG
ccagctgattcctcttgatg

SEQ ID NO: 54197 - DNA, 20 bp, Artificial Sequence
  Description of Artificial Sequence: Synthetic oligonucleotide
  Target: ATXN2; (+) strand; PAM type: NRG; PAM sequence: TGG
tgctgtaaataaaaattctt

SEQ ID NO: 54198 - DNA, 20 bp, Artificial Sequence
  Description of Artificial Sequence: Synthetic oligonucleotide
  Target: ATXN2; (+) strand; PAM type: NRG; PAM sequence: TGG
aaataaaaattctttggaaa

SEQ ID NO: 54199 - DNA, 20 bp, Artificial Sequence
  Description of Artificial Sequence: Synthetic oligonucleotide
  Target: ATXN2; (+) strand; PAM type: NRG; PAM sequence: GGG
aataaaaattctttggaaat

SEQ ID NO: 54200 - DNA, 20 bp, Artificial Sequence
  Description of Artificial Sequence: Synthetic oligonucleotide
  Target: ATXN2; (+) strand; PAM type: NRG; PAM sequence: AAG
gctgaaaatgtgttttcaaa

SEQ ID NO: 54201 - DNA, 20 bp, Artificial Sequence
  Description of Artificial Sequence: Synthetic oligonucleotide
  Target: ATXN2; (+) strand; PAM type: NRG; PAM sequence: CGG
gtgttttcaaaaagaaaact

SEQ ID NO: 54202 - DNA, 20 bp, Artificial Sequence
  Description of Artificial Sequence: Synthetic oligonucleotide
  Target: ATXN2; (+) strand; PAM type: NRG; PAM sequence: GGG
tgttttcaaaaagaaaactc

SEQ ID NO: 54203 - DNA, 20 bp, Artificial Sequence
  Description of Artificial Sequence: Synthetic oligonucleotide
  Target: ATXN2; (+) strand; PAM type: NRG; PAM sequence: AAG
tcctcttattccaccttcca

SEQ ID NO: 54204 - DNA, 20 bp, Artificial Sequence
  Description of Artificial Sequence: Synthetic oligonucleotide
  Target: ATXN2; (+) strand; PAM type: NRG; PAM sequence: AAG
tattccaccttccaaagccc

SEQ ID NO: 54205 - DNA, 20 bp, Artificial Sequence
  Description of Artificial Sequence: Synthetic oligonucleotide
  Target: ATXN2; (+) strand; PAM type: NRG; PAM sequence: AAG
aaagcccaagatgcctattt

SEQ ID NO: 54206 - DNA, 20 bp, Artificial Sequence
  Description of Artificial Sequence: Synthetic oligonucleotide
  Target: ATXN2; (+) strand; PAM type: NRG; PAM sequence: AGG
aagcccaagatgcctattta

SEQ ID NO: 54207 - DNA, 20 bp, Artificial Sequence
  Description of Artificial Sequence: Synthetic oligonucleotide
  Target: ATXN2; (+) strand; PAM type: NRG; PAM sequence: GAG
gcccaagatgcctatttaag

SEQ ID NO: 54208 - DNA, 20 bp, Artificial Sequence
  Description of Artificial Sequence: Synthetic oligonucleotide
  Target: ATXN2; (+) strand; PAM type: NRG; PAM sequence: AGG
cccaagatgcctatttaagg

SEQ ID NO: 54209 - DNA, 20 bp, Artificial Sequence
  Description of Artificial Sequence: Synthetic oligonucleotide
  Target: ATXN2; (+) strand; PAM type: NRG; PAM sequence: CGG
tgcctatttaaggaggacgc

SEQ ID NO: 54210 - DNA, 20 bp, Artificial Sequence
  Description of Artificial Sequence: Synthetic oligonucleotide
  Target: ATXN2; (+) strand; PAM type: NRG; PAM sequence: AAG
gacgccggtcacccgccgtc

SEQ ID NO: 54211 - DNA, 20 bp, Artificial Sequence
  Description of Artificial Sequence: Synthetic oligonucleotide
  Target: ATXN2; (+) strand; PAM type: NRG; PAM sequence: CGG
ccggtcacccgccgtcaagc

SEQ ID NO: 54212 - DNA, 20 bp, Artificial Sequence
  Description of Artificial Sequence: Synthetic oligonucleotide
  Target: ATXN2; (+) strand; PAM type: NRG; PAM sequence: CGG
gtcacccgccgtcaagccgg

SEQ ID NO: 54213 - DNA, 20 bp, Artificial Sequence
  Description of Artificial Sequence: Synthetic oligonucleotide
  Target: ATXN2; (+) strand; PAM type: NRG; PAM sequence: TAG
ccgccgtcaagccggcggcc

SEQ ID NO: 54214 - DNA, 20 bp, Artificial Sequence
  Description of Artificial Sequence: Synthetic oligonucleotide
  Target: ATXN2; (+) strand; PAM type: NRG; PAM sequence: AGG
cgccgtcaagccggcggcct

SEQ ID NO: 54215 - DNA, 20 bp, Artificial Sequence
  Description of Artificial Sequence: Synthetic oligonucleotide
  Target: ATXN2; (+) strand; PAM type: NRG; PAM sequence: AAG
aagccggcggcctaggccta

SEQ ID NO: 54216 - DNA, 20 bp, Artificial Sequence
  Description of Artificial Sequence: Synthetic oligonucleotide
  Target: ATXN2; (+) strand; PAM type: NRG; PAM sequence: AAG
ccggcggcctaggcctaaag

SEQ ID NO: 54217 - DNA, 20 bp, Artificial Sequence
  Description of Artificial Sequence: Synthetic oligonucleotide
  Target: ATXN2; (+) strand; PAM type: NRG; PAM sequence: AGG
cggcggcctaggcctaaaga

SEQ ID NO: 54218 - DNA, 20 bp, Artificial Sequence
  Description of Artificial Sequence: Synthetic oligonucleotide
  Target: ATXN2; (+) strand; PAM type: NRG; PAM sequence: CAG
gcctaggcctaaagaaggca

SEQ ID NO: 54219 - DNA, 20 bp, Artificial Sequence
  Description of Artificial Sequence: Synthetic oligonucleotide
  Target: ATXN2; (+) strand; PAM type: NRG; PAM sequence: TAG
taggcctaaagaaggcacag

SEQ ID NO: 54220 - DNA, 20 bp, Artificial Sequence
  Description of Artificial Sequence: Synthetic oligonucleotide
  Target: ATXN2; (+) strand; PAM type: NRG; PAM sequence: CGG
gcacagtagtgcctacaaca

SEQ ID NO: 54221 - DNA, 20 bp, Artificial Sequence
  Description of Artificial Sequence: Synthetic oligonucleotide
  Target: ATXN2; (+) strand; PAM type: NRG; PAM sequence: TGG
agtagtgcctacaacacgga

SEQ ID NO: 54222 - DNA, 20 bp, Artificial Sequence
  Description of Artificial Sequence: Synthetic oligonucleotide
  Target: ATXN2; (+) strand; PAM type: NRG; PAM sequence: GAG
cctacaacacggatggactt

SEQ ID NO: 54223 - DNA, 20 bp, Artificial Sequence
  Description of Artificial Sequence: Synthetic oligonucleotide
  Target: ATXN2; (+) strand; PAM type: NRG; PAM sequence: AGG
ctacaacacggatggacttg

SEQ ID NO: 54224 - DNA, 20 bp, Artificial Sequence
  Description of Artificial Sequence: Synthetic oligonucleotide
  Target: ATXN2; (+) strand; PAM type: NRG; PAM sequence: AAG
cacggatggacttgaggcac

SEQ ID NO: 54225 - DNA, 20 bp, Artificial Sequence
  Description of Artificial Sequence: Synthetic oligonucleotide
  Target: ATXN2; (+) strand; PAM type: NRG; PAM sequence: AGG
acggatggacttgaggcaca

SEQ ID NO: 54226 - DNA, 20 bp, Artificial Sequence
  Description of Artificial Sequence: Synthetic oligonucleotide
  Target: ATXN2; (+) strand; PAM type: NRG; PAM sequence: GGG
cggatggacttgaggcacaa

SEQ ID NO: 54227 - DNA, 20 bp, Artificial Sequence
  Description of Artificial Sequence: Synthetic oligonucleotide
  Target: ATXN2; (+) strand; PAM type: NRG; PAM sequence: TGG
gacttgaggcacaagggaaa

SEQ ID NO: 54228 - DNA, 20 bp, Artificial Sequence
  Description of Artificial Sequence: Synthetic oligonucleotide
  Target: ATXN2; (+) strand; PAM type: NRG; PAM sequence: TGG
gaaatggacttgcgtgccct

SEQ ID NO: 54229 - DNA, 20 bp, Artificial Sequence
  Description of Artificial Sequence: Synthetic oligonucleotide
  Target: ATXN2; (+) strand; PAM type: NRG; PAM sequence: AAG
tggacttgcgtgcccttggt

SEQ ID NO: 54230 - DNA, 20 bp, Artificial Sequence
  Description of Artificial Sequence: Synthetic oligonucleotide
  Target: ATXN2; (+) strand; PAM type: NRG; PAM sequence: TGG
tgcgtgcccttggtaagctc

SEQ ID NO: 54231 - DNA, 20 bp, Artificial Sequence
  Description of Artificial Sequence: Synthetic oligonucleotide
  Target: ATXN2; (+) strand; PAM type: NRG; PAM sequence: CGG
gtgcccttggtaagctctgg

SEQ ID NO: 54232 - DNA, 20 bp, Artificial Sequence
  Description of Artificial Sequence: Synthetic oligonucleotide
  Target: ATXN2; (+) strand; PAM type: NRG; PAM sequence: AAG
aagctctggcggcactcccg

SEQ ID NO: 54233 - DNA, 20 bp, Artificial Sequence
  Description of Artificial Sequence: Synthetic oligonucleotide
  Target: ATXN2; (+) strand; PAM type: NRG; PAM sequence: AAG
ctggcggcactcccgaagtt

SEQ ID NO: 54234 - DNA, 20 bp, Artificial Sequence
  Description of Artificial Sequence: Synthetic oligonucleotide
  Target: ATXN2; (+) strand; PAM type: NRG; PAM sequence: AGG
tggcggcactcccgaagtta

SEQ ID NO: 54235 - DNA, 20 bp, Artificial Sequence
  Description of Artificial Sequence: Synthetic oligonucleotide
  Target: ATXN2; (+) strand; PAM type: NRG; PAM sequence: CGG
actcccgaagttaaggacac

SEQ ID NO: 54236 - DNA, 20 bp, Artificial Sequence
  Description of Artificial Sequence: Synthetic oligonucleotide
  Target: ATXN2; (+) strand; PAM type: NRG; PAM sequence: TGG
gttaaggacaccggccacaa

SEQ ID NO: 54237 - DNA, 20 bp, Artificial Sequence
  Description of Artificial Sequence: Synthetic oligonucleotide
  Target: ATXN2; (+) strand; PAM type: NRG; PAM sequence: TGG
ggacaccggccacaatggaa

SEQ ID NO: 54238 - DNA, 20 bp, Artificial Sequence
  Description of Artificial Sequence: Synthetic oligonucleotide
  Target: ATXN2; (+) strand; PAM type: NRG; PAM sequence: GAG
acaccggccacaatggaatg

SEQ ID NO: 54239 - DNA, 20 bp, Artificial Sequence
  Description of Artificial Sequence: Synthetic oligonucleotide
  Target: ATXN2; (+) strand; PAM type: NRG; PAM sequence: AAG
tccttctccctttgaacact

SEQ ID NO: 54240 - DNA, 20 bp, Artificial Sequence
  Description of Artificial Sequence: Synthetic oligonucleotide
  Target: ATXN2; (+) strand; PAM type: NRG; PAM sequence: TAG
ttgaacactaagcattttct

SEQ ID NO: 54241 - DNA, 20 bp, Artificial Sequence
  Description of Artificial Sequence: Synthetic oligonucleotide
  Target: ATXN2; (+) strand; PAM type: NRG; PAM sequence: CAG
caaccgcccgccacccccaa

SEQ ID NO: 54242 - DNA, 20 bp, Artificial Sequence
  Description of Artificial Sequence: Synthetic oligonucleotide
  Target: ATXN2; (+) strand; PAM type: NRG; PAM sequence: AGG
aaccgcccgccacccccaac

SEQ ID NO: 54243 - DNA, 20 bp, Artificial Sequence
  Description of Artificial Sequence: Synthetic oligonucleotide
  Target: ATXN2; (+) strand; PAM type: NRG; PAM sequence: GAG
tcctgcacaaacacaccctc

SEQ ID NO: 54244 - DNA, 20 bp, Artificial Sequence
  Description of Artificial Sequence: Synthetic oligonucleotide
  Target: ATXN2; (+) strand; PAM type: NRG; PAM sequence: CAG
acacaccctcgagtcaaacc

SEQ ID NO: 54245 - DNA, 20 bp, Artificial Sequence
  Description of Artificial Sequence: Synthetic oligonucleotide
  Target: ATXN2; (+) strand; PAM type: NRG; PAM sequence: TAG
accctcgagtcaaacccagt

SEQ ID NO: 54246 - DNA, 20 bp, Artificial Sequence
  Description of Artificial Sequence: Synthetic oligonucleotide
  Target: ATXN2; (+) strand; PAM type: NRG; PAM sequence: CGG
tcgagtcaaacccagttagc

SEQ ID NO: 54247 - DNA, 20 bp, Artificial Sequence
  Description of Artificial Sequence: Synthetic oligonucleotide
  Target: ATXN2; (+) strand; PAM type: NRG; PAM sequence: GGG
cgagtcaaacccagttagcc

SEQ ID NO: 54248 - DNA, 20 bp, Artificial Sequence
  Description of Artificial Sequence: Synthetic oligonucleotide
  Target: ATXN2; (+) strand; PAM type: NRG; PAM sequence: GAG
cagttagccgggacaacact

SEQ ID NO: 54249 - DNA, 20 bp, Artificial Sequence
  Description of Artificial Sequence: Synthetic oligonucleotide
  Target: ATXN2; (+) strand; PAM type: NRG; PAM sequence: CAG
ccgggacaacactgagcccc

SEQ ID NO: 54250 - DNA, 20 bp, Artificial Sequence
  Description of Artificial Sequence: Synthetic oligonucleotide
  Target: ATXN2; (+) strand; PAM type: NRG; PAM sequence: CGG
cccagcccctactacaaccc

SEQ ID NO: 54251 - DNA, 20 bp, Artificial Sequence
  Description of Artificial Sequence: Synthetic oligonucleotide
  Target: ATXN2; (+) strand; PAM type: NRG; PAM sequence: TAG
cccctactacaaccccggct

SEQ ID NO: 54252 - DNA, 20 bp, Artificial Sequence
  Description of Artificial Sequence: Synthetic oligonucleotide
  Target: ATXN2; (+) strand; PAM type: NRG; PAM sequence: AGG
ccctactacaaccccggctt

SEQ ID NO: 54253 - DNA, 20 bp, Artificial Sequence
  Description of Artificial Sequence: Synthetic oligonucleotide
  Target: ATXN2; (+) strand; PAM type: NRG; PAM sequence: GAG
ctactacaaccccggcttag

SEQ ID NO: 54254 - DNA, 20 bp, Artificial Sequence
  Description of Artificial Sequence: Synthetic oligonucleotide
  Target: ATXN2; (+) strand; PAM type: NRG; PAM sequence: AGG
tactacaaccccggcttagg

SEQ ID NO: 54255 - DNA, 20 bp, Artificial Sequence
  Description of Artificial Sequence: Synthetic oligonucleotide
  Target: ATXN2; (+) strand; PAM type: NRG; PAM sequence: GGG
actacaaccccggcttagga

SEQ ID NO: 54256 - DNA, 20 bp, Artificial Sequence
  Description of Artificial Sequence: Synthetic oligonucleotide
  Target: ATXN2; (+) strand; PAM type: NRG; PAM sequence: AAG
accccggcttaggagggaaa

SEQ ID NO: 54257 - DNA, 20 bp, Artificial Sequence
  Description of Artificial Sequence: Synthetic oligonucleotide
  Target: ATXN2; (+) strand; PAM type: NRG; PAM sequence: TAG
cttaggagggaaaaagacgc

SEQ ID NO: 54258 - DNA, 20 bp, Artificial Sequence
  Description of Artificial Sequence: Synthetic oligonucleotide
  Target: ATXN2; (+) strand; PAM type: NRG; PAM sequence: CAG
aacacccgcctttctgcctt

SEQ ID NO: 54259 - DNA, 20 bp, Artificial Sequence
  Description of Artificial Sequence: Synthetic oligonucleotide
  Target: ATXN2; (+) strand; PAM type: NRG; PAM sequence: AGG
acacccgcctttctgccttc

SEQ ID NO: 54260 - DNA, 20 bp, Artificial Sequence
  Description of Artificial Sequence: Synthetic oligonucleotide
  Target: ATXN2; (+) strand; PAM type: NRG; PAM sequence: TAG
ctgctgcaatctctctctcc

SEQ ID NO: 54261 - DNA, 20 bp, Artificial Sequence
  Description of Artificial Sequence: Synthetic oligonucleotide
  Target: ATXN2; (+) strand; PAM type: NRG; PAM sequence: TGG
tctcctagcatttccgaaat

SEQ ID NO: 54262 - DNA, 20 bp, Artificial Sequence
  Description of Artificial Sequence: Synthetic oligonucleotide
  Target: ATXN2; (+) strand; PAM type: NRG; PAM sequence: GGG
ctcctagcatttccgaaatt

SEQ ID NO: 54263 - DNA, 20 bp, Artificial Sequence
  Description of Artificial Sequence: Synthetic oligonucleotide
  Target: ATXN2; (+) strand; PAM type: NRG; PAM sequence: GGG
tcctagcatttccgaaattg

SEQ ID NO: 54264 - DNA, 20 bp, Artificial Sequence
  Description of Artificial Sequence: Synthetic oligonucleotide
  Target: ATXN2; (+) strand; PAM type: NRG; PAM sequence: CGG
tagcatttccgaaattgggg

SEQ ID NO: 54265 - DNA, 20 bp, Artificial Sequence
  Description of Artificial Sequence: Synthetic oligonucleotide
  Target: ATXN2; (+) strand; PAM type: NRG; PAM sequence: GGG
agcatttccgaaattggggc

SEQ ID NO: 54266 - DNA, 20 bp, Artificial Sequence
  Description of Artificial Sequence: Synthetic oligonucleotide
  Target: ATXN2; (+) strand; PAM type: NRG; PAM sequence: GGG
gcatttccgaaattggggcg

SEQ ID NO: 54267 - DNA, 20 bp, Artificial Sequence
  Description of Artificial Sequence: Synthetic oligonucleotide
  Target: ATXN2; (+) strand; PAM type: NRG; PAM sequence: GGG
catttccgaaattggggcgg

SEQ ID NO: 54268 - DNA, 20 bp, Artificial Sequence
  Description of Artificial Sequence: Synthetic oligonucleotide
  Target: ATXN2; (+) strand; PAM type: NRG; PAM sequence: TGG
tccgaaattggggcgggggt

SEQ ID NO: 54269 - DNA, 20 bp, Artificial Sequence
  Description of Artificial Sequence: Synthetic oligonucleotide
  Target: ATXN2; (+) strand; PAM type: NRG; PAM sequence: GGG
ccgaaattggggcgggggtt

SEQ ID NO: 54270 - DNA, 20 bp, Artificial Sequence
  Description of Artificial Sequence: Synthetic oligonucleotide
  Target: ATXN2; (+) strand; PAM type: NRG; PAM sequence: AAG
attggggcgggggttgggat

SEQ ID NO: 54271 - DNA, 20 bp, Artificial Sequence
  Description of Artificial Sequence: Synthetic oligonucleotide
  Target: ATXN2; (+) strand; PAM type: NRG; PAM sequence: CAG
cgggggttgggataagtgcg

SEQ ID NO: 54272 - DNA, 20 bp, Artificial Sequence
  Description of Artificial Sequence: Synthetic oligonucleotide
  Target: ATXN2; (+) strand; PAM type: NRG; PAM sequence: AGG
gggggttgggataagtgcgc

SEQ ID NO: 54273 - DNA, 20 bp, Artificial Sequence
  Description of Artificial Sequence: Synthetic oligonucleotide
  Target: ATXN2; (+) strand; PAM type: NRG; PAM sequence: GGG
ggggttgggataagtgcgca

SEQ ID NO: 54274 - DNA, 20 bp, Artificial Sequence
  Description of Artificial Sequence: Synthetic oligonucleotide
  Target: ATXN2; (+) strand; PAM type: NRG; PAM sequence: CAG
gggtgcccgccccctgccac

SEQ ID NO: 54275 - DNA, 20 bp, Artificial Sequence
  Description of Artificial Sequence: Synthetic oligonucleotide
  Target: ATXN2; (+) strand; PAM type: NRG; PAM sequence: CGG
tgccaccagcaccgccaccc

SEQ ID NO: 54276 - DNA, 20 bp, Artificial Sequence
  Description of Artificial Sequence: Synthetic oligonucleotide
  Target: ATXN2; (+) strand; PAM type: NRG; PAM sequence: CAG
gcaccgccaccccggatctc

SEQ ID NO: 54277 - DNA, 20 bp, Artificial Sequence
  Description of Artificial Sequence: Synthetic oligonucleotide
  Target: ATXN2; (+) strand; PAM type: NRG; PAM sequence: AGG
caccgccaccccggatctcc

SEQ ID NO: 54278 - DNA, 20 bp, Artificial Sequence
  Description of Artificial Sequence: Synthetic oligonucleotide
  Target: ATXN2; (+) strand; PAM type: NRG; PAM sequence: GGG
accgccaccccggatctcca

SEQ ID NO: 54279 - DNA, 20 bp, Artificial Sequence
  Description of Artificial Sequence: Synthetic oligonucleotide
  Target: ATXN2; (+) strand; PAM type: NRG; PAM sequence: CAG
caccccggatctccagggtc

SEQ ID NO: 54280 - DNA, 20 bp, Artificial Sequence
  Description of Artificial Sequence: Synthetic oligonucleotide
  Target: ATXN2; (+) strand; PAM type: NRG; PAM sequence: TGG
cggatctccagggtccagcc

SEQ ID NO: 54281 - DNA, 20 bp, Artificial Sequence
  Description of Artificial Sequence: Synthetic oligonucleotide
  Target: ATXN2; (+) strand; PAM type: NRG; PAM sequence: GGG
ggatctccagggtccagcct

SEQ ID NO: 54282 - DNA, 20 bp, Artificial Sequence
  Description of Artificial Sequence: Synthetic oligonucleotide
  Target: ATXN2; (+) strand; PAM type: NRG; PAM sequence: CAG
tccagggtccagcctgggtc

SEQ ID NO: 54283 - DNA, 20 bp, Artificial Sequence
  Description of Artificial Sequence: Synthetic oligonucleotide
  Target: ATXN2; (+) strand; PAM type: NRG; PAM sequence: CAG
cctcacccaccgatgttcca

SEQ ID NO: 54284 - DNA, 20 bp, Artificial Sequence
  Description of Artificial Sequence: Synthetic oligonucleotide
  Target: ATXN2; (+) strand; PAM type: NRG; PAM sequence: AGG
ctcacccaccgatgttccac

SEQ ID NO: 54285 - DNA, 20 bp, Artificial Sequence
  Description of Artificial Sequence: Synthetic oligonucleotide
  Target: ATXN2; (+) strand; PAM type: NRG; PAM sequence: CGG
cacaggcgccttctccactg

SEQ ID NO: 54286 - DNA, 20 bp, Artificial Sequence
  Description of Artificial Sequence: Synthetic oligonucleotide
  Target: ATXN2; (+) strand; PAM type: NRG; PAM sequence: CAG
ttctccactgcggcctcgaa

SEQ ID NO: 54287 - DNA, 20 bp, Artificial Sequence
  Description of Artificial Sequence: Synthetic oligonucleotide
  Target: ATXN2; (+) strand; PAM type: NRG; PAM sequence: CGG
tgcggcctcgaacagcaatg

SEQ ID NO: 54288 - DNA, 20 bp, Artificial Sequence
  Description of Artificial Sequence: Synthetic oligonucleotide
  Target: ATXN2; (+) strand; PAM type: NRG; PAM sequence: CGG
cctcgaacagcaatgcggat

SEQ ID NO: 54289 - DNA, 20 bp, Artificial Sequence
  Description of Artificial Sequence: Synthetic oligonucleotide
  Target: ATXN2; (+) strand; PAM type: NRG; PAM sequence: CGG
atcggccaccacccgcgcgc

SEQ ID NO: 54290 - DNA, 20 bp, Artificial Sequence
  Description of Artificial Sequence: Synthetic oligonucleotide
  Target: ATXN2; (+) strand; PAM type: NRG; PAM sequence: GAG
cggccaccacccgcgcgccg

SEQ ID NO: 54291 - DNA, 20 bp, Artificial Sequence
  Description of Artificial Sequence: Synthetic oligonucleotide
  Target: ATXN2; (+) strand; PAM type: NRG; PAM sequence: GAG
gccaccacccgcgcgccgga

SEQ ID NO: 54292 - DNA, 20 bp, Artificial Sequence
  Description of Artificial Sequence: Synthetic oligonucleotide
  Target: ATXN2; (+) strand; PAM type: NRG; PAM sequence: AGG
ccaccacccgcgcgccggag

SEQ ID NO: 54293 - DNA, 20 bp, Artificial Sequence
  Description of Artificial Sequence: Synthetic oligonucleotide
  Target: ATXN2; (+) strand; PAM type: NRG; PAM sequence: TGG
acccgcgcgccggagaggtc

SEQ ID NO: 54294 - DNA, 20 bp, Artificial Sequence
  Description of Artificial Sequence: Synthetic oligonucleotide
  Target: ATXN2; (+) strand; PAM type: NRG; PAM sequence: CGG
cgcgcgccggagaggtctgg

SEQ ID NO: 54295 - DNA, 20 bp, Artificial Sequence
  Description of Artificial Sequence: Synthetic oligonucleotide
  Target: ATXN2; (+) strand; PAM type: NRG; PAM sequence: GGG
gcgcgccggagaggtctggc

SEQ ID NO: 54296 - DNA, 20 bp, Artificial Sequence
  Description of Artificial Sequence: Synthetic oligonucleotide
  Target: ATXN2; (+) strand; PAM type: NRG; PAM sequence: GGG
cgcgccggagaggtctggcg

SEQ ID NO: 54297 - DNA, 20 bp, Artificial Sequence
  Description of Artificial Sequence: Synthetic oligonucleotide
  Target: ATXN2; (+) strand; PAM type: NRG; PAM sequence: GGG
gcgccggagaggtctggcgg

SEQ ID NO: 54298 - DNA, 20 bp, Artificial Sequence
  Description of Artificial Sequence: Synthetic oligonucleotide
  Target: ATXN2; (+) strand; PAM type: NRG; PAM sequence: AAG
ccggagaggtctggcggggg

SEQ ID NO: 54299 - DNA, 20 bp, Artificial Sequence
  Description of Artificial Sequence: Synthetic oligonucleotide
  Target: ATXN2; (+) strand; PAM type: NRG; PAM sequence: AGG
cggagaggtctggcggggga

SEQ ID NO: 54300 - DNA, 20 bp, Artificial Sequence
  Description of Artificial Sequence: Synthetic oligonucleotide
  Target: ATXN2; (+) strand; PAM type: NRG; PAM sequence: GAG
gagaggtctggcgggggaag

SEQ ID NO: 54301 - DNA, 20 bp, Artificial Sequence
  Description of Artificial Sequence: Synthetic oligonucleotide
  Target: ATXN2; (+) strand; PAM type: NRG; PAM sequence: AGG
agaggtctggcgggggaagg

SEQ ID NO: 54302 - DNA, 20 bp, Artificial Sequence
  Description of Artificial Sequence: Synthetic oligonucleotide
  Target: ATXN2; (+) strand; PAM type: NRG; PAM sequence: AAG
ggtctggcgggggaaggagg

SEQ ID NO: 54303 - DNA, 20 bp, Artificial Sequence
  Description of Artificial Sequence: Synthetic oligonucleotide
  Target: ATXN2; (+) strand; PAM type: NRG; PAM sequence: AGG
gtctggcgggggaaggagga

SEQ ID NO: 54304 - DNA, 20 bp, Artificial Sequence
  Description of Artificial Sequence: Synthetic oligonucleotide
  Target: ATXN2; (+) strand; PAM type: NRG; PAM sequence: CGG
ggcgggggaaggaggaaggc

SEQ ID NO: 54305 - DNA, 20 bp, Artificial Sequence
  Description of Artificial Sequence: Synthetic oligonucleotide
  Target: ATXN2; (+) strand; PAM type: NRG; PAM sequence: GGG
gcgggggaaggaggaaggcc

SEQ ID NO: 54306 - DNA, 20 bp, Artificial Sequence
  Description of Artificial Sequence: Synthetic oligonucleotide
  Target: ATXN2; (+) strand; PAM type: NRG; PAM sequence: CGG
gggaaggaggaaggccggga

SEQ ID NO: 54307 - DNA, 20 bp, Artificial Sequence
  Description of Artificial Sequence: Synthetic oligonucleotide
  Target: ATXN2; (+) strand; PAM type: NRG; PAM sequence: GGG
ggaaggaggaaggccgggac

SEQ ID NO: 54308 - DNA, 20 bp, Artificial Sequence
  Description of Artificial Sequence: Synthetic oligonucleotide
  Target: ATXN2; (+) strand; PAM type: NRG; PAM sequence: GGG
gaaggaggaaggccgggacg

SEQ ID NO: 54309 - DNA, 20 bp, Artificial Sequence
  Description of Artificial Sequence: Synthetic oligonucleotide
  Target: ATXN2; (+) strand; PAM type: NRG; PAM sequence: CGG
gaggaaggccgggacggggc

SEQ ID NO: 54310 - DNA, 20 bp, Artificial Sequence
  Description of Artificial Sequence: Synthetic oligonucleotide
  Target: ATXN2; (+) strand; PAM type: NRG; PAM sequence: GGG
aggaaggccgggacggggcc

SEQ ID NO: 54311 - DNA, 20 bp, Artificial Sequence
  Description of Artificial Sequence: Synthetic oligonucleotide
  Target: ATXN2; (+) strand; PAM type: NRG; PAM sequence: CAG
tccccaccccttcccttccc

SEQ ID NO: 54312 - DNA, 20 bp, Artificial Sequence
  Description of Artificial Sequence: Synthetic oligonucleotide
  Target: ATXN2; (+) strand; PAM type: NRG; PAM sequence: AGG
ccccaccccttcccttcccc

SEQ ID NO: 54313 - DNA, 20 bp, Artificial Sequence
  Description of Artificial Sequence: Synthetic oligonucleotide
  Target: ATXN2; (+) strand; PAM type: NRG; PAM sequence: TGG
caccccttcccttccccagg

SEQ ID NO: 54314 - DNA, 20 bp, Artificial Sequence
  Description of Artificial Sequence: Synthetic oligonucleotide
  Target: ATXN2; (+) strand; PAM type: NRG; PAM sequence: GGG
accccttcccttccccaggt

SEQ ID NO: 54315 - DNA, 20 bp, Artificial Sequence
  Description of Artificial Sequence: Synthetic oligonucleotide
  Target: ATXN2; (+) strand; PAM type: NRG; PAM sequence: GGG
ccccttcccttccccaggtg

SEQ ID NO: 54316 - DNA, 20 bp, Artificial Sequence
  Description of Artificial Sequence: Synthetic oligonucleotide
  Target: ATXN2; (+) strand; PAM type: NRG; PAM sequence: GGG
cccttcccttccccaggtgg

SEQ ID NO: 54317 - DNA, 20 bp, Artificial Sequence
  Description of Artificial Sequence: Synthetic oligonucleotide
  Target: ATXN2; (+) strand; PAM type: NRG; PAM sequence: GAG
cttcccttccccaggtgggg

SEQ ID NO: 54318 - DNA, 20 bp, Artificial Sequence
  Description of Artificial Sequence: Synthetic oligonucleotide
  Target: ATXN2; (+) strand; PAM type: NRG; PAM sequence: AGG
ttcccttccccaggtggggg

SEQ ID NO: 54319 - DNA, 20 bp, Artificial Sequence
  Description of Artificial Sequence: Synthetic oligonucleotide
  Target: ATXN2; (+) strand; PAM type: NRG; PAM sequence: GGG
tcccttccccaggtggggga

SEQ ID NO: 54320 - DNA, 20 bp, Artificial Sequence
  Description of Artificial Sequence: Synthetic oligonucleotide
  Target: ATXN2; (+) strand; PAM type: NRG; PAM sequence: TGG
cttccccaggtgggggaggg

SEQ ID NO: 54321 - DNA, 20 bp, Artificial Sequence
  Description of Artificial Sequence: Synthetic oligonucleotide
  Target: ATXN2; (+) strand; PAM type: NRG; PAM sequence: CGG
gggggagggtggaacgctgc

SEQ ID NO: 54322 - DNA, 20 bp, Artificial Sequence
  Description of Artificial Sequence: Synthetic oligonucleotide
  Target: ATXN2; (+) strand; PAM type: NRG; PAM sequence: GAG
gggagggtggaacgctgccg

SEQ ID NO: 54323 - DNA, 20 bp, Artificial Sequence
  Description of Artificial Sequence: Synthetic oligonucleotide
  Target: ATXN2; (+) strand; PAM type: NRG; PAM sequence: AGG
ggagggtggaacgctgccgg

SEQ ID NO: 54324 - DNA, 20 bp, Artificial Sequence
  Description of Artificial Sequence: Synthetic oligonucleotide
  Target: ATXN2; (+) strand; PAM type: NRG; PAM sequence: TGG
gaacgctgccggaggccaca

SEQ ID NO: 54325 - DNA, 20 bp, Artificial Sequence
  Description of Artificial Sequence: Synthetic oligonucleotide
  Target: ATXN2; (+) strand; PAM type: NRG; PAM sequence: GAG
acgctgccggaggccacatg

SEQ ID NO: 54326 - DNA, 20 bp, Artificial Sequence
  Description of Artificial Sequence: Synthetic oligonucleotide
  Target: ATXN2; (+) strand; PAM type: NRG; PAM sequence: CAG
cacatggagccccacgattt

SEQ ID NO: 54327 - DNA, 20 bp, Artificial Sequence
  Description of Artificial Sequence: Synthetic oligonucleotide
  Target: ATXN2; (+) strand; PAM type: NRG; PAM sequence: AGG
acatggagccccacgatttc

SEQ ID NO: 54328 - DNA, 20 bp, Artificial Sequence
  Description of Artificial Sequence: Synthetic oligonucleotide
  Target: ATXN2; (+) strand; PAM type: NRG; PAM sequence: GGG
catggagccccacgatttca

SEQ ID NO: 54329 - DNA, 20 bp, Artificial Sequence
  Description of Artificial Sequence: Synthetic oligonucleotide
  Target: ATXN2; (+) strand; PAM type: NRG; PAM sequence: GGG
atggagccccacgatttcag

SEQ ID NO: 54330 - DNA, 20 bp, Artificial Sequence
  Description of Artificial Sequence: Synthetic oligonucleotide
  Target: ATXN2; (+) strand; PAM type: NRG; PAM sequence: GAG
ggagccccacgatttcaggg

SEQ ID NO: 54331 - DNA, 20 bp, Artificial Sequence
  Description of Artificial Sequence: Synthetic oligonucleotide
  Target: ATXN2; (+) strand; PAM type: NRG; PAM sequence: CGG
cccacgatttcaggggagtt

SEQ ID NO: 54332 - DNA, 20 bp, Artificial Sequence
  Description of Artificial Sequence: Synthetic oligonucleotide
  Target: ATXN2; (+) strand; PAM type: NRG; PAM sequence: GGG
ccacgatttcaggggagttc

SEQ ID NO: 54333 - DNA, 20 bp, Artificial Sequence
  Description of Artificial Sequence: Synthetic oligonucleotide
  Target: ATXN2; (+) strand; PAM type: NRG; PAM sequence: GAG
acgatttcaggggagttcgg

SEQ ID NO: 54334 - DNA, 20 bp, Artificial Sequence
  Description of Artificial Sequence: Synthetic oligonucleotide
  Target: ATXN2; (+) strand; PAM type: NRG; PAM sequence: CGG
gggagcccccgccgccgcct

SEQ ID NO: 54335 - DNA, 20 bp, Artificial Sequence
  Description of Artificial Sequence: Synthetic oligonucleotide
  Target: ATXN2; (+) strand; PAM type: NRG; PAM sequence: CAG
cgccgcctcggacacgaacg

SEQ ID NO: 54336 - DNA, 20 bp, Artificial Sequence
  Description of Artificial Sequence: Synthetic oligonucleotide
  Target: ATXN2; (+) strand; PAM type: NRG; PAM sequence: GAG
ccgcctcggacacgaacgca

SEQ ID NO: 54337 - DNA, 20 bp, Artificial Sequence
  Description of Artificial Sequence: Synthetic oligonucleotide
  Target: ATXN2; (+) strand; PAM type: NRG; PAM sequence: AGG
cgcctcggacacgaacgcag

SEQ ID NO: 54338 - DNA, 20 bp, Artificial Sequence
  Description of Artificial Sequence: Synthetic oligonucleotide
  Target: ATXN2; (+) strand; PAM type: NRG; PAM sequence: GGG
gcctcggacacgaacgcaga

SEQ ID NO: 54339 - DNA, 20 bp, Artificial Sequence
  Description of Artificial Sequence: Synthetic oligonucleotide
  Target: ATXN2; (+) strand; PAM type: NRG; PAM sequence: GGG
cctcggacacgaacgcagag

SEQ ID NO: 54340 - DNA, 20 bp, Artificial Sequence
  Description of Artificial Sequence: Synthetic oligonucleotide
  Target: ATXN2; (+) strand; PAM type: NRG; PAM sequence: CGG
gacacgaacgcagaggggtg

SEQ ID NO: 54341 - DNA, 20 bp, Artificial Sequence
  Description of Artificial Sequence: Synthetic oligonucleotide
  Target: ATXN2; (+) strand; PAM type: NRG; PAM sequence: GGG
acacgaacgcagaggggtgc

SEQ ID NO: 54342 - DNA, 20 bp, Artificial Sequence
  Description of Artificial Sequence: Synthetic oligonucleotide
  Target: ATXN2; (+) strand; PAM type: NRG; PAM sequence: GGG
cacgaacgcagaggggtgcg

SEQ ID NO: 54343 - DNA, 20 bp, Artificial Sequence
  Description of Artificial Sequence: Synthetic oligonucleotide
  Target: ATXN2; (+) strand; PAM type: NRG; PAM sequence: GGG
acgaacgcagaggggtgcgg

SEQ ID NO: 54344 - DNA, 20 bp, Artificial Sequence
  Description of Artificial Sequence: Synthetic oligonucleotide
  Target: ATXN2; (+) strand; PAM type: NRG; PAM sequence: AAG
cgcagaggggtgcgggggcc

SEQ ID NO: 54345 - DNA, 20 bp, Artificial Sequence
  Description of Artificial Sequence: Synthetic oligonucleotide
  Target: ATXN2; (+) strand; PAM type: NRG; PAM sequence: AGG
gcagaggggtgcgggggcca

SEQ ID NO: 54346 - DNA, 20 bp, Artificial Sequence
  Description of Artificial Sequence: Synthetic oligonucleotide
  Target: ATXN2; (+) strand; PAM type: NRG; PAM sequence: CAG
ccccgtcctccgatctttcc

SEQ ID NO: 54347 - DNA, 20 bp, Artificial Sequence
  Description of Artificial Sequence: Synthetic oligonucleotide
  Target: ATXN2; (+) strand; PAM type: NRG; PAM sequence: AGG
cccgtcctccgatctttccc

SEQ ID NO: 54348 - DNA, 20 bp, Artificial Sequence
  Description of Artificial Sequence: Synthetic oligonucleotide
  Target: ATXN2; (+) strand; PAM type: NRG; PAM sequence: CGG
ctccgatctttcccaggact

SEQ ID NO: 54349 - DNA, 20 bp, Artificial Sequence
  Description of Artificial Sequence: Synthetic oligonucleotide
  Target: ATXN2; (+) strand; PAM type: NRG; PAM sequence: GAG
ccgatctttcccaggactcg

SEQ ID NO: 54350 - DNA, 20 bp, Artificial Sequence
  Description of Artificial Sequence: Synthetic oligonucleotide
  Target: ATXN2; (+) strand; PAM type: NRG; PAM sequence: AGG
cgatctttcccaggactcgg

SEQ ID NO: 54351 - DNA, 20 bp, Artificial Sequence
  Description of Artificial Sequence: Synthetic oligonucleotide
  Target: ATXN2; (+) strand; PAM type: NRG; PAM sequence: GGG
gatctttcccaggactcgga

SEQ ID NO: 54352 - DNA, 20 bp, Artificial Sequence
  Description of Artificial Sequence: Synthetic oligonucleotide
  Target: ATXN2; (+) strand; PAM type: NRG; PAM sequence: GGG
atctttcccaggactcggag

SEQ ID NO: 54353 - DNA, 20 bp, Artificial Sequence
  Description of Artificial Sequence: Synthetic oligonucleotide
  Target: ATXN2; (+) strand; PAM type: NRG; PAM sequence: GGG
tctttcccaggactcggagg

SEQ ID NO: 54354 - DNA, 20 bp, Artificial Sequence
  Description of Artificial Sequence: Synthetic oligonucleotide
  Target: ATXN2; (+) strand; PAM type: NRG; PAM sequence: CGG
ttcccaggactcggaggggg

SEQ ID NO: 54355 - DNA, 20 bp, Artificial Sequence
  Description of Artificial Sequence: Synthetic oligonucleotide
  Target: ATXN2; (+) strand; PAM type: NRG; PAM sequence: GGG
tcccaggactcggagggggc

SEQ ID NO: 54356 - DNA, 20 bp, Artificial Sequence
  Description of Artificial Sequence: Synthetic oligonucleotide
  Target: ATXN2; (+) strand; PAM type: NRG; PAM sequence: GGG
cccaggactcggagggggcg

SEQ ID NO: 54357 - DNA, 20 bp, Artificial Sequence
  Description of Artificial Sequence: Synthetic oligonucleotide
  Target: ATXN2; (+) strand; PAM type: NRG; PAM sequence: GAG
caggactcggagggggcggg

SEQ ID NO: 54358 - DNA, 20 bp, Artificial Sequence
  Description of Artificial Sequence: Synthetic oligonucleotide
  Target: ATXN2; (+) strand; PAM type: NRG; PAM sequence: GAG
ggactcggagggggcgggga

SEQ ID NO: 54359 - DNA, 20 bp, Artificial Sequence
  Description of Artificial Sequence: Synthetic oligonucleotide
  Target: ATXN2; (+) strand; PAM type: NRG; PAM sequence: GAG
actcggagggggcggggaga

SEQ ID NO: 54360 - DNA, 20 bp, Artificial Sequence
  Description of Artificial Sequence: Synthetic oligonucleotide
  Target: ATXN2; (+) strand; PAM type: NRG; PAM sequence: CAG
gggcggggagagagccccga

SEQ ID NO: 54361 - DNA, 20 bp, Artificial Sequence
  Description of Artificial Sequence: Synthetic oligonucleotide
  Target: ATXN2; (+) strand; PAM type: NRG; PAM sequence: CGG
ccgacagaccctgatgattc

SEQ ID NO: 54362 - DNA, 20 bp, Artificial Sequence
  Description of Artificial Sequence: Synthetic oligonucleotide
  Target: ATXN2; (+) strand; PAM type: NRG; PAM sequence: GAG
gacagaccctgatgattccg

SEQ ID NO: 54363 - DNA, 20 bp, Artificial Sequence
  Description of Artificial Sequence: Synthetic oligonucleotide
  Target: ATXN2; (+) strand; PAM type: NRG; PAM sequence: AGG
acagaccctgatgattccgg

SEQ ID NO: 54364 - DNA, 20 bp, Artificial Sequence
  Description of Artificial Sequence: Synthetic oligonucleotide
  Target: ATXN2; (+) strand; PAM type: NRG; PAM sequence: GAG
agaccctgatgattccggag

SEQ ID NO: 54365 - DNA, 20 bp, Artificial Sequence
  Description of Artificial Sequence: Synthetic oligonucleotide
  Target: ATXN2; (+) strand; PAM type: NRG; PAM sequence: CGG
ctgatgattccggaggagcc

SEQ ID NO: 54366 - DNA, 20 bp, Artificial Sequence
  Description of Artificial Sequence: Synthetic oligonucleotide
  Target: ATXN2; (+) strand; PAM type: NRG; PAM sequence: CGG
ccggtgcctacccctttaac

SEQ ID NO: 54367 - DNA, 20 bp, Artificial Sequence
  Description of Artificial Sequence: Synthetic oligonucleotide
  Target: ATXN2; (+) strand; PAM type: NRG; PAM sequence: CGG
gcctacccctttaaccggca

SEQ ID NO: 54368 - DNA, 20 bp, Artificial Sequence
  Description of Artificial Sequence: Synthetic oligonucleotide
  Target: ATXN2; (+) strand; PAM type: NRG; PAM sequence: GGG
cctacccctttaaccggcac

SEQ ID NO: 54369 - DNA, 20 bp, Artificial Sequence
  Description of Artificial Sequence: Synthetic oligonucleotide
  Target: ATXN2; (+) strand; PAM type: NRG; PAM sequence: GGG
ctacccctttaaccggcacg

SEQ ID NO: 54370 - DNA, 20 bp, Artificial Sequence
  Description of Artificial Sequence: Synthetic oligonucleotide
  Target: ATXN2; (+) strand; PAM type: NRG; PAM sequence: GGG
tacccctttaaccggcacgg

SEQ ID NO: 54371 - DNA, 20 bp, Artificial Sequence
  Description of Artificial Sequence: Synthetic oligonucleotide
  Target: ATXN2; (+) strand; PAM type: NRG; PAM sequence: CGG
tttaaccggcacgggggacg

SEQ ID NO: 54372 - DNA, 20 bp, Artificial Sequence
  Description of Artificial Sequence: Synthetic oligonucleotide
  Target: ATXN2; (+) strand; PAM type: NRG; PAM sequence: CAG
cggccctaacttctcccctc

SEQ ID NO: 54373 - DNA, 20 bp, Artificial Sequence
  Description of Artificial Sequence: Synthetic oligonucleotide
  Target: ATXN2; (+) strand; PAM type: NRG; PAM sequence: GAG
gccctaacttctcccctcca

SEQ ID NO: 54374 - DNA, 20 bp, Artificial Sequence
  Description of Artificial Sequence: Synthetic oligonucleotide
  Target: ATXN2; (+) strand; PAM type: NRG; PAM sequence: TGG
ccctccagagatgtccccca

SEQ ID NO: 54375 - DNA, 20 bp, Artificial Sequence
  Description of Artificial Sequence: Synthetic oligonucleotide
  Target: ATXN2; (+) strand; PAM type: NRG; PAM sequence: GAG
ctccagagatgtcccccatg

SEQ ID NO: 54376 - DNA, 20 bp, Artificial Sequence
  Description of Artificial Sequence: Synthetic oligonucleotide
  Target: ATXN2; (+) strand; PAM type: NRG; PAM sequence: AGG
tccagagatgtcccccatgg

SEQ ID NO: 54377 - DNA, 20 bp, Artificial Sequence
  Description of Artificial Sequence: Synthetic oligonucleotide
  Target: ATXN2; (+) strand; PAM type: NRG; PAM sequence: GGG
ccagagatgtcccccatgga

SEQ ID NO: 54378 - DNA, 20 bp, Artificial Sequence
  Description of Artificial Sequence: Synthetic oligonucleotide
  Target: ATXN2; (+) strand; PAM type: NRG; PAM sequence: GGG
cagagatgtcccccatggag

SEQ ID NO: 54379 - DNA, 20 bp, Artificial Sequence
  Description of Artificial Sequence: Synthetic oligonucleotide
  Target: ATXN2; (+) strand; PAM type: NRG; PAM sequence: GGG
agagatgtcccccatggagg

SEQ ID NO: 54380 - DNA, 20 bp, Artificial Sequence
  Description of Artificial Sequence: Synthetic oligonucleotide
  Target: ATXN2; (+) strand; PAM type: NRG; PAM sequence: CGG
ccatggagggggacatgttc

SEQ ID NO: 54381 - DNA, 20 bp, Artificial Sequence
  Description of Artificial Sequence: Synthetic oligonucleotide
  Target: ATXN2; (+) strand; PAM type: NRG; PAM sequence: CAG
tgttccggaaaacgccacca

SEQ ID NO: 54382 - DNA, 20 bp, Artificial Sequence
  Description of Artificial Sequence: Synthetic oligonucleotide
  Target: ATXN2; (+) strand; PAM type: NRG; PAM sequence: CAG
gaaaacgccaccacagcctc

SEQ ID NO: 54383 - DNA, 20 bp, Artificial Sequence
  Description of Artificial Sequence: Synthetic oligonucleotide
  Target: ATXN2; (+) strand; PAM type: NRG; PAM sequence: CGG
tccaacgttcacacctaaac

SEQ ID NO: 54384 - DNA, 20 bp, Artificial Sequence
  Description of Artificial Sequence: Synthetic oligonucleotide
  Target: ATXN2; (+) strand; PAM type: NRG; PAM sequence: GGG
ccaacgttcacacctaaacc

SEQ ID NO: 54385 - DNA, 20 bp, Artificial Sequence
  Description of Artificial Sequence: Synthetic oligonucleotide
  Target: ATXN2; (+) strand; PAM type: NRG; PAM sequence: GAG
aacgttcacacctaaaccgg

SEQ ID NO: 54386 - DNA, 20 bp, Artificial Sequence
  Description of Artificial Sequence: Synthetic oligonucleotide
  Target: ATXN2; (+) strand; PAM type: NRG; PAM sequence: TGG
gttcacacctaaaccgggag

SEQ ID NO: 54387 - DNA, 20 bp, Artificial Sequence
  Description of Artificial Sequence: Synthetic oligonucleotide
  Target: ATXN2; (+) strand; PAM type: NRG; PAM sequence: GAG
tcacacctaaaccgggagtg

SEQ ID NO: 54388 - DNA, 20 bp, Artificial Sequence
  Description of Artificial Sequence: Synthetic oligonucleotide
  Target: ATXN2; (+) strand; PAM type: NRG; PAM sequence: AGG
cacacctaaaccgggagtgg

SEQ ID NO: 54389 - DNA, 20 bp, Artificial Sequence
  Description of Artificial Sequence: Synthetic oligonucleotide
  Target: ATXN2; (+) strand; PAM type: NRG; PAM sequence: GAG
cacctaaaccgggagtggag

SEQ ID NO: 54390 - DNA, 20 bp, Artificial Sequence
  Description of Artificial Sequence: Synthetic oligonucleotide
  Target: ATXN2; (+) strand; PAM type: NRG; PAM sequence: GAG
cgggagtggaggagctgccc

SEQ ID NO: 54391 - DNA, 20 bp, Artificial Sequence
  Description of Artificial Sequence: Synthetic oligonucleotide
  Target: ATXN2; (+) strand; PAM type: NRG; PAM sequence: CGG
gcccgagcatccccacgctg

SEQ ID NO: 54392 - DNA, 20 bp, Artificial Sequence
  Description of Artificial Sequence: Synthetic oligonucleotide
  Target: ATXN2; (+) strand; PAM type: NRG; PAM sequence: GGG
cccgagcatccccacgctgc

SEQ ID NO: 54393 - DNA, 20 bp, Artificial Sequence
  Description of Artificial Sequence: Synthetic oligonucleotide
  Target: ATXN2; (+) strand; PAM type: NRG; PAM sequence: CGG
gagcatccccacgctgcggg

SEQ ID NO: 54394 - DNA, 20 bp, Artificial Sequence
  Description of Artificial Sequence: Synthetic oligonucleotide
  Target: ATXN2; (+) strand; PAM type: NRG; PAM sequence: GAG
gcatccccacgctgcgggcg

SEQ ID NO: 54395 - DNA, 20 bp, Artificial Sequence
  Description of Artificial Sequence: Synthetic oligonucleotide
  Target: ATXN2; (+) strand; PAM type: NRG; PAM sequence: AGG
catccccacgctgcgggcgg

SEQ ID NO: 54396 - DNA, 20 bp, Artificial Sequence
  Description of Artificial Sequence: Synthetic oligonucleotide
  Target: ATXN2; (+) strand; PAM type: NRG; PAM sequence: CGG
gctgcgggcggaggatcgtg

SEQ ID NO: 54397 - DNA, 20 bp, Artificial Sequence
  Description of Artificial Sequence: Synthetic oligonucleotide
  Target: ATXN2; (+) strand; PAM type: NRG; PAM sequence: AAG
gcgggcggaggatcgtgcgg

SEQ ID NO: 54398 - DNA, 20 bp, Artificial Sequence
  Description of Artificial Sequence: Synthetic oligonucleotide
  Target: ATXN2; (+) strand; PAM type: NRG; PAM sequence: AGG
cgggcggaggatcgtgcgga

SEQ ID NO: 54399 - DNA, 20 bp, Artificial Sequence
  Description of Artificial Sequence: Synthetic oligonucleotide
  Target: ATXN2; (+) strand; PAM type: NRG; PAM sequence: GGG
gggcggaggatcgtgcggaa

SEQ ID NO: 54400 - DNA, 20 bp, Artificial Sequence
  Description of Artificial Sequence: Synthetic oligonucleotide
  Target: ATXN2; (+) strand; PAM type: NRG; PAM sequence: GGG
ggcggaggatcgtgcggaag

SEQ ID NO: 54401 - DNA, 20 bp, Artificial Sequence
  Description of Artificial Sequence: Synthetic oligonucleotide
  Target: ATXN2; (+) strand; PAM type: NRG; PAM sequence: GGG
gcggaggatcgtgcggaagg

SEQ ID NO: 54402 - DNA, 20 bp, Artificial Sequence
  Description of Artificial Sequence: Synthetic oligonucleotide
  Target: ATXN2; (+) strand; PAM type: NRG; PAM sequence: GAG
ggaggatcgtgcggaagggg

SEQ ID NO: 54403 - DNA, 20 bp, Artificial Sequence
  Description of Artificial Sequence: Synthetic oligonucleotide
  Target: ATXN2; (+) strand; PAM type: NRG; PAM sequence: CGG
gatcgtgcggaagggggagc

SEQ ID NO: 54404 - DNA, 20 bp, Artificial Sequence
  Description of Artificial Sequence: Synthetic oligonucleotide
  Target: ATXN2; (+) strand; PAM type: NRG; PAM sequence: GGG
atcgtgcggaagggggagcc

SEQ ID NO: 54405 - DNA, 20 bp, Artificial Sequence
  Description of Artificial Sequence: Synthetic oligonucleotide
  Target: ATXN2; (+) strand; PAM type: NRG; PAM sequence: GGG
tcgtgcggaagggggagccg

SEQ ID NO: 54406 - DNA, 20 bp, Artificial Sequence
  Description of Artificial Sequence: Synthetic oligonucleotide
  Target: ATXN2; (+) strand; PAM type: NRG; PAM sequence: GAG
gctgaccatcgccgctaccc

SEQ ID NO: 54407 - DNA, 20 bp, Artificial Sequence
  Description of Artificial Sequence: Synthetic oligonucleotide
  Target: ATXN2; (+) strand; PAM type: NRG; PAM sequence: TGG
agaacccctcccaacacgcg

SEQ ID NO: 54408 - DNA, 20 bp, Artificial Sequence
  Description of Artificial Sequence: Synthetic oligonucleotide
  Target: ATXN2; (+) strand; PAM type: NRG; PAM sequence: GGG
gaacccctcccaacacgcgt

SEQ ID NO: 54409 - DNA, 20 bp, Artificial Sequence
  Description of Artificial Sequence: Synthetic oligonucleotide
  Target: ATXN2; (+) strand; PAM type: NRG; PAM sequence: GGG
aacccctcccaacacgcgtg

SEQ ID NO: 54410 - DNA, 20 bp, Artificial Sequence
  Description of Artificial Sequence: Synthetic oligonucleotide
  Target: ATXN2; (+) strand; PAM type: NRG; PAM sequence: GAG
cccctcccaacacgcgtggg

SEQ ID NO: 54411 - DNA, 20 bp, Artificial Sequence
  Description of Artificial Sequence: Synthetic oligonucleotide
  Target: ATXN2; (+) strand; PAM type: NRG; PAM sequence: AGG
ccctcccaacacgcgtgggg

SEQ ID NO: 54412 - DNA, 20 bp, Artificial Sequence
  Description of Artificial Sequence: Synthetic oligonucleotide
  Target: ATXN2; (+) strand; PAM type: NRG; PAM sequence: GGG
cctcccaacacgcgtgggga

SEQ ID NO: 54413 - DNA, 20 bp, Artificial Sequence
  Description of Artificial Sequence: Synthetic oligonucleotide
  Target: ATXN2; (+) strand; PAM type: NRG; PAM sequence: GGG
ctcccaacacgcgtggggag

SEQ ID NO: 54414 - DNA, 20 bp, Artificial Sequence
  Description of Artificial Sequence: Synthetic oligonucleotide
  Target: ATXN2; (+) strand; PAM type: NRG; PAM sequence: GAG
cccaacacgcgtggggaggg

SEQ ID NO: 54415 - DNA, 20 bp, Artificial Sequence
  Description of Artificial Sequence: Synthetic oligonucleotide
  Target: ATXN2; (+) strand; PAM type: NRG; PAM sequence: AGG
ccaacacgcgtggggagggg

SEQ ID NO: 54416 - DNA, 20 bp, Artificial Sequence
  Description of Artificial Sequence: Synthetic oligonucleotide
  Target: ATXN2; (+) strand; PAM type: NRG; PAM sequence: CGG
gctccctccatcttgaccgc

SEQ ID NO: 54417 - DNA, 20 bp, Artificial Sequence
  Description of Artificial Sequence: Synthetic oligonucleotide
  Target: ATXN2; (+) strand; PAM type: NRG; PAM sequence: GGG
ctccctccatcttgaccgcc

SEQ ID NO: 54418 - DNA, 20 bp, Artificial Sequence
  Description of Artificial Sequence: Synthetic oligonucleotide
  Target: ATXN2; (+) strand; PAM type: NRG; PAM sequence: GGG
tccctccatcttgaccgccg

SEQ ID NO: 54419 - DNA, 20 bp, Artificial Sequence
  Description of Artificial Sequence: Synthetic oligonucleotide
  Target: ATXN2; (+) strand; PAM type: NRG; PAM sequence: GGG
ccctccatcttgaccgccgg

SEQ ID NO: 54420 - DNA, 20 bp, Artificial Sequence
  Description of Artificial Sequence: Synthetic oligonucleotide
  Target: ATXN2; (+) strand; PAM type: NRG; PAM sequence: GAG
ctccatcttgaccgccgggg

SEQ ID NO: 54421 - DNA, 20 bp, Artificial Sequence
  Description of Artificial Sequence: Synthetic oligonucleotide
  Target: ATXN2; (+) strand; PAM type: NRG; PAM sequence: AGG
tccatcttgaccgccggggg

SEQ ID NO: 54422 - DNA, 20 bp, Artificial Sequence
  Description of Artificial Sequence: Synthetic oligonucleotide
  Target: ATXN2; (+) strand; PAM type: NRG; PAM sequence: GGG
ccatcttgaccgccggggga

SEQ ID NO: 54423 - DNA, 20 bp, Artificial Sequence
  Description of Artificial Sequence: Synthetic oligonucleotide
  Target: ATXN2; (+) strand; PAM type: NRG; PAM sequence: GGG
catcttgaccgccgggggag

SEQ ID NO: 54424 - DNA, 20 bp, Artificial Sequence
  Description of Artificial Sequence: Synthetic oligonucleotide
  Target: ATXN2; (+) strand; PAM type: NRG; PAM sequence: GGG
atcttgaccgccgggggagg

SEQ ID NO: 54425 - DNA, 20 bp, Artificial Sequence
  Description of Artificial Sequence: Synthetic oligonucleotide
  Target: ATXN2; (+) strand; PAM type: NRG; PAM sequence: CGG
ttgaccgccgggggaggggg

SEQ ID NO: 54426 - DNA, 20 bp, Artificial Sequence
  Description of Artificial Sequence: Synthetic oligonucleotide
  Target: ATXN2; (+) strand; PAM type: NRG; PAM sequence: GGG
tgaccgccgggggagggggc

SEQ ID NO: 54427 - DNA, 20 bp, Artificial Sequence
  Description of Artificial Sequence: Synthetic oligonucleotide
  Target: ATXN2; (+) strand; PAM type: NRG; PAM sequence: GGG
gaccgccgggggagggggcg

SEQ ID NO: 54428 - DNA, 20 bp, Artificial Sequence
  Description of Artificial Sequence: Synthetic oligonucleotide
  Target: ATXN2; (+) strand; PAM type: NRG; PAM sequence: CGG
gggagggggcggggatgctg

SEQ ID NO: 54429 - DNA, 20 bp, Artificial Sequence
  Description of Artificial Sequence: Synthetic oligonucleotide
  Target: ATXN2; (+) strand; PAM type: NRG; PAM sequence: GGG
ggagggggcggggatgctgc

SEQ ID NO: 54430 - DNA, 20 bp, Artificial Sequence
  Description of Artificial Sequence: Synthetic oligonucleotide
  Target: ATXN2; (+) strand; PAM type: NRG; PAM sequence: GAG
agggggcggggatgctgcgg

SEQ ID NO: 54431 - DNA, 20 bp, Artificial Sequence
  Description of Artificial Sequence: Synthetic oligonucleotide
  Target: ATXN2; (+) strand; PAM type: NRG; PAM sequence: AGG
gggggcggggatgctgcggg

SEQ ID NO: 54432 - DNA, 20 bp, Artificial Sequence
  Description of Artificial Sequence: Synthetic oligonucleotide
  Target: ATXN2; (+) strand; PAM type: NRG; PAM sequence: TGG
gcggggatgctgcgggaggc

SEQ ID NO: 54433 - DNA, 20 bp, Artificial Sequence
  Description of Artificial Sequence: Synthetic oligonucleotide
  Target: ATXN2; (+) strand; PAM type: NRG; PAM sequence: CAG
ggatgctgcgggaggctgga

SEQ ID NO: 54434 - DNA, 20 bp, Artificial Sequence
  Description of Artificial Sequence: Synthetic oligonucleotide
  Target: ATXN2; (+) strand; PAM type: NRG; PAM sequence: AGG
gatgctgcgggaggctggac

SEQ ID NO: 54435 - DNA, 20 bp, Artificial Sequence
  Description of Artificial Sequence: Synthetic oligonucleotide
  Target: ATXN2; (+) strand; PAM type: NRG; PAM sequence: CAG
ctggacaggcctgacaatcc

SEQ ID NO: 54436 - DNA, 20 bp, Artificial Sequence
  Description of Artificial Sequence: Synthetic oligonucleotide
  Target: ATXN2; (+) strand; PAM type: NRG; PAM sequence: GAG
ggacaggcctgacaatccca

SEQ ID NO: 54437 - DNA, 20 bp, Artificial Sequence
  Description of Artificial Sequence: Synthetic oligonucleotide
  Target: ATXN2; (+) strand; PAM type: NRG; PAM sequence: AGG
gacaggcctgacaatcccag

SEQ ID NO: 54438 - DNA, 20 bp, Artificial Sequence
  Description of Artificial Sequence: Synthetic oligonucleotide
  Target: ATXN2; (+) strand; PAM type: NRG; PAM sequence: CGG
ctgacaatcccagaggaccc

SEQ ID NO: 54439 - DNA, 20 bp, Artificial Sequence
  Description of Artificial Sequence: Synthetic oligonucleotide
  Target: ATXN2; (+) strand; PAM type: NRG; PAM sequence: CGG
aggaccccggctgcgcccac

SEQ ID NO: 54440 - DNA, 20 bp, Artificial Sequence
  Description of Artificial Sequence: Synthetic oligonucleotide
  Target: ATXN2; (+) strand; PAM type: NRG; PAM sequence: GAG
cccggctgcgcccaccggcc

SEQ ID NO: 54441 - DNA, 20 bp, Artificial Sequence
  Description of Artificial Sequence: Synthetic oligonucleotide
  Target: ATXN2; (+) strand; PAM type: NRG; PAM sequence: CGG
tgcgcccaccggccgagcct

SEQ ID NO: 54442 - DNA, 20 bp, Artificial Sequence
  Description of Artificial Sequence: Synthetic oligonucleotide
  Target: ATXN2; (+) strand; PAM type: NRG; PAM sequence: GGG
gcgcccaccggccgagcctc

SEQ ID NO: 54443 - DNA, 20 bp, Artificial Sequence
  Description of Artificial Sequence: Synthetic oligonucleotide
  Target: ATXN2; (+) strand; PAM type: NRG; PAM sequence: GGG
cgcccaccggccgagcctcg

SEQ ID NO: 54444 - DNA, 20 bp, Artificial Sequence
  Description of Artificial Sequence: Synthetic oligonucleotide
  Target: ATXN2; (+) strand; PAM type: NRG; PAM sequence: CAG
accggccgagcctcggggct

SEQ ID NO: 54445 - DNA, 20 bp, Artificial Sequence
  Description of Artificial Sequence: Synthetic oligonucleotide
  Target: ATXN2; (+) strand; PAM type: NRG; PAM sequence: AGG
ccggccgagcctcggggctc

SEQ ID NO: 54446 - DNA, 20 bp, Artificial Sequence
  Description of Artificial Sequence: Synthetic oligonucleotide
  Target: ATXN2; (+) strand; PAM type: NRG; PAM sequence: GAG
gagcctcggggctcaggccc

SEQ ID NO: 54447 - DNA, 20 bp, Artificial Sequence
  Description of Artificial Sequence: Synthetic oligonucleotide
  Target: ATXN2; (+) strand; PAM type: NRG; PAM sequence: GAG
ctcggggctcaggcccgagc

SEQ ID NO: 54448 - DNA, 20 bp, Artificial Sequence
  Description of Artificial Sequence: Synthetic oligonucleotide
  Target: ATXN2; (+) strand; PAM type: NRG; PAM sequence: CGG
gcgagtctcccccgcgctgc

SEQ ID NO: 54449 - DNA, 20 bp, Artificial Sequence
  Description of Artificial Sequence: Synthetic oligonucleotide
  Target: ATXN2; (+) strand; PAM type: NRG; PAM sequence: CAG
tcccccgcgctgccggcccc

SEQ ID NO: 54450 - DNA, 20 bp, Artificial Sequence
  Description of Artificial Sequence: Synthetic oligonucleotide
  Target: ATXN2; (+) strand; PAM type: NRG; PAM sequence: CGG
tgccggcccccagcccaccc

SEQ ID NO: 54451 - DNA, 20 bp, Artificial Sequence
  Description of Artificial Sequence: Synthetic oligonucleotide
  Target: ATXN2; (+) strand; PAM type: NRG; PAM sequence: GGG
gccggcccccagcccacccc

SEQ ID NO: 54452 - DNA, 20 bp, Artificial Sequence
  Description of Artificial Sequence: Synthetic oligonucleotide
  Target: ATXN2; (+) strand; PAM type: NRG; PAM sequence: TAG
ggcccccagcccaccccggg

SEQ ID NO: 54453 - DNA, 20 bp, Artificial Sequence
  Description of Artificial Sequence: Synthetic oligonucleotide
  Target: ATXN2; (+) strand; PAM type: NRG; PAM sequence: CGG
ccagcccaccccgggtagcc

SEQ ID NO: 54454 - DNA, 20 bp, Artificial Sequence
  Description of Artificial Sequence: Synthetic oligonucleotide
  Target: ATXN2; (+) strand; PAM type: NRG; PAM sequence: CGG
gcccaccccgggtagcccgg

SEQ ID NO: 54455 - DNA, 20 bp, Artificial Sequence
  Description of Artificial Sequence: Synthetic oligonucleotide
  Target: ATXN2; (+) strand; PAM type: NRG; PAM sequence: GGG
cccaccccgggtagcccggc

SEQ ID NO: 54456 - DNA, 20 bp, Artificial Sequence
  Description of Artificial Sequence: Synthetic oligonucleotide
  Target: ATXN2; (+) strand; PAM type: NRG; PAM sequence: CGG
ccgggtagcccggcgggtca

SEQ ID NO: 54457 - DNA, 20 bp, Artificial Sequence
  Description of Artificial Sequence: Synthetic oligonucleotide
  Target: ATXN2; (+) strand; PAM type: NRG; PAM sequence: GGG
cgggtagcccggcgggtcac

SEQ ID NO: 54458 - DNA, 20 bp, Artificial Sequence
  Description of Artificial Sequence: Synthetic oligonucleotide
  Target: ATXN2; (+) strand; PAM type: NRG; PAM sequence: GGG
gggtagcccggcgggtcacg

SEQ ID NO: 54459 - DNA, 20 bp, Artificial Sequence
  Description of Artificial Sequence: Synthetic oligonucleotide
  Target: ATXN2; (+) strand; PAM type: NRG; PAM sequence: CGG
tagcccggcgggtcacgggg

SEQ ID NO: 54460 - DNA, 20 bp, Artificial Sequence
  Description of Artificial Sequence: Synthetic oligonucleotide
  Target: ATXN2; (+) strand; PAM type: NRG; PAM sequence: GGG
agcccggcgggtcacggggc

SEQ ID NO: 54461 - DNA, 20 bp, Artificial Sequence
  Description of Artificial Sequence: Synthetic oligonucleotide
  Target: ATXN2; (+) strand; PAM type: NRG; PAM sequence: GGG
gcccggcgggtcacggggcg

SEQ ID NO: 54462 - DNA, 20 bp, Artificial Sequence
  Description of Artificial Sequence: Synthetic oligonucleotide
  Target: ATXN2; (+) strand; PAM type: NRG; PAM sequence: CGG
ggcgggtcacggggcgggga

SEQ ID NO: 54463 - DNA, 20 bp, Artificial Sequence
  Description of Artificial Sequence: Synthetic oligonucleotide
  Target: ATXN2; (+) strand; PAM type: NRG; PAM sequence: CGG
gggtcacggggcggggacgg

SEQ ID NO: 54464 - DNA, 20 bp, Artificial Sequence
  Description of Artificial Sequence: Synthetic oligonucleotide
  Target: ATXN2; (+) strand; PAM type: NRG; PAM sequence: CGG
acggggcggggacggcggcg

SEQ ID NO: 54465 - DNA, 20 bp, Artificial Sequence
  Description of Artificial Sequence: Synthetic oligonucleotide
  Target: ATXN2; (+) strand; PAM type: NRG; PAM sequence: GGG
cggggcggggacggcggcgc

SEQ ID NO: 54466 - DNA, 20 bp, Artificial Sequence
  Description of Artificial Sequence: Synthetic oligonucleotide
  Target: ATXN2; (+) strand; PAM type: NRG; PAM sequence: CGG
ggggacggcggcgcgggccg

SEQ ID NO: 54467 - DNA, 20 bp, Artificial Sequence
  Description of Artificial Sequence: Synthetic oligonucleotide
  Target: ATXN2; (+) strand; PAM type: NRG; PAM sequence: GGG
gggacggcggcgcgggccgc

SEQ ID NO: 54468 - DNA, 20 bp, Artificial Sequence
  Description of Artificial Sequence: Synthetic oligonucleotide
  Target: ATXN2; (+) strand; PAM type: NRG; PAM sequence: GGG
ggacggcggcgcgggccgcg

SEQ ID NO: 54469 - DNA, 20 bp, Artificial Sequence
  Description of Artificial Sequence: Synthetic oligonucleotide
  Target: ATXN2; (+) strand; PAM type: NRG; PAM sequence: GGG
gacggcggcgcgggccgcgg

SEQ ID NO: 54470 - DNA, 20 bp, Artificial Sequence
  Description of Artificial Sequence: Synthetic oligonucleotide
  Target: ATXN2; (+) strand; PAM type: NRG; PAM sequence: GAG
cggcggcgcgggccgcgggg

SEQ ID NO: 54471 - DNA, 20 bp, Artificial Sequence
  Description of Artificial Sequence: Synthetic oligonucleotide
  Target: ATXN2; (+) strand; PAM type: NRG; PAM sequence: AGG
ggcggcgcgggccgcggggg

SEQ ID NO: 54472 - DNA, 20 bp, Artificial Sequence
  Description of Artificial Sequence: Synthetic oligonucleotide
  Target: ATXN2; (+) strand; PAM type: NRG; PAM sequence: GGG
gcggcgcgggccgcggggga

SEQ ID NO: 54473 - DNA, 20 bp, Artificial Sequence
  Description of Artificial Sequence: Synthetic oligonucleotide
  Target: ATXN2; (+) strand; PAM type: NRG; PAM sequence: GGG
cggcgcgggccgcgggggag

SEQ ID NO: 54474 - DNA, 20 bp, Artificial Sequence
  Description of Artificial Sequence: Synthetic oligonucleotide
  Target: ATXN2; (+) strand; PAM type: NRG; PAM sequence: CGG
ggccgcgggggaggggacgc

SEQ ID NO: 54475 - DNA, 20 bp, Artificial Sequence
  Description of Artificial Sequence: Synthetic oligonucleotide
  Target: ATXN2; (+) strand; PAM type: NRG; PAM sequence: GGG
gccgcgggggaggggacgcc

SEQ ID NO: 54476 - DNA, 20 bp, Artificial Sequence
  Description of Artificial Sequence: Synthetic oligonucleotide
  Target: ATXN2; (+) strand; PAM type: NRG; PAM sequence: CGG
gggggaggggacgccgggcc

SEQ ID NO: 54477 - DNA, 20 bp, Artificial Sequence
  Description of Artificial Sequence: Synthetic oligonucleotide
  Target: ATXN2; (+) strand; PAM type: NRG; PAM sequence: GAG
gggaggggacgccgggcccg

SEQ ID NO: 54478 - DNA, 20 bp, Artificial Sequence
  Description of Artificial Sequence: Synthetic oligonucleotide
  Target: ATXN2; (+) strand; PAM type: NRG; PAM sequence: CGG
aggggacgccgggcccggag

SEQ ID NO: 54479 - DNA, 20 bp, Artificial Sequence
  Description of Artificial Sequence: Synthetic oligonucleotide
  Target: ATXN2; (+) strand; PAM type: NRG; PAM sequence: GAG
gggacgccgggcccggagcg

SEQ ID NO: 54480 - DNA, 20 bp, Artificial Sequence
  Description of Artificial Sequence: Synthetic oligonucleotide
  Target: ATXN2; (+) strand; PAM type: NRG; PAM sequence: AGG
ggacgccgggcccggagcgg

SEQ ID NO: 54481 - DNA, 20 bp, Artificial Sequence
  Description of Artificial Sequence: Synthetic oligonucleotide
  Target: ATXN2; (+) strand; PAM type: NRG; PAM sequence: GGG
gacgccgggcccggagcgga

SEQ ID NO: 54482 - DNA, 20 bp, Artificial Sequence
  Description of Artificial Sequence: Synthetic oligonucleotide
  Target: ATXN2; (+) strand; PAM type: NRG; PAM sequence: GGG
acgccgggcccggagcggag

SEQ ID NO: 54483 - DNA, 20 bp, Artificial Sequence
  Description of Artificial Sequence: Synthetic oligonucleotide
  Target: ATXN2; (+) strand; PAM type: NRG; PAM sequence: GGG
cgccgggcccggagcggagg

SEQ ID NO: 54484 - DNA, 20 bp, Artificial Sequence
  Description of Artificial Sequence: Synthetic oligonucleotide
  Target: ATXN2; (+) strand; PAM type: NRG; PAM sequence: TGG
gggcccggagcggagggggc

SEQ ID NO: 54485 - DNA, 20 bp, Artificial Sequence
  Description of Artificial Sequence: Synthetic oligonucleotide
  Target: ATXN2; (+) strand; PAM type: NRG; PAM sequence: GGG
ggcccggagcggagggggct

SEQ ID NO: 54486 - DNA, 20 bp, Artificial Sequence
  Description of Artificial Sequence: Synthetic oligonucleotide
  Target: ATXN2; (+) strand; PAM type: NRG; PAM sequence: GGG
gcccggagcggagggggctg

SEQ ID NO: 54487 - DNA, 20 bp, Artificial Sequence
  Description of Artificial Sequence: Synthetic oligonucleotide
  Target: ATXN2; (+) strand; PAM type: NRG; PAM sequence: CAG
ggtgccgacacccacctgcc

SEQ ID NO: 54488 - DNA, 20 bp, Artificial Sequence
  Description of Artificial Sequence: Synthetic oligonucleotide
  Target: ATXN2; (+) strand; PAM type: NRG; PAM sequence: AGG
gtgccgacacccacctgccc

SEQ ID NO: 54489 - DNA, 20 bp, Artificial Sequence
  Description of Artificial Sequence: Synthetic oligonucleotide
  Target: ATXN2; (+) strand; PAM type: NRG; PAM sequence: CGG
cgacacccacctgcccaggc

SEQ ID NO: 54490 - DNA, 20 bp, Artificial Sequence
  Description of Artificial Sequence: Synthetic oligonucleotide
  Target: ATXN2; (+) strand; PAM type: NRG; PAM sequence: GGG
gacacccacctgcccaggcc

SEQ ID NO: 54491 - DNA, 20 bp, Artificial Sequence
  Description of Artificial Sequence: Synthetic oligonucleotide
  Target: ATXN2; (+) strand; PAM type: NRG; PAM sequence: CGG
caggccgggcctcccgccgc

SEQ ID NO: 54492 - DNA, 20 bp, Artificial Sequence
  Description of Artificial Sequence: Synthetic oligonucleotide
  Target: ATXN2; (+) strand; PAM type: NRG; PAM sequence: GAG
ggccgggcctcccgccgccg

SEQ ID NO: 54493 - DNA, 20 bp, Artificial Sequence
  Description of Artificial Sequence: Synthetic oligonucleotide
  Target: ATXN2; (+) strand; PAM type: NRG; PAM sequence: AGG
gccgggcctcccgccgccgg

SEQ ID NO: 54494 - DNA, 20 bp, Artificial Sequence
  Description of Artificial Sequence: Synthetic oligonucleotide
  Target: ATXN2; (+) strand; PAM type: NRG; PAM sequence: GAG
cggaggtcgccgcgaccacc

SEQ ID NO: 54495 - DNA, 20 bp, Artificial Sequence
  Description of Artificial Sequence: Synthetic oligonucleotide
  Target: ATXN2; (+) strand; PAM type: NRG; PAM sequence: AGG
ggaggtcgccgcgaccaccg

SEQ ID NO: 54496 - DNA, 20 bp, Artificial Sequence
  Description of Artificial Sequence: Synthetic oligonucleotide
  Target: ATXN2; (+) strand; PAM type: NRG; PAM sequence: GAG
aggtcgccgcgaccaccgag

SEQ ID NO: 54497 - DNA, 20 bp, Artificial Sequence
  Description of Artificial Sequence: Synthetic oligonucleotide
  Target: ATXN2; (+) strand; PAM type: NRG; PAM sequence: AGG
ggtcgccgcgaccaccgagg

SEQ ID NO: 54498 - DNA, 20 bp, Artificial Sequence
  Description of Artificial Sequence: Synthetic oligonucleotide
  Target: ATXN2; (+) strand; PAM type: NRG; PAM sequence: GGG
gtcgccgcgaccaccgagga

SEQ ID NO: 54499 - DNA, 20 bp, Artificial Sequence
  Description of Artificial Sequence: Synthetic oligonucleotide
  Target: ATXN2; (+) strand; PAM type: NRG; PAM sequence: GAG
cgccgcgaccaccgaggagg

SEQ ID NO: 54500 - DNA, 20 bp, Artificial Sequence
  Description of Artificial Sequence: Synthetic oligonucleotide
  Target: ATXN2; (+) strand; PAM type: NRG; PAM sequence: TGG
gaccaccgaggagggagccg

SEQ ID NO: 54501 - DNA, 20 bp, Artificial Sequence
  Description of Artificial Sequence: Synthetic oligonucleotide
  Target: ATXN2; (+) strand; PAM type: NRG; PAM sequence: GAG
ccgaggagggagccgtggcc

SEQ ID NO: 54502 - DNA, 20 bp, Artificial Sequence
  Description of Artificial Sequence: Synthetic oligonucleotide
  Target: ATXN2; (+) strand; PAM type: NRG; PAM sequence: AGG
cgaggagggagccgtggccg

SEQ ID NO: 54503 - DNA, 20 bp, Artificial Sequence
  Description of Artificial Sequence: Synthetic oligonucleotide
  Target: ATXN2; (+) strand; PAM type: NRG; PAM sequence: GAG
agggagccgtggccgaggac

SEQ ID NO: 54504 - DNA, 20 bp, Artificial Sequence
  Description of Artificial Sequence: Synthetic oligonucleotide
  Target: ATXN2; (+) strand; PAM type: NRG; PAM sequence: AGG
gggagccgtggccgaggacg

SEQ ID NO: 54505 - DNA, 20 bp, Artificial Sequence
  Description of Artificial Sequence: Synthetic oligonucleotide
  Target: ATXN2; (+) strand; PAM type: NRG; PAM sequence: GAG
gagccgtggccgaggacgag

SEQ ID NO: 54506 - DNA, 20 bp, Artificial Sequence
  Description of Artificial Sequence: Synthetic oligonucleotide
  Target: ATXN2; (+) strand; PAM type: NRG; PAM sequence: GAG
tggccgaggacgaggagacc

SEQ ID NO: 54507 - DNA, 20 bp, Artificial Sequence
  Description of Artificial Sequence: Synthetic oligonucleotide
  Target: ATXN2; (+) strand; PAM type: NRG; PAM sequence: AGG
ggccgaggacgaggagaccg

SEQ ID NO: 54508 - DNA, 20 bp, Artificial Sequence
  Description of Artificial Sequence: Synthetic oligonucleotide
  Target: ATXN2; (+) strand; PAM type: NRG; PAM sequence: GAG
aggacgaggagaccgaggac

SEQ ID NO: 54509 - DNA, 20 bp, Artificial Sequence
  Description of Artificial Sequence: Synthetic oligonucleotide
  Target: ATXN2; (+) strand; PAM type: NRG; PAM sequence: AGG
ggacgaggagaccgaggacg

SEQ ID NO: 54510 - DNA, 20 bp, Artificial Sequence
  Description of Artificial Sequence: Synthetic oligonucleotide
  Target: ATXN2; (+) strand; PAM type: NRG; PAM sequence: CGG
gaggagaccgaggacgagga

SEQ ID NO: 54511 - DNA, 20 bp, Artificial Sequence
  Description of Artificial Sequence: Synthetic oligonucleotide
  Target: ATXN2; (+) strand; PAM type: NRG; PAM sequence: AAG
gaccgaggacgaggacggcg

SEQ ID NO: 54512 - DNA, 20 bp, Artificial Sequence
  Description of Artificial Sequence: Synthetic oligonucleotide
  Target: ATXN2; (+) strand; PAM type: NRG; PAM sequence: AGG
accgaggacgaggacggcga

SEQ ID NO: 54513 - DNA, 20 bp, Artificial Sequence
  Description of Artificial Sequence: Synthetic oligonucleotide
  Target: ATXN2; (+) strand; PAM type: NRG; PAM sequence: CGG
ggacgaggacggcgaaggcg

SEQ ID NO: 54514 - DNA, 20 bp, Artificial Sequence
  Description of Artificial Sequence: Synthetic oligonucleotide
  Target: ATXN2; (+) strand; PAM type: NRG; PAM sequence: CGG
cgaggacggcgaaggcgcgg

SEQ ID NO: 54515 - DNA, 20 bp, Artificial Sequence
  Description of Artificial Sequence: Synthetic oligonucleotide
  Target: ATXN2; (+) strand; PAM type: NRG; PAM sequence: CGG
ggacggcgaaggcgcggcgg

SEQ ID NO: 54516 - DNA, 20 bp, Artificial Sequence
  Description of Artificial Sequence: Synthetic oligonucleotide
  Target: ATXN2; (+) strand; PAM type: NRG; PAM sequence: GGG
gacggcgaaggcgcggcggc

SEQ ID NO: 54517 - DNA, 20 bp, Artificial Sequence
  Description of Artificial Sequence: Synthetic oligonucleotide
  Target: ATXN2; (+) strand; PAM type: NRG; PAM sequence: TAG
ggcgcggcggcgggcgacgc

SEQ ID NO: 54518 - DNA, 20 bp, Artificial Sequence
  Description of Artificial Sequence: Synthetic oligonucleotide
  Target: ATXN2; (+) strand; PAM type: NRG; PAM sequence: AAG
gcggcggcgggcgacgctag

SEQ ID NO: 54519 - DNA, 20 bp, Artificial Sequence
  Description of Artificial Sequence: Synthetic oligonucleotide
  Target: ATXN2; (+) strand; PAM type: NRG; PAM sequence: AGG
cggcggcgggcgacgctaga

SEQ ID NO: 54520 - DNA, 20 bp, Artificial Sequence
  Description of Artificial Sequence: Synthetic oligonucleotide
  Target: ATXN2; (+) strand; PAM type: NRG; PAM sequence: CGG
cgctagaaggccgctgccgc

SEQ ID NO: 54521 - DNA, 20 bp, Artificial Sequence
  Description of Artificial Sequence: Synthetic oligonucleotide
  Target: ATXN2; (+) strand; PAM type: NRG; PAM sequence: GGG
gctagaaggccgctgccgcc

SEQ ID NO: 54522 - DNA, 20 bp, Artificial Sequence
  Description of Artificial Sequence: Synthetic oligonucleotide
  Target: ATXN2; (+) strand; PAM type: NRG; PAM sequence: CGG
ggccgctgccgccgggcttg

SEQ ID NO: 54523 - DNA, 20 bp, Artificial Sequence
  Description of Artificial Sequence: Synthetic oligonucleotide
  Target: ATXN2; (+) strand; PAM type: NRG; PAM sequence: TGG
gccgccgggcttgcggacat

SEQ ID NO: 54524 - DNA, 20 bp, Artificial Sequence
  Description of Artificial Sequence: Synthetic oligonucleotide
  Target: ATXN2; (+) strand; PAM type: NRG; PAM sequence: CAG
gccgggcttgcggacattgg

SEQ ID NO: 54525 - DNA, 20 bp, Artificial Sequence
  Description of Artificial Sequence: Synthetic oligonucleotide
  Target: ATXN2; (+) strand; PAM type: NRG; PAM sequence: CGG
cttgcggacattggcagccg

SEQ ID NO: 54526 - DNA, 20 bp, Artificial Sequence
  Description of Artificial Sequence: Synthetic oligonucleotide
  Target: ATXN2; (+) strand; PAM type: NRG; PAM sequence: GGG
ttgcggacattggcagccgc

SEQ ID NO: 54527 - DNA, 20 bp, Artificial Sequence
  Description of Artificial Sequence: Synthetic oligonucleotide
  Target: ATXN2; (+) strand; PAM type: NRG; PAM sequence: CGG
cggacattggcagccgcggg

SEQ ID NO: 54528 - DNA, 20 bp, Artificial Sequence
  Description of Artificial Sequence: Synthetic oligonucleotide
  Target: ATXN2; (+) strand; PAM type: NRG; PAM sequence: CGG
acattggcagccgcgggcgg

SEQ ID NO: 54529 - DNA, 20 bp, Artificial Sequence
  Description of Artificial Sequence: Synthetic oligonucleotide
  Target: ATXN2; (+) strand; PAM type: NRG; PAM sequence: TGG
gctgctgctgctgctgctgc

SEQ ID NO: 54530 - DNA, 20 bp, Artificial Sequence
  Description of Artificial Sequence: Synthetic oligonucleotide
  Target: ATXN2; (+) strand; PAM type: NRG; PAM sequence: GGG
ctgctgctgctgctgctgct

SEQ ID NO: 54531 - DNA, 20 bp, Artificial Sequence
  Description of Artificial Sequence: Synthetic oligonucleotide
  Target: ATXN2; (+) strand; PAM type: NRG; PAM sequence: GGG
tgctgctgctgctgctgctg

SEQ ID NO: 54532 - DNA, 20 bp, Artificial Sequence
  Description of Artificial Sequence: Synthetic oligonucleotide
  Target: ATXN2; (+) strand; PAM type: NRG; PAM sequence: CAG
tgctgctgctgctggggctt

SEQ ID NO: 54533 - DNA, 20 bp, Artificial Sequence
  Description of Artificial Sequence: Synthetic oligonucleotide
  Target: ATXN2; (+) strand; PAM type: NRG; PAM sequence: TGG
ctgctggggcttcagcgaca

SEQ ID NO: 54534 - DNA, 20 bp, Artificial Sequence
  Description of Artificial Sequence: Synthetic oligonucleotide
  Target: ATXN2; (+) strand; PAM type: NRG; PAM sequence: GAG
tggggcttcagcgacatggt

SEQ ID NO: 54535 - DNA, 20 bp, Artificial Sequence
  Description of Artificial Sequence: Synthetic oligonucleotide
  Target: ATXN2; (+) strand; PAM type: NRG; PAM sequence: AGG
ggggcttcagcgacatggtg

SEQ ID NO: 54536 - DNA, 20 bp, Artificial Sequence
  Description of Artificial Sequence: Synthetic oligonucleotide
  Target: ATXN2; (+) strand; PAM type: NRG; PAM sequence: GGG
gggcttcagcgacatggtga

SEQ ID NO: 54537 - DNA, 20 bp, Artificial Sequence
  Description of Artificial Sequence: Synthetic oligonucleotide
  Target: ATXN2; (+) strand; PAM type: NRG; PAM sequence: GGG
ggcttcagcgacatggtgag

SEQ ID NO: 54538 - DNA, 20 bp, Artificial Sequence
  Description of Artificial Sequence: Synthetic oligonucleotide
  Target: ATXN2; (+) strand; PAM type: NRG; PAM sequence: CGG
atggtgaggggcccatacac

SEQ ID NO: 54539 - DNA, 20 bp, Artificial Sequence
  Description of Artificial Sequence: Synthetic oligonucleotide
  Target: ATXN2; (+) strand; PAM type: NRG; PAM sequence: CGG
ccatacaccggctcgcacgc

SEQ ID NO: 54540 - DNA, 20 bp, Artificial Sequence
  Description of Artificial Sequence: Synthetic oligonucleotide
  Target: ATXN2; (+) strand; PAM type: NRG; PAM sequence: GGG
catacaccggctcgcacgcc

SEQ ID NO: 54541 - DNA, 20 bp, Artificial Sequence
  Description of Artificial Sequence: Synthetic oligonucleotide
  Target: ATXN2; (+) strand; PAM type: NRG; PAM sequence: CGG
acaccggctcgcacgccggg

SEQ ID NO: 54542 - DNA, 20 bp, Artificial Sequence
  Description of Artificial Sequence: Synthetic oligonucleotide
  Target: ATXN2; (+) strand; PAM type: NRG; PAM sequence: GGG
caccggctcgcacgccgggc

SEQ ID NO: 54543 - DNA, 20 bp, Artificial Sequence
  Description of Artificial Sequence: Synthetic oligonucleotide
  Target: ATXN2; (+) strand; PAM type: NRG; PAM sequence: GGG
accggctcgcacgccgggcg

SEQ ID NO: 54544 - DNA, 20 bp, Artificial Sequence
  Description of Artificial Sequence: Synthetic oligonucleotide
  Target: ATXN2; (+) strand; PAM type: NRG; PAM sequence: CAG
gctcgcacgccgggcgggga

SEQ ID NO: 54545 - DNA, 20 bp, Artificial Sequence
  Description of Artificial Sequence: Synthetic oligonucleotide
  Target: ATXN2; (+) strand; PAM type: NRG; PAM sequence: CGG
gcacgccgggcggggacagc

SEQ ID NO: 54546 - DNA, 20 bp, Artificial Sequence
  Description of Artificial Sequence: Synthetic oligonucleotide
  Target: ATXN2; (+) strand; PAM type: NRG; PAM sequence: GGG
cacgccgggcggggacagcc

SEQ ID NO: 54547 - DNA, 20 bp, Artificial Sequence
  Description of Artificial Sequence: Synthetic oligonucleotide
  Target: ATXN2; (+) strand; PAM type: NRG; PAM sequence: GAG
cgccgggcggggacagccgg

SEQ ID NO: 54548 - DNA, 20 bp, Artificial Sequence
  Description of Artificial Sequence: Synthetic oligonucleotide
  Target: ATXN2; (+) strand; PAM type: NRG; PAM sequence: CGG
gggcggggacagccgggagc

SEQ ID NO: 54549 - DNA, 20 bp, Artificial Sequence
  Description of Artificial Sequence: Synthetic oligonucleotide
  Target: ATXN2; (+) strand; PAM type: NRG; PAM sequence: GGG
ggcggggacagccgggagcc

SEQ ID NO: 54550 - DNA, 20 bp, Artificial Sequence
  Description of Artificial Sequence: Synthetic oligonucleotide
  Target: ATXN2; (+) strand; PAM type: NRG; PAM sequence: AAG
agccgggagccgggcgcgcc

SEQ ID NO: 54551 - DNA, 20 bp, Artificial Sequence
  Description of Artificial Sequence: Synthetic oligonucleotide
  Target: ATXN2; (+) strand; PAM type: NRG; PAM sequence: AGG
gccgggagccgggcgcgcca

SEQ ID NO: 54552 - DNA, 20 bp, Artificial Sequence
  Description of Artificial Sequence: Synthetic oligonucleotide
  Target: ATXN2; (+) strand; PAM type: NRG; PAM sequence: GAG
cgggagccgggcgcgccaag

SEQ ID NO: 54553 - DNA, 20 bp, Artificial Sequence
  Description of Artificial Sequence: Synthetic oligonucleotide
  Target: ATXN2; (+) strand; PAM type: NRG; PAM sequence: CGG
cgggcgcgccaaggagacgc

SEQ ID NO: 54554 - DNA, 20 bp, Artificial Sequence
  Description of Artificial Sequence: Synthetic oligonucleotide
  Target: ATXN2; (+) strand; PAM type: NRG; PAM sequence: CGG
gccaaggagacgccggaacg

SEQ ID NO: 54555 - DNA, 20 bp, Artificial Sequence
  Description of Artificial Sequence: Synthetic oligonucleotide
  Target: ATXN2; (+) strand; PAM type: NRG; PAM sequence: CGG
aaggagacgccggaacgcgg

SEQ ID NO: 54556 - DNA, 20 bp, Artificial Sequence
  Description of Artificial Sequence: Synthetic oligonucleotide
  Target: ATXN2; (+) strand; PAM type: NRG; PAM sequence: GGG
aggagacgccggaacgcggc

SEQ ID NO: 54557 - DNA, 20 bp, Artificial Sequence
  Description of Artificial Sequence: Synthetic oligonucleotide
  Target: ATXN2; (+) strand; PAM type: NRG; PAM sequence: GGG
ggagacgccggaacgcggcg

SEQ ID NO: 54558 - DNA, 20 bp, Artificial Sequence
  Description of Artificial Sequence: Synthetic oligonucleotide
  Target: ATXN2; (+) strand; PAM type: NRG; PAM sequence: CGG
cggaacgcggcggggacgcg

SEQ ID NO: 54559 - DNA, 20 bp, Artificial Sequence
  Description of Artificial Sequence: Synthetic oligonucleotide
  Target: ATXN2; (+) strand; PAM type: NRG; PAM sequence: GGG
ggaacgcggcggggacgcgc

SEQ ID NO: 54560 - DNA, 20 bp, Artificial Sequence
  Description of Artificial Sequence: Synthetic oligonucleotide
  Target: ATXN2; (+) strand; PAM type: NRG; PAM sequence: GAG
ggcggggacgcgcgggcgcc

SEQ ID NO: 54561 - DNA, 20 bp, Artificial Sequence
  Description of Artificial Sequence: Synthetic oligonucleotide
  Target: ATXN2; (+) strand; PAM type: NRG; PAM sequence: CGG
ggggacgcgcgggcgccgag

SEQ ID NO: 54562 - DNA, 20 bp, Artificial Sequence
  Description of Artificial Sequence: Synthetic oligonucleotide
  Target: ATXN2; (+) strand; PAM type: NRG; PAM sequence: GGG
gggacgcgcgggcgccgagc

SEQ ID NO: 54563 - DNA, 20 bp, Artificial Sequence
  Description of Artificial Sequence: Synthetic oligonucleotide
  Target: ATXN2; (+) strand; PAM type: NRG; PAM sequence: GGG
ggacgcgcgggcgccgagcg

SEQ ID NO: 54564 - DNA, 20 bp, Artificial Sequence
  Description of Artificial Sequence: Synthetic oligonucleotide
  Target: ATXN2; (+) strand; PAM type: NRG; PAM sequence: GAG
acgcgcgggcgccgagcggg

SEQ ID NO: 54565 - DNA, 20 bp, Artificial Sequence
  Description of Artificial Sequence: Synthetic oligonucleotide
  Target: ATXN2; (+) strand; PAM type: NRG; PAM sequence: AGG
cgcgcgggcgccgagcgggg

SEQ ID NO: 54566 - DNA, 20 bp, Artificial Sequence
  Description of Artificial Sequence: Synthetic oligonucleotide
  Target: ATXN2; (+) strand; PAM type: NRG; PAM sequence: CGG
gggcgccgagcggggaggcg

SEQ ID NO: 54567 - DNA, 20 bp, Artificial Sequence
  Description of Artificial Sequence: Synthetic oligonucleotide
  Target: ATXN2; (+) strand; PAM type: NRG; PAM sequence: GGG
ggcgccgagcggggaggcgc

SEQ ID NO: 54568 - DNA, 20 bp, Artificial Sequence
  Description of Artificial Sequence: Synthetic oligonucleotide
  Target: ATXN2; (+) strand; PAM type: NRG; PAM sequence: TGG
ccgagcggggaggcgcgggt

SEQ ID NO: 54569 - DNA, 20 bp, Artificial Sequence
  Description of Artificial Sequence: Synthetic oligonucleotide
  Target: ATXN2; (+) strand; PAM type: NRG; PAM sequence: CGG
cggggaggcgcgggttggcg

SEQ ID NO: 54570 - DNA, 20 bp, Artificial Sequence
  Description of Artificial Sequence: Synthetic oligonucleotide
  Target: ATXN2; (+) strand; PAM type: NRG; PAM sequence: CGG
gaggcgcgggttggcgcggc

SEQ ID NO: 54571 - DNA, 20 bp, Artificial Sequence
  Description of Artificial Sequence: Synthetic oligonucleotide
  Target: ATXN2; (+) strand; PAM type: NRG; PAM sequence: GAG
ggcgcgggttggcgcggccg

SEQ ID NO: 54572 - DNA, 20 bp, Artificial Sequence
  Description of Artificial Sequence: Synthetic oligonucleotide
  Target: ATXN2; (+) strand; PAM type: NRG; PAM sequence: AGG
gcgcgggttggcgcggccgg

SEQ ID NO: 54573 - DNA, 20 bp, Artificial Sequence
  Description of Artificial Sequence: Synthetic oligonucleotide
  Target: ATXN2; (+) strand; PAM type: NRG; PAM sequence: GGG
cgcgggttggcgcggccgga

SEQ ID NO: 54574 - DNA, 20 bp, Artificial Sequence
  Description of Artificial Sequence: Synthetic oligonucleotide
  Target: ATXN2; (+) strand; PAM type: NRG; PAM sequence: GGG
gcgggttggcgcggccggag

SEQ ID NO: 54575 - DNA, 20 bp, Artificial Sequence
  Description of Artificial Sequence: Synthetic oligonucleotide
  Target: ATXN2; (+) strand; PAM type: NRG; PAM sequence: CGG
ggcgcggccggaggggcgcc

SEQ ID NO: 54576 - DNA, 20 bp, Artificial Sequence
  Description of Artificial Sequence: Synthetic oligonucleotide
  Target: ATXN2; (+) strand; PAM type: NRG; PAM sequence: GGG
gcgcggccggaggggcgccc

SEQ ID NO: 54577 - DNA, 20 bp, Artificial Sequence
  Description of Artificial Sequence: Synthetic oligonucleotide
  Target: ATXN2; (+) strand; PAM type: NRG; PAM sequence: TGG
ggccggaggggcgcccgggc

SEQ ID NO: 54578 - DNA, 20 bp, Artificial Sequence
  Description of Artificial Sequence: Synthetic oligonucleotide
  Target: ATXN2; (+) strand; PAM type: NRG; PAM sequence: GAG
ggaggggcgcccgggctggc

SEQ ID NO: 54579 - DNA, 20 bp, Artificial Sequence
  Description of Artificial Sequence: Synthetic oligonucleotide
  Target: ATXN2; (+) strand; PAM type: NRG; PAM sequence: AGG
gaggggcgcccgggctggcg

SEQ ID NO: 54580 - DNA, 20 bp, Artificial Sequence
  Description of Artificial Sequence: Synthetic oligonucleotide
  Target: ATXN2; (+) strand; PAM type: NRG; PAM sequence: GGG
aggggcgcccgggctggcga

SEQ ID NO: 54581 - DNA, 20 bp, Artificial Sequence
  Description of Artificial Sequence: Synthetic oligonucleotide
  Target: ATXN2; (+) strand; PAM type: NRG; PAM sequence: GGG
ggggcgcccgggctggcgag

SEQ ID NO: 54582 - DNA, 20 bp, Artificial Sequence
  Description of Artificial Sequence: Synthetic oligonucleotide
  Target: ATXN2; (+) strand; PAM type: NRG; PAM sequence: GGG
gggcgcccgggctggcgagg

SEQ ID NO: 54583 - DNA, 20 bp, Artificial Sequence
  Description of Artificial Sequence: Synthetic oligonucleotide
  Target: ATXN2; (+) strand; PAM type: NRG; PAM sequence: GAG
gcgcccgggctggcgagggg

SEQ ID NO: 54584 - DNA, 20 bp, Artificial Sequence
  Description of Artificial Sequence: Synthetic oligonucleotide
  Target: ATXN2; (+) strand; PAM type: NRG; PAM sequence: AAG
cccgggctggcgagggggag

SEQ ID NO: 54585 - DNA, 20 bp, Artificial Sequence
  Description of Artificial Sequence: Synthetic oligonucleotide
  Target: ATXN2; (+) strand; PAM type: NRG; PAM sequence: AGG
ccgggctggcgagggggaga

SEQ ID NO: 54586 - DNA, 20 bp, Artificial Sequence
  Description of Artificial Sequence: Synthetic oligonucleotide
  Target: ATXN2; (+) strand; PAM type: NRG; PAM sequence: GAG
gggctggcgagggggagaag

SEQ ID NO: 54587 - DNA, 20 bp, Artificial Sequence
  Description of Artificial Sequence: Synthetic oligonucleotide
  Target: ATXN2; (+) strand; PAM type: NRG; PAM sequence: AGG
ggctggcgagggggagaagg

SEQ ID NO: 54588 - DNA, 20 bp, Artificial Sequence
  Description of Artificial Sequence: Synthetic oligonucleotide
  Target: ATXN2; (+) strand; PAM type: NRG; PAM sequence: AAG
gggggagaaggaggacgacg

SEQ ID NO: 54589 - DNA, 20 bp, Artificial Sequence
  Description of Artificial Sequence: Synthetic oligonucleotide
  Target: ATXN2; (+) strand; PAM type: NRG; PAM sequence: AGG
ggggagaaggaggacgacga

SEQ ID NO: 54590 - DNA, 20 bp, Artificial Sequence
  Description of Artificial Sequence: Synthetic oligonucleotide
  Target: ATXN2; (+) strand; PAM type: NRG; PAM sequence: GGG
gggagaaggaggacgacgaa

SEQ ID NO: 54591 - DNA, 20 bp, Artificial Sequence
  Description of Artificial Sequence: Synthetic oligonucleotide
  Target: ATXN2; (+) strand; PAM type: NRG; PAM sequence: GGG
ggagaaggaggacgacgaag

SEQ ID NO: 54592 - DNA, 20 bp, Artificial Sequence
  Description of Artificial Sequence: Synthetic oligonucleotide
  Target: ATXN2; (+) strand; PAM type: NRG; PAM sequence: CGG
gaaggaggacgacgaagggg

SEQ ID NO: 54593 - DNA, 20 bp, Artificial Sequence
  Description of Artificial Sequence: Synthetic oligonucleotide
  Target: ATXN2; (+) strand; PAM type: NRG; PAM sequence: GGG
aaggaggacgacgaaggggc

SEQ ID NO: 54594 - DNA, 20 bp, Artificial Sequence
  Description of Artificial Sequence: Synthetic oligonucleotide
  Target: ATXN2; (+) strand; PAM type: NRG; PAM sequence: GGG
aggaggacgacgaaggggcg

SEQ ID NO: 54595 - DNA, 20 bp, Artificial Sequence
  Description of Artificial Sequence: Synthetic oligonucleotide
  Target: ATXN2; (+) strand; PAM type: NRG; PAM sequence: GAG
gaggacgacgaaggggcggg

SEQ ID NO: 54596 - DNA, 20 bp, Artificial Sequence
  Description of Artificial Sequence: Synthetic oligonucleotide
  Target: ATXN2; (+) strand; PAM type: NRG; PAM sequence: AGG
aggacgacgaaggggcgggg

SEQ ID NO: 54597 - DNA, 20 bp, Artificial Sequence
  Description of Artificial Sequence: Synthetic oligonucleotide
  Target: ATXN2; (+) strand; PAM type: NRG; PAM sequence: GAG
aaggggcggggaggcccgcc

SEQ ID NO: 54598 - DNA, 20 bp, Artificial Sequence
  Description of Artificial Sequence: Synthetic oligonucleotide
  Target: ATXN2; (+) strand; PAM type: NRG; PAM sequence: AAG
cggggaggcccgccgagacc

SEQ ID NO: 54599 - DNA, 20 bp, Artificial Sequence
  Description of Artificial Sequence: Synthetic oligonucleotide
  Target: ATXN2; (+) strand; PAM type: NRG; PAM sequence: AGG
ggggaggcccgccgagacca

SEQ ID NO: 54600 - DNA, 20 bp, Artificial Sequence
  Description of Artificial Sequence: Synthetic oligonucleotide
  Target: ATXN2; (+) strand; PAM type: NRG; PAM sequence: GAG
ggaggcccgccgagaccaag

SEQ ID NO: 54601 - DNA, 20 bp, Artificial Sequence
  Description of Artificial Sequence: Synthetic oligonucleotide
  Target: ATXN2; (+) strand; PAM type: NRG; PAM sequence: CGG
cgccgagaccaaggagccgc

SEQ ID NO: 54602 - DNA, 20 bp, Artificial Sequence
  Description of Artificial Sequence: Synthetic oligonucleotide
  Target: ATXN2; (+) strand; PAM type: NRG; PAM sequence: GGG
gccgagaccaaggagccgcc

SEQ ID NO: 54603 - DNA, 20 bp, Artificial Sequence
  Description of Artificial Sequence: Synthetic oligonucleotide
  Target: ATXN2; (+) strand; PAM type: NRG; PAM sequence: GAG
cgagaccaaggagccgccgg

SEQ ID NO: 54604 - DNA, 20 bp, Artificial Sequence
  Description of Artificial Sequence: Synthetic oligonucleotide
  Target: ATXN2; (+) strand; PAM type: NRG; PAM sequence: CGG
accaaggagccgccgggagc

SEQ ID NO: 54605 - DNA, 20 bp, Artificial Sequence
  Description of Artificial Sequence: Synthetic oligonucleotide
  Target: ATXN2; (+) strand; PAM type: NRG; PAM sequence: GGG
ccaaggagccgccgggagcc

SEQ ID NO: 54606 - DNA, 20 bp, Artificial Sequence
  Description of Artificial Sequence: Synthetic oligonucleotide
  Target: ATXN2; (+) strand; PAM type: NRG; PAM sequence: CAG
cgttgccgttgctaccaaaa

SEQ ID NO: 54607 - DNA, 20 bp, Artificial Sequence
  Description of Artificial Sequence: Synthetic oligonucleotide
  Target: ATXN2; (+) strand; PAM type: NRG; PAM sequence: GAG
cgttgctaccaaaacagtct

SEQ ID NO: 54608 - DNA, 20 bp, Artificial Sequence
  Description of Artificial Sequence: Synthetic oligonucleotide
  Target: ATXN2; (+) strand; PAM type: NRG; PAM sequence: AGG
gttgctaccaaaacagtctg

SEQ ID NO: 54609 - DNA, 20 bp, Artificial Sequence
  Description of Artificial Sequence: Synthetic oligonucleotide
  Target: ATXN2; (+) strand; PAM type: NRG; PAM sequence: CGG
gctaccaaaacagtctgagg

SEQ ID NO: 54610 - DNA, 20 bp, Artificial Sequence
  Description of Artificial Sequence: Synthetic oligonucleotide
  Target: ATXN2; (+) strand; PAM type: NRG; PAM sequence: GAG
taccaaaacagtctgaggcg

SEQ ID NO: 54611 - DNA, 20 bp, Artificial Sequence
  Description of Artificial Sequence: Synthetic oligonucleotide
  Target: ATXN2; (+) strand; PAM type: NRG; PAM sequence: AGG
accaaaacagtctgaggcgg

SEQ ID NO: 54612 - DNA, 20 bp, Artificial Sequence
  Description of Artificial Sequence: Synthetic oligonucleotide
  Target: ATXN2; (+) strand; PAM type: NRG; PAM sequence: GGG
ccaaaacagtctgaggcgga

SEQ ID NO: 54613 - DNA, 20 bp, Artificial Sequence
  Description of Artificial Sequence: Synthetic oligonucleotide
  Target: ATXN2; (+) strand; PAM type: NRG; PAM sequence: GAG
aaaacagtctgaggcggagg

SEQ ID NO: 54614 - DNA, 20 bp, Artificial Sequence
  Description of Artificial Sequence: Synthetic oligonucleotide
  Target: ATXN2; (+) strand; PAM type: NRG; PAM sequence: AGG
aaacagtctgaggcggaggg

SEQ ID NO: 54615 - DNA, 20 bp, Artificial Sequence
  Description of Artificial Sequence: Synthetic oligonucleotide
  Target: ATXN2; (+) strand; PAM type: NRG; PAM sequence: GAG
agtctgaggcggagggaggc

SEQ ID NO: 54616 - DNA, 20 bp, Artificial Sequence
  Description of Artificial Sequence: Synthetic oligonucleotide
  Target: ATXN2; (+) strand; PAM type: NRG; PAM sequence: CGG
cggagggaggcgagctctgc

SEQ ID NO: 54617 - DNA, 20 bp, Artificial Sequence
  Description of Artificial Sequence: Synthetic oligonucleotide
  Target: ATXN2; (+) strand; PAM type: NRG; PAM sequence: GGG
ggagggaggcgagctctgcc

SEQ ID NO: 54618 - DNA, 20 bp, Artificial Sequence
  Description of Artificial Sequence: Synthetic oligonucleotide
  Target: ATXN2; (+) strand; PAM type: NRG; PAM sequence: GAG
agggaggcgagctctgccgg

SEQ ID NO: 54619 - DNA, 20 bp, Artificial Sequence
  Description of Artificial Sequence: Synthetic oligonucleotide
  Target: ATXN2; (+) strand; PAM type: NRG; PAM sequence: AGG
gggaggcgagctctgccggg

SEQ ID NO: 54620 - DNA, 20 bp, Artificial Sequence
  Description of Artificial Sequence: Synthetic oligonucleotide
  Target: ATXN2; (+) strand; PAM type: NRG; PAM sequence: GGG
ggaggcgagctctgccggga

SEQ ID NO: 54621 - DNA, 20 bp, Artificial Sequence
  Description of Artificial Sequence: Synthetic oligonucleotide
  Target: ATXN2; (+) strand; PAM type: NRG; PAM sequence: GAG
aggcgagctctgccgggagg

SEQ ID NO: 54622 - DNA, 20 bp, Artificial Sequence
  Description of Artificial Sequence: Synthetic oligonucleotide
  Target: ATXN2; (+) strand; PAM type: NRG; PAM sequence: AGG
ggcgagctctgccgggaggg

SEQ ID NO: 54623 - DNA, 20 bp, Artificial Sequence
  Description of Artificial Sequence: Synthetic oligonucleotide
  Target: ATXN2; (+) strand; PAM type: NRG; PAM sequence: GGG
gcgagctctgccgggaggga

SEQ ID NO: 54624 - DNA, 20 bp, Artificial Sequence
  Description of Artificial Sequence: Synthetic oligonucleotide
  Target: ATXN2; (+) strand; PAM type: NRG; PAM sequence: GGG
cgagctctgccgggagggag

SEQ ID NO: 54625 - DNA, 20 bp, Artificial Sequence
  Description of Artificial Sequence: Synthetic oligonucleotide
  Target: ATXN2; (+) strand; PAM type: NRG; PAM sequence: GGG
gagctctgccgggagggagg

SEQ ID NO: 54626 - DNA, 20 bp, Artificial Sequence
  Description of Artificial Sequence: Synthetic oligonucleotide
  Target: ATXN2; (+) strand; PAM type: NRG; PAM sequence: GGG
agctctgccgggagggaggg

SEQ ID NO: 54627 - DNA, 20 bp, Artificial Sequence
  Description of Artificial Sequence: Synthetic oligonucleotide
  Target: ATXN2; (+) strand; PAM type: NRG; PAM sequence: CGG
ctgccgggagggaggggggc

SEQ ID NO: 54628 - DNA, 20 bp, Artificial Sequence
  Description of Artificial Sequence: Synthetic oligonucleotide
  Target: ATXN2; (+) strand; PAM type: NRG; PAM sequence: GGG
tgccgggagggaggggggcc

SEQ ID NO: 54629 - DNA, 20 bp, Artificial Sequence
  Description of Artificial Sequence: Synthetic oligonucleotide
  Target: ATXN2; (+) strand; PAM type: NRG; PAM sequence: GGG
gccgggagggaggggggccg

SEQ ID NO: 54630 - DNA, 20 bp, Artificial Sequence
  Description of Artificial Sequence: Synthetic oligonucleotide
  Target: ATXN2; (+) strand; PAM type: NRG; PAM sequence: CGG
ggagggaggggggccggggc

SEQ ID NO: 54631 - DNA, 20 bp, Artificial Sequence
  Description of Artificial Sequence: Synthetic oligonucleotide
  Target: ATXN2; (+) strand; PAM type: NRG; PAM sequence: GGG
gagggaggggggccggggcc

SEQ ID NO: 54632 - DNA, 20 bp, Artificial Sequence
  Description of Artificial Sequence: Synthetic oligonucleotide
  Target: ATXN2; (+) strand; PAM type: NRG; PAM sequence: CGG
ggaggggggccggggccggg

SEQ ID NO: 54633 - DNA, 20 bp, Artificial Sequence
  Description of Artificial Sequence: Synthetic oligonucleotide
  Target: ATXN2; (+) strand; PAM type: NRG; PAM sequence: GGG
gaggggggccggggccgggc

SEQ ID NO: 54634 - DNA, 20 bp, Artificial Sequence
  Description of Artificial Sequence: Synthetic oligonucleotide
  Target: ATXN2; (+) strand; PAM type: NRG; PAM sequence: GGG
aggggggccggggccgggcg

SEQ ID NO: 54635 - DNA, 20 bp, Artificial Sequence
  Description of Artificial Sequence: Synthetic oligonucleotide
  Target: ATXN2; (+) strand; PAM type: NRG; PAM sequence: GGG
ggggggccggggccgggcgg

SEQ ID NO: 54636 - DNA, 20 bp, Artificial Sequence
  Description of Artificial Sequence: Synthetic oligonucleotide
  Target: ATXN2; (+) strand; PAM type: NRG; PAM sequence: GAG
ggggccggggccgggcgggg

SEQ ID NO: 54637 - DNA, 20 bp, Artificial Sequence
  Description of Artificial Sequence: Synthetic oligonucleotide
  Target: ATXN2; (+) strand; PAM type: NRG; PAM sequence: AGG
gggccggggccgggcggggg

SEQ ID NO: 54638 - DNA, 20 bp, Artificial Sequence
  Description of Artificial Sequence: Synthetic oligonucleotide
  Target: ATXN2; (+) strand; PAM type: NRG; PAM sequence: GGG
ggccggggccgggcggggga

SEQ ID NO: 54639 - DNA, 20 bp, Artificial Sequence
  Description of Artificial Sequence: Synthetic oligonucleotide
  Target: ATXN2; (+) strand; PAM type: NRG; PAM sequence: GGG
gccggggccgggcgggggag

SEQ ID NO: 54640 - DNA, 20 bp, Artificial Sequence
  Description of Artificial Sequence: Synthetic oligonucleotide
  Target: ATXN2; (+) strand; PAM type: NRG; PAM sequence: CGG
ggggccgggcgggggagggg

SEQ ID NO: 54641 - DNA, 20 bp, Artificial Sequence
  Description of Artificial Sequence: Synthetic oligonucleotide
  Target: ATXN2; (+) strand; PAM type: NRG; PAM sequence: CGG
gccgggcgggggaggggcgg

SEQ ID NO: 54642 - DNA, 20 bp, Artificial Sequence
  Description of Artificial Sequence: Synthetic oligonucleotide
  Target: ATXN2; (+) strand; PAM type: NRG; PAM sequence: GAG
cgggcgggggaggggcggcg

SEQ ID NO: 54643 - DNA, 20 bp, Artificial Sequence
  Description of Artificial Sequence: Synthetic oligonucleotide
  Target: ATXN2; (+) strand; PAM type: NRG; PAM sequence: AGG
gggcgggggaggggcggcgg

SEQ ID NO: 54644 - DNA, 20 bp, Artificial Sequence
  Description of Artificial Sequence: Synthetic oligonucleotide
  Target: ATXN2; (+) strand; PAM type: NRG; PAM sequence: GGG
ggcgggggaggggcggcgga

SEQ ID NO: 54645 - DNA, 20 bp, Artificial Sequence
  Description of Artificial Sequence: Synthetic oligonucleotide
  Target: ATXN2; (+) strand; PAM type: NRG; PAM sequence: CGG
ggaggggcggcggagggata

SEQ ID NO: 54646 - DNA, 20 bp, Artificial Sequence
  Description of Artificial Sequence: Synthetic oligonucleotide
  Target: ATXN2; (+) strand; PAM type: NRG; PAM sequence: CGG
gcggcggagggatacggtcc

SEQ ID NO: 54647 - DNA, 20 bp, Artificial Sequence
  Description of Artificial Sequence: Synthetic oligonucleotide
  Target: ATXN2; (+) strand; PAM type: NRG; PAM sequence: GGG
cggcggagggatacggtccc

SEQ ID NO: 54648 - DNA, 20 bp, Artificial Sequence
  Description of Artificial Sequence: Synthetic oligonucleotide
  Target: ATXN2; (+) strand; PAM type: NRG; PAM sequence: GGG
ggcggagggatacggtcccg

SEQ ID NO: 54649 - DNA, 20 bp, Artificial Sequence
  Description of Artificial Sequence: Synthetic oligonucleotide
  Target: ATXN2; (+) strand; PAM type: NRG; PAM sequence: CGG
ccccgcccgctccgccgcgc

SEQ ID NO: 54650 - DNA, 20 bp, Artificial Sequence
  Description of Artificial Sequence: Synthetic oligonucleotide
  Target: ATXN2; (+) strand; PAM type: NRG; PAM sequence: TGG
cgctccgccgcgccggccgc

SEQ ID NO: 54651 - DNA, 20 bp, Artificial Sequence
  Description of Artificial Sequence: Synthetic oligonucleotide
  Target: ATXN2; (+) strand; PAM type: NRG; PAM sequence: GAG
ctccgccgcgccggccgctg

SEQ ID NO: 54652 - DNA, 20 bp, Artificial Sequence
  Description of Artificial Sequence: Synthetic oligonucleotide
  Target: ATXN2; (+) strand; PAM type: NRG; PAM sequence: GAG
gccgcgccggccgctggagc

SEQ ID NO: 54653 - DNA, 20 bp, Artificial Sequence
  Description of Artificial Sequence: Synthetic oligonucleotide
  Target: ATXN2; (+) strand; PAM type: NRG; PAM sequence: CGG
ccgctggagcgagcgccacc

SEQ ID NO: 54654 - DNA, 20 bp, Artificial Sequence
  Description of Artificial Sequence: Synthetic oligonucleotide
  Target: ATXN2; (+) strand; PAM type: NRG; PAM sequence: GGG
cgctggagcgagcgccaccc

SEQ ID NO: 54655 - DNA, 20 bp, Artificial Sequence
  Description of Artificial Sequence: Synthetic oligonucleotide
  Target: ATXN2; (+) strand; PAM type: NRG; PAM sequence: TGG
cgagcgccacccgggccacc

SEQ ID NO: 54656 - DNA, 20 bp, Artificial Sequence
  Description of Artificial Sequence: Synthetic oligonucleotide
  Target: ATXN2; (+) strand; PAM type: NRG; PAM sequence: CGG
ccacccgggccacctggctg

SEQ ID NO: 54657 - DNA, 20 bp, Artificial Sequence
  Description of Artificial Sequence: Synthetic oligonucleotide
  Target: ATXN2; (+) strand; PAM type: NRG; PAM sequence: AAG
cgggccacctggctgcggcg

SEQ ID NO: 54658 - DNA, 20 bp, Artificial Sequence
  Description of Artificial Sequence: Synthetic oligonucleotide
  Target: ATXN2; (+) strand; PAM type: NRG; PAM sequence: CGG
gccacctggctgcggcgaag

SEQ ID NO: 54659 - DNA, 20 bp, Artificial Sequence
  Description of Artificial Sequence: Synthetic oligonucleotide
  Target: ATXN2; (+) strand; PAM type: NRG; PAM sequence: GAG
cctggctgcggcgaagcggc

SEQ ID NO: 54660 - DNA, 20 bp, Artificial Sequence
  Description of Artificial Sequence: Synthetic oligonucleotide
  Target: ATXN2; (+) strand; PAM type: NRG; PAM sequence: CGG
tgcggcgaagcggcgagact

SEQ ID NO: 54661 - DNA, 20 bp, Artificial Sequence
  Description of Artificial Sequence: Synthetic oligonucleotide
  Target: ATXN2; (+) strand; PAM type: NRG; PAM sequence: TGG
ggcgaagcggcgagactcgg

SEQ ID NO: 54662 - DNA, 20 bp, Artificial Sequence
  Description of Artificial Sequence: Synthetic oligonucleotide
  Target: ATXN2; (+) strand; PAM type: NRG; PAM sequence: CGG
gcgagactcggtggccaccg

SEQ ID NO: 54663 - DNA, 20 bp, Artificial Sequence
  Description of Artificial Sequence: Synthetic oligonucleotide
  Target: ATXN2; (+) strand; PAM type: NRG; PAM sequence: GGG
cgagactcggtggccaccgc

SEQ ID NO: 54664 - DNA, 20 bp, Artificial Sequence
  Description of Artificial Sequence: Synthetic oligonucleotide
  Target: ATXN2; (+) strand; PAM type: NRG; PAM sequence: GAG
ggtggccaccgcgggactcc

SEQ ID NO: 54665 - DNA, 20 bp, Artificial Sequence
  Description of Artificial Sequence: Synthetic oligonucleotide
  Target: ATXN2; (+) strand; PAM type: NRG; PAM sequence: AGG
gtggccaccgcgggactccg

SEQ ID NO: 54666 - DNA, 20 bp, Artificial Sequence
  Description of Artificial Sequence: Synthetic oligonucleotide
  Target: ATXN2; (+) strand; PAM type: NRG; PAM sequence: GAG
ggccaccgcgggactccgag

SEQ ID NO: 54667 - DNA, 20 bp, Artificial Sequence
  Description of Artificial Sequence: Synthetic oligonucleotide
  Target: ATXN2; (+) strand; PAM type: NRG; PAM sequence: CGG
cgcgggactccgaggagctg

SEQ ID NO: 54668 - DNA, 20 bp, Artificial Sequence
  Description of Artificial Sequence: Synthetic oligonucleotide
  Target: ATXN2; (+) strand; PAM type: NRG; PAM sequence: GAG
tccgaggagctgcggccgct

SEQ ID NO: 54669 - DNA, 20 bp, Artificial Sequence
  Description of Artificial Sequence: Synthetic oligonucleotide
  Target: ATXN2; (+) strand; PAM type: NRG; PAM sequence: CGG
gctgcggccgctgagcgcat

SEQ ID NO: 54670 - DNA, 20 bp, Artificial Sequence
  Description of Artificial Sequence: Synthetic oligonucleotide
  Target: ATXN2; (+) strand; PAM type: NRG; PAM sequence: GAG
tgcggccgctgagcgcatcg

SEQ ID NO: 54671 - DNA, 20 bp, Artificial Sequence
  Description of Artificial Sequence: Synthetic oligonucleotide
  Target: ATXN2; (+) strand; PAM type: NRG; PAM sequence: AGG
gcggccgctgagcgcatcgg

SEQ ID NO: 54672 - DNA, 20 bp, Artificial Sequence
  Description of Artificial Sequence: Synthetic oligonucleotide
  Target: ATXN2; (+) strand; PAM type: NRG; PAM sequence: GGG
cggccgctgagcgcatcgga

SEQ ID NO: 54673 - DNA, 20 bp, Artificial Sequence
  Description of Artificial Sequence: Synthetic oligonucleotide
  Target: ATXN2; (+) strand; PAM type: NRG; PAM sequence: CGG
ccgctgagcgcatcggaggg

SEQ ID NO: 54674 - DNA, 20 bp, Artificial Sequence
  Description of Artificial Sequence: Synthetic oligonucleotide
  Target: ATXN2; (+) strand; PAM type: NRG; PAM sequence: GGG
cgctgagcgcatcggagggc

SEQ ID NO: 54675 - DNA, 20 bp, Artificial Sequence
  Description of Artificial Sequence: Synthetic oligonucleotide
  Target: ATXN2; (+) strand; PAM type: NRG; PAM sequence: GAG
catcggagggcgggcgcgcc

SEQ ID NO: 54676 - DNA, 20 bp, Artificial Sequence
  Description of Artificial Sequence: Synthetic oligonucleotide
  Target: ATXN2; (+) strand; PAM type: NRG; PAM sequence: AGG
atcggagggcgggcgcgccg

SEQ ID NO: 54677 - DNA, 20 bp, Artificial Sequence
  Description of Artificial Sequence: Synthetic oligonucleotide
  Target: ATXN2; (+) strand; PAM type: NRG; PAM sequence: CGG
gggcgggcgcgccgaggcgc

SEQ ID NO: 54678 - DNA, 20 bp, Artificial Sequence
  Description of Artificial Sequence: Synthetic oligonucleotide
  Target: ATXN2; (+) strand; PAM type: NRG; PAM sequence: GGG
ggcgggcgcgccgaggcgcc

SEQ ID NO: 54679 - DNA, 20 bp, Artificial Sequence
  Description of Artificial Sequence: Synthetic oligonucleotide
  Target: ATXN2; (+) strand; PAM type: NRG; PAM sequence: TGG
gggcgcgccgaggcgccggg

SEQ ID NO: 54680 - DNA, 20 bp, Artificial Sequence
  Description of Artificial Sequence: Synthetic oligonucleotide
  Target: ATXN2; (+) strand; PAM type: NRG; PAM sequence: GGG
ggcgcgccgaggcgccgggt

SEQ ID NO: 54681 - DNA, 20 bp, Artificial Sequence
  Description of Artificial Sequence: Synthetic oligonucleotide
  Target: ATXN2; (+) strand; PAM type: NRG; PAM sequence: GAG
cgcgccgaggcgccgggtgg

SEQ ID NO: 54682 - DNA, 20 bp, Artificial Sequence
  Description of Artificial Sequence: Synthetic oligonucleotide
  Target: ATXN2; (+) strand; PAM type: NRG; PAM sequence: CGG
gccgaggcgccgggtgggag

SEQ ID NO: 54683 - DNA, 20 bp, Artificial Sequence
  Description of Artificial Sequence: Synthetic oligonucleotide
  Target: ATXN2; (+) strand; PAM type: NRG; PAM sequence: GAG
cgaggcgccgggtgggagcg

SEQ ID NO: 54684 - DNA, 20 bp, Artificial Sequence
  Description of Artificial Sequence: Synthetic oligonucleotide
  Target: ATXN2; (+) strand; PAM type: NRG; PAM sequence: AGG
gaggcgccgggtgggagcgg

SEQ ID NO: 54685 - DNA, 20 bp, Artificial Sequence
  Description of Artificial Sequence: Synthetic oligonucleotide
  Target: ATXN2; (+) strand; PAM type: NRG; PAM sequence: CGG
gccgggtgggagcggaggtg

SEQ ID NO: 54686 - DNA, 20 bp, Artificial Sequence
  Description of Artificial Sequence: Synthetic oligonucleotide
  Target: ATXN2; (+) strand; PAM type: NRG; PAM sequence: TAG
ggtgggagcggaggtgcgga

SEQ ID NO: 54687 - DNA, 20 bp, Artificial Sequence
  Description of Artificial Sequence: Synthetic oligonucleotide
  Target: ATXN2; (+) strand; PAM type: NRG; PAM sequence: AGG
gtgggagcggaggtgcggat

SEQ ID NO: 54688 - DNA, 20 bp, Artificial Sequence
  Description of Artificial Sequence: Synthetic oligonucleotide
  Target: ATXN2; (+) strand; PAM type: NRG; PAM sequence: GGG
tgggagcggaggtgcggata

SEQ ID NO: 54689 - DNA, 20 bp, Artificial Sequence
  Description of Artificial Sequence: Synthetic oligonucleotide
  Target: ATXN2; (+) strand; PAM type: NRG; PAM sequence: CGG
tgcggatagggactctttac

SEQ ID NO: 54690 - DNA, 20 bp, Artificial Sequence
  Description of Artificial Sequence: Synthetic oligonucleotide
  Target: ATXN2; (+) strand; PAM type: NRG; PAM sequence: AAG
ggatagggactctttaccgg

SEQ ID NO: 54691 - DNA, 20 bp, Artificial Sequence
  Description of Artificial Sequence: Synthetic oligonucleotide
  Target: ATXN2; (+) strand; PAM type: NRG; PAM sequence: CGG
agggactctttaccggaagt

SEQ ID NO: 54692 - DNA, 20 bp, Artificial Sequence
  Description of Artificial Sequence: Synthetic oligonucleotide
  Target: ATXN2; (+) strand; PAM type: NRG; PAM sequence: GAG
ggactctttaccggaagtcg

SEQ ID NO: 54693 - DNA, 20 bp, Artificial Sequence
  Description of Artificial Sequence: Synthetic oligonucleotide
  Target: ATXN2; (+) strand; PAM type: NRG; PAM sequence: AGG
gactctttaccggaagtcgg

SEQ ID NO: 54694 - DNA, 20 bp, Artificial Sequence
  Description of Artificial Sequence: Synthetic oligonucleotide
  Target: ATXN2; (+) strand; PAM type: NRG; PAM sequence: GGG
actctttaccggaagtcgga

SEQ ID NO: 54695 - DNA, 20 bp, Artificial Sequence
  Description of Artificial Sequence: Synthetic oligonucleotide
  Target: ATXN2; (+) strand; PAM type: NRG; PAM sequence: GGG
ctctttaccggaagtcggag

SEQ ID NO: 54696 - DNA, 20 bp, Artificial Sequence
  Description of Artificial Sequence: Synthetic oligonucleotide
  Target: ATXN2; (+) strand; PAM type: NRG; PAM sequence: CAG
ttaccggaagtcggaggggt

SEQ ID NO: 54697 - DNA, 20 bp, Artificial Sequence
  Description of Artificial Sequence: Synthetic oligonucleotide
  Target: ATXN2; (+) strand; PAM type: NRG; PAM sequence: CGG
cggaagtcggaggggtcaga

SEQ ID NO: 54698 - DNA, 20 bp, Artificial Sequence
  Description of Artificial Sequence: Synthetic oligonucleotide
  Target: ATXN2; (+) strand; PAM type: NRG; PAM sequence: AAG
aagtcggaggggtcagacgg

SEQ ID NO: 54699 - DNA, 20 bp, Artificial Sequence
  Description of Artificial Sequence: Synthetic oligonucleotide
  Target: ATXN2; (+) strand; PAM type: NRG; PAM sequence: CAG
tcggaggggtcagacggaag

SEQ ID NO: 54700 - DNA, 20 bp, Artificial Sequence
  Description of Artificial Sequence: Synthetic oligonucleotide
  Target: ATXN2; (+) strand; PAM type: NRG; PAM sequence: GAG
gtcagacggaagcagaacgt

SEQ ID NO: 54701 - DNA, 20 bp, Artificial Sequence
  Description of Artificial Sequence: Synthetic oligonucleotide
  Target: ATXN2; (+) strand; PAM type: NRG; PAM sequence: AGG
tcagacggaagcagaacgtg

SEQ ID NO: 54702 - DNA, 20 bp, Artificial Sequence
  Description of Artificial Sequence: Synthetic oligonucleotide
  Target: ATXN2; (+) strand; PAM type: NRG; PAM sequence: TGG
gacggaagcagaacgtgagg

SEQ ID NO: 54703 - DNA, 20 bp, Artificial Sequence
  Description of Artificial Sequence: Synthetic oligonucleotide
  Target: ATXN2; (+) strand; PAM type: NRG; PAM sequence: CGG
agcagaacgtgaggtggccc

SEQ ID NO: 54704 - DNA, 20 bp, Artificial Sequence
  Description of Artificial Sequence: Synthetic oligonucleotide
  Target: ATXN2; (+) strand; PAM type: NRG; PAM sequence: GGG
gcagaacgtgaggtggcccc

SEQ ID NO: 54705 - DNA, 20 bp, Artificial Sequence
  Description of Artificial Sequence: Synthetic oligonucleotide
  Target: ATXN2; (+) strand; PAM type: NRG; PAM sequence: GGG
cagaacgtgaggtggccccg

SEQ ID NO: 54706 - DNA, 20 bp, Artificial Sequence
  Description of Artificial Sequence: Synthetic oligonucleotide
  Target: ATXN2; (+) strand; PAM type: NRG; PAM sequence: CGG
acgtgaggtggccccggggc

SEQ ID NO: 54707 - DNA, 20 bp, Artificial Sequence
  Description of Artificial Sequence: Synthetic oligonucleotide
  Target: ATXN2; (+) strand; PAM type: NRG; PAM sequence: GGG
cgtgaggtggccccggggcc

SEQ ID NO: 54708 - DNA, 20 bp, Artificial Sequence
  Description of Artificial Sequence: Synthetic oligonucleotide
  Target: ATXN2; (+) strand; PAM type: NRG; PAM sequence: GAG
tgaggtggccccggggccgg

SEQ ID NO: 54709 - DNA, 20 bp, Artificial Sequence
  Description of Artificial Sequence: Synthetic oligonucleotide
  Target: ATXN2; (+) strand; PAM type: NRG; PAM sequence: AGG
gaggtggccccggggccggg

SEQ ID NO: 54710 - DNA, 20 bp, Artificial Sequence
  Description of Artificial Sequence: Synthetic oligonucleotide
  Target: ATXN2; (+) strand; PAM type: NRG; PAM sequence: GGG
aggtggccccggggccggga

SEQ ID NO: 54711 - DNA, 20 bp, Artificial Sequence
  Description of Artificial Sequence: Synthetic oligonucleotide
  Target: ATXN2; (+) strand; PAM type: NRG; PAM sequence: GAG
cggggccgggagggacacgt

SEQ ID NO: 54712 - DNA, 20 bp, Artificial Sequence
  Description of Artificial Sequence: Synthetic oligonucleotide
  Target: ATXN2; (+) strand; PAM type: NRG; PAM sequence: AGG
ggggccgggagggacacgtg

SEQ ID NO: 54713 - DNA, 20 bp, Artificial Sequence
  Description of Artificial Sequence: Synthetic oligonucleotide
  Target: ATXN2; (+) strand; PAM type: NRG; PAM sequence: GAG
ggccgggagggacacgtgag

SEQ ID NO: 54714 - DNA, 20 bp, Artificial Sequence
  Description of Artificial Sequence: Synthetic oligonucleotide
  Target: ATXN2; (+) strand; PAM type: NRG; PAM sequence: CGG
cgggagggacacgtgaggag

SEQ ID NO: 54715 - DNA, 20 bp, Artificial Sequence
  Description of Artificial Sequence: Synthetic oligonucleotide
  Target: ATXN2; (+) strand; PAM type: NRG; PAM sequence: GGG
gggagggacacgtgaggagc

SEQ ID NO: 54716 - DNA, 20 bp, Artificial Sequence
  Description of Artificial Sequence: Synthetic oligonucleotide
  Target: ATXN2; (+) strand; PAM type: NRG; PAM sequence: CGG
agggacacgtgaggagcggg

SEQ ID NO: 54717 - DNA, 20 bp, Artificial Sequence
  Description of Artificial Sequence: Synthetic oligonucleotide
  Target: ATXN2; (+) strand; PAM type: NRG; PAM sequence: TGG
gtgaggagcgggcggcgcgc

SEQ ID NO: 54718 - DNA, 20 bp, Artificial Sequence
  Description of Artificial Sequence: Synthetic oligonucleotide
  Target: ATXN2; (+) strand; PAM type: NRG; PAM sequence: GGG
tgaggagcgggcggcgcgct

SEQ ID NO: 54719 - DNA, 20 bp, Artificial Sequence
  Description of Artificial Sequence: Synthetic oligonucleotide
  Target: ATXN2; (+) strand; PAM type: NRG; PAM sequence: CGG
ggcgcgctgggttgctttct

SEQ ID NO: 54720 - DNA, 20 bp, Artificial Sequence
  Description of Artificial Sequence: Synthetic oligonucleotide
  Target: ATXN2; (+) strand; PAM type: NRG; PAM sequence: GGG
gcgcgctgggttgctttctc

SEQ ID NO: 54721 - DNA, 20 bp, Artificial Sequence
  Description of Artificial Sequence: Synthetic oligonucleotide
  Target: ATXN2; (+) strand; PAM type: NRG; PAM sequence: GGG
cgcgctgggttgctttctcg

SEQ ID NO: 54722 - DNA, 20 bp, Artificial Sequence
  Description of Artificial Sequence: Synthetic oligonucleotide
  Target: ATXN2; (+) strand; PAM type: NRG; PAM sequence: GGG
gcgctgggttgctttctcgg

SEQ ID NO: 54723 - DNA, 20 bp, Artificial Sequence
  Description of Artificial Sequence: Synthetic oligonucleotide
  Target: ATXN2; (+) strand; PAM type: NRG; PAM sequence: CGG
tgggttgctttctcgggggt

SEQ ID NO: 54724 - DNA, 20 bp, Artificial Sequence
  Description of Artificial Sequence: Synthetic oligonucleotide
  Target: ATXN2; (+) strand; PAM type: NRG; PAM sequence: GGG
gggttgctttctcgggggtc

SEQ ID NO: 54725 - DNA, 20 bp, Artificial Sequence
  Description of Artificial Sequence: Synthetic oligonucleotide
  Target: ATXN2; (+) strand; PAM type: NRG; PAM sequence: GAG
tgctttctcgggggtcgggt

SEQ ID NO: 54726 - DNA, 20 bp, Artificial Sequence
  Description of Artificial Sequence: Synthetic oligonucleotide
  Target: ATXN2; (+) strand; PAM type: NRG; PAM sequence: AGG
gctttctcgggggtcgggtg

SEQ ID NO: 54727 - DNA, 20 bp, Artificial Sequence
  Description of Artificial Sequence: Synthetic oligonucleotide
  Target: ATXN2; (+) strand; PAM type: NRG; PAM sequence: GGG
ctttctcgggggtcgggtga

SEQ ID NO: 54728 - DNA, 20 bp, Artificial Sequence
  Description of Artificial Sequence: Synthetic oligonucleotide
  Target: ATXN2; (+) strand; PAM type: NRG; PAM sequence: CAG
ctcgggggtcgggtgagggc

SEQ ID NO: 54729 - DNA, 20 bp, Artificial Sequence
  Description of Artificial Sequence: Synthetic oligonucleotide
  Target: ATXN2; (+) strand; PAM type: NRG; PAM sequence: AGG
tcgggggtcgggtgagggcc

SEQ ID NO: 54730 - DNA, 20 bp, Artificial Sequence
  Description of Artificial Sequence: Synthetic oligonucleotide
  Target: ATXN2; (+) strand; PAM type: NRG; PAM sequence: CGG
ggggtcgggtgagggccagg

SEQ ID NO: 54731 - DNA, 20 bp, Artificial Sequence
  Description of Artificial Sequence: Synthetic oligonucleotide
  Target: ATXN2; (+) strand; PAM type: NRG; PAM sequence: CGG
gtcgggtgagggccaggcgg

SEQ ID NO: 54732 - DNA, 20 bp, Artificial Sequence
  Description of Artificial Sequence: Synthetic oligonucleotide
  Target: ATXN2; (+) strand; PAM type: NRG; PAM sequence: CGG
gccaggcggcggtccctacc

SEQ ID NO: 54733 - DNA, 20 bp, Artificial Sequence
  Description of Artificial Sequence: Synthetic oligonucleotide
  Target: ATXN2; (+) strand; PAM type: NRG; PAM sequence: AAG
tacccggatccgccttcctc

SEQ ID NO: 54734 - DNA, 20 bp, Artificial Sequence
  Description of Artificial Sequence: Synthetic oligonucleotide
  Target: ATXN2; (+) strand; PAM type: NRG; PAM sequence: AGG
acccggatccgccttcctca

SEQ ID NO: 54735 - DNA, 20 bp, Artificial Sequence
  Description of Artificial Sequence: Synthetic oligonucleotide
  Target: ATXN2; (+) strand; PAM type: NRG; PAM sequence: CGG
cggatccgccttcctcaagg

SEQ ID NO: 54736 - DNA, 20 bp, Artificial Sequence
  Description of Artificial Sequence: Synthetic oligonucleotide
  Target: ATXN2; (+) strand; PAM type: NRG; PAM sequence: GGG
ggatccgccttcctcaaggc

SEQ ID NO: 54737 - DNA, 20 bp, Artificial Sequence
  Description of Artificial Sequence: Synthetic oligonucleotide
  Target: ATXN2; (+) strand; PAM type: NRG; PAM sequence: CGG
ctcaaggcgggtctgccctt

SEQ ID NO: 54738 - DNA, 20 bp, Artificial Sequence
  Description of Artificial Sequence: Synthetic oligonucleotide
  Target: ATXN2; (+) strand; PAM type: NRG; PAM sequence: GGG
tcaaggcgggtctgcccttc

SEQ ID NO: 54739 - DNA, 20 bp, Artificial Sequence
  Description of Artificial Sequence: Synthetic oligonucleotide
  Target: ATXN2; (+) strand; PAM type: NRG; PAM sequence: GGG
caaggcgggtctgcccttcg

SEQ ID NO: 54740 - DNA, 20 bp, Artificial Sequence
  Description of Artificial Sequence: Synthetic oligonucleotide
  Target: ATXN2; (+) strand; PAM type: NRG; PAM sequence: GAG
aggcgggtctgcccttcggg

SEQ ID NO: 54741 - DNA, 20 bp, Artificial Sequence
  Description of Artificial Sequence: Synthetic oligonucleotide
  Target: ATXN2; (+) strand; PAM type: NRG; PAM sequence: AGG
ggcgggtctgcccttcgggg

SEQ ID NO: 54742 - DNA, 20 bp, Artificial Sequence
  Description of Artificial Sequence: Synthetic oligonucleotide
  Target: ATXN2; (+) strand; PAM type: NRG; PAM sequence: GGG
gcgggtctgcccttcgggga

SEQ ID NO: 54743 - DNA, 20 bp, Artificial Sequence
  Description of Artificial Sequence: Synthetic oligonucleotide
  Target: ATXN2; (+) strand; PAM type: NRG; PAM sequence: CGG
gcccttcggggagggcgtgt

SEQ ID NO: 54744 - DNA, 20 bp, Artificial Sequence
  Description of Artificial Sequence: Synthetic oligonucleotide
  Target: ATXN2; (+) strand; PAM type: NRG; PAM sequence: CAG
cggggagggcgtgtcggtct

SEQ ID NO: 54745 - DNA, 20 bp, Artificial Sequence
  Description of Artificial Sequence: Synthetic oligonucleotide
  Target: ATXN2; (+) strand; PAM type: NRG; PAM sequence: TGG
ggcgtgtcggtctcagcctc

SEQ ID NO: 54746 - DNA, 20 bp, Artificial Sequence
  Description of Artificial Sequence: Synthetic oligonucleotide
  Target: ATXN2; (+) strand; PAM type: NRG; PAM sequence: GGG
gcgtgtcggtctcagcctct

SEQ ID NO: 54747 - DNA, 20 bp, Artificial Sequence
  Description of Artificial Sequence: Synthetic oligonucleotide
  Target: ATXN2; (+) strand; PAM type: NRG; PAM sequence: GGG
cgtgtcggtctcagcctctg

SEQ ID NO: 54748 - DNA, 20 bp, Artificial Sequence
  Description of Artificial Sequence: Synthetic oligonucleotide
  Target: ATXN2; (+) strand; PAM type: NRG; PAM sequence: TGG
ctcagcctctggggcctgcc

SEQ ID NO: 54749 - DNA, 20 bp, Artificial Sequence
  Description of Artificial Sequence: Synthetic oligonucleotide
  Target: ATXN2; (+) strand; PAM type: NRG; PAM sequence: TGG
cctctggggcctgcctggtg

SEQ ID NO: 54750 - DNA, 20 bp, Artificial Sequence
  Description of Artificial Sequence: Synthetic oligonucleotide
  Target: ATXN2; (+) strand; PAM type: NRG; PAM sequence: GAG
tctggggcctgcctggtgtg

SEQ ID NO: 54751 - DNA, 20 bp, Artificial Sequence
  Description of Artificial Sequence: Synthetic oligonucleotide
  Target: ATXN2; (+) strand; PAM type: NRG; PAM sequence: AGG
ctggggcctgcctggtgtgg

SEQ ID NO: 54752 - DNA, 20 bp, Artificial Sequence
  Description of Artificial Sequence: Synthetic oligonucleotide
  Target: ATXN2; (+) strand; PAM type: NRG; PAM sequence: CAG
ggcctgcctggtgtggagga

SEQ ID NO: 54753 - DNA, 20 bp, Artificial Sequence
  Description of Artificial Sequence: Synthetic oligonucleotide
  Target: ATXN2; (+) strand; PAM type: NRG; PAM sequence: AGG
gcctgcctggtgtggaggac

SEQ ID NO: 54754 - DNA, 20 bp, Artificial Sequence
  Description of Artificial Sequence: Synthetic oligonucleotide
  Target: ATXN2; (+) strand; PAM type: NRG; PAM sequence: GAG
ctgcctggtgtggaggacag

SEQ ID NO: 54755 - DNA, 20 bp, Artificial Sequence
  Description of Artificial Sequence: Synthetic oligonucleotide
  Target: ATXN2; (+) strand; PAM type: NRG; PAM sequence: GAG
gcctggtgtggaggacagga

SEQ ID NO: 54756 - DNA, 20 bp, Artificial Sequence
  Description of Artificial Sequence: Synthetic oligonucleotide
  Target: ATXN2; (+) strand; PAM type: NRG; PAM sequence: AAG
tggtgtggaggacaggagag

SEQ ID NO: 54757 - DNA, 20 bp, Artificial Sequence
  Description of Artificial Sequence: Synthetic oligonucleotide
  Target: ATXN2; (+) strand; PAM type: NRG; PAM sequence: CAG
cttctcctactgtattcctt

SEQ ID NO: 54758 - DNA, 20 bp, Artificial Sequence
  Description of Artificial Sequence: Synthetic oligonucleotide
  Target: ATXN2; (+) strand; PAM type: NRG; PAM sequence: CGG
cttcagcatcttcacttctg

SEQ ID NO: 54759 - DNA, 20 bp, Artificial Sequence
  Description of Artificial Sequence: Synthetic oligonucleotide
  Target: ATXN2; (+) strand; PAM type: NRG; PAM sequence: GGG
ttcagcatcttcacttctgc

SEQ ID NO: 54760 - DNA, 20 bp, Artificial Sequence
  Description of Artificial Sequence: Synthetic oligonucleotide
  Target: ATXN2; (+) strand; PAM type: NRG; PAM sequence: GGG
tcagcatcttcacttctgcg

SEQ ID NO: 54761 - DNA, 20 bp, Artificial Sequence
  Description of Artificial Sequence: Synthetic oligonucleotide
  Target: ATXN2; (+) strand; PAM type: NRG; PAM sequence: TAG
tcttcacttctgcggggacc

SEQ ID NO: 54762 - DNA, 20 bp, Artificial Sequence
  Description of Artificial Sequence: Synthetic oligonucleotide
  Target: ATXN2; (+) strand; PAM type: NRG; PAM sequence: CAG
tgcccccacctgatgcaacc

SEQ ID NO: 54763 - DNA, 20 bp, Artificial Sequence
  Description of Artificial Sequence: Synthetic oligonucleotide
  Target: ATXN2; (+) strand; PAM type: NRG; PAM sequence: TGG
acctgatgcaacccagaaaa

SEQ ID NO: 54764 - DNA, 20 bp, Artificial Sequence
  Description of Artificial Sequence: Synthetic oligonucleotide
  Target: ATXN2; (+) strand; PAM type: NRG; PAM sequence: GAG
ccagaaaatggactgactgc

SEQ ID NO: 54765 - DNA, 20 bp, Artificial Sequence
  Description of Artificial Sequence: Synthetic oligonucleotide
  Target: ATXN2; (+) strand; PAM type: NRG; PAM sequence: TGG
tggactgactgcgagtgcct

SEQ ID NO: 54766 - DNA, 20 bp, Artificial Sequence
  Description of Artificial Sequence: Synthetic oligonucleotide
  Target: ATXN2; (+) strand; PAM type: NRG; PAM sequence: GGG
ggactgactgcgagtgcctt

SEQ ID NO: 54767 - DNA, 20 bp, Artificial Sequence
  Description of Artificial Sequence: Synthetic oligonucleotide
  Target: ATXN2; (+) strand; PAM type: NRG; PAM sequence: GGG
gactgactgcgagtgccttg

SEQ ID NO: 54768 - DNA, 20 bp, Artificial Sequence
  Description of Artificial Sequence: Synthetic oligonucleotide
  Target: ATXN2; (+) strand; PAM type: NRG; PAM sequence: CGG
tgactgcgagtgccttgggg

SEQ ID NO: 54769 - DNA, 20 bp, Artificial Sequence
  Description of Artificial Sequence: Synthetic oligonucleotide
  Target: ATXN2; (+) strand; PAM type: NRG; PAM sequence: GAG
actgcgagtgccttggggcg

SEQ ID NO: 54770 - DNA, 20 bp, Artificial Sequence
  Description of Artificial Sequence: Synthetic oligonucleotide
  Target: ATXN2; (+) strand; PAM type: NRG; PAM sequence: AAG
aatgtgtcttgctacgtgta

SEQ ID NO: 54771 - DNA, 20 bp, Artificial Sequence
  Description of Artificial Sequence: Synthetic oligonucleotide
  Target: ATXN2; (+) strand; PAM type: NRG; PAM sequence: TAG
cttgctacgtgtaaagcacc

SEQ ID NO: 54772 - DNA, 20 bp, Artificial Sequence
  Description of Artificial Sequence: Synthetic oligonucleotide
  Target: ATXN2; (+) strand; PAM type: NRG; PAM sequence: CAG
taaagcacctagaaccctgc

SEQ ID NO: 54773 - DNA, 20 bp, Artificial Sequence
  Description of Artificial Sequence: Synthetic oligonucleotide
  Target: ATXN2; (+) strand; PAM type: NRG; PAM sequence: CAG
acctagaaccctgccagatt

SEQ ID NO: 54774 - DNA, 20 bp, Artificial Sequence
  Description of Artificial Sequence: Synthetic oligonucleotide
  Target: ATXN2; (+) strand; PAM type: NRG; PAM sequence: AGG
cctagaaccctgccagattc

SEQ ID NO: 54775 - DNA, 20 bp, Artificial Sequence
  Description of Artificial Sequence: Synthetic oligonucleotide
  Target: ATXN2; (+) strand; PAM type: NRG; PAM sequence: GGG
ctagaaccctgccagattca

SEQ ID NO: 54776 - DNA, 20 bp, Artificial Sequence
  Description of Artificial Sequence: Synthetic oligonucleotide
  Target: ATXN2; (+) strand; PAM type: NRG; PAM sequence: GGG
tagaaccctgccagattcag

SEQ ID NO: 54777 - DNA, 20 bp, Artificial Sequence
  Description of Artificial Sequence: Synthetic oligonucleotide
  Target: ATXN2; (+) strand; PAM type: NRG; PAM sequence: CAG
cctgccagattcaggggaca

SEQ ID NO: 54778 - DNA, 20 bp, Artificial Sequence
  Description of Artificial Sequence: Synthetic oligonucleotide
  Target: ATXN2; (+) strand; PAM type: NRG; PAM sequence: CAG
gccgtcccccgcccgccaca

SEQ ID NO: 54779 - DNA, 20 bp, Artificial Sequence
  Description of Artificial Sequence: Synthetic oligonucleotide
  Target: ATXN2; (+) strand; PAM type: NRG; PAM sequence: TAG
gtcccccgcccgccacacag

SEQ ID NO: 54780 - DNA, 20 bp, Artificial Sequence
  Description of Artificial Sequence: Synthetic oligonucleotide
  Target: ATXN2; (+) strand; PAM type: NRG; PAM sequence: AGG
tcccccgcccgccacacagt

SEQ ID NO: 54781 - DNA, 20 bp, Artificial Sequence
  Description of Artificial Sequence: Synthetic oligonucleotide
  Target: ATXN2; (+) strand; PAM type: NRG; PAM sequence: CAG
ccgccacacagtaggcgctc

SEQ ID NO: 54782 - DNA, 20 bp, Artificial Sequence
  Description of Artificial Sequence: Synthetic oligonucleotide
  Target: ATXN2; (+) strand; PAM type: NRG; PAM sequence: TGG
ccacacagtaggcgctccag

SEQ ID NO: 54783 - DNA, 20 bp, Artificial Sequence
  Description of Artificial Sequence: Synthetic oligonucleotide
  Target: ATXN2; (+) strand; PAM type: NRG; PAM sequence: CGG
cagtaggcgctccagtggct

SEQ ID NO: 54784 - DNA, 20 bp, Artificial Sequence
  Description of Artificial Sequence: Synthetic oligonucleotide
  Target: ATXN2; (+) strand; PAM type: NRG; PAM sequence: GGG
agtaggcgctccagtggctc

SEQ ID NO: 54785 - DNA, 20 bp, Artificial Sequence
  Description of Artificial Sequence: Synthetic oligonucleotide
  Target: ATXN2; (+) strand; PAM type: NRG; PAM sequence: GGG
gtaggcgctccagtggctcg

SEQ ID NO: 54786 - DNA, 20 bp, Artificial Sequence
  Description of Artificial Sequence: Synthetic oligonucleotide
  Target: ATXN2; (+) strand; PAM type: NRG; PAM sequence: CAG
cagtggctcggggcatctac

SEQ ID NO: 54787 - DNA, 20 bp, Artificial Sequence
  Description of Artificial Sequence: Synthetic oligonucleotide
  Target: ATXN2; (+) strand; PAM type: NRG; PAM sequence: AGG
agtggctcggggcatctacc

SEQ ID NO: 54788 - DNA, 20 bp, Artificial Sequence
  Description of Artificial Sequence: Synthetic oligonucleotide
  Target: ATXN2; (+) strand; PAM type: NRG; PAM sequence: CAG
ggctcggggcatctaccagg

SEQ ID NO: 54789 - DNA, 20 bp, Artificial Sequence
  Description of Artificial Sequence: Synthetic oligonucleotide
  Target: ATXN2; (+) strand; PAM type: NRG; PAM sequence: AGG
gctcggggcatctaccaggc

SEQ ID NO: 54790 - DNA, 20 bp, Artificial Sequence
  Description of Artificial Sequence: Synthetic oligonucleotide
  Target: ATXN2; (+) strand; PAM type: NRG; PAM sequence: CGG
gccgcgctgtcctgccctgc

SEQ ID NO: 54791 - DNA, 20 bp, Artificial Sequence
  Description of Artificial Sequence: Synthetic oligonucleotide
  Target: ATXN2; (+) strand; PAM type: NRG; PAM sequence: GGG
ccgcgctgtcctgccctgcc

SEQ ID NO: 54792 - DNA, 20 bp, Artificial Sequence
  Description of Artificial Sequence: Synthetic oligonucleotide
  Target: ATXN2; (+) strand; PAM type: NRG; PAM sequence: GGG
cgcgctgtcctgccctgccg

SEQ ID NO: 54793 - DNA, 20 bp, Artificial Sequence
  Description of Artificial Sequence: Synthetic oligonucleotide
  Target: ATXN2; (+) strand; PAM type: NRG; PAM sequence: TGG
ctgtcctgccctgccggggc

SEQ ID NO: 54794 - DNA, 20 bp, Artificial Sequence
  Description of Artificial Sequence: Synthetic oligonucleotide
  Target: ATXN2; (+) strand; PAM type: NRG; PAM sequence: GAG
gtcctgccctgccggggctg

SEQ ID NO: 54795 - DNA, 20 bp, Artificial Sequence
  Description of Artificial Sequence: Synthetic oligonucleotide
  Target: ATXN2; (+) strand; PAM type: NRG; PAM sequence: TGG
ctgccctgccggggctggag

SEQ ID NO: 54796 - DNA, 20 bp, Artificial Sequence
  Description of Artificial Sequence: Synthetic oligonucleotide
  Target: ATXN2; (+) strand; PAM type: NRG; PAM sequence: GAG
gccctgccggggctggagtg

SEQ ID NO: 54797 - DNA, 20 bp, Artificial Sequence
  Description of Artificial Sequence: Synthetic oligonucleotide
  Target: ATXN2; (+) strand; PAM type: NRG; PAM sequence: CGG
gctggagtggagcaaccctc

SEQ ID NO: 54798 - DNA, 20 bp, Artificial Sequence
  Description of Artificial Sequence: Synthetic oligonucleotide
  Target: ATXN2; (+) strand; PAM type: NRG; PAM sequence: GGG
ctggagtggagcaaccctcc

SEQ ID NO: 54799 - DNA, 20 bp, Artificial Sequence
  Description of Artificial Sequence: Synthetic oligonucleotide
  Target: ATXN2; (+) strand; PAM type: NRG; PAM sequence: GGG
tggagtggagcaaccctccg

SEQ ID NO: 54800 - DNA, 20 bp, Artificial Sequence
  Description of Artificial Sequence: Synthetic oligonucleotide
  Target: ATXN2; (+) strand; PAM type: NRG; PAM sequence: TGG
cctccggggccacccacatc

SEQ ID NO: 54801 - DNA, 20 bp, Artificial Sequence
  Description of Artificial Sequence: Synthetic oligonucleotide
  Target: ATXN2; (+) strand; PAM type: NRG; PAM sequence: GGG
ctccggggccacccacatct

SEQ ID NO: 54802 - DNA, 20 bp, Artificial Sequence
  Description of Artificial Sequence: Synthetic oligonucleotide
  Target: ATXN2; (+) strand; PAM type: NRG; PAM sequence: CAG
tttccccactttttccaccc

SEQ ID NO: 54803 - DNA, 20 bp, Artificial Sequence
  Description of Artificial Sequence: Synthetic oligonucleotide
  Target: ATXN2; (+) strand; PAM type: NRG; PAM sequence: CAG
ttttccaccccagccgcgca

SEQ ID NO: 54804 - DNA, 20 bp, Artificial Sequence
  Description of Artificial Sequence: Synthetic oligonucleotide
  Target: ATXN2; (+) strand; PAM type: NRG; PAM sequence: CAG
ccccagccgcgcacagtcac

SEQ ID NO: 54805 - DNA, 20 bp, Artificial Sequence
  Description of Artificial Sequence: Synthetic oligonucleotide
  Target: ATXN2; (+) strand; PAM type: NRG; PAM sequence: TAG
cagtcaccagaaaactcttt

SEQ ID NO: 54806 - DNA, 20 bp, Artificial Sequence
  Description of Artificial Sequence: Synthetic oligonucleotide
  Target: ATXN2; (+) strand; PAM type: NRG; PAM sequence: AGG
agtcaccagaaaactctttt

SEQ ID NO: 54807 - DNA, 20 bp, Artificial Sequence
  Description of Artificial Sequence: Synthetic oligonucleotide
  Target: ATXN2; (+) strand; PAM type: NRG; PAM sequence: GAG
acttctttttcctcattcat

SEQ ID NO: 54808 - DNA, 20 bp, Artificial Sequence
  Description of Artificial Sequence: Synthetic oligonucleotide
  Target: ATXN2; (+) strand; PAM type: NRG; PAM sequence: AAG
tcctcattcatgagattcta

SEQ ID NO: 54809 - DNA, 20 bp, Artificial Sequence
  Description of Artificial Sequence: Synthetic oligonucleotide
  Target: ATXN2; (+) strand; PAM type: NRG; PAM sequence: AGG
cctcattcatgagattctaa

SEQ ID NO: 54810 - DNA, 20 bp, Artificial Sequence
  Description of Artificial Sequence: Synthetic oligonucleotide
  Target: ATXN2; (+) strand; PAM type: NRG; PAM sequence: TGG
gagattctaaaggaaatata

SEQ ID NO: 54811 - DNA, 20 bp, Artificial Sequence
  Description of Artificial Sequence: Synthetic oligonucleotide
  Target: ATXN2; (+) strand; PAM type: NRG; PAM sequence: GGG
agattctaaaggaaatatat

SEQ ID NO: 54812 - DNA, 20 bp, Artificial Sequence
  Description of Artificial Sequence: Synthetic oligonucleotide
  Target: ATXN2; (+) strand; PAM type: NRG; PAM sequence: TGG
ctaaaggaaatatatgggat

SEQ ID NO: 54813 - DNA, 20 bp, Artificial Sequence
  Description of Artificial Sequence: Synthetic oligonucleotide
  Target: ATXN2; (+) strand; PAM type: NRG; PAM sequence: GGG
taaaggaaatatatgggatt

SEQ ID NO: 54814 - DNA, 20 bp, Artificial Sequence
  Description of Artificial Sequence: Synthetic oligonucleotide
  Target: ATXN2; (+) strand; PAM type: NRG; PAM sequence: TGG
gaaatatatgggattgggac

SEQ ID NO: 54815 - DNA, 20 bp, Artificial Sequence
  Description of Artificial Sequence: Synthetic oligonucleotide
  Target: ATXN2; (+) strand; PAM type: NRG; PAM sequence: TAG
atatatgggattgggactgg

SEQ ID NO: 54816 - DNA, 20 bp, Artificial Sequence
  Description of Artificial Sequence: Synthetic oligonucleotide
  Target: ATXN2; (+) strand; PAM type: NRG; PAM sequence: CGG
gattgggactggtagaacta

SEQ ID NO: 54817 - DNA, 20 bp, Artificial Sequence
  Description of Artificial Sequence: Synthetic oligonucleotide
  Target: ATXN2; (+) strand; PAM type: NRG; PAM sequence: TGG
actggtagaactacggataa

SEQ ID NO: 54818 - DNA, 20 bp, Artificial Sequence
  Description of Artificial Sequence: Synthetic oligonucleotide
  Target: ATXN2; (+) strand; PAM type: NRG; PAM sequence: GGG
ctggtagaactacggataat

SEQ ID NO: 54819 - DNA, 20 bp, Artificial Sequence
  Description of Artificial Sequence: Synthetic oligonucleotide
  Target: ATXN2; (+) strand; PAM type: NRG; PAM sequence: CGG
acggataatgggatctccct

SEQ ID NO: 54820 - DNA, 20 bp, Artificial Sequence
  Description of Artificial Sequence: Synthetic oligonucleotide
  Target: ATXN2; (+) strand; PAM type: NRG; PAM sequence: TAG
gataatgggatctccctcgg

SEQ ID NO: 54821 - DNA, 20 bp, Artificial Sequence
  Description of Artificial Sequence: Synthetic oligonucleotide
  Target: ATXN2; (+) strand; PAM type: NRG; PAM sequence: GAG
taatgggatctccctcggta

SEQ ID NO: 54822 - DNA, 20 bp, Artificial Sequence
  Description of Artificial Sequence: Synthetic oligonucleotide
  Target: ATXN2; (+) strand; PAM type: NRG; PAM sequence: CAG
gggatctccctcggtagaga

SEQ ID NO: 54823 - DNA, 20 bp, Artificial Sequence
  Description of Artificial Sequence: Synthetic oligonucleotide
  Target: ATXN2; (+) strand; PAM type: NRG; PAM sequence: GAG
gatctccctcggtagagaca

SEQ ID NO: 54824 - DNA, 20 bp, Artificial Sequence
  Description of Artificial Sequence: Synthetic oligonucleotide
  Target: ATXN2; (+) strand; PAM type: NRG; PAM sequence: TAG
tcaaaacaatgtgcgaactt

SEQ ID NO: 54825 - DNA, 20 bp, Artificial Sequence
  Description of Artificial Sequence: Synthetic oligonucleotide
  Target: ATXN2; (+) strand; PAM type: NRG; PAM sequence: TGG
aatgtgcgaactttagacct

SEQ ID NO: 54826 - DNA, 20 bp, Artificial Sequence
  Description of Artificial Sequence: Synthetic oligonucleotide
  Target: ATXN2; (+) strand; PAM type: NRG; PAM sequence: TAG
actttagaccttggaccctt

SEQ ID NO: 54827 - DNA, 20 bp, Artificial Sequence
  Description of Artificial Sequence: Synthetic oligonucleotide
  Target: ATXN2; (+) strand; PAM type: NRG; PAM sequence: AAG
ttagaccttggaccctttag

SEQ ID NO: 54828 - DNA, 20 bp, Artificial Sequence
  Description of Artificial Sequence: Synthetic oligonucleotide
  Target: ATXN2; (+) strand; PAM type: NRG; PAM sequence: CAG
aagttttaatttaacttacc

SEQ ID NO: 54829 - DNA, 20 bp, Artificial Sequence
  Description of Artificial Sequence: Synthetic oligonucleotide
  Target: ATXN2; (+) strand; PAM type: NRG; PAM sequence: CAG
tttaatttaacttacccagc

SEQ ID NO: 54830 - DNA, 20 bp, Artificial Sequence
  Description of Artificial Sequence: Synthetic oligonucleotide
  Target: ATXN2; (+) strand; PAM type: NRG; PAM sequence: CAG
tttaacttacccagccagca

SEQ ID NO: 54831 - DNA, 20 bp, Artificial Sequence
  Description of Artificial Sequence: Synthetic oligonucleotide
  Target: ATXN2; (+) strand; PAM type: NRG; PAM sequence: TAG
aacttacccagccagcacag

SEQ ID NO: 54832 - DNA, 20 bp, Artificial Sequence
  Description of Artificial Sequence: Synthetic oligonucleotide
  Target: ATXN2; (+) strand; PAM type: NRG; PAM sequence: CAG
actctttttaaaatgtgttg

SEQ ID NO: 54833 - DNA, 20 bp, Artificial Sequence
  Description of Artificial Sequence: Synthetic oligonucleotide
  Target: ATXN2; (+) strand; PAM type: NRG; PAM sequence: TGG
aaaatgtgttgcagttaaac

SEQ ID NO: 54834 - DNA, 20 bp, Artificial Sequence
  Description of Artificial Sequence: Synthetic oligonucleotide
  Target: ATXN2; (+) strand; PAM type: NRG; PAM sequence: AAG
atgtgttgcagttaaactgg

SEQ ID NO: 54835 - DNA, 20 bp, Artificial Sequence
  Description of Artificial Sequence: Synthetic oligonucleotide
  Target: ATXN2; (+) strand; PAM type: NRG; PAM sequence: AAG
gttgcagttaaactggaagc

SEQ ID NO: 54836 - DNA, 20 bp, Artificial Sequence
  Description of Artificial Sequence: Synthetic oligonucleotide
  Target: ATXN2; (+) strand; PAM type: NRG; PAM sequence: TAG
gcagttaaactggaagcaag

SEQ ID NO: 54837 - DNA, 20 bp, Artificial Sequence
  Description of Artificial Sequence: Synthetic oligonucleotide
  Target: ATXN2; (+) strand; PAM type: NRG; PAM sequence: AAG
ttaaactggaagcaagtaga

SEQ ID NO: 54838 - DNA, 20 bp, Artificial Sequence
  Description of Artificial Sequence: Synthetic oligonucleotide
  Target: ATXN2; (+) strand; PAM type: NRG; PAM sequence: TAG
aactggaagcaagtagaaag

SEQ ID NO: 54839 - DNA, 20 bp, Artificial Sequence
  Description of Artificial Sequence: Synthetic oligonucleotide
  Target: ATXN2; (+) strand; PAM type: NRG; PAM sequence: AGG
actggaagcaagtagaaagt

SEQ ID NO: 54840 - DNA, 20 bp, Artificial Sequence
  Description of Artificial Sequence: Synthetic oligonucleotide
  Target: ATXN2; (+) strand; PAM type: NRG; PAM sequence: GAG
taactttttttttttttttt

SEQ ID NO: 54841 - DNA, 20 bp, Artificial Sequence
  Description of Artificial Sequence: Synthetic oligonucleotide
  Target: ATXN2; (+) strand; PAM type: NRG; PAM sequence: CAG
cttttttttttttttttgag

SEQ ID NO: 54842 - DNA, 20 bp, Artificial Sequence
  Description of Artificial Sequence: Synthetic oligonucleotide
  Target: ATXN2; (+) strand; PAM type: NRG; PAM sequence: AAG
agtgaatctattgtttttta

SEQ ID NO: 54843 - DNA, 20 bp, Artificial Sequence
  Description of Artificial Sequence: Synthetic oligonucleotide
  Target: ATXN2; (+) strand; PAM type: NRG; PAM sequence: CAG
tttttaaagtgaaatgactt

SEQ ID NO: 54844 - DNA, 20 bp, Artificial Sequence
  Description of Artificial Sequence: Synthetic oligonucleotide
  Target: ATXN2; (+) strand; PAM type: NRG; PAM sequence: AGG
ttttaaagtgaaatgacttc

SEQ ID NO: 54845 - DNA, 20 bp, Artificial Sequence
  Description of Artificial Sequence: Synthetic oligonucleotide
  Target: ATXN2; (+) strand; PAM type: NRG; PAM sequence: TAG
gaaatgacttcaggaaataa

SEQ ID NO: 54846 - DNA, 20 bp, Artificial Sequence
  Description of Artificial Sequence: Synthetic oligonucleotide
  Target: ATXN2; (+) strand; PAM type: NRG; PAM sequence: AGG
aaatgacttcaggaaataat

SEQ ID NO: 54847 - DNA, 20 bp, Artificial Sequence
  Description of Artificial Sequence: Synthetic oligonucleotide
  Target: ATXN2; (+) strand; PAM type: NRG; PAM sequence: GGG
aatgacttcaggaaataata

SEQ ID NO: 54848 - DNA, 20 bp, Artificial Sequence
  Description of Artificial Sequence: Synthetic oligonucleotide
  Target: ATXN2; (+) strand; PAM type: NRG; PAM sequence: GGG
atgacttcaggaaataatag

SEQ ID NO: 54849 - DNA, 20 bp, Artificial Sequence
  Description of Artificial Sequence: Synthetic oligonucleotide
  Target: ATXN2; (+) strand; PAM type: NRG; PAM sequence: AAG
acttcaggaaataatagggg

SEQ ID NO: 54850 - DNA, 20 bp, Artificial Sequence
  Description of Artificial Sequence: Synthetic oligonucleotide
  Target: ATXN2; (+) strand; PAM type: NRG; PAM sequence: TAG
caaaattcccctcaatgtcc

SEQ ID NO: 54851 - DNA, 20 bp, Artificial Sequence
  Description of Artificial Sequence: Synthetic oligonucleotide
  Target: ATXN2; (+) strand; PAM type: NRG; PAM sequence: CAG
ctcaatgtcctagaactgtc

SEQ ID NO: 54852 - DNA, 20 bp, Artificial Sequence
  Description of Artificial Sequence: Synthetic oligonucleotide
  Target: ATXN2; (+) strand; PAM type: NRG; PAM sequence: AAG
gtcctagaactgtccagata

SEQ ID NO: 54853 - DNA, 20 bp, Artificial Sequence
  Description of Artificial Sequence: Synthetic oligonucleotide
  Target: ATXN2; (+) strand; PAM type: NRG; PAM sequence: AGG
tcctagaactgtccagataa

SEQ ID NO: 54854 - DNA, 20 bp, Artificial Sequence
  Description of Artificial Sequence: Synthetic oligonucleotide
  Target: ATXN2; (+) strand; PAM type: NRG; PAM sequence: AAG
gaactgtccagataaaggta

SEQ ID NO: 54855 - DNA, 20 bp, Artificial Sequence
  Description of Artificial Sequence: Synthetic oligonucleotide
  Target: ATXN2; (+) strand; PAM type: NRG; PAM sequence: TAG
tccagataaaggtaaagact

SEQ ID NO: 54856 - DNA, 20 bp, Artificial Sequence
  Description of Artificial Sequence: Synthetic oligonucleotide
  Target: ATXN2; (+) strand; PAM type: NRG; PAM sequence: TGG
ggtaaagacttagataaacg

SEQ ID NO: 54857 - DNA, 20 bp, Artificial Sequence
  Description of Artificial Sequence: Synthetic oligonucleotide
  Target: ATXN2; (+) strand; PAM type: NRG; PAM sequence: GAG
taaagacttagataaacgtg

SEQ ID NO: 54858 - DNA, 20 bp, Artificial Sequence
  Description of Artificial Sequence: Synthetic oligonucleotide
  Target: ATXN2; (+) strand; PAM type: NRG; PAM sequence: CAG
aacgtggagaatgattgaac

SEQ ID NO: 54859 - DNA, 20 bp, Artificial Sequence
  Description of Artificial Sequence: Synthetic oligonucleotide
  Target: ATXN2; (+) strand; PAM type: NRG; PAM sequence: CAG
gtggagaatgattgaaccag

SEQ ID NO: 54860 - DNA, 20 bp, Artificial Sequence
  Description of Artificial Sequence: Synthetic oligonucleotide
  Target: ATXN2; (+) strand; PAM type: NRG; PAM sequence: CAG
atgattgaaccagcagtttt

SEQ ID NO: 54861 - DNA, 20 bp, Artificial Sequence
  Description of Artificial Sequence: Synthetic oligonucleotide
  Target: ATXN2; (+) strand; PAM type: NRG; PAM sequence: TAG
attgaaccagcagttttcag

SEQ ID NO: 54862 - DNA, 20 bp, Artificial Sequence
  Description of Artificial Sequence: Synthetic oligonucleotide
  Target: ATXN2; (+) strand; PAM type: NRG; PAM sequence: TAG
tccaactgaaattaacctcc

SEQ ID NO: 54863 - DNA, 20 bp, Artificial Sequence
  Description of Artificial Sequence: Synthetic oligonucleotide
  Target: ATXN2; (+) strand; PAM type: NRG; PAM sequence: TAG
actgaaattaacctcctaga

SEQ ID NO: 54864 - DNA, 20 bp, Artificial Sequence
  Description of Artificial Sequence: Synthetic oligonucleotide
  Target: ATXN2; (+) strand; PAM type: NRG; PAM sequence: CAG
aattaacctcctagatagtc

SEQ ID NO: 54865 - DNA, 20 bp, Artificial Sequence
  Description of Artificial Sequence: Synthetic oligonucleotide
  Target: ATXN2; (+) strand; PAM type: NRG; PAM sequence: AGG
attaacctcctagatagtcc

SEQ ID NO: 54866 - DNA, 20 bp, Artificial Sequence
  Description of Artificial Sequence: Synthetic oligonucleotide
  Target: ATXN2; (+) strand; PAM type: NRG; PAM sequence: TAG
atcattgtattctgccaatg

SEQ ID NO: 54867 - DNA, 20 bp, Artificial Sequence
  Description of Artificial Sequence: Synthetic oligonucleotide
  Target: ATXN2; (+) strand; PAM type: NRG; PAM sequence: AGG
tcattgtattctgccaatgt

SEQ ID NO: 54868 - DNA, 20 bp, Artificial Sequence
  Description of Artificial Sequence: Synthetic oligonucleotide
  Target: ATXN2; (+) strand; PAM type: NRG; PAM sequence: CAG
attctgccaatgtaggaaat

SEQ ID NO: 54869 - DNA, 20 bp, Artificial Sequence
  Description of Artificial Sequence: Synthetic oligonucleotide
  Target: ATXN2; (+) strand; PAM type: NRG; PAM sequence: AAG
atcagttttatttcccatct

SEQ ID NO: 54870 - DNA, 20 bp, Artificial Sequence
  Description of Artificial Sequence: Synthetic oligonucleotide
  Target: ATXN2; (+) strand; PAM type: NRG; PAM sequence: AGG
tcagttttatttcccatcta

SEQ ID NO: 54871 - DNA, 20 bp, Artificial Sequence
  Description of Artificial Sequence: Synthetic oligonucleotide
  Target: ATXN2; (+) strand; PAM type: NRG; PAM sequence: AAG
tatttcccatctaaggtaaa

SEQ ID NO: 54872 - DNA, 20 bp, Artificial Sequence
  Description of Artificial Sequence: Synthetic oligonucleotide
  Target: ATXN2; (+) strand; PAM type: NRG; PAM sequence: TAG
ttcccatctaaggtaaaaag

SEQ ID NO: 54873 - DNA, 20 bp, Artificial Sequence
  Description of Artificial Sequence: Synthetic oligonucleotide
  Target: ATXN2; (+) strand; PAM type: NRG; PAM sequence: AAG
tctaaggtaaaaagtagatc

SEQ ID NO: 54874 - DNA, 20 bp, Artificial Sequence
  Description of Artificial Sequence: Synthetic oligonucleotide
  Target: ATXN2; (+) strand; PAM type: NRG; PAM sequence: AGG
ctaaggtaaaaagtagatca

SEQ ID NO: 54875 - DNA, 20 bp, Artificial Sequence
  Description of Artificial Sequence: Synthetic oligonucleotide
  Target: ATXN2; (+) strand; PAM type: NRG; PAM sequence: GGG
taaggtaaaaagtagatcaa

SEQ ID NO: 54876 - DNA, 20 bp, Artificial Sequence
  Description of Artificial Sequence: Synthetic oligonucleotide
  Target: ATXN2; (+) strand; PAM type: NRG; PAM sequence: TAG
aaaccctttaaaaattaacc

SEQ ID NO: 54877 - DNA, 20 bp, Artificial Sequence
  Description of Artificial Sequence: Synthetic oligonucleotide
  Target: ATXN2; (+) strand; PAM type: NRG; PAM sequence: TAG
ctttaaaaattaacctagcc

SEQ ID NO: 54878 - DNA, 20 bp, Artificial Sequence
  Description of Artificial Sequence: Synthetic oligonucleotide
  Target: ATXN2; (+) strand; PAM type: NRG; PAM sequence: TGG
ttaacctagcctagccaaca

SEQ ID NO: 54879 - DNA, 20 bp, Artificial Sequence
  Description of Artificial Sequence: Synthetic oligonucleotide
  Target: ATXN2; (+) strand; PAM type: NRG; PAM sequence: TAG
tctaccaaaaatataaaaat

SEQ ID NO: 54880 - DNA, 20 bp, Artificial Sequence
  Description of Artificial Sequence: Synthetic oligonucleotide
  Target: ATXN2; (+) strand; PAM type: NRG; PAM sequence: CGG
ccaaaaatataaaaattagc

SEQ ID NO: 54881 - DNA, 20 bp, Artificial Sequence
  Description of Artificial Sequence: Synthetic oligonucleotide
  Target: ATXN2; (+) strand; PAM type: NRG; PAM sequence: GGG
caaaaatataaaaattagcc

SEQ ID NO: 54882 - DNA, 20 bp, Artificial Sequence
  Description of Artificial Sequence: Synthetic oligonucleotide
  Target: ATXN2; (+) strand; PAM type: NRG; PAM sequence: TGG
atataaaaattagccgggtg

SEQ ID NO: 54883 - DNA, 20 bp, Artificial Sequence
  Description of Artificial Sequence: Synthetic oligonucleotide
  Target: ATXN2; (+) strand; PAM type: NRG; PAM sequence: TGG
taaaaattagccgggtgtgg

SEQ ID NO: 54884 - DNA, 20 bp, Artificial Sequence
  Description of Artificial Sequence: Synthetic oligonucleotide
  Target: ATXN2; (+) strand; PAM type: NRG; PAM sequence: TGG
aaattagccgggtgtggtgg

SEQ ID NO: 54885 - DNA, 20 bp, Artificial Sequence
  Description of Artificial Sequence: Synthetic oligonucleotide
  Target: ATXN2; (+) strand; PAM type: NRG; PAM sequence: GGG
aattagccgggtgtggtggt

SEQ ID NO: 54886 - DNA, 20 bp, Artificial Sequence
  Description of Artificial Sequence: Synthetic oligonucleotide
  Target: ATXN2; (+) strand; PAM type: NRG; PAM sequence: CAG
gtggtgggcgcctgtaatcc

SEQ ID NO: 54887 - DNA, 20 bp, Artificial Sequence
  Description of Artificial Sequence: Synthetic oligonucleotide
  Target: ATXN2; (+) strand; PAM type: NRG; PAM sequence: CGG
cgcctgtaatcccagctact

SEQ ID NO: 54888 - DNA, 20 bp, Artificial Sequence
  Description of Artificial Sequence: Synthetic oligonucleotide
  Target: ATXN2; (+) strand; PAM type: NRG; PAM sequence: GGG
gcctgtaatcccagctactc

SEQ ID NO: 54889 - DNA, 20 bp, Artificial Sequence
  Description of Artificial Sequence: Synthetic oligonucleotide
  Target: ATXN2; (+) strand; PAM type: NRG; PAM sequence: GAG
ctgtaatcccagctactcgg

SEQ ID NO: 54890 - DNA, 20 bp, Artificial Sequence
  Description of Artificial Sequence: Synthetic oligonucleotide
  Target: ATXN2; (+) strand; PAM type: NRG; PAM sequence: AGG
tgtaatcccagctactcggg

SEQ ID NO: 54891 - DNA, 20 bp, Artificial Sequence
  Description of Artificial Sequence: Synthetic oligonucleotide
  Target: ATXN2; (+) strand; PAM type: NRG; PAM sequence: CAG
agctactcgggaggctgata

SEQ ID NO: 54892 - DNA, 20 bp, Artificial Sequence
  Description of Artificial Sequence: Synthetic oligonucleotide
  Target: ATXN2; (+) strand; PAM type: NRG; PAM sequence: AGG
gctactcgggaggctgatac

SEQ ID NO: 54893 - DNA, 20 bp, Artificial Sequence
  Description of Artificial Sequence: Synthetic oligonucleotide
  Target: ATXN2; (+) strand; PAM type: NRG; PAM sequence: GAG
tactcgggaggctgatacag

SEQ ID NO: 54894 - DNA, 20 bp, Artificial Sequence
  Description of Artificial Sequence: Synthetic oligonucleotide
  Target: ATXN2; (+) strand; PAM type: NRG; PAM sequence: CGG
acaggagaattgcttgaatc

SEQ ID NO: 54895 - DNA, 20 bp, Artificial Sequence
  Description of Artificial Sequence: Synthetic oligonucleotide
  Target: ATXN2; (+) strand; PAM type: NRG; PAM sequence: GGG
caggagaattgcttgaatcc

SEQ ID NO: 54896 - DNA, 20 bp, Artificial Sequence
  Description of Artificial Sequence: Synthetic oligonucleotide
  Target: ATXN2; (+) strand; PAM type: NRG; PAM sequence: GAG
ggagaattgcttgaatccgg

SEQ ID NO: 54897 - DNA, 20 bp, Artificial Sequence
  Description of Artificial Sequence: Synthetic oligonucleotide
  Target: ATXN2; (+) strand; PAM type: NRG; PAM sequence: AGG
gagaattgcttgaatccggg

SEQ ID NO: 54898 - DNA, 20 bp, Artificial Sequence
  Description of Artificial Sequence: Synthetic oligonucleotide
  Target: ATXN2; (+) strand; PAM type: NRG; PAM sequence: TGG
aattgcttgaatccgggagg

SEQ ID NO: 54899 - DNA, 20 bp, Artificial Sequence
  Description of Artificial Sequence: Synthetic oligonucleotide
  Target: ATXN2; (+) strand; PAM type: NRG; PAM sequence: GAG
ttgcttgaatccgggaggtg

SEQ ID NO: 54900 - DNA, 20 bp, Artificial Sequence
  Description of Artificial Sequence: Synthetic oligonucleotide
  Target: ATXN2; (+) strand; PAM type: NRG; PAM sequence: AGG
tgcttgaatccgggaggtgg

SEQ ID NO: 54901 - DNA, 20 bp, Artificial Sequence
  Description of Artificial Sequence: Synthetic oligonucleotide
  Target: ATXN2; (+) strand; PAM type: NRG; PAM sequence: CAG
aatccgggaggtggaggttg

SEQ ID NO: 54902 - DNA, 20 bp, Artificial Sequence
  Description of Artificial Sequence: Synthetic oligonucleotide
  Target: ATXN2; (+) strand; PAM type: NRG; PAM sequence: CAG
cgggaggtggaggttgcagt

SEQ ID NO: 54903 - DNA, 20 bp, Artificial Sequence
  Description of Artificial Sequence: Synthetic oligonucleotide
  Target: ATXN2; (+) strand; PAM type: NRG; PAM sequence: GAG
ggtggaggttgcagtcagcc

SEQ ID NO: 54904 - DNA, 20 bp, Artificial Sequence
  Description of Artificial Sequence: Synthetic oligonucleotide
  Target: ATXN2; (+) strand; PAM type: NRG; PAM sequence: CAG
tcagccgagatcatgcactc

SEQ ID NO: 54905 - DNA, 20 bp, Artificial Sequence
  Description of Artificial Sequence: Synthetic oligonucleotide
  Target: ATXN2; (+) strand; PAM type: NRG; PAM sequence: TGG
cgagatcatgcactccagcc

SEQ ID NO: 54906 - DNA, 20 bp, Artificial Sequence
  Description of Artificial Sequence: Synthetic oligonucleotide
  Target: ATXN2; (+) strand; PAM type: NRG; PAM sequence: GGG
gagatcatgcactccagcct

SEQ ID NO: 54907 - DNA, 20 bp, Artificial Sequence
  Description of Artificial Sequence: Synthetic oligonucleotide
  Target: ATXN2; (+) strand; PAM type: NRG; PAM sequence: CAG
atgcactccagcctgggcga

SEQ ID NO: 54908 - DNA, 20 bp, Artificial Sequence
  Description of Artificial Sequence: Synthetic oligonucleotide
  Target: ATXN2; (+) strand; PAM type: NRG; PAM sequence: GAG
gcactccagcctgggcgaca

SEQ ID NO: 54909 - DNA, 20 bp, Artificial Sequence
  Description of Artificial Sequence: Synthetic oligonucleotide
  Target: ATXN2; (+) strand; PAM type: NRG; PAM sequence: GAG
tccagcctgggcgacagagc

SEQ ID NO: 54910 - DNA, 20 bp, Artificial Sequence
  Description of Artificial Sequence: Synthetic oligonucleotide
  Target: ATXN2; (+) strand; PAM type: NRG; PAM sequence: AAG
aataaataaataaataaata

SEQ ID NO: 54911 - DNA, 20 bp, Artificial Sequence
  Description of Artificial Sequence: Synthetic oligonucleotide
  Target: ATXN2; (+) strand; PAM type: NRG; PAM sequence: AAG
taaataaataaagtaaccta

SEQ ID NO: 54912 - DNA, 20 bp, Artificial Sequence
  Description of Artificial Sequence: Synthetic oligonucleotide
  Target: ATXN2; (+) strand; PAM type: NRG; PAM sequence: AGG
aaataaataaagtaacctaa

SEQ ID NO: 54913 - DNA, 20 bp, Artificial Sequence
  Description of Artificial Sequence: Synthetic oligonucleotide
  Target: ATXN2; (+) strand; PAM type: NRG; PAM sequence: TGG
taaagtaacctaaaggaaac

SEQ ID NO: 54914 - DNA, 20 bp, Artificial Sequence
  Description of Artificial Sequence: Synthetic oligonucleotide
  Target: ATXN2; (+) strand; PAM type: NRG; PAM sequence: CAG
ggaaactggaactaaaaaac

SEQ ID NO: 54915 - DNA, 20 bp, Artificial Sequence
  Description of Artificial Sequence: Synthetic oligonucleotide
  Target: ATXN2; (+) strand; PAM type: NRG; PAM sequence: CGG
aacaaaaaaatacctgtacc

SEQ ID NO: 54916 - DNA, 20 bp, Artificial Sequence
  Description of Artificial Sequence: Synthetic oligonucleotide
  Target: ATXN2; (+) strand; PAM type: NRG; PAM sequence: TGG
aaaatacctgtacccggctg

SEQ ID NO: 54917 - DNA, 20 bp, Artificial Sequence
  Description of Artificial Sequence: Synthetic oligonucleotide
  Target: ATXN2; (+) strand; PAM type: NRG; PAM sequence: CAG
acctgtacccggctgtggta

SEQ ID NO: 54918 - DNA, 20 bp, Artificial Sequence
  Description of Artificial Sequence: Synthetic oligonucleotide
  Target: ATXN2; (+) strand; PAM type: NRG; PAM sequence: AGG
cctgtacccggctgtggtac

SEQ ID NO: 54919 - DNA, 20 bp, Artificial Sequence
  Description of Artificial Sequence: Synthetic oligonucleotide
  Target: ATXN2; (+) strand; PAM type: NRG; PAM sequence: CAG
tacccggctgtggtacaggc

SEQ ID NO: 54920 - DNA, 20 bp, Artificial Sequence
  Description of Artificial Sequence: Synthetic oligonucleotide
  Target: ATXN2; (+) strand; PAM type: NRG; PAM sequence: AGG
acccggctgtggtacaggcc

SEQ ID NO: 54921 - DNA, 20 bp, Artificial Sequence
  Description of Artificial Sequence: Synthetic oligonucleotide
  Target: ATXN2; (+) strand; PAM type: NRG; PAM sequence: GGG
cccggctgtggtacaggcca

SEQ ID NO: 54922 - DNA, 20 bp, Artificial Sequence
  Description of Artificial Sequence: Synthetic oligonucleotide
  Target: ATXN2; (+) strand; PAM type: NRG; PAM sequence: GAG
gtacaggccagggctgctgt

SEQ ID NO: 54923 - DNA, 20 bp, Artificial Sequence
  Description of Artificial Sequence: Synthetic oligonucleotide
  Target: ATXN2; (+) strand; PAM type: NRG; PAM sequence: AGG
tacaggccagggctgctgtg

SEQ ID NO: 54924 - DNA, 20 bp, Artificial Sequence
  Description of Artificial Sequence: Synthetic oligonucleotide
  Target: ATXN2; (+) strand; PAM type: NRG; PAM sequence: GGG
acaggccagggctgctgtga

SEQ ID NO: 54925 - DNA, 20 bp, Artificial Sequence
  Description of Artificial Sequence: Synthetic oligonucleotide
  Target: ATXN2; (+) strand; PAM type: NRG; PAM sequence: GGG
caggccagggctgctgtgag

SEQ ID NO: 54926 - DNA, 20 bp, Artificial Sequence
  Description of Artificial Sequence: Synthetic oligonucleotide
  Target: ATXN2; (+) strand; PAM type: NRG; PAM sequence: AAG
gccagggctgctgtgagggg

SEQ ID NO: 54927 - DNA, 20 bp, Artificial Sequence
  Description of Artificial Sequence: Synthetic oligonucleotide
  Target: ATXN2; (+) strand; PAM type: NRG; PAM sequence: TGG
ctgctgtgaggggaagctcc

SEQ ID NO: 54928 - DNA, 20 bp, Artificial Sequence
  Description of Artificial Sequence: Synthetic oligonucleotide
  Target: ATXN2; (+) strand; PAM type: NRG; PAM sequence: GAG
gctgtgaggggaagctcctg

SEQ ID NO: 54929 - DNA, 20 bp, Artificial Sequence
  Description of Artificial Sequence: Synthetic oligonucleotide
  Target: ATXN2; (+) strand; PAM type: NRG; PAM sequence: GAG
tgtgaggggaagctcctgga

SEQ ID NO: 54930 - DNA, 20 bp, Artificial Sequence
  Description of Artificial Sequence: Synthetic oligonucleotide
  Target: ATXN2; (+) strand; PAM type: NRG; PAM sequence: AGG
gtgaggggaagctcctggag

SEQ ID NO: 54931 - DNA, 20 bp, Artificial Sequence
  Description of Artificial Sequence: Synthetic oligonucleotide
  Target: ATXN2; (+) strand; PAM type: NRG; PAM sequence: GGG
tgaggggaagctcctggaga

SEQ ID NO: 54932 - DNA, 20 bp, Artificial Sequence
  Description of Artificial Sequence: Synthetic oligonucleotide
  Target: ATXN2; (+) strand; PAM type: NRG; PAM sequence: TGG
agctcctggagagggtgaca

SEQ ID NO: 54933 - DNA, 20 bp, Artificial Sequence
  Description of Artificial Sequence: Synthetic oligonucleotide
  Target: ATXN2; (+) strand; PAM type: NRG; PAM sequence: GGG
gctcctggagagggtgacat

SEQ ID NO: 54934 - DNA, 20 bp, Artificial Sequence
  Description of Artificial Sequence: Synthetic oligonucleotide
  Target: ATXN2; (+) strand; PAM type: NRG; PAM sequence: GGG
ctcctggagagggtgacatg

SEQ ID NO: 54935 - DNA, 20 bp, Artificial Sequence
  Description of Artificial Sequence: Synthetic oligonucleotide
  Target: ATXN2; (+) strand; PAM type: NRG; PAM sequence: CAG
ctggagagggtgacatgggg

SEQ ID NO: 54936 - DNA, 20 bp, Artificial Sequence
  Description of Artificial Sequence: Synthetic oligonucleotide
  Target: ATXN2; (+) strand; PAM type: NRG; PAM sequence: AGG
tggagagggtgacatggggc

SEQ ID NO: 54937 - DNA, 20 bp, Artificial Sequence
  Description of Artificial Sequence: Synthetic oligonucleotide
  Target: ATXN2; (+) strand; PAM type: NRG; PAM sequence: GGG
ggagagggtgacatggggca

SEQ ID NO: 54938 - DNA, 20 bp, Artificial Sequence
  Description of Artificial Sequence: Synthetic oligonucleotide
  Target: ATXN2; (+) strand; PAM type: NRG; PAM sequence: GAG
catggggcagggacccaaat

SEQ ID NO: 54939 - DNA, 20 bp, Artificial Sequence
  Description of Artificial Sequence: Synthetic oligonucleotide
  Target: ATXN2; (+) strand; PAM type: NRG; PAM sequence: TGG
ggcagggacccaaatgagca

SEQ ID NO: 54940 - DNA, 20 bp, Artificial Sequence
  Description of Artificial Sequence: Synthetic oligonucleotide
  Target: ATXN2; (+) strand; PAM type: NRG; PAM sequence: GGG
gcagggacccaaatgagcat

SEQ ID NO: 54941 - DNA, 20 bp, Artificial Sequence
  Description of Artificial Sequence: Synthetic oligonucleotide
  Target: ATXN2; (+) strand; PAM type: NRG; PAM sequence: GAG
acccaaatgagcatgggcat

SEQ ID NO: 54942 - DNA, 20 bp, Artificial Sequence
  Description of Artificial Sequence: Synthetic oligonucleotide
  Target: ATXN2; (+) strand; PAM type: NRG; PAM sequence: AGG
cccaaatgagcatgggcatg

SEQ ID NO: 54943 - DNA, 20 bp, Artificial Sequence
  Description of Artificial Sequence: Synthetic oligonucleotide
  Target: ATXN2; (+) strand; PAM type: NRG; PAM sequence: TGG
gagcatgggcatgaggatcc

SEQ ID NO: 54944 - DNA, 20 bp, Artificial Sequence
  Description of Artificial Sequence: Synthetic oligonucleotide
  Target: ATXN2; (+) strand; PAM type: NRG; PAM sequence: GGG
agcatgggcatgaggatcct

SEQ ID NO: 54945 - DNA, 20 bp, Artificial Sequence
  Description of Artificial Sequence: Synthetic oligonucleotide
  Target: ATXN2; (+) strand; PAM type: NRG; PAM sequence: GGG
gcatgggcatgaggatcctg

SEQ ID NO: 54946 - DNA, 20 bp, Artificial Sequence
  Description of Artificial Sequence: Synthetic oligonucleotide
  Target: ATXN2; (+) strand; PAM type: NRG; PAM sequence: GAG
atgggcatgaggatcctggg

SEQ ID NO: 54947 - DNA, 20 bp, Artificial Sequence
  Description of Artificial Sequence: Synthetic oligonucleotide
  Target: ATXN2; (+) strand; PAM type: NRG; PAM sequence: CAG
gatcctggggagaaacgctc

SEQ ID NO: 54948 - DNA, 20 bp, Artificial Sequence
  Description of Artificial Sequence: Synthetic oligonucleotide
  Target: ATXN2; (+) strand; PAM type: NRG; PAM sequence: AGG
atcctggggagaaacgctcc

SEQ ID NO: 54949 - DNA, 20 bp, Artificial Sequence
  Description of Artificial Sequence: Synthetic oligonucleotide
  Target: ATXN2; (+) strand; PAM type: NRG; PAM sequence: TGG
ctggggagaaacgctccagg

SEQ ID NO: 54950 - DNA, 20 bp, Artificial Sequence
  Description of Artificial Sequence: Synthetic oligonucleotide
  Target: ATXN2; (+) strand; PAM type: NRG; PAM sequence: GAG
ggggagaaacgctccaggtg

SEQ ID NO: 54951 - DNA, 20 bp, Artificial Sequence
  Description of Artificial Sequence: Synthetic oligonucleotide
  Target: ATXN2; (+) strand; PAM type: NRG; PAM sequence: AGG
gggagaaacgctccaggtgg

SEQ ID NO: 54952 - DNA, 20 bp, Artificial Sequence
  Description of Artificial Sequence: Synthetic oligonucleotide
  Target: ATXN2; (+) strand; PAM type: NRG; PAM sequence: GGG
ggagaaacgctccaggtgga

SEQ ID NO: 54953 - DNA, 20 bp, Artificial Sequence
  Description of Artificial Sequence: Synthetic oligonucleotide
  Target: ATXN2; (+) strand; PAM type: NRG; PAM sequence: CAG
aacgctccaggtggagggca

SEQ ID NO: 54954 - DNA, 20 bp, Artificial Sequence
  Description of Artificial Sequence: Synthetic oligonucleotide
  Target: ATXN2; (+) strand; PAM type: NRG; PAM sequence: GAG
ctccaggtggagggcacagc

SEQ ID NO: 54955 - DNA, 20 bp, Artificial Sequence
  Description of Artificial Sequence: Synthetic oligonucleotide
  Target: ATXN2; (+) strand; PAM type: NRG; PAM sequence: AGG
tccaggtggagggcacagcg

SEQ ID NO: 54956 - DNA, 20 bp, Artificial Sequence
  Description of Artificial Sequence: Synthetic oligonucleotide
  Target: ATXN2; (+) strand; PAM type: NRG; PAM sequence: GGG
ccaggtggagggcacagcga

SEQ ID NO: 54957 - DNA, 20 bp, Artificial Sequence
  Description of Artificial Sequence: Synthetic oligonucleotide
  Target: ATXN2; (+) strand; PAM type: NRG; PAM sequence: AAG
tggagggcacagcgagggca

SEQ ID NO: 54958 - DNA, 20 bp, Artificial Sequence
  Description of Artificial Sequence: Synthetic oligonucleotide
  Target: ATXN2; (+) strand; PAM type: NRG; PAM sequence: AGG
ggagggcacagcgagggcaa

SEQ ID NO: 54959 - DNA, 20 bp, Artificial Sequence
  Description of Artificial Sequence: Synthetic oligonucleotide
  Target: ATXN2; (+) strand; PAM type: NRG; PAM sequence: GAG
acagcgagggcaaaggctct

SEQ ID NO: 54960 - DNA, 20 bp, Artificial Sequence
  Description of Artificial Sequence: Synthetic oligonucleotide
  Target: ATXN2; (+) strand; PAM type: NRG; PAM sequence: AGG
cagcgagggcaaaggctctg

SEQ ID NO: 54961 - DNA, 20 bp, Artificial Sequence
  Description of Artificial Sequence: Synthetic oligonucleotide
  Target: ATXN2; (+) strand; PAM type: NRG; PAM sequence: GGG
agcgagggcaaaggctctga

SEQ ID NO: 54962 - DNA, 20 bp, Artificial Sequence
  Description of Artificial Sequence: Synthetic oligonucleotide
  Target: ATXN2; (+) strand; PAM type: NRG; PAM sequence: GGG
gcgagggcaaaggctctgag

SEQ ID NO: 54963 - DNA, 20 bp, Artificial Sequence
  Description of Artificial Sequence: Synthetic oligonucleotide
  Target: ATXN2; (+) strand; PAM type: NRG; PAM sequence: GGG
cgagggcaaaggctctgagg

SEQ ID NO: 54964 - DNA, 20 bp, Artificial Sequence
  Description of Artificial Sequence: Synthetic oligonucleotide
  Target: ATXN2; (+) strand; PAM type: NRG; PAM sequence: GGG
gagggcaaaggctctgaggg

SEQ ID NO: 54965 - DNA, 20 bp, Artificial Sequence
  Description of Artificial Sequence: Synthetic oligonucleotide
  Target: ATXN2; (+) strand; PAM type: NRG; PAM sequence: GAG
gggcaaaggctctgaggggg

SEQ ID NO: 54966 - DNA, 20 bp, Artificial Sequence
  Description of Artificial Sequence: Synthetic oligonucleotide
  Target: ATXN2; (+) strand; PAM type: NRG; PAM sequence: GAG
aggctctgaggggggagtct

SEQ ID NO: 54967 - DNA, 20 bp, Artificial Sequence
  Description of Artificial Sequence: Synthetic oligonucleotide
  Target: ATXN2; (+) strand; PAM type: NRG; PAM sequence: AGG
ggctctgaggggggagtctg

SEQ ID NO: 54968 - DNA, 20 bp, Artificial Sequence
  Description of Artificial Sequence: Synthetic oligonucleotide
  Target: ATXN2; (+) strand; PAM type: NRG; PAM sequence: CAG
tgaggggggagtctgaggaa

SEQ ID NO: 54969 - DNA, 20 bp, Artificial Sequence
  Description of Artificial Sequence: Synthetic oligonucleotide
  Target: ATXN2; (+) strand; PAM type: NRG; PAM sequence: AAG
gggggagtctgaggaacagc

SEQ ID NO: 54970 - DNA, 20 bp, Artificial Sequence
  Description of Artificial Sequence: Synthetic oligonucleotide
  Target: ATXN2; (+) strand; PAM type: NRG; PAM sequence: AGG
ggggagtctgaggaacagca

SEQ ID NO: 54971 - DNA, 20 bp, Artificial Sequence
  Description of Artificial Sequence: Synthetic oligonucleotide
  Target: ATXN2; (+) strand; PAM type: NRG; PAM sequence: GAG
ggagtctgaggaacagcaag

SEQ ID NO: 54972 - DNA, 20 bp, Artificial Sequence
  Description of Artificial Sequence: Synthetic oligonucleotide
  Target: ATXN2; (+) strand; PAM type: NRG; PAM sequence: AGG
gagtctgaggaacagcaagg

SEQ ID NO: 54973 - DNA, 20 bp, Artificial Sequence
  Description of Artificial Sequence: Synthetic oligonucleotide
  Target: ATXN2; (+) strand; PAM type: NRG; PAM sequence: TGG
aacagcaaggaggcctgcaa

SEQ ID NO: 54974 - DNA, 20 bp, Artificial Sequence
  Description of Artificial Sequence: Synthetic oligonucleotide
  Target: ATXN2; (+) strand; PAM type: NRG; PAM sequence: GAG
cagcaaggaggcctgcaatg

SEQ ID NO: 54975 - DNA, 20 bp, Artificial Sequence
  Description of Artificial Sequence: Synthetic oligonucleotide
  Target: ATXN2; (+) strand; PAM type: NRG; PAM sequence: CAG
caaggaggcctgcaatggag

SEQ ID NO: 54976 - DNA, 20 bp, Artificial Sequence
  Description of Artificial Sequence: Synthetic oligonucleotide
  Target: ATXN2; (+) strand; PAM type: NRG; PAM sequence: AGG
aaggaggcctgcaatggagc

SEQ ID NO: 54977 - DNA, 20 bp, Artificial Sequence
  Description of Artificial Sequence: Synthetic oligonucleotide
  Target: ATXN2; (+) strand; PAM type: NRG; PAM sequence: TGG
gcaatggagcaggtcgtcaa

SEQ ID NO: 54978 - DNA, 20 bp, Artificial Sequence
  Description of Artificial Sequence: Synthetic oligonucleotide
  Target: ATXN2; (+) strand; PAM type: NRG; PAM sequence: TAG
ccgttatattctttctttaa

SEQ ID NO: 54979 - DNA, 20 bp, Artificial Sequence
  Description of Artificial Sequence: Synthetic oligonucleotide
  Target: ATXN2; (+) strand; PAM type: NRG; PAM sequence: TGG
ttaatagaaatacaaacact

SEQ ID NO: 54980 - DNA, 20 bp, Artificial Sequence
  Description of Artificial Sequence: Synthetic oligonucleotide
  Target: ATXN2; (+) strand; PAM type: NRG; PAM sequence: TGG
agaaatacaaacacttggcc

SEQ ID NO: 54981 - DNA, 20 bp, Artificial Sequence
  Description of Artificial Sequence: Synthetic oligonucleotide
  Target: ATXN2; (+) strand; PAM type: NRG; PAM sequence: CGG
tacaaacacttggcctggcg

SEQ ID NO: 54982 - DNA, 20 bp, Artificial Sequence
  Description of Artificial Sequence: Synthetic oligonucleotide
  Target: ATXN2; (+) strand; PAM type: NRG; PAM sequence: TGG
aaacacttggcctggcgcgg

SEQ ID NO: 54983 - DNA, 20 bp, Artificial Sequence
  Description of Artificial Sequence: Synthetic oligonucleotide
  Target: ATXN2; (+) strand; PAM type: NRG; PAM sequence: CAG
gtggctcacacctgtaatcc

SEQ ID NO: 54984 - DNA, 20 bp, Artificial Sequence
  Description of Artificial Sequence: Synthetic oligonucleotide
  Target: ATXN2; (+) strand; PAM type: NRG; PAM sequence: TGG
cacctgtaatcccagcactc

SEQ ID NO: 54985 - DNA, 20 bp, Artificial Sequence
  Description of Artificial Sequence: Synthetic oligonucleotide
  Target: ATXN2; (+) strand; PAM type: NRG; PAM sequence: GGG
acctgtaatcccagcactct

SEQ ID NO: 54986 - DNA, 20 bp, Artificial Sequence
  Description of Artificial Sequence: Synthetic oligonucleotide
  Target: ATXN2; (+) strand; PAM type: NRG; PAM sequence: GAG
ctgtaatcccagcactctgg

SEQ ID NO: 54987 - DNA, 20 bp, Artificial Sequence
  Description of Artificial Sequence: Synthetic oligonucleotide
  Target: ATXN2; (+) strand; PAM type: NRG; PAM sequence: AGG
tgtaatcccagcactctggg

SEQ ID NO: 54988 - DNA, 20 bp, Artificial Sequence
  Description of Artificial Sequence: Synthetic oligonucleotide
  Target: ATXN2; (+) strand; PAM type: NRG; PAM sequence: GAG
tcccagcactctgggaggcc

SEQ ID NO: 54989 - DNA, 20 bp, Artificial Sequence
  Description of Artificial Sequence: Synthetic oligonucleotide
  Target: ATXN2; (+) strand; PAM type: NRG; PAM sequence: AGG
cccagcactctgggaggccg

SEQ ID NO: 54990 - DNA, 20 bp, Artificial Sequence
  Description of Artificial Sequence: Synthetic oligonucleotide
  Target: ATXN2; (+) strand; PAM type: NRG; PAM sequence: CGG
agcactctgggaggccgagg

SEQ ID NO: 54991 - DNA, 20 bp, Artificial Sequence
  Description of Artificial Sequence: Synthetic oligonucleotide
  Target: ATXN2; (+) strand; PAM type: NRG; PAM sequence: TGG
ctctgggaggccgaggcgga

SEQ ID NO: 54992 - DNA, 20 bp, Artificial Sequence
  Description of Artificial Sequence: Synthetic oligonucleotide
  Target: ATXN2; (+) strand; PAM type: NRG; PAM sequence: GAG
ccgaggcggatggatcacct

SEQ ID NO: 54993 - DNA, 20 bp, Artificial Sequence
  Description of Artificial Sequence: Synthetic oligonucleotide
  Target: ATXN2; (+) strand; PAM type: NRG; PAM sequence: AGG
cgaggcggatggatcacctg

SEQ ID NO: 54994 - DNA, 20 bp, Artificial Sequence
  Description of Artificial Sequence: Synthetic oligonucleotide
  Target: ATXN2; (+) strand; PAM type: NRG; PAM sequence: CAG
gcggatggatcacctgaggt

SEQ ID NO: 54995 - DNA, 20 bp, Artificial Sequence
  Description of Artificial Sequence: Synthetic oligonucleotide
  Target: ATXN2; (+) strand; PAM type: NRG; PAM sequence: AGG
cggatggatcacctgaggtc

SEQ ID NO: 54996 - DNA, 20 bp, Artificial Sequence
  Description of Artificial Sequence: Synthetic oligonucleotide
  Target: ATXN2; (+) strand; PAM type: NRG; PAM sequence: GAG
gatggatcacctgaggtcag

SEQ ID NO: 54997 - DNA, 20 bp, Artificial Sequence
  Description of Artificial Sequence: Synthetic oligonucleotide
  Target: ATXN2; (+) strand; PAM type: NRG; PAM sequence: AAG
tcacctgaggtcaggagttc

SEQ ID NO: 54998 - DNA, 20 bp, Artificial Sequence
  Description of Artificial Sequence: Synthetic oligonucleotide
  Target: ATXN2; (+) strand; PAM type: NRG; PAM sequence: CAG
tgaggtcaggagttcaagac

SEQ ID NO: 54999 - DNA, 20 bp, Artificial Sequence
  Description of Artificial Sequence: Synthetic oligonucleotide
  Target: ATXN2; (+) strand; PAM type: NRG; PAM sequence: TGG
tcaggagttcaagaccagcg

SEQ ID NO: 55000 - DNA, 20 bp, Artificial Sequence
  Description of Artificial Sequence: Synthetic oligonucleotide
  Target: ATXN2; (+) strand; PAM type: NRG; PAM sequence: TGG
caagaccagcgtggccaaca

SEQ ID NO: 55001 - DNA, 20 bp, Artificial Sequence
  Description of Artificial Sequence: Synthetic oligonucleotide
  Target: ATXN2; (+) strand; PAM type: NRG; PAM sequence: TAG
tactaaaaatacgaaaaaat

SEQ ID NO: 55002 - DNA, 20 bp, Artificial Sequence
  Description of Artificial Sequence: Synthetic oligonucleotide
  Target: ATXN2; (+) strand; PAM type: NRG; PAM sequence: TGG
aaaaatacgaaaaaattagc

SEQ ID NO: 55003 - DNA, 20 bp, Artificial Sequence
  Description of Artificial Sequence: Synthetic oligonucleotide
  Target: ATXN2; (+) strand; PAM type: NRG; PAM sequence: GGG
aaaatacgaaaaaattagct

SEQ ID NO: 55004 - DNA, 20 bp, Artificial Sequence
  Description of Artificial Sequence: Synthetic oligonucleotide
  Target: ATXN2; (+) strand; PAM type: NRG; PAM sequence: TGG
acgaaaaaattagctgggcg

SEQ ID NO: 55005 - DNA, 20 bp, Artificial Sequence
  Description of Artificial Sequence: Synthetic oligonucleotide
  Target: ATXN2; (+) strand; PAM type: NRG; PAM sequence: TGG
aaaaaattagctgggcgtgg

SEQ ID NO: 55006 - DNA, 20 bp, Artificial Sequence
  Description of Artificial Sequence: Synthetic oligonucleotide
  Target: ATXN2; (+) strand; PAM type: NRG; PAM sequence: TGG
aaattagctgggcgtggtgg

SEQ ID NO: 55007 - DNA, 20 bp, Artificial Sequence
  Description of Artificial Sequence: Synthetic oligonucleotide
  Target: ATXN2; (+) strand; PAM type: NRG; PAM sequence: GGG
aattagctgggcgtggtggt

SEQ ID NO: 55008 - DNA, 20 bp, Artificial Sequence
  Description of Artificial Sequence: Synthetic oligonucleotide
  Target: ATXN2; (+) strand; PAM type: NRG; PAM sequence: CAG
gtggtgggcatctgtgatct

SEQ ID NO: 55009 - DNA, 20 bp, Artificial Sequence
  Description of Artificial Sequence: Synthetic oligonucleotide
  Target: ATXN2; (+) strand; PAM type: NRG; PAM sequence: CAG
catctgtgatctcagctacg

SEQ ID NO: 55010 - DNA, 20 bp, Artificial Sequence
  Description of Artificial Sequence: Synthetic oligonucleotide
  Target: ATXN2; (+) strand; PAM type: NRG; PAM sequence: AGG
atctgtgatctcagctacgc

SEQ ID NO: 55011 - DNA, 20 bp, Artificial Sequence
  Description of Artificial Sequence: Synthetic oligonucleotide
  Target: ATXN2; (+) strand; PAM type: NRG; PAM sequence: GAG
tctcagctacgcaggatgct

SEQ ID NO: 55012 - DNA, 20 bp, Artificial Sequence
  Description of Artificial Sequence: Synthetic oligonucleotide
  Target: ATXN2; (+) strand; PAM type: NRG; PAM sequence: AGG
ctcagctacgcaggatgctg

SEQ ID NO: 55013 - DNA, 20 bp, Artificial Sequence
  Description of Artificial Sequence: Synthetic oligonucleotide
  Target: ATXN2; (+) strand; PAM type: NRG; PAM sequence: CAG
agctacgcaggatgctgagg

SEQ ID NO: 55014 - DNA, 20 bp, Artificial Sequence
  Description of Artificial Sequence: Synthetic oligonucleotide
  Target: ATXN2; (+) strand; PAM type: NRG; PAM sequence: AGG
gctacgcaggatgctgaggc

SEQ ID NO: 55015 - DNA, 20 bp, Artificial Sequence
  Description of Artificial Sequence: Synthetic oligonucleotide
  Target: ATXN2; (+) strand; PAM type: NRG; PAM sequence: GAG
tacgcaggatgctgaggcag

SEQ ID NO: 55016 - DNA, 20 bp, Artificial Sequence
  Description of Artificial Sequence: Synthetic oligonucleotide
  Target: ATXN2; (+) strand; PAM type: NRG; PAM sequence: CAG
gcaggagaatcgcttgaacc

SEQ ID NO: 55017 - DNA, 20 bp, Artificial Sequence
  Description of Artificial Sequence: Synthetic oligonucleotide
  Target: ATXN2; (+) strand; PAM type: NRG; PAM sequence: AGG
caggagaatcgcttgaaccc

SEQ ID NO: 55018 - DNA, 20 bp, Artificial Sequence
  Description of Artificial Sequence: Synthetic oligonucleotide
  Target: ATXN2; (+) strand; PAM type: NRG; PAM sequence: GAG
ggagaatcgcttgaacccag

SEQ ID NO: 55019 - DNA, 20 bp, Artificial Sequence
  Description of Artificial Sequence: Synthetic oligonucleotide
  Target: ATXN2; (+) strand; PAM type: NRG; PAM sequence: AGG
gagaatcgcttgaacccagg

SEQ ID NO: 55020 - DNA, 20 bp, Artificial Sequence
  Description of Artificial Sequence: Synthetic oligonucleotide
  Target: ATXN2; (+) strand; PAM type: NRG; PAM sequence: CGG
aatcgcttgaacccaggagg

SEQ ID NO: 55021 - DNA, 20 bp, Artificial Sequence
  Description of Artificial Sequence: Synthetic oligonucleotide
  Target: ATXN2; (+) strand; PAM type: NRG; PAM sequence: GAG
tcgcttgaacccaggaggcg

SEQ ID NO: 55022 - DNA, 20 bp, Artificial Sequence
  Description of Artificial Sequence: Synthetic oligonucleotide
  Target: ATXN2; (+) strand; PAM type: NRG; PAM sequence: AGG
cgcttgaacccaggaggcgg

SEQ ID NO: 55023 - DNA, 20 bp, Artificial Sequence
  Description of Artificial Sequence: Synthetic oligonucleotide
  Target: ATXN2; (+) strand; PAM type: NRG; PAM sequence: CAG
aacccaggaggcggaggtta

SEQ ID NO: 55024 - DNA, 20 bp, Artificial Sequence
  Description of Artificial Sequence: Synthetic oligonucleotide
  Target: ATXN2; (+) strand; PAM type: NRG; PAM sequence: AAG
ggcggaggttacagtgacca

SEQ ID NO: 55025 - DNA, 20 bp, Artificial Sequence
  Description of Artificial Sequence: Synthetic oligonucleotide
  Target: ATXN2; (+) strand; PAM type: NRG; PAM sequence: GAG
cggaggttacagtgaccaaa

SEQ ID NO: 55026 - DNA, 20 bp, Artificial Sequence
  Description of Artificial Sequence: Synthetic oligonucleotide
  Target: ATXN2; (+) strand; PAM type: NRG; PAM sequence: AGG
ggaggttacagtgaccaaag

SEQ ID NO: 55027 - DNA, 20 bp, Artificial Sequence
  Description of Artificial Sequence: Synthetic oligonucleotide
  Target: ATXN2; (+) strand; PAM type: NRG; PAM sequence: GGG
gaggttacagtgaccaaaga

SEQ ID NO: 55028 - DNA, 20 bp, Artificial Sequence
  Description of Artificial Sequence: Synthetic oligonucleotide
  Target: ATXN2; (+) strand; PAM type: NRG; PAM sequence: CAG
aagagggcaccactgcactc

SEQ ID NO: 55029 - DNA, 20 bp, Artificial Sequence
  Description of Artificial Sequence: Synthetic oligonucleotide
  Target: ATXN2; (+) strand; PAM type: NRG; PAM sequence: TGG
ggcaccactgcactccagcc

SEQ ID NO: 55030 - DNA, 20 bp, Artificial Sequence
  Description of Artificial Sequence: Synthetic oligonucleotide
  Target: ATXN2; (+) strand; PAM type: NRG; PAM sequence: GGG
gcaccactgcactccagcct

SEQ ID NO: 55031 - DNA, 20 bp, Artificial Sequence
  Description of Artificial Sequence: Synthetic oligonucleotide
  Target: ATXN2; (+) strand; PAM type: NRG; PAM sequence: AAG
tgcactccagcctgggcaac

SEQ ID NO: 55032 - DNA, 20 bp, Artificial Sequence
  Description of Artificial Sequence: Synthetic oligonucleotide
  Target: ATXN2; (+) strand; PAM type: NRG; PAM sequence: GAG
cactccagcctgggcaacaa

SEQ ID NO: 55033 - DNA, 20 bp, Artificial Sequence
  Description of Artificial Sequence: Synthetic oligonucleotide
  Target: ATXN2; (+) strand; PAM type: NRG; PAM sequence: TGG
tacaatcacttttctctgat

SEQ ID NO: 55034 - DNA, 20 bp, Artificial Sequence
  Description of Artificial Sequence: Synthetic oligonucleotide
  Target: ATXN2; (+) strand; PAM type: NRG; PAM sequence: AAG
acttttctctgattggaatc

SEQ ID NO: 55035 - DNA, 20 bp, Artificial Sequence
  Description of Artificial Sequence: Synthetic oligonucleotide
  Target: ATXN2; (+) strand; PAM type: NRG; PAM sequence: AGG
cttttctctgattggaatca

SEQ ID NO: 55036 - DNA, 20 bp, Artificial Sequence
  Description of Artificial Sequence: Synthetic oligonucleotide
  Target: ATXN2; (+) strand; PAM type: NRG; PAM sequence: CAG
tctgattggaatcaaggtcc

SEQ ID NO: 55037 - DNA, 20 bp, Artificial Sequence
  Description of Artificial Sequence: Synthetic oligonucleotide
  Target: ATXN2; (+) strand; PAM type: NRG; PAM sequence: AAG
aggtcccagaatacaatctt

SEQ ID NO: 55038 - DNA, 20 bp, Artificial Sequence
  Description of Artificial Sequence: Synthetic oligonucleotide
  Target: ATXN2; (+) strand; PAM type: NRG; PAM sequence: AAG
cagaatacaatcttaagaac

SEQ ID NO: 55039 - DNA, 20 bp, Artificial Sequence
  Description of Artificial Sequence: Synthetic oligonucleotide
  Target: ATXN2; (+) strand; PAM type: NRG; PAM sequence: TGG
acaatcttaagaacaagttt

SEQ ID NO: 55040 - DNA, 20 bp, Artificial Sequence
  Description of Artificial Sequence: Synthetic oligonucleotide
  Target: ATXN2; (+) strand; PAM type: NRG; PAM sequence: CAG
tcttaagaacaagttttggc

SEQ ID NO: 55041 - DNA, 20 bp, Artificial Sequence
  Description of Artificial Sequence: Synthetic oligonucleotide
  Target: ATXN2; (+) strand; PAM type: NRG; PAM sequence: TGG
agaacaagttttggccagtg

SEQ ID NO: 55042 - DNA, 20 bp, Artificial Sequence
  Description of Artificial Sequence: Synthetic oligonucleotide
  Target: ATXN2; (+) strand; PAM type: NRG; PAM sequence: TGG
acaagttttggccagtgtgg

SEQ ID NO: 55043 - DNA, 20 bp, Artificial Sequence
  Description of Artificial Sequence: Synthetic oligonucleotide
  Target: ATXN2; (+) strand; PAM type: NRG; PAM sequence: CAG
gtggctcacgcctgtaatcc

SEQ ID NO: 55044 - DNA, 20 bp, Artificial Sequence
  Description of Artificial Sequence: Synthetic oligonucleotide
  Target: ATXN2; (+) strand; PAM type: NRG; PAM sequence: TGG
cgcctgtaatcccagcactt

SEQ ID NO: 55045 - DNA, 20 bp, Artificial Sequence
  Description of Artificial Sequence: Synthetic oligonucleotide
  Target: ATXN2; (+) strand; PAM type: NRG; PAM sequence: GGG
gcctgtaatcccagcacttt

SEQ ID NO: 55046 - DNA, 20 bp, Artificial Sequence
  Description of Artificial Sequence: Synthetic oligonucleotide
  Target: ATXN2; (+) strand; PAM type: NRG; PAM sequence: GAG
ctgtaatcccagcactttgg

SEQ ID NO: 55047 - DNA, 20 bp, Artificial Sequence
  Description of Artificial Sequence: Synthetic oligonucleotide
  Target: ATXN2; (+) strand; PAM type: NRG; PAM sequence: AGG
tgtaatcccagcactttggg

SEQ ID NO: 55048 - DNA, 20 bp, Artificial Sequence
  Description of Artificial Sequence: Synthetic oligonucleotide
  Target: ATXN2; (+) strand; PAM type: NRG; PAM sequence: CAG
aatcccagcactttgggagg

SEQ ID NO: 55049 - DNA, 20 bp, Artificial Sequence
  Description of Artificial Sequence: Synthetic oligonucleotide
  Target: ATXN2; (+) strand; PAM type: NRG; PAM sequence: TGG
cccagcactttgggaggcag

SEQ ID NO: 55050 - DNA, 20 bp, Artificial Sequence
  Description of Artificial Sequence: Synthetic oligonucleotide
  Target: ATXN2; (+) strand; PAM type: NRG; PAM sequence: CGG
gcactttgggaggcagtggc

SEQ ID NO: 55051 - DNA, 20 bp, Artificial Sequence
  Description of Artificial Sequence: Synthetic oligonucleotide
  Target: ATXN2; (+) strand; PAM type: NRG; PAM sequence: TGG
ctttgggaggcagtggccgg

SEQ ID NO: 55052 - DNA, 20 bp, Artificial Sequence
  Description of Artificial Sequence: Synthetic oligonucleotide
  Target: ATXN2; (+) strand; PAM type: NRG; PAM sequence: GAG
cagtggccggtggatcacct

SEQ ID NO: 55053 - DNA, 20 bp, Artificial Sequence
  Description of Artificial Sequence: Synthetic oligonucleotide
  Target: ATXN2; (+) strand; PAM type: NRG; PAM sequence: AGG
agtggccggtggatcacctg

SEQ ID NO: 55054 - DNA, 20 bp, Artificial Sequence
  Description of Artificial Sequence: Synthetic oligonucleotide
  Target: ATXN2; (+) strand; PAM type: NRG; PAM sequence: CAG
gccggtggatcacctgaggt

SEQ ID NO: 55055 - DNA, 20 bp, Artificial Sequence
  Description of Artificial Sequence: Synthetic oligonucleotide
  Target: ATXN2; (+) strand; PAM type: NRG; PAM sequence: AGG
ccggtggatcacctgaggtc

SEQ ID NO: 55056 - DNA, 20 bp, Artificial Sequence
  Description of Artificial Sequence: Synthetic oligonucleotide
  Target: ATXN2; (+) strand; PAM type: NRG; PAM sequence: GAG
ggtggatcacctgaggtcag

SEQ ID NO: 55057 - DNA, 20 bp, Artificial Sequence
  Description of Artificial Sequence: Synthetic oligonucleotide
  Target: ATXN2; (+) strand; PAM type: NRG; PAM sequence: GAG
tcacctgaggtcaggagttc

SEQ ID NO: 55058 - DNA, 20 bp, Artificial Sequence
  Description of Artificial Sequence: Synthetic oligonucleotide
  Target: ATXN2; (+) strand; PAM type: NRG; PAM sequence: CAG
tgaggtcaggagttcgagac

SEQ ID NO: 55059 - DNA, 20 bp, Artificial Sequence
  Description of Artificial Sequence: Synthetic oligonucleotide
  Target: ATXN2; (+) strand; PAM type: NRG; PAM sequence: TGG
tcaggagttcgagaccagcc

SEQ ID NO: 55060 - DNA, 20 bp, Artificial Sequence
  Description of Artificial Sequence: Synthetic oligonucleotide
  Target: ATXN2; (+) strand; PAM type: NRG; PAM sequence: TAG
agaccagcctggccaatttt

SEQ ID NO: 55061 - DNA, 20 bp, Artificial Sequence
  Description of Artificial Sequence: Synthetic oligonucleotide
  Target: ATXN2; (+) strand; PAM type: NRG; PAM sequence: TAG
ccagcctggccaatttttag

SEQ ID NO: 55062 - DNA, 20 bp, Artificial Sequence
  Description of Artificial Sequence: Synthetic oligonucleotide
  Target: ATXN2; (+) strand; PAM type: NRG; PAM sequence: GAG
agcctggccaatttttagta

SEQ ID NO: 55063 - DNA, 20 bp, Artificial Sequence
  Description of Artificial Sequence: Synthetic oligonucleotide
  Target: ATXN2; (+) strand; PAM type: NRG; PAM sequence: TAG
tctactaaaaatacaaaaat

SEQ ID NO: 55064 - DNA, 20 bp, Artificial Sequence
  Description of Artificial Sequence: Synthetic oligonucleotide
  Target: ATXN2; (+) strand; PAM type: NRG; PAM sequence: TGG
ctaaaaatacaaaaattagc

SEQ ID NO: 55065 - DNA, 20 bp, Artificial Sequence
  Description of Artificial Sequence: Synthetic oligonucleotide
  Target: ATXN2; (+) strand; PAM type: NRG; PAM sequence: GGG
taaaaatacaaaaattagct

SEQ ID NO: 55066 - DNA, 20 bp, Artificial Sequence
  Description of Artificial Sequence: Synthetic oligonucleotide
  Target: ATXN2; (+) strand; PAM type: NRG; PAM sequence: TGG
atacaaaaattagctgggtg

SEQ ID NO: 55067 - DNA, 20 bp, Artificial Sequence
  Description of Artificial Sequence: Synthetic oligonucleotide
  Target: ATXN2; (+) strand; PAM type: NRG; PAM sequence: TAG
ggtgtggtgatgcgcacctg

SEQ ID NO: 55068 - DNA, 20 bp, Artificial Sequence
  Description of Artificial Sequence: Synthetic oligonucleotide
  Target: ATXN2; (+) strand; PAM type: NRG; PAM sequence: CAG
gtgatgcgcacctgtagtcc

SEQ ID NO: 55069 - DNA, 20 bp, Artificial Sequence
  Description of Artificial Sequence: Synthetic oligonucleotide
  Target: ATXN2; (+) strand; PAM type: NRG; PAM sequence: TGG
cacctgtagtcccagctact

SEQ ID NO: 55070 - DNA, 20 bp, Artificial Sequence
  Description of Artificial Sequence: Synthetic oligonucleotide
  Target: ATXN2; (+) strand; PAM type: NRG; PAM sequence: GGG
acctgtagtcccagctactt

SEQ ID NO: 55071 - DNA, 20 bp, Artificial Sequence
  Description of Artificial Sequence: Synthetic oligonucleotide
  Target: ATXN2; (+) strand; PAM type: NRG; PAM sequence: GAG
ctgtagtcccagctacttgg

SEQ ID NO: 55072 - DNA, 20 bp, Artificial Sequence
  Description of Artificial Sequence: Synthetic oligonucleotide
  Target: ATXN2; (+) strand; PAM type: NRG; PAM sequence: AGG
tgtagtcccagctacttggg

SEQ ID NO: 55073 - DNA, 20 bp, Artificial Sequence
  Description of Artificial Sequence: Synthetic oligonucleotide
  Target: ATXN2; (+) strand; PAM type: NRG; PAM sequence: GAG
tcccagctacttgggaggct

SEQ ID NO: 55074 - DNA, 20 bp, Artificial Sequence
  Description of Artificial Sequence: Synthetic oligonucleotide
  Target: ATXN2; (+) strand; PAM type: NRG; PAM sequence: AGG
cccagctacttgggaggctg

SEQ ID NO: 55075 - DNA, 20 bp, Artificial Sequence
  Description of Artificial Sequence: Synthetic oligonucleotide
  Target: ATXN2; (+) strand; PAM type: NRG; PAM sequence: CAG
agctacttgggaggctgagg

SEQ ID NO: 55076 - DNA, 20 bp, Artificial Sequence
  Description of Artificial Sequence: Synthetic oligonucleotide
  Target: ATXN2; (+) strand; PAM type: NRG; PAM sequence: AGG
gctacttgggaggctgaggc

SEQ ID NO: 55077 - DNA, 20 bp, Artificial Sequence
  Description of Artificial Sequence: Synthetic oligonucleotide
  Target: ATXN2; (+) strand; PAM type: NRG; PAM sequence: GAG
tacttgggaggctgaggcag

SEQ ID NO: 55078 - DNA, 20 bp, Artificial Sequence
  Description of Artificial Sequence: Synthetic oligonucleotide
  Target: ATXN2; (+) strand; PAM type: NRG; PAM sequence: TGG
gggaggctgaggcaggagaa

SEQ ID NO: 55079 - DNA, 20 bp, Artificial Sequence
  Description of Artificial Sequence: Synthetic oligonucleotide
  Target: ATXN2; (+) strand; PAM type: NRG; PAM sequence: TGG
gcaggagaatggtgtgaacc

SEQ ID NO: 55080 - DNA, 20 bp, Artificial Sequence
  Description of Artificial Sequence: Synthetic oligonucleotide
  Target: ATXN2; (+) strand; PAM type: NRG; PAM sequence: GGG
caggagaatggtgtgaacct

SEQ ID NO: 55081 - DNA, 20 bp, Artificial Sequence
  Description of Artificial Sequence: Synthetic oligonucleotide
  Target: ATXN2; (+) strand; PAM type: NRG; PAM sequence: GAG
ggagaatggtgtgaacctgg

SEQ ID NO: 55082 - DNA, 20 bp, Artificial Sequence
  Description of Artificial Sequence: Synthetic oligonucleotide
  Target: ATXN2; (+) strand; PAM type: NRG; PAM sequence: AGG
gagaatggtgtgaacctggg

SEQ ID NO: 55083 - DNA, 20 bp, Artificial Sequence
  Description of Artificial Sequence: Synthetic oligonucleotide
  Target: ATXN2; (+) strand; PAM type: NRG; PAM sequence: CGG
aatggtgtgaacctgggagg

SEQ ID NO: 55084 - DNA, 20 bp, Artificial Sequence
  Description of Artificial Sequence: Synthetic oligonucleotide
  Target: ATXN2; (+) strand; PAM type: NRG; PAM sequence: CAG
aacctgggaggcggtgcttg

SEQ ID NO: 55085 - DNA, 20 bp, Artificial Sequence
  Description of Artificial Sequence: Synthetic oligonucleotide
  Target: ATXN2; (+) strand; PAM type: NRG; PAM sequence: GAG
tgggaggcggtgcttgcagt

SEQ ID NO: 55086 - DNA, 20 bp, Artificial Sequence
  Description of Artificial Sequence: Synthetic oligonucleotide
  Target: ATXN2; (+) strand; PAM type: NRG; PAM sequence: CGG
gaggcggtgcttgcagtgag

SEQ ID NO: 55087 - DNA, 20 bp, Artificial Sequence
  Description of Artificial Sequence: Synthetic oligonucleotide
  Target: ATXN2; (+) strand; PAM type: NRG; PAM sequence: GAG
ggcggtgcttgcagtgagcg

SEQ ID NO: 55088 - DNA, 20 bp, Artificial Sequence
  Description of Artificial Sequence: Synthetic oligonucleotide
  Target: ATXN2; (+) strand; PAM type: NRG; PAM sequence: CAG
gagatcacaccactgcactc

SEQ ID NO: 55089 - DNA, 20 bp, Artificial Sequence
  Description of Artificial Sequence: Synthetic oligonucleotide
  Target: ATXN2; (+) strand; PAM type: NRG; PAM sequence: TGG
cacaccactgcactccagcc

SEQ ID NO: 55090 - DNA, 20 bp, Artificial Sequence
  Description of Artificial Sequence: Synthetic oligonucleotide
  Target: ATXN2; (+) strand; PAM type: NRG; PAM sequence: GGG
acaccactgcactccagcct

SEQ ID NO: 55091 - DNA, 20 bp, Artificial Sequence
  Description of Artificial Sequence: Synthetic oligonucleotide
  Target: ATXN2; (+) strand; PAM type: NRG; PAM sequence: CAG
ctgcactccagcctgggcga

SEQ ID NO: 55092 - DNA, 20 bp, Artificial Sequence
  Description of Artificial Sequence: Synthetic oligonucleotide
  Target: ATXN2; (+) strand; PAM type: NRG; PAM sequence: GAG
gcactccagcctgggcgaca

SEQ ID NO: 55093 - DNA, 20 bp, Artificial Sequence
  Description of Artificial Sequence: Synthetic oligonucleotide
  Target: ATXN2; (+) strand; PAM type: NRG; PAM sequence: GAG
tccagcctgggcgacagagc

SEQ ID NO: 55094 - DNA, 20 bp, Artificial Sequence
  Description of Artificial Sequence: Synthetic oligonucleotide
  Target: ATXN2; (+) strand; PAM type: NRG; PAM sequence: TAG
actccgtctcaaaaaaaaaa

SEQ ID NO: 55095 - DNA, 20 bp, Artificial Sequence
  Description of Artificial Sequence: Synthetic oligonucleotide
  Target: ATXN2; (+) strand; PAM type: NRG; PAM sequence: AAG
cgtctcaaaaaaaaaatagt

SEQ ID NO: 55096 - DNA, 20 bp, Artificial Sequence
  Description of Artificial Sequence: Synthetic oligonucleotide
  Target: ATXN2; (+) strand; PAM type: NRG; PAM sequence: CAG
aaaaaaaaaatagtaagttt

SEQ ID NO: 55097 - DNA, 20 bp, Artificial Sequence
  Description of Artificial Sequence: Synthetic oligonucleotide
  Target: ATXN2; (+) strand; PAM type: NRG; PAM sequence: AGG
aaaaaaaaatagtaagtttc

SEQ ID NO: 55098 - DNA, 20 bp, Artificial Sequence
  Description of Artificial Sequence: Synthetic oligonucleotide
  Target: ATXN2; (+) strand; PAM type: NRG; PAM sequence: TGG
aatagtaagtttcaggtcga

SEQ ID NO: 55099 - DNA, 20 bp, Artificial Sequence
  Description of Artificial Sequence: Synthetic oligonucleotide
  Target: ATXN2; (+) strand; PAM type: NRG; PAM sequence: AAG
agtaagtttcaggtcgatgg

SEQ ID NO: 55100 - DNA, 20 bp, Artificial Sequence
  Description of Artificial Sequence: Synthetic oligonucleotide
  Target: ATXN2; (+) strand; PAM type: NRG; PAM sequence: AAG
caggtcgatggaagttgaat

SEQ ID NO: 55101 - DNA, 20 bp, Artificial Sequence
  Description of Artificial Sequence: Synthetic oligonucleotide
  Target: ATXN2; (+) strand; PAM type: NRG; PAM sequence: AAG
gtcgatggaagttgaataag

SEQ ID NO: 55102 - DNA, 20 bp, Artificial Sequence
  Description of Artificial Sequence: Synthetic oligonucleotide
  Target: ATXN2; (+) strand; PAM type: NRG; PAM sequence: AGG
tcgatggaagttgaataaga

SEQ ID NO: 55103 - DNA, 20 bp, Artificial Sequence
  Description of Artificial Sequence: Synthetic oligonucleotide
  Target: ATXN2; (+) strand; PAM type: NRG; PAM sequence: TAG
ggaagttgaataagaaggcc

SEQ ID NO: 55104 - DNA, 20 bp, Artificial Sequence
  Description of Artificial Sequence: Synthetic oligonucleotide
  Target: ATXN2; (+) strand; PAM type: NRG; PAM sequence: AGG
gaagttgaataagaaggcct

SEQ ID NO: 55105 - DNA, 20 bp, Artificial Sequence
  Description of Artificial Sequence: Synthetic oligonucleotide
  Target: ATXN2; (+) strand; PAM type: NRG; PAM sequence: TGG
ttgaataagaaggcctaggc

SEQ ID NO: 55106 - DNA, 20 bp, Artificial Sequence
  Description of Artificial Sequence: Synthetic oligonucleotide
  Target: ATXN2; (+) strand; PAM type: NRG; PAM sequence: CAG
aagaaggcctaggctggata

SEQ ID NO: 55107 - DNA, 20 bp, Artificial Sequence
  Description of Artificial Sequence: Synthetic oligonucleotide
  Target: ATXN2; (+) strand; PAM type: NRG; PAM sequence: TGG
aaggcctaggctggatacag

SEQ ID NO: 55108 - DNA, 20 bp, Artificial Sequence
  Description of Artificial Sequence: Synthetic oligonucleotide
  Target: ATXN2; (+) strand; PAM type: NRG; PAM sequence: CAG
gtggcctacacctataatcc

SEQ ID NO: 55109 - DNA, 20 bp, Artificial Sequence
  Description of Artificial Sequence: Synthetic oligonucleotide
  Target: ATXN2; (+) strand; PAM type: NRG; PAM sequence: TGG
cacctataatcccagcactt

SEQ ID NO: 55110 - DNA, 20 bp, Artificial Sequence
  Description of Artificial Sequence: Synthetic oligonucleotide
  Target: ATXN2; (+) strand; PAM type: NRG; PAM sequence: AAG
ctataatcccagcactttgg

SEQ ID NO: 55111 - DNA, 20 bp, Artificial Sequence
  Description of Artificial Sequence: Synthetic oligonucleotide
  Target: ATXN2; (+) strand; PAM type: NRG; PAM sequence: AGG
tataatcccagcactttgga

SEQ ID NO: 55112 - DNA, 20 bp, Artificial Sequence
  Description of Artificial Sequence: Synthetic oligonucleotide
  Target: ATXN2; (+) strand; PAM type: NRG; PAM sequence: AAG
tcccagcactttggaaggcc

SEQ ID NO: 55113 - DNA, 20 bp, Artificial Sequence
  Description of Artificial Sequence: Synthetic oligonucleotide
  Target: ATXN2; (+) strand; PAM type: NRG; PAM sequence: AGG
cccagcactttggaaggcca

SEQ ID NO: 55114 - DNA, 20 bp, Artificial Sequence
  Description of Artificial Sequence: Synthetic oligonucleotide
  Target: ATXN2; (+) strand; PAM type: NRG; PAM sequence: CAG
agcactttggaaggccaagg

SEQ ID NO: 55115 - DNA, 20 bp, Artificial Sequence
  Description of Artificial Sequence: Synthetic oligonucleotide
  Target: ATXN2; (+) strand; PAM type: NRG; PAM sequence: AGG
gcactttggaaggccaaggc

SEQ ID NO: 55116 - DNA, 20 bp, Artificial Sequence
  Description of Artificial Sequence: Synthetic oligonucleotide
  Target: ATXN2; (+) strand; PAM type: NRG; PAM sequence: CAG
ctttggaaggccaaggcagg

SEQ ID NO: 55117 - DNA, 20 bp, Artificial Sequence
  Description of Artificial Sequence: Synthetic oligonucleotide
  Target: ATXN2; (+) strand; PAM type: NRG; PAM sequence: AAG
gcaggcagatcctttgaacc

SEQ ID NO: 55118 - DNA, 20 bp, Artificial Sequence
  Description of Artificial Sequence: Synthetic oligonucleotide
  Target: ATXN2; (+) strand; PAM type: NRG; PAM sequence: AGG
caggcagatcctttgaacca

SEQ ID NO: 55119 - DNA, 20 bp, Artificial Sequence
  Description of Artificial Sequence: Synthetic oligonucleotide
  Target: ATXN2; (+) strand; PAM type: NRG; PAM sequence: GAG
ggcagatcctttgaaccaag

SEQ ID NO: 55120 - DNA, 20 bp, Artificial Sequence
  Description of Artificial Sequence: Synthetic oligonucleotide
  Target: ATXN2; (+) strand; PAM type: NRG; PAM sequence: TAG
agatcctttgaaccaaggag

SEQ ID NO: 55121 - DNA, 20 bp, Artificial Sequence
  Description of Artificial Sequence: Synthetic oligonucleotide
  Target: ATXN2; (+) strand; PAM type: NRG; PAM sequence: AGG
gatcctttgaaccaaggagt

SEQ ID NO: 55122 - DNA, 20 bp, Artificial Sequence
  Description of Artificial Sequence: Synthetic oligonucleotide
  Target: ATXN2; (+) strand; PAM type: NRG; PAM sequence: GAG
tcctttgaaccaaggagtag

SEQ ID NO: 55123 - DNA, 20 bp, Artificial Sequence
  Description of Artificial Sequence: Synthetic oligonucleotide
  Target: ATXN2; (+) strand; PAM type: NRG; PAM sequence: CAG
tgaaccaaggagtaggagac

SEQ ID NO: 55124 - DNA, 20 bp, Artificial Sequence
  Description of Artificial Sequence: Synthetic oligonucleotide
  Target: ATXN2; (+) strand; PAM type: NRG; PAM sequence: TGG
caaggagtaggagaccagcc

SEQ ID NO: 55125 - DNA, 20 bp, Artificial Sequence
  Description of Artificial Sequence: Synthetic oligonucleotide
  Target: ATXN2; (+) strand; PAM type: NRG; PAM sequence: GGG
aaggagtaggagaccagcct

SEQ ID NO: 55126 - DNA, 20 bp, Artificial Sequence
  Description of Artificial Sequence: Synthetic oligonucleotide
  Target: ATXN2; (+) strand; PAM type: NRG; PAM sequence: TAG
ggagaccagcctgggcaaca

SEQ ID NO: 55127 - DNA, 20 bp, Artificial Sequence
  Description of Artificial Sequence: Synthetic oligonucleotide
  Target: ATXN2; (+) strand; PAM type: NRG; PAM sequence: GAG
accagcctgggcaacatagt

SEQ ID NO: 55128 - DNA, 20 bp, Artificial Sequence
  Description of Artificial Sequence: Synthetic oligonucleotide
  Target: ATXN2; (+) strand; PAM type: NRG; PAM sequence: AAG
atttttcaaaattaaaaaaa

SEQ ID NO: 55129 - DNA, 20 bp, Artificial Sequence
  Description of Artificial Sequence: Synthetic oligonucleotide
  Target: ATXN2; (+) strand; PAM type: NRG; PAM sequence: AAG
tttcaaaattaaaaaaaaag

SEQ ID NO: 55130 - DNA, 20 bp, Artificial Sequence
  Description of Artificial Sequence: Synthetic oligonucleotide
  Target: ATXN2; (+) strand; PAM type: NRG; PAM sequence: AGG
ttcaaaattaaaaaaaaaga

SEQ ID NO: 55131 - DNA, 20 bp, Artificial Sequence
  Description of Artificial Sequence: Synthetic oligonucleotide
  Target: ATXN2; (+) strand; PAM type: NRG; PAM sequence: AAG
ttaaaaaaaaagaaggcctg

SEQ ID NO: 55132 - DNA, 20 bp, Artificial Sequence
  Description of Artificial Sequence: Synthetic oligonucleotide
  Target: ATXN2; (+) strand; PAM type: NRG; PAM sequence: TAG
aagaaggcctgaagctgaca

SEQ ID NO: 55133 - DNA, 20 bp, Artificial Sequence
  Description of Artificial Sequence: Synthetic oligonucleotide
  Target: ATXN2; (+) strand; PAM type: NRG; PAM sequence: GAG
ggcctgaagctgacatagct

SEQ ID NO: 55134 - DNA, 20 bp, Artificial Sequence
  Description of Artificial Sequence: Synthetic oligonucleotide
  Target: ATXN2; (+) strand; PAM type: NRG; PAM sequence: AAG
tgaagctgacatagctgaga

SEQ ID NO: 55135 - DNA, 20 bp, Artificial Sequence
  Description of Artificial Sequence: Synthetic oligonucleotide
  Target: ATXN2; (+) strand; PAM type: NRG; PAM sequence: TAG
accattgaataaaaacttaa

SEQ ID NO: 55136 - DNA, 20 bp, Artificial Sequence
  Description of Artificial Sequence: Synthetic oligonucleotide
  Target: ATXN2; (+) strand; PAM type: NRG; PAM sequence: AAG
aaaaacttaatagttttatc

SEQ ID NO: 55137 - DNA, 20 bp, Artificial Sequence
  Description of Artificial Sequence: Synthetic oligonucleotide
  Target: ATXN2; (+) strand; PAM type: NRG; PAM sequence: CAG
gtgtacaatttaatgattct

SEQ ID NO: 55138 - DNA, 20 bp, Artificial Sequence
  Description of Artificial Sequence: Synthetic oligonucleotide
  Target: ATXN2; (+) strand; PAM type: NRG; PAM sequence: CAG
tgattctcagtaaatttaca

SEQ ID NO: 55139 - DNA, 20 bp, Artificial Sequence
  Description of Artificial Sequence: Synthetic oligonucleotide
  Target: ATXN2; (+) strand; PAM type: NRG; PAM sequence: CAG
acaaccattgccactaattt

SEQ ID NO: 55140 - DNA, 20 bp, Artificial Sequence
  Description of Artificial Sequence: Synthetic oligonucleotide
  Target: ATXN2; (+) strand; PAM type: NRG; PAM sequence: AAG
aacatttccattaccccaaa

SEQ ID NO: 55141 - DNA, 20 bp, Artificial Sequence
  Description of Artificial Sequence: Synthetic oligonucleotide
  Target: ATXN2; (+) strand; PAM type: NRG; PAM sequence: TGG
cccaaaaagatccttcacga

SEQ ID NO: 55142 - DNA, 20 bp, Artificial Sequence
  Description of Artificial Sequence: Synthetic oligonucleotide
  Target: ATXN2; (+) strand; PAM type: NRG; PAM sequence: TGG
aaaaagatccttcacgatgg

SEQ ID NO: 55143 - DNA, 20 bp, Artificial Sequence
  Description of Artificial Sequence: Synthetic oligonucleotide
  Target: ATXN2; (+) strand; PAM type: NRG; PAM sequence: GGG
aaaagatccttcacgatggt

SEQ ID NO: 55144 - DNA, 20 bp, Artificial Sequence
  Description of Artificial Sequence: Synthetic oligonucleotide
  Target: ATXN2; (+) strand; PAM type: NRG; PAM sequence: CAG
agatccttcacgatggtggg

SEQ ID NO: 55145 - DNA, 20 bp, Artificial Sequence
  Description of Artificial Sequence: Synthetic oligonucleotide
  Target: ATXN2; (+) strand; PAM type: NRG; PAM sequence: TGG
cttcacgatggtgggcagtt

SEQ ID NO: 55146 - DNA, 20 bp, Artificial Sequence
  Description of Artificial Sequence: Synthetic oligonucleotide
  Target: ATXN2; (+) strand; PAM type: NRG; PAM sequence: TAG
ggcagtttggttcccatcct

SEQ ID NO: 55147 - DNA, 20 bp, Artificial Sequence
  Description of Artificial Sequence: Synthetic oligonucleotide
  Target: ATXN2; (+) strand; PAM type: NRG; PAM sequence: CAG
ttggttcccatccttagccc

SEQ ID NO: 55148 - DNA, 20 bp, Artificial Sequence
  Description of Artificial Sequence: Synthetic oligonucleotide
  Target: ATXN2; (+) strand; PAM type: NRG; PAM sequence: AGG
tggttcccatccttagcccc

SEQ ID NO: 55149 - DNA, 20 bp, Artificial Sequence
  Description of Artificial Sequence: Synthetic oligonucleotide
  Target: ATXN2; (+) strand; PAM type: NRG; PAM sequence: TGG
tcatctacattttctctcta

SEQ ID NO: 55150 - DNA, 20 bp, Artificial Sequence
  Description of Artificial Sequence: Synthetic oligonucleotide
  Target: ATXN2; (+) strand; PAM type: NRG; PAM sequence: CAG
tttctctctatggatttgtc

SEQ ID NO: 55151 - DNA, 20 bp, Artificial Sequence
  Description of Artificial Sequence: Synthetic oligonucleotide
  Target: ATXN2; (+) strand; PAM type: NRG; PAM sequence: AAG
tttgtccagatttttcacat

SEQ ID NO: 55152 - DNA, 20 bp, Artificial Sequence
  Description of Artificial Sequence: Synthetic oligonucleotide
  Target: ATXN2; (+) strand; PAM type: NRG; PAM sequence: TAG
gtccagatttttcacataag

SEQ ID NO: 55153 - DNA, 20 bp, Artificial Sequence
  Description of Artificial Sequence: Synthetic oligonucleotide
  Target: ATXN2; (+) strand; PAM type: NRG; PAM sequence: CAG
ttcacataagtagaatctta

SEQ ID NO: 55154 - DNA, 20 bp, Artificial Sequence
  Description of Artificial Sequence: Synthetic oligonucleotide
  Target: ATXN2; (+) strand; PAM type: NRG; PAM sequence: CAG
aagtagaatcttacagcatg

SEQ ID NO: 55155 - DNA, 20 bp, Artificial Sequence
  Description of Artificial Sequence: Synthetic oligonucleotide
  Target: ATXN2; (+) strand; PAM type: NRG; PAM sequence: GAG
tcatttgtcataatgttttt

SEQ ID NO: 55156 - DNA, 20 bp, Artificial Sequence
  Description of Artificial Sequence: Synthetic oligonucleotide
  Target: ATXN2; (+) strand; PAM type: NRG; PAM sequence: AGG
catttgtcataatgtttttg

SEQ ID NO: 55157 - DNA, 20 bp, Artificial Sequence
  Description of Artificial Sequence: Synthetic oligonucleotide
  Target: ATXN2; (+) strand; PAM type: NRG; PAM sequence: AAG
aatgtttttgaggtttatct

SEQ ID NO: 55158 - DNA, 20 bp, Artificial Sequence
  Description of Artificial Sequence: Synthetic oligonucleotide
  Target: ATXN2; (+) strand; PAM type: NRG; PAM sequence: AGG
atgtttttgaggtttatcta

SEQ ID NO: 55159 - DNA, 20 bp, Artificial Sequence
  Description of Artificial Sequence: Synthetic oligonucleotide
  Target: ATXN2; (+) strand; PAM type: NRG; PAM sequence: TGG
ttgaggtttatctaaggttg

SEQ ID NO: 55160 - DNA, 20 bp, Artificial Sequence
  Description of Artificial Sequence: Synthetic oligonucleotide
  Target: ATXN2; (+) strand; PAM type: NRG; PAM sequence: TAG
ttatctaaggttgtggcatg

SEQ ID NO: 55161 - DNA, 20 bp, Artificial Sequence
  Description of Artificial Sequence: Synthetic oligonucleotide
  Target: ATXN2; (+) strand; PAM type: NRG; PAM sequence: CAG
tctaaggttgtggcatgtag

SEQ ID NO: 55162 - DNA, 20 bp, Artificial Sequence
  Description of Artificial Sequence: Synthetic oligonucleotide
  Target: ATXN2; (+) strand; PAM type: NRG; PAM sequence: TGG
gctatgtcatattccatgta

SEQ ID NO: 55163 - DNA, 20 bp, Artificial Sequence
  Description of Artificial Sequence: Synthetic oligonucleotide
  Target: ATXN2; (+) strand; PAM type: NRG; PAM sequence: TGG
ttgtgtctactttccaattg

SEQ ID NO: 55164 - DNA, 20 bp, Artificial Sequence
  Description of Artificial Sequence: Synthetic oligonucleotide
  Target: ATXN2; (+) strand; PAM type: NRG; PAM sequence: TAG
actttccaattgtggatgtt

SEQ ID NO: 55165 - DNA, 20 bp, Artificial Sequence
  Description of Artificial Sequence: Synthetic oligonucleotide
  Target: ATXN2; (+) strand; PAM type: NRG; PAM sequence: GAG
ttagattgtgtcaacttttt

SEQ ID NO: 55166 - DNA, 20 bp, Artificial Sequence
  Description of Artificial Sequence: Synthetic oligonucleotide
  Target: ATXN2; (+) strand; PAM type: NRG; PAM sequence: TGG
gagtattatgaaaatgctgc

SEQ ID NO: 55167 - DNA, 20 bp, Artificial Sequence
  Description of Artificial Sequence: Synthetic oligonucleotide
  Target: ATXN2; (+) strand; PAM type: NRG; PAM sequence: GGG
agtattatgaaaatgctgct

SEQ ID NO: 55168 - DNA, 20 bp, Artificial Sequence
  Description of Artificial Sequence: Synthetic oligonucleotide
  Target: ATXN2; (+) strand; PAM type: NRG; PAM sequence: GGG
gtattatgaaaatgctgctg

SEQ ID NO: 55169 - DNA, 20 bp, Artificial Sequence
  Description of Artificial Sequence: Synthetic oligonucleotide
  Target: ATXN2; (+) strand; PAM type: NRG; PAM sequence: GAG
atgaaaatgctgctggggct

SEQ ID NO: 55170 - DNA, 20 bp, Artificial Sequence
  Description of Artificial Sequence: Synthetic oligonucleotide
  Target: ATXN2; (+) strand; PAM type: NRG; PAM sequence: TGG
aatgctgctggggctgagat

SEQ ID NO: 55171 - DNA, 20 bp, Artificial Sequence
  Description of Artificial Sequence: Synthetic oligonucleotide
  Target: ATXN2; (+) strand; PAM type: NRG; PAM sequence: TGG
gctgctggggctgagattgg

SEQ ID NO: 55172 - DNA, 20 bp, Artificial Sequence
  Description of Artificial Sequence: Synthetic oligonucleotide
  Target: ATXN2; (+) strand; PAM type: NRG; PAM sequence: TAG
ctcctgtaatcccaacactt

SEQ ID NO: 55173 - DNA, 20 bp, Artificial Sequence
  Description of Artificial Sequence: Synthetic oligonucleotide
  Target: ATXN2; (+) strand; PAM type: NRG; PAM sequence: AGG
tcctgtaatcccaacacttt

SEQ ID NO: 55174 - DNA, 20 bp, Artificial Sequence
  Description of Artificial Sequence: Synthetic oligonucleotide
  Target: ATXN2; (+) strand; PAM type: NRG; PAM sequence: GAG
tcccaacactttaggatacc

SEQ ID NO: 55175 - DNA, 20 bp, Artificial Sequence
  Description of Artificial Sequence: Synthetic oligonucleotide
  Target: ATXN2; (+) strand; PAM type: NRG; PAM sequence: TGG
aacactttaggataccgaga

SEQ ID NO: 55176 - DNA, 20 bp, Artificial Sequence
  Description of Artificial Sequence: Synthetic oligonucleotide
  Target: ATXN2; (+) strand; PAM type: NRG; PAM sequence: GGG
acactttaggataccgagat

SEQ ID NO: 55177 - DNA, 20 bp, Artificial Sequence
  Description of Artificial Sequence: Synthetic oligonucleotide
  Target: ATXN2; (+) strand; PAM type: NRG; PAM sequence: GAG
actttaggataccgagatgg

SEQ ID NO: 55178 - DNA, 20 bp, Artificial Sequence
  Description of Artificial Sequence: Synthetic oligonucleotide
  Target: ATXN2; (+) strand; PAM type: NRG; PAM sequence: AGG
ctttaggataccgagatggg

SEQ ID NO: 55179 - DNA, 20 bp, Artificial Sequence
  Description of Artificial Sequence: Synthetic oligonucleotide
  Target: ATXN2; (+) strand; PAM type: NRG; PAM sequence: CGG
ggaggatcacttgaataccc

SEQ ID NO: 55180 - DNA, 20 bp, Artificial Sequence
  Description of Artificial Sequence: Synthetic oligonucleotide
  Target: ATXN2; (+) strand; PAM type: NRG; PAM sequence: GAG
aggatcacttgaataccccg

SEQ ID NO: 55181 - DNA, 20 bp, Artificial Sequence
  Description of Artificial Sequence: Synthetic oligonucleotide
  Target: ATXN2; (+) strand; PAM type: NRG; PAM sequence: CAG
aataccccggagtttgaaac

SEQ ID NO: 55182 - DNA, 20 bp, Artificial Sequence
  Description of Artificial Sequence: Synthetic oligonucleotide
  Target: ATXN2; (+) strand; PAM type: NRG; PAM sequence: TGG
cccggagtttgaaaccagcc

SEQ ID NO: 55183 - DNA, 20 bp, Artificial Sequence
  Description of Artificial Sequence: Synthetic oligonucleotide
  Target: ATXN2; (+) strand; PAM type: NRG; PAM sequence: GGG
ccggagtttgaaaccagcct

SEQ ID NO: 55184 - DNA, 20 bp, Artificial Sequence
  Description of Artificial Sequence: Synthetic oligonucleotide
  Target: ATXN2; (+) strand; PAM type: NRG; PAM sequence: TAG
tgaaaccagcctgggcaaca

SEQ ID NO: 55185 - DNA, 20 bp, Artificial Sequence
  Description of Artificial Sequence: Synthetic oligonucleotide
  Target: ATXN2; (+) strand; PAM type: NRG; PAM sequence: GAG
aaaccagcctgggcaacata

SEQ ID NO: 55186 - DNA, 20 bp, Artificial Sequence
  Description of Artificial Sequence: Synthetic oligonucleotide
  Target: ATXN2; (+) strand; PAM type: NRG; PAM sequence: GAG
accagcctgggcaacataga

SEQ ID NO: 55187 - DNA, 20 bp, Artificial Sequence
  Description of Artificial Sequence: Synthetic oligonucleotide
  Target: ATXN2; (+) strand; PAM type: NRG; PAM sequence: TAG
aaactttaaaaataaaaaat

SEQ ID NO: 55188 - DNA, 20 bp, Artificial Sequence
  Description of Artificial Sequence: Synthetic oligonucleotide
  Target: ATXN2; (+) strand; PAM type: NRG; PAM sequence: TGG
tttaaaaataaaaaattagc

SEQ ID NO: 55189 - DNA, 20 bp, Artificial Sequence
  Description of Artificial Sequence: Synthetic oligonucleotide
  Target: ATXN2; (+) strand; PAM type: NRG; PAM sequence: TGG
aaaataaaaaattagctggt

SEQ ID NO: 55190 - DNA, 20 bp, Artificial Sequence
  Description of Artificial Sequence: Synthetic oligonucleotide
  Target: ATXN2; (+) strand; PAM type: NRG; PAM sequence: TGG
taaaaaattagctggttggc

SEQ ID NO: 55191 - DNA, 20 bp, Artificial Sequence
  Description of Artificial Sequence: Synthetic oligonucleotide
  Target: ATXN2; (+) strand; PAM type: NRG; PAM sequence: GGG
aaaaaattagctggttggct

SEQ ID NO: 55192 - DNA, 20 bp, Artificial Sequence
  Description of Artificial Sequence: Synthetic oligonucleotide
  Target: ATXN2; (+) strand; PAM type: NRG; PAM sequence: TGG
attagctggttggctgggcg

SEQ ID NO: 55193 - DNA, 20 bp, Artificial Sequence
  Description of Artificial Sequence: Synthetic oligonucleotide
  Target: ATXN2; (+) strand; PAM type: NRG; PAM sequence: TGG
agctggttggctgggcgtgg

SEQ ID NO: 55194 - DNA, 20 bp, Artificial Sequence
  Description of Artificial Sequence: Synthetic oligonucleotide
  Target: ATXN2; (+) strand; PAM type: NRG; PAM sequence: CAG
gtggctcatgcctataatcc

SEQ ID NO: 55195 - DNA, 20 bp, Artificial Sequence
  Description of Artificial Sequence: Synthetic oligonucleotide
  Target: ATXN2; (+) strand; PAM type: NRG; PAM sequence: TGG
tgcctataatcccagcactt

SEQ ID NO: 55196 - DNA, 20 bp, Artificial Sequence
  Description of Artificial Sequence: Synthetic oligonucleotide
  Target: ATXN2; (+) strand; PAM type: NRG; PAM sequence: GGG
gcctataatcccagcacttt

SEQ ID NO: 55197 - DNA, 20 bp, Artificial Sequence
  Description of Artificial Sequence: Synthetic oligonucleotide
  Target: ATXN2; (+) strand; PAM type: NRG; PAM sequence: GAG
ctataatcccagcactttgg

SEQ ID NO: 55198 - DNA, 20 bp, Artificial Sequence
  Description of Artificial Sequence: Synthetic oligonucleotide
  Target: ATXN2; (+) strand; PAM type: NRG; PAM sequence: AGG
tataatcccagcactttggg

SEQ ID NO: 55199 - DNA, 20 bp, Artificial Sequence
  Description of Artificial Sequence: Synthetic oligonucleotide
  Target: ATXN2; (+) strand; PAM type: NRG; PAM sequence: GAG
tcccagcactttgggaggcc

SEQ ID NO: 55200 - DNA, 20 bp, Artificial Sequence
  Description of Artificial Sequence: Synthetic oligonucleotide
  Target: ATXN2; (+) strand; PAM type: NRG; PAM sequence: AGG
cccagcactttgggaggccg

SEQ ID NO: 55201 - DNA, 20 bp, Artificial Sequence
  Description of Artificial Sequence: Synthetic oligonucleotide
  Target: ATXN2; (+) strand; PAM type: NRG; PAM sequence: TGG
agcactttgggaggccgagg

SEQ ID NO: 55202 - DNA, 20 bp, Artificial Sequence
  Description of Artificial Sequence: Synthetic oligonucleotide
  Target: ATXN2; (+) strand; PAM type: NRG; PAM sequence: GGG
gcactttgggaggccgaggt

SEQ ID NO: 55203 - DNA, 20 bp, Artificial Sequence
  Description of Artificial Sequence: Synthetic oligonucleotide
  Target: ATXN2; (+) strand; PAM type: NRG; PAM sequence: TGG
ctttgggaggccgaggtggg

SEQ ID NO: 55204 - DNA, 20 bp, Artificial Sequence
  Description of Artificial Sequence: Synthetic oligonucleotide
  Target: ATXN2; (+) strand; PAM type: NRG; PAM sequence: GAG
ccgaggtgggtggatcacct

SEQ ID NO: 55205 - DNA, 20 bp, Artificial Sequence
  Description of Artificial Sequence: Synthetic oligonucleotide
  Target: ATXN2; (+) strand; PAM type: NRG; PAM sequence: CAG
gtgggtggatcacctgagat

SEQ ID NO: 55206 - DNA, 20 bp, Artificial Sequence
  Description of Artificial Sequence: Synthetic oligonucleotide
  Target: ATXN2; (+) strand; PAM type: NRG; PAM sequence: AGG
tgggtggatcacctgagatc

SEQ ID NO: 55207 - DNA, 20 bp, Artificial Sequence
  Description of Artificial Sequence: Synthetic oligonucleotide
  Target: ATXN2; (+) strand; PAM type: NRG; PAM sequence: GAG
ggtggatcacctgagatcag

SEQ ID NO: 55208 - DNA, 20 bp, Artificial Sequence
  Description of Artificial Sequence: Synthetic oligonucleotide
  Target: ATXN2; (+) strand; PAM type: NRG; PAM sequence: GAG
tcacctgagatcaggagttc

SEQ ID NO: 55209 - DNA, 20 bp, Artificial Sequence
  Description of Artificial Sequence: Synthetic oligonucleotide
  Target: ATXN2; (+) strand; PAM type: NRG; PAM sequence: CAG
tgagatcaggagttcgagac

SEQ ID NO: 55210 - DNA, 20 bp, Artificial Sequence
  Description of Artificial Sequence: Synthetic oligonucleotide
  Target: ATXN2; (+) strand; PAM type: NRG; PAM sequence: TGG
tcaggagttcgagaccagcc

SEQ ID NO: 55211 - DNA, 20 bp, Artificial Sequence
  Description of Artificial Sequence: Synthetic oligonucleotide
  Target: ATXN2; (+) strand; PAM type: NRG; PAM sequence: TGG
cgagaccagcctggcctaca

SEQ ID NO: 55212 - DNA, 20 bp, Artificial Sequence
  Description of Artificial Sequence: Synthetic oligonucleotide
  Target: ATXN2; (+) strand; PAM type: NRG; PAM sequence: TAG
ctactaaaaatacaaaaaat

SEQ ID NO: 55213 - DNA, 20 bp, Artificial Sequence
  Description of Artificial Sequence: Synthetic oligonucleotide
  Target: ATXN2; (+) strand; PAM type: NRG; PAM sequence: CAG
taaaaatacaaaaaattagc

SEQ ID NO: 55214 - DNA, 20 bp, Artificial Sequence
  Description of Artificial Sequence: Synthetic oligonucleotide
  Target: ATXN2; (+) strand; PAM type: NRG; PAM sequence: AGG
aaaaatacaaaaaattagcc

SEQ ID NO: 55215 - DNA, 20 bp, Artificial Sequence
  Description of Artificial Sequence: Synthetic oligonucleotide
  Target: ATXN2; (+) strand; PAM type: NRG; PAM sequence: TGG
tacaaaaaattagccaggcg

SEQ ID NO: 55216 - DNA, 20 bp, Artificial Sequence
  Description of Artificial Sequence: Synthetic oligonucleotide
  Target: ATXN2; (+) strand; PAM type: NRG; PAM sequence: TGG
aaaaaattagccaggcgtgg

SEQ ID NO: 55217 - DNA, 20 bp, Artificial Sequence
  Description of Artificial Sequence: Synthetic oligonucleotide
  Target: ATXN2; (+) strand; PAM type: NRG; PAM sequence: CGG
aaattagccaggcgtggtgg

SEQ ID NO: 55218 - DNA, 20 bp, Artificial Sequence
  Description of Artificial Sequence: Synthetic oligonucleotide
  Target: ATXN2; (+) strand; PAM type: NRG; PAM sequence: GGG
aattagccaggcgtggtggc

SEQ ID NO: 55219 - DNA, 20 bp, Artificial Sequence
  Description of Artificial Sequence: Synthetic oligonucleotide
  Target: ATXN2; (+) strand; PAM type: NRG; PAM sequence: CAG
gtggcgggcacctgtaatct

SEQ ID NO: 55220 - DNA, 20 bp, Artificial Sequence
  Description of Artificial Sequence: Synthetic oligonucleotide
  Target: ATXN2; (+) strand; PAM type: NRG; PAM sequence: TGG
cacctgtaatctcagctact

SEQ ID NO: 55221 - DNA, 20 bp, Artificial Sequence
  Description of Artificial Sequence: Synthetic oligonucleotide
  Target: ATXN2; (+) strand; PAM type: NRG; PAM sequence: GGG
acctgtaatctcagctactt

SEQ ID NO: 55222 - DNA, 20 bp, Artificial Sequence
  Description of Artificial Sequence: Synthetic oligonucleotide
  Target: ATXN2; (+) strand; PAM type: NRG; PAM sequence: GAG
ctgtaatctcagctacttgg

SEQ ID NO: 55223 - DNA, 20 bp, Artificial Sequence
  Description of Artificial Sequence: Synthetic oligonucleotide
  Target: ATXN2; (+) strand; PAM type: NRG; PAM sequence: AGG
tgtaatctcagctacttggg

SEQ ID NO: 55224 - DNA, 20 bp, Artificial Sequence
  Description of Artificial Sequence: Synthetic oligonucleotide
  Target: ATXN2; (+) strand; PAM type: NRG; PAM sequence: GAG
tctcagctacttgggaggct

SEQ ID NO: 55225 - DNA, 20 bp, Artificial Sequence
  Description of Artificial Sequence: Synthetic oligonucleotide
  Target: ATXN2; (+) strand; PAM type: NRG; PAM sequence: AGG
ctcagctacttgggaggctg

SEQ ID NO: 55226 - DNA, 20 bp, Artificial Sequence
  Description of Artificial Sequence: Synthetic oligonucleotide
  Target: ATXN2; (+) strand; PAM type: NRG; PAM sequence: CAG
agctacttgggaggctgagg

SEQ ID NO: 55227 - DNA, 20 bp, Artificial Sequence
  Description of Artificial Sequence: Synthetic oligonucleotide
  Target: ATXN2; (+) strand; PAM type: NRG; PAM sequence: AGG
gctacttgggaggctgaggc

SEQ ID NO: 55228 - DNA, 20 bp, Artificial Sequence
  Description of Artificial Sequence: Synthetic oligonucleotide
  Target: ATXN2; (+) strand; PAM type: NRG; PAM sequence: GAG
tacttgggaggctgaggcag

SEQ ID NO: 55229 - DNA, 20 bp, Artificial Sequence
  Description of Artificial Sequence: Synthetic oligonucleotide
  Target: ATXN2; (+) strand; PAM type: NRG; PAM sequence: CAG
gcaggagaattgcttgaacc

SEQ ID NO: 55230 - DNA, 20 bp, Artificial Sequence
  Description of Artificial Sequence: Synthetic oligonucleotide
  Target: ATXN2; (+) strand; PAM type: NRG; PAM sequence: AGG
caggagaattgcttgaaccc

SEQ ID NO: 55231 - DNA, 20 bp, Artificial Sequence
  Description of Artificial Sequence: Synthetic oligonucleotide
  Target: ATXN2; (+) strand; PAM type: NRG; PAM sequence: GAG
ggagaattgcttgaacccag

SEQ ID NO: 55232 - DNA, 20 bp, Artificial Sequence
  Description of Artificial Sequence: Synthetic oligonucleotide
  Target: ATXN2; (+) strand; PAM type: NRG; PAM sequence: AGG
gagaattgcttgaacccagg

SEQ ID NO: 55233 - DNA, 20 bp, Artificial Sequence
  Description of Artificial Sequence: Synthetic oligonucleotide
  Target: ATXN2; (+) strand; PAM type: NRG; PAM sequence: CGG
aattgcttgaacccaggagg

SEQ ID NO: 55234 - DNA, 20 bp, Artificial Sequence
  Description of Artificial Sequence: Synthetic oligonucleotide
  Target: ATXN2; (+) strand; PAM type: NRG; PAM sequence: GAG
ttgcttgaacccaggaggcg

SEQ ID NO: 55235 - DNA, 20 bp, Artificial Sequence
  Description of Artificial Sequence: Synthetic oligonucleotide
  Target: ATXN2; (+) strand; PAM type: NRG; PAM sequence: AGG
tgcttgaacccaggaggcgg

SEQ ID NO: 55236 - DNA, 20 bp, Artificial Sequence
  Description of Artificial Sequence: Synthetic oligonucleotide
  Target: ATXN2; (+) strand; PAM type: NRG; PAM sequence: CAG
aacccaggaggcggaggtta

SEQ ID NO: 55237 - DNA, 20 bp, Artificial Sequence
  Description of Artificial Sequence: Synthetic oligonucleotide
  Target: ATXN2; (+) strand; PAM type: NRG; PAM sequence: GAG
caggaggcggaggttacagt

SEQ ID NO: 55238 - DNA, 20 bp, Artificial Sequence
  Description of Artificial Sequence: Synthetic oligonucleotide
  Target: ATXN2; (+) strand; PAM type: NRG; PAM sequence: GAG
ggcggaggttacagtgagcc

SEQ ID NO: 55239 - DNA, 20 bp, Artificial Sequence
  Description of Artificial Sequence: Synthetic oligonucleotide
  Target: ATXN2; (+) strand; PAM type: NRG; PAM sequence: AAG
gagattgcaccattgcactg

SEQ ID NO: 55240 - DNA, 20 bp, Artificial Sequence
  Description of Artificial Sequence: Synthetic oligonucleotide
  Target: ATXN2; (+) strand; PAM type: NRG; PAM sequence: TGG
tgcaccattgcactgaagcc

SEQ ID NO: 55241 - DNA, 20 bp, Artificial Sequence
  Description of Artificial Sequence: Synthetic oligonucleotide
  Target: ATXN2; (+) strand; PAM type: NRG; PAM sequence: GGG
gcaccattgcactgaagcct

SEQ ID NO: 55242 - DNA, 20 bp, Artificial Sequence
  Description of Artificial Sequence: Synthetic oligonucleotide
  Target: ATXN2; (+) strand; PAM type: NRG; PAM sequence: CAG
gcactgaagcctgggtgaca

SEQ ID NO: 55243 - DNA, 20 bp, Artificial Sequence
  Description of Artificial Sequence: Synthetic oligonucleotide
  Target: ATXN2; (+) strand; PAM type: NRG; PAM sequence: TAG
aaaaaaaaaaaaaaaaaaat

SEQ ID NO: 55244 - DNA, 20 bp, Artificial Sequence
  Description of Artificial Sequence: Synthetic oligonucleotide
  Target: ATXN2; (+) strand; PAM type: NRG; PAM sequence: TGG
aaaaaaaaaaaaaaattagc

SEQ ID NO: 55245 - DNA, 20 bp, Artificial Sequence
  Description of Artificial Sequence: Synthetic oligonucleotide
  Target: ATXN2; (+) strand; PAM type: NRG; PAM sequence: TGG
aaaaaaaaattagctggtca

SEQ ID NO: 55246 - DNA, 20 bp, Artificial Sequence
  Description of Artificial Sequence: Synthetic oligonucleotide
  Target: ATXN2; (+) strand; PAM type: NRG; PAM sequence: TAG
gtcatggtgacacgcaccta

SEQ ID NO: 55247 - DNA, 20 bp, Artificial Sequence
  Description of Artificial Sequence: Synthetic oligonucleotide
  Target: ATXN2; (+) strand; PAM type: NRG; PAM sequence: CAG
gtgacacgcacctatagtcc

SEQ ID NO: 55248 - DNA, 20 bp, Artificial Sequence
  Description of Artificial Sequence: Synthetic oligonucleotide
  Target: ATXN2; (+) strand; PAM type: NRG; PAM sequence: TAG
gcacctatagtcccagctac

SEQ ID NO: 55249 - DNA, 20 bp, Artificial Sequence
  Description of Artificial Sequence: Synthetic oligonucleotide
  Target: ATXN2; (+) strand; PAM type: NRG; PAM sequence: AGG
cacctatagtcccagctact

SEQ ID NO: 55250 - DNA, 20 bp, Artificial Sequence
  Description of Artificial Sequence: Synthetic oligonucleotide
  Target: ATXN2; (+) strand; PAM type: NRG; PAM sequence: GGG
acctatagtcccagctacta

SEQ ID NO: 55251 - DNA, 20 bp, Artificial Sequence
  Description of Artificial Sequence: Synthetic oligonucleotide
  Target: ATXN2; (+) strand; PAM type: NRG; PAM sequence: GAG
ctatagtcccagctactagg

SEQ ID NO: 55252 - DNA, 20 bp, Artificial Sequence
  Description of Artificial Sequence: Synthetic oligonucleotide
  Target: ATXN2; (+) strand; PAM type: NRG; PAM sequence: AGG
tatagtcccagctactaggg

SEQ ID NO: 55253 - DNA, 20 bp, Artificial Sequence
  Description of Artificial Sequence: Synthetic oligonucleotide
  Target: ATXN2; (+) strand; PAM type: NRG; PAM sequence: AAG
cccagctactagggaggctg

SEQ ID NO: 55254 - DNA, 20 bp, Artificial Sequence
  Description of Artificial Sequence: Synthetic oligonucleotide
  Target: ATXN2; (+) strand; PAM type: NRG; PAM sequence: CAG
agctactagggaggctgaag

SEQ ID NO: 55255 - DNA, 20 bp, Artificial Sequence
  Description of Artificial Sequence: Synthetic oligonucleotide
  Target: ATXN2; (+) strand; PAM type: NRG; PAM sequence: AAG
tactagggaggctgaagcag

SEQ ID NO: 55256 - DNA, 20 bp, Artificial Sequence
  Description of Artificial Sequence: Synthetic oligonucleotide
  Target: ATXN2; (+) strand; PAM type: NRG; PAM sequence: AGG
actagggaggctgaagcaga

SEQ ID NO: 55257 - DNA, 20 bp, Artificial Sequence
  Description of Artificial Sequence: Synthetic oligonucleotide
  Target: ATXN2; (+) strand; PAM type: NRG; PAM sequence: GAG
ctgaagcagaaggaccgctt

SEQ ID NO: 55258 - DNA, 20 bp, Artificial Sequence
  Description of Artificial Sequence: Synthetic oligonucleotide
  Target: ATXN2; (+) strand; PAM type: NRG; PAM sequence: CAG
gcagaaggaccgcttgagcc

SEQ ID NO: 55259 - DNA, 20 bp, Artificial Sequence
  Description of Artificial Sequence: Synthetic oligonucleotide
  Target: ATXN2; (+) strand; PAM type: NRG; PAM sequence: AGG
cagaaggaccgcttgagccc

SEQ ID NO: 55260 - DNA, 20 bp, Artificial Sequence
  Description of Artificial Sequence: Synthetic oligonucleotide
  Target: ATXN2; (+) strand; PAM type: NRG; PAM sequence: GAG
gaaggaccgcttgagcccag

SEQ ID NO: 55261 - DNA, 20 bp, Artificial Sequence
  Description of Artificial Sequence: Synthetic oligonucleotide
  Target: ATXN2; (+) strand; PAM type: NRG; PAM sequence: GAG
ccgcttgagcccaggagatc

SEQ ID NO: 55262 - DNA, 20 bp, Artificial Sequence
  Description of Artificial Sequence: Synthetic oligonucleotide
  Target: ATXN2; (+) strand; PAM type: NRG; PAM sequence: AGG
cgcttgagcccaggagatcg

SEQ ID NO: 55263 - DNA, 20 bp, Artificial Sequence
  Description of Artificial Sequence: Synthetic oligonucleotide
  Target: ATXN2; (+) strand; PAM type: NRG; PAM sequence: GAG
caggagatcgaggttgctgt

SEQ ID NO: 55264 - DNA, 20 bp, Artificial Sequence
  Description of Artificial Sequence: Synthetic oligonucleotide
  Target: ATXN2; (+) strand; PAM type: NRG; PAM sequence: TAG
acgaatgcgccactgcactc

SEQ ID NO: 55265 - DNA, 20 bp, Artificial Sequence
  Description of Artificial Sequence: Synthetic oligonucleotide
  Target: ATXN2; (+) strand; PAM type: NRG; PAM sequence: TGG
tgcgccactgcactctagcc

SEQ ID NO: 55266 - DNA, 20 bp, Artificial Sequence
  Description of Artificial Sequence: Synthetic oligonucleotide
  Target: ATXN2; (+) strand; PAM type: NRG; PAM sequence: GGG
gcgccactgcactctagcct

SEQ ID NO: 55267 - DNA, 20 bp, Artificial Sequence
  Description of Artificial Sequence: Synthetic oligonucleotide
  Target: ATXN2; (+) strand; PAM type: NRG; PAM sequence: CAG
ctgcactctagcctgggcaa

SEQ ID NO: 55268 - DNA, 20 bp, Artificial Sequence
  Description of Artificial Sequence: Synthetic oligonucleotide
  Target: ATXN2; (+) strand; PAM type: NRG; PAM sequence: AAG
tctagcctgggcaacagacc

SEQ ID NO: 55269 - DNA, 20 bp, Artificial Sequence
  Description of Artificial Sequence: Synthetic oligonucleotide
  Target: ATXN2; (+) strand; PAM type: NRG; PAM sequence: CAG
gaccaagaccctgtctcgtt

SEQ ID NO: 55270 - DNA, 20 bp, Artificial Sequence
  Description of Artificial Sequence: Synthetic oligonucleotide
  Target: ATXN2; (+) strand; PAM type: NRG; PAM sequence: TAG
accctgtctcgttcagttaa

SEQ ID NO: 55271 - DNA, 20 bp, Artificial Sequence
  Description of Artificial Sequence: Synthetic oligonucleotide
  Target: ATXN2; (+) strand; PAM type: NRG; PAM sequence: GAG
cctgtctcgttcagttaata

SEQ ID NO: 55272 - DNA, 20 bp, Artificial Sequence
  Description of Artificial Sequence: Synthetic oligonucleotide
  Target: ATXN2; (+) strand; PAM type: NRG; PAM sequence: AAG
aacacacacacacacacaca

SEQ ID NO: 55273 - DNA, 20 bp, Artificial Sequence
  Description of Artificial Sequence: Synthetic oligonucleotide
  Target: ATXN2; (+) strand; PAM type: NRG; PAM sequence: AAG
acacacacacacacacaaag

SEQ ID NO: 55274 - DNA, 20 bp, Artificial Sequence
  Description of Artificial Sequence: Synthetic oligonucleotide
  Target: ATXN2; (+) strand; PAM type: NRG; PAM sequence: AAG
cacacacacacacaaagaag

SEQ ID NO: 55275 - DNA, 20 bp, Artificial Sequence
  Description of Artificial Sequence: Synthetic oligonucleotide
  Target: ATXN2; (+) strand; PAM type: NRG; PAM sequence: AAG
cacacacacaaagaagaaga

SEQ ID NO: 55276 - DNA, 20 bp, Artificial Sequence
  Description of Artificial Sequence: Synthetic oligonucleotide
  Target: ATXN2; (+) strand; PAM type: NRG; PAM sequence: TGG
tgtgaacatatatcttcatg

SEQ ID NO: 55277 - DNA, 20 bp, Artificial Sequence
  Description of Artificial Sequence: Synthetic oligonucleotide
  Target: ATXN2; (+) strand; PAM type: NRG; PAM sequence: TGG
atatatgttttcatttatct

SEQ ID NO: 55278 - DNA, 20 bp, Artificial Sequence
  Description of Artificial Sequence: Synthetic oligonucleotide
  Target: ATXN2; (+) strand; PAM type: NRG; PAM sequence: GGG
tatatgttttcatttatctt

SEQ ID NO: 55279 - DNA, 20 bp, Artificial Sequence
  Description of Artificial Sequence: Synthetic oligonucleotide
  Target: ATXN2; (+) strand; PAM type: NRG; PAM sequence: TGG
tgttttcatttatcttgggt

SEQ ID NO: 55280 - DNA, 20 bp, Artificial Sequence
  Description of Artificial Sequence: Synthetic oligonucleotide
  Target: ATXN2; (+) strand; PAM type: NRG; PAM sequence: TGG
gttcctacaaacgaaattgt

SEQ ID NO: 55281 - DNA, 20 bp, Artificial Sequence
  Description of Artificial Sequence: Synthetic oligonucleotide
  Target: ATXN2; (+) strand; PAM type: NRG; PAM sequence: GGG
ttcctacaaacgaaattgtt

SEQ ID NO: 55282 - DNA, 20 bp, Artificial Sequence
  Description of Artificial Sequence: Synthetic oligonucleotide
  Target: ATXN2; (+) strand; PAM type: NRG; PAM sequence: TGG
aacgaaattgttgggtgatg

SEQ ID NO: 55283 - DNA, 20 bp, Artificial Sequence
  Description of Artificial Sequence: Synthetic oligonucleotide
  Target: ATXN2; (+) strand; PAM type: NRG; PAM sequence: AAG
aaattgttgggtgatgtggt

SEQ ID NO: 55284 - DNA, 20 bp, Artificial Sequence
  Description of Artificial Sequence: Synthetic oligonucleotide
  Target: ATXN2; (+) strand; PAM type: NRG; PAM sequence: TAG
ggtgatgtggtaagtttatt

SEQ ID NO: 55285 - DNA, 20 bp, Artificial Sequence
  Description of Artificial Sequence: Synthetic oligonucleotide
  Target: ATXN2; (+) strand; PAM type: NRG; PAM sequence: TGG
ttattttatttatttattta

SEQ ID NO: 55286 - DNA, 20 bp, Artificial Sequence
  Description of Artificial Sequence: Synthetic oligonucleotide
  Target: ATXN2; (+) strand; PAM type: NRG; PAM sequence: TGG
tatggaaactaccttttctc

SEQ ID NO: 55287 - DNA, 20 bp, Artificial Sequence
  Description of Artificial Sequence: Synthetic oligonucleotide
  Target: ATXN2; (+) strand; PAM type: NRG; PAM sequence: CAG
actaccttttctctggactt

SEQ ID NO: 55288 - DNA, 20 bp, Artificial Sequence
  Description of Artificial Sequence: Synthetic oligonucleotide
  Target: ATXN2; (+) strand; PAM type: NRG; PAM sequence: AAG
accttttctctggacttcag

SEQ ID NO: 55289 - DNA, 20 bp, Artificial Sequence
  Description of Artificial Sequence: Synthetic oligonucleotide
  Target: ATXN2; (+) strand; PAM type: NRG; PAM sequence: AGG
ccttttctctggacttcaga

SEQ ID NO: 55290 - DNA, 20 bp, Artificial Sequence
  Description of Artificial Sequence: Synthetic oligonucleotide
  Target: ATXN2; (+) strand; PAM type: NRG; PAM sequence: AAG
ctctggacttcagaaggctt

SEQ ID NO: 55291 - DNA, 20 bp, Artificial Sequence
  Description of Artificial Sequence: Synthetic oligonucleotide
  Target: ATXN2; (+) strand; PAM type: NRG; PAM sequence: CAG
taagctttatatgaaaatat

SEQ ID NO: 55292 - DNA, 20 bp, Artificial Sequence
  Description of Artificial Sequence: Synthetic oligonucleotide
  Target: ATXN2; (+) strand; PAM type: NRG; PAM sequence: GAG
agctttatatgaaaatatca

SEQ ID NO: 55293 - DNA, 20 bp, Artificial Sequence
  Description of Artificial Sequence: Synthetic oligonucleotide
  Target: ATXN2; (+) strand; PAM type: NRG; PAM sequence: TAG
tttatatgaaaatatcagag

SEQ ID NO: 55294 - DNA, 20 bp, Artificial Sequence
  Description of Artificial Sequence: Synthetic oligonucleotide
  Target: ATXN2; (+) strand; PAM type: NRG; PAM sequence: AGG
ttatatgaaaatatcagagt

SEQ ID NO: 55295 - DNA, 20 bp, Artificial Sequence
  Description of Artificial Sequence: Synthetic oligonucleotide
  Target: ATXN2; (+) strand; PAM type: NRG; PAM sequence: TGG
atgaaaatatcagagtaggc

SEQ ID NO: 55296 - DNA, 20 bp, Artificial Sequence
  Description of Artificial Sequence: Synthetic oligonucleotide
  Target: ATXN2; (+) strand; PAM type: NRG; PAM sequence: GGG
tgaaaatatcagagtaggct

SEQ ID NO: 55297 - DNA, 20 bp, Artificial Sequence
  Description of Artificial Sequence: Synthetic oligonucleotide
  Target: ATXN2; (+) strand; PAM type: NRG; PAM sequence: CGG
atatcagagtaggctgggca

SEQ ID NO: 55298 - DNA, 20 bp, Artificial Sequence
  Description of Artificial Sequence: Synthetic oligonucleotide
  Target: ATXN2; (+) strand; PAM type: NRG; PAM sequence: TGG
tcagagtaggctgggcacgg

SEQ ID NO: 55299 - DNA, 20 bp, Artificial Sequence
  Description of Artificial Sequence: Synthetic oligonucleotide
  Target: ATXN2; (+) strand; PAM type: NRG; PAM sequence: CAG
gtggctcatgcctgtaatcc

SEQ ID NO: 55300 - DNA, 20 bp, Artificial Sequence
  Description of Artificial Sequence: Synthetic oligonucleotide
  Target: ATXN2; (+) strand; PAM type: NRG; PAM sequence: TGG
tgcctgtaatcccagcactt

SEQ ID NO: 55301 - DNA, 20 bp, Artificial Sequence
  Description of Artificial Sequence: Synthetic oligonucleotide
  Target: ATXN2; (+) strand; PAM type: NRG; PAM sequence: GGG
gcctgtaatcccagcacttt

SEQ ID NO: 55302 - DNA, 20 bp, Artificial Sequence
  Description of Artificial Sequence: Synthetic oligonucleotide
  Target: ATXN2; (+) strand; PAM type: NRG; PAM sequence: GAG
ctgtaatcccagcactttgg

SEQ ID NO: 55303 - DNA, 20 bp, Artificial Sequence
  Description of Artificial Sequence: Synthetic oligonucleotide
  Target: ATXN2; (+) strand; PAM type: NRG; PAM sequence: GAG
tcccagcactttgggagact

SEQ ID NO: 55304 - DNA, 20 bp, Artificial Sequence
  Description of Artificial Sequence: Synthetic oligonucleotide
  Target: ATXN2; (+) strand; PAM type: NRG; PAM sequence: AGG
cccagcactttgggagactg

SEQ ID NO: 55305 - DNA, 20 bp, Artificial Sequence
  Description of Artificial Sequence: Synthetic oligonucleotide
  Target: ATXN2; (+) strand; PAM type: NRG; PAM sequence: TGG
agcactttgggagactgagg

SEQ ID NO: 55306 - DNA, 20 bp, Artificial Sequence
  Description of Artificial Sequence: Synthetic oligonucleotide
  Target: ATXN2; (+) strand; PAM type: NRG; PAM sequence: GGG
gcactttgggagactgaggt

SEQ ID NO: 55307 - DNA, 20 bp, Artificial Sequence
  Description of Artificial Sequence: Synthetic oligonucleotide
  Target: ATXN2; (+) strand; PAM type: NRG; PAM sequence: GAG
ctgaggtgggctgatcacct

SEQ ID NO: 55308 - DNA, 20 bp, Artificial Sequence
  Description of Artificial Sequence: Synthetic oligonucleotide
  Target: ATXN2; (+) strand; PAM type: NRG; PAM sequence: AGG
tgaggtgggctgatcacctg

SEQ ID NO: 55309 - DNA, 20 bp, Artificial Sequence
  Description of Artificial Sequence: Synthetic oligonucleotide
  Target: ATXN2; (+) strand; PAM type: NRG; PAM sequence: AAG
tgggctgatcacctgaggtc

SEQ ID NO: 55310 - DNA, 20 bp, Artificial Sequence
  Description of Artificial Sequence: Synthetic oligonucleotide
  Target: ATXN2; (+) strand; PAM type: NRG; PAM sequence: GAG
ggctgatcacctgaggtcaa

SEQ ID NO: 55311 - DNA, 20 bp, Artificial Sequence
  Description of Artificial Sequence: Synthetic oligonucleotide
  Target: ATXN2; (+) strand; PAM type: NRG; PAM sequence: GAG
tcacctgaggtcaagagatc

SEQ ID NO: 55312 - DNA, 20 bp, Artificial Sequence
  Description of Artificial Sequence: Synthetic oligonucleotide
  Target: ATXN2; (+) strand; PAM type: NRG; PAM sequence: TGG
cgagaccatccttgccaaca

SEQ ID NO: 55313 - DNA, 20 bp, Artificial Sequence
  Description of Artificial Sequence: Synthetic oligonucleotide
  Target: ATXN2; (+) strand; PAM type: NRG; PAM sequence: TAG
tctattaaaaatacaaaaat

SEQ ID NO: 55314 - DNA, 20 bp, Artificial Sequence
  Description of Artificial Sequence: Synthetic oligonucleotide
  Target: ATXN2; (+) strand; PAM type: NRG; PAM sequence: CAG
ttaaaaatacaaaaattagc

SEQ ID NO: 55315 - DNA, 20 bp, Artificial Sequence
  Description of Artificial Sequence: Synthetic oligonucleotide
  Target: ATXN2; (+) strand; PAM type: NRG; PAM sequence: AGG
taaaaatacaaaaattagcc

SEQ ID NO: 55316 - DNA, 20 bp, Artificial Sequence
  Description of Artificial Sequence: Synthetic oligonucleotide
  Target: ATXN2; (+) strand; PAM type: NRG; PAM sequence: TGG
atacaaaaattagccaggca

SEQ ID NO: 55317 - DNA, 20 bp, Artificial Sequence
  Description of Artificial Sequence: Synthetic oligonucleotide
  Target: ATXN2; (+) strand; PAM type: NRG; PAM sequence: TGG
caaaaattagccaggcatgg

SEQ ID NO: 55318 - DNA, 20 bp, Artificial Sequence
  Description of Artificial Sequence: Synthetic oligonucleotide
  Target: ATXN2; (+) strand; PAM type: NRG; PAM sequence: CAG
gtggctcacacctgtaatcc

SEQ ID NO: 55319 - DNA, 20 bp, Artificial Sequence
  Description of Artificial Sequence: Synthetic oligonucleotide
  Target: ATXN2; (+) strand; PAM type: NRG; PAM sequence: TGG
cacctgtaatcccagcactt

SEQ ID NO: 55320 - DNA, 20 bp, Artificial Sequence
  Description of Artificial Sequence: Synthetic oligonucleotide
  Target: ATXN2; (+) strand; PAM type: NRG; PAM sequence: GGG
acctgtaatcccagcacttt

SEQ ID NO: 55321 - DNA, 20 bp, Artificial Sequence
  Description of Artificial Sequence: Synthetic oligonucleotide
  Target: ATXN2; (+) strand; PAM type: NRG; PAM sequence: GAG
ctgtaatcccagcactttgg

SEQ ID NO: 55322 - DNA, 20 bp, Artificial Sequence
  Description of Artificial Sequence: Synthetic oligonucleotide
  Target: ATXN2; (+) strand; PAM type: NRG; PAM sequence: AGG
tgtaatcccagcactttggg

SEQ ID NO: 55323 - DNA, 20 bp, Artificial Sequence
  Description of Artificial Sequence: Synthetic oligonucleotide
  Target: ATXN2; (+) strand; PAM type: NRG; PAM sequence: AAG
tcccagcactttgggaggcc

SEQ ID NO: 55324 - DNA, 20 bp, Artificial Sequence
  Description of Artificial Sequence: Synthetic oligonucleotide
  Target: ATXN2; (+) strand; PAM type: NRG; PAM sequence: AGG
cccagcactttgggaggcca

SEQ ID NO: 55325 - DNA, 20 bp, Artificial Sequence
  Description of Artificial Sequence: Synthetic oligonucleotide
  Target: ATXN2; (+) strand; PAM type: NRG; PAM sequence: CGG
agcactttgggaggccaagg

SEQ ID NO: 55326 - DNA, 20 bp, Artificial Sequence
  Description of Artificial Sequence: Synthetic oligonucleotide
  Target: ATXN2; (+) strand; PAM type: NRG; PAM sequence: GGG
gcactttgggaggccaaggc

SEQ ID NO: 55327 - DNA, 20 bp, Artificial Sequence
  Description of Artificial Sequence: Synthetic oligonucleotide
  Target: ATXN2; (+) strand; PAM type: NRG; PAM sequence: CAG
ctttgggaggccaaggcggg

SEQ ID NO: 55328 - DNA, 20 bp, Artificial Sequence
  Description of Artificial Sequence: Synthetic oligonucleotide
  Target: ATXN2; (+) strand; PAM type: NRG; PAM sequence: GAG
ggccaaggcgggcagatcac

SEQ ID NO: 55329 - DNA, 20 bp, Artificial Sequence
  Description of Artificial Sequence: Synthetic oligonucleotide
  Target: ATXN2; (+) strand; PAM type: NRG; PAM sequence: AGG
gccaaggcgggcagatcacg

SEQ ID NO: 55330 - DNA, 20 bp, Artificial Sequence
  Description of Artificial Sequence: Synthetic oligonucleotide
  Target: ATXN2; (+) strand; PAM type: NRG; PAM sequence: CAG
aggcgggcagatcacgaggt

SEQ ID NO: 55331 - DNA, 20 bp, Artificial Sequence
  Description of Artificial Sequence: Synthetic oligonucleotide
  Target: ATXN2; (+) strand; PAM type: NRG; PAM sequence: AGG
ggcgggcagatcacgaggtc

SEQ ID NO: 55332 - DNA, 20 bp, Artificial Sequence
  Description of Artificial Sequence: Synthetic oligonucleotide
  Target: ATXN2; (+) strand; PAM type: NRG; PAM sequence: GAG
cgggcagatcacgaggtcag

SEQ ID NO: 55333 - DNA, 20 bp, Artificial Sequence
  Description of Artificial Sequence: Synthetic oligonucleotide
  Target: ATXN2; (+) strand; PAM type: NRG; PAM sequence: AAG
gatcacgaggtcaggagatc

SEQ ID NO: 55334 - DNA, 20 bp, Artificial Sequence
  Description of Artificial Sequence: Synthetic oligonucleotide
  Target: ATXN2; (+) strand; PAM type: NRG; PAM sequence: AGG
atcacgaggtcaggagatca

SEQ ID NO: 55335 - DNA, 20 bp, Artificial Sequence
  Description of Artificial Sequence: Synthetic oligonucleotide
  Target: ATXN2; (+) strand; PAM type: NRG; PAM sequence: TGG
tcaggagatcaaggccatcc

SEQ ID NO: 55336 - DNA, 20 bp, Artificial Sequence
  Description of Artificial Sequence: Synthetic oligonucleotide
  Target: ATXN2; (+) strand; PAM type: NRG; PAM sequence: CAG
caaggccatcctggctaaca

SEQ ID NO: 55337 - DNA, 20 bp, Artificial Sequence
  Description of Artificial Sequence: Synthetic oligonucleotide
  Target: ATXN2; (+) strand; PAM type: NRG; PAM sequence: TAG
ctactaaaaatacaaaaaaa

SEQ ID NO: 55338 - DNA, 20 bp, Artificial Sequence
  Description of Artificial Sequence: Synthetic oligonucleotide
  Target: ATXN2; (+) strand; PAM type: NRG; PAM sequence: AGG
tactaaaaatacaaaaaaat

SEQ ID NO: 55339 - DNA, 20 bp, Artificial Sequence
  Description of Artificial Sequence: Synthetic oligonucleotide
  Target: ATXN2; (+) strand; PAM type: NRG; PAM sequence: TGG
taaaaatacaaaaaaatagg

SEQ ID NO: 55340 - DNA, 20 bp, Artificial Sequence
  Description of Artificial Sequence: Synthetic oligonucleotide
  Target: ATXN2; (+) strand; PAM type: NRG; PAM sequence: GGG
aaaaatacaaaaaaataggt

SEQ ID NO: 55341 - DNA, 20 bp, Artificial Sequence
  Description of Artificial Sequence: Synthetic oligonucleotide
  Target: ATXN2; (+) strand; PAM type: NRG; PAM sequence: TGG
tacaaaaaaataggtgggtg

SEQ ID NO: 55342 - DNA, 20 bp, Artificial Sequence
  Description of Artificial Sequence: Synthetic oligonucleotide
  Target: ATXN2; (+) strand; PAM type: NRG; PAM sequence: TGG
aaaaaaataggtgggtgtgg

SEQ ID NO: 55343 - DNA, 20 bp, Artificial Sequence
  Description of Artificial Sequence: Synthetic oligonucleotide
  Target: ATXN2; (+) strand; PAM type: NRG; PAM sequence: CGG
aaaataggtgggtgtggtgg

SEQ ID NO: 55344 - DNA, 20 bp, Artificial Sequence
  Description of Artificial Sequence: Synthetic oligonucleotide
  Target: ATXN2; (+) strand; PAM type: NRG; PAM sequence: GGG
aaataggtgggtgtggtggc

SEQ ID NO: 55345 - DNA, 20 bp, Artificial Sequence
  Description of Artificial Sequence: Synthetic oligonucleotide
  Target: ATXN2; (+) strand; PAM type: NRG; PAM sequence: TAG
ggtgtggtggcgggcgcctg

SEQ ID NO: 55346 - DNA, 20 bp, Artificial Sequence
  Description of Artificial Sequence: Synthetic oligonucleotide
  Target: ATXN2; (+) strand; PAM type: NRG; PAM sequence: CAG
gtggcgggcgcctgtagtcc

SEQ ID NO: 55347 - DNA, 20 bp, Artificial Sequence
  Description of Artificial Sequence: Synthetic oligonucleotide
  Target: ATXN2; (+) strand; PAM type: NRG; PAM sequence: TGG
cgcctgtagtcccagctact

SEQ ID NO: 55348 - DNA, 20 bp, Artificial Sequence
  Description of Artificial Sequence: Synthetic oligonucleotide
  Target: ATXN2; (+) strand; PAM type: NRG; PAM sequence: GGG
gcctgtagtcccagctactt

SEQ ID NO: 55349 - DNA, 20 bp, Artificial Sequence
  Description of Artificial Sequence: Synthetic oligonucleotide
  Target: ATXN2; (+) strand; PAM type: NRG; PAM sequence: GAG
ctgtagtcccagctacttgg

SEQ ID NO: 55350 - DNA, 20 bp, Artificial Sequence
  Description of Artificial Sequence: Synthetic oligonucleotide
  Target: ATXN2; (+) strand; PAM type: NRG; PAM sequence: AGG
tgtagtcccagctacttggg

SEQ ID NO: 55351 - DNA, 20 bp, Artificial Sequence
  Description of Artificial Sequence: Synthetic oligonucleotide
  Target: ATXN2; (+) strand; PAM type: NRG; PAM sequence: GAG
tcccagctacttgggaggct

SEQ ID NO: 55352 - DNA, 20 bp, Artificial Sequence
  Description of Artificial Sequence: Synthetic oligonucleotide
  Target: ATXN2; (+) strand; PAM type: NRG; PAM sequence: AGG
cccagctacttgggaggctg

SEQ ID NO: 55353 - DNA, 20 bp, Artificial Sequence
  Description of Artificial Sequence: Synthetic oligonucleotide
  Target: ATXN2; (+) strand; PAM type: NRG; PAM sequence: CAG
agctacttgggaggctgagg

SEQ ID NO: 55354 - DNA, 20 bp, Artificial Sequence
  Description of Artificial Sequence: Synthetic oligonucleotide
  Target: ATXN2; (+) strand; PAM type: NRG; PAM sequence: AGG
gctacttgggaggctgaggc

SEQ ID NO: 55355 - DNA, 20 bp, Artificial Sequence
  Description of Artificial Sequence: Synthetic oligonucleotide
  Target: ATXN2; (+) strand; PAM type: NRG; PAM sequence: GAG
tacttgggaggctgaggcag

SEQ ID NO: 55356 - DNA, 20 bp, Artificial Sequence
  Description of Artificial Sequence: Synthetic oligonucleotide
  Target: ATXN2; (+) strand; PAM type: NRG; PAM sequence: TGG
gggaggctgaggcaggagaa

SEQ ID NO: 55357 - DNA, 20 bp, Artificial Sequence
  Description of Artificial Sequence: Synthetic oligonucleotide
  Target: ATXN2; (+) strand; PAM type: NRG; PAM sequence: CGG
gcaggagaatggcatgaact

SEQ ID NO: 55358 - DNA, 20 bp, Artificial Sequence
  Description of Artificial Sequence: Synthetic oligonucleotide
  Target: ATXN2; (+) strand; PAM type: NRG; PAM sequence: GGG
caggagaatggcatgaactc

SEQ ID NO: 55359 - DNA, 20 bp, Artificial Sequence
  Description of Artificial Sequence: Synthetic oligonucleotide
  Target: ATXN2; (+) strand; PAM type: NRG; PAM sequence: GAG
ggagaatggcatgaactcgg

SEQ ID NO: 55360 - DNA, 20 bp, Artificial Sequence
  Description of Artificial Sequence: Synthetic oligonucleotide
  Target: ATXN2; (+) strand; PAM type: NRG; PAM sequence: AGG
gagaatggcatgaactcggg

SEQ ID NO: 55361 - DNA, 20 bp, Artificial Sequence
  Description of Artificial Sequence: Synthetic oligonucleotide
  Target: ATXN2; (+) strand; PAM type: NRG; PAM sequence: CGG
aatggcatgaactcgggagg

SEQ ID NO: 55362 - DNA, 20 bp, Artificial Sequence
  Description of Artificial Sequence: Synthetic oligonucleotide
  Target: ATXN2; (+) strand; PAM type: NRG; PAM sequence: GAG
tggcatgaactcgggaggcg

SEQ ID NO: 55363 - DNA, 20 bp, Artificial Sequence
  Description of Artificial Sequence: Synthetic oligonucleotide
  Target: ATXN2; (+) strand; PAM type: NRG; PAM sequence: CAG
aactcgggaggcggagcttg

SEQ ID NO: 55364 - DNA, 20 bp, Artificial Sequence
  Description of Artificial Sequence: Synthetic oligonucleotide
  Target: ATXN2; (+) strand; PAM type: NRG; PAM sequence: GAG
cgggaggcggagcttgcagt

SEQ ID NO: 55365 - DNA, 20 bp, Artificial Sequence
  Description of Artificial Sequence: Synthetic oligonucleotide
  Target: ATXN2; (+) strand; PAM type: NRG; PAM sequence: AGG
gggaggcggagcttgcagtg

SEQ ID NO: 55366 - DNA, 20 bp, Artificial Sequence
  Description of Artificial Sequence: Synthetic oligonucleotide
  Target: ATXN2; (+) strand; PAM type: NRG; PAM sequence: GAG
ggcggagcttgcagtgaggt

SEQ ID NO: 55367 - DNA, 20 bp, Artificial Sequence
  Description of Artificial Sequence: Synthetic oligonucleotide
  Target: ATXN2; (+) strand; PAM type: NRG; PAM sequence: TGG
gagcttgcagtgaggtgaga

SEQ ID NO: 55368 - DNA, 20 bp, Artificial Sequence
  Description of Artificial Sequence: Synthetic oligonucleotide
  Target: ATXN2; (+) strand; PAM type: NRG; PAM sequence: CAG
gagatggcgccactgcactc

SEQ ID NO: 55369 - DNA, 20 bp, Artificial Sequence
  Description of Artificial Sequence: Synthetic oligonucleotide
  Target: ATXN2; (+) strand; PAM type: NRG; PAM sequence: TGG
ggcgccactgcactccagcc

SEQ ID NO: 55370 - DNA, 20 bp, Artificial Sequence
  Description of Artificial Sequence: Synthetic oligonucleotide
  Target: ATXN2; (+) strand; PAM type: NRG; PAM sequence: GGG
gcgccactgcactccagcct

SEQ ID NO: 55371 - DNA, 20 bp, Artificial Sequence
  Description of Artificial Sequence: Synthetic oligonucleotide
  Target: ATXN2; (+) strand; PAM type: NRG; PAM sequence: CAG
ctgcactccagcctgggcaa

SEQ ID NO: 55372 - DNA, 20 bp, Artificial Sequence
  Description of Artificial Sequence: Synthetic oligonucleotide
  Target: ATXN2; (+) strand; PAM type: NRG; PAM sequence: GAG
gcactccagcctgggcaaca

SEQ ID NO: 55373 - DNA, 20 bp, Artificial Sequence
  Description of Artificial Sequence: Synthetic oligonucleotide
  Target: ATXN2; (+) strand; PAM type: NRG; PAM sequence: GAG
tccagcctgggcaacagagc

SEQ ID NO: 55374 - DNA, 20 bp, Artificial Sequence
  Description of Artificial Sequence: Synthetic oligonucleotide
  Target: ATXN2; (+) strand; PAM type: NRG; PAM sequence: AAG
cgagactctgtctcaaaaaa

SEQ ID NO: 55375 - DNA, 20 bp, Artificial Sequence
  Description of Artificial Sequence: Synthetic oligonucleotide
  Target: ATXN2; (+) strand; PAM type: NRG; PAM sequence: TAG
aaaaaagaaaatacaaaaat

SEQ ID NO: 55376 - DNA, 20 bp, Artificial Sequence
  Description of Artificial Sequence: Synthetic oligonucleotide
  Target: ATXN2; (+) strand; PAM type: NRG; PAM sequence: TGG
aagaaaatacaaaaattagc

SEQ ID NO: 55377 - DNA, 20 bp, Artificial Sequence
  Description of Artificial Sequence: Synthetic oligonucleotide
  Target: ATXN2; (+) strand; PAM type: NRG; PAM sequence: GGG
agaaaatacaaaaattagct

SEQ ID NO: 55378 - DNA, 20 bp, Artificial Sequence
  Description of Artificial Sequence: Synthetic oligonucleotide
  Target: ATXN2; (+) strand; PAM type: NRG; PAM sequence: TGG
atacaaaaattagctgggca

SEQ ID NO: 55379 - DNA, 20 bp, Artificial Sequence
  Description of Artificial Sequence: Synthetic oligonucleotide
  Target: ATXN2; (+) strand; PAM type: NRG; PAM sequence: TGG
caaaaattagctgggcatgg

SEQ ID NO: 55380 - DNA, 20 bp, Artificial Sequence
  Description of Artificial Sequence: Synthetic oligonucleotide
  Target: ATXN2; (+) strand; PAM type: NRG; PAM sequence: TAG
ggcatggtggtgtgcgcctg

SEQ ID NO: 55381 - DNA, 20 bp, Artificial Sequence
  Description of Artificial Sequence: Synthetic oligonucleotide
  Target: ATXN2; (+) strand; PAM type: NRG; PAM sequence: CGG
cgcctgtagtcctaactact

SEQ ID NO: 55382 - DNA, 20 bp, Artificial Sequence
  Description of Artificial Sequence: Synthetic oligonucleotide
  Target: ATXN2; (+) strand; PAM type: NRG; PAM sequence: GGG
gcctgtagtcctaactactc

SEQ ID NO: 55383 - DNA, 20 bp, Artificial Sequence
  Description of Artificial Sequence: Synthetic oligonucleotide
  Target: ATXN2; (+) strand; PAM type: NRG; PAM sequence: GAG
ctgtagtcctaactactcgg

SEQ ID NO: 55384 - DNA, 20 bp, Artificial Sequence
  Description of Artificial Sequence: Synthetic oligonucleotide
  Target: ATXN2; (+) strand; PAM type: NRG; PAM sequence: AGG
tgtagtcctaactactcggg

SEQ ID NO: 55385 - DNA, 20 bp, Artificial Sequence
  Description of Artificial Sequence: Synthetic oligonucleotide
  Target: ATXN2; (+) strand; PAM type: NRG; PAM sequence: GAG
tcctaactactcgggaggct

SEQ ID NO: 55386 - DNA, 20 bp, Artificial Sequence
  Description of Artificial Sequence: Synthetic oligonucleotide
  Target: ATXN2; (+) strand; PAM type: NRG; PAM sequence: AGG
cctaactactcgggaggctg

SEQ ID NO: 55387 - DNA, 20 bp, Artificial Sequence
  Description of Artificial Sequence: Synthetic oligonucleotide
  Target: ATXN2; (+) strand; PAM type: NRG; PAM sequence: CAG
aactactcgggaggctgagg

SEQ ID NO: 55388 - DNA, 20 bp, Artificial Sequence
  Description of Artificial Sequence: Synthetic oligonucleotide
  Target: ATXN2; (+) strand; PAM type: NRG; PAM sequence: AGG
actactcgggaggctgaggc

SEQ ID NO: 55389 - DNA, 20 bp, Artificial Sequence
  Description of Artificial Sequence: Synthetic oligonucleotide
  Target: ATXN2; (+) strand; PAM type: NRG; PAM sequence: GAG
tactcgggaggctgaggcag

SEQ ID NO: 55390 - DNA, 20 bp, Artificial Sequence
  Description of Artificial Sequence: Synthetic oligonucleotide
  Target: ATXN2; (+) strand; PAM type: NRG; PAM sequence: TGG
gcaggagaatcgcttgaacc

SEQ ID NO: 55391 - DNA, 20 bp, Artificial Sequence
  Description of Artificial Sequence: Synthetic oligonucleotide
  Target: ATXN2; (+) strand; PAM type: NRG; PAM sequence: CAG
ggagaatcgcttgaacctgg

SEQ ID NO: 55392 - DNA, 20 bp, Artificial Sequence
  Description of Artificial Sequence: Synthetic oligonucleotide
  Target: ATXN2; (+) strand; PAM type: NRG; PAM sequence: AGG
gagaatcgcttgaacctggc

SEQ ID NO: 55393 - DNA, 20 bp, Artificial Sequence
  Description of Artificial Sequence: Synthetic oligonucleotide
  Target: ATXN2; (+) strand; PAM type: NRG; PAM sequence: CAG
aatcgcttgaacctggcagg

SEQ ID NO: 55394 - DNA, 20 bp, Artificial Sequence
  Description of Artificial Sequence: Synthetic oligonucleotide
  Target: ATXN2; (+) strand; PAM type: NRG; PAM sequence: GAG
tcgcttgaacctggcaggca

SEQ ID NO: 55395 - DNA, 20 bp, Artificial Sequence
  Description of Artificial Sequence: Synthetic oligonucleotide
  Target: ATXN2; (+) strand; PAM type: NRG; PAM sequence: AGG
cgcttgaacctggcaggcag

SEQ ID NO: 55396 - DNA, 20 bp, Artificial Sequence
  Description of Artificial Sequence: Synthetic oligonucleotide
  Target: ATXN2; (+) strand; PAM type: NRG; PAM sequence: CAG
aacctggcaggcagaggttg

SEQ ID NO: 55397 - DNA, 20 bp, Artificial Sequence
  Description of Artificial Sequence: Synthetic oligonucleotide
  Target: ATXN2; (+) strand; PAM type: NRG; PAM sequence: GAG
tggcaggcagaggttgcagt

SEQ ID NO: 55398 - DNA, 20 bp, Artificial Sequence
  Description of Artificial Sequence: Synthetic oligonucleotide
  Target: ATXN2; (+) strand; PAM type: NRG; PAM sequence: AAG
ggcagaggttgcagtgagtc

SEQ ID NO: 55399 - DNA, 20 bp, Artificial Sequence
  Description of Artificial Sequence: Synthetic oligonucleotide
  Target: ATXN2; (+) strand; PAM type: NRG; PAM sequence: CAG
aagatcatgccactgcactc

SEQ ID NO: 55400 - DNA, 20 bp, Artificial Sequence
  Description of Artificial Sequence: Synthetic oligonucleotide
  Target: ATXN2; (+) strand; PAM type: NRG; PAM sequence: TGG
catgccactgcactccagcc

SEQ ID NO: 55401 - DNA, 20 bp, Artificial Sequence
  Description of Artificial Sequence: Synthetic oligonucleotide
  Target: ATXN2; (+) strand; PAM type: NRG; PAM sequence: CAG
actgcactccagcctggtga

SEQ ID NO: 55402 - DNA, 20 bp, Artificial Sequence
  Description of Artificial Sequence: Synthetic oligonucleotide
  Target: ATXN2; (+) strand; PAM type: NRG; PAM sequence: GAG
tgcactccagcctggtgaca

SEQ ID NO: 55403 - DNA, 20 bp, Artificial Sequence
  Description of Artificial Sequence: Synthetic oligonucleotide
  Target: ATXN2; (+) strand; PAM type: NRG; PAM sequence: TAG
atatatatatatatatatat

SEQ ID NO: 55404 - DNA, 20 bp, Artificial Sequence
  Description of Artificial Sequence: Synthetic oligonucleotide
  Target: ATXN2; (+) strand; PAM type: NRG; PAM sequence: GAG
atatatatatatatatatta

SEQ ID NO: 55405 - DNA, 20 bp, Artificial Sequence
  Description of Artificial Sequence: Synthetic oligonucleotide
  Target: ATXN2; (+) strand; PAM type: NRG; PAM sequence: AAG
attagagtaatgcaccttaa

SEQ ID NO: 55406 - DNA, 20 bp, Artificial Sequence
  Description of Artificial Sequence: Synthetic oligonucleotide
  Target: ATXN2; (+) strand; PAM type: NRG; PAM sequence: AAG
agagtaatgcaccttaaaag

SEQ ID NO: 55407 - DNA, 20 bp, Artificial Sequence
  Description of Artificial Sequence: Synthetic oligonucleotide
  Target: ATXN2; (+) strand; PAM type: NRG; PAM sequence: TGG
gtaatgcaccttaaaagaag

SEQ ID NO: 55408 - DNA, 20 bp, Artificial Sequence
  Description of Artificial Sequence: Synthetic oligonucleotide
  Target: ATXN2; (+) strand; PAM type: NRG; PAM sequence: CAG
ccttaaaagaagtggtgtgt

SEQ ID NO: 55409 - DNA, 20 bp, Artificial Sequence
  Description of Artificial Sequence: Synthetic oligonucleotide
  Target: ATXN2; (+) strand; PAM type: NRG; PAM sequence: AGG
cttaaaagaagtggtgtgtc

SEQ ID NO: 55410 - DNA, 20 bp, Artificial Sequence
  Description of Artificial Sequence: Synthetic oligonucleotide
  Target: ATXN2; (+) strand; PAM type: NRG; PAM sequence: CAG
aaaagaagtggtgtgtcagg

SEQ ID NO: 55411 - DNA, 20 bp, Artificial Sequence
  Description of Artificial Sequence: Synthetic oligonucleotide
  Target: ATXN2; (+) strand; PAM type: NRG; PAM sequence: TGG
ggtgtgtcaggcagcctcta

SEQ ID NO: 55412 - DNA, 20 bp, Artificial Sequence
  Description of Artificial Sequence: Synthetic oligonucleotide
  Target: ATXN2; (+) strand; PAM type: NRG; PAM sequence: CGG
gtgtcaggcagcctctatgg

SEQ ID NO: 55413 - DNA, 20 bp, Artificial Sequence
  Description of Artificial Sequence: Synthetic oligonucleotide
  Target: ATXN2; (+) strand; PAM type: NRG; PAM sequence: TGG
cccaaatgattcttgcctcc

SEQ ID NO: 55414 - DNA, 20 bp, Artificial Sequence
  Description of Artificial Sequence: Synthetic oligonucleotide
  Target: ATXN2; (+) strand; PAM type: NRG; PAM sequence: CAG
gattcttgcctcctggtgtt

SEQ ID NO: 55415 - DNA, 20 bp, Artificial Sequence
  Description of Artificial Sequence: Synthetic oligonucleotide
  Target: ATXN2; (+) strand; PAM type: NRG; PAM sequence: GAG
tacttttttttttttttttc

SEQ ID NO: 55416 - DNA, 20 bp, Artificial Sequence
  Description of Artificial Sequence: Synthetic oligonucleotide
  Target: ATXN2; (+) strand; PAM type: NRG; PAM sequence: CAG
tttttttttttttttcgaga

SEQ ID NO: 55417 - DNA, 20 bp, Artificial Sequence
  Description of Artificial Sequence: Synthetic oligonucleotide
  Target: ATXN2; (+) strand; PAM type: NRG; PAM sequence: AGG
ttttttttttttttcgagac

SEQ ID NO: 55418 - DNA, 20 bp, Artificial Sequence
  Description of Artificial Sequence: Synthetic oligonucleotide
  Target: ATXN2; (+) strand; PAM type: NRG; PAM sequence: GGG
tttttttttttttcgagaca

SEQ ID NO: 55419 - DNA, 20 bp, Artificial Sequence
  Description of Artificial Sequence: Synthetic oligonucleotide
  Target: ATXN2; (+) strand; PAM type: NRG; PAM sequence: CAG
cagggtcttactctgccaac

SEQ ID NO: 55420 - DNA, 20 bp, Artificial Sequence
  Description of Artificial Sequence: Synthetic oligonucleotide
  Target: ATXN2; (+) strand; PAM type: NRG; PAM sequence: AGG
agggtcttactctgccaacc

SEQ ID NO: 55421 - DNA, 20 bp, Artificial Sequence
  Description of Artificial Sequence: Synthetic oligonucleotide
  Target: ATXN2; (+) strand; PAM type: NRG; PAM sequence: TGG
tcttactctgccaaccaggc

SEQ ID NO: 55422 - DNA, 20 bp, Artificial Sequence
  Description of Artificial Sequence: Synthetic oligonucleotide
  Target: ATXN2; (+) strand; PAM type: NRG; PAM sequence: GAG
ttactctgccaaccaggctg

SEQ ID NO: 55423 - DNA, 20 bp, Artificial Sequence
  Description of Artificial Sequence: Synthetic oligonucleotide
  Target: ATXN2; (+) strand; PAM type: NRG; PAM sequence: CAG
ctgccaaccaggctggagta

SEQ ID NO: 55424 - DNA, 20 bp, Artificial Sequence
  Description of Artificial Sequence: Synthetic oligonucleotide
  Target: ATXN2; (+) strand; PAM type: NRG; PAM sequence: CAG
caggctggagtacagttcca

SEQ ID NO: 55425 - DNA, 20 bp, Artificial Sequence
  Description of Artificial Sequence: Synthetic oligonucleotide
  Target: ATXN2; (+) strand; PAM type: NRG; PAM sequence: TGG
tggagtacagttccacagtc

SEQ ID NO: 55426 - DNA, 20 bp, Artificial Sequence
  Description of Artificial Sequence: Synthetic oligonucleotide
  Target: ATXN2; (+) strand; PAM type: NRG; PAM sequence: CAG
ttccacagtctggctcactg

SEQ ID NO: 55427 - DNA, 20 bp, Artificial Sequence
  Description of Artificial Sequence: Synthetic oligonucleotide
  Target: ATXN2; (+) strand; PAM type: NRG; PAM sequence: CAG
tcactgcagcgtctgcctcc

SEQ ID NO: 55428 - DNA, 20 bp, Artificial Sequence
  Description of Artificial Sequence: Synthetic oligonucleotide
  Target: ATXN2; (+) strand; PAM type: NRG; PAM sequence: AGG
cactgcagcgtctgcctccc

SEQ ID NO: 55429 - DNA, 20 bp, Artificial Sequence
  Description of Artificial Sequence: Synthetic oligonucleotide
  Target: ATXN2; (+) strand; PAM type: NRG; PAM sequence: CGG
tgcagcgtctgcctcccagg

SEQ ID NO: 55430 - DNA, 20 bp, Artificial Sequence
  Description of Artificial Sequence: Synthetic oligonucleotide
  Target: ATXN2; (+) strand; PAM type: NRG; PAM sequence: GAG
tctgcctcccaggcggtccc

SEQ ID NO: 55431 - DNA, 20 bp, Artificial Sequence
  Description of Artificial Sequence: Synthetic oligonucleotide
  Target: ATXN2; (+) strand; PAM type: NRG; PAM sequence: CAG
cccgagcaatcctcccatct

SEQ ID NO: 55432 - DNA, 20 bp, Artificial Sequence
  Description of Artificial Sequence: Synthetic oligonucleotide
  Target: ATXN2; (+) strand; PAM type: NRG; PAM sequence: CAG
aatcctcccatctcagcctt

SEQ ID NO: 55433 - DNA, 20 bp, Artificial Sequence
  Description of Artificial Sequence: Synthetic oligonucleotide
  Target: ATXN2; (+) strand; PAM type: NRG; PAM sequence: GAG
tcctcccatctcagccttca

SEQ ID NO: 55434 - DNA, 20 bp, Artificial Sequence
  Description of Artificial Sequence: Synthetic oligonucleotide
  Target: ATXN2; (+) strand; PAM type: NRG; PAM sequence: CAG
catctcagccttcagagtat

SEQ ID NO: 55435 - DNA, 20 bp, Artificial Sequence
  Description of Artificial Sequence: Synthetic oligonucleotide
  Target: ATXN2; (+) strand; PAM type: NRG; PAM sequence: AGG
atctcagccttcagagtatc

SEQ ID NO: 55436 - DNA, 20 bp, Artificial Sequence
  Description of Artificial Sequence: Synthetic oligonucleotide
  Target: ATXN2; (+) strand; PAM type: NRG; PAM sequence: GGG
tctcagccttcagagtatca

SEQ ID NO: 55437 - DNA, 20 bp, Artificial Sequence
  Description of Artificial Sequence: Synthetic oligonucleotide
  Target: ATXN2; (+) strand; PAM type: NRG; PAM sequence: CAG
cttcagagtatcagggacta

SEQ ID NO: 55438 - DNA, 20 bp, Artificial Sequence
  Description of Artificial Sequence: Synthetic oligonucleotide
  Target: ATXN2; (+) strand; PAM type: NRG; PAM sequence: AGG
ttcagagtatcagggactac

SEQ ID NO: 55439 - DNA, 20 bp, Artificial Sequence
  Description of Artificial Sequence: Synthetic oligonucleotide
  Target: ATXN2; (+) strand; PAM type: NRG; PAM sequence: CAG
caggcgtgcaccaccacacc

SEQ ID NO: 55440 - DNA, 20 bp, Artificial Sequence
  Description of Artificial Sequence: Synthetic oligonucleotide
  Target: ATXN2; (+) strand; PAM type: NRG; PAM sequence: TAG
cacacccagctaatttttgt

SEQ ID NO: 55441 - DNA, 20 bp, Artificial Sequence
  Description of Artificial Sequence: Synthetic oligonucleotide
  Target: ATXN2; (+) strand; PAM type: NRG; PAM sequence: TGG
cagctaatttttgttagttt

SEQ ID NO: 55442 - DNA, 20 bp, Artificial Sequence
  Description of Artificial Sequence: Synthetic oligonucleotide
  Target: ATXN2; (+) strand; PAM type: NRG; PAM sequence: GGG
agctaatttttgttagtttt

SEQ ID NO: 55443 - DNA, 20 bp, Artificial Sequence
  Description of Artificial Sequence: Synthetic oligonucleotide
  Target: ATXN2; (+) strand; PAM type: NRG; PAM sequence: GGG
gctaatttttgttagttttg

SEQ ID NO: 55444 - DNA, 20 bp, Artificial Sequence
  Description of Artificial Sequence: Synthetic oligonucleotide
  Target: ATXN2; (+) strand; PAM type: NRG; PAM sequence: GGG
ctaatttttgttagttttgg

SEQ ID NO: 55445 - DNA, 20 bp, Artificial Sequence
  Description of Artificial Sequence: Synthetic oligonucleotide
  Target: ATXN2; (+) strand; PAM type: NRG; PAM sequence: TAG
gggatttgtttgtttgtttt

SEQ ID NO: 55446 - DNA, 20 bp, Artificial Sequence
  Description of Artificial Sequence: Synthetic oligonucleotide
  Target: ATXN2; (+) strand; PAM type: NRG; PAM sequence: AGG
ggatttgtttgtttgttttt

SEQ ID NO: 55447 - DNA, 20 bp, Artificial Sequence
  Description of Artificial Sequence: Synthetic oligonucleotide
  Target: ATXN2; (+) strand; PAM type: NRG; PAM sequence: CAG
tttgtttgtttgtttttagg

SEQ ID NO: 55448 - DNA, 20 bp, Artificial Sequence
  Description of Artificial Sequence: Synthetic oligonucleotide
  Target: ATXN2; (+) strand; PAM type: NRG; PAM sequence: GAG
tgtttgtttgtttttaggca

SEQ ID NO: 55449 - DNA, 20 bp, Artificial Sequence
  Description of Artificial Sequence: Synthetic oligonucleotide
  Target: ATXN2; (+) strand; PAM type: NRG; PAM sequence: CAG
cagagtcttgctgtcttgcc

SEQ ID NO: 55450 - DNA, 20 bp, Artificial Sequence
  Description of Artificial Sequence: Synthetic oligonucleotide
  Target: ATXN2; (+) strand; PAM type: NRG; PAM sequence: AGG
agagtcttgctgtcttgccc

SEQ ID NO: 55451 - DNA, 20 bp, Artificial Sequence
  Description of Artificial Sequence: Synthetic oligonucleotide
  Target: ATXN2; (+) strand; PAM type: NRG; PAM sequence: TGG
tcttgctgtcttgcccaggc

SEQ ID NO: 55452 - DNA, 20 bp, Artificial Sequence
  Description of Artificial Sequence: Synthetic oligonucleotide
  Target: ATXN2; (+) strand; PAM type: NRG; PAM sequence: CAG
gtcttgcccaggctggaatg

SEQ ID NO: 55453 - DNA, 20 bp, Artificial Sequence
  Description of Artificial Sequence: Synthetic oligonucleotide
  Target: ATXN2; (+) strand; PAM type: NRG; PAM sequence: TGG
ttgcccaggctggaatgcag

SEQ ID NO: 55454 - DNA, 20 bp, Artificial Sequence
  Description of Artificial Sequence: Synthetic oligonucleotide
  Target: ATXN2; (+) strand; PAM type: NRG; PAM sequence: CAG
ggaatgcagtggcacaatct

SEQ ID NO: 55455 - DNA, 20 bp, Artificial Sequence
  Description of Artificial Sequence: Synthetic oligonucleotide
  Target: ATXN2; (+) strand; PAM type: NRG; PAM sequence: TGG
tcactgtaacctccacctcc

SEQ ID NO: 55456 - DNA, 20 bp, Artificial Sequence
  Description of Artificial Sequence: Synthetic oligonucleotide
  Target: ATXN2; (+) strand; PAM type: NRG; PAM sequence: GGG
cactgtaacctccacctcct

SEQ ID NO: 55457 - DNA, 20 bp, Artificial Sequence
  Description of Artificial Sequence: Synthetic oligonucleotide
  Target: ATXN2; (+) strand; PAM type: NRG; PAM sequence: AAG
aacctccacctcctgggttc

SEQ ID NO: 55458 - DNA, 20 bp, Artificial Sequence
  Description of Artificial Sequence: Synthetic oligonucleotide
  Target: ATXN2; (+) strand; PAM type: NRG; PAM sequence: CAG
ttcaagtgatcctccccgct

SEQ ID NO: 55459 - DNA, 20 bp, Artificial Sequence
  Description of Artificial Sequence: Synthetic oligonucleotide
  Target: ATXN2; (+) strand; PAM type: NRG; PAM sequence: TAG
tccccgctcagccttccatg

SEQ ID NO: 55460 - DNA, 20 bp, Artificial Sequence
  Description of Artificial Sequence: Synthetic oligonucleotide
  Target: ATXN2; (+) strand; PAM type: NRG; PAM sequence: TGG
cgctcagccttccatgtagc

SEQ ID NO: 55461 - DNA, 20 bp, Artificial Sequence
  Description of Artificial Sequence: Synthetic oligonucleotide
  Target: ATXN2; (+) strand; PAM type: NRG; PAM sequence: GGG
gctcagccttccatgtagct

SEQ ID NO: 55462 - DNA, 20 bp, Artificial Sequence
  Description of Artificial Sequence: Synthetic oligonucleotide
  Target: ATXN2; (+) strand; PAM type: NRG; PAM sequence: TAG
cttccatgtagctgggatta

SEQ ID NO: 55463 - DNA, 20 bp, Artificial Sequence
  Description of Artificial Sequence: Synthetic oligonucleotide
  Target: ATXN2; (+) strand; PAM type: NRG; PAM sequence: AGG
ttccatgtagctgggattat

SEQ ID NO: 55464 - DNA, 20 bp, Artificial Sequence
  Description of Artificial Sequence: Synthetic oligonucleotide
  Target: ATXN2; (+) strand; PAM type: NRG; PAM sequence: CAG
taggcactcaccaccatgtc

SEQ ID NO: 55465 - DNA, 20 bp, Artificial Sequence
  Description of Artificial Sequence: Synthetic oligonucleotide
  Target: ATXN2; (+) strand; PAM type: NRG; PAM sequence: TAG
ccagctaatttttgtatttt

SEQ ID NO: 55466 - DNA, 20 bp, Artificial Sequence
  Description of Artificial Sequence: Synthetic oligonucleotide
  Target: ATXN2; (+) strand; PAM type: NRG; PAM sequence: TAG
gctaatttttgtatttttag

SEQ ID NO: 55467 - DNA, 20 bp, Artificial Sequence
  Description of Artificial Sequence: Synthetic oligonucleotide
  Target: ATXN2; (+) strand; PAM type: NRG; PAM sequence: GAG
taatttttgtatttttagta

SEQ ID NO: 55468 - DNA, 20 bp, Artificial Sequence
  Description of Artificial Sequence: Synthetic oligonucleotide
  Target: ATXN2; (+) strand; PAM type: NRG; PAM sequence: TGG
gagacgacattttttcgtgt

SEQ ID NO: 55469 - DNA, 20 bp, Artificial Sequence
  Description of Artificial Sequence: Synthetic oligonucleotide
  Target: ATXN2; (+) strand; PAM type: NRG; PAM sequence: CAG
cgacattttttcgtgttggc

SEQ ID NO: 55470 - DNA, 20 bp, Artificial Sequence
  Description of Artificial Sequence: Synthetic oligonucleotide
  Target: ATXN2; (+) strand; PAM type: NRG; PAM sequence: AAG
tggccagaactcctcacctc

SEQ ID NO: 55471 - DNA, 20 bp, Artificial Sequence
  Description of Artificial Sequence: Synthetic oligonucleotide
  Target: ATXN2; (+) strand; PAM type: NRG; PAM sequence: TGG
ctcaagtgatctgcctgcct

SEQ ID NO: 55472 - DNA, 20 bp, Artificial Sequence
  Description of Artificial Sequence: Synthetic oligonucleotide
  Target: ATXN2; (+) strand; PAM type: NRG; PAM sequence: AAG
ctgcctgccttggcctccca

SEQ ID NO: 55473 - DNA, 20 bp, Artificial Sequence
  Description of Artificial Sequence: Synthetic oligonucleotide
  Target: ATXN2; (+) strand; PAM type: NRG; PAM sequence: TGG
gccttggcctcccaaagtgc

SEQ ID NO: 55474 - DNA, 20 bp, Artificial Sequence
  Description of Artificial Sequence: Synthetic oligonucleotide
  Target: ATXN2; (-) strand; PAM type: YTN; PAM sequence: CTA
gctattggtttacccacctt

SEQ ID NO: 55475 - DNA, 20 bp, Artificial Sequence
  Description of Artificial Sequence: Synthetic oligonucleotide
  Target: ATXN2; (-) strand; PAM type: YTN; PAM sequence: TTC
cagcgtacccagaagacaat

SEQ ID NO: 55476 - DNA, 20 bp, Artificial Sequence
  Description of Artificial Sequence: Synthetic oligonucleotide
  Target: ATXN2; (-) strand; PAM type: YTN; PAM sequence: CTG
ggttccagcgtacccagaag

SEQ ID NO: 55477 - DNA, 20 bp, Artificial Sequence
  Description of Artificial Sequence: Synthetic oligonucleotide
  Target: ATXN2; (-) strand; PAM type: YTN; PAM sequence: CTG
agtctgggttccagcgtacc

SEQ ID NO: 55478 - DNA, 20 bp, Artificial Sequence
  Description of Artificial Sequence: Synthetic oligonucleotide
  Target: ATXN2; (-) strand; PAM type: YTN; PAM sequence: CTG
ggctgagtctgggttccagc

SEQ ID NO: 55479 - DNA, 20 bp, Artificial Sequence
  Description of Artificial Sequence: Synthetic oligonucleotide
  Target: ATXN2; (-) strand; PAM type: YTN; PAM sequence: TTA
tgtcctgggctgagtctggg

SEQ ID NO: 55480 - DNA, 20 bp, Artificial Sequence
  Description of Artificial Sequence: Synthetic oligonucleotide
  Target: ATXN2; (-) strand; PAM type: YTN; PAM sequence: CTT
atgtcctgggctgagtctgg

SEQ ID NO: 55481 - DNA, 20 bp, Artificial Sequence
  Description of Artificial Sequence: Synthetic oligonucleotide
  Target: ATXN2; (-) strand; PAM type: YTN; PAM sequence: CTA
ccttatgtcctgggctgagt

SEQ ID NO: 55482 - DNA, 20 bp, Artificial Sequence
  Description of Artificial Sequence: Synthetic oligonucleotide
  Target: ATXN2; (-) strand; PAM type: YTN; PAM sequence: TTA
gataagatgggtgatggtgg

SEQ ID NO: 55483 - DNA, 20 bp, Artificial Sequence
  Description of Artificial Sequence: Synthetic oligonucleotide
  Target: ATXN2; (-) strand; PAM type: YTN; PAM sequence: CTG
ttagataagatgggtgatgg

SEQ ID NO: 55484 - DNA, 20 bp, Artificial Sequence
  Description of Artificial Sequence: Synthetic oligonucleotide
  Target: ATXN2; (-) strand; PAM type: YTN; PAM sequence: CTG
gcaggccgggtccagcagcc

SEQ ID NO: 55485 - DNA, 20 bp, Artificial Sequence
  Description of Artificial Sequence: Synthetic oligonucleotide
  Target: ATXN2; (-) strand; PAM type: YTN; PAM sequence: TTC
tggcaggccgggtccagcag

SEQ ID NO: 55486 - DNA, 20 bp, Artificial Sequence
  Description of Artificial Sequence: Synthetic oligonucleotide
  Target: ATXN2; (-) strand; PAM type: YTN; PAM sequence: CTT
ctggcaggccgggtccagca

SEQ ID NO: 55487 - DNA, 20 bp, Artificial Sequence
  Description of Artificial Sequence: Synthetic oligonucleotide
  Target: ATXN2; (-) strand; PAM type: YTN; PAM sequence: CTG
gagatggggccgtggaacca

SEQ ID NO: 55488 - DNA, 20 bp, Artificial Sequence
  Description of Artificial Sequence: Synthetic oligonucleotide
  Target: ATXN2; (-) strand; PAM type: YTN; PAM sequence: CTC
tggagatggggccgtggaac

SEQ ID NO: 55489 - DNA, 20 bp, Artificial Sequence
  Description of Artificial Sequence: Synthetic oligonucleotide
  Target: ATXN2; (-) strand; PAM type: YTN; PAM sequence: TTC
actctggagatggggccgtg

SEQ ID NO: 55490 - DNA, 20 bp, Artificial Sequence
  Description of Artificial Sequence: Synthetic oligonucleotide
  Target: ATXN2; (-) strand; PAM type: YTN; PAM sequence: TTT
cactctggagatggggccgt

SEQ ID NO: 55491 - DNA, 20 bp, Artificial Sequence
  Description of Artificial Sequence: Synthetic oligonucleotide
  Target: ATXN2; (-) strand; PAM type: YTN; PAM sequence: CTT
tcactctggagatggggccg

SEQ ID NO: 55492 - DNA, 20 bp, Artificial Sequence
  Description of Artificial Sequence: Synthetic oligonucleotide
  Target: ATXN2; (-) strand; PAM type: YTN; PAM sequence: CTG
ctttcactctggagatgggg

SEQ ID NO: 55493 - DNA, 20 bp, Artificial Sequence
  Description of Artificial Sequence: Synthetic oligonucleotide
  Target: ATXN2; (-) strand; PAM type: YTN; PAM sequence: CTG
agctgctttcactctggaga

SEQ ID NO: 55494 - DNA, 20 bp, Artificial Sequence
  Description of Artificial Sequence: Synthetic oligonucleotide
  Target: ATXN2; (-) strand; PAM type: YTN; PAM sequence: CTG
aaccagctgagctgctttca

SEQ ID NO: 55495 - DNA, 20 bp, Artificial Sequence
  Description of Artificial Sequence: Synthetic oligonucleotide
  Target: ATXN2; (-) strand; PAM type: YTN; PAM sequence: CTG
cagctgaaccagctgagctg

SEQ ID NO: 55496 - DNA, 20 bp, Artificial Sequence
  Description of Artificial Sequence: Synthetic oligonucleotide
  Target: ATXN2; (-) strand; PAM type: YTN; PAM sequence: CTC
catgagcatcagggccctgc

SEQ ID NO: 55497 - DNA, 20 bp, Artificial Sequence
  Description of Artificial Sequence: Synthetic oligonucleotide
  Target: ATXN2; (-) strand; PAM type: YTN; PAM sequence: CTG
ccgcaccaggaacactccat

SEQ ID NO: 55498 - DNA, 20 bp, Artificial Sequence
  Description of Artificial Sequence: Synthetic oligonucleotide
  Target: ATXN2; (-) strand; PAM type: YTN; PAM sequence: CTC
tgccgcaccaggaacactcc

SEQ ID NO: 55499 - DNA, 20 bp, Artificial Sequence
  Description of Artificial Sequence: Synthetic oligonucleotide
  Target: ATXN2; (-) strand; PAM type: YTN; PAM sequence: CTC
gctctgccgcaccaggaaca

SEQ ID NO: 55500 - DNA, 20 bp, Artificial Sequence
  Description of Artificial Sequence: Synthetic oligonucleotide
  Target: ATXN2; (-) strand; PAM type: YTN; PAM sequence: TTC
cccacgccgcgtctcgctct

SEQ ID NO: 55501 - DNA, 20 bp, Artificial Sequence
  Description of Artificial Sequence: Synthetic oligonucleotide
  Target: ATXN2; (-) strand; PAM type: YTN; PAM sequence: TTG
aaagtgagcacgtattcccc

SEQ ID NO: 55502 - DNA, 20 bp, Artificial Sequence
  Description of Artificial Sequence: Synthetic oligonucleotide
  Target: ATXN2; (-) strand; PAM type: YTN; PAM sequence: CTG
aaagttgaaagtgagcacgt

SEQ ID NO: 55503 - DNA, 20 bp, Artificial Sequence
  Description of Artificial Sequence: Synthetic oligonucleotide
  Target: ATXN2; (-) strand; PAM type: YTN; PAM sequence: CTA
tcccctgaaagttgaaagtg

SEQ ID NO: 55504 - DNA, 20 bp, Artificial Sequence
  Description of Artificial Sequence: Synthetic oligonucleotide
  Target: ATXN2; (-) strand; PAM type: YTN; PAM sequence: TTG
gctatcccctgaaagttgaa

SEQ ID NO: 55505 - DNA, 20 bp, Artificial Sequence
  Description of Artificial Sequence: Synthetic oligonucleotide
  Target: ATXN2; (-) strand; PAM type: YTN; PAM sequence: CTT
ggctatcccctgaaagttga

SEQ ID NO: 55506 - DNA, 20 bp, Artificial Sequence
  Description of Artificial Sequence: Synthetic oligonucleotide
  Target: ATXN2; (-) strand; PAM type: YTN; PAM sequence: CTG
ccccaccccaccccacccca

SEQ ID NO: 55507 - DNA, 20 bp, Artificial Sequence
  Description of Artificial Sequence: Synthetic oligonucleotide
  Target: ATXN2; (-) strand; PAM type: YTN; PAM sequence: CTG
cctgccccaccccaccccac

SEQ ID NO: 55508 - DNA, 20 bp, Artificial Sequence
  Description of Artificial Sequence: Synthetic oligonucleotide
  Target: ATXN2; (-) strand; PAM type: YTN; PAM sequence: CTC
cagtggagaggggtggcacg

SEQ ID NO: 55509 - DNA, 20 bp, Artificial Sequence
  Description of Artificial Sequence: Synthetic oligonucleotide
  Target: ATXN2; (-) strand; PAM type: YTN; PAM sequence: CTG
aactccagtggagaggggtg

SEQ ID NO: 55510 - DNA, 20 bp, Artificial Sequence
  Description of Artificial Sequence: Synthetic oligonucleotide
  Target: ATXN2; (-) strand; PAM type: YTN; PAM sequence: CTA
ggaccctgaactccagtgga

SEQ ID NO: 55511 - DNA, 20 bp, Artificial Sequence
  Description of Artificial Sequence: Synthetic oligonucleotide
  Target: ATXN2; (-) strand; PAM type: YTN; PAM sequence: CTC
taggaccctgaactccagtg

SEQ ID NO: 55512 - DNA, 20 bp, Artificial Sequence
  Description of Artificial Sequence: Synthetic oligonucleotide
  Target: ATXN2; (-) strand; PAM type: YTN; PAM sequence: CTG
tccctctaggaccctgaact

SEQ ID NO: 55513 - DNA, 20 bp, Artificial Sequence
  Description of Artificial Sequence: Synthetic oligonucleotide
  Target: ATXN2; (-) strand; PAM type: YTN; PAM sequence: CTC
gggctgtccctctaggaccc

SEQ ID NO: 55514 - DNA, 20 bp, Artificial Sequence
  Description of Artificial Sequence: Synthetic oligonucleotide
  Target: ATXN2; (-) strand; PAM type: YTN; PAM sequence: CTG
tgggaggagaggatggtggg

SEQ ID NO: 55515 - DNA, 20 bp, Artificial Sequence
  Description of Artificial Sequence: Synthetic oligonucleotide
  Target: ATXN2; (-) strand; PAM type: YTN; PAM sequence: CTG
tcagcgacaggcgcaggtgc

SEQ ID NO: 55516 - DNA, 20 bp, Artificial Sequence
  Description of Artificial Sequence: Synthetic oligonucleotide
  Target: ATXN2; (-) strand; PAM type: YTN; PAM sequence: CTC
tgtcagcgacaggcgcaggt

SEQ ID NO: 55517 - DNA, 20 bp, Artificial Sequence
  Description of Artificial Sequence: Synthetic oligonucleotide
  Target: ATXN2; (-) strand; PAM type: YTN; PAM sequence: CTG
gccccgctctgtcagcgaca

SEQ ID NO: 55518 - DNA, 20 bp, Artificial Sequence
  Description of Artificial Sequence: Synthetic oligonucleotide
  Target: ATXN2; (-) strand; PAM type: YTN; PAM sequence: CTG
cacacggcactggccccgct

SEQ ID NO: 55519 - DNA, 20 bp, Artificial Sequence
  Description of Artificial Sequence: Synthetic oligonucleotide
  Target: ATXN2; (-) strand; PAM type: YTN; PAM sequence: CTG
gaagtggtggagcatgtcca

SEQ ID NO: 55520 - DNA, 20 bp, Artificial Sequence
  Description of Artificial Sequence: Synthetic oligonucleotide
  Target: ATXN2; (-) strand; PAM type: YTN; PAM sequence: CTC
gagtgggatgggcgagcgct

SEQ ID NO: 55521 - DNA, 20 bp, Artificial Sequence
  Description of Artificial Sequence: Synthetic oligonucleotide
  Target: ATXN2; (-) strand; PAM type: YTN; PAM sequence: CTG
gagagccggacatcacaggc

SEQ ID NO: 55522 - DNA, 20 bp, Artificial Sequence
  Description of Artificial Sequence: Synthetic oligonucleotide
  Target: ATXN2; (-) strand; PAM type: YTN; PAM sequence: CTA
ccacgtagctggagagccgg

SEQ ID NO: 55523 - DNA, 20 bp, Artificial Sequence
  Description of Artificial Sequence: Synthetic oligonucleotide
  Target: ATXN2; (-) strand; PAM type: YTN; PAM sequence: TTG
ggagacgactaccacgtagc

SEQ ID NO: 55524 - DNA, 20 bp, Artificial Sequence
  Description of Artificial Sequence: Synthetic oligonucleotide
  Target: ATXN2; (-) strand; PAM type: YTN; PAM sequence: CTG
gtggttgggagacgactacc

SEQ ID NO: 55525 - DNA, 20 bp, Artificial Sequence
  Description of Artificial Sequence: Synthetic oligonucleotide
  Target: ATXN2; (-) strand; PAM type: YTN; PAM sequence: TTC
agcaaagggcagtagggtca

SEQ ID NO: 55526 - DNA, 20 bp, Artificial Sequence
  Description of Artificial Sequence: Synthetic oligonucleotide
  Target: ATXN2; (-) strand; PAM type: YTN; PAM sequence: CTT
cagcaaagggcagtagggtc

SEQ ID NO: 55527 - DNA, 20 bp, Artificial Sequence
  Description of Artificial Sequence: Synthetic oligonucleotide
  Target: ATXN2; (-) strand; PAM type: YTN; PAM sequence: CTA
cccagtgtcagccaccccct

SEQ ID NO: 55528 - DNA, 20 bp, Artificial Sequence
  Description of Artificial Sequence: Synthetic oligonucleotide
  Target: ATXN2; (-) strand; PAM type: YTN; PAM sequence: CTC
tacccagtgtcagccacccc

SEQ ID NO: 55529 - DNA, 20 bp, Artificial Sequence
  Description of Artificial Sequence: Synthetic oligonucleotide
  Target: ATXN2; (-) strand; PAM type: YTN; PAM sequence: CTA
ccctctacccagtgtcagcc

SEQ ID NO: 55530 - DNA, 20 bp, Artificial Sequence
  Description of Artificial Sequence: Synthetic oligonucleotide
  Target: ATXN2; (-) strand; PAM type: YTN; PAM sequence: CTC
taccctctacccagtgtcag

SEQ ID NO: 55531 - DNA, 20 bp, Artificial Sequence
  Description of Artificial Sequence: Synthetic oligonucleotide
  Target: ATXN2; (-) strand; PAM type: YTN; PAM sequence: CTG
cagcaagcctctaccctcta

SEQ ID NO: 55532 - DNA, 20 bp, Artificial Sequence
  Description of Artificial Sequence: Synthetic oligonucleotide
  Target: ATXN2; (-) strand; PAM type: YTN; PAM sequence: CTG
ggtctgcagcaagcctctac

SEQ ID NO: 55533 - DNA, 20 bp, Artificial Sequence
  Description of Artificial Sequence: Synthetic oligonucleotide
  Target: ATXN2; (-) strand; PAM type: YTN; PAM sequence: CTG
tacccctgggtctgcagcaa

SEQ ID NO: 55534 - DNA, 20 bp, Artificial Sequence
  Description of Artificial Sequence: Synthetic oligonucleotide
  Target: ATXN2; (-) strand; PAM type: YTN; PAM sequence: CTG
acaggacacagaacaagata

SEQ ID NO: 55535 - DNA, 20 bp, Artificial Sequence
  Description of Artificial Sequence: Synthetic oligonucleotide
  Target: ATXN2; (-) strand; PAM type: YTN; PAM sequence: TTG
aggcaagtgctgacaggaca

SEQ ID NO: 55536 - DNA, 20 bp, Artificial Sequence
  Description of Artificial Sequence: Synthetic oligonucleotide
  Target: ATXN2; (-) strand; PAM type: YTN; PAM sequence: CTT
gaggcaagtgctgacaggac

SEQ ID NO: 55537 - DNA, 20 bp, Artificial Sequence
  Description of Artificial Sequence: Synthetic oligonucleotide
  Target: ATXN2; (-) strand; PAM type: YTN; PAM sequence: CTA
ggacaagtgaccaagagaga

SEQ ID NO: 55538 - DNA, 20 bp, Artificial Sequence
  Description of Artificial Sequence: Synthetic oligonucleotide
  Target: ATXN2; (-) strand; PAM type: YTN; PAM sequence: TTG
caggaacctaggacaagtga

SEQ ID NO: 55539 - DNA, 20 bp, Artificial Sequence
  Description of Artificial Sequence: Synthetic oligonucleotide
  Target: ATXN2; (-) strand; PAM type: YTN; PAM sequence: CTG
aatcccagtgaggaagggag

SEQ ID NO: 55540 - DNA, 20 bp, Artificial Sequence
  Description of Artificial Sequence: Synthetic oligonucleotide
  Target: ATXN2; (-) strand; PAM type: YTN; PAM sequence: CTC
tgaatcccagtgaggaaggg

SEQ ID NO: 55541 - DNA, 20 bp, Artificial Sequence
  Description of Artificial Sequence: Synthetic oligonucleotide
  Target: ATXN2; (-) strand; PAM type: YTN; PAM sequence: CTG
aaccccagtgaggaagggac

SEQ ID NO: 55542 - DNA, 20 bp, Artificial Sequence
  Description of Artificial Sequence: Synthetic oligonucleotide
  Target: ATXN2; (-) strand; PAM type: YTN; PAM sequence: CTC
tgaaccccagtgaggaaggg

SEQ ID NO: 55543 - DNA, 20 bp, Artificial Sequence
  Description of Artificial Sequence: Synthetic oligonucleotide
  Target: ATXN2; (-) strand; PAM type: YTN; PAM sequence: CTA
aggtggggaaggcccaactc

SEQ ID NO: 55544 - DNA, 20 bp, Artificial Sequence
  Description of Artificial Sequence: Synthetic oligonucleotide
  Target: ATXN2; (-) strand; PAM type: YTN; PAM sequence: CTG
agcccccggggacagccaga

SEQ ID NO: 55545 - DNA, 20 bp, Artificial Sequence
  Description of Artificial Sequence: Synthetic oligonucleotide
  Target: ATXN2; (-) strand; PAM type: YTN; PAM sequence: CTG
ggctgagcccccggggacag

SEQ ID NO: 55546 - DNA, 20 bp, Artificial Sequence
  Description of Artificial Sequence: Synthetic oligonucleotide
  Target: ATXN2; (-) strand; PAM type: YTN; PAM sequence: CTC
tgggctgagcccccggggac

SEQ ID NO: 55547 - DNA, 20 bp, Artificial Sequence
  Description of Artificial Sequence: Synthetic oligonucleotide
  Target: ATXN2; (-) strand; PAM type: YTN; PAM sequence: CTG
ggagaccctctgggctgagc

SEQ ID NO: 55548 - DNA, 20 bp, Artificial Sequence
  Description of Artificial Sequence: Synthetic oligonucleotide
  Target: ATXN2; (-) strand; PAM type: YTN; PAM sequence: CTC
ggggggtgaggatcgccctg

SEQ ID NO: 55549 - DNA, 20 bp, Artificial Sequence
  Description of Artificial Sequence: Synthetic oligonucleotide
  Target: ATXN2; (-) strand; PAM type: YTN; PAM sequence: CTG
ctcggggggtgaggatcgcc

SEQ ID NO: 55550 - DNA, 20 bp, Artificial Sequence
  Description of Artificial Sequence: Synthetic oligonucleotide
  Target: ATXN2; (-) strand; PAM type: YTN; PAM sequence: TTC
gggcgaaggcaccaggtgga

SEQ ID NO: 55551 - DNA, 20 bp, Artificial Sequence
  Description of Artificial Sequence: Synthetic oligonucleotide
  Target: ATXN2; (-) strand; PAM type: YTN; PAM sequence: CTT
cgggcgaaggcaccaggtgg

SEQ ID NO: 55552 - DNA, 20 bp, Artificial Sequence
  Description of Artificial Sequence: Synthetic oligonucleotide
  Target: ATXN2; (-) strand; PAM type: YTN; PAM sequence: TTC
ttcgggcgaaggcaccaggt

SEQ ID NO: 55553 - DNA, 20 bp, Artificial Sequence
  Description of Artificial Sequence: Synthetic oligonucleotide
  Target: ATXN2; (-) strand; PAM type: YTN; PAM sequence: TTG
gccagttcttcgggcgaagg

SEQ ID NO: 55554 - DNA, 20 bp, Artificial Sequence
  Description of Artificial Sequence: Synthetic oligonucleotide
  Target: ATXN2; (-) strand; PAM type: YTN; PAM sequence: CTG
ttggccagttcttcgggcga

SEQ ID NO: 55555 - DNA, 20 bp, Artificial Sequence
  Description of Artificial Sequence: Synthetic oligonucleotide
  Target: ATXN2; (-) strand; PAM type: YTN; PAM sequence: CTG
caggctgttggccagttctt

SEQ ID NO: 55556 - DNA, 20 bp, Artificial Sequence
  Description of Artificial Sequence: Synthetic oligonucleotide
  Target: ATXN2; (-) strand; PAM type: YTN; PAM sequence: CTC
caggtgctgcaggctgttgg

SEQ ID NO: 55557 - DNA, 20 bp, Artificial Sequence
  Description of Artificial Sequence: Synthetic oligonucleotide
  Target: ATXN2; (-) strand; PAM type: YTN; PAM sequence: CTC
atgctccaggtgctgcaggc

SEQ ID NO: 55558 - DNA, 20 bp, Artificial Sequence
  Description of Artificial Sequence: Synthetic oligonucleotide
  Target: ATXN2; (-) strand; PAM type: YTN; PAM sequence: TTC
acaggctcatgctccaggtg

SEQ ID NO: 55559 - DNA, 20 bp, Artificial Sequence
  Description of Artificial Sequence: Synthetic oligonucleotide
  Target: ATXN2; (-) strand; PAM type: YTN; PAM sequence: CTC
gattcacaggctcatgctcc

SEQ ID NO: 55560 - DNA, 20 bp, Artificial Sequence
  Description of Artificial Sequence: Synthetic oligonucleotide
  Target: ATXN2; (-) strand; PAM type: YTN; PAM sequence: TTC
gtagtccgagtcccgggctc

SEQ ID NO: 55561 - DNA, 20 bp, Artificial Sequence
  Description of Artificial Sequence: Synthetic oligonucleotide
  Target: ATXN2; (-) strand; PAM type: YTN; PAM sequence: TTT
cgtagtccgagtcccgggct

SEQ ID NO: 55562 - DNA, 20 bp, Artificial Sequence
  Description of Artificial Sequence: Synthetic oligonucleotide
  Target: ATXN2; (-) strand; PAM type: YTN; PAM sequence: CTC
cgggaggatgagtccatttc

SEQ ID NO: 55563 - DNA, 20 bp, Artificial Sequence
  Description of Artificial Sequence: Synthetic oligonucleotide
  Target: ATXN2; (-) strand; PAM type: YTN; PAM sequence: CTA
tggcccgcaggtggctccgg

SEQ ID NO: 55564 - DNA, 20 bp, Artificial Sequence
  Description of Artificial Sequence: Synthetic oligonucleotide
  Target: ATXN2; (-) strand; PAM type: YTN; PAM sequence: TTG
tctatggcccgcaggtggct

SEQ ID NO: 55565 - DNA, 20 bp, Artificial Sequence
  Description of Artificial Sequence: Synthetic oligonucleotide
  Target: ATXN2; (-) strand; PAM type: YTN; PAM sequence: CTG
attgtctatggcccgcaggt

SEQ ID NO: 55566 - DNA, 20 bp, Artificial Sequence
  Description of Artificial Sequence: Synthetic oligonucleotide
  Target: ATXN2; (-) strand; PAM type: YTN; PAM sequence: CTG
gtcagagaggtgtgtactga

SEQ ID NO: 55567 - DNA, 20 bp, Artificial Sequence
  Description of Artificial Sequence: Synthetic oligonucleotide
  Target: ATXN2; (-) strand; PAM type: YTN; PAM sequence: CTC
actggtcagagaggtgtgta

SEQ ID NO: 55568 - DNA, 20 bp, Artificial Sequence
  Description of Artificial Sequence: Synthetic oligonucleotide
  Target: ATXN2; (-) strand; PAM type: YTN; PAM sequence: TTC
ctcactggtcagagaggtgt

SEQ ID NO: 55569 - DNA, 20 bp, Artificial Sequence
  Description of Artificial Sequence: Synthetic oligonucleotide
  Target: ATXN2; (-) strand; PAM type: YTN; PAM sequence: CTG
gaattcctcactggtcagag

SEQ ID NO: 55570 - DNA, 20 bp, Artificial Sequence
  Description of Artificial Sequence: Synthetic oligonucleotide
  Target: ATXN2; (-) strand; PAM type: YTN; PAM sequence: TTG
aggcctggaattcctcactg

SEQ ID NO: 55571 - DNA, 20 bp, Artificial Sequence
  Description of Artificial Sequence: Synthetic oligonucleotide
  Target: ATXN2; (-) strand; PAM type: YTN; PAM sequence: CTG
ttgaggcctggaattcctca

SEQ ID NO: 55572 - DNA, 20 bp, Artificial Sequence
  Description of Artificial Sequence: Synthetic oligonucleotide
  Target: ATXN2; (-) strand; PAM type: YTN; PAM sequence: CTC
aagggcagctgttgaggcct

SEQ ID NO: 55573 - DNA, 20 bp, Artificial Sequence
  Description of Artificial Sequence: Synthetic oligonucleotide
  Target: ATXN2; (-) strand; PAM type: YTN; PAM sequence: CTC
ctcaagggcagctgttgagg

SEQ ID NO: 55574 - DNA, 20 bp, Artificial Sequence
  Description of Artificial Sequence: Synthetic oligonucleotide
  Target: ATXN2; (-) strand; PAM type: YTN; PAM sequence: CTG
tgctcctcaagggcagctgt

SEQ ID NO: 55575 - DNA, 20 bp, Artificial Sequence
  Description of Artificial Sequence: Synthetic oligonucleotide
  Target: ATXN2; (-) strand; PAM type: YTN; PAM sequence: CTG
cctgtgctcctcaagggcag

SEQ ID NO: 55576 - DNA, 20 bp, Artificial Sequence
  Description of Artificial Sequence: Synthetic oligonucleotide
  Target: ATXN2; (-) strand; PAM type: YTN; PAM sequence: TTC
tgcctgtgctcctcaagggc

SEQ ID NO: 55577 - DNA, 20 bp, Artificial Sequence
  Description of Artificial Sequence: Synthetic oligonucleotide
  Target: ATXN2; (-) strand; PAM type: YTN; PAM sequence: CTT
ctgcctgtgctcctcaaggg

SEQ ID NO: 55578 - DNA, 20 bp, Artificial Sequence
  Description of Artificial Sequence: Synthetic oligonucleotide
  Target: ATXN2; (-) strand; PAM type: YTN; PAM sequence: TTC
acacttctgcctgtgctcct

SEQ ID NO: 55579 - DNA, 20 bp, Artificial Sequence
  Description of Artificial Sequence: Synthetic oligonucleotide
  Target: ATXN2; (-) strand; PAM type: YTN; PAM sequence: TTC
acaagttcacacttctgcct

SEQ ID NO: 55580 - DNA, 20 bp, Artificial Sequence
  Description of Artificial Sequence: Synthetic oligonucleotide
  Target: ATXN2; (-) strand; PAM type: YTN; PAM sequence: TTA
cattcacaagttcacacttc

SEQ ID NO: 55581 - DNA, 20 bp, Artificial Sequence
  Description of Artificial Sequence: Synthetic oligonucleotide
  Target: ATXN2; (-) strand; PAM type: YTN; PAM sequence: CTG
gaaggaaggaaagatcaatt

SEQ ID NO: 55582 - DNA, 20 bp, Artificial Sequence
  Description of Artificial Sequence: Synthetic oligonucleotide
  Target: ATXN2; (-) strand; PAM type: YTN; PAM sequence: CTC
tggaaggaaggaaagatcaa

SEQ ID NO: 55583 - DNA, 20 bp, Artificial Sequence
  Description of Artificial Sequence: Synthetic oligonucleotide
  Target: ATXN2; (-) strand; PAM type: YTN; PAM sequence: TTC
tctggaaggaaggaaagatc

SEQ ID NO: 55584 - DNA, 20 bp, Artificial Sequence
  Description of Artificial Sequence: Synthetic oligonucleotide
  Target: ATXN2; (-) strand; PAM type: YTN; PAM sequence: TTT
ctctggaaggaaggaaagat

SEQ ID NO: 55585 - DNA, 20 bp, Artificial Sequence
  Description of Artificial Sequence: Synthetic oligonucleotide
  Target: ATXN2; (-) strand; PAM type: YTN; PAM sequence: CTT
tctctggaaggaaggaaaga

SEQ ID NO: 55586 - DNA, 20 bp, Artificial Sequence
  Description of Artificial Sequence: Synthetic oligonucleotide
  Target: ATXN2; (-) strand; PAM type: YTN; PAM sequence: TTA
aatctttctctggaaggaag

SEQ ID NO: 55587 - DNA, 20 bp, Artificial Sequence
  Description of Artificial Sequence: Synthetic oligonucleotide
  Target: ATXN2; (-) strand; PAM type: YTN; PAM sequence: CTT
aaatctttctctggaaggaa

SEQ ID NO: 55588 - DNA, 20 bp, Artificial Sequence
  Description of Artificial Sequence: Synthetic oligonucleotide
  Target: ATXN2; (-) strand; PAM type: YTN; PAM sequence: TTA
acagtgtcccttaaatcttt

SEQ ID NO: 55589 - DNA, 20 bp, Artificial Sequence
  Description of Artificial Sequence: Synthetic oligonucleotide
  Target: ATXN2; (-) strand; PAM type: YTN; PAM sequence: CTG
gcacgagcagttaacagtgt

SEQ ID NO: 55590 - DNA, 20 bp, Artificial Sequence
  Description of Artificial Sequence: Synthetic oligonucleotide
  Target: ATXN2; (-) strand; PAM type: YTN; PAM sequence: TTC
caaactggcacgagcagtta

SEQ ID NO: 55591 - DNA, 20 bp, Artificial Sequence
  Description of Artificial Sequence: Synthetic oligonucleotide
  Target: ATXN2; (-) strand; PAM type: YTN; PAM sequence: CTT
ccaaactggcacgagcagtt

SEQ ID NO: 55592 - DNA, 20 bp, Artificial Sequence
  Description of Artificial Sequence: Synthetic oligonucleotide
  Target: ATXN2; (-) strand; PAM type: YTN; PAM sequence: CTA
atagaagggtcacttccaaa

SEQ ID NO: 55593 - DNA, 20 bp, Artificial Sequence
  Description of Artificial Sequence: Synthetic oligonucleotide
  Target: ATXN2; (-) strand; PAM type: YTN; PAM sequence: TTC
aacaggcctaatagaagggt

SEQ ID NO: 55594 - DNA, 20 bp, Artificial Sequence
  Description of Artificial Sequence: Synthetic oligonucleotide
  Target: ATXN2; (-) strand; PAM type: YTN; PAM sequence: CTT
caacaggcctaatagaaggg

SEQ ID NO: 55595 - DNA, 20 bp, Artificial Sequence
  Description of Artificial Sequence: Synthetic oligonucleotide
  Target: ATXN2; (-) strand; PAM type: YTN; PAM sequence: CTA
caggagggcccttcaacagg

SEQ ID NO: 55596 - DNA, 20 bp, Artificial Sequence
  Description of Artificial Sequence: Synthetic oligonucleotide
  Target: ATXN2; (-) strand; PAM type: YTN; PAM sequence: CTG
taaacaataaggagaaagcc

SEQ ID NO: 55597 - DNA, 20 bp, Artificial Sequence
  Description of Artificial Sequence: Synthetic oligonucleotide
  Target: ATXN2; (-) strand; PAM type: YTN; PAM sequence: CTA
catctgtaaacaataaggag

SEQ ID NO: 55598 - DNA, 20 bp, Artificial Sequence
  Description of Artificial Sequence: Synthetic oligonucleotide
  Target: ATXN2; (-) strand; PAM type: YTN; PAM sequence: CTA
acaagaactacatctgtaaa

SEQ ID NO: 55599 - DNA, 20 bp, Artificial Sequence
  Description of Artificial Sequence: Synthetic oligonucleotide
  Target: ATXN2; (-) strand; PAM type: YTN; PAM sequence: CTC
taacaagaactacatctgta

SEQ ID NO: 55600 - DNA, 20 bp, Artificial Sequence
  Description of Artificial Sequence: Synthetic oligonucleotide
  Target: ATXN2; (-) strand; PAM type: YTN; PAM sequence: CTA
gcggcatcctctaacaagaa

SEQ ID NO: 55601 - DNA, 20 bp, Artificial Sequence
  Description of Artificial Sequence: Synthetic oligonucleotide
  Target: ATXN2; (-) strand; PAM type: YTN; PAM sequence: CTG
ggcatagggaccccgggcag

SEQ ID NO: 55602 - DNA, 20 bp, Artificial Sequence
  Description of Artificial Sequence: Synthetic oligonucleotide
  Target: ATXN2; (-) strand; PAM type: YTN; PAM sequence: CTA
agagtaacggggactgggca

SEQ ID NO: 55603 - DNA, 20 bp, Artificial Sequence
  Description of Artificial Sequence: Synthetic oligonucleotide
  Target: ATXN2; (-) strand; PAM type: YTN; PAM sequence: CTC
taagagtaacggggactggg

SEQ ID NO: 55604 - DNA, 20 bp, Artificial Sequence
  Description of Artificial Sequence: Synthetic oligonucleotide
  Target: ATXN2; (-) strand; PAM type: YTN; PAM sequence: TTC
tctaagagtaacggggactg

SEQ ID NO: 55605 - DNA, 20 bp, Artificial Sequence
  Description of Artificial Sequence: Synthetic oligonucleotide
  Target: ATXN2; (-) strand; PAM type: YTN; PAM sequence: TTT
ctctaagagtaacggggact

SEQ ID NO: 55606 - DNA, 20 bp, Artificial Sequence
  Description of Artificial Sequence: Synthetic oligonucleotide
  Target: ATXN2; (-) strand; PAM type: YTN; PAM sequence: CTT
tctctaagagtaacggggac

SEQ ID NO: 55607 - DNA, 20 bp, Artificial Sequence
  Description of Artificial Sequence: Synthetic oligonucleotide
  Target: ATXN2; (-) strand; PAM type: YTN; PAM sequence: CTC
ctttctctaagagtaacggg

SEQ ID NO: 55608 - DNA, 20 bp, Artificial Sequence
  Description of Artificial Sequence: Synthetic oligonucleotide
  Target: ATXN2; (-) strand; PAM type: YTN; PAM sequence: CTC
accccaactcctttctctaa

SEQ ID NO: 55609 - DNA, 20 bp, Artificial Sequence
  Description of Artificial Sequence: Synthetic oligonucleotide
  Target: ATXN2; (-) strand; PAM type: YTN; PAM sequence: CTG
gccctcaccccaactccttt

SEQ ID NO: 55610 - DNA, 20 bp, Artificial Sequence
  Description of Artificial Sequence: Synthetic oligonucleotide
  Target: ATXN2; (-) strand; PAM type: YTN; PAM sequence: CTC
tggccctcaccccaactcct

SEQ ID NO: 55611 - DNA, 20 bp, Artificial Sequence
  Description of Artificial Sequence: Synthetic oligonucleotide
  Target: ATXN2; (-) strand; PAM type: YTN; PAM sequence: CTG
ccagctctggccctcacccc

SEQ ID NO: 55612 - DNA, 20 bp, Artificial Sequence
  Description of Artificial Sequence: Synthetic oligonucleotide
  Target: ATXN2; (-) strand; PAM type: YTN; PAM sequence: TTC
cactgccagctctggccctc

SEQ ID NO: 55613 - DNA, 20 bp, Artificial Sequence
  Description of Artificial Sequence: Synthetic oligonucleotide
  Target: ATXN2; (-) strand; PAM type: YTN; PAM sequence: TTT
ccactgccagctctggccct

SEQ ID NO: 55614 - DNA, 20 bp, Artificial Sequence
  Description of Artificial Sequence: Synthetic oligonucleotide
  Target: ATXN2; (-) strand; PAM type: YTN; PAM sequence: CTG
tgacagtgtcagtgaaaaag

SEQ ID NO: 55615 - DNA, 20 bp, Artificial Sequence
  Description of Artificial Sequence: Synthetic oligonucleotide
  Target: ATXN2; (-) strand; PAM type: YTN; PAM sequence: CTG
tcatccgctgtgacagtgtc

SEQ ID NO: 55616 - DNA, 20 bp, Artificial Sequence
  Description of Artificial Sequence: Synthetic oligonucleotide
  Target: ATXN2; (-) strand; PAM type: YTN; PAM sequence: CTC
cccgtagaaagtctgtcatc

SEQ ID NO: 55617 - DNA, 20 bp, Artificial Sequence
  Description of Artificial Sequence: Synthetic oligonucleotide
  Target: ATXN2; (-) strand; PAM type: YTN; PAM sequence: CTC
ctccccgtagaaagtctgtc

SEQ ID NO: 55618 - DNA, 20 bp, Artificial Sequence
  Description of Artificial Sequence: Synthetic oligonucleotide
  Target: ATXN2; (-) strand; PAM type: YTN; PAM sequence: CTG
atgatccccccctcctcccc

SEQ ID NO: 55619 - DNA, 20 bp, Artificial Sequence
  Description of Artificial Sequence: Synthetic oligonucleotide
  Target: ATXN2; (-) strand; PAM type: YTN; PAM sequence: TTC
ctgatgatccccccctcctc

SEQ ID NO: 55620 - DNA, 20 bp, Artificial Sequence
  Description of Artificial Sequence: Synthetic oligonucleotide
  Target: ATXN2; (-) strand; PAM type: YTN; PAM sequence: CTT
cctgatgatccccccctcct

SEQ ID NO: 55621 - DNA, 20 bp, Artificial Sequence
  Description of Artificial Sequence: Synthetic oligonucleotide
  Target: ATXN2; (-) strand; PAM type: YTN; PAM sequence: CTG
ggcttcctgatgatcccccc

SEQ ID NO: 55622 - DNA, 20 bp, Artificial Sequence
  Description of Artificial Sequence: Synthetic oligonucleotide
  Target: ATXN2; (-) strand; PAM type: YTN; PAM sequence: TTC
tgggcttcctgatgatcccc

SEQ ID NO: 55623 - DNA, 20 bp, Artificial Sequence
  Description of Artificial Sequence: Synthetic oligonucleotide
  Target: ATXN2; (-) strand; PAM type: YTN; PAM sequence: TTA
gtgttctgggcttcctgatg

SEQ ID NO: 55624 - DNA, 20 bp, Artificial Sequence
  Description of Artificial Sequence: Synthetic oligonucleotide
  Target: ATXN2; (-) strand; PAM type: YTN; PAM sequence: TTG
ttagtgttctgggcttcctg

SEQ ID NO: 55625 - DNA, 20 bp, Artificial Sequence
  Description of Artificial Sequence: Synthetic oligonucleotide
  Target: ATXN2; (-) strand; PAM type: YTN; PAM sequence: CTT
gttagtgttctgggcttcct

SEQ ID NO: 55626 - DNA, 20 bp, Artificial Sequence
  Description of Artificial Sequence: Synthetic oligonucleotide
  Target: ATXN2; (-) strand; PAM type: YTN; PAM sequence: CTG
acggtagatgggagaaccgc

SEQ ID NO: 55627 - DNA, 20 bp, Artificial Sequence
  Description of Artificial Sequence: Synthetic oligonucleotide
  Target: ATXN2; (-) strand; PAM type: YTN; PAM sequence: CTG
ccatgtggactgacggtaga

SEQ ID NO: 55628 - DNA, 20 bp, Artificial Sequence
  Description of Artificial Sequence: Synthetic oligonucleotide
  Target: ATXN2; (-) strand; PAM type: YTN; PAM sequence: CTG
tggtgtggacacagcagacc

SEQ ID NO: 55629 - DNA, 20 bp, Artificial Sequence
  Description of Artificial Sequence: Synthetic oligonucleotide
  Target: ATXN2; (-) strand; PAM type: YTN; PAM sequence: TTA
gatgtggtcatctgtggtgt

SEQ ID NO: 55630 - DNA, 20 bp, Artificial Sequence
  Description of Artificial Sequence: Synthetic oligonucleotide
  Target: ATXN2; (-) strand; PAM type: YTN; PAM sequence: CTG
agagtagaagcaggattaga

SEQ ID NO: 55631 - DNA, 20 bp, Artificial Sequence
  Description of Artificial Sequence: Synthetic oligonucleotide
  Target: ATXN2; (-) strand; PAM type: YTN; PAM sequence: CTA
aagctgagagtagaagcagg

SEQ ID NO: 55632 - DNA, 20 bp, Artificial Sequence
  Description of Artificial Sequence: Synthetic oligonucleotide
  Target: ATXN2; (-) strand; PAM type: YTN; PAM sequence: TTG
tcctaaagctgagagtagaa

SEQ ID NO: 55633 - DNA, 20 bp, Artificial Sequence
  Description of Artificial Sequence: Synthetic oligonucleotide
  Target: ATXN2; (-) strand; PAM type: YTN; PAM sequence: TTT
gtcctaaagctgagagtaga

SEQ ID NO: 55634 - DNA, 20 bp, Artificial Sequence
  Description of Artificial Sequence: Synthetic oligonucleotide
  Target: ATXN2; (-) strand; PAM type: YTN; PAM sequence: TTT
tgtcctaaagctgagagtag

SEQ ID NO: 55635 - DNA, 20 bp, Artificial Sequence
  Description of Artificial Sequence: Synthetic oligonucleotide
  Target: ATXN2; (-) strand; PAM type: YTN; PAM sequence: CTT
ttgtcctaaagctgagagta

SEQ ID NO: 55636 - DNA, 20 bp, Artificial Sequence
  Description of Artificial Sequence: Synthetic oligonucleotide
  Target: ATXN2; (-) strand; PAM type: YTN; PAM sequence: CTG
acagagcttttgtcctaaag

SEQ ID NO: 55637 - DNA, 20 bp, Artificial Sequence
  Description of Artificial Sequence: Synthetic oligonucleotide
  Target: ATXN2; (-) strand; PAM type: YTN; PAM sequence: CTC
tgacagagcttttgtcctaa

SEQ ID NO: 55638 - DNA, 20 bp, Artificial Sequence
  Description of Artificial Sequence: Synthetic oligonucleotide
  Target: ATXN2; (-) strand; PAM type: YTN; PAM sequence: TTG
tgcctctgacagagcttttg

SEQ ID NO: 55639 - DNA, 20 bp, Artificial Sequence
  Description of Artificial Sequence: Synthetic oligonucleotide
  Target: ATXN2; (-) strand; PAM type: YTN; PAM sequence: CTT
gtgcctctgacagagctttt

SEQ ID NO: 55640 - DNA, 20 bp, Artificial Sequence
  Description of Artificial Sequence: Synthetic oligonucleotide
  Target: ATXN2; (-) strand; PAM type: YTN; PAM sequence: TTC
agcttgtgcctctgacagag

SEQ ID NO: 55641 - DNA, 20 bp, Artificial Sequence
  Description of Artificial Sequence: Synthetic oligonucleotide
  Target: ATXN2; (-) strand; PAM type: YTN; PAM sequence: CTT
cagcttgtgcctctgacaga

SEQ ID NO: 55642 - DNA, 20 bp, Artificial Sequence
  Description of Artificial Sequence: Synthetic oligonucleotide
  Target: ATXN2; (-) strand; PAM type: YTN; PAM sequence: TTG
accttcagcttgtgcctctg

SEQ ID NO: 55643 - DNA, 20 bp, Artificial Sequence
  Description of Artificial Sequence: Synthetic oligonucleotide
  Target: ATXN2; (-) strand; PAM type: YTN; PAM sequence: TTT
gaccttcagcttgtgcctct

SEQ ID NO: 55644 - DNA, 20 bp, Artificial Sequence
  Description of Artificial Sequence: Synthetic oligonucleotide
  Target: ATXN2; (-) strand; PAM type: YTN; PAM sequence: TTT
tgaccttcagcttgtgcctc

SEQ ID NO: 55645 - DNA, 20 bp, Artificial Sequence
  Description of Artificial Sequence: Synthetic oligonucleotide
  Target: ATXN2; (-) strand; PAM type: YTN; PAM sequence: TTT
ttgaccttcagcttgtgcct

SEQ ID NO: 55646 - DNA, 20 bp, Artificial Sequence
  Description of Artificial Sequence: Synthetic oligonucleotide
  Target: ATXN2; (-) strand; PAM type: YTN; PAM sequence: TTA
aatcatttttgaccttcagc

SEQ ID NO: 55647 - DNA, 20 bp, Artificial Sequence
  Description of Artificial Sequence: Synthetic oligonucleotide
  Target: ATXN2; (-) strand; PAM type: YTN; PAM sequence: TTT
aaatcatttttgaccttcag

SEQ ID NO: 55648 - DNA, 20 bp, Artificial Sequence
  Description of Artificial Sequence: Synthetic oligonucleotide
  Target: ATXN2; (-) strand; PAM type: YTN; PAM sequence: TTT
taaatcatttttgaccttca

SEQ ID NO: 55649 - DNA, 20 bp, Artificial Sequence
  Description of Artificial Sequence: Synthetic oligonucleotide
  Target: ATXN2; (-) strand; PAM type: YTN; PAM sequence: CTG
aggtaaaatgttttaaatca

SEQ ID NO: 55650 - DNA, 20 bp, Artificial Sequence
  Description of Artificial Sequence: Synthetic oligonucleotide
  Target: ATXN2; (-) strand; PAM type: YTN; PAM sequence: TTA
gtctgaggtaaaatgtttta

SEQ ID NO: 55651 - DNA, 20 bp, Artificial Sequence
  Description of Artificial Sequence: Synthetic oligonucleotide
  Target: ATXN2; (-) strand; PAM type: YTN; PAM sequence: TTA
aagaaattagtctgaggtaa

SEQ ID NO: 55652 - DNA, 20 bp, Artificial Sequence
  Description of Artificial Sequence: Synthetic oligonucleotide
  Target: ATXN2; (-) strand; PAM type: YTN; PAM sequence: TTT
aaagaaattagtctgaggta

SEQ ID NO: 55653 - DNA, 20 bp, Artificial Sequence
  Description of Artificial Sequence: Synthetic oligonucleotide
  Target: ATXN2; (-) strand; PAM type: YTN; PAM sequence: CTT
taaagaaattagtctgaggt

SEQ ID NO: 55654 - DNA, 20 bp, Artificial Sequence
  Description of Artificial Sequence: Synthetic oligonucleotide
  Target: ATXN2; (-) strand; PAM type: YTN; PAM sequence: CTG
aatcctttaaagaaattagt

SEQ ID NO: 55655 - DNA, 20 bp, Artificial Sequence
  Description of Artificial Sequence: Synthetic oligonucleotide
  Target: ATXN2; (-) strand; PAM type: YTN; PAM sequence: TTG
aacctgaatcctttaaagaa

SEQ ID NO: 55656 - DNA, 20 bp, Artificial Sequence
  Description of Artificial Sequence: Synthetic oligonucleotide
  Target: ATXN2; (-) strand; PAM type: YTN; PAM sequence: TTT
gaacctgaatcctttaaaga

SEQ ID NO: 55657 - DNA, 20 bp, Artificial Sequence
  Description of Artificial Sequence: Synthetic oligonucleotide
  Target: ATXN2; (-) strand; PAM type: YTN; PAM sequence: TTT
tgaacctgaatcctttaaag

SEQ ID NO: 55658 - DNA, 20 bp, Artificial Sequence
  Description of Artificial Sequence: Synthetic oligonucleotide
  Target: ATXN2; (-) strand; PAM type: YTN; PAM sequence: TTA
agttttgaacctgaatcctt

SEQ ID NO: 55659 - DNA, 20 bp, Artificial Sequence
  Description of Artificial Sequence: Synthetic oligonucleotide
  Target: ATXN2; (-) strand; PAM type: YTN; PAM sequence: CTG
aaataagcagtggttaagtt

SEQ ID NO: 55660 - DNA, 20 bp, Artificial Sequence
  Description of Artificial Sequence: Synthetic oligonucleotide
  Target: ATXN2; (-) strand; PAM type: YTN; PAM sequence: TTG
aaacagtgcactgaaataag

SEQ ID NO: 55661 - DNA, 20 bp, Artificial Sequence
  Description of Artificial Sequence: Synthetic oligonucleotide
  Target: ATXN2; (-) strand; PAM type: YTN; PAM sequence: TTA
gttgaaacagtgcactgaaa

SEQ ID NO: 55662 - DNA, 20 bp, Artificial Sequence
  Description of Artificial Sequence: Synthetic oligonucleotide
  Target: ATXN2; (-) strand; PAM type: YTN; PAM sequence: CTA
caaaaatagcatgggtgtta

SEQ ID NO: 55663 - DNA, 20 bp, Artificial Sequence
  Description of Artificial Sequence: Synthetic oligonucleotide
  Target: ATXN2; (-) strand; PAM type: YTN; PAM sequence: CTG
actacaaaaatagcatgggt

SEQ ID NO: 55664 - DNA, 20 bp, Artificial Sequence
  Description of Artificial Sequence: Synthetic oligonucleotide
  Target: ATXN2; (-) strand; PAM type: YTN; PAM sequence: TTC
tgactacaaaaatagcatgg

SEQ ID NO: 55665 - DNA, 20 bp, Artificial Sequence
  Description of Artificial Sequence: Synthetic oligonucleotide
  Target: ATXN2; (-) strand; PAM type: YTN; PAM sequence: TTT
ctgactacaaaaatagcatg

SEQ ID NO: 55666 - DNA, 20 bp, Artificial Sequence
  Description of Artificial Sequence: Synthetic oligonucleotide
  Target: ATXN2; (-) strand; PAM type: YTN; PAM sequence: CTG
tttctgactacaaaaatagc

SEQ ID NO: 55667 - DNA, 20 bp, Artificial Sequence
  Description of Artificial Sequence: Synthetic oligonucleotide
  Target: ATXN2; (-) strand; PAM type: YTN; PAM sequence: TTG
catagctgtttctgactaca

SEQ ID NO: 55668 - DNA, 20 bp, Artificial Sequence
  Description of Artificial Sequence: Synthetic oligonucleotide
  Target: ATXN2; (-) strand; PAM type: YTN; PAM sequence: TTT
gcatagctgtttctgactac

SEQ ID NO: 55669 - DNA, 20 bp, Artificial Sequence
  Description of Artificial Sequence: Synthetic oligonucleotide
  Target: ATXN2; (-) strand; PAM type: YTN; PAM sequence: TTA
ggtagggtttgcatagctgt

SEQ ID NO: 55670 - DNA, 20 bp, Artificial Sequence
  Description of Artificial Sequence: Synthetic oligonucleotide
  Target: ATXN2; (-) strand; PAM type: YTN; PAM sequence: CTG
taaattaggtagggtttgca

SEQ ID NO: 55671 - DNA, 20 bp, Artificial Sequence
  Description of Artificial Sequence: Synthetic oligonucleotide
  Target: ATXN2; (-) strand; PAM type: YTN; PAM sequence: CTC
agactgtaaattaggtaggg

SEQ ID NO: 55672 - DNA, 20 bp, Artificial Sequence
  Description of Artificial Sequence: Synthetic oligonucleotide
  Target: ATXN2; (-) strand; PAM type: YTN; PAM sequence: CTG
gctcagactgtaaattaggt

SEQ ID NO: 55673 - DNA, 20 bp, Artificial Sequence
  Description of Artificial Sequence: Synthetic oligonucleotide
  Target: ATXN2; (-) strand; PAM type: YTN; PAM sequence: CTG
tcccgaggatgcagtagaca

SEQ ID NO: 55674 - DNA, 20 bp, Artificial Sequence
  Description of Artificial Sequence: Synthetic oligonucleotide
  Target: ATXN2; (-) strand; PAM type: YTN; PAM sequence: CTC
agtggcaggtgactgtcccg

SEQ ID NO: 55675 - DNA, 20 bp, Artificial Sequence
  Description of Artificial Sequence: Synthetic oligonucleotide
  Target: ATXN2; (-) strand; PAM type: YTN; PAM sequence: TTA
ggaaggacagtggccactca

SEQ ID NO: 55676 - DNA, 20 bp, Artificial Sequence
  Description of Artificial Sequence: Synthetic oligonucleotide
  Target: ATXN2; (-) strand; PAM type: YTN; PAM sequence: TTT
aggaaggacagtggccactc

SEQ ID NO: 55677 - DNA, 20 bp, Artificial Sequence
  Description of Artificial Sequence: Synthetic oligonucleotide
  Target: ATXN2; (-) strand; PAM type: YTN; PAM sequence: TTG
acatttaggaaggacagtgg

SEQ ID NO: 55678 - DNA, 20 bp, Artificial Sequence
  Description of Artificial Sequence: Synthetic oligonucleotide
  Target: ATXN2; (-) strand; PAM type: YTN; PAM sequence: CTT
gacatttaggaaggacagtg

SEQ ID NO: 55679 - DNA, 20 bp, Artificial Sequence
  Description of Artificial Sequence: Synthetic oligonucleotide
  Target: ATXN2; (-) strand; PAM type: YTN; PAM sequence: TTC
ttgacatttaggaaggacag

SEQ ID NO: 55680 - DNA, 20 bp, Artificial Sequence
  Description of Artificial Sequence: Synthetic oligonucleotide
  Target: ATXN2; (-) strand; PAM type: YTN; PAM sequence: CTT
cttgacatttaggaaggaca

SEQ ID NO: 55681 - DNA, 20 bp, Artificial Sequence
  Description of Artificial Sequence: Synthetic oligonucleotide
  Target: ATXN2; (-) strand; PAM type: YTN; PAM sequence: TTC
acttcttgacatttaggaag

SEQ ID NO: 55682 - DNA, 20 bp, Artificial Sequence
  Description of Artificial Sequence: Synthetic oligonucleotide
  Target: ATXN2; (-) strand; PAM type: YTN; PAM sequence: CTT
cacttcttgacatttaggaa

SEQ ID NO: 55683 - DNA, 20 bp, Artificial Sequence
  Description of Artificial Sequence: Synthetic oligonucleotide
  Target: ATXN2; (-) strand; PAM type: YTN; PAM sequence: CTG
aaagggtgacatacttcact

SEQ ID NO: 55684 - DNA, 20 bp, Artificial Sequence
  Description of Artificial Sequence: Synthetic oligonucleotide
  Target: ATXN2; (-) strand; PAM type: YTN; PAM sequence: TTC
cctgaaagggtgacatactt

SEQ ID NO: 55685 - DNA, 20 bp, Artificial Sequence
  Description of Artificial Sequence: Synthetic oligonucleotide
  Target: ATXN2; (-) strand; PAM type: YTN; PAM sequence: TTT
ccctgaaagggtgacatact

SEQ ID NO: 55686 - DNA, 20 bp, Artificial Sequence
  Description of Artificial Sequence: Synthetic oligonucleotide
  Target: ATXN2; (-) strand; PAM type: YTN; PAM sequence: CTG
aatttccctgaaagggtgac

SEQ ID NO: 55687 - DNA, 20 bp, Artificial Sequence
  Description of Artificial Sequence: Synthetic oligonucleotide
  Target: ATXN2; (-) strand; PAM type: YTN; PAM sequence: TTG
cctgaatttccctgaaaggg

SEQ ID NO: 55688 - DNA, 20 bp, Artificial Sequence
  Description of Artificial Sequence: Synthetic oligonucleotide
  Target: ATXN2; (-) strand; PAM type: YTN; PAM sequence: TTC
agtaattgcctgaatttccc

SEQ ID NO: 55689 - DNA, 20 bp, Artificial Sequence
  Description of Artificial Sequence: Synthetic oligonucleotide
  Target: ATXN2; (-) strand; PAM type: YTN; PAM sequence: TTT
cagtaattgcctgaatttcc

SEQ ID NO: 55690 - DNA, 20 bp, Artificial Sequence
  Description of Artificial Sequence: Synthetic oligonucleotide
  Target: ATXN2; (-) strand; PAM type: YTN; PAM sequence: CTA
tttcagtaattgcctgaatt

SEQ ID NO: 55691 - DNA, 20 bp, Artificial Sequence
  Description of Artificial Sequence: Synthetic oligonucleotide
  Target: ATXN2; (-) strand; PAM type: YTN; PAM sequence: CTC
ctatttcagtaattgcctga

SEQ ID NO: 55692 - DNA, 20 bp, Artificial Sequence
  Description of Artificial Sequence: Synthetic oligonucleotide
  Target: ATXN2; (-) strand; PAM type: YTN; PAM sequence: TTG
ccaccctcctatttcagtaa

SEQ ID NO: 55693 - DNA, 20 bp, Artificial Sequence
  Description of Artificial Sequence: Synthetic oligonucleotide
  Target: ATXN2; (-) strand; PAM type: YTN; PAM sequence: CTT
gccaccctcctatttcagta

SEQ ID NO: 55694 - DNA, 20 bp, Artificial Sequence
  Description of Artificial Sequence: Synthetic oligonucleotide
  Target: ATXN2; (-) strand; PAM type: YTN; PAM sequence: TTC
ttgccaccctcctatttcag

SEQ ID NO: 55695 - DNA, 20 bp, Artificial Sequence
  Description of Artificial Sequence: Synthetic oligonucleotide
  Target: ATXN2; (-) strand; PAM type: YTN; PAM sequence: CTG
ttcttgccaccctcctattt

SEQ ID NO: 55696 - DNA, 20 bp, Artificial Sequence
  Description of Artificial Sequence: Synthetic oligonucleotide
  Target: ATXN2; (-) strand; PAM type: YTN; PAM sequence: TTC
gtaaggcaccaggatagaac

SEQ ID NO: 55697 - DNA, 20 bp, Artificial Sequence
  Description of Artificial Sequence: Synthetic oligonucleotide
  Target: ATXN2; (-) strand; PAM type: YTN; PAM sequence: TTA
ttcgtaaggcaccaggatag

SEQ ID NO: 55698 - DNA, 20 bp, Artificial Sequence
  Description of Artificial Sequence: Synthetic oligonucleotide
  Target: ATXN2; (-) strand; PAM type: YTN; PAM sequence: TTT
attcgtaaggcaccaggata

SEQ ID NO: 55699 - DNA, 20 bp, Artificial Sequence
  Description of Artificial Sequence: Synthetic oligonucleotide
  Target: ATXN2; (-) strand; PAM type: YTN; PAM sequence: TTT
tattcgtaaggcaccaggat

SEQ ID NO: 55700 - DNA, 20 bp, Artificial Sequence
  Description of Artificial Sequence: Synthetic oligonucleotide
  Target: ATXN2; (-) strand; PAM type: YTN; PAM sequence: TTT
ttattcgtaaggcaccagga

SEQ ID NO: 55701 - DNA, 20 bp, Artificial Sequence
  Description of Artificial Sequence: Synthetic oligonucleotide
  Target: ATXN2; (-) strand; PAM type: YTN; PAM sequence: TTT
tttattcgtaaggcaccagg

SEQ ID NO: 55702 - DNA, 20 bp, Artificial Sequence
  Description of Artificial Sequence: Synthetic oligonucleotide
  Target: ATXN2; (-) strand; PAM type: YTN; PAM sequence: CTG
taaaccagaatccagttttt

SEQ ID NO: 55703 - DNA, 20 bp, Artificial Sequence
  Description of Artificial Sequence: Synthetic oligonucleotide
  Target: ATXN2; (-) strand; PAM type: YTN; PAM sequence: CTG
ctgtaaaccagaatccagtt

SEQ ID NO: 55704 - DNA, 20 bp, Artificial Sequence
  Description of Artificial Sequence: Synthetic oligonucleotide
  Target: ATXN2; (-) strand; PAM type: YTN; PAM sequence: CTG
taaagctgctgtaaaccaga

SEQ ID NO: 55705 - DNA, 20 bp, Artificial Sequence
  Description of Artificial Sequence: Synthetic oligonucleotide
  Target: ATXN2; (-) strand; PAM type: YTN; PAM sequence: CTA
tcactgtaaagctgctgtaa

SEQ ID NO: 55706 - DNA, 20 bp, Artificial Sequence
  Description of Artificial Sequence: Synthetic oligonucleotide
  Target: ATXN2; (-) strand; PAM type: YTN; PAM sequence: TTA
actatcactgtaaagctgct

SEQ ID NO: 55707 - DNA, 20 bp, Artificial Sequence
  Description of Artificial Sequence: Synthetic oligonucleotide
  Target: ATXN2; (-) strand; PAM type: YTN; PAM sequence: TTT
aactatcactgtaaagctgc

SEQ ID NO: 55708 - DNA, 20 bp, Artificial Sequence
  Description of Artificial Sequence: Synthetic oligonucleotide
  Target: ATXN2; (-) strand; PAM type: YTN; PAM sequence: TTA
atttaactatcactgtaaag

SEQ ID NO: 55709 - DNA, 20 bp, Artificial Sequence
  Description of Artificial Sequence: Synthetic oligonucleotide
  Target: ATXN2; (-) strand; PAM type: YTN; PAM sequence: CTA
gccccagttaatttaactat

SEQ ID NO: 55710 - DNA, 20 bp, Artificial Sequence
  Description of Artificial Sequence: Synthetic oligonucleotide
  Target: ATXN2; (-) strand; PAM type: YTN; PAM sequence: TTC
ccctagccccagttaattta

SEQ ID NO: 55711 - DNA, 20 bp, Artificial Sequence
  Description of Artificial Sequence: Synthetic oligonucleotide
  Target: ATXN2; (-) strand; PAM type: YTN; PAM sequence: CTT
cccctagccccagttaattt

SEQ ID NO: 55712 - DNA, 20 bp, Artificial Sequence
  Description of Artificial Sequence: Synthetic oligonucleotide
  Target: ATXN2; (-) strand; PAM type: YTN; PAM sequence: CTC
ttcccctagccccagttaat

SEQ ID NO: 55713 - DNA, 20 bp, Artificial Sequence
  Description of Artificial Sequence: Synthetic oligonucleotide
  Target: ATXN2; (-) strand; PAM type: YTN; PAM sequence: TTG
ctcttcccctagccccagtt

SEQ ID NO: 55714 - DNA, 20 bp, Artificial Sequence
  Description of Artificial Sequence: Synthetic oligonucleotide
  Target: ATXN2; (-) strand; PAM type: YTN; PAM sequence: CTT
gctcttcccctagccccagt

SEQ ID NO: 55715 - DNA, 20 bp, Artificial Sequence
  Description of Artificial Sequence: Synthetic oligonucleotide
  Target: ATXN2; (-) strand; PAM type: YTN; PAM sequence: TTG
cttgctcttcccctagcccc

SEQ ID NO: 55716 - DNA, 20 bp, Artificial Sequence
  Description of Artificial Sequence: Synthetic oligonucleotide
  Target: ATXN2; (-) strand; PAM type: YTN; PAM sequence: TTT
gcttgctcttcccctagccc

SEQ ID NO: 55717 - DNA, 20 bp, Artificial Sequence
  Description of Artificial Sequence: Synthetic oligonucleotide
  Target: ATXN2; (-) strand; PAM type: YTN; PAM sequence: TTT
tgcttgctcttcccctagcc

SEQ ID NO: 55718 - DNA, 20 bp, Artificial Sequence
  Description of Artificial Sequence: Synthetic oligonucleotide
  Target: ATXN2; (-) strand; PAM type: YTN; PAM sequence: TTT
ttgcttgctcttcccctagc

SEQ ID NO: 55719 - DNA, 20 bp, Artificial Sequence
  Description of Artificial Sequence: Synthetic oligonucleotide
  Target: ATXN2; (-) strand; PAM type: YTN; PAM sequence: CTT
tttgcttgctcttcccctag

SEQ ID NO: 55720 - DNA, 20 bp, Artificial Sequence
  Description of Artificial Sequence: Synthetic oligonucleotide
  Target: ATXN2; (-) strand; PAM type: YTN; PAM sequence: TTC
cctttttgcttgctcttccc

SEQ ID NO: 55721 - DNA, 20 bp, Artificial Sequence
  Description of Artificial Sequence: Synthetic oligonucleotide
  Target: ATXN2; (-) strand; PAM type: YTN; PAM sequence: CTT
ccctttttgcttgctcttcc

SEQ ID NO: 55722 - DNA, 20 bp, Artificial Sequence
  Description of Artificial Sequence: Synthetic oligonucleotide
  Target: ATXN2; (-) strand; PAM type: YTN; PAM sequence: TTC
ttccctttttgcttgctctt

SEQ ID NO: 55723 - DNA, 20 bp, Artificial Sequence
  Description of Artificial Sequence: Synthetic oligonucleotide
  Target: ATXN2; (-) strand; PAM type: YTN; PAM sequence: CTT
cttccctttttgcttgctct

SEQ ID NO: 55724 - DNA, 20 bp, Artificial Sequence
  Description of Artificial Sequence: Synthetic oligonucleotide
  Target: ATXN2; (-) strand; PAM type: YTN; PAM sequence: CTA
ggagtccttcttcccttttt

SEQ ID NO: 55725 - DNA, 20 bp, Artificial Sequence
  Description of Artificial Sequence: Synthetic oligonucleotide
  Target: ATXN2; (-) strand; PAM type: YTN; PAM sequence: CTA
gaaagggcctaggagtcctt

SEQ ID NO: 55726 - DNA, 20 bp, Artificial Sequence
  Description of Artificial Sequence: Synthetic oligonucleotide
  Target: ATXN2; (-) strand; PAM type: YTN; PAM sequence: TTA
ctagaaagggcctaggagtc

SEQ ID NO: 55727 - DNA, 20 bp, Artificial Sequence
  Description of Artificial Sequence: Synthetic oligonucleotide
  Target: ATXN2; (-) strand; PAM type: YTN; PAM sequence: TTT
actagaaagggcctaggagt

SEQ ID NO: 55728 - DNA, 20 bp, Artificial Sequence
  Description of Artificial Sequence: Synthetic oligonucleotide
  Target: ATXN2; (-) strand; PAM type: YTN; PAM sequence: CTG
aaggatttactagaaagggc

SEQ ID NO: 55729 - DNA, 20 bp, Artificial Sequence
  Description of Artificial Sequence: Synthetic oligonucleotide
  Target: ATXN2; (-) strand; PAM type: YTN; PAM sequence: TTG
ctgaaggatttactagaaag

SEQ ID NO: 55730 - DNA, 20 bp, Artificial Sequence
  Description of Artificial Sequence: Synthetic oligonucleotide
  Target: ATXN2; (-) strand; PAM type: YTN; PAM sequence: TTG
ttgctgaaggatttactaga

SEQ ID NO: 55731 - DNA, 20 bp, Artificial Sequence
  Description of Artificial Sequence: Synthetic oligonucleotide
  Target: ATXN2; (-) strand; PAM type: YTN; PAM sequence: CTT
gttgctgaaggatttactag

SEQ ID NO: 55732 - DNA, 20 bp, Artificial Sequence
  Description of Artificial Sequence: Synthetic oligonucleotide
  Target: ATXN2; (-) strand; PAM type: YTN; PAM sequence: TTG
gagggcaccaagccagcctt

SEQ ID NO: 55733 - DNA, 20 bp, Artificial Sequence
  Description of Artificial Sequence: Synthetic oligonucleotide
  Target: ATXN2; (-) strand; PAM type: YTN; PAM sequence: CTT
ggagggcaccaagccagcct

SEQ ID NO: 55734 - DNA, 20 bp, Artificial Sequence
  Description of Artificial Sequence: Synthetic oligonucleotide
  Target: ATXN2; (-) strand; PAM type: YTN; PAM sequence: TTA
gatgcttggagggcaccaag

SEQ ID NO: 55735 - DNA, 20 bp, Artificial Sequence
  Description of Artificial Sequence: Synthetic oligonucleotide
  Target: ATXN2; (-) strand; PAM type: YTN; PAM sequence: TTA
ataagccattagatgcttgg

SEQ ID NO: 55736 - DNA, 20 bp, Artificial Sequence
  Description of Artificial Sequence: Synthetic oligonucleotide
  Target: ATXN2; (-) strand; PAM type: YTN; PAM sequence: TTT
aataagccattagatgcttg

SEQ ID NO: 55737 - DNA, 20 bp, Artificial Sequence
  Description of Artificial Sequence: Synthetic oligonucleotide
  Target: ATXN2; (-) strand; PAM type: YTN; PAM sequence: TTG
tgggataatttaataagcca

SEQ ID NO: 55738 - DNA, 20 bp, Artificial Sequence
  Description of Artificial Sequence: Synthetic oligonucleotide
  Target: ATXN2; (-) strand; PAM type: YTN; PAM sequence: CTT
gtgggataatttaataagcc

SEQ ID NO: 55739 - DNA, 20 bp, Artificial Sequence
  Description of Artificial Sequence: Synthetic oligonucleotide
  Target: ATXN2; (-) strand; PAM type: YTN; PAM sequence: CTA
aaacccacttgtgggataat

SEQ ID NO: 55740 - DNA, 20 bp, Artificial Sequence
  Description of Artificial Sequence: Synthetic oligonucleotide
  Target: ATXN2; (-) strand; PAM type: YTN; PAM sequence: CTC
aaaaaaggagcctaaaaccc

SEQ ID NO: 55741 - DNA, 20 bp, Artificial Sequence
  Description of Artificial Sequence: Synthetic oligonucleotide
  Target: ATXN2; (-) strand; PAM type: YTN; PAM sequence: TTG
gctcaaaaaaggagcctaaa

SEQ ID NO: 55742 - DNA, 20 bp, Artificial Sequence
  Description of Artificial Sequence: Synthetic oligonucleotide
  Target: ATXN2; (-) strand; PAM type: YTN; PAM sequence: TTT
ggctcaaaaaaggagcctaa

SEQ ID NO: 55743 - DNA, 20 bp, Artificial Sequence
  Description of Artificial Sequence: Synthetic oligonucleotide
  Target: ATXN2; (-) strand; PAM type: YTN; PAM sequence: TTT
tggctcaaaaaaggagccta

SEQ ID NO: 55744 - DNA, 20 bp, Artificial Sequence
  Description of Artificial Sequence: Synthetic oligonucleotide
  Target: ATXN2; (-) strand; PAM type: YTN; PAM sequence: TTC
cattttggctcaaaaaagga

SEQ ID NO: 55745 - DNA, 20 bp, Artificial Sequence
  Description of Artificial Sequence: Synthetic oligonucleotide
  Target: ATXN2; (-) strand; PAM type: YTN; PAM sequence: CTT
ccattttggctcaaaaaagg

SEQ ID NO: 55746 - DNA, 20 bp, Artificial Sequence
  Description of Artificial Sequence: Synthetic oligonucleotide
  Target: ATXN2; (-) strand; PAM type: YTN; PAM sequence: TTC
ccagcttccattttggctca

SEQ ID NO: 55747 - DNA, 20 bp, Artificial Sequence
  Description of Artificial Sequence: Synthetic oligonucleotide
  Target: ATXN2; (-) strand; PAM type: YTN; PAM sequence: TTA
tggcaccagattcccagctt

SEQ ID NO: 55748 - DNA, 20 bp, Artificial Sequence
  Description of Artificial Sequence: Synthetic oligonucleotide
  Target: ATXN2; (-) strand; PAM type: YTN; PAM sequence: TTA
gttatggcaccagattccca

SEQ ID NO: 55749 - DNA, 20 bp, Artificial Sequence
  Description of Artificial Sequence: Synthetic oligonucleotide
  Target: ATXN2; (-) strand; PAM type: YTN; PAM sequence: CTC
attagttatggcaccagatt

SEQ ID NO: 55750 - DNA, 20 bp, Artificial Sequence
  Description of Artificial Sequence: Synthetic oligonucleotide
  Target: ATXN2; (-) strand; PAM type: YTN; PAM sequence: TTC
tcattagttatggcaccaga

SEQ ID NO: 55751 - DNA, 20 bp, Artificial Sequence
  Description of Artificial Sequence: Synthetic oligonucleotide
  Target: ATXN2; (-) strand; PAM type: YTN; PAM sequence: TTT
ctcattagttatggcaccag

SEQ ID NO: 55752 - DNA, 20 bp, Artificial Sequence
  Description of Artificial Sequence: Synthetic oligonucleotide
  Target: ATXN2; (-) strand; PAM type: YTN; PAM sequence: TTA
aaggagtttctcattagtta

SEQ ID NO: 55753 - DNA, 20 bp, Artificial Sequence
  Description of Artificial Sequence: Synthetic oligonucleotide
  Target: ATXN2; (-) strand; PAM type: YTN; PAM sequence: CTA
ttaaaggagtttctcattag

SEQ ID NO: 55754 - DNA, 20 bp, Artificial Sequence
  Description of Artificial Sequence: Synthetic oligonucleotide
  Target: ATXN2; (-) strand; PAM type: YTN; PAM sequence: TTG
tgggctattaaaggagtttc

SEQ ID NO: 55755 - DNA, 20 bp, Artificial Sequence
  Description of Artificial Sequence: Synthetic oligonucleotide
  Target: ATXN2; (-) strand; PAM type: YTN; PAM sequence: CTG
attgtgggctattaaaggag

SEQ ID NO: 55756 - DNA, 20 bp, Artificial Sequence
  Description of Artificial Sequence: Synthetic oligonucleotide
  Target: ATXN2; (-) strand; PAM type: YTN; PAM sequence: CTA
gaacagaacactgattgtgg

SEQ ID NO: 55757 - DNA, 20 bp, Artificial Sequence
  Description of Artificial Sequence: Synthetic oligonucleotide
  Target: ATXN2; (-) strand; PAM type: YTN; PAM sequence: CTC
aatccagtgaagcagtagcc

SEQ ID NO: 55758 - DNA, 20 bp, Artificial Sequence
  Description of Artificial Sequence: Synthetic oligonucleotide
  Target: ATXN2; (-) strand; PAM type: YTN; PAM sequence: TTC
tcaatccagtgaagcagtag

SEQ ID NO: 55759 - DNA, 20 bp, Artificial Sequence
  Description of Artificial Sequence: Synthetic oligonucleotide
  Target: ATXN2; (-) strand; PAM type: YTN; PAM sequence: TTG
tgtgtgcccatgtgtgcaag

SEQ ID NO: 55760 - DNA, 20 bp, Artificial Sequence
  Description of Artificial Sequence: Synthetic oligonucleotide
  Target: ATXN2; (-) strand; PAM type: YTN; PAM sequence: CTG
gatggtggagattgtgtgtg

SEQ ID NO: 55761 - DNA, 20 bp, Artificial Sequence
  Description of Artificial Sequence: Synthetic oligonucleotide
  Target: ATXN2; (-) strand; PAM type: YTN; PAM sequence: CTC
cctggatggtggagattgtg

SEQ ID NO: 55762 - DNA, 20 bp, Artificial Sequence
  Description of Artificial Sequence: Synthetic oligonucleotide
  Target: ATXN2; (-) strand; PAM type: YTN; PAM sequence: TTC
aggacctccctggatggtgg

SEQ ID NO: 55763 - DNA, 20 bp, Artificial Sequence
  Description of Artificial Sequence: Synthetic oligonucleotide
  Target: ATXN2; (-) strand; PAM type: YTN; PAM sequence: CTT
caggacctccctggatggtg

SEQ ID NO: 55764 - DNA, 20 bp, Artificial Sequence
  Description of Artificial Sequence: Synthetic oligonucleotide
  Target: ATXN2; (-) strand; PAM type: YTN; PAM sequence: TTG
acttcaggacctccctggat

SEQ ID NO: 55765 - DNA, 20 bp, Artificial Sequence
  Description of Artificial Sequence: Synthetic oligonucleotide
  Target: ATXN2; (-) strand; PAM type: YTN; PAM sequence: TTT
gacttcaggacctccctgga

SEQ ID NO: 55766 - DNA, 20 bp, Artificial Sequence
  Description of Artificial Sequence: Synthetic oligonucleotide
  Target: ATXN2; (-) strand; PAM type: YTN; PAM sequence: TTG
tatagatagagatttgactt

SEQ ID NO: 55767 - DNA, 20 bp, Artificial Sequence
  Description of Artificial Sequence: Synthetic oligonucleotide
  Target: ATXN2; (-) strand; PAM type: YTN; PAM sequence: CTT
gtatagatagagatttgact

SEQ ID NO: 55768 - DNA, 20 bp, Artificial Sequence
  Description of Artificial Sequence: Synthetic oligonucleotide
  Target: ATXN2; (-) strand; PAM type: YTN; PAM sequence: TTG
tatcacttgtatagatagag

SEQ ID NO: 55769 - DNA, 20 bp, Artificial Sequence
  Description of Artificial Sequence: Synthetic oligonucleotide
  Target: ATXN2; (-) strand; PAM type: YTN; PAM sequence: CTA
tgaattgtatcacttgtata

SEQ ID NO: 55770 - DNA, 20 bp, Artificial Sequence
  Description of Artificial Sequence: Synthetic oligonucleotide
  Target: ATXN2; (-) strand; PAM type: YTN; PAM sequence: CTG
ggaggagccagccccctatg

SEQ ID NO: 55771 - DNA, 20 bp, Artificial Sequence
  Description of Artificial Sequence: Synthetic oligonucleotide
  Target: ATXN2; (-) strand; PAM type: YTN; PAM sequence: TTC
tgggaggagccagcccccta

SEQ ID NO: 55772 - DNA, 20 bp, Artificial Sequence
  Description of Artificial Sequence: Synthetic oligonucleotide
  Target: ATXN2; (-) strand; PAM type: YTN; PAM sequence: CTC
cagacaggttctgggaggag

SEQ ID NO: 55773 - DNA, 20 bp, Artificial Sequence
  Description of Artificial Sequence: Synthetic oligonucleotide
  Target: ATXN2; (-) strand; PAM type: YTN; PAM sequence: CTG
agcctccagacaggttctgg

SEQ ID NO: 55774 - DNA, 20 bp, Artificial Sequence
  Description of Artificial Sequence: Synthetic oligonucleotide
  Target: ATXN2; (-) strand; PAM type: YTN; PAM sequence: TTC
tgagcctccagacaggttct

SEQ ID NO: 55775 - DNA, 20 bp, Artificial Sequence
  Description of Artificial Sequence: Synthetic oligonucleotide
  Target: ATXN2; (-) strand; PAM type: YTN; PAM sequence: TTT
ctgagcctccagacaggttc

SEQ ID NO: 55776 - DNA, 20 bp, Artificial Sequence
  Description of Artificial Sequence: Synthetic oligonucleotide
  Target: ATXN2; (-) strand; PAM type: YTN; PAM sequence: CTG
cccccgtttctgagcctcca

SEQ ID NO: 55777 - DNA, 20 bp, Artificial Sequence
  Description of Artificial Sequence: Synthetic oligonucleotide
  Target: ATXN2; (-) strand; PAM type: YTN; PAM sequence: CTG
tcactgcccccgtttctgag

SEQ ID NO: 55778 - DNA, 20 bp, Artificial Sequence
  Description of Artificial Sequence: Synthetic oligonucleotide
  Target: ATXN2; (-) strand; PAM type: YTN; PAM sequence: CTC
cactgtcactgcccccgttt

SEQ ID NO: 55779 - DNA, 20 bp, Artificial Sequence
  Description of Artificial Sequence: Synthetic oligonucleotide
  Target: ATXN2; (-) strand; PAM type: YTN; PAM sequence: CTG
actccactgtcactgccccc

SEQ ID NO: 55780 - DNA, 20 bp, Artificial Sequence
  Description of Artificial Sequence: Synthetic oligonucleotide
  Target: ATXN2; (-) strand; PAM type: YTN; PAM sequence: CTG
gcacccaagagcagctgact

SEQ ID NO: 55781 - DNA, 20 bp, Artificial Sequence
  Description of Artificial Sequence: Synthetic oligonucleotide
  Target: ATXN2; (-) strand; PAM type: YTN; PAM sequence: CTG
ctggcacccaagagcagctg

SEQ ID NO: 55782 - DNA, 20 bp, Artificial Sequence
  Description of Artificial Sequence: Synthetic oligonucleotide
  Target: ATXN2; (-) strand; PAM type: YTN; PAM sequence: CTC
tgctggcacccaagagcagc

SEQ ID NO: 55783 - DNA, 20 bp, Artificial Sequence
  Description of Artificial Sequence: Synthetic oligonucleotide
  Target: ATXN2; (-) strand; PAM type: YTN; PAM sequence: CTG
aatggctctgctggcaccca

SEQ ID NO: 55784 - DNA, 20 bp, Artificial Sequence
  Description of Artificial Sequence: Synthetic oligonucleotide
  Target: ATXN2; (-) strand; PAM type: YTN; PAM sequence: TTG
tactgaatggctctgctggc

SEQ ID NO: 55785 - DNA, 20 bp, Artificial Sequence
  Description of Artificial Sequence: Synthetic oligonucleotide
  Target: ATXN2; (-) strand; PAM type: YTN; PAM sequence: CTG
ggggttgtactgaatggctc

SEQ ID NO: 55786 - DNA, 20 bp, Artificial Sequence
  Description of Artificial Sequence: Synthetic oligonucleotide
  Target: ATXN2; (-) strand; PAM type: YTN; PAM sequence: CTG
tgagcctgggggttgtactg

SEQ ID NO: 55787 - DNA, 20 bp, Artificial Sequence
  Description of Artificial Sequence: Synthetic oligonucleotide
  Target: ATXN2; (-) strand; PAM type: YTN; PAM sequence: CTG
ctgtgagcctgggggttgta

SEQ ID NO: 55788 - DNA, 20 bp, Artificial Sequence
  Description of Artificial Sequence: Synthetic oligonucleotide
  Target: ATXN2; (-) strand; PAM type: YTN; PAM sequence: CTA
gaagccactgctgtgagcct

SEQ ID NO: 55789 - DNA, 20 bp, Artificial Sequence
  Description of Artificial Sequence: Synthetic oligonucleotide
  Target: ATXN2; (-) strand; PAM type: YTN; PAM sequence: TTC
ctagaagccactgctgtgag

SEQ ID NO: 55790 - DNA, 20 bp, Artificial Sequence
  Description of Artificial Sequence: Synthetic oligonucleotide
  Target: ATXN2; (-) strand; PAM type: YTN; PAM sequence: TTT
cctagaagccactgctgtga

SEQ ID NO: 55791 - DNA, 20 bp, Artificial Sequence
  Description of Artificial Sequence: Synthetic oligonucleotide
  Target: ATXN2; (-) strand; PAM type: YTN; PAM sequence: CTC
ccagtttcctagaagccact

SEQ ID NO: 55792 - DNA, 20 bp, Artificial Sequence
  Description of Artificial Sequence: Synthetic oligonucleotide
  Target: ATXN2; (-) strand; PAM type: YTN; PAM sequence: CTA
aactcccagtttcctagaag

SEQ ID NO: 55793 - DNA, 20 bp, Artificial Sequence
  Description of Artificial Sequence: Synthetic oligonucleotide
  Target: ATXN2; (-) strand; PAM type: YTN; PAM sequence: CTG
atctaaactcccagtttcct

SEQ ID NO: 55794 - DNA, 20 bp, Artificial Sequence
  Description of Artificial Sequence: Synthetic oligonucleotide
  Target: ATXN2; (-) strand; PAM type: YTN; PAM sequence: CTG
taaagctgatctaaactccc

SEQ ID NO: 55795 - DNA, 20 bp, Artificial Sequence
  Description of Artificial Sequence: Synthetic oligonucleotide
  Target: ATXN2; (-) strand; PAM type: YTN; PAM sequence: CTG
atcgatgtatctgtaaagct

SEQ ID NO: 55796 - DNA, 20 bp, Artificial Sequence
  Description of Artificial Sequence: Synthetic oligonucleotide
  Target: ATXN2; (-) strand; PAM type: YTN; PAM sequence: CTC
tgatcgatgtatctgtaaag

SEQ ID NO: 55797 - DNA, 20 bp, Artificial Sequence
  Description of Artificial Sequence: Synthetic oligonucleotide
  Target: ATXN2; (-) strand; PAM type: YTN; PAM sequence: TTA
gcctctgatcgatgtatctg

SEQ ID NO: 55798 - DNA, 20 bp, Artificial Sequence
  Description of Artificial Sequence: Synthetic oligonucleotide
  Target: ATXN2; (-) strand; PAM type: YTN; PAM sequence: TTT
agcctctgatcgatgtatct

SEQ ID NO: 55799 - DNA, 20 bp, Artificial Sequence
  Description of Artificial Sequence: Synthetic oligonucleotide
  Target: ATXN2; (-) strand; PAM type: YTN; PAM sequence: TTT
tagcctctgatcgatgtatc

SEQ ID NO: 55800 - DNA, 20 bp, Artificial Sequence
  Description of Artificial Sequence: Synthetic oligonucleotide
  Target: ATXN2; (-) strand; PAM type: YTN; PAM sequence: TTC
attttagcctctgatcgatg

SEQ ID NO: 55801 - DNA, 20 bp, Artificial Sequence
  Description of Artificial Sequence: Synthetic oligonucleotide
  Target: ATXN2; (-) strand; PAM type: YTN; PAM sequence: TTT
cattttagcctctgatcgat

SEQ ID NO: 55802 - DNA, 20 bp, Artificial Sequence
  Description of Artificial Sequence: Synthetic oligonucleotide
  Target: ATXN2; (-) strand; PAM type: YTN; PAM sequence: CTG
aggtttcattttagcctctg

SEQ ID NO: 55803 - DNA, 20 bp, Artificial Sequence
  Description of Artificial Sequence: Synthetic oligonucleotide
  Target: ATXN2; (-) strand; PAM type: YTN; PAM sequence: TTA
ggctgaggtttcattttagc

SEQ ID NO: 55804 - DNA, 20 bp, Artificial Sequence
  Description of Artificial Sequence: Synthetic oligonucleotide
  Target: ATXN2; (-) strand; PAM type: YTN; PAM sequence: TTT
aggctgaggtttcattttag

SEQ ID NO: 55805 - DNA, 20 bp, Artificial Sequence
  Description of Artificial Sequence: Synthetic oligonucleotide
  Target: ATXN2; (-) strand; PAM type: YTN; PAM sequence: TTT
taggctgaggtttcatttta

SEQ ID NO: 55806 - DNA, 20 bp, Artificial Sequence
  Description of Artificial Sequence: Synthetic oligonucleotide
  Target: ATXN2; (-) strand; PAM type: YTN; PAM sequence: CTA
tgagttttaggctgaggttt

SEQ ID NO: 55807 - DNA, 20 bp, Artificial Sequence
  Description of Artificial Sequence: Synthetic oligonucleotide
  Target: ATXN2; (-) strand; PAM type: YTN; PAM sequence: CTC
ccaggcagtcagtcctatga

SEQ ID NO: 55808 - DNA, 20 bp, Artificial Sequence
  Description of Artificial Sequence: Synthetic oligonucleotide
  Target: ATXN2; (-) strand; PAM type: YTN; PAM sequence: CTC
ctcccaggcagtcagtccta

SEQ ID NO: 55809 - DNA, 20 bp, Artificial Sequence
  Description of Artificial Sequence: Synthetic oligonucleotide
  Target: ATXN2; (-) strand; PAM type: YTN; PAM sequence: CTA
accctcctcccaggcagtca

SEQ ID NO: 55810 - DNA, 20 bp, Artificial Sequence
  Description of Artificial Sequence: Synthetic oligonucleotide
  Target: ATXN2; (-) strand; PAM type: YTN; PAM sequence: CTA
agtataagtggaagaagcag

SEQ ID NO: 55811 - DNA, 20 bp, Artificial Sequence
  Description of Artificial Sequence: Synthetic oligonucleotide
  Target: ATXN2; (-) strand; PAM type: YTN; PAM sequence: TTG
gagcacagagactaagtata

SEQ ID NO: 55812 - DNA, 20 bp, Artificial Sequence
  Description of Artificial Sequence: Synthetic oligonucleotide
  Target: ATXN2; (-) strand; PAM type: YTN; PAM sequence: CTT
ggagcacagagactaagtat

SEQ ID NO: 55813 - DNA, 20 bp, Artificial Sequence
  Description of Artificial Sequence: Synthetic oligonucleotide
  Target: ATXN2; (-) strand; PAM type: YTN; PAM sequence: CTC
ttggagcacagagactaagt

SEQ ID NO: 55814 - DNA, 20 bp, Artificial Sequence
  Description of Artificial Sequence: Synthetic oligonucleotide
  Target: ATXN2; (-) strand; PAM type: YTN; PAM sequence: TTG
acctcttggagcacagagac

SEQ ID NO: 55815 - DNA, 20 bp, Artificial Sequence
  Description of Artificial Sequence: Synthetic oligonucleotide
  Target: ATXN2; (-) strand; PAM type: YTN; PAM sequence: TTT
gacctcttggagcacagaga

SEQ ID NO: 55816 - DNA, 20 bp, Artificial Sequence
  Description of Artificial Sequence: Synthetic oligonucleotide
  Target: ATXN2; (-) strand; PAM type: YTN; PAM sequence: CTA
gaagcaaaaatttgacctct

SEQ ID NO: 55817 - DNA, 20 bp, Artificial Sequence
  Description of Artificial Sequence: Synthetic oligonucleotide
  Target: ATXN2; (-) strand; PAM type: YTN; PAM sequence: TTC
tagaagcaaaaatttgacct

SEQ ID NO: 55818 - DNA, 20 bp, Artificial Sequence
  Description of Artificial Sequence: Synthetic oligonucleotide
  Target: ATXN2; (-) strand; PAM type: YTN; PAM sequence: CTG
aaagaccccaaggaaattct

SEQ ID NO: 55819 - DNA, 20 bp, Artificial Sequence
  Description of Artificial Sequence: Synthetic oligonucleotide
  Target: ATXN2; (-) strand; PAM type: YTN; PAM sequence: CTC
tgaaagaccccaaggaaatt

SEQ ID NO: 55820 - DNA, 20 bp, Artificial Sequence
  Description of Artificial Sequence: Synthetic oligonucleotide
  Target: ATXN2; (-) strand; PAM type: YTN; PAM sequence: TTC
ccccaccctctgaaagaccc

SEQ ID NO: 55821 - DNA, 20 bp, Artificial Sequence
  Description of Artificial Sequence: Synthetic oligonucleotide
  Target: ATXN2; (-) strand; PAM type: YTN; PAM sequence: TTG
ttcccccaccctctgaaaga

SEQ ID NO: 55822 - DNA, 20 bp, Artificial Sequence
  Description of Artificial Sequence: Synthetic oligonucleotide
  Target: ATXN2; (-) strand; PAM type: YTN; PAM sequence: TTT
gttcccccaccctctgaaag

SEQ ID NO: 55823 - DNA, 20 bp, Artificial Sequence
  Description of Artificial Sequence: Synthetic oligonucleotide
  Target: ATXN2; (-) strand; PAM type: YTN; PAM sequence: CTC
aaaaaaaaaaaaaagaaaag

SEQ ID NO: 55824 - DNA, 20 bp, Artificial Sequence
  Description of Artificial Sequence: Synthetic oligonucleotide
  Target: ATXN2; (-) strand; PAM type: YTN; PAM sequence: CTC
catctcaaaaaaaaaaaaaa

SEQ ID NO: 55825 - DNA, 20 bp, Artificial Sequence
  Description of Artificial Sequence: Synthetic oligonucleotide
  Target: ATXN2; (-) strand; PAM type: YTN; PAM sequence: TTG
acaagagaaactccatctca

SEQ ID NO: 55826 - DNA, 20 bp, Artificial Sequence
  Description of Artificial Sequence: Synthetic oligonucleotide
  Target: ATXN2; (-) strand; PAM type: YTN; PAM sequence: CTC
cagcccggttgacaagagaa

SEQ ID NO: 55827 - DNA, 20 bp, Artificial Sequence
  Description of Artificial Sequence: Synthetic oligonucleotide
  Target: ATXN2; (-) strand; PAM type: YTN; PAM sequence: CTG
cactccagcccggttgacaa

SEQ ID NO: 55828 - DNA, 20 bp, Artificial Sequence
  Description of Artificial Sequence: Synthetic oligonucleotide
  Target: ATXN2; (-) strand; PAM type: YTN; PAM sequence: TTG
caccactgcactccagcccg

SEQ ID NO: 55829 - DNA, 20 bp, Artificial Sequence
  Description of Artificial Sequence: Synthetic oligonucleotide
  Target: ATXN2; (-) strand; PAM type: YTN; PAM sequence: TTG
cagtgagccaagattgcacc

SEQ ID NO: 55830 - DNA, 20 bp, Artificial Sequence
  Description of Artificial Sequence: Synthetic oligonucleotide
  Target: ATXN2; (-) strand; PAM type: YTN; PAM sequence: TTG
aaccaggaaggtggaggttg

SEQ ID NO: 55831 - DNA, 20 bp, Artificial Sequence
  Description of Artificial Sequence: Synthetic oligonucleotide
  Target: ATXN2; (-) strand; PAM type: YTN; PAM sequence: CTT
gaaccaggaaggtggaggtt

SEQ ID NO: 55832 - DNA, 20 bp, Artificial Sequence
  Description of Artificial Sequence: Synthetic oligonucleotide
  Target: ATXN2; (-) strand; PAM type: YTN; PAM sequence: TTG
agaggtcgaggcagaatcgc

SEQ ID NO: 55833 - DNA, 20 bp, Artificial Sequence
  Description of Artificial Sequence: Synthetic oligonucleotide
  Target: ATXN2; (-) strand; PAM type: YTN; PAM sequence: CTT
gagaggtcgaggcagaatcg

SEQ ID NO: 55834 - DNA, 20 bp, Artificial Sequence
  Description of Artificial Sequence: Synthetic oligonucleotide
  Target: ATXN2; (-) strand; PAM type: YTN; PAM sequence: CTA
cttgagaggtcgaggcagaa

SEQ ID NO: 55835 - DNA, 20 bp, Artificial Sequence
  Description of Artificial Sequence: Synthetic oligonucleotide
  Target: ATXN2; (-) strand; PAM type: YTN; PAM sequence: TTG
taatcccagctacttgagag

SEQ ID NO: 55836 - DNA, 20 bp, Artificial Sequence
  Description of Artificial Sequence: Synthetic oligonucleotide
  Target: ATXN2; (-) strand; PAM type: YTN; PAM sequence: CTT
gtaatcccagctacttgaga

SEQ ID NO: 55837 - DNA, 20 bp, Artificial Sequence
  Description of Artificial Sequence: Synthetic oligonucleotide
  Target: ATXN2; (-) strand; PAM type: YTN; PAM sequence: CTG
gtgcttgtaatcccagctac

SEQ ID NO: 55838 - DNA, 20 bp, Artificial Sequence
  Description of Artificial Sequence: Synthetic oligonucleotide
  Target: ATXN2; (-) strand; PAM type: YTN; PAM sequence: TTA
gccaggcatggtggctggtg

SEQ ID NO: 55839 - DNA, 20 bp, Artificial Sequence
  Description of Artificial Sequence: Synthetic oligonucleotide
  Target: ATXN2; (-) strand; PAM type: YTN; PAM sequence: CTA
aaaatacaaaattagccagg

SEQ ID NO: 55840 - DNA, 20 bp, Artificial Sequence
  Description of Artificial Sequence: Synthetic oligonucleotide
  Target: ATXN2; (-) strand; PAM type: YTN; PAM sequence: CTA
ctaaaaatacaaaattagcc

SEQ ID NO: 55841 - DNA, 20 bp, Artificial Sequence
  Description of Artificial Sequence: Synthetic oligonucleotide
  Target: ATXN2; (-) strand; PAM type: YTN; PAM sequence: CTC
tactaaaaatacaaaattag

SEQ ID NO: 55842 - DNA, 20 bp, Artificial Sequence
  Description of Artificial Sequence: Synthetic oligonucleotide
  Target: ATXN2; (-) strand; PAM type: YTN; PAM sequence: CTG
tctctactaaaaatacaaaa

SEQ ID NO: 55843 - DNA, 20 bp, Artificial Sequence
  Description of Artificial Sequence: Synthetic oligonucleotide
  Target: ATXN2; (-) strand; PAM type: YTN; PAM sequence: CTG
gccaacatggtgaaaccctg

SEQ ID NO: 55844 - DNA, 20 bp, Artificial Sequence
  Description of Artificial Sequence: Synthetic oligonucleotide
  Target: ATXN2; (-) strand; PAM type: YTN; PAM sequence: TTC
gagaccagcctggccaacat

SEQ ID NO: 55845 - DNA, 20 bp, Artificial Sequence
  Description of Artificial Sequence: Synthetic oligonucleotide
  Target: ATXN2; (-) strand; PAM type: YTN; PAM sequence: CTG
aggtcagacattcgagacca

SEQ ID NO: 55846 - DNA, 20 bp, Artificial Sequence
  Description of Artificial Sequence: Synthetic oligonucleotide
  Target: ATXN2; (-) strand; PAM type: YTN; PAM sequence: TTG
ggaggccaaggcgggtggat

SEQ ID NO: 55847 - DNA, 20 bp, Artificial Sequence
  Description of Artificial Sequence: Synthetic oligonucleotide
  Target: ATXN2; (-) strand; PAM type: YTN; PAM sequence: TTT
gggaggccaaggcgggtgga

SEQ ID NO: 55848 - DNA, 20 bp, Artificial Sequence
  Description of Artificial Sequence: Synthetic oligonucleotide
  Target: ATXN2; (-) strand; PAM type: YTN; PAM sequence: CTT
tgggaggccaaggcgggtgg

SEQ ID NO: 55849 - DNA, 20 bp, Artificial Sequence
  Description of Artificial Sequence: Synthetic oligonucleotide
  Target: ATXN2; (-) strand; PAM type: YTN; PAM sequence: CTG
taatcccagcactttgggag

SEQ ID NO: 55850 - DNA, 20 bp, Artificial Sequence
  Description of Artificial Sequence: Synthetic oligonucleotide
  Target: ATXN2; (-) strand; PAM type: YTN; PAM sequence: CTC
gcgcctgtaatcccagcact

SEQ ID NO: 55851 - DNA, 20 bp, Artificial Sequence
  Description of Artificial Sequence: Synthetic oligonucleotide
  Target: ATXN2; (-) strand; PAM type: YTN; PAM sequence: CTG
ggcgcggtggctcgcgcctg

SEQ ID NO: 55852 - DNA, 20 bp, Artificial Sequence
  Description of Artificial Sequence: Synthetic oligonucleotide
  Target: ATXN2; (-) strand; PAM type: YTN; PAM sequence: CTA
aaagtggtgtaggctgggcg

SEQ ID NO: 55853 - DNA, 20 bp, Artificial Sequence
  Description of Artificial Sequence: Synthetic oligonucleotide
  Target: ATXN2; (-) strand; PAM type: YTN; PAM sequence: TTG
gtactaaaagtggtgtaggc

SEQ ID NO: 55854 - DNA, 20 bp, Artificial Sequence
  Description of Artificial Sequence: Synthetic oligonucleotide
  Target: ATXN2; (-) strand; PAM type: YTN; PAM sequence: TTA
gggtccatgaaatcacccaa

SEQ ID NO: 55855 - DNA, 20 bp, Artificial Sequence
  Description of Artificial Sequence: Synthetic oligonucleotide
  Target: ATXN2; (-) strand; PAM type: YTN; PAM sequence: TTT
agggtccatgaaatcaccca

SEQ ID NO: 55856 - DNA, 20 bp, Artificial Sequence
  Description of Artificial Sequence: Synthetic oligonucleotide
  Target: ATXN2; (-) strand; PAM type: YTN; PAM sequence: CTT
tagggtccatgaaatcaccc

SEQ ID NO: 55857 - DNA, 20 bp, Artificial Sequence
  Description of Artificial Sequence: Synthetic oligonucleotide
  Target: ATXN2; (-) strand; PAM type: YTN; PAM sequence: CTG
ctttagggtccatgaaatca

SEQ ID NO: 55858 - DNA, 20 bp, Artificial Sequence
  Description of Artificial Sequence: Synthetic oligonucleotide
  Target: ATXN2; (-) strand; PAM type: YTN; PAM sequence: CTG
gatcagtgtcaggtctgctt

SEQ ID NO: 55859 - DNA, 20 bp, Artificial Sequence
  Description of Artificial Sequence: Synthetic oligonucleotide
  Target: ATXN2; (-) strand; PAM type: YTN; PAM sequence: CTG
caaatctggatcagtgtcag

SEQ ID NO: 55860 - DNA, 20 bp, Artificial Sequence
  Description of Artificial Sequence: Synthetic oligonucleotide
  Target: ATXN2; (-) strand; PAM type: YTN; PAM sequence: TTA
aaaatggactgcaaatctgg

SEQ ID NO: 55861 - DNA, 20 bp, Artificial Sequence
  Description of Artificial Sequence: Synthetic oligonucleotide
  Target: ATXN2; (-) strand; PAM type: YTN; PAM sequence: CTT
aaaaatggactgcaaatctg

SEQ ID NO: 55862 - DNA, 20 bp, Artificial Sequence
  Description of Artificial Sequence: Synthetic oligonucleotide
  Target: ATXN2; (-) strand; PAM type: YTN; PAM sequence: TTG
aggaaataaagacaggtgtc

SEQ ID NO: 55863 - DNA, 20 bp, Artificial Sequence
  Description of Artificial Sequence: Synthetic oligonucleotide
  Target: ATXN2; (-) strand; PAM type: YTN; PAM sequence: TTT
gaggaaataaagacaggtgt

SEQ ID NO: 55864 - DNA, 20 bp, Artificial Sequence
  Description of Artificial Sequence: Synthetic oligonucleotide
  Target: ATXN2; (-) strand; PAM type: YTN; PAM sequence: CTT
tgaggaaataaagacaggtg

SEQ ID NO: 55865 - DNA, 20 bp, Artificial Sequence
  Description of Artificial Sequence: Synthetic oligonucleotide
  Target: ATXN2; (-) strand; PAM type: YTN; PAM sequence: TTG
actttgaggaaataaagaca

SEQ ID NO: 55866 - DNA, 20 bp, Artificial Sequence
  Description of Artificial Sequence: Synthetic oligonucleotide
  Target: ATXN2; (-) strand; PAM type: YTN; PAM sequence: CTT
gactttgaggaaataaagac

SEQ ID NO: 55867 - DNA, 20 bp, Artificial Sequence
  Description of Artificial Sequence: Synthetic oligonucleotide
  Target: ATXN2; (-) strand; PAM type: YTN; PAM sequence: CTG
cttgactttgaggaaataaa

SEQ ID NO: 55868 - DNA, 20 bp, Artificial Sequence
  Description of Artificial Sequence: Synthetic oligonucleotide
  Target: ATXN2; (-) strand; PAM type: YTN; PAM sequence: TTC
cagagaaagctgcttgactt

SEQ ID NO: 55869 - DNA, 20 bp, Artificial Sequence
  Description of Artificial Sequence: Synthetic oligonucleotide
  Target: ATXN2; (-) strand; PAM type: YTN; PAM sequence: TTT
ccagagaaagctgcttgact

SEQ ID NO: 55870 - DNA, 20 bp, Artificial Sequence
  Description of Artificial Sequence: Synthetic oligonucleotide
  Target: ATXN2; (-) strand; PAM type: YTN; PAM sequence: TTT
tccagagaaagctgcttgac

SEQ ID NO: 55871 - DNA, 20 bp, Artificial Sequence
  Description of Artificial Sequence: Synthetic oligonucleotide
  Target: ATXN2; (-) strand; PAM type: YTN; PAM sequence: TTC
attttccagagaaagctgct

SEQ ID NO: 55872 - DNA, 20 bp, Artificial Sequence
  Description of Artificial Sequence: Synthetic oligonucleotide
  Target: ATXN2; (-) strand; PAM type: YTN; PAM sequence: TTA
gcattcattttccagagaaa

SEQ ID NO: 55873 - DNA, 20 bp, Artificial Sequence
  Description of Artificial Sequence: Synthetic oligonucleotide
  Target: ATXN2; (-) strand; PAM type: YTN; PAM sequence: CTA
attagcattcattttccaga

SEQ ID NO: 55874 - DNA, 20 bp, Artificial Sequence
  Description of Artificial Sequence: Synthetic oligonucleotide
  Target: ATXN2; (-) strand; PAM type: YTN; PAM sequence: TTC
acactaattagcattcattt

SEQ ID NO: 55875 - DNA, 20 bp, Artificial Sequence
  Description of Artificial Sequence: Synthetic oligonucleotide
  Target: ATXN2; (-) strand; PAM type: YTN; PAM sequence: TTG
gttcacactaattagcattc

SEQ ID NO: 55876 - DNA, 20 bp, Artificial Sequence
  Description of Artificial Sequence: Synthetic oligonucleotide
  Target: ATXN2; (-) strand; PAM type: YTN; PAM sequence: TTT
ggttcacactaattagcatt

SEQ ID NO: 55877 - DNA, 20 bp, Artificial Sequence
  Description of Artificial Sequence: Synthetic oligonucleotide
  Target: ATXN2; (-) strand; PAM type: YTN; PAM sequence: TTT
tggttcacactaattagcat

SEQ ID NO: 55878 - DNA, 20 bp, Artificial Sequence
  Description of Artificial Sequence: Synthetic oligonucleotide
  Target: ATXN2; (-) strand; PAM type: YTN; PAM sequence: CTT
ttggttcacactaattagca

SEQ ID NO: 55879 - DNA, 20 bp, Artificial Sequence
  Description of Artificial Sequence: Synthetic oligonucleotide
  Target: ATXN2; (-) strand; PAM type: YTN; PAM sequence: CTC
ttttggttcacactaattag

SEQ ID NO: 55880 - DNA, 20 bp, Artificial Sequence
  Description of Artificial Sequence: Synthetic oligonucleotide
  Target: ATXN2; (-) strand; PAM type: YTN; PAM sequence: TTA
ctcttttggttcacactaat

SEQ ID NO: 55881 - DNA, 20 bp, Artificial Sequence
  Description of Artificial Sequence: Synthetic oligonucleotide
  Target: ATXN2; (-) strand; PAM type: YTN; PAM sequence: CTT
actcttttggttcacactaa

SEQ ID NO: 55882 - DNA, 20 bp, Artificial Sequence
  Description of Artificial Sequence: Synthetic oligonucleotide
  Target: ATXN2; (-) strand; PAM type: YTN; PAM sequence: TTA
cttactcttttggttcacac

SEQ ID NO: 55883 - DNA, 20 bp, Artificial Sequence
  Description of Artificial Sequence: Synthetic oligonucleotide
  Target: ATXN2; (-) strand; PAM type: YTN; PAM sequence: CTT
acttactcttttggttcaca

SEQ ID NO: 55884 - DNA, 20 bp, Artificial Sequence
  Description of Artificial Sequence: Synthetic oligonucleotide
  Target: ATXN2; (-) strand; PAM type: YTN; PAM sequence: CTC
ttacttactcttttggttca

SEQ ID NO: 55885 - DNA, 20 bp, Artificial Sequence
  Description of Artificial Sequence: Synthetic oligonucleotide
  Target: ATXN2; (-) strand; PAM type: YTN; PAM sequence: TTC
agactcttacttactctttt

SEQ ID NO: 55886 - DNA, 20 bp, Artificial Sequence
  Description of Artificial Sequence: Synthetic oligonucleotide
  Target: ATXN2; (-) strand; PAM type: YTN; PAM sequence: CTT
cagactcttacttactcttt

SEQ ID NO: 55887 - DNA, 20 bp, Artificial Sequence
  Description of Artificial Sequence: Synthetic oligonucleotide
  Target: ATXN2; (-) strand; PAM type: YTN; PAM sequence: TTA
aaaaaacttcagactcttac

SEQ ID NO: 55888 - DNA, 20 bp, Artificial Sequence
  Description of Artificial Sequence: Synthetic oligonucleotide
  Target: ATXN2; (-) strand; PAM type: YTN; PAM sequence: TTT
aaaaaaacttcagactctta

SEQ ID NO: 55889 - DNA, 20 bp, Artificial Sequence
  Description of Artificial Sequence: Synthetic oligonucleotide
  Target: ATXN2; (-) strand; PAM type: YTN; PAM sequence: CTT
taaaaaaacttcagactctt

SEQ ID NO: 55890 - DNA, 20 bp, Artificial Sequence
  Description of Artificial Sequence: Synthetic oligonucleotide
  Target: ATXN2; (-) strand; PAM type: YTN; PAM sequence: CTC
ctttaaaaaaacttcagact

SEQ ID NO: 55891 - DNA, 20 bp, Artificial Sequence
  Description of Artificial Sequence: Synthetic oligonucleotide
  Target: ATXN2; (-) strand; PAM type: YTN; PAM sequence: TTC
tcctttaaaaaaacttcaga

SEQ ID NO: 55892 - DNA, 20 bp, Artificial Sequence
  Description of Artificial Sequence: Synthetic oligonucleotide
  Target: ATXN2; (-) strand; PAM type: YTN; PAM sequence: TTT
ctcctttaaaaaaacttcag

SEQ ID NO: 55893 - DNA, 20 bp, Artificial Sequence
  Description of Artificial Sequence: Synthetic oligonucleotide
  Target: ATXN2; (-) strand; PAM type: YTN; PAM sequence: CTT
tctcctttaaaaaaacttca

SEQ ID NO: 55894 - DNA, 20 bp, Artificial Sequence
  Description of Artificial Sequence: Synthetic oligonucleotide
  Target: ATXN2; (-) strand; PAM type: YTN; PAM sequence: TTC
cataataagctttctccttt

SEQ ID NO: 55895 - DNA, 20 bp, Artificial Sequence
  Description of Artificial Sequence: Synthetic oligonucleotide
  Target: ATXN2; (-) strand; PAM type: YTN; PAM sequence: TTT
ccataataagctttctcctt

SEQ ID NO: 55896 - DNA, 20 bp, Artificial Sequence
  Description of Artificial Sequence: Synthetic oligonucleotide
  Target: ATXN2; (-) strand; PAM type: YTN; PAM sequence: CTT
tccataataagctttctcct

SEQ ID NO: 55897 - DNA, 20 bp, Artificial Sequence
  Description of Artificial Sequence: Synthetic oligonucleotide
  Target: ATXN2; (-) strand; PAM type: YTN; PAM sequence: CTG
tgcggaggggaggaccagtg

SEQ ID NO: 55898 - DNA, 20 bp, Artificial Sequence
  Description of Artificial Sequence: Synthetic oligonucleotide
  Target: ATXN2; (-) strand; PAM type: YTN; PAM sequence: TTC
ctgtgcggaggggaggacca

SEQ ID NO: 55899 - DNA, 20 bp, Artificial Sequence
  Description of Artificial Sequence: Synthetic oligonucleotide
  Target: ATXN2; (-) strand; PAM type: YTN; PAM sequence: TTT
cctgtgcggaggggaggacc

SEQ ID NO: 55900 - DNA, 20 bp, Artificial Sequence
  Description of Artificial Sequence: Synthetic oligonucleotide
  Target: ATXN2; (-) strand; PAM type: YTN; PAM sequence: CTT
tcctgtgcggaggggaggac

SEQ ID NO: 55901 - DNA, 20 bp, Artificial Sequence
  Description of Artificial Sequence: Synthetic oligonucleotide
  Target: ATXN2; (-) strand; PAM type: YTN; PAM sequence: CTG
ggtacctttcctgtgcggag

SEQ ID NO: 55902 - DNA, 20 bp, Artificial Sequence
  Description of Artificial Sequence: Synthetic oligonucleotide
  Target: ATXN2; (-) strand; PAM type: YTN; PAM sequence: CTA
ctgggtacctttcctgtgcg

SEQ ID NO: 55903 - DNA, 20 bp, Artificial Sequence
  Description of Artificial Sequence: Synthetic oligonucleotide
  Target: ATXN2; (-) strand; PAM type: YTN; PAM sequence: TTA
tctactgggtacctttcctg

SEQ ID NO: 55904 - DNA, 20 bp, Artificial Sequence
  Description of Artificial Sequence: Synthetic oligonucleotide
  Target: ATXN2; (-) strand; PAM type: YTN; PAM sequence: TTC
attatctactgggtaccttt

SEQ ID NO: 55905 - DNA, 20 bp, Artificial Sequence
  Description of Artificial Sequence: Synthetic oligonucleotide
  Target: ATXN2; (-) strand; PAM type: YTN; PAM sequence: TTG
gttcattatctactgggtac

SEQ ID NO: 55906 - DNA, 20 bp, Artificial Sequence
  Description of Artificial Sequence: Synthetic oligonucleotide
  Target: ATXN2; (-) strand; PAM type: YTN; PAM sequence: TTT
ggttcattatctactgggta

SEQ ID NO: 55907 - DNA, 20 bp, Artificial Sequence
  Description of Artificial Sequence: Synthetic oligonucleotide
  Target: ATXN2; (-) strand; PAM type: YTN; PAM sequence: TTA
atttggttcattatctactg

SEQ ID NO: 55908 - DNA, 20 bp, Artificial Sequence
  Description of Artificial Sequence: Synthetic oligonucleotide
  Target: ATXN2; (-) strand; PAM type: YTN; PAM sequence: CTT
aatttggttcattatctact

SEQ ID NO: 55909 - DNA, 20 bp, Artificial Sequence
  Description of Artificial Sequence: Synthetic oligonucleotide
  Target: ATXN2; (-) strand; PAM type: YTN; PAM sequence: CTG
gagggagggaacttaatttg

SEQ ID NO: 55910 - DNA, 20 bp, Artificial Sequence
  Description of Artificial Sequence: Synthetic oligonucleotide
  Target: ATXN2; (-) strand; PAM type: YTN; PAM sequence: CTG
gctggagggagggaacttaa

SEQ ID NO: 55911 - DNA, 20 bp, Artificial Sequence
  Description of Artificial Sequence: Synthetic oligonucleotide
  Target: ATXN2; (-) strand; PAM type: YTN; PAM sequence: TTC
tggctggagggagggaactt

SEQ ID NO: 55912 - DNA, 20 bp, Artificial Sequence
  Description of Artificial Sequence: Synthetic oligonucleotide
  Target: ATXN2; (-) strand; PAM type: YTN; PAM sequence: CTT
ctggctggagggagggaact

SEQ ID NO: 55913 - DNA, 20 bp, Artificial Sequence
  Description of Artificial Sequence: Synthetic oligonucleotide
  Target: ATXN2; (-) strand; PAM type: YTN; PAM sequence: TTA
acttctggctggagggaggg

SEQ ID NO: 55914 - DNA, 20 bp, Artificial Sequence
  Description of Artificial Sequence: Synthetic oligonucleotide
  Target: ATXN2; (-) strand; PAM type: YTN; PAM sequence: TTT
aacttctggctggagggagg

SEQ ID NO: 55915 - DNA, 20 bp, Artificial Sequence
  Description of Artificial Sequence: Synthetic oligonucleotide
  Target: ATXN2; (-) strand; PAM type: YTN; PAM sequence: CTG
gcatgaagacgtcatatccc

SEQ ID NO: 55916 - DNA, 20 bp, Artificial Sequence
  Description of Artificial Sequence: Synthetic oligonucleotide
  Target: ATXN2; (-) strand; PAM type: YTN; PAM sequence: CTA
agaaatgagtgcccctggca

SEQ ID NO: 55917 - DNA, 20 bp, Artificial Sequence
  Description of Artificial Sequence: Synthetic oligonucleotide
  Target: ATXN2; (-) strand; PAM type: YTN; PAM sequence: CTG
ctaagaaatgagtgcccctg

SEQ ID NO: 55918 - DNA, 20 bp, Artificial Sequence
  Description of Artificial Sequence: Synthetic oligonucleotide
  Target: ATXN2; (-) strand; PAM type: YTN; PAM sequence: CTG
agagatgtatgtagagaggc

SEQ ID NO: 55919 - DNA, 20 bp, Artificial Sequence
  Description of Artificial Sequence: Synthetic oligonucleotide
  Target: ATXN2; (-) strand; PAM type: YTN; PAM sequence: TTG
gcaccacctgagagatgtat

SEQ ID NO: 55920 - DNA, 20 bp, Artificial Sequence
  Description of Artificial Sequence: Synthetic oligonucleotide
  Target: ATXN2; (-) strand; PAM type: YTN; PAM sequence: CTT
ggcaccacctgagagatgta

SEQ ID NO: 55921 - DNA, 20 bp, Artificial Sequence
  Description of Artificial Sequence: Synthetic oligonucleotide
  Target: ATXN2; (-) strand; PAM type: YTN; PAM sequence: CTC
ttggcaccacctgagagatg

SEQ ID NO: 55922 - DNA, 20 bp, Artificial Sequence
  Description of Artificial Sequence: Synthetic oligonucleotide
  Target: ATXN2; (-) strand; PAM type: YTN; PAM sequence: CTG
gtgtgcctcttggcaccacc

SEQ ID NO: 55923 - DNA, 20 bp, Artificial Sequence
  Description of Artificial Sequence: Synthetic oligonucleotide
  Target: ATXN2; (-) strand; PAM type: YTN; PAM sequence: CTA
cctggtgtgcctcttggcac

SEQ ID NO: 55924 - DNA, 20 bp, Artificial Sequence
  Description of Artificial Sequence: Synthetic oligonucleotide
  Target: ATXN2; (-) strand; PAM type: YTN; PAM sequence: CTC
tacctggtgtgcctcttggc

SEQ ID NO: 55925 - DNA, 20 bp, Artificial Sequence
  Description of Artificial Sequence: Synthetic oligonucleotide
  Target: ATXN2; (-) strand; PAM type: YTN; PAM sequence: TTG
ctctacctggtgtgcctctt

SEQ ID NO: 55926 - DNA, 20 bp, Artificial Sequence
  Description of Artificial Sequence: Synthetic oligonucleotide
  Target: ATXN2; (-) strand; PAM type: YTN; PAM sequence: TTT
gctctacctggtgtgcctct

SEQ ID NO: 55927 - DNA, 20 bp, Artificial Sequence
  Description of Artificial Sequence: Synthetic oligonucleotide
  Target: ATXN2; (-) strand; PAM type: YTN; PAM sequence: CTA
agtttgctctacctggtgtg

SEQ ID NO: 55928 - DNA, 20 bp, Artificial Sequence
  Description of Artificial Sequence: Synthetic oligonucleotide
  Target: ATXN2; (-) strand; PAM type: YTN; PAM sequence: CTG
ctaagtttgctctacctggt

SEQ ID NO: 55929 - DNA, 20 bp, Artificial Sequence
  Description of Artificial Sequence: Synthetic oligonucleotide
  Target: ATXN2; (-) strand; PAM type: YTN; PAM sequence: TTA
gtcagagctgctaagtttgc

SEQ ID NO: 55930 - DNA, 20 bp, Artificial Sequence
  Description of Artificial Sequence: Synthetic oligonucleotide
  Target: ATXN2; (-) strand; PAM type: YTN; PAM sequence: CTG
ttagtcagagctgctaagtt

SEQ ID NO: 55931 - DNA, 20 bp, Artificial Sequence
  Description of Artificial Sequence: Synthetic oligonucleotide
  Target: ATXN2; (-) strand; PAM type: YTN; PAM sequence: TTG
cagcctgttagtcagagctg

SEQ ID NO: 55932 - DNA, 20 bp, Artificial Sequence
  Description of Artificial Sequence: Synthetic oligonucleotide
  Target: ATXN2; (-) strand; PAM type: YTN; PAM sequence: TTT
gcagcctgttagtcagagct

SEQ ID NO: 55933 - DNA, 20 bp, Artificial Sequence
  Description of Artificial Sequence: Synthetic oligonucleotide
  Target: ATXN2; (-) strand; PAM type: YTN; PAM sequence: CTT
tgcagcctgttagtcagagc

SEQ ID NO: 55934 - DNA, 20 bp, Artificial Sequence
  Description of Artificial Sequence: Synthetic oligonucleotide
  Target: ATXN2; (-) strand; PAM type: YTN; PAM sequence: TTG
cactttgcagcctgttagtc

SEQ ID NO: 55935 - DNA, 20 bp, Artificial Sequence
  Description of Artificial Sequence: Synthetic oligonucleotide
  Target: ATXN2; (-) strand; PAM type: YTN; PAM sequence: CTT
gcactttgcagcctgttagt

SEQ ID NO: 55936 - DNA, 20 bp, Artificial Sequence
  Description of Artificial Sequence: Synthetic oligonucleotide
  Target: ATXN2; (-) strand; PAM type: YTN; PAM sequence: CTG
aacttgcactttgcagcctg

SEQ ID NO: 55937 - DNA, 20 bp, Artificial Sequence
  Description of Artificial Sequence: Synthetic oligonucleotide
  Target: ATXN2; (-) strand; PAM type: YTN; PAM sequence: CTG
ccacagaatctgaacttgca

SEQ ID NO: 55938 - DNA, 20 bp, Artificial Sequence
  Description of Artificial Sequence: Synthetic oligonucleotide
  Target: ATXN2; (-) strand; PAM type: YTN; PAM sequence: CTC
tgccacagaatctgaacttg

SEQ ID NO: 55939 - DNA, 20 bp, Artificial Sequence
  Description of Artificial Sequence: Synthetic oligonucleotide
  Target: ATXN2; (-) strand; PAM type: YTN; PAM sequence: TTC
caaatctctgccacagaatc

SEQ ID NO: 55940 - DNA, 20 bp, Artificial Sequence
  Description of Artificial Sequence: Synthetic oligonucleotide
  Target: ATXN2; (-) strand; PAM type: YTN; PAM sequence: CTT
ccaaatctctgccacagaat

SEQ ID NO: 55941 - DNA, 20 bp, Artificial Sequence
  Description of Artificial Sequence: Synthetic oligonucleotide
  Target: ATXN2; (-) strand; PAM type: YTN; PAM sequence: CTG
gaggtgggtgccttccaaat

SEQ ID NO: 55942 - DNA, 20 bp, Artificial Sequence
  Description of Artificial Sequence: Synthetic oligonucleotide
  Target: ATXN2; (-) strand; PAM type: YTN; PAM sequence: TTG
gacgggaagcagtctggagg

SEQ ID NO: 55943 - DNA, 20 bp, Artificial Sequence
  Description of Artificial Sequence: Synthetic oligonucleotide
  Target: ATXN2; (-) strand; PAM type: YTN; PAM sequence: CTT
ggacgggaagcagtctggag

SEQ ID NO: 55944 - DNA, 20 bp, Artificial Sequence
  Description of Artificial Sequence: Synthetic oligonucleotide
  Target: ATXN2; (-) strand; PAM type: YTN; PAM sequence: CTG
gtaacttggacgggaagcag

SEQ ID NO: 55945 - DNA, 20 bp, Artificial Sequence
  Description of Artificial Sequence: Synthetic oligonucleotide
  Target: ATXN2; (-) strand; PAM type: YTN; PAM sequence: CTG
tcctggtaacttggacggga

SEQ ID NO: 55946 - DNA, 20 bp, Artificial Sequence
  Description of Artificial Sequence: Synthetic oligonucleotide
  Target: ATXN2; (-) strand; PAM type: YTN; PAM sequence: TTG
agctgtcctggtaacttgga

SEQ ID NO: 55947 - DNA, 20 bp, Artificial Sequence
  Description of Artificial Sequence: Synthetic oligonucleotide
  Target: ATXN2; (-) strand; PAM type: YTN; PAM sequence: TTT
gagctgtcctggtaacttgg

SEQ ID NO: 55948 - DNA, 20 bp, Artificial Sequence
  Description of Artificial Sequence: Synthetic oligonucleotide
  Target: ATXN2; (-) strand; PAM type: YTN; PAM sequence: TTT
tgagctgtcctggtaacttg

SEQ ID NO: 55949 - DNA, 20 bp, Artificial Sequence
  Description of Artificial Sequence: Synthetic oligonucleotide
  Target: ATXN2; (-) strand; PAM type: YTN; PAM sequence: TTT
ttgagctgtcctggtaactt

SEQ ID NO: 55950 - DNA, 20 bp, Artificial Sequence
  Description of Artificial Sequence: Synthetic oligonucleotide
  Target: ATXN2; (-) strand; PAM type: YTN; PAM sequence: CTG
tcagcatgtttttgagctgt

SEQ ID NO: 55951 - DNA, 20 bp, Artificial Sequence
  Description of Artificial Sequence: Synthetic oligonucleotide
  Target: ATXN2; (-) strand; PAM type: YTN; PAM sequence: TTC
tgtcagcatgtttttgagct

SEQ ID NO: 55952 - DNA, 20 bp, Artificial Sequence
  Description of Artificial Sequence: Synthetic oligonucleotide
  Target: ATXN2; (-) strand; PAM type: YTN; PAM sequence: TTT
ctgtcagcatgtttttgagc

SEQ ID NO: 55953 - DNA, 20 bp, Artificial Sequence
  Description of Artificial Sequence: Synthetic oligonucleotide
  Target: ATXN2; (-) strand; PAM type: YTN; PAM sequence: TTT
tctgtcagcatgtttttgag

SEQ ID NO: 55954 - DNA, 20 bp, Artificial Sequence
  Description of Artificial Sequence: Synthetic oligonucleotide
  Target: ATXN2; (-) strand; PAM type: YTN; PAM sequence: CTA
gagccatgggagttttctgt

SEQ ID NO: 55955 - DNA, 20 bp, Artificial Sequence
  Description of Artificial Sequence: Synthetic oligonucleotide
  Target: ATXN2; (-) strand; PAM type: YTN; PAM sequence: TTC
ctagagccatgggagttttc

SEQ ID NO: 55956 - DNA, 20 bp, Artificial Sequence
  Description of Artificial Sequence: Synthetic oligonucleotide
  Target: ATXN2; (-) strand; PAM type: YTN; PAM sequence: CTT
cctagagccatgggagtttt

SEQ ID NO: 55957 - DNA, 20 bp, Artificial Sequence
  Description of Artificial Sequence: Synthetic oligonucleotide
  Target: ATXN2; (-) strand; PAM type: YTN; PAM sequence: TTC
ttcctagagccatgggagtt

SEQ ID NO: 55958 - DNA, 20 bp, Artificial Sequence
  Description of Artificial Sequence: Synthetic oligonucleotide
  Target: ATXN2; (-) strand; PAM type: YTN; PAM sequence: CTT
cttcctagagccatgggagt

SEQ ID NO: 55959 - DNA, 20 bp, Artificial Sequence
  Description of Artificial Sequence: Synthetic oligonucleotide
  Target: ATXN2; (-) strand; PAM type: YTN; PAM sequence: TTA
gtgtcacttcttcctagagc

SEQ ID NO: 55960 - DNA, 20 bp, Artificial Sequence
  Description of Artificial Sequence: Synthetic oligonucleotide
  Target: ATXN2; (-) strand; PAM type: YTN; PAM sequence: CTT
agtgtcacttcttcctagag

SEQ ID NO: 55961 - DNA, 20 bp, Artificial Sequence
  Description of Artificial Sequence: Synthetic oligonucleotide
  Target: ATXN2; (-) strand; PAM type: YTN; PAM sequence: TTG
gcttagtgtcacttcttcct

SEQ ID NO: 55962 - DNA, 20 bp, Artificial Sequence
  Description of Artificial Sequence: Synthetic oligonucleotide
  Target: ATXN2; (-) strand; PAM type: YTN; PAM sequence: CTC
ccacataaagaaaggtgttg

SEQ ID NO: 55963 - DNA, 20 bp, Artificial Sequence
  Description of Artificial Sequence: Synthetic oligonucleotide
  Target: ATXN2; (-) strand; PAM type: YTN; PAM sequence: CTG
ctcccacataaagaaaggtg

SEQ ID NO: 55964 - DNA, 20 bp, Artificial Sequence
  Description of Artificial Sequence: Synthetic oligonucleotide
  Target: ATXN2; (-) strand; PAM type: YTN; PAM sequence: TTC
tgctcccacataaagaaagg

SEQ ID NO: 55965 - DNA, 20 bp, Artificial Sequence
  Description of Artificial Sequence: Synthetic oligonucleotide
  Target: ATXN2; (-) strand; PAM type: YTN; PAM sequence: CTG
attctgctcccacataaaga

SEQ ID NO: 55966 - DNA, 20 bp, Artificial Sequence
  Description of Artificial Sequence: Synthetic oligonucleotide
  Target: ATXN2; (-) strand; PAM type: YTN; PAM sequence: TTC
atcagctgattctgctccca

SEQ ID NO: 55967 - DNA, 20 bp, Artificial Sequence
  Description of Artificial Sequence: Synthetic oligonucleotide
  Target: ATXN2; (-) strand; PAM type: YTN; PAM sequence: CTT
catcagctgattctgctccc

SEQ ID NO: 55968 - DNA, 20 bp, Artificial Sequence
  Description of Artificial Sequence: Synthetic oligonucleotide
  Target: ATXN2; (-) strand; PAM type: YTN; PAM sequence: CTG
cccaccccttcatcagctga

SEQ ID NO: 55969 - DNA, 20 bp, Artificial Sequence
  Description of Artificial Sequence: Synthetic oligonucleotide
  Target: ATXN2; (-) strand; PAM type: YTN; PAM sequence: CTG
ctgcccaccccttcatcagc

SEQ ID NO: 55970 - DNA, 20 bp, Artificial Sequence
  Description of Artificial Sequence: Synthetic oligonucleotide
  Target: ATXN2; (-) strand; PAM type: YTN; PAM sequence: CTG
ccccacactgctgcccaccc

SEQ ID NO: 55971 - DNA, 20 bp, Artificial Sequence
  Description of Artificial Sequence: Synthetic oligonucleotide
  Target: ATXN2; (-) strand; PAM type: YTN; PAM sequence: CTG
cagccagtggggtgcctgcc

SEQ ID NO: 55972 - DNA, 20 bp, Artificial Sequence
  Description of Artificial Sequence: Synthetic oligonucleotide
  Target: ATXN2; (-) strand; PAM type: YTN; PAM sequence: CTA
gctgcagccagtggggtgcc

SEQ ID NO: 55973 - DNA, 20 bp, Artificial Sequence
  Description of Artificial Sequence: Synthetic oligonucleotide
  Target: ATXN2; (-) strand; PAM type: YTN; PAM sequence: CTA
tggtgggctagctgcagcca

SEQ ID NO: 55974 - DNA, 20 bp, Artificial Sequence
  Description of Artificial Sequence: Synthetic oligonucleotide
  Target: ATXN2; (-) strand; PAM type: YTN; PAM sequence: CTG
tgcctatggtgggctagctg

SEQ ID NO: 55975 - DNA, 20 bp, Artificial Sequence
  Description of Artificial Sequence: Synthetic oligonucleotide
  Target: ATXN2; (-) strand; PAM type: YTN; PAM sequence: CTG
gaaggagagtggtgggatgt

SEQ ID NO: 55976 - DNA, 20 bp, Artificial Sequence
  Description of Artificial Sequence: Synthetic oligonucleotide
  Target: ATXN2; (-) strand; PAM type: YTN; PAM sequence: CTG
gtcaggactggaaggagagt

SEQ ID NO: 55977 - DNA, 20 bp, Artificial Sequence
  Description of Artificial Sequence: Synthetic oligonucleotide
  Target: ATXN2; (-) strand; PAM type: YTN; PAM sequence: CTG
gggcctggtcaggactggaa

SEQ ID NO: 55978 - DNA, 20 bp, Artificial Sequence
  Description of Artificial Sequence: Synthetic oligonucleotide
  Target: ATXN2; (-) strand; PAM type: YTN; PAM sequence: TTG
ccggctggggcctggtcagg

SEQ ID NO: 55979 - DNA, 20 bp, Artificial Sequence
  Description of Artificial Sequence: Synthetic oligonucleotide
  Target: ATXN2; (-) strand; PAM type: YTN; PAM sequence: CTC
ggtagaagttgccggctggg

SEQ ID NO: 55980 - DNA, 20 bp, Artificial Sequence
  Description of Artificial Sequence: Synthetic oligonucleotide
  Target: ATXN2; (-) strand; PAM type: YTN; PAM sequence: CTC
tcggtagaagttgccggctg

SEQ ID NO: 55981 - DNA, 20 bp, Artificial Sequence
  Description of Artificial Sequence: Synthetic oligonucleotide
  Target: ATXN2; (-) strand; PAM type: YTN; PAM sequence: TTG
agccatggctctcggtagaa

SEQ ID NO: 55982 - DNA, 20 bp, Artificial Sequence
  Description of Artificial Sequence: Synthetic oligonucleotide
  Target: ATXN2; (-) strand; PAM type: YTN; PAM sequence: TTG
gtgttgagccatggctctcg

SEQ ID NO: 55983 - DNA, 20 bp, Artificial Sequence
  Description of Artificial Sequence: Synthetic oligonucleotide
  Target: ATXN2; (-) strand; PAM type: YTN; PAM sequence: TTT
ggtgttgagccatggctctc

SEQ ID NO: 55984 - DNA, 20 bp, Artificial Sequence
  Description of Artificial Sequence: Synthetic oligonucleotide
  Target: ATXN2; (-) strand; PAM type: YTN; PAM sequence: CTG
tccagtttggtgttgagcca

SEQ ID NO: 55985 - DNA, 20 bp, Artificial Sequence
  Description of Artificial Sequence: Synthetic oligonucleotide
  Target: ATXN2; (-) strand; PAM type: YTN; PAM sequence: CTA
ctgtccagtttggtgttgag

SEQ ID NO: 55986 - DNA, 20 bp, Artificial Sequence
  Description of Artificial Sequence: Synthetic oligonucleotide
  Target: ATXN2; (-) strand; PAM type: YTN; PAM sequence: CTG
gagggatcatgatgtctact

SEQ ID NO: 55987 - DNA, 20 bp, Artificial Sequence
  Description of Artificial Sequence: Synthetic oligonucleotide
  Target: ATXN2; (-) strand; PAM type: YTN; PAM sequence: CTA
actggagggatcatgatgtc

SEQ ID NO: 55988 - DNA, 20 bp, Artificial Sequence
  Description of Artificial Sequence: Synthetic oligonucleotide
  Target: ATXN2; (-) strand; PAM type: YTN; PAM sequence: TTA
gagctaactggagggatcat

SEQ ID NO: 55989 - DNA, 20 bp, Artificial Sequence
  Description of Artificial Sequence: Synthetic oligonucleotide
  Target: ATXN2; (-) strand; PAM type: YTN; PAM sequence: CTG
taattagagctaactggagg

SEQ ID NO: 55990 - DNA, 20 bp, Artificial Sequence
  Description of Artificial Sequence: Synthetic oligonucleotide
  Target: ATXN2; (-) strand; PAM type: YTN; PAM sequence: CTG
gtggggtctgtaattagagc

SEQ ID NO: 55991 - DNA, 20 bp, Artificial Sequence
  Description of Artificial Sequence: Synthetic oligonucleotide
  Target: ATXN2; (-) strand; PAM type: YTN; PAM sequence: CTG
tactggtggggtctgtaatt

SEQ ID NO: 55992 - DNA, 20 bp, Artificial Sequence
  Description of Artificial Sequence: Synthetic oligonucleotide
  Target: ATXN2; (-) strand; PAM type: YTN; PAM sequence: CTG
tcaagctgtactggtggggt

SEQ ID NO: 55993 - DNA, 20 bp, Artificial Sequence
  Description of Artificial Sequence: Synthetic oligonucleotide
  Target: ATXN2; (-) strand; PAM type: YTN; PAM sequence: TTC
aataagtcagatgaaggaag

SEQ ID NO: 55994 - DNA, 20 bp, Artificial Sequence
  Description of Artificial Sequence: Synthetic oligonucleotide
  Target: ATXN2; (-) strand; PAM type: YTN; PAM sequence: TTG
taaaagttcaataagtcaga

SEQ ID NO: 55995 - DNA, 20 bp, Artificial Sequence
  Description of Artificial Sequence: Synthetic oligonucleotide
  Target: ATXN2; (-) strand; PAM type: YTN; PAM sequence: TTT
gtaaaagttcaataagtcag

SEQ ID NO: 55996 - DNA, 20 bp, Artificial Sequence
  Description of Artificial Sequence: Synthetic oligonucleotide
  Target: ATXN2; (-) strand; PAM type: YTN; PAM sequence: TTA
gtttgtaaaagttcaataag

SEQ ID NO: 55997 - DNA, 20 bp, Artificial Sequence
  Description of Artificial Sequence: Synthetic oligonucleotide
  Target: ATXN2; (-) strand; PAM type: YTN; PAM sequence: CTG
ttagtttgtaaaagttcaat

SEQ ID NO: 55998 - DNA, 20 bp, Artificial Sequence
  Description of Artificial Sequence: Synthetic oligonucleotide
  Target: ATXN2; (-) strand; PAM type: YTN; PAM sequence: CTG
gtgactgttagtttgtaaaa

SEQ ID NO: 55999 - DNA, 20 bp, Artificial Sequence
  Description of Artificial Sequence: Synthetic oligonucleotide
  Target: ATXN2; (-) strand; PAM type: YTN; PAM sequence: TTG
gtgctggtgactgttagttt

SEQ ID NO: 56000 - DNA, 20 bp, Artificial Sequence
  Description of Artificial Sequence: Synthetic oligonucleotide
  Target: ATXN2; (-) strand; PAM type: YTN; PAM sequence: TTT
ggtgctggtgactgttagtt

SEQ ID NO: 56001 - DNA, 20 bp, Artificial Sequence
  Description of Artificial Sequence: Synthetic oligonucleotide
  Target: ATXN2; (-) strand; PAM type: YTN; PAM sequence: CTT
tggtgctggtgactgttagt

SEQ ID NO: 56002 - DNA, 20 bp, Artificial Sequence
  Description of Artificial Sequence: Synthetic oligonucleotide
  Target: ATXN2; (-) strand; PAM type: YTN; PAM sequence: TTC
tttggtgctggtgactgtta

SEQ ID NO: 56003 - DNA, 20 bp, Artificial Sequence
  Description of Artificial Sequence: Synthetic oligonucleotide
  Target: ATXN2; (-) strand; PAM type: YTN; PAM sequence: TTA
attctttggtgctggtgact

SEQ ID NO: 56004 - DNA, 20 bp, Artificial Sequence
  Description of Artificial Sequence: Synthetic oligonucleotide
  Target: ATXN2; (-) strand; PAM type: YTN; PAM sequence: CTT
aattctttggtgctggtgac

SEQ ID NO: 56005 - DNA, 20 bp, Artificial Sequence
  Description of Artificial Sequence: Synthetic oligonucleotide
  Target: ATXN2; (-) strand; PAM type: YTN; PAM sequence: TTG
acttaattctttggtgctgg

SEQ ID NO: 56006 - DNA, 20 bp, Artificial Sequence
  Description of Artificial Sequence: Synthetic oligonucleotide
  Target: ATXN2; (-) strand; PAM type: YTN; PAM sequence: TTA
gttgacttaattctttggtg

SEQ ID NO: 56007 - DNA, 20 bp, Artificial Sequence
  Description of Artificial Sequence: Synthetic oligonucleotide
  Target: ATXN2; (-) strand; PAM type: YTN; PAM sequence: TTC
aaggcaggttagttgactta

SEQ ID NO: 56008 - DNA, 20 bp, Artificial Sequence
  Description of Artificial Sequence: Synthetic oligonucleotide
  Target: ATXN2; (-) strand; PAM type: YTN; PAM sequence: CTA
aaattcaaggcaggttagtt

SEQ ID NO: 56009 - DNA, 20 bp, Artificial Sequence
  Description of Artificial Sequence: Synthetic oligonucleotide
  Target: ATXN2; (-) strand; PAM type: YTN; PAM sequence: CTG
gtctaaaattcaaggcaggt

SEQ ID NO: 56010 - DNA, 20 bp, Artificial Sequence
  Description of Artificial Sequence: Synthetic oligonucleotide
  Target: ATXN2; (-) strand; PAM type: YTN; PAM sequence: TTG
ctggtctaaaattcaaggca

SEQ ID NO: 56011 - DNA, 20 bp, Artificial Sequence
  Description of Artificial Sequence: Synthetic oligonucleotide
  Target: ATXN2; (-) strand; PAM type: YTN; PAM sequence: TTA
taccagataaagccatatgg

SEQ ID NO: 56012 - DNA, 20 bp, Artificial Sequence
  Description of Artificial Sequence: Synthetic oligonucleotide
  Target: ATXN2; (-) strand; PAM type: YTN; PAM sequence: TTT
ataccagataaagccatatg

SEQ ID NO: 56013 - DNA, 20 bp, Artificial Sequence
  Description of Artificial Sequence: Synthetic oligonucleotide
  Target: ATXN2; (-) strand; PAM type: YTN; PAM sequence: CTA
cggtccagaaatgatcaaag

SEQ ID NO: 56014 - DNA, 20 bp, Artificial Sequence
  Description of Artificial Sequence: Synthetic oligonucleotide
  Target: ATXN2; (-) strand; PAM type: YTN; PAM sequence: TTC
ctacggtccagaaatgatca

SEQ ID NO: 56015 - DNA, 20 bp, Artificial Sequence
  Description of Artificial Sequence: Synthetic oligonucleotide
  Target: ATXN2; (-) strand; PAM type: YTN; PAM sequence: TTT
cctacggtccagaaatgatc

SEQ ID NO: 56016 - DNA, 20 bp, Artificial Sequence
  Description of Artificial Sequence: Synthetic oligonucleotide
  Target: ATXN2; (-) strand; PAM type: YTN; PAM sequence: TTT
tcctacggtccagaaatgat

SEQ ID NO: 56017 - DNA, 20 bp, Artificial Sequence
  Description of Artificial Sequence: Synthetic oligonucleotide
  Target: ATXN2; (-) strand; PAM type: YTN; PAM sequence: TTT
ttcctacggtccagaaatga

SEQ ID NO: 56018 - DNA, 20 bp, Artificial Sequence
  Description of Artificial Sequence: Synthetic oligonucleotide
  Target: ATXN2; (-) strand; PAM type: YTN; PAM sequence: CTT
tttcctacggtccagaaatg

SEQ ID NO: 56019 - DNA, 20 bp, Artificial Sequence
  Description of Artificial Sequence: Synthetic oligonucleotide
  Target: ATXN2; (-) strand; PAM type: YTN; PAM sequence: TTC
ctttttcctacggtccagaa

SEQ ID NO: 56020 - DNA, 20 bp, Artificial Sequence
  Description of Artificial Sequence: Synthetic oligonucleotide
  Target: ATXN2; (-) strand; PAM type: YTN; PAM sequence: CTA
ttcctttttcctacggtcca

SEQ ID NO: 56021 - DNA, 20 bp, Artificial Sequence
  Description of Artificial Sequence: Synthetic oligonucleotide
  Target: ATXN2; (-) strand; PAM type: YTN; PAM sequence: TTG
ctattcctttttcctacggt

SEQ ID NO: 56022 - DNA, 20 bp, Artificial Sequence
  Description of Artificial Sequence: Synthetic oligonucleotide
  Target: ATXN2; (-) strand; PAM type: YTN; PAM sequence: TTA
atgattgctattcctttttc

SEQ ID NO: 56023 - DNA, 20 bp, Artificial Sequence
  Description of Artificial Sequence: Synthetic oligonucleotide
  Target: ATXN2; (-) strand; PAM type: YTN; PAM sequence: TTT
aatgattgctattccttttt

SEQ ID NO: 56024 - DNA, 20 bp, Artificial Sequence
  Description of Artificial Sequence: Synthetic oligonucleotide
  Target: ATXN2; (-) strand; PAM type: YTN; PAM sequence: TTT
taatgattgctattcctttt

SEQ ID NO: 56025 - DNA, 20 bp, Artificial Sequence
  Description of Artificial Sequence: Synthetic oligonucleotide
  Target: ATXN2; (-) strand; PAM type: YTN; PAM sequence: CTG
gcccaagattttaatgattg

SEQ ID NO: 56026 - DNA, 20 bp, Artificial Sequence
  Description of Artificial Sequence: Synthetic oligonucleotide
  Target: ATXN2; (-) strand; PAM type: YTN; PAM sequence: CTC
tggcccaagattttaatgat

SEQ ID NO: 56027 - DNA, 20 bp, Artificial Sequence
  Description of Artificial Sequence: Synthetic oligonucleotide
  Target: ATXN2; (-) strand; PAM type: YTN; PAM sequence: TTC
tctggcccaagattttaatg

SEQ ID NO: 56028 - DNA, 20 bp, Artificial Sequence
  Description of Artificial Sequence: Synthetic oligonucleotide
  Target: ATXN2; (-) strand; PAM type: YTN; PAM sequence: TTA
tgtaaaaatagtgttctctg

SEQ ID NO: 56029 - DNA, 20 bp, Artificial Sequence
  Description of Artificial Sequence: Synthetic oligonucleotide
  Target: ATXN2; (-) strand; PAM type: YTN; PAM sequence: CTG
ttatgtaaaaatagtgttct

SEQ ID NO: 56030 - DNA, 20 bp, Artificial Sequence
  Description of Artificial Sequence: Synthetic oligonucleotide
  Target: ATXN2; (-) strand; PAM type: YTN; PAM sequence: TTA
agaaactgttatgtaaaaat

SEQ ID NO: 56031 - DNA, 20 bp, Artificial Sequence
  Description of Artificial Sequence: Synthetic oligonucleotide
  Target: ATXN2; (-) strand; PAM type: YTN; PAM sequence: TTA
ggttaagaaactgttatgta

SEQ ID NO: 56032 - DNA, 20 bp, Artificial Sequence
  Description of Artificial Sequence: Synthetic oligonucleotide
  Target: ATXN2; (-) strand; PAM type: YTN; PAM sequence: TTT
aggttaagaaactgttatgt

SEQ ID NO: 56033 - DNA, 20 bp, Artificial Sequence
  Description of Artificial Sequence: Synthetic oligonucleotide
  Target: ATXN2; (-) strand; PAM type: YTN; PAM sequence: CTT
taggttaagaaactgttatg

SEQ ID NO: 56034 - DNA, 20 bp, Artificial Sequence
  Description of Artificial Sequence: Synthetic oligonucleotide
  Target: ATXN2; (-) strand; PAM type: YTN; PAM sequence: TTG
actttaggttaagaaactgt

SEQ ID NO: 56035 - DNA, 20 bp, Artificial Sequence
  Description of Artificial Sequence: Synthetic oligonucleotide
  Target: ATXN2; (-) strand; PAM type: YTN; PAM sequence: CTT
gactttaggttaagaaactg

SEQ ID NO: 56036 - DNA, 20 bp, Artificial Sequence
  Description of Artificial Sequence: Synthetic oligonucleotide
  Target: ATXN2; (-) strand; PAM type: YTN; PAM sequence: CTC
agggaagagtccaaggcctt

SEQ ID NO: 56037 - DNA, 20 bp, Artificial Sequence
  Description of Artificial Sequence: Synthetic oligonucleotide
  Target: ATXN2; (-) strand; PAM type: YTN; PAM sequence: CTC
aggcaaccctcagggaagag

SEQ ID NO: 56038 - DNA, 20 bp, Artificial Sequence
  Description of Artificial Sequence: Synthetic oligonucleotide
  Target: ATXN2; (-) strand; PAM type: YTN; PAM sequence: CTG
aatagaaagcatgaaggaat

SEQ ID NO: 56039 - DNA, 20 bp, Artificial Sequence
  Description of Artificial Sequence: Synthetic oligonucleotide
  Target: ATXN2; (-) strand; PAM type: YTN; PAM sequence: TTA
gtcctgaatagaaagcatga

SEQ ID NO: 56040 - DNA, 20 bp, Artificial Sequence
  Description of Artificial Sequence: Synthetic oligonucleotide
  Target: ATXN2; (-) strand; PAM type: YTN; PAM sequence: CTT
agtcctgaatagaaagcatg

SEQ ID NO: 56041 - DNA, 20 bp, Artificial Sequence
  Description of Artificial Sequence: Synthetic oligonucleotide
  Target: ATXN2; (-) strand; PAM type: YTN; PAM sequence: TTG
cagtaagggacttagtcctg

SEQ ID NO: 56042 - DNA, 20 bp, Artificial Sequence
  Description of Artificial Sequence: Synthetic oligonucleotide
  Target: ATXN2; (-) strand; PAM type: YTN; PAM sequence: TTT
gcagtaagggacttagtcct

SEQ ID NO: 56043 - DNA, 20 bp, Artificial Sequence
  Description of Artificial Sequence: Synthetic oligonucleotide
  Target: ATXN2; (-) strand; PAM type: YTN; PAM sequence: CTA
acacatttgcagtaagggac

SEQ ID NO: 56044 - DNA, 20 bp, Artificial Sequence
  Description of Artificial Sequence: Synthetic oligonucleotide
  Target: ATXN2; (-) strand; PAM type: YTN; PAM sequence: TTA
gagctaacacatttgcagta

SEQ ID NO: 56045 - DNA, 20 bp, Artificial Sequence
  Description of Artificial Sequence: Synthetic oligonucleotide
  Target: ATXN2; (-) strand; PAM type: YTN; PAM sequence: TTG
tgggagatgttagagctaac

SEQ ID NO: 56046 - DNA, 20 bp, Artificial Sequence
  Description of Artificial Sequence: Synthetic oligonucleotide
  Target: ATXN2; (-) strand; PAM type: YTN; PAM sequence: CTT
gtgggagatgttagagctaa

SEQ ID NO: 56047 - DNA, 20 bp, Artificial Sequence
  Description of Artificial Sequence: Synthetic oligonucleotide
  Target: ATXN2; (-) strand; PAM type: YTN; PAM sequence: CTA
gcttgtgggagatgttagag

SEQ ID NO: 56048 - DNA, 20 bp, Artificial Sequence
  Description of Artificial Sequence: Synthetic oligonucleotide
  Target: ATXN2; (-) strand; PAM type: YTN; PAM sequence: CTC
tagcttgtgggagatgttag

SEQ ID NO: 56049 - DNA, 20 bp, Artificial Sequence
  Description of Artificial Sequence: Synthetic oligonucleotide
  Target: ATXN2; (-) strand; PAM type: YTN; PAM sequence: TTC
ctctagcttgtgggagatgt

SEQ ID NO: 56050 - DNA, 20 bp, Artificial Sequence
  Description of Artificial Sequence: Synthetic oligonucleotide
  Target: ATXN2; (-) strand; PAM type: YTN; PAM sequence: CTC
gcaagttcctctagcttgtg

SEQ ID NO: 56051 - DNA, 20 bp, Artificial Sequence
  Description of Artificial Sequence: Synthetic oligonucleotide
  Target: ATXN2; (-) strand; PAM type: YTN; PAM sequence: TTA
atatactcgcaagttcctct

SEQ ID NO: 56052 - DNA, 20 bp, Artificial Sequence
  Description of Artificial Sequence: Synthetic oligonucleotide
  Target: ATXN2; (-) strand; PAM type: YTN; PAM sequence: TTG
ttaatatactcgcaagttcc

SEQ ID NO: 56053 - DNA, 20 bp, Artificial Sequence
  Description of Artificial Sequence: Synthetic oligonucleotide
  Target: ATXN2; (-) strand; PAM type: YTN; PAM sequence: CTT
gttaatatactcgcaagttc

SEQ ID NO: 56054 - DNA, 20 bp, Artificial Sequence
  Description of Artificial Sequence: Synthetic oligonucleotide
  Target: ATXN2; (-) strand; PAM type: YTN; PAM sequence: CTA
accaaacacaggatgtcaga

SEQ ID NO: 56055 - DNA, 20 bp, Artificial Sequence
  Description of Artificial Sequence: Synthetic oligonucleotide
  Target: ATXN2; (-) strand; PAM type: YTN; PAM sequence: TTC
taaccaaacacaggatgtca

SEQ ID NO: 56056 - DNA, 20 bp, Artificial Sequence
  Description of Artificial Sequence: Synthetic oligonucleotide
  Target: ATXN2; (-) strand; PAM type: YTN; PAM sequence: CTG
tatattctaaccaaacacag

SEQ ID NO: 56057 - DNA, 20 bp, Artificial Sequence
  Description of Artificial Sequence: Synthetic oligonucleotide
  Target: ATXN2; (-) strand; PAM type: YTN; PAM sequence: TTA
tcacaatgtgctgtatattc

SEQ ID NO: 56058 - DNA, 20 bp, Artificial Sequence
  Description of Artificial Sequence: Synthetic oligonucleotide
  Target: ATXN2; (-) strand; PAM type: YTN; PAM sequence: TTA
tgttatcacaatgtgctgta

SEQ ID NO: 56059 - DNA, 20 bp, Artificial Sequence
  Description of Artificial Sequence: Synthetic oligonucleotide
  Target: ATXN2; (-) strand; PAM type: YTN; PAM sequence: TTT
atgttatcacaatgtgctgt

SEQ ID NO: 56060 - DNA, 20 bp, Artificial Sequence
  Description of Artificial Sequence: Synthetic oligonucleotide
  Target: ATXN2; (-) strand; PAM type: YTN; PAM sequence: CTT
tatgttatcacaatgtgctg

SEQ ID NO: 56061 - DNA, 20 bp, Artificial Sequence
  Description of Artificial Sequence: Synthetic oligonucleotide
  Target: ATXN2; (-) strand; PAM type: YTN; PAM sequence: CTA
taatgatacaagatgaatcc

SEQ ID NO: 56062 - DNA, 20 bp, Artificial Sequence
  Description of Artificial Sequence: Synthetic oligonucleotide
  Target: ATXN2; (-) strand; PAM type: YTN; PAM sequence: CTG
cctataatgatacaagatga

SEQ ID NO: 56063 - DNA, 20 bp, Artificial Sequence
  Description of Artificial Sequence: Synthetic oligonucleotide
  Target: ATXN2; (-) strand; PAM type: YTN; PAM sequence: TTC
tgcctataatgatacaagat

SEQ ID NO: 56064 - DNA, 20 bp, Artificial Sequence
  Description of Artificial Sequence: Synthetic oligonucleotide
  Target: ATXN2; (-) strand; PAM type: YTN; PAM sequence: CTT
ctgcctataatgatacaaga

SEQ ID NO: 56065 - DNA, 20 bp, Artificial Sequence
  Description of Artificial Sequence: Synthetic oligonucleotide
  Target: ATXN2; (-) strand; PAM type: YTN; PAM sequence: TTG
ccaaataccttctgcctata

SEQ ID NO: 56066 - DNA, 20 bp, Artificial Sequence
  Description of Artificial Sequence: Synthetic oligonucleotide
  Target: ATXN2; (-) strand; PAM type: YTN; PAM sequence: TTT
gccaaataccttctgcctat

SEQ ID NO: 56067 - DNA, 20 bp, Artificial Sequence
  Description of Artificial Sequence: Synthetic oligonucleotide
  Target: ATXN2; (-) strand; PAM type: YTN; PAM sequence: TTG
tacagtacataaaacaatac

SEQ ID NO: 56068 - DNA, 20 bp, Artificial Sequence
  Description of Artificial Sequence: Synthetic oligonucleotide
  Target: ATXN2; (-) strand; PAM type: YTN; PAM sequence: CTT
gtacagtacataaaacaata

SEQ ID NO: 56069 - DNA, 20 bp, Artificial Sequence
  Description of Artificial Sequence: Synthetic oligonucleotide
  Target: ATXN2; (-) strand; PAM type: YTN; PAM sequence: TTA
cttgtacagtacataaaaca

SEQ ID NO: 56070 - DNA, 20 bp, Artificial Sequence
  Description of Artificial Sequence: Synthetic oligonucleotide
  Target: ATXN2; (-) strand; PAM type: YTN; PAM sequence: TTC
aagaataagttacttgtaca

SEQ ID NO: 56071 - DNA, 20 bp, Artificial Sequence
  Description of Artificial Sequence: Synthetic oligonucleotide
  Target: ATXN2; (-) strand; PAM type: YTN; PAM sequence: TTA
ttcaagaataagttacttgt

SEQ ID NO: 56072 - DNA, 20 bp, Artificial Sequence
  Description of Artificial Sequence: Synthetic oligonucleotide
  Target: ATXN2; (-) strand; PAM type: YTN; PAM sequence: TTG
cattattcaagaataagtta

SEQ ID NO: 56073 - DNA, 20 bp, Artificial Sequence
  Description of Artificial Sequence: Synthetic oligonucleotide
  Target: ATXN2; (-) strand; PAM type: YTN; PAM sequence: TTT
gcattattcaagaataagtt

SEQ ID NO: 56074 - DNA, 20 bp, Artificial Sequence
  Description of Artificial Sequence: Synthetic oligonucleotide
  Target: ATXN2; (-) strand; PAM type: YTN; PAM sequence: TTA
tagcaaaatttgcattattc

SEQ ID NO: 56075 - DNA, 20 bp, Artificial Sequence
  Description of Artificial Sequence: Synthetic oligonucleotide
  Target: ATXN2; (-) strand; PAM type: YTN; PAM sequence: TTG
tacattatagcaaaatttgc

SEQ ID NO: 56076 - DNA, 20 bp, Artificial Sequence
  Description of Artificial Sequence: Synthetic oligonucleotide
  Target: ATXN2; (-) strand; PAM type: YTN; PAM sequence: TTT
gtacattatagcaaaatttg

SEQ ID NO: 56077 - DNA, 20 bp, Artificial Sequence
  Description of Artificial Sequence: Synthetic oligonucleotide
  Target: ATXN2; (-) strand; PAM type: YTN; PAM sequence: TTC
acatatagcaatttgtacat

SEQ ID NO: 56078 - DNA, 20 bp, Artificial Sequence
  Description of Artificial Sequence: Synthetic oligonucleotide
  Target: ATXN2; (-) strand; PAM type: YTN; PAM sequence: TTA
attcacatatagcaatttgt

SEQ ID NO: 56079 - DNA, 20 bp, Artificial Sequence
  Description of Artificial Sequence: Synthetic oligonucleotide
  Target: ATXN2; (-) strand; PAM type: YTN; PAM sequence: TTT
aattcacatatagcaatttg

SEQ ID NO: 56080 - DNA, 20 bp, Artificial Sequence
  Description of Artificial Sequence: Synthetic oligonucleotide
  Target: ATXN2; (-) strand; PAM type: YTN; PAM sequence: TTT
taattcacatatagcaattt

SEQ ID NO: 56081 - DNA, 20 bp, Artificial Sequence
  Description of Artificial Sequence: Synthetic oligonucleotide
  Target: ATXN2; (-) strand; PAM type: YTN; PAM sequence: TTT
ttaattcacatatagcaatt

SEQ ID NO: 56082 - DNA, 20 bp, Artificial Sequence
  Description of Artificial Sequence: Synthetic oligonucleotide
  Target: ATXN2; (-) strand; PAM type: YTN; PAM sequence: CTT
tttaattcacatatagcaat

SEQ ID NO: 56083 - DNA, 20 bp, Artificial Sequence
  Description of Artificial Sequence: Synthetic oligonucleotide
  Target: ATXN2; (-) strand; PAM type: YTN; PAM sequence: CTG
aaaactttttaattcacata

SEQ ID NO: 56084 - DNA, 20 bp, Artificial Sequence
  Description of Artificial Sequence: Synthetic oligonucleotide
  Target: ATXN2; (-) strand; PAM type: YTN; PAM sequence: TTC
tgaaaactttttaattcaca

SEQ ID NO: 56085 - DNA, 20 bp, Artificial Sequence
  Description of Artificial Sequence: Synthetic oligonucleotide
  Target: ATXN2; (-) strand; PAM type: YTN; PAM sequence: TTA
tgacagcaaatcaagattct

SEQ ID NO: 56086 - DNA, 20 bp, Artificial Sequence
  Description of Artificial Sequence: Synthetic oligonucleotide
  Target: ATXN2; (-) strand; PAM type: YTN; PAM sequence: TTA
aatattatgacagcaaatca

SEQ ID NO: 56087 - DNA, 20 bp, Artificial Sequence
  Description of Artificial Sequence: Synthetic oligonucleotide
  Target: ATXN2; (-) strand; PAM type: YTN; PAM sequence: TTT
aaatattatgacagcaaatc

SEQ ID NO: 56088 - DNA, 20 bp, Artificial Sequence
  Description of Artificial Sequence: Synthetic oligonucleotide
  Target: ATXN2; (-) strand; PAM type: YTN; PAM sequence: CTT
taaatattatgacagcaaat

SEQ ID NO: 56089 - DNA, 20 bp, Artificial Sequence
  Description of Artificial Sequence: Synthetic oligonucleotide
  Target: ATXN2; (-) strand; PAM type: YTN; PAM sequence: TTA
atagagcctttaaatattat

SEQ ID NO: 56090 - DNA, 20 bp, Artificial Sequence
  Description of Artificial Sequence: Synthetic oligonucleotide
  Target: ATXN2; (-) strand; PAM type: YTN; PAM sequence: CTT
aatagagcctttaaatatta

SEQ ID NO: 56091 - DNA, 20 bp, Artificial Sequence
  Description of Artificial Sequence: Synthetic oligonucleotide
  Target: ATXN2; (-) strand; PAM type: YTN; PAM sequence: TTG
tagagacaccatggtcttaa

SEQ ID NO: 56092 - DNA, 20 bp, Artificial Sequence
  Description of Artificial Sequence: Synthetic oligonucleotide
  Target: ATXN2; (-) strand; PAM type: YTN; PAM sequence: TTT
gtagagacaccatggtctta

SEQ ID NO: 56093 - DNA, 20 bp, Artificial Sequence
  Description of Artificial Sequence: Synthetic oligonucleotide
  Target: ATXN2; (-) strand; PAM type: YTN; PAM sequence: TTT
tgtagagacaccatggtctt

SEQ ID NO: 56094 - DNA, 20 bp, Artificial Sequence
  Description of Artificial Sequence: Synthetic oligonucleotide
  Target: ATXN2; (-) strand; PAM type: YTN; PAM sequence: TTG
ggcagggcaaggattttgta

SEQ ID NO: 56095 - DNA, 20 bp, Artificial Sequence
  Description of Artificial Sequence: Synthetic oligonucleotide
  Target: ATXN2; (-) strand; PAM type: YTN; PAM sequence: TTT
gggcagggcaaggattttgt

SEQ ID NO: 56096 - DNA, 20 bp, Artificial Sequence
  Description of Artificial Sequence: Synthetic oligonucleotide
  Target: ATXN2; (-) strand; PAM type: YTN; PAM sequence: TTG
caacggggaggacaaaggga

SEQ ID NO: 56097 - DNA, 20 bp, Artificial Sequence
  Description of Artificial Sequence: Synthetic oligonucleotide
  Target: ATXN2; (-) strand; PAM type: YTN; PAM sequence: TTC
ccagattgcaacggggagga

SEQ ID NO: 56098 - DNA, 20 bp, Artificial Sequence
  Description of Artificial Sequence: Synthetic oligonucleotide
  Target: ATXN2; (-) strand; PAM type: YTN; PAM sequence: TTA
gtattcccagattgcaacgg

SEQ ID NO: 56099 - DNA, 20 bp, Artificial Sequence
  Description of Artificial Sequence: Synthetic oligonucleotide
  Target: ATXN2; (-) strand; PAM type: YTN; PAM sequence: TTG
ttagtattcccagattgcaa

SEQ ID NO: 56100 - DNA, 20 bp, Artificial Sequence
  Description of Artificial Sequence: Synthetic oligonucleotide
  Target: ATXN2; (-) strand; PAM type: YTN; PAM sequence: TTT
gttagtattcccagattgca

SEQ ID NO: 56101 - DNA, 20 bp, Artificial Sequence
  Description of Artificial Sequence: Synthetic oligonucleotide
  Target: ATXN2; (-) strand; PAM type: YTN; PAM sequence: CTC
ataagcatttgttagtattc

SEQ ID NO: 56102 - DNA, 20 bp, Artificial Sequence
  Description of Artificial Sequence: Synthetic oligonucleotide
  Target: ATXN2; (-) strand; PAM type: YTN; PAM sequence: TTG
acatggatggactcataagc

SEQ ID NO: 56103 - DNA, 20 bp, Artificial Sequence
  Description of Artificial Sequence: Synthetic oligonucleotide
  Target: ATXN2; (-) strand; PAM type: YTN; PAM sequence: TTA
ttgacatggatggactcata

SEQ ID NO: 56104 - DNA, 20 bp, Artificial Sequence
  Description of Artificial Sequence: Synthetic oligonucleotide
  Target: ATXN2; (-) strand; PAM type: YTN; PAM sequence: CTT
attgacatggatggactcat

SEQ ID NO: 56105 - DNA, 20 bp, Artificial Sequence
  Description of Artificial Sequence: Synthetic oligonucleotide
  Target: ATXN2; (-) strand; PAM type: YTN; PAM sequence: CTG
cttattgacatggatggact

SEQ ID NO: 56106 - DNA, 20 bp, Artificial Sequence
  Description of Artificial Sequence: Synthetic oligonucleotide
  Target: ATXN2; (-) strand; PAM type: YTN; PAM sequence: CTG
aaaagatacaaagatgtaca

SEQ ID NO: 56107 - DNA, 20 bp, Artificial Sequence
  Description of Artificial Sequence: Synthetic oligonucleotide
  Target: ATXN2; (-) strand; PAM type: YTN; PAM sequence: TTG
caataaagaaatccagaggg

SEQ ID NO: 56108 - DNA, 20 bp, Artificial Sequence
  Description of Artificial Sequence: Synthetic oligonucleotide
  Target: ATXN2; (-) strand; PAM type: YTN; PAM sequence: CTC
agaaaaaaattgcaataaag

SEQ ID NO: 56109 - DNA, 20 bp, Artificial Sequence
  Description of Artificial Sequence: Synthetic oligonucleotide
  Target: ATXN2; (-) strand; PAM type: YTN; PAM sequence: TTA
ccagtagggggcaggagaca

SEQ ID NO: 56110 - DNA, 20 bp, Artificial Sequence
  Description of Artificial Sequence: Synthetic oligonucleotide
  Target: ATXN2; (-) strand; PAM type: YTN; PAM sequence: TTT
accagtagggggcaggagac

SEQ ID NO: 56111 - DNA, 20 bp, Artificial Sequence
  Description of Artificial Sequence: Synthetic oligonucleotide
  Target: ATXN2; (-) strand; PAM type: YTN; PAM sequence: CTT
taccagtagggggcaggaga

SEQ ID NO: 56112 - DNA, 20 bp, Artificial Sequence
  Description of Artificial Sequence: Synthetic oligonucleotide
  Target: ATXN2; (-) strand; PAM type: YTN; PAM sequence: CTA
ctttaccagtagggggcagg

SEQ ID NO: 56113 - DNA, 20 bp, Artificial Sequence
  Description of Artificial Sequence: Synthetic oligonucleotide
  Target: ATXN2; (-) strand; PAM type: YTN; PAM sequence: TTC
tactttaccagtagggggca

SEQ ID NO: 56114 - DNA, 20 bp, Artificial Sequence
  Description of Artificial Sequence: Synthetic oligonucleotide
  Target: ATXN2; (-) strand; PAM type: YTN; PAM sequence: TTT
ctactttaccagtagggggc

SEQ ID NO: 56115 - DNA, 20 bp, Artificial Sequence
  Description of Artificial Sequence: Synthetic oligonucleotide
  Target: ATXN2; (-) strand; PAM type: YTN; PAM sequence: TTT
tctactttaccagtaggggg

SEQ ID NO: 56116 - DNA, 20 bp, Artificial Sequence
  Description of Artificial Sequence: Synthetic oligonucleotide
  Target: ATXN2; (-) strand; PAM type: YTN; PAM sequence: TTT
ttctactttaccagtagggg

SEQ ID NO: 56117 - DNA, 20 bp, Artificial Sequence
  Description of Artificial Sequence: Synthetic oligonucleotide
  Target: ATXN2; (-) strand; PAM type: YTN; PAM sequence: TTC
gggcatttttctactttacc

SEQ ID NO: 56118 - DNA, 20 bp, Artificial Sequence
  Description of Artificial Sequence: Synthetic oligonucleotide
  Target: ATXN2; (-) strand; PAM type: YTN; PAM sequence: TTC
ccaattcgggcatttttcta

SEQ ID NO: 56119 - DNA, 20 bp, Artificial Sequence
  Description of Artificial Sequence: Synthetic oligonucleotide
  Target: ATXN2; (-) strand; PAM type: YTN; PAM sequence: CTG
gaagttcccaattcgggcat

SEQ ID NO: 56120 - DNA, 20 bp, Artificial Sequence
  Description of Artificial Sequence: Synthetic oligonucleotide
  Target: ATXN2; (-) strand; PAM type: YTN; PAM sequence: TTA
gctggaagttcccaattcgg

SEQ ID NO: 56121 - DNA, 20 bp, Artificial Sequence
  Description of Artificial Sequence: Synthetic oligonucleotide
  Target: ATXN2; (-) strand; PAM type: YTN; PAM sequence: CTG
aaccaaaatgagtgtcatta

SEQ ID NO: 56122 - DNA, 20 bp, Artificial Sequence
  Description of Artificial Sequence: Synthetic oligonucleotide
  Target: ATXN2; (-) strand; PAM type: YTN; PAM sequence: CTC
ctgaaccaaaatgagtgtca

SEQ ID NO: 56123 - DNA, 20 bp, Artificial Sequence
  Description of Artificial Sequence: Synthetic oligonucleotide
  Target: ATXN2; (-) strand; PAM type: YTN; PAM sequence: TTA
atatctcctgaaccaaaatg

SEQ ID NO: 56124 - DNA, 20 bp, Artificial Sequence
  Description of Artificial Sequence: Synthetic oligonucleotide
  Target: ATXN2; (-) strand; PAM type: YTN; PAM sequence: TTT
aatatctcctgaaccaaaat

SEQ ID NO: 56125 - DNA, 20 bp, Artificial Sequence
  Description of Artificial Sequence: Synthetic oligonucleotide
  Target: ATXN2; (-) strand; PAM type: YTN; PAM sequence: TTT
taatatctcctgaaccaaaa

SEQ ID NO: 56126 - DNA, 20 bp, Artificial Sequence
  Description of Artificial Sequence: Synthetic oligonucleotide
  Target: ATXN2; (-) strand; PAM type: YTN; PAM sequence: TTT
ttaatatctcctgaaccaaa

SEQ ID NO: 56127 - DNA, 20 bp, Artificial Sequence
  Description of Artificial Sequence: Synthetic oligonucleotide
  Target: ATXN2; (-) strand; PAM type: YTN; PAM sequence: CTT
tttaatatctcctgaaccaa

SEQ ID NO: 56128 - DNA, 20 bp, Artificial Sequence
  Description of Artificial Sequence: Synthetic oligonucleotide
  Target: ATXN2; (-) strand; PAM type: YTN; PAM sequence: TTC
ctttttaatatctcctgaac

SEQ ID NO: 56129 - DNA, 20 bp, Artificial Sequence
  Description of Artificial Sequence: Synthetic oligonucleotide
  Target: ATXN2; (-) strand; PAM type: YTN; PAM sequence: CTT
cctttttaatatctcctgaa

SEQ ID NO: 56130 - DNA, 20 bp, Artificial Sequence
  Description of Artificial Sequence: Synthetic oligonucleotide
  Target: ATXN2; (-) strand; PAM type: YTN; PAM sequence: CTG
taagcttcctttttaatatc

SEQ ID NO: 56131 - DNA, 20 bp, Artificial Sequence
  Description of Artificial Sequence: Synthetic oligonucleotide
  Target: ATXN2; (-) strand; PAM type: YTN; PAM sequence: TTC
tgtaagcttcctttttaata

SEQ ID NO: 56132 - DNA, 20 bp, Artificial Sequence
  Description of Artificial Sequence: Synthetic oligonucleotide
  Target: ATXN2; (-) strand; PAM type: YTN; PAM sequence: CTG
acaccgattctgtaagcttc

SEQ ID NO: 56133 - DNA, 20 bp, Artificial Sequence
  Description of Artificial Sequence: Synthetic oligonucleotide
  Target: ATXN2; (-) strand; PAM type: YTN; PAM sequence: CTC
gggctgacaccgattctgta

SEQ ID NO: 56134 - DNA, 20 bp, Artificial Sequence
  Description of Artificial Sequence: Synthetic oligonucleotide
  Target: ATXN2; (-) strand; PAM type: YTN; PAM sequence: TTC
cacatcctcgggctgacacc

SEQ ID NO: 56135 - DNA, 20 bp, Artificial Sequence
  Description of Artificial Sequence: Synthetic oligonucleotide
  Target: ATXN2; (-) strand; PAM type: YTN; PAM sequence: CTG
aaattccacatcctcgggct

SEQ ID NO: 56136 - DNA, 20 bp, Artificial Sequence
  Description of Artificial Sequence: Synthetic oligonucleotide
  Target: ATXN2; (-) strand; PAM type: YTN; PAM sequence: TTG
ggcagcactgaaattccaca

SEQ ID NO: 56137 - DNA, 20 bp, Artificial Sequence
  Description of Artificial Sequence: Synthetic oligonucleotide
  Target: ATXN2; (-) strand; PAM type: YTN; PAM sequence: TTG
gccagagttgggcagcactg

SEQ ID NO: 56138 - DNA, 20 bp, Artificial Sequence
  Description of Artificial Sequence: Synthetic oligonucleotide
  Target: ATXN2; (-) strand; PAM type: YTN; PAM sequence: TTC
aggaggaggaaggttggcca

SEQ ID NO: 56139 - DNA, 20 bp, Artificial Sequence
  Description of Artificial Sequence: Synthetic oligonucleotide
  Target: ATXN2; (-) strand; PAM type: YTN; PAM sequence: CTT
caggaggaggaaggttggcc

SEQ ID NO: 56140 - DNA, 20 bp, Artificial Sequence
  Description of Artificial Sequence: Synthetic oligonucleotide
  Target: ATXN2; (-) strand; PAM type: YTN; PAM sequence: CTG
cttcaggaggaggaaggttg

SEQ ID NO: 56141 - DNA, 20 bp, Artificial Sequence
  Description of Artificial Sequence: Synthetic oligonucleotide
  Target: ATXN2; (-) strand; PAM type: YTN; PAM sequence: TTA
gagatctgcttcaggaggag

SEQ ID NO: 56142 - DNA, 20 bp, Artificial Sequence
  Description of Artificial Sequence: Synthetic oligonucleotide
  Target: ATXN2; (-) strand; PAM type: YTN; PAM sequence: TTG
gtggattagagatctgcttc

SEQ ID NO: 56143 - DNA, 20 bp, Artificial Sequence
  Description of Artificial Sequence: Synthetic oligonucleotide
  Target: ATXN2; (-) strand; PAM type: YTN; PAM sequence: TTT
ggtggattagagatctgctt

SEQ ID NO: 56144 - DNA, 20 bp, Artificial Sequence
  Description of Artificial Sequence: Synthetic oligonucleotide
  Target: ATXN2; (-) strand; PAM type: YTN; PAM sequence: CTT
tggtggattagagatctgct

SEQ ID NO: 56145 - DNA, 20 bp, Artificial Sequence
  Description of Artificial Sequence: Synthetic oligonucleotide
  Target: ATXN2; (-) strand; PAM type: YTN; PAM sequence: CTC
tttggtggattagagatctg

SEQ ID NO: 56146 - DNA, 20 bp, Artificial Sequence
  Description of Artificial Sequence: Synthetic oligonucleotide
  Target: ATXN2; (-) strand; PAM type: YTN; PAM sequence: TTC
tctttggtggattagagatc

SEQ ID NO: 56147 - DNA, 20 bp, Artificial Sequence
  Description of Artificial Sequence: Synthetic oligonucleotide
  Target: ATXN2; (-) strand; PAM type: YTN; PAM sequence: CTA
ttctctttggtggattagag

SEQ ID NO: 56148 - DNA, 20 bp, Artificial Sequence
  Description of Artificial Sequence: Synthetic oligonucleotide
  Target: ATXN2; (-) strand; PAM type: YTN; PAM sequence: CTG
agctattctctttggtggat

SEQ ID NO: 56149 - DNA, 20 bp, Artificial Sequence
  Description of Artificial Sequence: Synthetic oligonucleotide
  Target: ATXN2; (-) strand; PAM type: YTN; PAM sequence: CTA
gaaaaagacaagactgagct

SEQ ID NO: 56150 - DNA, 20 bp, Artificial Sequence
  Description of Artificial Sequence: Synthetic oligonucleotide
  Target: ATXN2; (-) strand; PAM type: YTN; PAM sequence: CTC
tagaaaaagacaagactgag

SEQ ID NO: 56151 - DNA, 20 bp, Artificial Sequence
  Description of Artificial Sequence: Synthetic oligonucleotide
  Target: ATXN2; (-) strand; PAM type: YTN; PAM sequence: TTC
aaggtatctctagaaaaaga

SEQ ID NO: 56152 - DNA, 20 bp, Artificial Sequence
  Description of Artificial Sequence: Synthetic oligonucleotide
  Target: ATXN2; (-) strand; PAM type: YTN; PAM sequence: CTG
gttcaaggtatctctagaaa

SEQ ID NO: 56153 - DNA, 20 bp, Artificial Sequence
  Description of Artificial Sequence: Synthetic oligonucleotide
  Target: ATXN2; (-) strand; PAM type: YTN; PAM sequence: TTC
tggttcaaggtatctctaga

SEQ ID NO: 56154 - DNA, 20 bp, Artificial Sequence
  Description of Artificial Sequence: Synthetic oligonucleotide
  Target: ATXN2; (-) strand; PAM type: YTN; PAM sequence: TTA
gttctggttcaaggtatctc

SEQ ID NO: 56155 - DNA, 20 bp, Artificial Sequence
  Description of Artificial Sequence: Synthetic oligonucleotide
  Target: ATXN2; (-) strand; PAM type: YTN; PAM sequence: CTT
agttctggttcaaggtatct

SEQ ID NO: 56156 - DNA, 20 bp, Artificial Sequence
  Description of Artificial Sequence: Synthetic oligonucleotide
  Target: ATXN2; (-) strand; PAM type: YTN; PAM sequence: TTC
acccttagttctggttcaag

SEQ ID NO: 56157 - DNA, 20 bp, Artificial Sequence
  Description of Artificial Sequence: Synthetic oligonucleotide
  Target: ATXN2; (-) strand; PAM type: YTN; PAM sequence: CTT
cacccttagttctggttcaa

SEQ ID NO: 56158 - DNA, 20 bp, Artificial Sequence
  Description of Artificial Sequence: Synthetic oligonucleotide
  Target: ATXN2; (-) strand; PAM type: YTN; PAM sequence: TTC
ttcacccttagttctggttc

SEQ ID NO: 56159 - DNA, 20 bp, Artificial Sequence
  Description of Artificial Sequence: Synthetic oligonucleotide
  Target: ATXN2; (-) strand; PAM type: YTN; PAM sequence: CTT
cttcacccttagttctggtt

SEQ ID NO: 56160 - DNA, 20 bp, Artificial Sequence
  Description of Artificial Sequence: Synthetic oligonucleotide
  Target: ATXN2; (-) strand; PAM type: YTN; PAM sequence: TTC
ttcttcacccttagttctgg

SEQ ID NO: 56161 - DNA, 20 bp, Artificial Sequence
  Description of Artificial Sequence: Synthetic oligonucleotide
  Target: ATXN2; (-) strand; PAM type: YTN; PAM sequence: TTT
cttcttcacccttagttctg

SEQ ID NO: 56162 - DNA, 20 bp, Artificial Sequence
  Description of Artificial Sequence: Synthetic oligonucleotide
  Target: ATXN2; (-) strand; PAM type: YTN; PAM sequence: TTT
tcttcttcacccttagttct

SEQ ID NO: 56163 - DNA, 20 bp, Artificial Sequence
  Description of Artificial Sequence: Synthetic oligonucleotide
  Target: ATXN2; (-) strand; PAM type: YTN; PAM sequence: TTT
ttcttcttcacccttagttc

SEQ ID NO: 56164 - DNA, 20 bp, Artificial Sequence
  Description of Artificial Sequence: Synthetic oligonucleotide
  Target: ATXN2; (-) strand; PAM type: YTN; PAM sequence: CTG
tgaaatgatttttcttcttc

SEQ ID NO: 56165 - DNA, 20 bp, Artificial Sequence
  Description of Artificial Sequence: Synthetic oligonucleotide
  Target: ATXN2; (-) strand; PAM type: YTN; PAM sequence: TTG
aatatcccggaaggtagctg

SEQ ID NO: 56166 - DNA, 20 bp, Artificial Sequence
  Description of Artificial Sequence: Synthetic oligonucleotide
  Target: ATXN2; (-) strand; PAM type: YTN; PAM sequence: TTT
gaatatcccggaaggtagct

SEQ ID NO: 56167 - DNA, 20 bp, Artificial Sequence
  Description of Artificial Sequence: Synthetic oligonucleotide
  Target: ATXN2; (-) strand; PAM type: YTN; PAM sequence: TTT
tgaatatcccggaaggtagc

SEQ ID NO: 56168 - DNA, 20 bp, Artificial Sequence
  Description of Artificial Sequence: Synthetic oligonucleotide
  Target: ATXN2; (-) strand; PAM type: YTN; PAM sequence: CTA
agggtgcattttgaatatcc

SEQ ID NO: 56169 - DNA, 20 bp, Artificial Sequence
  Description of Artificial Sequence: Synthetic oligonucleotide
  Target: ATXN2; (-) strand; PAM type: YTN; PAM sequence: TTA
atatcaaagcaggtgtgcta

SEQ ID NO: 56170 - DNA, 20 bp, Artificial Sequence
  Description of Artificial Sequence: Synthetic oligonucleotide
  Target: ATXN2; (-) strand; PAM type: YTN; PAM sequence: CTT
aatatcaaagcaggtgtgct

SEQ ID NO: 56171 - DNA, 20 bp, Artificial Sequence
  Description of Artificial Sequence: Synthetic oligonucleotide
  Target: ATXN2; (-) strand; PAM type: YTN; PAM sequence: TTG
taggatacttaatatcaaag

SEQ ID NO: 56172 - DNA, 20 bp, Artificial Sequence
  Description of Artificial Sequence: Synthetic oligonucleotide
  Target: ATXN2; (-) strand; PAM type: YTN; PAM sequence: TTT
gtaggatacttaatatcaaa

SEQ ID NO: 56173 - DNA, 20 bp, Artificial Sequence
  Description of Artificial Sequence: Synthetic oligonucleotide
  Target: ATXN2; (-) strand; PAM type: YTN; PAM sequence: CTT
tgtaggatacttaatatcaa

SEQ ID NO: 56174 - DNA, 20 bp, Artificial Sequence
  Description of Artificial Sequence: Synthetic oligonucleotide
  Target: ATXN2; (-) strand; PAM type: YTN; PAM sequence: TTC
tttgtaggatacttaatatc

SEQ ID NO: 56175 - DNA, 20 bp, Artificial Sequence
  Description of Artificial Sequence: Synthetic oligonucleotide
  Target: ATXN2; (-) strand; PAM type: YTN; PAM sequence: CTT
ctttgtaggatacttaatat

SEQ ID NO: 56176 - DNA, 20 bp, Artificial Sequence
  Description of Artificial Sequence: Synthetic oligonucleotide
  Target: ATXN2; (-) strand; PAM type: YTN; PAM sequence: CTA
cttctttgtaggatacttaa

SEQ ID NO: 56177 - DNA, 20 bp, Artificial Sequence
  Description of Artificial Sequence: Synthetic oligonucleotide
  Target: ATXN2; (-) strand; PAM type: YTN; PAM sequence: CTG
tataagctacttctttgtag

SEQ ID NO: 56178 - DNA, 20 bp, Artificial Sequence
  Description of Artificial Sequence: Synthetic oligonucleotide
  Target: ATXN2; (-) strand; PAM type: YTN; PAM sequence: TTA
gtgtgtgtctgtataagcta

SEQ ID NO: 56179 - DNA, 20 bp, Artificial Sequence
  Description of Artificial Sequence: Synthetic oligonucleotide
  Target: ATXN2; (-) strand; PAM type: YTN; PAM sequence: CTG
atcaagttagtgtgtgtctg

SEQ ID NO: 56180 - DNA, 20 bp, Artificial Sequence
  Description of Artificial Sequence: Synthetic oligonucleotide
  Target: ATXN2; (-) strand; PAM type: YTN; PAM sequence: TTA
aaaactgatcaagttagtgt

SEQ ID NO: 56181 - DNA, 20 bp, Artificial Sequence
  Description of Artificial Sequence: Synthetic oligonucleotide
  Target: ATXN2; (-) strand; PAM type: YTN; PAM sequence: TTT
aaaaactgatcaagttagtg

SEQ ID NO: 56182 - DNA, 20 bp, Artificial Sequence
  Description of Artificial Sequence: Synthetic oligonucleotide
  Target: ATXN2; (-) strand; PAM type: YTN; PAM sequence: TTT
taaaaactgatcaagttagt

SEQ ID NO: 56183 - DNA, 20 bp, Artificial Sequence
  Description of Artificial Sequence: Synthetic oligonucleotide
  Target: ATXN2; (-) strand; PAM type: YTN; PAM sequence: TTA
aaaaataaaaaaagttttaa

SEQ ID NO: 56184 - DNA, 20 bp, Artificial Sequence
  Description of Artificial Sequence: Synthetic oligonucleotide
  Target: ATXN2; (-) strand; PAM type: YTN; PAM sequence: TTT
aaaaaataaaaaaagtttta

SEQ ID NO: 56185 - DNA, 20 bp, Artificial Sequence
  Description of Artificial Sequence: Synthetic oligonucleotide
  Target: ATXN2; (-) strand; PAM type: YTN; PAM sequence: TTA
aaaaaaatttaaaaaataaa

SEQ ID NO: 56186 - DNA, 20 bp, Artificial Sequence
  Description of Artificial Sequence: Synthetic oligonucleotide
  Target: ATXN2; (-) strand; PAM type: YTN; PAM sequence: CTT
aaaaaaaatttaaaaaataa

SEQ ID NO: 56187 - DNA, 20 bp, Artificial Sequence
  Description of Artificial Sequence: Synthetic oligonucleotide
  Target: ATXN2; (-) strand; PAM type: YTN; PAM sequence: TTG
tagataatataaaataaaaa

SEQ ID NO: 56188 - DNA, 20 bp, Artificial Sequence
  Description of Artificial Sequence: Synthetic oligonucleotide
  Target: ATXN2; (-) strand; PAM type: YTN; PAM sequence: TTT
gtagataatataaaataaaa

SEQ ID NO: 56189 - DNA, 20 bp, Artificial Sequence
  Description of Artificial Sequence: Synthetic oligonucleotide
  Target: ATXN2; (-) strand; PAM type: YTN; PAM sequence: CTT
tgtagataatataaaataaa

SEQ ID NO: 56190 - DNA, 20 bp, Artificial Sequence
  Description of Artificial Sequence: Synthetic oligonucleotide
  Target: ATXN2; (-) strand; PAM type: YTN; PAM sequence: TTA
ctttgtagataatataaaat

SEQ ID NO: 56191 - DNA, 20 bp, Artificial Sequence
  Description of Artificial Sequence: Synthetic oligonucleotide
  Target: ATXN2; (-) strand; PAM type: YTN; PAM sequence: TTT
actttgtagataatataaaa

SEQ ID NO: 56192 - DNA, 20 bp, Artificial Sequence
  Description of Artificial Sequence: Synthetic oligonucleotide
  Target: ATXN2; (-) strand; PAM type: YTN; PAM sequence: TTT
tactttgtagataatataaa

SEQ ID NO: 56193 - DNA, 20 bp, Artificial Sequence
  Description of Artificial Sequence: Synthetic oligonucleotide
  Target: ATXN2; (-) strand; PAM type: YTN; PAM sequence: CTT
ttactttgtagataatataa

SEQ ID NO: 56194 - DNA, 20 bp, Artificial Sequence
  Description of Artificial Sequence: Synthetic oligonucleotide
  Target: ATXN2; (-) strand; PAM type: YTN; PAM sequence: TTA
agggaaaaacttttactttg

SEQ ID NO: 56195 - DNA, 20 bp, Artificial Sequence
  Description of Artificial Sequence: Synthetic oligonucleotide
  Target: ATXN2; (-) strand; PAM type: YTN; PAM sequence: TTA
agttaagggaaaaactttta

SEQ ID NO: 56196 - DNA, 20 bp, Artificial Sequence
  Description of Artificial Sequence: Synthetic oligonucleotide
  Target: ATXN2; (-) strand; PAM type: YTN; PAM sequence: TTT
aagttaagggaaaaactttt

SEQ ID NO: 56197 - DNA, 20 bp, Artificial Sequence
  Description of Artificial Sequence: Synthetic oligonucleotide
  Target: ATXN2; (-) strand; PAM type: YTN; PAM sequence: TTT
taagttaagggaaaaacttt

SEQ ID NO: 56198 - DNA, 20 bp, Artificial Sequence
  Description of Artificial Sequence: Synthetic oligonucleotide
  Target: ATXN2; (-) strand; PAM type: YTN; PAM sequence: CTT
ttaagttaagggaaaaactt

SEQ ID NO: 56199 - DNA, 20 bp, Artificial Sequence
  Description of Artificial Sequence: Synthetic oligonucleotide
  Target: ATXN2; (-) strand; PAM type: YTN; PAM sequence: TTC
aacttttaagttaagggaaa

SEQ ID NO: 56200 - DNA, 20 bp, Artificial Sequence
  Description of Artificial Sequence: Synthetic oligonucleotide
  Target: ATXN2; (-) strand; PAM type: YTN; PAM sequence: CTA
cagtggttcaacttttaagt

SEQ ID NO: 56201 - DNA, 20 bp, Artificial Sequence
  Description of Artificial Sequence: Synthetic oligonucleotide
  Target: ATXN2; (-) strand; PAM type: YTN; PAM sequence: CTG
tctacagtggttcaactttt

SEQ ID NO: 56202 - DNA, 20 bp, Artificial Sequence
  Description of Artificial Sequence: Synthetic oligonucleotide
  Target: ATXN2; (-) strand; PAM type: YTN; PAM sequence: TTG
atgaggtgatcactgtctac

SEQ ID NO: 56203 - DNA, 20 bp, Artificial Sequence
  Description of Artificial Sequence: Synthetic oligonucleotide
  Target: ATXN2; (-) strand; PAM type: YTN; PAM sequence: TTT
gatgaggtgatcactgtcta

SEQ ID NO: 56204 - DNA, 20 bp, Artificial Sequence
  Description of Artificial Sequence: Synthetic oligonucleotide
  Target: ATXN2; (-) strand; PAM type: YTN; PAM sequence: TTA
taaatcaagtttgatgaggt

SEQ ID NO: 56205 - DNA, 20 bp, Artificial Sequence
  Description of Artificial Sequence: Synthetic oligonucleotide
  Target: ATXN2; (-) strand; PAM type: YTN; PAM sequence: TTT
ataaatcaagtttgatgagg

SEQ ID NO: 56206 - DNA, 20 bp, Artificial Sequence
  Description of Artificial Sequence: Synthetic oligonucleotide
  Target: ATXN2; (-) strand; PAM type: YTN; PAM sequence: TTA
tttataaatcaagtttgatg

SEQ ID NO: 56207 - DNA, 20 bp, Artificial Sequence
  Description of Artificial Sequence: Synthetic oligonucleotide
  Target: ATXN2; (-) strand; PAM type: YTN; PAM sequence: TTA
ttatttataaatcaagtttg

SEQ ID NO: 56208 - DNA, 20 bp, Artificial Sequence
  Description of Artificial Sequence: Synthetic oligonucleotide
  Target: ATXN2; (-) strand; PAM type: YTN; PAM sequence: CTG
acggattattatttataaat

SEQ ID NO: 56209 - DNA, 20 bp, Artificial Sequence
  Description of Artificial Sequence: Synthetic oligonucleotide
  Target: ATXN2; (-) strand; PAM type: YTN; PAM sequence: TTA
ccgtcaaactgacggattat

SEQ ID NO: 56210 - DNA, 20 bp, Artificial Sequence
  Description of Artificial Sequence: Synthetic oligonucleotide
  Target: ATXN2; (-) strand; PAM type: YTN; PAM sequence: CTT
accgtcaaactgacggatta

SEQ ID NO: 56211 - DNA, 20 bp, Artificial Sequence
  Description of Artificial Sequence: Synthetic oligonucleotide
  Target: ATXN2; (-) strand; PAM type: YTN; PAM sequence: TTC
ttaccgtcaaactgacggat

SEQ ID NO: 56212 - DNA, 20 bp, Artificial Sequence
  Description of Artificial Sequence: Synthetic oligonucleotide
  Target: ATXN2; (-) strand; PAM type: YTN; PAM sequence: TTC
agtaaattcttaccgtcaaa

SEQ ID NO: 56213 - DNA, 20 bp, Artificial Sequence
  Description of Artificial Sequence: Synthetic oligonucleotide
  Target: ATXN2; (-) strand; PAM type: YTN; PAM sequence: TTT
cagtaaattcttaccgtcaa

SEQ ID NO: 56214 - DNA, 20 bp, Artificial Sequence
  Description of Artificial Sequence: Synthetic oligonucleotide
  Target: ATXN2; (-) strand; PAM type: YTN; PAM sequence: TTG
acaaagtttcagtaaattct

SEQ ID NO: 56215 - DNA, 20 bp, Artificial Sequence
  Description of Artificial Sequence: Synthetic oligonucleotide
  Target: ATXN2; (-) strand; PAM type: YTN; PAM sequence: CTT
gacaaagtttcagtaaattc

SEQ ID NO: 56216 - DNA, 20 bp, Artificial Sequence
  Description of Artificial Sequence: Synthetic oligonucleotide
  Target: ATXN2; (-) strand; PAM type: YTN; PAM sequence: CTA
aacttgacaaagtttcagta

SEQ ID NO: 56217 - DNA, 20 bp, Artificial Sequence
  Description of Artificial Sequence: Synthetic oligonucleotide
  Target: ATXN2; (-) strand; PAM type: YTN; PAM sequence: TTA
ctaaacttgacaaagtttca

SEQ ID NO: 56218 - DNA, 20 bp, Artificial Sequence
  Description of Artificial Sequence: Synthetic oligonucleotide
  Target: ATXN2; (-) strand; PAM type: YTN; PAM sequence: TTT
actaaacttgacaaagtttc

SEQ ID NO: 56219 - DNA, 20 bp, Artificial Sequence
  Description of Artificial Sequence: Synthetic oligonucleotide
  Target: ATXN2; (-) strand; PAM type: YTN; PAM sequence: TTT
tactaaacttgacaaagttt

SEQ ID NO: 56220 - DNA, 20 bp, Artificial Sequence
  Description of Artificial Sequence: Synthetic oligonucleotide
  Target: ATXN2; (-) strand; PAM type: YTN; PAM sequence: CTT
ttactaaacttgacaaagtt

SEQ ID NO: 56221 - DNA, 20 bp, Artificial Sequence
  Description of Artificial Sequence: Synthetic oligonucleotide
  Target: ATXN2; (-) strand; PAM type: YTN; PAM sequence: TTG
gaacgcccttttactaaact

SEQ ID NO: 56222 - DNA, 20 bp, Artificial Sequence
  Description of Artificial Sequence: Synthetic oligonucleotide
  Target: ATXN2; (-) strand; PAM type: YTN; PAM sequence: CTT
ggaacgcccttttactaaac

SEQ ID NO: 56223 - DNA, 20 bp, Artificial Sequence
  Description of Artificial Sequence: Synthetic oligonucleotide
  Target: ATXN2; (-) strand; PAM type: YTN; PAM sequence: CTA
aaaaaaaaaaaaaaaaaaaa

SEQ ID NO: 56224 - DNA, 20 bp, Artificial Sequence
  Description of Artificial Sequence: Synthetic oligonucleotide
  Target: ATXN2; (-) strand; PAM type: YTN; PAM sequence: CTG
ctaaaaaaaaaaaaaaaaaa

SEQ ID NO: 56225 - DNA, 20 bp, Artificial Sequence
  Description of Artificial Sequence: Synthetic oligonucleotide
  Target: ATXN2; (-) strand; PAM type: YTN; PAM sequence: TTA
ctgctaaaaaaaaaaaaaaa

SEQ ID NO: 56226 - DNA, 20 bp, Artificial Sequence
  Description of Artificial Sequence: Synthetic oligonucleotide
  Target: ATXN2; (-) strand; PAM type: YTN; PAM sequence: CTA
ttactgctaaaaaaaaaaaa

SEQ ID NO: 56227 - DNA, 20 bp, Artificial Sequence
  Description of Artificial Sequence: Synthetic oligonucleotide
  Target: ATXN2; (-) strand; PAM type: YTN; PAM sequence: CTG
ctattactgctaaaaaaaaa

SEQ ID NO: 56228 - DNA, 20 bp, Artificial Sequence
  Description of Artificial Sequence: Synthetic oligonucleotide
  Target: ATXN2; (-) strand; PAM type: YTN; PAM sequence: TTG
ctgctattactgctaaaaaa

SEQ ID NO: 56229 - DNA, 20 bp, Artificial Sequence
  Description of Artificial Sequence: Synthetic oligonucleotide
  Target: ATXN2; (-) strand; PAM type: YTN; PAM sequence: CTT
gctgctattactgctaaaaa

SEQ ID NO: 56230 - DNA, 20 bp, Artificial Sequence
  Description of Artificial Sequence: Synthetic oligonucleotide
  Target: ATXN2; (-) strand; PAM type: YTN; PAM sequence: TTC
ttgctgctattactgctaaa

SEQ ID NO: 56231 - DNA, 20 bp, Artificial Sequence
  Description of Artificial Sequence: Synthetic oligonucleotide
  Target: ATXN2; (-) strand; PAM type: YTN; PAM sequence: CTA
gcaaaagaagtaacaagagt

SEQ ID NO: 56232 - DNA, 20 bp, Artificial Sequence
  Description of Artificial Sequence: Synthetic oligonucleotide
  Target: ATXN2; (-) strand; PAM type: YTN; PAM sequence: TTG
aaagtcatgaacacatcagc

SEQ ID NO: 56233 - DNA, 20 bp, Artificial Sequence
  Description of Artificial Sequence: Synthetic oligonucleotide
  Target: ATXN2; (-) strand; PAM type: YTN; PAM sequence: CTT
gaaagtcatgaacacatcag

SEQ ID NO: 56234 - DNA, 20 bp, Artificial Sequence
  Description of Artificial Sequence: Synthetic oligonucleotide
  Target: ATXN2; (-) strand; PAM type: YTN; PAM sequence: TTA
ataacccttgaaagtcatga

SEQ ID NO: 56235 - DNA, 20 bp, Artificial Sequence
  Description of Artificial Sequence: Synthetic oligonucleotide
  Target: ATXN2; (-) strand; PAM type: YTN; PAM sequence: TTT
aataacccttgaaagtcatg

SEQ ID NO: 56236 - DNA, 20 bp, Artificial Sequence
  Description of Artificial Sequence: Synthetic oligonucleotide
  Target: ATXN2; (-) strand; PAM type: YTN; PAM sequence: TTT
taataacccttgaaagtcat

SEQ ID NO: 56237 - DNA, 20 bp, Artificial Sequence
  Description of Artificial Sequence: Synthetic oligonucleotide
  Target: ATXN2; (-) strand; PAM type: YTN; PAM sequence: TTT
ttaataacccttgaaagtca

SEQ ID NO: 56238 - DNA, 20 bp, Artificial Sequence
  Description of Artificial Sequence: Synthetic oligonucleotide
  Target: ATXN2; (-) strand; PAM type: YTN; PAM sequence: TTT
tttaataacccttgaaagtc

SEQ ID NO: 56239 - DNA, 20 bp, Artificial Sequence
  Description of Artificial Sequence: Synthetic oligonucleotide
  Target: ATXN2; (-) strand; PAM type: YTN; PAM sequence: TTA
ttttttaataacccttgaaa

SEQ ID NO: 56240 - DNA, 20 bp, Artificial Sequence
  Description of Artificial Sequence: Synthetic oligonucleotide
  Target: ATXN2; (-) strand; PAM type: YTN; PAM sequence: TTT
attttttaataacccttgaa

SEQ ID NO: 56241 - DNA, 20 bp, Artificial Sequence
  Description of Artificial Sequence: Synthetic oligonucleotide
  Target: ATXN2; (-) strand; PAM type: YTN; PAM sequence: TTA
tttattttttaataaccctt

SEQ ID NO: 56242 - DNA, 20 bp, Artificial Sequence
  Description of Artificial Sequence: Synthetic oligonucleotide
  Target: ATXN2; (-) strand; PAM type: YTN; PAM sequence: CTG
gaagttatttattttttaat

SEQ ID NO: 56243 - DNA, 20 bp, Artificial Sequence
  Description of Artificial Sequence: Synthetic oligonucleotide
  Target: ATXN2; (-) strand; PAM type: YTN; PAM sequence: TTG
ccgaaactggaagttattta

SEQ ID NO: 56244 - DNA, 20 bp, Artificial Sequence
  Description of Artificial Sequence: Synthetic oligonucleotide
  Target: ATXN2; (-) strand; PAM type: YTN; PAM sequence: CTT
gccgaaactggaagttattt

SEQ ID NO: 56245 - DNA, 20 bp, Artificial Sequence
  Description of Artificial Sequence: Synthetic oligonucleotide
  Target: ATXN2; (-) strand; PAM type: YTN; PAM sequence: CTG
cttgccgaaactggaagtta

SEQ ID NO: 56246 - DNA, 20 bp, Artificial Sequence
  Description of Artificial Sequence: Synthetic oligonucleotide
  Target: ATXN2; (-) strand; PAM type: YTN; PAM sequence: CTC
tgcttgccgaaactggaagt

SEQ ID NO: 56247 - DNA, 20 bp, Artificial Sequence
  Description of Artificial Sequence: Synthetic oligonucleotide
  Target: ATXN2; (-) strand; PAM type: YTN; PAM sequence: TTC
agagtcccgcaggtacccca

SEQ ID NO: 56248 - DNA, 20 bp, Artificial Sequence
  Description of Artificial Sequence: Synthetic oligonucleotide
  Target: ATXN2; (-) strand; PAM type: YTN; PAM sequence: TTT
cagagtcccgcaggtacccc

SEQ ID NO: 56249 - DNA, 20 bp, Artificial Sequence
  Description of Artificial Sequence: Synthetic oligonucleotide
  Target: ATXN2; (-) strand; PAM type: YTN; PAM sequence: CTG
tttcagagtcccgcaggtac

SEQ ID NO: 56250 - DNA, 20 bp, Artificial Sequence
  Description of Artificial Sequence: Synthetic oligonucleotide
  Target: ATXN2; (-) strand; PAM type: YTN; PAM sequence: TTC
catatgctgtttcagagtcc

SEQ ID NO: 56251 - DNA, 20 bp, Artificial Sequence
  Description of Artificial Sequence: Synthetic oligonucleotide
  Target: ATXN2; (-) strand; PAM type: YTN; PAM sequence: TTC
cataattccatatgctgttt

SEQ ID NO: 56252 - DNA, 20 bp, Artificial Sequence
  Description of Artificial Sequence: Synthetic oligonucleotide
  Target: ATXN2; (-) strand; PAM type: YTN; PAM sequence: CTA
ttccataattccatatgctg

SEQ ID NO: 56253 - DNA, 20 bp, Artificial Sequence
  Description of Artificial Sequence: Synthetic oligonucleotide
  Target: ATXN2; (-) strand; PAM type: YTN; PAM sequence: TTG
ggggctattccataattcca

SEQ ID NO: 56254 - DNA, 20 bp, Artificial Sequence
  Description of Artificial Sequence: Synthetic oligonucleotide
  Target: ATXN2; (-) strand; PAM type: YTN; PAM sequence: CTT
gggggctattccataattcc

SEQ ID NO: 56255 - DNA, 20 bp, Artificial Sequence
  Description of Artificial Sequence: Synthetic oligonucleotide
  Target: ATXN2; (-) strand; PAM type: YTN; PAM sequence: TTA
ggaacttgggggctattcca

SEQ ID NO: 56256 - DNA, 20 bp, Artificial Sequence
  Description of Artificial Sequence: Synthetic oligonucleotide
  Target: ATXN2; (-) strand; PAM type: YTN; PAM sequence: TTT
aggaacttgggggctattcc

SEQ ID NO: 56257 - DNA, 20 bp, Artificial Sequence
  Description of Artificial Sequence: Synthetic oligonucleotide
  Target: ATXN2; (-) strand; PAM type: YTN; PAM sequence: TTG
gaccgagtagaggcatttag

SEQ ID NO: 56258 - DNA, 20 bp, Artificial Sequence
  Description of Artificial Sequence: Synthetic oligonucleotide
  Target: ATXN2; (-) strand; PAM type: YTN; PAM sequence: CTT
ggaccgagtagaggcattta

SEQ ID NO: 56259 - DNA, 20 bp, Artificial Sequence
  Description of Artificial Sequence: Synthetic oligonucleotide
  Target: ATXN2; (-) strand; PAM type: YTN; PAM sequence: TTG
cagtggaagatacttggacc

SEQ ID NO: 56260 - DNA, 20 bp, Artificial Sequence
  Description of Artificial Sequence: Synthetic oligonucleotide
  Target: ATXN2; (-) strand; PAM type: YTN; PAM sequence: CTT
gcagtggaagatacttggac

SEQ ID NO: 56261 - DNA, 20 bp, Artificial Sequence
  Description of Artificial Sequence: Synthetic oligonucleotide
  Target: ATXN2; (-) strand; PAM type: YTN; PAM sequence: TTC
acttgcagtggaagatactt

SEQ ID NO: 56262 - DNA, 20 bp, Artificial Sequence
  Description of Artificial Sequence: Synthetic oligonucleotide
  Target: ATXN2; (-) strand; PAM type: YTN; PAM sequence: CTA
acagttcacttgcagtggaa

SEQ ID NO: 56263 - DNA, 20 bp, Artificial Sequence
  Description of Artificial Sequence: Synthetic oligonucleotide
  Target: ATXN2; (-) strand; PAM type: YTN; PAM sequence: TTG
taacatccaataggaatgct

SEQ ID NO: 56264 - DNA, 20 bp, Artificial Sequence
  Description of Artificial Sequence: Synthetic oligonucleotide
  Target: ATXN2; (-) strand; PAM type: YTN; PAM sequence: CTT
gtaacatccaataggaatgc

SEQ ID NO: 56265 - DNA, 20 bp, Artificial Sequence
  Description of Artificial Sequence: Synthetic oligonucleotide
  Target: ATXN2; (-) strand; PAM type: YTN; PAM sequence: TTC
ttgtaacatccaataggaat

SEQ ID NO: 56266 - DNA, 20 bp, Artificial Sequence
  Description of Artificial Sequence: Synthetic oligonucleotide
  Target: ATXN2; (-) strand; PAM type: YTN; PAM sequence: TTT
cttgtaacatccaataggaa

SEQ ID NO: 56267 - DNA, 20 bp, Artificial Sequence
  Description of Artificial Sequence: Synthetic oligonucleotide
  Target: ATXN2; (-) strand; PAM type: YTN; PAM sequence: TTG
atttcttgtaacatccaata

SEQ ID NO: 56268 - DNA, 20 bp, Artificial Sequence
  Description of Artificial Sequence: Synthetic oligonucleotide
  Target: ATXN2; (-) strand; PAM type: YTN; PAM sequence: TTA
aaatatatatgttgatttct

SEQ ID NO: 56269 - DNA, 20 bp, Artificial Sequence
  Description of Artificial Sequence: Synthetic oligonucleotide
  Target: ATXN2; (-) strand; PAM type: YTN; PAM sequence: TTT
aaaatatatatgttgatttc

SEQ ID NO: 56270 - DNA, 20 bp, Artificial Sequence
  Description of Artificial Sequence: Synthetic oligonucleotide
  Target: ATXN2; (-) strand; PAM type: YTN; PAM sequence: TTT
taaaatatatatgttgattt

SEQ ID NO: 56271 - DNA, 20 bp, Artificial Sequence
  Description of Artificial Sequence: Synthetic oligonucleotide
  Target: ATXN2; (-) strand; PAM type: YTN; PAM sequence: TTT
ttaaaatatatatgttgatt

SEQ ID NO: 56272 - DNA, 20 bp, Artificial Sequence
  Description of Artificial Sequence: Synthetic oligonucleotide
  Target: ATXN2; (-) strand; PAM type: YTN; PAM sequence: TTG
tttttaaaatatatatgttg

SEQ ID NO: 56273 - DNA, 20 bp, Artificial Sequence
  Description of Artificial Sequence: Synthetic oligonucleotide
  Target: ATXN2; (-) strand; PAM type: YTN; PAM sequence: TTT
gtttttaaaatatatatgtt

SEQ ID NO: 56274 - DNA, 20 bp, Artificial Sequence
  Description of Artificial Sequence: Synthetic oligonucleotide
  Target: ATXN2; (-) strand; PAM type: YTN; PAM sequence: TTT
tgtttttaaaatatatatgt

SEQ ID NO: 56275 - DNA, 20 bp, Artificial Sequence
  Description of Artificial Sequence: Synthetic oligonucleotide
  Target: ATXN2; (-) strand; PAM type: YTN; PAM sequence: TTA
ttttgtttttaaaatatata

SEQ ID NO: 56276 - DNA, 20 bp, Artificial Sequence
  Description of Artificial Sequence: Synthetic oligonucleotide
  Target: ATXN2; (-) strand; PAM type: YTN; PAM sequence: TTT
attttgtttttaaaatatat

SEQ ID NO: 56277 - DNA, 20 bp, Artificial Sequence
  Description of Artificial Sequence: Synthetic oligonucleotide
  Target: ATXN2; (-) strand; PAM type: YTN; PAM sequence: TTC
atttattttgtttttaaaat

SEQ ID NO: 56278 - DNA, 20 bp, Artificial Sequence
  Description of Artificial Sequence: Synthetic oligonucleotide
  Target: ATXN2; (-) strand; PAM type: YTN; PAM sequence: TTT
catttattttgtttttaaaa

SEQ ID NO: 56279 - DNA, 20 bp, Artificial Sequence
  Description of Artificial Sequence: Synthetic oligonucleotide
  Target: ATXN2; (-) strand; PAM type: YTN; PAM sequence: CTA
gaatttcatttattttgttt

SEQ ID NO: 56280 - DNA, 20 bp, Artificial Sequence
  Description of Artificial Sequence: Synthetic oligonucleotide
  Target: ATXN2; (-) strand; PAM type: YTN; PAM sequence: CTG
gaagcacagaaaactagaat

SEQ ID NO: 56281 - DNA, 20 bp, Artificial Sequence
  Description of Artificial Sequence: Synthetic oligonucleotide
  Target: ATXN2; (-) strand; PAM type: YTN; PAM sequence: CTA
ccaactggaagcacagaaaa

SEQ ID NO: 56282 - DNA, 20 bp, Artificial Sequence
  Description of Artificial Sequence: Synthetic oligonucleotide
  Target: ATXN2; (-) strand; PAM type: YTN; PAM sequence: TTC
taccaactggaagcacagaa

SEQ ID NO: 56283 - DNA, 20 bp, Artificial Sequence
  Description of Artificial Sequence: Synthetic oligonucleotide
  Target: ATXN2; (-) strand; PAM type: YTN; PAM sequence: CTT
ctaccaactggaagcacaga

SEQ ID NO: 56284 - DNA, 20 bp, Artificial Sequence
  Description of Artificial Sequence: Synthetic oligonucleotide
  Target: ATXN2; (-) strand; PAM type: YTN; PAM sequence: CTG
cttctaccaactggaagcac

SEQ ID NO: 56285 - DNA, 20 bp, Artificial Sequence
  Description of Artificial Sequence: Synthetic oligonucleotide
  Target: ATXN2; (-) strand; PAM type: YTN; PAM sequence: CTA
ctgcttctaccaactggaag

SEQ ID NO: 56286 - DNA, 20 bp, Artificial Sequence
  Description of Artificial Sequence: Synthetic oligonucleotide
  Target: ATXN2; (-) strand; PAM type: YTN; PAM sequence: TTC
tactgcttctaccaactgga

SEQ ID NO: 56287 - DNA, 20 bp, Artificial Sequence
  Description of Artificial Sequence: Synthetic oligonucleotide
  Target: ATXN2; (-) strand; PAM type: YTN; PAM sequence: CTT
ctactgcttctaccaactgg

SEQ ID NO: 56288 - DNA, 20 bp, Artificial Sequence
  Description of Artificial Sequence: Synthetic oligonucleotide
  Target: ATXN2; (-) strand; PAM type: YTN; PAM sequence: CTC
ccttctactgcttctaccaa

SEQ ID NO: 56289 - DNA, 20 bp, Artificial Sequence
  Description of Artificial Sequence: Synthetic oligonucleotide
  Target: ATXN2; (-) strand; PAM type: YTN; PAM sequence: CTC
ctcccttctactgcttctac

SEQ ID NO: 56290 - DNA, 20 bp, Artificial Sequence
  Description of Artificial Sequence: Synthetic oligonucleotide
  Target: ATXN2; (-) strand; PAM type: YTN; PAM sequence: TTC
cctcctcccttctactgctt

SEQ ID NO: 56291 - DNA, 20 bp, Artificial Sequence
  Description of Artificial Sequence: Synthetic oligonucleotide
  Target: ATXN2; (-) strand; PAM type: YTN; PAM sequence: CTG
gaggaaccgaaaggccaaat

SEQ ID NO: 56292 - DNA, 20 bp, Artificial Sequence
  Description of Artificial Sequence: Synthetic oligonucleotide
  Target: ATXN2; (-) strand; PAM type: YTN; PAM sequence: CTG
ccctggaggaaccgaaaggc

SEQ ID NO: 56293 - DNA, 20 bp, Artificial Sequence
  Description of Artificial Sequence: Synthetic oligonucleotide
  Target: ATXN2; (-) strand; PAM type: YTN; PAM sequence: TTG
taaggctgccctggaggaac

SEQ ID NO: 56294 - DNA, 20 bp, Artificial Sequence
  Description of Artificial Sequence: Synthetic oligonucleotide
  Target: ATXN2; (-) strand; PAM type: YTN; PAM sequence: TTA
cagtacaagcccaccaccaa

SEQ ID NO: 56295 - DNA, 20 bp, Artificial Sequence
  Description of Artificial Sequence: Synthetic oligonucleotide
  Target: ATXN2; (-) strand; PAM type: YTN; PAM sequence: TTT
acagtacaagcccaccacca

SEQ ID NO: 56296 - DNA, 20 bp, Artificial Sequence
  Description of Artificial Sequence: Synthetic oligonucleotide
  Target: ATXN2; (-) strand; PAM type: YTN; PAM sequence: TTT
tacagtacaagcccaccacc

SEQ ID NO: 56297 - DNA, 20 bp, Artificial Sequence
  Description of Artificial Sequence: Synthetic oligonucleotide
  Target: ATXN2; (-) strand; PAM type: YTN; PAM sequence: TTT
ttacagtacaagcccaccac

SEQ ID NO: 56298 - DNA, 20 bp, Artificial Sequence
  Description of Artificial Sequence: Synthetic oligonucleotide
  Target: ATXN2; (-) strand; PAM type: YTN; PAM sequence: CTT
tttacagtacaagcccacca

SEQ ID NO: 56299 - DNA, 20 bp, Artificial Sequence
  Description of Artificial Sequence: Synthetic oligonucleotide
  Target: ATXN2; (-) strand; PAM type: YTN; PAM sequence: TTC
tttttacagtacaagcccac

SEQ ID NO: 56300 - DNA, 20 bp, Artificial Sequence
  Description of Artificial Sequence: Synthetic oligonucleotide
  Target: ATXN2; (-) strand; PAM type: YTN; PAM sequence: TTT
ctttttacagtacaagccca

SEQ ID NO: 56301 - DNA, 20 bp, Artificial Sequence
  Description of Artificial Sequence: Synthetic oligonucleotide
  Target: ATXN2; (-) strand; PAM type: YTN; PAM sequence: TTT
tctttttacagtacaagccc

SEQ ID NO: 56302 - DNA, 20 bp, Artificial Sequence
  Description of Artificial Sequence: Synthetic oligonucleotide
  Target: ATXN2; (-) strand; PAM type: YTN; PAM sequence: CTT
ttctttttacagtacaagcc

SEQ ID NO: 56303 - DNA, 20 bp, Artificial Sequence
  Description of Artificial Sequence: Synthetic oligonucleotide
  Target: ATXN2; (-) strand; PAM type: YTN; PAM sequence: TTC
gcttttctttttacagtaca

SEQ ID NO: 56304 - DNA, 20 bp, Artificial Sequence
  Description of Artificial Sequence: Synthetic oligonucleotide
  Target: ATXN2; (-) strand; PAM type: YTN; PAM sequence: TTC
aatgttcgcttttcttttta

SEQ ID NO: 56305 - DNA, 20 bp, Artificial Sequence
  Description of Artificial Sequence: Synthetic oligonucleotide
  Target: ATXN2; (-) strand; PAM type: YTN; PAM sequence: TTT
caatgttcgcttttcttttt

SEQ ID NO: 56306 - DNA, 20 bp, Artificial Sequence
  Description of Artificial Sequence: Synthetic oligonucleotide
  Target: ATXN2; (-) strand; PAM type: YTN; PAM sequence: CTG
tttcaatgttcgcttttctt

SEQ ID NO: 56307 - DNA, 20 bp, Artificial Sequence
  Description of Artificial Sequence: Synthetic oligonucleotide
  Target: ATXN2; (-) strand; PAM type: YTN; PAM sequence: TTC
tgtttcaatgttcgcttttc

SEQ ID NO: 56308 - DNA, 20 bp, Artificial Sequence
  Description of Artificial Sequence: Synthetic oligonucleotide
  Target: ATXN2; (-) strand; PAM type: YTN; PAM sequence: TTT
ctgtttcaatgttcgctttt

SEQ ID NO: 56309 - DNA, 20 bp, Artificial Sequence
  Description of Artificial Sequence: Synthetic oligonucleotide
  Target: ATXN2; (-) strand; PAM type: YTN; PAM sequence: TTT
tctgtttcaatgttcgcttt

SEQ ID NO: 56310 - DNA, 20 bp, Artificial Sequence
  Description of Artificial Sequence: Synthetic oligonucleotide
  Target: ATXN2; (-) strand; PAM type: YTN; PAM sequence: TTG
ccagttttctgtttcaatgt

SEQ ID NO: 56311 - DNA, 20 bp, Artificial Sequence
  Description of Artificial Sequence: Synthetic oligonucleotide
  Target: ATXN2; (-) strand; PAM type: YTN; PAM sequence: CTG
atgtgtggtgttgccagttt

SEQ ID NO: 56312 - DNA, 20 bp, Artificial Sequence
  Description of Artificial Sequence: Synthetic oligonucleotide
  Target: ATXN2; (-) strand; PAM type: YTN; PAM sequence: CTA
ggctgatgtgtggtgttgcc

SEQ ID NO: 56313 - DNA, 20 bp, Artificial Sequence
  Description of Artificial Sequence: Synthetic oligonucleotide
  Target: ATXN2; (-) strand; PAM type: YTN; PAM sequence: CTG
cagagacactaggctgatgt

SEQ ID NO: 56314 - DNA, 20 bp, Artificial Sequence
  Description of Artificial Sequence: Synthetic oligonucleotide
  Target: ATXN2; (-) strand; PAM type: YTN; PAM sequence: TTA
caatcatgtgctgcagagac

SEQ ID NO: 56315 - DNA, 20 bp, Artificial Sequence
  Description of Artificial Sequence: Synthetic oligonucleotide
  Target: ATXN2; (-) strand; PAM type: YTN; PAM sequence: TTT
acaatcatgtgctgcagaga

SEQ ID NO: 56316 - DNA, 20 bp, Artificial Sequence
  Description of Artificial Sequence: Synthetic oligonucleotide
  Target: ATXN2; (-) strand; PAM type: YTN; PAM sequence: CTA
gcacgaggatagtttacaat

SEQ ID NO: 56317 - DNA, 20 bp, Artificial Sequence
  Description of Artificial Sequence: Synthetic oligonucleotide
  Target: ATXN2; (-) strand; PAM type: YTN; PAM sequence: TTC
agctagcacgaggatagttt

SEQ ID NO: 56318 - DNA, 20 bp, Artificial Sequence
  Description of Artificial Sequence: Synthetic oligonucleotide
  Target: ATXN2; (-) strand; PAM type: YTN; PAM sequence: TTG
ttcagctagcacgaggatag

SEQ ID NO: 56319 - DNA, 20 bp, Artificial Sequence
  Description of Artificial Sequence: Synthetic oligonucleotide
  Target: ATXN2; (-) strand; PAM type: YTN; PAM sequence: TTT
gttcagctagcacgaggata

SEQ ID NO: 56320 - DNA, 20 bp, Artificial Sequence
  Description of Artificial Sequence: Synthetic oligonucleotide
  Target: ATXN2; (-) strand; PAM type: YTN; PAM sequence: TTT
tgttcagctagcacgaggat

SEQ ID NO: 56321 - DNA, 20 bp, Artificial Sequence
  Description of Artificial Sequence: Synthetic oligonucleotide
  Target: ATXN2; (-) strand; PAM type: YTN; PAM sequence: TTG
agttttgttcagctagcacg

SEQ ID NO: 56322 - DNA, 20 bp, Artificial Sequence
  Description of Artificial Sequence: Synthetic oligonucleotide
  Target: ATXN2; (-) strand; PAM type: YTN; PAM sequence: TTT
gagttttgttcagctagcac

SEQ ID NO: 56323 - DNA, 20 bp, Artificial Sequence
  Description of Artificial Sequence: Synthetic oligonucleotide
  Target: ATXN2; (-) strand; PAM type: YTN; PAM sequence: TTT
tgagttttgttcagctagca

SEQ ID NO: 56324 - DNA, 20 bp, Artificial Sequence
  Description of Artificial Sequence: Synthetic oligonucleotide
  Target: ATXN2; (-) strand; PAM type: YTN; PAM sequence: TTC
aattttgagttttgttcagc

SEQ ID NO: 56325 - DNA, 20 bp, Artificial Sequence
  Description of Artificial Sequence: Synthetic oligonucleotide
  Target: ATXN2; (-) strand; PAM type: YTN; PAM sequence: TTG
gtgcagatgggagggggaaa

SEQ ID NO: 56326 - DNA, 20 bp, Artificial Sequence
  Description of Artificial Sequence: Synthetic oligonucleotide
  Target: ATXN2; (-) strand; PAM type: YTN; PAM sequence: TTT
ggtgcagatgggagggggaa

SEQ ID NO: 56327 - DNA, 20 bp, Artificial Sequence
  Description of Artificial Sequence: Synthetic oligonucleotide
  Target: ATXN2; (-) strand; PAM type: YTN; PAM sequence: CTT
tggtgcagatgggaggggga

SEQ ID NO: 56328 - DNA, 20 bp, Artificial Sequence
  Description of Artificial Sequence: Synthetic oligonucleotide
  Target: ATXN2; (-) strand; PAM type: YTN; PAM sequence: CTC
cccactttggtgcagatggg

SEQ ID NO: 56329 - DNA, 20 bp, Artificial Sequence
  Description of Artificial Sequence: Synthetic oligonucleotide
  Target: ATXN2; (-) strand; PAM type: YTN; PAM sequence: CTA
cccacccacccaaccctccc

SEQ ID NO: 56330 - DNA, 20 bp, Artificial Sequence
  Description of Artificial Sequence: Synthetic oligonucleotide
  Target: ATXN2; (-) strand; PAM type: YTN; PAM sequence: TTC
tacccacccacccaaccctc

SEQ ID NO: 56331 - DNA, 20 bp, Artificial Sequence
  Description of Artificial Sequence: Synthetic oligonucleotide
  Target: ATXN2; (-) strand; PAM type: YTN; PAM sequence: TTT
ctacccacccacccaaccct

SEQ ID NO: 56332 - DNA, 20 bp, Artificial Sequence
  Description of Artificial Sequence: Synthetic oligonucleotide
  Target: ATXN2; (-) strand; PAM type: YTN; PAM sequence: TTG
tttctacccacccacccaac

SEQ ID NO: 56333 - DNA, 20 bp, Artificial Sequence
  Description of Artificial Sequence: Synthetic oligonucleotide
  Target: ATXN2; (-) strand; PAM type: YTN; PAM sequence: TTT
gtttctacccacccacccaa

SEQ ID NO: 56334 - DNA, 20 bp, Artificial Sequence
  Description of Artificial Sequence: Synthetic oligonucleotide
  Target: ATXN2; (-) strand; PAM type: YTN; PAM sequence: CTG
gtttgtttctacccacccac

SEQ ID NO: 56335 - DNA, 20 bp, Artificial Sequence
  Description of Artificial Sequence: Synthetic oligonucleotide
  Target: ATXN2; (-) strand; PAM type: YTN; PAM sequence: CTG
actggtttgtttctacccac

SEQ ID NO: 56336 - DNA, 20 bp, Artificial Sequence
  Description of Artificial Sequence: Synthetic oligonucleotide
  Target: ATXN2; (-) strand; PAM type: YTN; PAM sequence: TTA
cgtctgactggtttgtttct

SEQ ID NO: 56337 - DNA, 20 bp, Artificial Sequence
  Description of Artificial Sequence: Synthetic oligonucleotide
  Target: ATXN2; (-) strand; PAM type: YTN; PAM sequence: TTT
acgtctgactggtttgtttc

SEQ ID NO: 56338 - DNA, 20 bp, Artificial Sequence
  Description of Artificial Sequence: Synthetic oligonucleotide
  Target: ATXN2; (-) strand; PAM type: YTN; PAM sequence: TTT
tacgtctgactggtttgttt

SEQ ID NO: 56339 - DNA, 20 bp, Artificial Sequence
  Description of Artificial Sequence: Synthetic oligonucleotide
  Target: ATXN2; (-) strand; PAM type: YTN; PAM sequence: CTG
aagtggttttacgtctgact

SEQ ID NO: 56340 - DNA, 20 bp, Artificial Sequence
  Description of Artificial Sequence: Synthetic oligonucleotide
  Target: ATXN2; (-) strand; PAM type: YTN; PAM sequence: TTA
tctgaagtggttttacgtct

SEQ ID NO: 56341 - DNA, 20 bp, Artificial Sequence
  Description of Artificial Sequence: Synthetic oligonucleotide
  Target: ATXN2; (-) strand; PAM type: YTN; PAM sequence: TTT
atctgaagtggttttacgtc

SEQ ID NO: 56342 - DNA, 20 bp, Artificial Sequence
  Description of Artificial Sequence: Synthetic oligonucleotide
  Target: ATXN2; (-) strand; PAM type: YTN; PAM sequence: TTT
tatctgaagtggttttacgt

SEQ ID NO: 56343 - DNA, 20 bp, Artificial Sequence
  Description of Artificial Sequence: Synthetic oligonucleotide
  Target: ATXN2; (-) strand; PAM type: YTN; PAM sequence: CTG
ggagttttatctgaagtggt

SEQ ID NO: 56344 - DNA, 20 bp, Artificial Sequence
  Description of Artificial Sequence: Synthetic oligonucleotide
  Target: ATXN2; (-) strand; PAM type: YTN; PAM sequence: TTC
tgggagttttatctgaagtg

SEQ ID NO: 56345 - DNA, 20 bp, Artificial Sequence
  Description of Artificial Sequence: Synthetic oligonucleotide
  Target: ATXN2; (-) strand; PAM type: YTN; PAM sequence: CTT
ctgggagttttatctgaagt

SEQ ID NO: 56346 - DNA, 20 bp, Artificial Sequence
  Description of Artificial Sequence: Synthetic oligonucleotide
  Target: ATXN2; (-) strand; PAM type: YTN; PAM sequence: CTA
ccccatgaacaagtcttctg

SEQ ID NO: 56347 - DNA, 20 bp, Artificial Sequence
  Description of Artificial Sequence: Synthetic oligonucleotide
  Target: ATXN2; (-) strand; PAM type: YTN; PAM sequence: TTC
taccccatgaacaagtcttc

SEQ ID NO: 56348 - DNA, 20 bp, Artificial Sequence
  Description of Artificial Sequence: Synthetic oligonucleotide
  Target: ATXN2; (-) strand; PAM type: YTN; PAM sequence: TTT
ctaccccatgaacaagtctt

SEQ ID NO: 56349 - DNA, 20 bp, Artificial Sequence
  Description of Artificial Sequence: Synthetic oligonucleotide
  Target: ATXN2; (-) strand; PAM type: YTN; PAM sequence: TTT
tctaccccatgaacaagtct

SEQ ID NO: 56350 - DNA, 20 bp, Artificial Sequence
  Description of Artificial Sequence: Synthetic oligonucleotide
  Target: ATXN2; (-) strand; PAM type: YTN; PAM sequence: TTT
ttctaccccatgaacaagtc

SEQ ID NO: 56351 - DNA, 20 bp, Artificial Sequence
  Description of Artificial Sequence: Synthetic oligonucleotide
  Target: ATXN2; (-) strand; PAM type: YTN; PAM sequence: TTT
tttctaccccatgaacaagt

SEQ ID NO: 56352 - DNA, 20 bp, Artificial Sequence
  Description of Artificial Sequence: Synthetic oligonucleotide
  Target: ATXN2; (-) strand; PAM type: YTN; PAM sequence: TTT
ttttctaccccatgaacaag

SEQ ID NO: 56353 - DNA, 20 bp, Artificial Sequence
  Description of Artificial Sequence: Synthetic oligonucleotide
  Target: ATXN2; (-) strand; PAM type: YTN; PAM sequence: CTT
tttttctaccccatgaacaa

SEQ ID NO: 56354 - DNA, 20 bp, Artificial Sequence
  Description of Artificial Sequence: Synthetic oligonucleotide
  Target: ATXN2; (-) strand; PAM type: YTN; PAM sequence: TTA
aggcctttttttctacccca

SEQ ID NO: 56355 - DNA, 20 bp, Artificial Sequence
  Description of Artificial Sequence: Synthetic oligonucleotide
  Target: ATXN2; (-) strand; PAM type: YTN; PAM sequence: TTG
ttaaggcctttttttctacc

SEQ ID NO: 56356 - DNA, 20 bp, Artificial Sequence
  Description of Artificial Sequence: Synthetic oligonucleotide
  Target: ATXN2; (-) strand; PAM type: YTN; PAM sequence: TTT
gttaaggcctttttttctac

SEQ ID NO: 56357 - DNA, 20 bp, Artificial Sequence
  Description of Artificial Sequence: Synthetic oligonucleotide
  Target: ATXN2; (-) strand; PAM type: YTN; PAM sequence: TTG
gggagggggtttgttaaggc

SEQ ID NO: 56358 - DNA, 20 bp, Artificial Sequence
  Description of Artificial Sequence: Synthetic oligonucleotide
  Target: ATXN2; (-) strand; PAM type: YTN; PAM sequence: TTT
ggggagggggtttgttaagg

SEQ ID NO: 56359 - DNA, 20 bp, Artificial Sequence
  Description of Artificial Sequence: Synthetic oligonucleotide
  Target: ATXN2; (-) strand; PAM type: YTN; PAM sequence: CTA
atatttggggagggggtttg

SEQ ID NO: 56360 - DNA, 20 bp, Artificial Sequence
  Description of Artificial Sequence: Synthetic oligonucleotide
  Target: ATXN2; (-) strand; PAM type: YTN; PAM sequence: TTG
gctaatatttggggaggggg

SEQ ID NO: 56361 - DNA, 20 bp, Artificial Sequence
  Description of Artificial Sequence: Synthetic oligonucleotide
  Target: ATXN2; (-) strand; PAM type: YTN; PAM sequence: CTT
ggctaatatttggggagggg

SEQ ID NO: 56362 - DNA, 20 bp, Artificial Sequence
  Description of Artificial Sequence: Synthetic oligonucleotide
  Target: ATXN2; (-) strand; PAM type: YTN; PAM sequence: CTG
gtgcttggctaatatttggg

SEQ ID NO: 56363 - DNA, 20 bp, Artificial Sequence
  Description of Artificial Sequence: Synthetic oligonucleotide
  Target: ATXN2; (-) strand; PAM type: YTN; PAM sequence: CTG
aaagcaatactggtgcttgg

SEQ ID NO: 56364 - DNA, 20 bp, Artificial Sequence
  Description of Artificial Sequence: Synthetic oligonucleotide
  Target: ATXN2; (-) strand; PAM type: YTN; PAM sequence: TTC
tgaaagcaatactggtgctt

SEQ ID NO: 56365 - DNA, 20 bp, Artificial Sequence
  Description of Artificial Sequence: Synthetic oligonucleotide
  Target: ATXN2; (-) strand; PAM type: YTN; PAM sequence: TTA
ttctgaaagcaatactggtg

SEQ ID NO: 56366 - DNA, 20 bp, Artificial Sequence
  Description of Artificial Sequence: Synthetic oligonucleotide
  Target: ATXN2; (-) strand; PAM type: YTN; PAM sequence: CTG
ttattctgaaagcaatactg

SEQ ID NO: 56367 - DNA, 20 bp, Artificial Sequence
  Description of Artificial Sequence: Synthetic oligonucleotide
  Target: ATXN2; (-) strand; PAM type: YTN; PAM sequence: CTG
acctgttattctgaaagcaa

SEQ ID NO: 56368 - DNA, 20 bp, Artificial Sequence
  Description of Artificial Sequence: Synthetic oligonucleotide
  Target: ATXN2; (-) strand; PAM type: YTN; PAM sequence: TTC
acagtctgacctgttattct

SEQ ID NO: 56369 - DNA, 20 bp, Artificial Sequence
  Description of Artificial Sequence: Synthetic oligonucleotide
  Target: ATXN2; (-) strand; PAM type: YTN; PAM sequence: CTT
cacagtctgacctgttattc

SEQ ID NO: 56370 - DNA, 20 bp, Artificial Sequence
  Description of Artificial Sequence: Synthetic oligonucleotide
  Target: ATXN2; (-) strand; PAM type: YTN; PAM sequence: CTG
ccatggcgatacttcacagt

SEQ ID NO: 56371 - DNA, 20 bp, Artificial Sequence
  Description of Artificial Sequence: Synthetic oligonucleotide
  Target: ATXN2; (-) strand; PAM type: YTN; PAM sequence: TTG
atggctgccatggcgatact

SEQ ID NO: 56372 - DNA, 20 bp, Artificial Sequence
  Description of Artificial Sequence: Synthetic oligonucleotide
  Target: ATXN2; (-) strand; PAM type: YTN; PAM sequence: CTT
gatggctgccatggcgatac

SEQ ID NO: 56373 - DNA, 20 bp, Artificial Sequence
  Description of Artificial Sequence: Synthetic oligonucleotide
  Target: ATXN2; (-) strand; PAM type: YTN; PAM sequence: CTA
cttgatggctgccatggcga

SEQ ID NO: 56374 - DNA, 20 bp, Artificial Sequence
  Description of Artificial Sequence: Synthetic oligonucleotide
  Target: ATXN2; (-) strand; PAM type: YTN; PAM sequence: CTA
ctacttgatggctgccatgg

SEQ ID NO: 56375 - DNA, 20 bp, Artificial Sequence
  Description of Artificial Sequence: Synthetic oligonucleotide
  Target: ATXN2; (-) strand; PAM type: YTN; PAM sequence: CTC
tactacttgatggctgccat

SEQ ID NO: 56376 - DNA, 20 bp, Artificial Sequence
  Description of Artificial Sequence: Synthetic oligonucleotide
  Target: ATXN2; (-) strand; PAM type: YTN; PAM sequence: TTG
tgctctactacttgatggct

SEQ ID NO: 56377 - DNA, 20 bp, Artificial Sequence
  Description of Artificial Sequence: Synthetic oligonucleotide
  Target: ATXN2; (-) strand; PAM type: YTN; PAM sequence: CTG
tgattgtgctctactacttg

SEQ ID NO: 56378 - DNA, 20 bp, Artificial Sequence
  Description of Artificial Sequence: Synthetic oligonucleotide
  Target: ATXN2; (-) strand; PAM type: YTN; PAM sequence: CTG
aacaggggagagcgccctgt

SEQ ID NO: 56379 - DNA, 20 bp, Artificial Sequence
  Description of Artificial Sequence: Synthetic oligonucleotide
  Target: ATXN2; (-) strand; PAM type: YTN; PAM sequence: TTA
gccccagcccctgaacaggg

SEQ ID NO: 56380 - DNA, 20 bp, Artificial Sequence
  Description of Artificial Sequence: Synthetic oligonucleotide
  Target: ATXN2; (-) strand; PAM type: YTN; PAM sequence: TTG
agtgtagcgttagccccagc

SEQ ID NO: 56381 - DNA, 20 bp, Artificial Sequence
  Description of Artificial Sequence: Synthetic oligonucleotide
  Target: ATXN2; (-) strand; PAM type: YTN; PAM sequence: TTT
gagtgtagcgttagccccag

SEQ ID NO: 56382 - DNA, 20 bp, Artificial Sequence
  Description of Artificial Sequence: Synthetic oligonucleotide
  Target: ATXN2; (-) strand; PAM type: YTN; PAM sequence: CTT
tgagtgtagcgttagcccca

SEQ ID NO: 56383 - DNA, 20 bp, Artificial Sequence
  Description of Artificial Sequence: Synthetic oligonucleotide
  Target: ATXN2; (-) strand; PAM type: YTN; PAM sequence: CTG
gctttgagtgtagcgttagc

SEQ ID NO: 56384 - DNA, 20 bp, Artificial Sequence
  Description of Artificial Sequence: Synthetic oligonucleotide
  Target: ATXN2; (-) strand; PAM type: YTN; PAM sequence: CTG
tggatggactggctttgagt

SEQ ID NO: 56385 - DNA, 20 bp, Artificial Sequence
  Description of Artificial Sequence: Synthetic oligonucleotide
  Target: ATXN2; (-) strand; PAM type: YTN; PAM sequence: CTG
agaaagcgctgtggatggac

SEQ ID NO: 56386 - DNA, 20 bp, Artificial Sequence
  Description of Artificial Sequence: Synthetic oligonucleotide
  Target: ATXN2; (-) strand; PAM type: YTN; PAM sequence: CTG
ctgagaaagcgctgtggatg

SEQ ID NO: 56387 - DNA, 20 bp, Artificial Sequence
  Description of Artificial Sequence: Synthetic oligonucleotide
  Target: ATXN2; (-) strand; PAM type: YTN; PAM sequence: CTG
gagaagatactgctgagaaa

SEQ ID NO: 56388 - DNA, 20 bp, Artificial Sequence
  Description of Artificial Sequence: Synthetic oligonucleotide
  Target: ATXN2; (-) strand; PAM type: YTN; PAM sequence: CTC
tggagaagatactgctgaga

SEQ ID NO: 56389 - DNA, 20 bp, Artificial Sequence
  Description of Artificial Sequence: Synthetic oligonucleotide
  Target: ATXN2; (-) strand; PAM type: YTN; PAM sequence: TTG
tagctctggagaagatactg

SEQ ID NO: 56390 - DNA, 20 bp, Artificial Sequence
  Description of Artificial Sequence: Synthetic oligonucleotide
  Target: ATXN2; (-) strand; PAM type: YTN; PAM sequence: TTG
attgtagctctggagaagat

SEQ ID NO: 56391 - DNA, 20 bp, Artificial Sequence
  Description of Artificial Sequence: Synthetic oligonucleotide
  Target: ATXN2; (-) strand; PAM type: YTN; PAM sequence: TTT
gattgtagctctggagaaga

SEQ ID NO: 56392 - DNA, 20 bp, Artificial Sequence
  Description of Artificial Sequence: Synthetic oligonucleotide
  Target: ATXN2; (-) strand; PAM type: YTN; PAM sequence: TTA
ccatggcagagtttgattgt

SEQ ID NO: 56393 - DNA, 20 bp, Artificial Sequence
  Description of Artificial Sequence: Synthetic oligonucleotide
  Target: ATXN2; (-) strand; PAM type: YTN; PAM sequence: TTA
ttaccatggcagagtttgat

SEQ ID NO: 56394 - DNA, 20 bp, Artificial Sequence
  Description of Artificial Sequence: Synthetic oligonucleotide
  Target: ATXN2; (-) strand; PAM type: YTN; PAM sequence: CTG
acatgtggggggttattacc

SEQ ID NO: 56395 - DNA, 20 bp, Artificial Sequence
  Description of Artificial Sequence: Synthetic oligonucleotide
  Target: ATXN2; (-) strand; PAM type: YTN; PAM sequence: CTG
agtcccaaaagtctgacatg

SEQ ID NO: 56396 - DNA, 20 bp, Artificial Sequence
  Description of Artificial Sequence: Synthetic oligonucleotide
  Target: ATXN2; (-) strand; PAM type: YTN; PAM sequence: TTC
ctgagtcccaaaagtctgac

SEQ ID NO: 56397 - DNA, 20 bp, Artificial Sequence
  Description of Artificial Sequence: Synthetic oligonucleotide
  Target: ATXN2; (-) strand; PAM type: YTN; PAM sequence: CTT
cctgagtcccaaaagtctga

SEQ ID NO: 56398 - DNA, 20 bp, Artificial Sequence
  Description of Artificial Sequence: Synthetic oligonucleotide
  Target: ATXN2; (-) strand; PAM type: YTN; PAM sequence: TTC
cttcctgagtcccaaaagtc

SEQ ID NO: 56399 - DNA, 20 bp, Artificial Sequence
  Description of Artificial Sequence: Synthetic oligonucleotide
  Target: ATXN2; (-) strand; PAM type: YTN; PAM sequence: TTT
ccttcctgagtcccaaaagt

SEQ ID NO: 56400 - DNA, 20 bp, Artificial Sequence
  Description of Artificial Sequence: Synthetic oligonucleotide
  Target: ATXN2; (-) strand; PAM type: YTN; PAM sequence: TTT
tccttcctgagtcccaaaag

SEQ ID NO: 56401 - DNA, 20 bp, Artificial Sequence
  Description of Artificial Sequence: Synthetic oligonucleotide
  Target: ATXN2; (-) strand; PAM type: YTN; PAM sequence: CTG
gacagggcagtgttttcctt

SEQ ID NO: 56402 - DNA, 20 bp, Artificial Sequence
  Description of Artificial Sequence: Synthetic oligonucleotide
  Target: ATXN2; (-) strand; PAM type: YTN; PAM sequence: TTA
tgacaggctggacagggcag

SEQ ID NO: 56403 - DNA, 20 bp, Artificial Sequence
  Description of Artificial Sequence: Synthetic oligonucleotide
  Target: ATXN2; (-) strand; PAM type: YTN; PAM sequence: TTG
ttatgacaggctggacaggg

SEQ ID NO: 56404 - DNA, 20 bp, Artificial Sequence
  Description of Artificial Sequence: Synthetic oligonucleotide
  Target: ATXN2; (-) strand; PAM type: YTN; PAM sequence: CTT
gttatgacaggctggacagg

SEQ ID NO: 56405 - DNA, 20 bp, Artificial Sequence
  Description of Artificial Sequence: Synthetic oligonucleotide
  Target: ATXN2; (-) strand; PAM type: YTN; PAM sequence: TTC
cttgttatgacaggctggac

SEQ ID NO: 56406 - DNA, 20 bp, Artificial Sequence
  Description of Artificial Sequence: Synthetic oligonucleotide
  Target: ATXN2; (-) strand; PAM type: YTN; PAM sequence: CTT
ccttgttatgacaggctgga

SEQ ID NO: 56407 - DNA, 20 bp, Artificial Sequence
  Description of Artificial Sequence: Synthetic oligonucleotide
  Target: ATXN2; (-) strand; PAM type: YTN; PAM sequence: TTG
gccttccttgttatgacagg

SEQ ID NO: 56408 - DNA, 20 bp, Artificial Sequence
  Description of Artificial Sequence: Synthetic oligonucleotide
  Target: ATXN2; (-) strand; PAM type: YTN; PAM sequence: CTC
agttggccttccttgttatg

SEQ ID NO: 56409 - DNA, 20 bp, Artificial Sequence
  Description of Artificial Sequence: Synthetic oligonucleotide
  Target: ATXN2; (-) strand; PAM type: YTN; PAM sequence: CTA
ggactcagttggccttcctt

SEQ ID NO: 56410 - DNA, 20 bp, Artificial Sequence
  Description of Artificial Sequence: Synthetic oligonucleotide
  Target: ATXN2; (-) strand; PAM type: YTN; PAM sequence: CTG
atgcatgcctaggactcagt

SEQ ID NO: 56411 - DNA, 20 bp, Artificial Sequence
  Description of Artificial Sequence: Synthetic oligonucleotide
  Target: ATXN2; (-) strand; PAM type: YTN; PAM sequence: TTG
atgagaagcagcagcagcag

SEQ ID NO: 56412 - DNA, 20 bp, Artificial Sequence
  Description of Artificial Sequence: Synthetic oligonucleotide
  Target: ATXN2; (-) strand; PAM type: YTN; PAM sequence: CTT
gatgagaagcagcagcagca

SEQ ID NO: 56413 - DNA, 20 bp, Artificial Sequence
  Description of Artificial Sequence: Synthetic oligonucleotide
  Target: ATXN2; (-) strand; PAM type: YTN; PAM sequence: TTG
gcttgatgagaagcagcagc

SEQ ID NO: 56414 - DNA, 20 bp, Artificial Sequence
  Description of Artificial Sequence: Synthetic oligonucleotide
  Target: ATXN2; (-) strand; PAM type: YTN; PAM sequence: TTT
ggcttgatgagaagcagcag

SEQ ID NO: 56415 - DNA, 20 bp, Artificial Sequence
  Description of Artificial Sequence: Synthetic oligonucleotide
  Target: ATXN2; (-) strand; PAM type: YTN; PAM sequence: CTG
atggtatacaggatttggct

SEQ ID NO: 56416 - DNA, 20 bp, Artificial Sequence
  Description of Artificial Sequence: Synthetic oligonucleotide
  Target: ATXN2; (-) strand; PAM type: YTN; PAM sequence: TTC
tgatggtatacaggatttgg

SEQ ID NO: 56417 - DNA, 20 bp, Artificial Sequence
  Description of Artificial Sequence: Synthetic oligonucleotide
  Target: ATXN2; (-) strand; PAM type: YTN; PAM sequence: CTG
tgtgtgttctgatggtatac

SEQ ID NO: 56418 - DNA, 20 bp, Artificial Sequence
  Description of Artificial Sequence: Synthetic oligonucleotide
  Target: ATXN2; (-) strand; PAM type: YTN; PAM sequence: TTC
cgggagccgagtctgtgtgt

SEQ ID NO: 56419 - DNA, 20 bp, Artificial Sequence
  Description of Artificial Sequence: Synthetic oligonucleotide
  Target: ATXN2; (-) strand; PAM type: YTN; PAM sequence: CTT
ccgggagccgagtctgtgtg

SEQ ID NO: 56420 - DNA, 20 bp, Artificial Sequence
  Description of Artificial Sequence: Synthetic oligonucleotide
  Target: ATXN2; (-) strand; PAM type: YTN; PAM sequence: CTG
aggcttccgggagccgagtc

SEQ ID NO: 56421 - DNA, 20 bp, Artificial Sequence
  Description of Artificial Sequence: Synthetic oligonucleotide
  Target: ATXN2; (-) strand; PAM type: YTN; PAM sequence: TTC
agcatcagggcctgaggctt

SEQ ID NO: 56422 - DNA, 20 bp, Artificial Sequence
  Description of Artificial Sequence: Synthetic oligonucleotide
  Target: ATXN2; (-) strand; PAM type: YTN; PAM sequence: CTG
tgacgatcagttcagcatca

SEQ ID NO: 56423 - DNA, 20 bp, Artificial Sequence
  Description of Artificial Sequence: Synthetic oligonucleotide
  Target: ATXN2; (-) strand; PAM type: YTN; PAM sequence: CTA
gcaagacccgtccaggagtg

SEQ ID NO: 56424 - DNA, 20 bp, Artificial Sequence
  Description of Artificial Sequence: Synthetic oligonucleotide
  Target: ATXN2; (-) strand; PAM type: YTN; PAM sequence: TTG
agaactagcaagacccgtcc

SEQ ID NO: 56425 - DNA, 20 bp, Artificial Sequence
  Description of Artificial Sequence: Synthetic oligonucleotide
  Target: ATXN2; (-) strand; PAM type: YTN; PAM sequence: TTT
gagaactagcaagacccgtc

SEQ ID NO: 56426 - DNA, 20 bp, Artificial Sequence
  Description of Artificial Sequence: Synthetic oligonucleotide
  Target: ATXN2; (-) strand; PAM type: YTN; PAM sequence: TTC
aagccccgcatttgagaact

SEQ ID NO: 56427 - DNA, 20 bp, Artificial Sequence
  Description of Artificial Sequence: Synthetic oligonucleotide
  Target: ATXN2; (-) strand; PAM type: YTN; PAM sequence: CTT
caagccccgcatttgagaac

SEQ ID NO: 56428 - DNA, 20 bp, Artificial Sequence
  Description of Artificial Sequence: Synthetic oligonucleotide
  Target: ATXN2; (-) strand; PAM type: YTN; PAM sequence: CTC
gcacaggtggaatggcaggc

SEQ ID NO: 56429 - DNA, 20 bp, Artificial Sequence
  Description of Artificial Sequence: Synthetic oligonucleotide
  Target: ATXN2; (-) strand; PAM type: YTN; PAM sequence: CTG
ctcgcacaggtggaatggca

SEQ ID NO: 56430 - DNA, 20 bp, Artificial Sequence
  Description of Artificial Sequence: Synthetic oligonucleotide
  Target: ATXN2; (-) strand; PAM type: YTN; PAM sequence: TTC
tgctcgcacaggtggaatgg

SEQ ID NO: 56431 - DNA, 20 bp, Artificial Sequence
  Description of Artificial Sequence: Synthetic oligonucleotide
  Target: ATXN2; (-) strand; PAM type: YTN; PAM sequence: TTC
aggtgaggcgtgtgtgtgca

SEQ ID NO: 56432 - DNA, 20 bp, Artificial Sequence
  Description of Artificial Sequence: Synthetic oligonucleotide
  Target: ATXN2; (-) strand; PAM type: YTN; PAM sequence: CTT
caggtgaggcgtgtgtgtgc

SEQ ID NO: 56433 - DNA, 20 bp, Artificial Sequence
  Description of Artificial Sequence: Synthetic oligonucleotide
  Target: ATXN2; (-) strand; PAM type: YTN; PAM sequence: CTA
tatgacgcacccttcaggtg

SEQ ID NO: 56434 - DNA, 20 bp, Artificial Sequence
  Description of Artificial Sequence: Synthetic oligonucleotide
  Target: ATXN2; (-) strand; PAM type: YTN; PAM sequence: TTC
ccctatatgacgcacccttc

SEQ ID NO: 56435 - DNA, 20 bp, Artificial Sequence
  Description of Artificial Sequence: Synthetic oligonucleotide
  Target: ATXN2; (-) strand; PAM type: YTN; PAM sequence: TTT
cccctatatgacgcaccctt

SEQ ID NO: 56436 - DNA, 20 bp, Artificial Sequence
  Description of Artificial Sequence: Synthetic oligonucleotide
  Target: ATXN2; (-) strand; PAM type: YTN; PAM sequence: CTC
gacaacagcgcatttcccct

SEQ ID NO: 56437 - DNA, 20 bp, Artificial Sequence
  Description of Artificial Sequence: Synthetic oligonucleotide
  Target: ATXN2; (-) strand; PAM type: YTN; PAM sequence: TTC
cagtctcgacaacagcgcat

SEQ ID NO: 56438 - DNA, 20 bp, Artificial Sequence
  Description of Artificial Sequence: Synthetic oligonucleotide
  Target: ATXN2; (-) strand; PAM type: YTN; PAM sequence: CTA
cagcccattccagtctcgac

SEQ ID NO: 56439 - DNA, 20 bp, Artificial Sequence
  Description of Artificial Sequence: Synthetic oligonucleotide
  Target: ATXN2; (-) strand; PAM type: YTN; PAM sequence: CTC
aaagtgcactacagcccatt

SEQ ID NO: 56440 - DNA, 20 bp, Artificial Sequence
  Description of Artificial Sequence: Synthetic oligonucleotide
  Target: ATXN2; (-) strand; PAM type: YTN; PAM sequence: CTC
gctcaaagtgcactacagcc

SEQ ID NO: 56441 - DNA, 20 bp, Artificial Sequence
  Description of Artificial Sequence: Synthetic oligonucleotide
  Target: ATXN2; (-) strand; PAM type: YTN; PAM sequence: CTA
atgacgacacagccacccgg

SEQ ID NO: 56442 - DNA, 20 bp, Artificial Sequence
  Description of Artificial Sequence: Synthetic oligonucleotide
  Target: ATXN2; (-) strand; PAM type: YTN; PAM sequence: CTG
cccatgcgccaatgatgcta

SEQ ID NO: 56443 - DNA, 20 bp, Artificial Sequence
  Description of Artificial Sequence: Synthetic oligonucleotide
  Target: ATXN2; (-) strand; PAM type: YTN; PAM sequence: CTC
atccaactgcccatgcgcca

SEQ ID NO: 56444 - DNA, 20 bp, Artificial Sequence
  Description of Artificial Sequence: Synthetic oligonucleotide
  Target: ATXN2; (-) strand; PAM type: YTN; PAM sequence: TTC
tcatccaactgcccatgcgc

SEQ ID NO: 56445 - DNA, 20 bp, Artificial Sequence
  Description of Artificial Sequence: Synthetic oligonucleotide
  Target: ATXN2; (-) strand; PAM type: YTN; PAM sequence: CTT
ctcatccaactgcccatgcg

SEQ ID NO: 56446 - DNA, 20 bp, Artificial Sequence
  Description of Artificial Sequence: Synthetic oligonucleotide
  Target: ATXN2; (-) strand; PAM type: YTN; PAM sequence: TTC
cttctcatccaactgcccat

SEQ ID NO: 56447 - DNA, 20 bp, Artificial Sequence
  Description of Artificial Sequence: Synthetic oligonucleotide
  Target: ATXN2; (-) strand; PAM type: YTN; PAM sequence: CTC
atgtacagtcaggaatggtt

SEQ ID NO: 56448 - DNA, 20 bp, Artificial Sequence
  Description of Artificial Sequence: Synthetic oligonucleotide
  Target: ATXN2; (-) strand; PAM type: YTN; PAM sequence: TTC
aggctcatgtacagtcagga

SEQ ID NO: 56449 - DNA, 20 bp, Artificial Sequence
  Description of Artificial Sequence: Synthetic oligonucleotide
  Target: ATXN2; (-) strand; PAM type: YTN; PAM sequence: TTT
caggctcatgtacagtcagg

SEQ ID NO: 56450 - DNA, 20 bp, Artificial Sequence
  Description of Artificial Sequence: Synthetic oligonucleotide
  Target: ATXN2; (-) strand; PAM type: YTN; PAM sequence: CTG
tttcaggctcatgtacagtc

SEQ ID NO: 56451 - DNA, 20 bp, Artificial Sequence
  Description of Artificial Sequence: Synthetic oligonucleotide
  Target: ATXN2; (-) strand; PAM type: YTN; PAM sequence: CTC
tgtttcaggctcatgtacag

SEQ ID NO: 56452 - DNA, 20 bp, Artificial Sequence
  Description of Artificial Sequence: Synthetic oligonucleotide
  Target: ATXN2; (-) strand; PAM type: YTN; PAM sequence: CTC
tctgtttcaggctcatgtac

SEQ ID NO: 56453 - DNA, 20 bp, Artificial Sequence
  Description of Artificial Sequence: Synthetic oligonucleotide
  Target: ATXN2; (-) strand; PAM type: YTN; PAM sequence: CTG
tatgcgtaaaagagctctct

SEQ ID NO: 56454 - DNA, 20 bp, Artificial Sequence
  Description of Artificial Sequence: Synthetic oligonucleotide
  Target: ATXN2; (-) strand; PAM type: YTN; PAM sequence: TTG
cctgtatgcgtaaaagagct

SEQ ID NO: 56455 - DNA, 20 bp, Artificial Sequence
  Description of Artificial Sequence: Synthetic oligonucleotide
  Target: ATXN2; (-) strand; PAM type: YTN; PAM sequence: TTG
aagccggagatgttgcctgt

SEQ ID NO: 56456 - DNA, 20 bp, Artificial Sequence
  Description of Artificial Sequence: Synthetic oligonucleotide
  Target: ATXN2; (-) strand; PAM type: YTN; PAM sequence: TTG
ttgaagccggagatgttgcc

SEQ ID NO: 56457 - DNA, 20 bp, Artificial Sequence
  Description of Artificial Sequence: Synthetic oligonucleotide
  Target: ATXN2; (-) strand; PAM type: YTN; PAM sequence: TTG
acatgttgttgaagccggag

SEQ ID NO: 56458 - DNA, 20 bp, Artificial Sequence
  Description of Artificial Sequence: Synthetic oligonucleotide
  Target: ATXN2; (-) strand; PAM type: YTN; PAM sequence: CTG
agagtcccagcccagtgaaa

SEQ ID NO: 56459 - DNA, 20 bp, Artificial Sequence
  Description of Artificial Sequence: Synthetic oligonucleotide
  Target: ATXN2; (-) strand; PAM type: YTN; PAM sequence: TTC
ctgagagtcccagcccagtg

SEQ ID NO: 56460 - DNA, 20 bp, Artificial Sequence
  Description of Artificial Sequence: Synthetic oligonucleotide
  Target: ATXN2; (-) strand; PAM type: YTN; PAM sequence: TTT
cctgagagtcccagcccagt

SEQ ID NO: 56461 - DNA, 20 bp, Artificial Sequence
  Description of Artificial Sequence: Synthetic oligonucleotide
  Target: ATXN2; (-) strand; PAM type: YTN; PAM sequence: CTT
tcctgagagtcccagcccag

SEQ ID NO: 56462 - DNA, 20 bp, Artificial Sequence
  Description of Artificial Sequence: Synthetic oligonucleotide
  Target: ATXN2; (-) strand; PAM type: YTN; PAM sequence: TTG
ccctttcctgagagtcccag

SEQ ID NO: 56463 - DNA, 20 bp, Artificial Sequence
  Description of Artificial Sequence: Synthetic oligonucleotide
  Target: ATXN2; (-) strand; PAM type: YTN; PAM sequence: CTG
aggcccaccgttgccctttc

SEQ ID NO: 56464 - DNA, 20 bp, Artificial Sequence
  Description of Artificial Sequence: Synthetic oligonucleotide
  Target: ATXN2; (-) strand; PAM type: YTN; PAM sequence: CTG
ggccctgaggcccaccgttg

SEQ ID NO: 56465 - DNA, 20 bp, Artificial Sequence
  Description of Artificial Sequence: Synthetic oligonucleotide
  Target: ATXN2; (-) strand; PAM type: YTN; PAM sequence: TTG
tccccagagaacagaactgg

SEQ ID NO: 56466 - DNA, 20 bp, Artificial Sequence
  Description of Artificial Sequence: Synthetic oligonucleotide
  Target: ATXN2; (-) strand; PAM type: YTN; PAM sequence: CTA
gagattgtccccagagaaca

SEQ ID NO: 56467 - DNA, 20 bp, Artificial Sequence
  Description of Artificial Sequence: Synthetic oligonucleotide
  Target: ATXN2; (-) strand; PAM type: YTN; PAM sequence: CTA
ctagagattgtccccagaga

SEQ ID NO: 56468 - DNA, 20 bp, Artificial Sequence
  Description of Artificial Sequence: Synthetic oligonucleotide
  Target: ATXN2; (-) strand; PAM type: YTN; PAM sequence: TTC
aggtcaatagataatctact

SEQ ID NO: 56469 - DNA, 20 bp, Artificial Sequence
  Description of Artificial Sequence: Synthetic oligonucleotide
  Target: ATXN2; (-) strand; PAM type: YTN; PAM sequence: CTT
caggtcaatagataatctac

SEQ ID NO: 56470 - DNA, 20 bp, Artificial Sequence
  Description of Artificial Sequence: Synthetic oligonucleotide
  Target: ATXN2; (-) strand; PAM type: YTN; PAM sequence: CTG
cccaaaggtgaagcgcgtct

SEQ ID NO: 56471 - DNA, 20 bp, Artificial Sequence
  Description of Artificial Sequence: Synthetic oligonucleotide
  Target: ATXN2; (-) strand; PAM type: YTN; PAM sequence: TTG
caggatctgcccaaaggtga

SEQ ID NO: 56472 - DNA, 20 bp, Artificial Sequence
  Description of Artificial Sequence: Synthetic oligonucleotide
  Target: ATXN2; (-) strand; PAM type: YTN; PAM sequence: CTT
gcaggatctgcccaaaggtg

SEQ ID NO: 56473 - DNA, 20 bp, Artificial Sequence
  Description of Artificial Sequence: Synthetic oligonucleotide
  Target: ATXN2; (-) strand; PAM type: YTN; PAM sequence: CTG
acccttgcaggatctgccca

SEQ ID NO: 56474 - DNA, 20 bp, Artificial Sequence
  Description of Artificial Sequence: Synthetic oligonucleotide
  Target: ATXN2; (-) strand; PAM type: YTN; PAM sequence: CTC
cctgacccttgcaggatctg

SEQ ID NO: 56475 - DNA, 20 bp, Artificial Sequence
  Description of Artificial Sequence: Synthetic oligonucleotide
  Target: ATXN2; (-) strand; PAM type: YTN; PAM sequence: CTG
ctccctgacccttgcaggat

SEQ ID NO: 56476 - DNA, 20 bp, Artificial Sequence
  Description of Artificial Sequence: Synthetic oligonucleotide
  Target: ATXN2; (-) strand; PAM type: YTN; PAM sequence: TTG
cctgctccctgacccttgca

SEQ ID NO: 56477 - DNA, 20 bp, Artificial Sequence
  Description of Artificial Sequence: Synthetic oligonucleotide
  Target: ATXN2; (-) strand; PAM type: YTN; PAM sequence: TTG
ttgcctgctccctgaccctt

SEQ ID NO: 56478 - DNA, 20 bp, Artificial Sequence
  Description of Artificial Sequence: Synthetic oligonucleotide
  Target: ATXN2; (-) strand; PAM type: YTN; PAM sequence: CTT
gttgcctgctccctgaccct

SEQ ID NO: 56479 - DNA, 20 bp, Artificial Sequence
  Description of Artificial Sequence: Synthetic oligonucleotide
  Target: ATXN2; (-) strand; PAM type: YTN; PAM sequence: CTC
acttgttgcctgctccctga

SEQ ID NO: 56480 - DNA, 20 bp, Artificial Sequence
  Description of Artificial Sequence: Synthetic oligonucleotide
  Target: ATXN2; (-) strand; PAM type: YTN; PAM sequence: CTA
cccaggctcacttgttgcct

SEQ ID NO: 56481 - DNA, 20 bp, Artificial Sequence
  Description of Artificial Sequence: Synthetic oligonucleotide
  Target: ATXN2; (-) strand; PAM type: YTN; PAM sequence: TTC
tacccaggctcacttgttgc

SEQ ID NO: 56482 - DNA, 20 bp, Artificial Sequence
  Description of Artificial Sequence: Synthetic oligonucleotide
  Target: ATXN2; (-) strand; PAM type: YTN; PAM sequence: CTT
ctacccaggctcacttgttg

SEQ ID NO: 56483 - DNA, 20 bp, Artificial Sequence
  Description of Artificial Sequence: Synthetic oligonucleotide
  Target: ATXN2; (-) strand; PAM type: YTN; PAM sequence: CTG
acttctacccaggctcactt

SEQ ID NO: 56484 - DNA, 20 bp, Artificial Sequence
  Description of Artificial Sequence: Synthetic oligonucleotide
  Target: ATXN2; (-) strand; PAM type: YTN; PAM sequence: TTA
ggacagcacagccctgactt

SEQ ID NO: 56485 - DNA, 20 bp, Artificial Sequence
  Description of Artificial Sequence: Synthetic oligonucleotide
  Target: ATXN2; (-) strand; PAM type: YTN; PAM sequence: TTA
ccccatacatagaatacaat

SEQ ID NO: 56486 - DNA, 20 bp, Artificial Sequence
  Description of Artificial Sequence: Synthetic oligonucleotide
  Target: ATXN2; (-) strand; PAM type: YTN; PAM sequence: CTT
accccatacatagaatacaa

SEQ ID NO: 56487 - DNA, 20 bp, Artificial Sequence
  Description of Artificial Sequence: Synthetic oligonucleotide
  Target: ATXN2; (-) strand; PAM type: YTN; PAM sequence: TTG
tgaagatcttaccccataca

SEQ ID NO: 56488 - DNA, 20 bp, Artificial Sequence
  Description of Artificial Sequence: Synthetic oligonucleotide
  Target: ATXN2; (-) strand; PAM type: YTN; PAM sequence: TTT
gtgaagatcttaccccatac

SEQ ID NO: 56489 - DNA, 20 bp, Artificial Sequence
  Description of Artificial Sequence: Synthetic oligonucleotide
  Target: ATXN2; (-) strand; PAM type: YTN; PAM sequence: CTT
tgtgaagatcttaccccata

SEQ ID NO: 56490 - DNA, 20 bp, Artificial Sequence
  Description of Artificial Sequence: Synthetic oligonucleotide
  Target: ATXN2; (-) strand; PAM type: YTN; PAM sequence: CTA
atctttgtgaagatcttacc

SEQ ID NO: 56491 - DNA, 20 bp, Artificial Sequence
  Description of Artificial Sequence: Synthetic oligonucleotide
  Target: ATXN2; (-) strand; PAM type: YTN; PAM sequence: TTG
gatccagtgtctaatctttg

SEQ ID NO: 56492 - DNA, 20 bp, Artificial Sequence
  Description of Artificial Sequence: Synthetic oligonucleotide
  Target: ATXN2; (-) strand; PAM type: YTN; PAM sequence: CTT
ggatccagtgtctaatcttt

SEQ ID NO: 56493 - DNA, 20 bp, Artificial Sequence
  Description of Artificial Sequence: Synthetic oligonucleotide
  Target: ATXN2; (-) strand; PAM type: YTN; PAM sequence: CTG
cccttggatccagtgtctaa

SEQ ID NO: 56494 - DNA, 20 bp, Artificial Sequence
  Description of Artificial Sequence: Synthetic oligonucleotide
  Target: ATXN2; (-) strand; PAM type: YTN; PAM sequence: TTG
agaaagctgcccttggatcc

SEQ ID NO: 56495 - DNA, 20 bp, Artificial Sequence
  Description of Artificial Sequence: Synthetic oligonucleotide
  Target: ATXN2; (-) strand; PAM type: YTN; PAM sequence: TTA
agttgagaaagctgcccttg

SEQ ID NO: 56496 - DNA, 20 bp, Artificial Sequence
  Description of Artificial Sequence: Synthetic oligonucleotide
  Target: ATXN2; (-) strand; PAM type: YTN; PAM sequence: TTG
tatgatattaagttgagaaa

SEQ ID NO: 56497 - DNA, 20 bp, Artificial Sequence
  Description of Artificial Sequence: Synthetic oligonucleotide
  Target: ATXN2; (-) strand; PAM type: YTN; PAM sequence: CTT
gtatgatattaagttgagaa

SEQ ID NO: 56498 - DNA, 20 bp, Artificial Sequence
  Description of Artificial Sequence: Synthetic oligonucleotide
  Target: ATXN2; (-) strand; PAM type: YTN; PAM sequence: TTG
aatcttgtatgatattaagt

SEQ ID NO: 56499 - DNA, 20 bp, Artificial Sequence
  Description of Artificial Sequence: Synthetic oligonucleotide
  Target: ATXN2; (-) strand; PAM type: YTN; PAM sequence: CTG
aagcatcattgaatcttgta

SEQ ID NO: 56500 - DNA, 20 bp, Artificial Sequence
  Description of Artificial Sequence: Synthetic oligonucleotide
  Target: ATXN2; (-) strand; PAM type: YTN; PAM sequence: TTC
tgaagcatcattgaatcttg

SEQ ID NO: 56501 - DNA, 20 bp, Artificial Sequence
  Description of Artificial Sequence: Synthetic oligonucleotide
  Target: ATXN2; (-) strand; PAM type: YTN; PAM sequence: CTG
attctgaagcatcattgaat

SEQ ID NO: 56502 - DNA, 20 bp, Artificial Sequence
  Description of Artificial Sequence: Synthetic oligonucleotide
  Target: ATXN2; (-) strand; PAM type: YTN; PAM sequence: CTC
aggccccacatggcagcctg

SEQ ID NO: 56503 - DNA, 20 bp, Artificial Sequence
  Description of Artificial Sequence: Synthetic oligonucleotide
  Target: ATXN2; (-) strand; PAM type: YTN; PAM sequence: CTA
cctcaggccccacatggcag

SEQ ID NO: 56504 - DNA, 20 bp, Artificial Sequence
  Description of Artificial Sequence: Synthetic oligonucleotide
  Target: ATXN2; (-) strand; PAM type: YTN; PAM sequence: CTG
caaaactacctcaggcccca

SEQ ID NO: 56505 - DNA, 20 bp, Artificial Sequence
  Description of Artificial Sequence: Synthetic oligonucleotide
  Target: ATXN2; (-) strand; PAM type: YTN; PAM sequence: TTA
tctgcaaaactacctcaggc

SEQ ID NO: 56506 - DNA, 20 bp, Artificial Sequence
  Description of Artificial Sequence: Synthetic oligonucleotide
  Target: ATXN2; (-) strand; PAM type: YTN; PAM sequence: TTG
aaagggatgttatctgcaaa

SEQ ID NO: 56507 - DNA, 20 bp, Artificial Sequence
  Description of Artificial Sequence: Synthetic oligonucleotide
  Target: ATXN2; (-) strand; PAM type: YTN; PAM sequence: TTT
gaaagggatgttatctgcaa

SEQ ID NO: 56508 - DNA, 20 bp, Artificial Sequence
  Description of Artificial Sequence: Synthetic oligonucleotide
  Target: ATXN2; (-) strand; PAM type: YTN; PAM sequence: CTA
tttgaaagggatgttatctg

SEQ ID NO: 56509 - DNA, 20 bp, Artificial Sequence
  Description of Artificial Sequence: Synthetic oligonucleotide
  Target: ATXN2; (-) strand; PAM type: YTN; PAM sequence: TTC
ctatttgaaagggatgttat

SEQ ID NO: 56510 - DNA, 20 bp, Artificial Sequence
  Description of Artificial Sequence: Synthetic oligonucleotide
  Target: ATXN2; (-) strand; PAM type: YTN; PAM sequence: TTT
cctatttgaaagggatgtta

SEQ ID NO: 56511 - DNA, 20 bp, Artificial Sequence
  Description of Artificial Sequence: Synthetic oligonucleotide
  Target: ATXN2; (-) strand; PAM type: YTN; PAM sequence: TTT
tcctatttgaaagggatgtt

SEQ ID NO: 56512 - DNA, 20 bp, Artificial Sequence
  Description of Artificial Sequence: Synthetic oligonucleotide
  Target: ATXN2; (-) strand; PAM type: YTN; PAM sequence: CTG
ttttcctatttgaaagggat

SEQ ID NO: 56513 - DNA, 20 bp, Artificial Sequence
  Description of Artificial Sequence: Synthetic oligonucleotide
  Target: ATXN2; (-) strand; PAM type: YTN; PAM sequence: TTA
atgtaatctgttttcctatt

SEQ ID NO: 56514 - DNA, 20 bp, Artificial Sequence
  Description of Artificial Sequence: Synthetic oligonucleotide
  Target: ATXN2; (-) strand; PAM type: YTN; PAM sequence: TTA
ttaatgtaatctgttttcct

SEQ ID NO: 56515 - DNA, 20 bp, Artificial Sequence
  Description of Artificial Sequence: Synthetic oligonucleotide
  Target: ATXN2; (-) strand; PAM type: YTN; PAM sequence: CTT
attaatgtaatctgttttcc

SEQ ID NO: 56516 - DNA, 20 bp, Artificial Sequence
  Description of Artificial Sequence: Synthetic oligonucleotide
  Target: ATXN2; (-) strand; PAM type: YTN; PAM sequence: CTG
cttattaatgtaatctgttt

SEQ ID NO: 56517 - DNA, 20 bp, Artificial Sequence
  Description of Artificial Sequence: Synthetic oligonucleotide
  Target: ATXN2; (-) strand; PAM type: YTN; PAM sequence: CTC
tgcttattaatgtaatctgt

SEQ ID NO: 56518 - DNA, 20 bp, Artificial Sequence
  Description of Artificial Sequence: Synthetic oligonucleotide
  Target: ATXN2; (-) strand; PAM type: YTN; PAM sequence: CTG
tgacagtctctgcttattaa

SEQ ID NO: 56519 - DNA, 20 bp, Artificial Sequence
  Description of Artificial Sequence: Synthetic oligonucleotide
  Target: ATXN2; (-) strand; PAM type: YTN; PAM sequence: TTG
actgtgacagtctctgctta

SEQ ID NO: 56520 - DNA, 20 bp, Artificial Sequence
  Description of Artificial Sequence: Synthetic oligonucleotide
  Target: ATXN2; (-) strand; PAM type: YTN; PAM sequence: CTT
gactgtgacagtctctgctt

SEQ ID NO: 56521 - DNA, 20 bp, Artificial Sequence
  Description of Artificial Sequence: Synthetic oligonucleotide
  Target: ATXN2; (-) strand; PAM type: YTN; PAM sequence: TTC
acatacttgactgtgacagt

SEQ ID NO: 56522 - DNA, 20 bp, Artificial Sequence
  Description of Artificial Sequence: Synthetic oligonucleotide
  Target: ATXN2; (-) strand; PAM type: YTN; PAM sequence: CTG
gtgagcagaccagaagcaga

SEQ ID NO: 56523 - DNA, 20 bp, Artificial Sequence
  Description of Artificial Sequence: Synthetic oligonucleotide
  Target: ATXN2; (-) strand; PAM type: YTN; PAM sequence: CTG
cctggtgagcagaccagaag

SEQ ID NO: 56524 - DNA, 20 bp, Artificial Sequence
  Description of Artificial Sequence: Synthetic oligonucleotide
  Target: ATXN2; (-) strand; PAM type: YTN; PAM sequence: TTC
actgcctggtgagcagacca

SEQ ID NO: 56525 - DNA, 20 bp, Artificial Sequence
  Description of Artificial Sequence: Synthetic oligonucleotide
  Target: ATXN2; (-) strand; PAM type: YTN; PAM sequence: TTT
cactgcctggtgagcagacc

SEQ ID NO: 56526 - DNA, 20 bp, Artificial Sequence
  Description of Artificial Sequence: Synthetic oligonucleotide
  Target: ATXN2; (-) strand; PAM type: YTN; PAM sequence: TTT
tcactgcctggtgagcagac

SEQ ID NO: 56527 - DNA, 20 bp, Artificial Sequence
  Description of Artificial Sequence: Synthetic oligonucleotide
  Target: ATXN2; (-) strand; PAM type: YTN; PAM sequence: CTT
ttcactgcctggtgagcaga

SEQ ID NO: 56528 - DNA, 20 bp, Artificial Sequence
  Description of Artificial Sequence: Synthetic oligonucleotide
  Target: ATXN2; (-) strand; PAM type: YTN; PAM sequence: CTC
ttttcactgcctggtgagca

SEQ ID NO: 56529 - DNA, 20 bp, Artificial Sequence
  Description of Artificial Sequence: Synthetic oligonucleotide
  Target: ATXN2; (-) strand; PAM type: YTN; PAM sequence: CTA
agagtctcttttcactgcct

SEQ ID NO: 56530 - DNA, 20 bp, Artificial Sequence
  Description of Artificial Sequence: Synthetic oligonucleotide
  Target: ATXN2; (-) strand; PAM type: YTN; PAM sequence: CTG
agagagtcacgggggcctaa

SEQ ID NO: 56531 - DNA, 20 bp, Artificial Sequence
  Description of Artificial Sequence: Synthetic oligonucleotide
  Target: ATXN2; (-) strand; PAM type: YTN; PAM sequence: CTC
tgagagagtcacgggggcct

SEQ ID NO: 56532 - DNA, 20 bp, Artificial Sequence
  Description of Artificial Sequence: Synthetic oligonucleotide
  Target: ATXN2; (-) strand; PAM type: YTN; PAM sequence: CTC
catcagcatatctctgagag

SEQ ID NO: 56533 - DNA, 20 bp, Artificial Sequence
  Description of Artificial Sequence: Synthetic oligonucleotide
  Target: ATXN2; (-) strand; PAM type: YTN; PAM sequence: CTG
ctccatcagcatatctctga

SEQ ID NO: 56534 - DNA, 20 bp, Artificial Sequence
  Description of Artificial Sequence: Synthetic oligonucleotide
  Target: ATXN2; (-) strand; PAM type: YTN; PAM sequence: CTC
ctgctccatcagcatatctc

SEQ ID NO: 56535 - DNA, 20 bp, Artificial Sequence
  Description of Artificial Sequence: Synthetic oligonucleotide
  Target: ATXN2; (-) strand; PAM type: YTN; PAM sequence: CTC
ctcctgctccatcagcatat

SEQ ID NO: 56536 - DNA, 20 bp, Artificial Sequence
  Description of Artificial Sequence: Synthetic oligonucleotide
  Target: ATXN2; (-) strand; PAM type: YTN; PAM sequence: CTC
ctcctcctgctccatcagca

SEQ ID NO: 56537 - DNA, 20 bp, Artificial Sequence
  Description of Artificial Sequence: Synthetic oligonucleotide
  Target: ATXN2; (-) strand; PAM type: YTN; PAM sequence: CTC
ctcctcctcctgctccatca

SEQ ID NO: 56538 - DNA, 20 bp, Artificial Sequence
  Description of Artificial Sequence: Synthetic oligonucleotide
  Target: ATXN2; (-) strand; PAM type: YTN; PAM sequence: CTC
ctcctcctcctcctgctcca

SEQ ID NO: 56539 - DNA, 20 bp, Artificial Sequence
  Description of Artificial Sequence: Synthetic oligonucleotide
  Target: ATXN2; (-) strand; PAM type: YTN; PAM sequence: CTC
caactcctcctcctcctcct

SEQ ID NO: 56540 - DNA, 20 bp, Artificial Sequence
  Description of Artificial Sequence: Synthetic oligonucleotide
  Target: ATXN2; (-) strand; PAM type: YTN; PAM sequence: TTA
aaaactccaactcctcctcc

SEQ ID NO: 56541 - DNA, 20 bp, Artificial Sequence
  Description of Artificial Sequence: Synthetic oligonucleotide
  Target: ATXN2; (-) strand; PAM type: YTN; PAM sequence: CTG
gagccattaaaaactccaac

SEQ ID NO: 56542 - DNA, 20 bp, Artificial Sequence
  Description of Artificial Sequence: Synthetic oligonucleotide
  Target: ATXN2; (-) strand; PAM type: YTN; PAM sequence: CTC
actggagccattaaaaactc

SEQ ID NO: 56543 - DNA, 20 bp, Artificial Sequence
  Description of Artificial Sequence: Synthetic oligonucleotide
  Target: ATXN2; (-) strand; PAM type: YTN; PAM sequence: TTC
catctcactggagccattaa

SEQ ID NO: 56544 - DNA, 20 bp, Artificial Sequence
  Description of Artificial Sequence: Synthetic oligonucleotide
  Target: ATXN2; (-) strand; PAM type: YTN; PAM sequence: TTT
ccatctcactggagccatta

SEQ ID NO: 56545 - DNA, 20 bp, Artificial Sequence
  Description of Artificial Sequence: Synthetic oligonucleotide
  Target: ATXN2; (-) strand; PAM type: YTN; PAM sequence: CTT
tccatctcactggagccatt

SEQ ID NO: 56546 - DNA, 20 bp, Artificial Sequence
  Description of Artificial Sequence: Synthetic oligonucleotide
  Target: ATXN2; (-) strand; PAM type: YTN; PAM sequence: CTC
ctttccatctcactggagcc

SEQ ID NO: 56547 - DNA, 20 bp, Artificial Sequence
  Description of Artificial Sequence: Synthetic oligonucleotide
  Target: ATXN2; (-) strand; PAM type: YTN; PAM sequence: TTA
ctcctttccatctcactgga

SEQ ID NO: 56548 - DNA, 20 bp, Artificial Sequence
  Description of Artificial Sequence: Synthetic oligonucleotide
  Target: ATXN2; (-) strand; PAM type: YTN; PAM sequence: TTC
aggttactcctttccatctc

SEQ ID NO: 56549 - DNA, 20 bp, Artificial Sequence
  Description of Artificial Sequence: Synthetic oligonucleotide
  Target: ATXN2; (-) strand; PAM type: YTN; PAM sequence: CTT
caggttactcctttccatct

SEQ ID NO: 56550 - DNA, 20 bp, Artificial Sequence
  Description of Artificial Sequence: Synthetic oligonucleotide
  Target: ATXN2; (-) strand; PAM type: YTN; PAM sequence: CTG
gcccagatgacttcaggtta

SEQ ID NO: 56551 - DNA, 20 bp, Artificial Sequence
  Description of Artificial Sequence: Synthetic oligonucleotide
  Target: ATXN2; (-) strand; PAM type: YTN; PAM sequence: CTG
ggctggcccagatgacttca

SEQ ID NO: 56552 - DNA, 20 bp, Artificial Sequence
  Description of Artificial Sequence: Synthetic oligonucleotide
  Target: ATXN2; (-) strand; PAM type: YTN; PAM sequence: TTG
gtacagagacgctgggctgg

SEQ ID NO: 56553 - DNA, 20 bp, Artificial Sequence
  Description of Artificial Sequence: Synthetic oligonucleotide
  Target: ATXN2; (-) strand; PAM type: YTN; PAM sequence: CTT
ggtacagagacgctgggctg

SEQ ID NO: 56554 - DNA, 20 bp, Artificial Sequence
  Description of Artificial Sequence: Synthetic oligonucleotide
  Target: ATXN2; (-) strand; PAM type: YTN; PAM sequence: TTG
aacttggtacagagacgctg

SEQ ID NO: 56555 - DNA, 20 bp, Artificial Sequence
  Description of Artificial Sequence: Synthetic oligonucleotide
  Target: ATXN2; (-) strand; PAM type: YTN; PAM sequence: TTG
acagtgagtgagaccaggtt

SEQ ID NO: 56556 - DNA, 20 bp, Artificial Sequence
  Description of Artificial Sequence: Synthetic oligonucleotide
  Target: ATXN2; (-) strand; PAM type: YTN; PAM sequence: CTT
gacagtgagtgagaccaggt

SEQ ID NO: 56557 - DNA, 20 bp, Artificial Sequence
  Description of Artificial Sequence: Synthetic oligonucleotide
  Target: ATXN2; (-) strand; PAM type: YTN; PAM sequence: TTC
caacttgacagtgagtgaga

SEQ ID NO: 56558 - DNA, 20 bp, Artificial Sequence
  Description of Artificial Sequence: Synthetic oligonucleotide
  Target: ATXN2; (-) strand; PAM type: YTN; PAM sequence: TTT
ccaacttgacagtgagtgag

SEQ ID NO: 56559 - DNA, 20 bp, Artificial Sequence
  Description of Artificial Sequence: Synthetic oligonucleotide
  Target: ATXN2; (-) strand; PAM type: YTN; PAM sequence: CTT
tccaacttgacagtgagtga

SEQ ID NO: 56560 - DNA, 20 bp, Artificial Sequence
  Description of Artificial Sequence: Synthetic oligonucleotide
  Target: ATXN2; (-) strand; PAM type: YTN; PAM sequence: CTA
aaatcacctttccaacttga

SEQ ID NO: 56561 - DNA, 20 bp, Artificial Sequence
  Description of Artificial Sequence: Synthetic oligonucleotide
  Target: ATXN2; (-) strand; PAM type: YTN; PAM sequence: CTG
actaaaatcacctttccaac

SEQ ID NO: 56562 - DNA, 20 bp, Artificial Sequence
  Description of Artificial Sequence: Synthetic oligonucleotide
  Target: ATXN2; (-) strand; PAM type: YTN; PAM sequence: TTG
ggctgactaaaatcaccttt

SEQ ID NO: 56563 - DNA, 20 bp, Artificial Sequence
  Description of Artificial Sequence: Synthetic oligonucleotide
  Target: ATXN2; (-) strand; PAM type: YTN; PAM sequence: TTT
gggctgactaaaatcacctt

SEQ ID NO: 56564 - DNA, 20 bp, Artificial Sequence
  Description of Artificial Sequence: Synthetic oligonucleotide
  Target: ATXN2; (-) strand; PAM type: YTN; PAM sequence: CTG
tttgggctgactaaaatcac

SEQ ID NO: 56565 - DNA, 20 bp, Artificial Sequence
  Description of Artificial Sequence: Synthetic oligonucleotide
  Target: ATXN2; (-) strand; PAM type: YTN; PAM sequence: CTG
gaatccagctgtttgggctg

SEQ ID NO: 56566 - DNA, 20 bp, Artificial Sequence
  Description of Artificial Sequence: Synthetic oligonucleotide
  Target: ATXN2; (-) strand; PAM type: YTN; PAM sequence: CTG
cagagctggaatccagctgt

SEQ ID NO: 56567 - DNA, 20 bp, Artificial Sequence
  Description of Artificial Sequence: Synthetic oligonucleotide
  Target: ATXN2; (-) strand; PAM type: YTN; PAM sequence: CTG
ccaaccccctgcagagctgg

SEQ ID NO: 56568 - DNA, 20 bp, Artificial Sequence
  Description of Artificial Sequence: Synthetic oligonucleotide
  Target: ATXN2; (-) strand; PAM type: YTN; PAM sequence: CTG
gccctgccaaccccctgcag

SEQ ID NO: 56569 - DNA, 20 bp, Artificial Sequence
  Description of Artificial Sequence: Synthetic oligonucleotide
  Target: ATXN2; (-) strand; PAM type: YTN; PAM sequence: TTC
ctggccctgccaaccccctg

SEQ ID NO: 56570 - DNA, 20 bp, Artificial Sequence
  Description of Artificial Sequence: Synthetic oligonucleotide
  Target: ATXN2; (-) strand; PAM type: YTN; PAM sequence: CTT
cctggccctgccaaccccct

SEQ ID NO: 56571 - DNA, 20 bp, Artificial Sequence
  Description of Artificial Sequence: Synthetic oligonucleotide
  Target: ATXN2; (-) strand; PAM type: YTN; PAM sequence: CTC
ttcctggccctgccaacccc

SEQ ID NO: 56572 - DNA, 20 bp, Artificial Sequence
  Description of Artificial Sequence: Synthetic oligonucleotide
  Target: ATXN2; (-) strand; PAM type: YTN; PAM sequence: CTA
gaacagtgcacagtgtggga

SEQ ID NO: 56573 - DNA, 20 bp, Artificial Sequence
  Description of Artificial Sequence: Synthetic oligonucleotide
  Target: ATXN2; (-) strand; PAM type: YTN; PAM sequence: TTA
tcgtagtctagaacagtgca

SEQ ID NO: 56574 - DNA, 20 bp, Artificial Sequence
  Description of Artificial Sequence: Synthetic oligonucleotide
  Target: ATXN2; (-) strand; PAM type: YTN; PAM sequence: CTT
atcgtagtctagaacagtgc

SEQ ID NO: 56575 - DNA, 20 bp, Artificial Sequence
  Description of Artificial Sequence: Synthetic oligonucleotide
  Target: ATXN2; (-) strand; PAM type: YTN; PAM sequence: TTC
atccaaggcttatcgtagtc

SEQ ID NO: 56576 - DNA, 20 bp, Artificial Sequence
  Description of Artificial Sequence: Synthetic oligonucleotide
  Target: ATXN2; (-) strand; PAM type: YTN; PAM sequence: TTT
catccaaggcttatcgtagt

SEQ ID NO: 56577 - DNA, 20 bp, Artificial Sequence
  Description of Artificial Sequence: Synthetic oligonucleotide
  Target: ATXN2; (-) strand; PAM type: YTN; PAM sequence: TTG
aatatgtgagagtaaaaacg

SEQ ID NO: 56578 - DNA, 20 bp, Artificial Sequence
  Description of Artificial Sequence: Synthetic oligonucleotide
  Target: ATXN2; (-) strand; PAM type: YTN; PAM sequence: TTT
gaatatgtgagagtaaaaac

SEQ ID NO: 56579 - DNA, 20 bp, Artificial Sequence
  Description of Artificial Sequence: Synthetic oligonucleotide
  Target: ATXN2; (-) strand; PAM type: YTN; PAM sequence: TTG
ccatgtgcccgtttgaatat

SEQ ID NO: 56580 - DNA, 20 bp, Artificial Sequence
  Description of Artificial Sequence: Synthetic oligonucleotide
  Target: ATXN2; (-) strand; PAM type: YTN; PAM sequence: TTT
gccatgtgcccgtttgaata

SEQ ID NO: 56581 - DNA, 20 bp, Artificial Sequence
  Description of Artificial Sequence: Synthetic oligonucleotide
  Target: ATXN2; (-) strand; PAM type: YTN; PAM sequence: CTC
aaatttgccatgtgcccgtt

SEQ ID NO: 56582 - DNA, 20 bp, Artificial Sequence
  Description of Artificial Sequence: Synthetic oligonucleotide
  Target: ATXN2; (-) strand; PAM type: YTN; PAM sequence: TTA
acacagggaagctcaaattt

SEQ ID NO: 56583 - DNA, 20 bp, Artificial Sequence
  Description of Artificial Sequence: Synthetic oligonucleotide
  Target: ATXN2; (-) strand; PAM type: YTN; PAM sequence: CTG
aaagggcaaaaaggttaaca

SEQ ID NO: 56584 - DNA, 20 bp, Artificial Sequence
  Description of Artificial Sequence: Synthetic oligonucleotide
  Target: ATXN2; (-) strand; PAM type: YTN; PAM sequence: TTG
tgctgaaagggcaaaaaggt

SEQ ID NO: 56585 - DNA, 20 bp, Artificial Sequence
  Description of Artificial Sequence: Synthetic oligonucleotide
  Target: ATXN2; (-) strand; PAM type: YTN; PAM sequence: TTT
gtgctgaaagggcaaaaagg

SEQ ID NO: 56586 - DNA, 20 bp, Artificial Sequence
  Description of Artificial Sequence: Synthetic oligonucleotide
  Target: ATXN2; (-) strand; PAM type: YTN; PAM sequence: TTT
tgtgctgaaagggcaaaaag

SEQ ID NO: 56587 - DNA, 20 bp, Artificial Sequence
  Description of Artificial Sequence: Synthetic oligonucleotide
  Target: ATXN2; (-) strand; PAM type: YTN; PAM sequence: TTT
ttgtgctgaaagggcaaaaa

SEQ ID NO: 56588 - DNA, 20 bp, Artificial Sequence
  Description of Artificial Sequence: Synthetic oligonucleotide
  Target: ATXN2; (-) strand; PAM type: YTN; PAM sequence: CTG
tttttgtgctgaaagggcaa

SEQ ID NO: 56589 - DNA, 20 bp, Artificial Sequence
  Description of Artificial Sequence: Synthetic oligonucleotide
  Target: ATXN2; (-) strand; PAM type: YTN; PAM sequence: CTC
tgtttttgtgctgaaagggc

SEQ ID NO: 56590 - DNA, 20 bp, Artificial Sequence
  Description of Artificial Sequence: Synthetic oligonucleotide
  Target: ATXN2; (-) strand; PAM type: YTN; PAM sequence: CTC
actctgtttttgtgctgaaa

SEQ ID NO: 56591 - DNA, 20 bp, Artificial Sequence
  Description of Artificial Sequence: Synthetic oligonucleotide
  Target: ATXN2; (-) strand; PAM type: YTN; PAM sequence: CTA
aaacctcactctgtttttgt

SEQ ID NO: 56592 - DNA, 20 bp, Artificial Sequence
  Description of Artificial Sequence: Synthetic oligonucleotide
  Target: ATXN2; (-) strand; PAM type: YTN; PAM sequence: TTA
catgtaagtcagggatccct

SEQ ID NO: 56593 - DNA, 20 bp, Artificial Sequence
  Description of Artificial Sequence: Synthetic oligonucleotide
  Target: ATXN2; (-) strand; PAM type: YTN; PAM sequence: CTT
acatgtaagtcagggatccc

SEQ ID NO: 56594 - DNA, 20 bp, Artificial Sequence
  Description of Artificial Sequence: Synthetic oligonucleotide
  Target: ATXN2; (-) strand; PAM type: YTN; PAM sequence: CTA
agtaggcatgtgaacttaca

SEQ ID NO: 56595 - DNA, 20 bp, Artificial Sequence
  Description of Artificial Sequence: Synthetic oligonucleotide
  Target: ATXN2; (-) strand; PAM type: YTN; PAM sequence: CTG
gtggctaagtaggcatgtga

SEQ ID NO: 56596 - DNA, 20 bp, Artificial Sequence
  Description of Artificial Sequence: Synthetic oligonucleotide
  Target: ATXN2; (-) strand; PAM type: YTN; PAM sequence: CTA
ccagaggctggtggctaagt

SEQ ID NO: 56597 - DNA, 20 bp, Artificial Sequence
  Description of Artificial Sequence: Synthetic oligonucleotide
  Target: ATXN2; (-) strand; PAM type: YTN; PAM sequence: CTG
taggtgtctaccagaggctg

SEQ ID NO: 56598 - DNA, 20 bp, Artificial Sequence
  Description of Artificial Sequence: Synthetic oligonucleotide
  Target: ATXN2; (-) strand; PAM type: YTN; PAM sequence: CTG
gggtcctgtaggtgtctacc

SEQ ID NO: 56599 - DNA, 20 bp, Artificial Sequence
  Description of Artificial Sequence: Synthetic oligonucleotide
  Target: ATXN2; (-) strand; PAM type: YTN; PAM sequence: TTC
ataagagctggggtcctgta

SEQ ID NO: 56600 - DNA, 20 bp, Artificial Sequence
  Description of Artificial Sequence: Synthetic oligonucleotide
  Target: ATXN2; (-) strand; PAM type: YTN; PAM sequence: CTT
cataagagctggggtcctgt

SEQ ID NO: 56601 - DNA, 20 bp, Artificial Sequence
  Description of Artificial Sequence: Synthetic oligonucleotide
  Target: ATXN2; (-) strand; PAM type: YTN; PAM sequence: TTG
gtggagtcagcttcataaga

SEQ ID NO: 56602 - DNA, 20 bp, Artificial Sequence
  Description of Artificial Sequence: Synthetic oligonucleotide
  Target: ATXN2; (-) strand; PAM type: YTN; PAM sequence: TTT
ggtggagtcagcttcataag

SEQ ID NO: 56603 - DNA, 20 bp, Artificial Sequence
  Description of Artificial Sequence: Synthetic oligonucleotide
  Target: ATXN2; (-) strand; PAM type: YTN; PAM sequence: TTG
gtccgtgtgggccagcgtgg

SEQ ID NO: 56604 - DNA, 20 bp, Artificial Sequence
  Description of Artificial Sequence: Synthetic oligonucleotide
  Target: ATXN2; (-) strand; PAM type: YTN; PAM sequence: TTT
ggtccgtgtgggccagcgtg

SEQ ID NO: 56605 - DNA, 20 bp, Artificial Sequence
  Description of Artificial Sequence: Synthetic oligonucleotide
  Target: ATXN2; (-) strand; PAM type: YTN; PAM sequence: TTG
atagtggggagggaagccgg

SEQ ID NO: 56606 - DNA, 20 bp, Artificial Sequence
  Description of Artificial Sequence: Synthetic oligonucleotide
  Target: ATXN2; (-) strand; PAM type: YTN; PAM sequence: TTT
gatagtggggagggaagccg

SEQ ID NO: 56607 - DNA, 20 bp, Artificial Sequence
  Description of Artificial Sequence: Synthetic oligonucleotide
  Target: ATXN2; (-) strand; PAM type: YTN; PAM sequence: TTT
tgatagtggggagggaagcc

SEQ ID NO: 56608 - DNA, 20 bp, Artificial Sequence
  Description of Artificial Sequence: Synthetic oligonucleotide
  Target: ATXN2; (-) strand; PAM type: YTN; PAM sequence: TTT
ttgatagtggggagggaagc

SEQ ID NO: 56609 - DNA, 20 bp, Artificial Sequence
  Description of Artificial Sequence: Synthetic oligonucleotide
  Target: ATXN2; (-) strand; PAM type: YTN; PAM sequence: CTT
tttgatagtggggagggaag

SEQ ID NO: 56610 - DNA, 20 bp, Artificial Sequence
  Description of Artificial Sequence: Synthetic oligonucleotide
  Target: ATXN2; (-) strand; PAM type: YTN; PAM sequence: TTG
ctttttgatagtggggaggg

SEQ ID NO: 56611 - DNA, 20 bp, Artificial Sequence
  Description of Artificial Sequence: Synthetic oligonucleotide
  Target: ATXN2; (-) strand; PAM type: YTN; PAM sequence: TTT
gctttttgatagtggggagg

SEQ ID NO: 56612 - DNA, 20 bp, Artificial Sequence
  Description of Artificial Sequence: Synthetic oligonucleotide
  Target: ATXN2; (-) strand; PAM type: YTN; PAM sequence: TTG
atttgctttttgatagtggg

SEQ ID NO: 56613 - DNA, 20 bp, Artificial Sequence
  Description of Artificial Sequence: Synthetic oligonucleotide
  Target: ATXN2; (-) strand; PAM type: YTN; PAM sequence: CTG
cagttgatttgctttttgat

SEQ ID NO: 56614 - DNA, 20 bp, Artificial Sequence
  Description of Artificial Sequence: Synthetic oligonucleotide
  Target: ATXN2; (-) strand; PAM type: YTN; PAM sequence: CTG
tggtgtagcgcactgcagtt

SEQ ID NO: 56615 - DNA, 20 bp, Artificial Sequence
  Description of Artificial Sequence: Synthetic oligonucleotide
  Target: ATXN2; (-) strand; PAM type: YTN; PAM sequence: TTC
tgtggtgtagcgcactgcag

SEQ ID NO: 56616 - DNA, 20 bp, Artificial Sequence
  Description of Artificial Sequence: Synthetic oligonucleotide
  Target: ATXN2; (-) strand; PAM type: YTN; PAM sequence: TTA
ggttctgtggtgtagcgcac

SEQ ID NO: 56617 - DNA, 20 bp, Artificial Sequence
  Description of Artificial Sequence: Synthetic oligonucleotide
  Target: ATXN2; (-) strand; PAM type: YTN; PAM sequence: TTT
aggttctgtggtgtagcgca

SEQ ID NO: 56618 - DNA, 20 bp, Artificial Sequence
  Description of Artificial Sequence: Synthetic oligonucleotide
  Target: ATXN2; (-) strand; PAM type: YTN; PAM sequence: CTG
caaagtttaggttctgtggt

SEQ ID NO: 56619 - DNA, 20 bp, Artificial Sequence
  Description of Artificial Sequence: Synthetic oligonucleotide
  Target: ATXN2; (-) strand; PAM type: YTN; PAM sequence: CTC
accctgcaaagtttaggttc

SEQ ID NO: 56620 - DNA, 20 bp, Artificial Sequence
  Description of Artificial Sequence: Synthetic oligonucleotide
  Target: ATXN2; (-) strand; PAM type: YTN; PAM sequence: TTG
ggcgtcctcaccctgcaaag

SEQ ID NO: 56621 - DNA, 20 bp, Artificial Sequence
  Description of Artificial Sequence: Synthetic oligonucleotide
  Target: ATXN2; (-) strand; PAM type: YTN; PAM sequence: TTT
gggcgtcctcaccctgcaaa

SEQ ID NO: 56622 - DNA, 20 bp, Artificial Sequence
  Description of Artificial Sequence: Synthetic oligonucleotide
  Target: ATXN2; (-) strand; PAM type: YTN; PAM sequence: CTG
ggaagtttgggcgtcctcac

SEQ ID NO: 56623 - DNA, 20 bp, Artificial Sequence
  Description of Artificial Sequence: Synthetic oligonucleotide
  Target: ATXN2; (-) strand; PAM type: YTN; PAM sequence: CTC
tgggaagtttgggcgtcctc

SEQ ID NO: 56624 - DNA, 20 bp, Artificial Sequence
  Description of Artificial Sequence: Synthetic oligonucleotide
  Target: ATXN2; (-) strand; PAM type: YTN; PAM sequence: TTC
cacagctctgggaagtttgg

SEQ ID NO: 56625 - DNA, 20 bp, Artificial Sequence
  Description of Artificial Sequence: Synthetic oligonucleotide
  Target: ATXN2; (-) strand; PAM type: YTN; PAM sequence: TTG
taagtagagttccacagctc

SEQ ID NO: 56626 - DNA, 20 bp, Artificial Sequence
  Description of Artificial Sequence: Synthetic oligonucleotide
  Target: ATXN2; (-) strand; PAM type: YTN; PAM sequence: CTT
gtaagtagagttccacagct

SEQ ID NO: 56627 - DNA, 20 bp, Artificial Sequence
  Description of Artificial Sequence: Synthetic oligonucleotide
  Target: ATXN2; (-) strand; PAM type: YTN; PAM sequence: CTA
ccttgtaagtagagttccac

SEQ ID NO: 56628 - DNA, 20 bp, Artificial Sequence
  Description of Artificial Sequence: Synthetic oligonucleotide
  Target: ATXN2; (-) strand; PAM type: YTN; PAM sequence: CTC
agaaggctaccttgtaagta

SEQ ID NO: 56629 - DNA, 20 bp, Artificial Sequence
  Description of Artificial Sequence: Synthetic oligonucleotide
  Target: ATXN2; (-) strand; PAM type: YTN; PAM sequence: CTC
tcagaaggctaccttgtaag

SEQ ID NO: 56630 - DNA, 20 bp, Artificial Sequence
  Description of Artificial Sequence: Synthetic oligonucleotide
  Target: ATXN2; (-) strand; PAM type: YTN; PAM sequence: CTA
tctctcagaaggctaccttg

SEQ ID NO: 56631 - DNA, 20 bp, Artificial Sequence
  Description of Artificial Sequence: Synthetic oligonucleotide
  Target: ATXN2; (-) strand; PAM type: YTN; PAM sequence: TTG
gatctatctctcagaaggct

SEQ ID NO: 56632 - DNA, 20 bp, Artificial Sequence
  Description of Artificial Sequence: Synthetic oligonucleotide
  Target: ATXN2; (-) strand; PAM type: YTN; PAM sequence: CTC
agttggatctatctctcaga

SEQ ID NO: 56633 - DNA, 20 bp, Artificial Sequence
  Description of Artificial Sequence: Synthetic oligonucleotide
  Target: ATXN2; (-) strand; PAM type: YTN; PAM sequence: CTA
gagatgcgactcagttggat

SEQ ID NO: 56634 - DNA, 20 bp, Artificial Sequence
  Description of Artificial Sequence: Synthetic oligonucleotide
  Target: ATXN2; (-) strand; PAM type: YTN; PAM sequence: CTG
gcaaggtgtgggctagagat

SEQ ID NO: 56635 - DNA, 20 bp, Artificial Sequence
  Description of Artificial Sequence: Synthetic oligonucleotide
  Target: ATXN2; (-) strand; PAM type: YTN; PAM sequence: CTC
tggcaaggtgtgggctagag

SEQ ID NO: 56636 - DNA, 20 bp, Artificial Sequence
  Description of Artificial Sequence: Synthetic oligonucleotide
  Target: ATXN2; (-) strand; PAM type: YTN; PAM sequence: TTA
aatagtgcgccagtgaggct

SEQ ID NO: 56637 - DNA, 20 bp, Artificial Sequence
  Description of Artificial Sequence: Synthetic oligonucleotide
  Target: ATXN2; (-) strand; PAM type: YTN; PAM sequence: CTG
ttaaatagtgcgccagtgag

SEQ ID NO: 56638 - DNA, 20 bp, Artificial Sequence
  Description of Artificial Sequence: Synthetic oligonucleotide
  Target: ATXN2; (-) strand; PAM type: YTN; PAM sequence: TTC
ctgttaaatagtgcgccagt

SEQ ID NO: 56639 - DNA, 20 bp, Artificial Sequence
  Description of Artificial Sequence: Synthetic oligonucleotide
  Target: ATXN2; (-) strand; PAM type: YTN; PAM sequence: TTT
cctgttaaatagtgcgccag

SEQ ID NO: 56640 - DNA, 20 bp, Artificial Sequence
  Description of Artificial Sequence: Synthetic oligonucleotide
  Target: ATXN2; (-) strand; PAM type: YTN; PAM sequence: TTC
catttcctgttaaatagtgc

SEQ ID NO: 56641 - DNA, 20 bp, Artificial Sequence
  Description of Artificial Sequence: Synthetic oligonucleotide
  Target: ATXN2; (-) strand; PAM type: YTN; PAM sequence: CTG
ccacaatgaattccatttcc

SEQ ID NO: 56642 - DNA, 20 bp, Artificial Sequence
  Description of Artificial Sequence: Synthetic oligonucleotide
  Target: ATXN2; (-) strand; PAM type: YTN; PAM sequence: CTA
agtgagacctgccacaatga

SEQ ID NO: 56643 - DNA, 20 bp, Artificial Sequence
  Description of Artificial Sequence: Synthetic oligonucleotide
  Target: ATXN2; (-) strand; PAM type: YTN; PAM sequence: CTG
aggcgggtctaagtgagacc

SEQ ID NO: 56644 - DNA, 20 bp, Artificial Sequence
  Description of Artificial Sequence: Synthetic oligonucleotide
  Target: ATXN2; (-) strand; PAM type: YTN; PAM sequence: CTC
tgaggcgggtctaagtgaga

SEQ ID NO: 56645 - DNA, 20 bp, Artificial Sequence
  Description of Artificial Sequence: Synthetic oligonucleotide
  Target: ATXN2; (-) strand; PAM type: YTN; PAM sequence: CTC
tctgaggcgggtctaagtga

SEQ ID NO: 56646 - DNA, 20 bp, Artificial Sequence
  Description of Artificial Sequence: Synthetic oligonucleotide
  Target: ATXN2; (-) strand; PAM type: YTN; PAM sequence: TTC
ataacagaactctctgaggc

SEQ ID NO: 56647 - DNA, 20 bp, Artificial Sequence
  Description of Artificial Sequence: Synthetic oligonucleotide
  Target: ATXN2; (-) strand; PAM type: YTN; PAM sequence: TTT
cataacagaactctctgagg

SEQ ID NO: 56648 - DNA, 20 bp, Artificial Sequence
  Description of Artificial Sequence: Synthetic oligonucleotide
  Target: ATXN2; (-) strand; PAM type: YTN; PAM sequence: CTT
tcataacagaactctctgag

SEQ ID NO: 56649 - DNA, 20 bp, Artificial Sequence
  Description of Artificial Sequence: Synthetic oligonucleotide
  Target: ATXN2; (-) strand; PAM type: YTN; PAM sequence: CTA
ctttcataacagaactctct

SEQ ID NO: 56650 - DNA, 20 bp, Artificial Sequence
  Description of Artificial Sequence: Synthetic oligonucleotide
  Target: ATXN2; (-) strand; PAM type: YTN; PAM sequence: CTG
ctactttcataacagaactc

SEQ ID NO: 56651 - DNA, 20 bp, Artificial Sequence
  Description of Artificial Sequence: Synthetic oligonucleotide
  Target: ATXN2; (-) strand; PAM type: YTN; PAM sequence: CTC
tgctactttcataacagaac

SEQ ID NO: 56652 - DNA, 20 bp, Artificial Sequence
  Description of Artificial Sequence: Synthetic oligonucleotide
  Target: ATXN2; (-) strand; PAM type: YTN; PAM sequence: TTA
gatgtctctgctactttcat

SEQ ID NO: 56653 - DNA, 20 bp, Artificial Sequence
  Description of Artificial Sequence: Synthetic oligonucleotide
  Target: ATXN2; (-) strand; PAM type: YTN; PAM sequence: CTG
tattagatgtctctgctact

SEQ ID NO: 56654 - DNA, 20 bp, Artificial Sequence
  Description of Artificial Sequence: Synthetic oligonucleotide
  Target: ATXN2; (-) strand; PAM type: YTN; PAM sequence: TTG
gctgtattagatgtctctgc

SEQ ID NO: 56655 - DNA, 20 bp, Artificial Sequence
  Description of Artificial Sequence: Synthetic oligonucleotide
  Target: ATXN2; (-) strand; PAM type: YTN; PAM sequence: TTA
cgggtgaattggctgtatta

SEQ ID NO: 56656 - DNA, 20 bp, Artificial Sequence
  Description of Artificial Sequence: Synthetic oligonucleotide
  Target: ATXN2; (-) strand; PAM type: YTN; PAM sequence: CTG
ttacgggtgaattggctgta

SEQ ID NO: 56657 - DNA, 20 bp, Artificial Sequence
  Description of Artificial Sequence: Synthetic oligonucleotide
  Target: ATXN2; (-) strand; PAM type: YTN; PAM sequence: CTG
gggctgttacgggtgaattg

SEQ ID NO: 56658 - DNA, 20 bp, Artificial Sequence
  Description of Artificial Sequence: Synthetic oligonucleotide
  Target: ATXN2; (-) strand; PAM type: YTN; PAM sequence: CTC
cctggggctgttacgggtga

SEQ ID NO: 56659 - DNA, 20 bp, Artificial Sequence
  Description of Artificial Sequence: Synthetic oligonucleotide
  Target: ATXN2; (-) strand; PAM type: YTN; PAM sequence: TTG
aggccctccctggggctgtt

SEQ ID NO: 56660 - DNA, 20 bp, Artificial Sequence
  Description of Artificial Sequence: Synthetic oligonucleotide
  Target: ATXN2; (-) strand; PAM type: YTN; PAM sequence: CTT
gaggccctccctggggctgt

SEQ ID NO: 56661 - DNA, 20 bp, Artificial Sequence
  Description of Artificial Sequence: Synthetic oligonucleotide
  Target: ATXN2; (-) strand; PAM type: YTN; PAM sequence: CTG
gccttgaggccctccctggg

SEQ ID NO: 56662 - DNA, 20 bp, Artificial Sequence
  Description of Artificial Sequence: Synthetic oligonucleotide
  Target: ATXN2; (-) strand; PAM type: YTN; PAM sequence: CTA
acgctggccttgaggccctc

SEQ ID NO: 56663 - DNA, 20 bp, Artificial Sequence
  Description of Artificial Sequence: Synthetic oligonucleotide
  Target: ATXN2; (-) strand; PAM type: YTN; PAM sequence: CTC
taacgctggccttgaggccc

SEQ ID NO: 56664 - DNA, 20 bp, Artificial Sequence
  Description of Artificial Sequence: Synthetic oligonucleotide
  Target: ATXN2; (-) strand; PAM type: YTN; PAM sequence: TTG
ggctctaacgctggccttga

SEQ ID NO: 56665 - DNA, 20 bp, Artificial Sequence
  Description of Artificial Sequence: Synthetic oligonucleotide
  Target: ATXN2; (-) strand; PAM type: YTN; PAM sequence: CTG
aagttgggctctaacgctgg

SEQ ID NO: 56666 - DNA, 20 bp, Artificial Sequence
  Description of Artificial Sequence: Synthetic oligonucleotide
  Target: ATXN2; (-) strand; PAM type: YTN; PAM sequence: CTG
cactgaagttgggctctaac

SEQ ID NO: 56667 - DNA, 20 bp, Artificial Sequence
  Description of Artificial Sequence: Synthetic oligonucleotide
  Target: ATXN2; (-) strand; PAM type: YTN; PAM sequence: TTA
atgaggagaaggagctgcac

SEQ ID NO: 56668 - DNA, 20 bp, Artificial Sequence
  Description of Artificial Sequence: Synthetic oligonucleotide
  Target: ATXN2; (-) strand; PAM type: YTN; PAM sequence: CTT
aatgaggagaaggagctgca

SEQ ID NO: 56669 - DNA, 20 bp, Artificial Sequence
  Description of Artificial Sequence: Synthetic oligonucleotide
  Target: ATXN2; (-) strand; PAM type: YTN; PAM sequence: TTG
tcttaatgaggagaaggagc

SEQ ID NO: 56670 - DNA, 20 bp, Artificial Sequence
  Description of Artificial Sequence: Synthetic oligonucleotide
  Target: ATXN2; (-) strand; PAM type: YTN; PAM sequence: CTC
cagggcccaggggattgtct

SEQ ID NO: 56671 - DNA, 20 bp, Artificial Sequence
  Description of Artificial Sequence: Synthetic oligonucleotide
  Target: ATXN2; (-) strand; PAM type: YTN; PAM sequence: CTG
cactccagggcccaggggat

SEQ ID NO: 56672 - DNA, 20 bp, Artificial Sequence
  Description of Artificial Sequence: Synthetic oligonucleotide
  Target: ATXN2; (-) strand; PAM type: YTN; PAM sequence: CTG
acaaaggtccctgcactcca

SEQ ID NO: 56673 - DNA, 20 bp, Artificial Sequence
  Description of Artificial Sequence: Synthetic oligonucleotide
  Target: ATXN2; (-) strand; PAM type: YTN; PAM sequence: CTG
ctgacaaaggtccctgcact

SEQ ID NO: 56674 - DNA, 20 bp, Artificial Sequence
  Description of Artificial Sequence: Synthetic oligonucleotide
  Target: ATXN2; (-) strand; PAM type: YTN; PAM sequence: CTG
catcagctgctgacaaaggt

SEQ ID NO: 56675 - DNA, 20 bp, Artificial Sequence
  Description of Artificial Sequence: Synthetic oligonucleotide
  Target: ATXN2; (-) strand; PAM type: YTN; PAM sequence: CTG
tctgcatcagctgctgacaa

SEQ ID NO: 56676 - DNA, 20 bp, Artificial Sequence
  Description of Artificial Sequence: Synthetic oligonucleotide
  Target: ATXN2; (-) strand; PAM type: YTN; PAM sequence: TTG
ctgtctgcatcagctgctga

SEQ ID NO: 56677 - DNA, 20 bp, Artificial Sequence
  Description of Artificial Sequence: Synthetic oligonucleotide
  Target: ATXN2; (-) strand; PAM type: YTN; PAM sequence: CTC
agtggttgctgtctgcatca

SEQ ID NO: 56678 - DNA, 20 bp, Artificial Sequence
  Description of Artificial Sequence: Synthetic oligonucleotide
  Target: ATXN2; (-) strand; PAM type: YTN; PAM sequence: TTG
ccatctcagtggttgctgtc

SEQ ID NO: 56679 - DNA, 20 bp, Artificial Sequence
  Description of Artificial Sequence: Synthetic oligonucleotide
  Target: ATXN2; (-) strand; PAM type: YTN; PAM sequence: CTT
gccatctcagtggttgctgt

SEQ ID NO: 56680 - DNA, 20 bp, Artificial Sequence
  Description of Artificial Sequence: Synthetic oligonucleotide
  Target: ATXN2; (-) strand; PAM type: YTN; PAM sequence: CTA
caggtgaaaggtgtgcttgc

SEQ ID NO: 56681 - DNA, 20 bp, Artificial Sequence
  Description of Artificial Sequence: Synthetic oligonucleotide
  Target: ATXN2; (-) strand; PAM type: YTN; PAM sequence: CTG
ctacaggtgaaaggtgtgct

SEQ ID NO: 56682 - DNA, 20 bp, Artificial Sequence
  Description of Artificial Sequence: Synthetic oligonucleotide
  Target: ATXN2; (-) strand; PAM type: YTN; PAM sequence: CTC
cagtgtaagctgctacaggt

SEQ ID NO: 56683 - DNA, 20 bp, Artificial Sequence
  Description of Artificial Sequence: Synthetic oligonucleotide
  Target: ATXN2; (-) strand; PAM type: YTN; PAM sequence: CTC
acctccagtgtaagctgcta

SEQ ID NO: 56684 - DNA, 20 bp, Artificial Sequence
  Description of Artificial Sequence: Synthetic oligonucleotide
  Target: ATXN2; (-) strand; PAM type: YTN; PAM sequence: TTG
gagctcacctccagtgtaag

SEQ ID NO: 56685 - DNA, 20 bp, Artificial Sequence
  Description of Artificial Sequence: Synthetic oligonucleotide
  Target: ATXN2; (-) strand; PAM type: YTN; PAM sequence: TTT
ggagctcacctccagtgtaa

SEQ ID NO: 56686 - DNA, 20 bp, Artificial Sequence
  Description of Artificial Sequence: Synthetic oligonucleotide
  Target: ATXN2; (-) strand; PAM type: YTN; PAM sequence: CTT
tggagctcacctccagtgta

SEQ ID NO: 56687 - DNA, 20 bp, Artificial Sequence
  Description of Artificial Sequence: Synthetic oligonucleotide
  Target: ATXN2; (-) strand; PAM type: YTN; PAM sequence: CTG
gaagcactttggagctcacc

SEQ ID NO: 56688 - DNA, 20 bp, Artificial Sequence
  Description of Artificial Sequence: Synthetic oligonucleotide
  Target: ATXN2; (-) strand; PAM type: YTN; PAM sequence: TTA
agagcagccctggaagcact

SEQ ID NO: 56689 - DNA, 20 bp, Artificial Sequence
  Description of Artificial Sequence: Synthetic oligonucleotide
  Target: ATXN2; (-) strand; PAM type: YTN; PAM sequence: TTT
aagagcagccctggaagcac

SEQ ID NO: 56690 - DNA, 20 bp, Artificial Sequence
  Description of Artificial Sequence: Synthetic oligonucleotide
  Target: ATXN2; (-) strand; PAM type: YTN; PAM sequence: CTT
taagagcagccctggaagca

SEQ ID NO: 56691 - DNA, 20 bp, Artificial Sequence
  Description of Artificial Sequence: Synthetic oligonucleotide
  Target: ATXN2; (-) strand; PAM type: YTN; PAM sequence: TTC
tttaagagcagccctggaag

SEQ ID NO: 56692 - DNA, 20 bp, Artificial Sequence
  Description of Artificial Sequence: Synthetic oligonucleotide
  Target: ATXN2; (-) strand; PAM type: YTN; PAM sequence: TTT
ctttaagagcagccctggaa

SEQ ID NO: 56693 - DNA, 20 bp, Artificial Sequence
  Description of Artificial Sequence: Synthetic oligonucleotide
  Target: ATXN2; (-) strand; PAM type: YTN; PAM sequence: TTT
tctttaagagcagccctgga

SEQ ID NO: 56694 - DNA, 20 bp, Artificial Sequence
  Description of Artificial Sequence: Synthetic oligonucleotide
  Target: ATXN2; (-) strand; PAM type: YTN; PAM sequence: TTT
ttctttaagagcagccctgg

SEQ ID NO: 56695 - DNA, 20 bp, Artificial Sequence
  Description of Artificial Sequence: Synthetic oligonucleotide
  Target: ATXN2; (-) strand; PAM type: YTN; PAM sequence: CTG
gaagcacccaggtggtccca

SEQ ID NO: 56696 - DNA, 20 bp, Artificial Sequence
  Description of Artificial Sequence: Synthetic oligonucleotide
  Target: ATXN2; (-) strand; PAM type: YTN; PAM sequence: CTA
gaagctggaagcacccaggt

SEQ ID NO: 56697 - DNA, 20 bp, Artificial Sequence
  Description of Artificial Sequence: Synthetic oligonucleotide
  Target: ATXN2; (-) strand; PAM type: YTN; PAM sequence: TTG
gtgcagtgtaactagaagct

SEQ ID NO: 56698 - DNA, 20 bp, Artificial Sequence
  Description of Artificial Sequence: Synthetic oligonucleotide
  Target: ATXN2; (-) strand; PAM type: YTN; PAM sequence: TTG
gacattggtgcagtgtaact

SEQ ID NO: 56699 - DNA, 20 bp, Artificial Sequence
  Description of Artificial Sequence: Synthetic oligonucleotide
  Target: ATXN2; (-) strand; PAM type: YTN; PAM sequence: CTT
ggacattggtgcagtgtaac

SEQ ID NO: 56700 - DNA, 20 bp, Artificial Sequence
  Description of Artificial Sequence: Synthetic oligonucleotide
  Target: ATXN2; (-) strand; PAM type: YTN; PAM sequence: TTG
gccttggacattggtgcagt

SEQ ID NO: 56701 - DNA, 20 bp, Artificial Sequence
  Description of Artificial Sequence: Synthetic oligonucleotide
  Target: ATXN2; (-) strand; PAM type: YTN; PAM sequence: CTT
ggccttggacattggtgcag

SEQ ID NO: 56702 - DNA, 20 bp, Artificial Sequence
  Description of Artificial Sequence: Synthetic oligonucleotide
  Target: ATXN2; (-) strand; PAM type: YTN; PAM sequence: TTG
agagggcttggccttggaca

SEQ ID NO: 56703 - DNA, 20 bp, Artificial Sequence
  Description of Artificial Sequence: Synthetic oligonucleotide
  Target: ATXN2; (-) strand; PAM type: YTN; PAM sequence: CTT
gagagggcttggccttggac

SEQ ID NO: 56704 - DNA, 20 bp, Artificial Sequence
  Description of Artificial Sequence: Synthetic oligonucleotide
  Target: ATXN2; (-) strand; PAM type: YTN; PAM sequence: CTC
ttgagagggcttggccttgg

SEQ ID NO: 56705 - DNA, 20 bp, Artificial Sequence
  Description of Artificial Sequence: Synthetic oligonucleotide
  Target: ATXN2; (-) strand; PAM type: YTN; PAM sequence: TTG
tactcttgagagggcttggc

SEQ ID NO: 56706 - DNA, 20 bp, Artificial Sequence
  Description of Artificial Sequence: Synthetic oligonucleotide
  Target: ATXN2; (-) strand; PAM type: YTN; PAM sequence: TTG
accataagttgtactcttga

SEQ ID NO: 56707 - DNA, 20 bp, Artificial Sequence
  Description of Artificial Sequence: Synthetic oligonucleotide
  Target: ATXN2; (-) strand; PAM type: YTN; PAM sequence: TTT
gaccataagttgtactcttg

SEQ ID NO: 56708 - DNA, 20 bp, Artificial Sequence
  Description of Artificial Sequence: Synthetic oligonucleotide
  Target: ATXN2; (-) strand; PAM type: YTN; PAM sequence: CTT
tgaccataagttgtactctt

SEQ ID NO: 56709 - DNA, 20 bp, Artificial Sequence
  Description of Artificial Sequence: Synthetic oligonucleotide
  Target: ATXN2; (-) strand; PAM type: YTN; PAM sequence: CTG
ctttgaccataagttgtact

SEQ ID NO: 56710 - DNA, 20 bp, Artificial Sequence
  Description of Artificial Sequence: Synthetic oligonucleotide
  Target: ATXN2; (-) strand; PAM type: YTN; PAM sequence: TTA
tccatatatctgctttgacc

SEQ ID NO: 56711 - DNA, 20 bp, Artificial Sequence
  Description of Artificial Sequence: Synthetic oligonucleotide
  Target: ATXN2; (-) strand; PAM type: YTN; PAM sequence: CTG
gttatccatatatctgcttt

SEQ ID NO: 56712 - DNA, 20 bp, Artificial Sequence
  Description of Artificial Sequence: Synthetic oligonucleotide
  Target: ATXN2; (-) strand; PAM type: YTN; PAM sequence: TTC
cctggttatccatatatctg

SEQ ID NO: 56713 - DNA, 20 bp, Artificial Sequence
  Description of Artificial Sequence: Synthetic oligonucleotide
  Target: ATXN2; (-) strand; PAM type: YTN; PAM sequence: TTT
ccctggttatccatatatct

SEQ ID NO: 56714 - DNA, 20 bp, Artificial Sequence
  Description of Artificial Sequence: Synthetic oligonucleotide
  Target: ATXN2; (-) strand; PAM type: YTN; PAM sequence: TTT
tccctggttatccatatatc

SEQ ID NO: 56715 - DNA, 20 bp, Artificial Sequence
  Description of Artificial Sequence: Synthetic oligonucleotide
  Target: ATXN2; (-) strand; PAM type: YTN; PAM sequence: TTG
ttttccctggttatccatat

SEQ ID NO: 56716 - DNA, 20 bp, Artificial Sequence
  Description of Artificial Sequence: Synthetic oligonucleotide
  Target: ATXN2; (-) strand; PAM type: YTN; PAM sequence: CTC
caattgttttccctggttat

SEQ ID NO: 56717 - DNA, 20 bp, Artificial Sequence
  Description of Artificial Sequence: Synthetic oligonucleotide
  Target: ATXN2; (-) strand; PAM type: YTN; PAM sequence: CTC
tccaattgttttccctggtt

SEQ ID NO: 56718 - DNA, 20 bp, Artificial Sequence
  Description of Artificial Sequence: Synthetic oligonucleotide
  Target: ATXN2; (-) strand; PAM type: YTN; PAM sequence: TTC
cagacacatctctccaattg

SEQ ID NO: 56719 - DNA, 20 bp, Artificial Sequence
  Description of Artificial Sequence: Synthetic oligonucleotide
  Target: ATXN2; (-) strand; PAM type: YTN; PAM sequence: CTC
acatgagttccagacacatc

SEQ ID NO: 56720 - DNA, 20 bp, Artificial Sequence
  Description of Artificial Sequence: Synthetic oligonucleotide
  Target: ATXN2; (-) strand; PAM type: YTN; PAM sequence: TTA
ctcacatgagttccagacac

SEQ ID NO: 56721 - DNA, 20 bp, Artificial Sequence
  Description of Artificial Sequence: Synthetic oligonucleotide
  Target: ATXN2; (-) strand; PAM type: YTN; PAM sequence: TTG
ttactcacatgagttccaga

SEQ ID NO: 56722 - DNA, 20 bp, Artificial Sequence
  Description of Artificial Sequence: Synthetic oligonucleotide
  Target: ATXN2; (-) strand; PAM type: YTN; PAM sequence: TTG
attgttactcacatgagttc

SEQ ID NO: 56723 - DNA, 20 bp, Artificial Sequence
  Description of Artificial Sequence: Synthetic oligonucleotide
  Target: ATXN2; (-) strand; PAM type: YTN; PAM sequence: CTT
gattgttactcacatgagtt

SEQ ID NO: 56724 - DNA, 20 bp, Artificial Sequence
  Description of Artificial Sequence: Synthetic oligonucleotide
  Target: ATXN2; (-) strand; PAM type: YTN; PAM sequence: CTG
tcaacttgattgttactcac

SEQ ID NO: 56725 - DNA, 20 bp, Artificial Sequence
  Description of Artificial Sequence: Synthetic oligonucleotide
  Target: ATXN2; (-) strand; PAM type: YTN; PAM sequence: CTA
ccggggcctgtcaacttgat

SEQ ID NO: 56726 - DNA, 20 bp, Artificial Sequence
  Description of Artificial Sequence: Synthetic oligonucleotide
  Target: ATXN2; (-) strand; PAM type: YTN; PAM sequence: CTC
cgaagtgactaccggggcct

SEQ ID NO: 56727 - DNA, 20 bp, Artificial Sequence
  Description of Artificial Sequence: Synthetic oligonucleotide
  Target: ATXN2; (-) strand; PAM type: YTN; PAM sequence: CTC
tccgaagtgactaccggggc

SEQ ID NO: 56728 - DNA, 20 bp, Artificial Sequence
  Description of Artificial Sequence: Synthetic oligonucleotide
  Target: ATXN2; (-) strand; PAM type: YTN; PAM sequence: CTC
agctctccgaagtgactacc

SEQ ID NO: 56729 - DNA, 20 bp, Artificial Sequence
  Description of Artificial Sequence: Synthetic oligonucleotide
  Target: ATXN2; (-) strand; PAM type: YTN; PAM sequence: TTC
acagagtctcagctctccga

SEQ ID NO: 56730 - DNA, 20 bp, Artificial Sequence
  Description of Artificial Sequence: Synthetic oligonucleotide
  Target: ATXN2; (-) strand; PAM type: YTN; PAM sequence: CTT
cacagagtctcagctctccg

SEQ ID NO: 56731 - DNA, 20 bp, Artificial Sequence
  Description of Artificial Sequence: Synthetic oligonucleotide
  Target: ATXN2; (-) strand; PAM type: YTN; PAM sequence: TTG
gaagccaggcagggatgatg

SEQ ID NO: 56732 - DNA, 20 bp, Artificial Sequence
  Description of Artificial Sequence: Synthetic oligonucleotide
  Target: ATXN2; (-) strand; PAM type: YTN; PAM sequence: CTT
ggaagccaggcagggatgat

SEQ ID NO: 56733 - DNA, 20 bp, Artificial Sequence
  Description of Artificial Sequence: Synthetic oligonucleotide
  Target: ATXN2; (-) strand; PAM type: YTN; PAM sequence: TTA
ccttggaagccaggcaggga

SEQ ID NO: 56734 - DNA, 20 bp, Artificial Sequence
  Description of Artificial Sequence: Synthetic oligonucleotide
  Target: ATXN2; (-) strand; PAM type: YTN; PAM sequence: CTT
accttggaagccaggcaggg

SEQ ID NO: 56735 - DNA, 20 bp, Artificial Sequence
  Description of Artificial Sequence: Synthetic oligonucleotide
  Target: ATXN2; (-) strand; PAM type: YTN; PAM sequence: CTA
cacacttaccttggaagcca

SEQ ID NO: 56736 - DNA, 20 bp, Artificial Sequence
  Description of Artificial Sequence: Synthetic oligonucleotide
  Target: ATXN2; (-) strand; PAM type: YTN; PAM sequence: TTC
ccctacacacttaccttgga

SEQ ID NO: 56737 - DNA, 20 bp, Artificial Sequence
  Description of Artificial Sequence: Synthetic oligonucleotide
  Target: ATXN2; (-) strand; PAM type: YTN; PAM sequence: CTA
tatatatgtgtacatatata

SEQ ID NO: 56738 - DNA, 20 bp, Artificial Sequence
  Description of Artificial Sequence: Synthetic oligonucleotide
  Target: ATXN2; (-) strand; PAM type: YTN; PAM sequence: CTA
ctatatatatgtgtacatat

SEQ ID NO: 56739 - DNA, 20 bp, Artificial Sequence
  Description of Artificial Sequence: Synthetic oligonucleotide
  Target: ATXN2; (-) strand; PAM type: YTN; PAM sequence: CTC
actactatatatatgtgtac

SEQ ID NO: 56740 - DNA, 20 bp, Artificial Sequence
  Description of Artificial Sequence: Synthetic oligonucleotide
  Target: ATXN2; (-) strand; PAM type: YTN; PAM sequence: CTA
tatagcctcactactatata

SEQ ID NO: 56741 - DNA, 20 bp, Artificial Sequence
  Description of Artificial Sequence: Synthetic oligonucleotide
  Target: ATXN2; (-) strand; PAM type: YTN; PAM sequence: CTA
tgtctatatagcctcactac

SEQ ID NO: 56742 - DNA, 20 bp, Artificial Sequence
  Description of Artificial Sequence: Synthetic oligonucleotide
  Target: ATXN2; (-) strand; PAM type: YTN; PAM sequence: TTG
ctatgtctatatagcctcac

SEQ ID NO: 56743 - DNA, 20 bp, Artificial Sequence
  Description of Artificial Sequence: Synthetic oligonucleotide
  Target: ATXN2; (-) strand; PAM type: YTN; PAM sequence: TTT
gctatgtctatatagcctca

SEQ ID NO: 56744 - DNA, 20 bp, Artificial Sequence
  Description of Artificial Sequence: Synthetic oligonucleotide
  Target: ATXN2; (-) strand; PAM type: YTN; PAM sequence: CTT
tgctatgtctatatagcctc

SEQ ID NO: 56745 - DNA, 20 bp, Artificial Sequence
  Description of Artificial Sequence: Synthetic oligonucleotide
  Target: ATXN2; (-) strand; PAM type: YTN; PAM sequence: CTG
ctttgctatgtctatatagc

SEQ ID NO: 56746 - DNA, 20 bp, Artificial Sequence
  Description of Artificial Sequence: Synthetic oligonucleotide
  Target: ATXN2; (-) strand; PAM type: YTN; PAM sequence: CTG
tgtctgctttgctatgtcta

SEQ ID NO: 56747 - DNA, 20 bp, Artificial Sequence
  Description of Artificial Sequence: Synthetic oligonucleotide
  Target: ATXN2; (-) strand; PAM type: YTN; PAM sequence: TTC
tgtgtctgctttgctatgtc

SEQ ID NO: 56748 - DNA, 20 bp, Artificial Sequence
  Description of Artificial Sequence: Synthetic oligonucleotide
  Target: ATXN2; (-) strand; PAM type: YTN; PAM sequence: TTT
ctgtgtctgctttgctatgt

SEQ ID NO: 56749 - DNA, 20 bp, Artificial Sequence
  Description of Artificial Sequence: Synthetic oligonucleotide
  Target: ATXN2; (-) strand; PAM type: YTN; PAM sequence: CTT
tctgtgtctgctttgctatg

SEQ ID NO: 56750 - DNA, 20 bp, Artificial Sequence
  Description of Artificial Sequence: Synthetic oligonucleotide
  Target: ATXN2; (-) strand; PAM type: YTN; PAM sequence: TTC
ctttctgtgtctgctttgct

SEQ ID NO: 56751 - DNA, 20 bp, Artificial Sequence
  Description of Artificial Sequence: Synthetic oligonucleotide
  Target: ATXN2; (-) strand; PAM type: YTN; PAM sequence: TTT
cctttctgtgtctgctttgc

SEQ ID NO: 56752 - DNA, 20 bp, Artificial Sequence
  Description of Artificial Sequence: Synthetic oligonucleotide
  Target: ATXN2; (-) strand; PAM type: YTN; PAM sequence: CTT
tcctttctgtgtctgctttg

SEQ ID NO: 56753 - DNA, 20 bp, Artificial Sequence
  Description of Artificial Sequence: Synthetic oligonucleotide
  Target: ATXN2; (-) strand; PAM type: YTN; PAM sequence: TTC
tttcctttctgtgtctgctt

SEQ ID NO: 56754 - DNA, 20 bp, Artificial Sequence
  Description of Artificial Sequence: Synthetic oligonucleotide
  Target: ATXN2; (-) strand; PAM type: YTN; PAM sequence: CTT
ctttcctttctgtgtctgct

SEQ ID NO: 56755 - DNA, 20 bp, Artificial Sequence
  Description of Artificial Sequence: Synthetic oligonucleotide
  Target: ATXN2; (-) strand; PAM type: YTN; PAM sequence: CTG
gaatgcaacccagtccttct

SEQ ID NO: 56756 - DNA, 20 bp, Artificial Sequence
  Description of Artificial Sequence: Synthetic oligonucleotide
  Target: ATXN2; (-) strand; PAM type: YTN; PAM sequence: CTC
tggaatgcaacccagtcctt

SEQ ID NO: 56757 - DNA, 20 bp, Artificial Sequence
  Description of Artificial Sequence: Synthetic oligonucleotide
  Target: ATXN2; (-) strand; PAM type: YTN; PAM sequence: TTG
actctggaatgcaacccagt

SEQ ID NO: 56758 - DNA, 20 bp, Artificial Sequence
  Description of Artificial Sequence: Synthetic oligonucleotide
  Target: ATXN2; (-) strand; PAM type: YTN; PAM sequence: TTT
gactctggaatgcaacccag

SEQ ID NO: 56759 - DNA, 20 bp, Artificial Sequence
  Description of Artificial Sequence: Synthetic oligonucleotide
  Target: ATXN2; (-) strand; PAM type: YTN; PAM sequence: CTT
tgactctggaatgcaaccca

SEQ ID NO: 56760 - DNA, 20 bp, Artificial Sequence
  Description of Artificial Sequence: Synthetic oligonucleotide
  Target: ATXN2; (-) strand; PAM type: YTN; PAM sequence: TTA
aaaatatctttgactctgga

SEQ ID NO: 56761 - DNA, 20 bp, Artificial Sequence
  Description of Artificial Sequence: Synthetic oligonucleotide
  Target: ATXN2; (-) strand; PAM type: YTN; PAM sequence: CTT
aaaaatatctttgactctgg

SEQ ID NO: 56762 - DNA, 20 bp, Artificial Sequence
  Description of Artificial Sequence: Synthetic oligonucleotide
  Target: ATXN2; (-) strand; PAM type: YTN; PAM sequence: CTG
agaccttaaaaatatctttg

SEQ ID NO: 56763 - DNA, 20 bp, Artificial Sequence
  Description of Artificial Sequence: Synthetic oligonucleotide
  Target: ATXN2; (-) strand; PAM type: YTN; PAM sequence: TTC
caactgagaccttaaaaata

SEQ ID NO: 56764 - DNA, 20 bp, Artificial Sequence
  Description of Artificial Sequence: Synthetic oligonucleotide
  Target: ATXN2; (-) strand; PAM type: YTN; PAM sequence: TTT
ccaactgagaccttaaaaat

SEQ ID NO: 56765 - DNA, 20 bp, Artificial Sequence
  Description of Artificial Sequence: Synthetic oligonucleotide
  Target: ATXN2; (-) strand; PAM type: YTN; PAM sequence: TTT
tccaactgagaccttaaaaa

SEQ ID NO: 56766 - DNA, 20 bp, Artificial Sequence
  Description of Artificial Sequence: Synthetic oligonucleotide
  Target: ATXN2; (-) strand; PAM type: YTN; PAM sequence: TTA
gttttccaactgagacctta

SEQ ID NO: 56767 - DNA, 20 bp, Artificial Sequence
  Description of Artificial Sequence: Synthetic oligonucleotide
  Target: ATXN2; (-) strand; PAM type: YTN; PAM sequence: TTT
agttttccaactgagacctt

SEQ ID NO: 56768 - DNA, 20 bp, Artificial Sequence
  Description of Artificial Sequence: Synthetic oligonucleotide
  Target: ATXN2; (-) strand; PAM type: YTN; PAM sequence: CTT
tagttttccaactgagacct

SEQ ID NO: 56769 - DNA, 20 bp, Artificial Sequence
  Description of Artificial Sequence: Synthetic oligonucleotide
  Target: ATXN2; (-) strand; PAM type: YTN; PAM sequence: TTG
gtcagtcctttagttttcca

SEQ ID NO: 56770 - DNA, 20 bp, Artificial Sequence
  Description of Artificial Sequence: Synthetic oligonucleotide
  Target: ATXN2; (-) strand; PAM type: YTN; PAM sequence: CTG
attggtcagtcctttagttt

SEQ ID NO: 56771 - DNA, 20 bp, Artificial Sequence
  Description of Artificial Sequence: Synthetic oligonucleotide
  Target: ATXN2; (-) strand; PAM type: YTN; PAM sequence: TTG
tcatgggatcagtgaaggtg

SEQ ID NO: 56772 - DNA, 20 bp, Artificial Sequence
  Description of Artificial Sequence: Synthetic oligonucleotide
  Target: ATXN2; (-) strand; PAM type: YTN; PAM sequence: TTT
gtcatgggatcagtgaaggt

SEQ ID NO: 56773 - DNA, 20 bp, Artificial Sequence
  Description of Artificial Sequence: Synthetic oligonucleotide
  Target: ATXN2; (-) strand; PAM type: YTN; PAM sequence: TTT
tgtcatgggatcagtgaagg

SEQ ID NO: 56774 - DNA, 20 bp, Artificial Sequence
  Description of Artificial Sequence: Synthetic oligonucleotide
  Target: ATXN2; (-) strand; PAM type: YTN; PAM sequence: TTG
tgtggttttgtcatgggatc

SEQ ID NO: 56775 - DNA, 20 bp, Artificial Sequence
  Description of Artificial Sequence: Synthetic oligonucleotide
  Target: ATXN2; (-) strand; PAM type: YTN; PAM sequence: TTT
gtgtggttttgtcatgggat

SEQ ID NO: 56776 - DNA, 20 bp, Artificial Sequence
  Description of Artificial Sequence: Synthetic oligonucleotide
  Target: ATXN2; (-) strand; PAM type: YTN; PAM sequence: CTA
agggaatgtttgtgtggttt

SEQ ID NO: 56777 - DNA, 20 bp, Artificial Sequence
  Description of Artificial Sequence: Synthetic oligonucleotide
  Target: ATXN2; (-) strand; PAM type: YTN; PAM sequence: CTG
gccctaagggaatgtttgtg

SEQ ID NO: 56778 - DNA, 20 bp, Artificial Sequence
  Description of Artificial Sequence: Synthetic oligonucleotide
  Target: ATXN2; (-) strand; PAM type: YTN; PAM sequence: CTC
aaatacacgtgatctggccc

SEQ ID NO: 56779 - DNA, 20 bp, Artificial Sequence
  Description of Artificial Sequence: Synthetic oligonucleotide
  Target: ATXN2; (-) strand; PAM type: YTN; PAM sequence: CTC
tcaaatacacgtgatctggc

SEQ ID NO: 56780 - DNA, 20 bp, Artificial Sequence
  Description of Artificial Sequence: Synthetic oligonucleotide
  Target: ATXN2; (-) strand; PAM type: YTN; PAM sequence: TTC
cctctcaaatacacgtgatc

SEQ ID NO: 56781 - DNA, 20 bp, Artificial Sequence
  Description of Artificial Sequence: Synthetic oligonucleotide
  Target: ATXN2; (-) strand; PAM type: YTN; PAM sequence: TTT
ccctctcaaatacacgtgat

SEQ ID NO: 56782 - DNA, 20 bp, Artificial Sequence
  Description of Artificial Sequence: Synthetic oligonucleotide
  Target: ATXN2; (-) strand; PAM type: YTN; PAM sequence: CTT
tccctctcaaatacacgtga

SEQ ID NO: 56783 - DNA, 20 bp, Artificial Sequence
  Description of Artificial Sequence: Synthetic oligonucleotide
  Target: ATXN2; (-) strand; PAM type: YTN; PAM sequence: CTC
cctttccctctcaaatacac

SEQ ID NO: 56784 - DNA, 20 bp, Artificial Sequence
  Description of Artificial Sequence: Synthetic oligonucleotide
  Target: ATXN2; (-) strand; PAM type: YTN; PAM sequence: CTG
tctccctttccctctcaaat

SEQ ID NO: 56785 - DNA, 20 bp, Artificial Sequence
  Description of Artificial Sequence: Synthetic oligonucleotide
  Target: ATXN2; (-) strand; PAM type: YTN; PAM sequence: TTG
cctgtctccctttccctctc

SEQ ID NO: 56786 - DNA, 20 bp, Artificial Sequence
  Description of Artificial Sequence: Synthetic oligonucleotide
  Target: ATXN2; (-) strand; PAM type: YTN; PAM sequence: TTT
gcctgtctccctttccctct

SEQ ID NO: 56787 - DNA, 20 bp, Artificial Sequence
  Description of Artificial Sequence: Synthetic oligonucleotide
  Target: ATXN2; (-) strand; PAM type: YTN; PAM sequence: CTG
tgtgtcatgccatttgcctg

SEQ ID NO: 56788 - DNA, 20 bp, Artificial Sequence
  Description of Artificial Sequence: Synthetic oligonucleotide
  Target: ATXN2; (-) strand; PAM type: YTN; PAM sequence: CTA
ggaaaccctgtgtgtcatgc

SEQ ID NO: 56789 - DNA, 20 bp, Artificial Sequence
  Description of Artificial Sequence: Synthetic oligonucleotide
  Target: ATXN2; (-) strand; PAM type: YTN; PAM sequence: CTC
ccagctaggaaaccctgtgt

SEQ ID NO: 56790 - DNA, 20 bp, Artificial Sequence
  Description of Artificial Sequence: Synthetic oligonucleotide
  Target: ATXN2; (-) strand; PAM type: YTN; PAM sequence: CTC
tcccagctaggaaaccctgt

SEQ ID NO: 56791 - DNA, 20 bp, Artificial Sequence
  Description of Artificial Sequence: Synthetic oligonucleotide
  Target: ATXN2; (-) strand; PAM type: YTN; PAM sequence: CTA
gaggctctcccagctaggaa

SEQ ID NO: 56792 - DNA, 20 bp, Artificial Sequence
  Description of Artificial Sequence: Synthetic oligonucleotide
  Target: ATXN2; (-) strand; PAM type: YTN; PAM sequence: TTA
tcagtaagcagctagaggct

SEQ ID NO: 56793 - DNA, 20 bp, Artificial Sequence
  Description of Artificial Sequence: Synthetic oligonucleotide
  Target: ATXN2; (-) strand; PAM type: YTN; PAM sequence: CTG
tgaaggccaagtagaatgtg

SEQ ID NO: 56794 - DNA, 20 bp, Artificial Sequence
  Description of Artificial Sequence: Synthetic oligonucleotide
  Target: ATXN2; (-) strand; PAM type: YTN; PAM sequence: TTC
tgtgaaggccaagtagaatg

SEQ ID NO: 56795 - DNA, 20 bp, Artificial Sequence
  Description of Artificial Sequence: Synthetic oligonucleotide
  Target: ATXN2; (-) strand; PAM type: YTN; PAM sequence: TTT
ctgtgaaggccaagtagaat

SEQ ID NO: 56796 - DNA, 20 bp, Artificial Sequence
  Description of Artificial Sequence: Synthetic oligonucleotide
  Target: ATXN2; (-) strand; PAM type: YTN; PAM sequence: CTT
tctgtgaaggccaagtagaa

SEQ ID NO: 56797 - DNA, 20 bp, Artificial Sequence
  Description of Artificial Sequence: Synthetic oligonucleotide
  Target: ATXN2; (-) strand; PAM type: YTN; PAM sequence: TTA
gccaactttctgtgaaggcc

SEQ ID NO: 56798 - DNA, 20 bp, Artificial Sequence
  Description of Artificial Sequence: Synthetic oligonucleotide
  Target: ATXN2; (-) strand; PAM type: YTN; PAM sequence: TTT
agccaactttctgtgaaggc

SEQ ID NO: 56799 - DNA, 20 bp, Artificial Sequence
  Description of Artificial Sequence: Synthetic oligonucleotide
  Target: ATXN2; (-) strand; PAM type: YTN; PAM sequence: CTT
tagccaactttctgtgaagg

SEQ ID NO: 56800 - DNA, 20 bp, Artificial Sequence
  Description of Artificial Sequence: Synthetic oligonucleotide
  Target: ATXN2; (-) strand; PAM type: YTN; PAM sequence: CTC
aggtaataccagctttagcc

SEQ ID NO: 56801 - DNA, 20 bp, Artificial Sequence
  Description of Artificial Sequence: Synthetic oligonucleotide
  Target: ATXN2; (-) strand; PAM type: YTN; PAM sequence: TTC
agccggcgtataccaaccca

SEQ ID NO: 56802 - DNA, 20 bp, Artificial Sequence
  Description of Artificial Sequence: Synthetic oligonucleotide
  Target: ATXN2; (-) strand; PAM type: YTN; PAM sequence: CTC
acgttcagccggcgtatacc

SEQ ID NO: 56803 - DNA, 20 bp, Artificial Sequence
  Description of Artificial Sequence: Synthetic oligonucleotide
  Target: ATXN2; (-) strand; PAM type: YTN; PAM sequence: TTC
tcacgttcagccggcgtata

SEQ ID NO: 56804 - DNA, 20 bp, Artificial Sequence
  Description of Artificial Sequence: Synthetic oligonucleotide
  Target: ATXN2; (-) strand; PAM type: YTN; PAM sequence: CTT
ctcacgttcagccggcgtat

SEQ ID NO: 56805 - DNA, 20 bp, Artificial Sequence
  Description of Artificial Sequence: Synthetic oligonucleotide
  Target: ATXN2; (-) strand; PAM type: YTN; PAM sequence: TTA
cgatccatccttctcacgtt

SEQ ID NO: 56806 - DNA, 20 bp, Artificial Sequence
  Description of Artificial Sequence: Synthetic oligonucleotide
  Target: ATXN2; (-) strand; PAM type: YTN; PAM sequence: TTT
acgatccatccttctcacgt

SEQ ID NO: 56807 - DNA, 20 bp, Artificial Sequence
  Description of Artificial Sequence: Synthetic oligonucleotide
  Target: ATXN2; (-) strand; PAM type: YTN; PAM sequence: CTT
tacgatccatccttctcacg

SEQ ID NO: 56808 - DNA, 20 bp, Artificial Sequence
  Description of Artificial Sequence: Synthetic oligonucleotide
  Target: ATXN2; (-) strand; PAM type: YTN; PAM sequence: CTG
tctttacgatccatccttct

SEQ ID NO: 56809 - DNA, 20 bp, Artificial Sequence
  Description of Artificial Sequence: Synthetic oligonucleotide
  Target: ATXN2; (-) strand; PAM type: YTN; PAM sequence: TTC
ccagcagcacaacagactgt

SEQ ID NO: 56810 - DNA, 20 bp, Artificial Sequence
  Description of Artificial Sequence: Synthetic oligonucleotide
  Target: ATXN2; (-) strand; PAM type: YTN; PAM sequence: TTT
cccagcagcacaacagactg

SEQ ID NO: 56811 - DNA, 20 bp, Artificial Sequence
  Description of Artificial Sequence: Synthetic oligonucleotide
  Target: ATXN2; (-) strand; PAM type: YTN; PAM sequence: CTC
caacacgcagtcgccacaga

SEQ ID NO: 56812 - DNA, 20 bp, Artificial Sequence
  Description of Artificial Sequence: Synthetic oligonucleotide
  Target: ATXN2; (-) strand; PAM type: YTN; PAM sequence: CTG
cctccaacacgcagtcgcca

SEQ ID NO: 56813 - DNA, 20 bp, Artificial Sequence
  Description of Artificial Sequence: Synthetic oligonucleotide
  Target: ATXN2; (-) strand; PAM type: YTN; PAM sequence: CTC
catgacacctgcctccaaca

SEQ ID NO: 56814 - DNA, 20 bp, Artificial Sequence
  Description of Artificial Sequence: Synthetic oligonucleotide
  Target: ATXN2; (-) strand; PAM type: YTN; PAM sequence: CTC
caccctccatgacacctgcc

SEQ ID NO: 56815 - DNA, 20 bp, Artificial Sequence
  Description of Artificial Sequence: Synthetic oligonucleotide
  Target: ATXN2; (-) strand; PAM type: YTN; PAM sequence: TTG
cgccaactccaccctccatg

SEQ ID NO: 56816 - DNA, 20 bp, Artificial Sequence
  Description of Artificial Sequence: Synthetic oligonucleotide
  Target: ATXN2; (-) strand; PAM type: YTN; PAM sequence: CTT
gcgccaactccaccctccat

SEQ ID NO: 56817 - DNA, 20 bp, Artificial Sequence
  Description of Artificial Sequence: Synthetic oligonucleotide
  Target: ATXN2; (-) strand; PAM type: YTN; PAM sequence: TTA
ccacgcggggcttgcgccaa

SEQ ID NO: 56818 - DNA, 20 bp, Artificial Sequence
  Description of Artificial Sequence: Synthetic oligonucleotide
  Target: ATXN2; (-) strand; PAM type: YTN; PAM sequence: TTT
accacgcggggcttgcgcca

SEQ ID NO: 56819 - DNA, 20 bp, Artificial Sequence
  Description of Artificial Sequence: Synthetic oligonucleotide
  Target: ATXN2; (-) strand; PAM type: YTN; PAM sequence: CTG
gccagtccacagcagcagtc

SEQ ID NO: 56820 - DNA, 20 bp, Artificial Sequence
  Description of Artificial Sequence: Synthetic oligonucleotide
  Target: ATXN2; (-) strand; PAM type: YTN; PAM sequence: CTC
catctggccagtccacagca

SEQ ID NO: 56821 - DNA, 20 bp, Artificial Sequence
  Description of Artificial Sequence: Synthetic oligonucleotide
  Target: ATXN2; (-) strand; PAM type: YTN; PAM sequence: CTC
tccatctggccagtccacag

SEQ ID NO: 56822 - DNA, 20 bp, Artificial Sequence
  Description of Artificial Sequence: Synthetic oligonucleotide
  Target: ATXN2; (-) strand; PAM type: YTN; PAM sequence: TTG
cagcaccatcagcaccaggc

SEQ ID NO: 56823 - DNA, 20 bp, Artificial Sequence
  Description of Artificial Sequence: Synthetic oligonucleotide
  Target: ATXN2; (-) strand; PAM type: YTN; PAM sequence: TTT
gcagcaccatcagcaccagg

SEQ ID NO: 56824 - DNA, 20 bp, Artificial Sequence
  Description of Artificial Sequence: Synthetic oligonucleotide
  Target: ATXN2; (-) strand; PAM type: YTN; PAM sequence: CTT
tgcagcaccatcagcaccag

SEQ ID NO: 56825 - DNA, 20 bp, Artificial Sequence
  Description of Artificial Sequence: Synthetic oligonucleotide
  Target: ATXN2; (-) strand; PAM type: YTN; PAM sequence: CTG
tcgctttgcagcaccatcag

SEQ ID NO: 56826 - DNA, 20 bp, Artificial Sequence
  Description of Artificial Sequence: Synthetic oligonucleotide
  Target: ATXN2; (-) strand; PAM type: YTN; PAM sequence: TTC
ctgtcgctttgcagcaccat

SEQ ID NO: 56827 - DNA, 20 bp, Artificial Sequence
  Description of Artificial Sequence: Synthetic oligonucleotide
  Target: ATXN2; (-) strand; PAM type: YTN; PAM sequence: TTT
cctgtcgctttgcagcacca

SEQ ID NO: 56828 - DNA, 20 bp, Artificial Sequence
  Description of Artificial Sequence: Synthetic oligonucleotide
  Target: ATXN2; (-) strand; PAM type: YTN; PAM sequence: CTT
tcctgtcgctttgcagcacc

SEQ ID NO: 56829 - DNA, 20 bp, Artificial Sequence
  Description of Artificial Sequence: Synthetic oligonucleotide
  Target: ATXN2; (-) strand; PAM type: YTN; PAM sequence: TTC
tttcctgtcgctttgcagca

SEQ ID NO: 56830 - DNA, 20 bp, Artificial Sequence
  Description of Artificial Sequence: Synthetic oligonucleotide
  Target: ATXN2; (-) strand; PAM type: YTN; PAM sequence: CTC
aattctttcctgtcgctttg

SEQ ID NO: 56831 - DNA, 20 bp, Artificial Sequence
  Description of Artificial Sequence: Synthetic oligonucleotide
  Target: ATXN2; (-) strand; PAM type: YTN; PAM sequence: CTC
tcaattctttcctgtcgctt

SEQ ID NO: 56832 - DNA, 20 bp, Artificial Sequence
  Description of Artificial Sequence: Synthetic oligonucleotide
  Target: ATXN2; (-) strand; PAM type: YTN; PAM sequence: TTC
ctctcaattctttcctgtcg

SEQ ID NO: 56833 - DNA, 20 bp, Artificial Sequence
  Description of Artificial Sequence: Synthetic oligonucleotide
  Target: ATXN2; (-) strand; PAM type: YTN; PAM sequence: TTT
cctctcaattctttcctgtc

SEQ ID NO: 56834 - DNA, 20 bp, Artificial Sequence
  Description of Artificial Sequence: Synthetic oligonucleotide
  Target: ATXN2; (-) strand; PAM type: YTN; PAM sequence: TTT
tcctctcaattctttcctgt

SEQ ID NO: 56835 - DNA, 20 bp, Artificial Sequence
  Description of Artificial Sequence: Synthetic oligonucleotide
  Target: ATXN2; (-) strand; PAM type: YTN; PAM sequence: TTA
aagaagttttcctctcaatt

SEQ ID NO: 56836 - DNA, 20 bp, Artificial Sequence
  Description of Artificial Sequence: Synthetic oligonucleotide
  Target: ATXN2; (-) strand; PAM type: YTN; PAM sequence: TTC
attaaagaagttttcctctc

SEQ ID NO: 56837 - DNA, 20 bp, Artificial Sequence
  Description of Artificial Sequence: Synthetic oligonucleotide
  Target: ATXN2; (-) strand; PAM type: YTN; PAM sequence: TTT
cattaaagaagttttcctct

SEQ ID NO: 56838 - DNA, 20 bp, Artificial Sequence
  Description of Artificial Sequence: Synthetic oligonucleotide
  Target: ATXN2; (-) strand; PAM type: YTN; PAM sequence: TTT
tcattaaagaagttttcctc

SEQ ID NO: 56839 - DNA, 20 bp, Artificial Sequence
  Description of Artificial Sequence: Synthetic oligonucleotide
  Target: ATXN2; (-) strand; PAM type: YTN; PAM sequence: CTT
ttcattaaagaagttttcct

SEQ ID NO: 56840 - DNA, 20 bp, Artificial Sequence
  Description of Artificial Sequence: Synthetic oligonucleotide
  Target: ATXN2; (-) strand; PAM type: YTN; PAM sequence: CTG
cttttcattaaagaagtttt

SEQ ID NO: 56841 - DNA, 20 bp, Artificial Sequence
  Description of Artificial Sequence: Synthetic oligonucleotide
  Target: ATXN2; (-) strand; PAM type: YTN; PAM sequence: TTG
gctgcttttcattaaagaag

SEQ ID NO: 56842 - DNA, 20 bp, Artificial Sequence
  Description of Artificial Sequence: Synthetic oligonucleotide
  Target: ATXN2; (-) strand; PAM type: YTN; PAM sequence: CTT
ggctgcttttcattaaagaa

SEQ ID NO: 56843 - DNA, 20 bp, Artificial Sequence
  Description of Artificial Sequence: Synthetic oligonucleotide
  Target: ATXN2; (-) strand; PAM type: YTN; PAM sequence: TTG
tgggtatcccttggctgctt

SEQ ID NO: 56844 - DNA, 20 bp, Artificial Sequence
  Description of Artificial Sequence: Synthetic oligonucleotide
  Target: ATXN2; (-) strand; PAM type: YTN; PAM sequence: TTT
gtgggtatcccttggctgct

SEQ ID NO: 56845 - DNA, 20 bp, Artificial Sequence
  Description of Artificial Sequence: Synthetic oligonucleotide
  Target: ATXN2; (-) strand; PAM type: YTN; PAM sequence: CTT
tgtgggtatcccttggctgc

SEQ ID NO: 56846 - DNA, 20 bp, Artificial Sequence
  Description of Artificial Sequence: Synthetic oligonucleotide
  Target: ATXN2; (-) strand; PAM type: YTN; PAM sequence: TTA
gctttgtgggtatcccttgg

SEQ ID NO: 56847 - DNA, 20 bp, Artificial Sequence
  Description of Artificial Sequence: Synthetic oligonucleotide
  Target: ATXN2; (-) strand; PAM type: YTN; PAM sequence: CTT
agctttgtgggtatcccttg

SEQ ID NO: 56848 - DNA, 20 bp, Artificial Sequence
  Description of Artificial Sequence: Synthetic oligonucleotide
  Target: ATXN2; (-) strand; PAM type: YTN; PAM sequence: CTC
atcataggcccaagtgtgca

SEQ ID NO: 56849 - DNA, 20 bp, Artificial Sequence
  Description of Artificial Sequence: Synthetic oligonucleotide
  Target: ATXN2; (-) strand; PAM type: YTN; PAM sequence: TTC
cagtgaccctcatcataggc

SEQ ID NO: 56850 - DNA, 20 bp, Artificial Sequence
  Description of Artificial Sequence: Synthetic oligonucleotide
  Target: ATXN2; (-) strand; PAM type: YTN; PAM sequence: TTT
ccagtgaccctcatcatagg

SEQ ID NO: 56851 - DNA, 20 bp, Artificial Sequence
  Description of Artificial Sequence: Synthetic oligonucleotide
  Target: ATXN2; (-) strand; PAM type: YTN; PAM sequence: CTT
tccagtgaccctcatcatag

SEQ ID NO: 56852 - DNA, 20 bp, Artificial Sequence
  Description of Artificial Sequence: Synthetic oligonucleotide
  Target: ATXN2; (-) strand; PAM type: YTN; PAM sequence: CTG
tactttccagtgaccctcat

SEQ ID NO: 56853 - DNA, 20 bp, Artificial Sequence
  Description of Artificial Sequence: Synthetic oligonucleotide
  Target: ATXN2; (-) strand; PAM type: YTN; PAM sequence: CTC
ctgtactttccagtgaccct

SEQ ID NO: 56854 - DNA, 20 bp, Artificial Sequence
  Description of Artificial Sequence: Synthetic oligonucleotide
  Target: ATXN2; (-) strand; PAM type: YTN; PAM sequence: TTC
tcctgtactttccagtgacc

SEQ ID NO: 56855 - DNA, 20 bp, Artificial Sequence
  Description of Artificial Sequence: Synthetic oligonucleotide
  Target: ATXN2; (-) strand; PAM type: YTN; PAM sequence: CTG
tacattctcctgtactttcc

SEQ ID NO: 56856 - DNA, 20 bp, Artificial Sequence
  Description of Artificial Sequence: Synthetic oligonucleotide
  Target: ATXN2; (-) strand; PAM type: YTN; PAM sequence: TTA
ccaccctgtacattctcctg

SEQ ID NO: 56857 - DNA, 20 bp, Artificial Sequence
  Description of Artificial Sequence: Synthetic oligonucleotide
  Target: ATXN2; (-) strand; PAM type: YTN; PAM sequence: CTT
accaccctgtacattctcct

SEQ ID NO: 56858 - DNA, 20 bp, Artificial Sequence
  Description of Artificial Sequence: Synthetic oligonucleotide
  Target: ATXN2; (-) strand; PAM type: YTN; PAM sequence: CTC
ttaccaccctgtacattctc

SEQ ID NO: 56859 - DNA, 20 bp, Artificial Sequence
  Description of Artificial Sequence: Synthetic oligonucleotide
  Target: ATXN2; (-) strand; PAM type: YTN; PAM sequence: TTG
ctcttaccaccctgtacatt

SEQ ID NO: 56860 - DNA, 20 bp, Artificial Sequence
  Description of Artificial Sequence: Synthetic oligonucleotide
  Target: ATXN2; (-) strand; PAM type: YTN; PAM sequence: CTT
gctcttaccaccctgtacat

SEQ ID NO: 56861 - DNA, 20 bp, Artificial Sequence
  Description of Artificial Sequence: Synthetic oligonucleotide
  Target: ATXN2; (-) strand; PAM type: YTN; PAM sequence: CTC
cagccttgctcttaccaccc

SEQ ID NO: 56862 - DNA, 20 bp, Artificial Sequence
  Description of Artificial Sequence: Synthetic oligonucleotide
  Target: ATXN2; (-) strand; PAM type: YTN; PAM sequence: TTG
tccagatgggaggcacctcc

SEQ ID NO: 56863 - DNA, 20 bp, Artificial Sequence
  Description of Artificial Sequence: Synthetic oligonucleotide
  Target: ATXN2; (-) strand; PAM type: YTN; PAM sequence: CTA
gaaaggagttgtccagatgg

SEQ ID NO: 56864 - DNA, 20 bp, Artificial Sequence
  Description of Artificial Sequence: Synthetic oligonucleotide
  Target: ATXN2; (-) strand; PAM type: YTN; PAM sequence: CTG
taccctagaaaggagttgtc

SEQ ID NO: 56865 - DNA, 20 bp, Artificial Sequence
  Description of Artificial Sequence: Synthetic oligonucleotide
  Target: ATXN2; (-) strand; PAM type: YTN; PAM sequence: TTC
tgtaccctagaaaggagttg

SEQ ID NO: 56866 - DNA, 20 bp, Artificial Sequence
  Description of Artificial Sequence: Synthetic oligonucleotide
  Target: ATXN2; (-) strand; PAM type: YTN; PAM sequence: CTT
ctgtaccctagaaaggagtt

SEQ ID NO: 56867 - DNA, 20 bp, Artificial Sequence
  Description of Artificial Sequence: Synthetic oligonucleotide
  Target: ATXN2; (-) strand; PAM type: YTN; PAM sequence: CTG
agaatcaggcttctgtaccc

SEQ ID NO: 56868 - DNA, 20 bp, Artificial Sequence
  Description of Artificial Sequence: Synthetic oligonucleotide
  Target: ATXN2; (-) strand; PAM type: YTN; PAM sequence: CTG
ccagactgagaatcaggctt

SEQ ID NO: 56869 - DNA, 20 bp, Artificial Sequence
  Description of Artificial Sequence: Synthetic oligonucleotide
  Target: ATXN2; (-) strand; PAM type: YTN; PAM sequence: CTA
actgccagactgagaatcag

SEQ ID NO: 56870 - DNA, 20 bp, Artificial Sequence
  Description of Artificial Sequence: Synthetic oligonucleotide
  Target: ATXN2; (-) strand; PAM type: YTN; PAM sequence: TTC
taactgccagactgagaatc

SEQ ID NO: 56871 - DNA, 20 bp, Artificial Sequence
  Description of Artificial Sequence: Synthetic oligonucleotide
  Target: ATXN2; (-) strand; PAM type: YTN; PAM sequence: TTT
ctaactgccagactgagaat

SEQ ID NO: 56872 - DNA, 20 bp, Artificial Sequence
  Description of Artificial Sequence: Synthetic oligonucleotide
  Target: ATXN2; (-) strand; PAM type: YTN; PAM sequence: CTC
agaagtttctaactgccaga

SEQ ID NO: 56873 - DNA, 20 bp, Artificial Sequence
  Description of Artificial Sequence: Synthetic oligonucleotide
  Target: ATXN2; (-) strand; PAM type: YTN; PAM sequence: TTA
gtatgtatgctcagaagttt

SEQ ID NO: 56874 - DNA, 20 bp, Artificial Sequence
  Description of Artificial Sequence: Synthetic oligonucleotide
  Target: ATXN2; (-) strand; PAM type: YTN; PAM sequence: TTT
agtatgtatgctcagaagtt

SEQ ID NO: 56875 - DNA, 20 bp, Artificial Sequence
  Description of Artificial Sequence: Synthetic oligonucleotide
  Target: ATXN2; (-) strand; PAM type: YTN; PAM sequence: CTT
tagtatgtatgctcagaagt

SEQ ID NO: 56876 - DNA, 20 bp, Artificial Sequence
  Description of Artificial Sequence: Synthetic oligonucleotide
  Target: ATXN2; (-) strand; PAM type: YTN; PAM sequence: TTG
actttagtatgtatgctcag

SEQ ID NO: 56877 - DNA, 20 bp, Artificial Sequence
  Description of Artificial Sequence: Synthetic oligonucleotide
  Target: ATXN2; (-) strand; PAM type: YTN; PAM sequence: TTT
gactttagtatgtatgctca

SEQ ID NO: 56878 - DNA, 20 bp, Artificial Sequence
  Description of Artificial Sequence: Synthetic oligonucleotide
  Target: ATXN2; (-) strand; PAM type: YTN; PAM sequence: TTT
tgactttagtatgtatgctc

SEQ ID NO: 56879 - DNA, 20 bp, Artificial Sequence
  Description of Artificial Sequence: Synthetic oligonucleotide
  Target: ATXN2; (-) strand; PAM type: YTN; PAM sequence: TTT
ttgactttagtatgtatgct

SEQ ID NO: 56880 - DNA, 20 bp, Artificial Sequence
  Description of Artificial Sequence: Synthetic oligonucleotide
  Target: ATXN2; (-) strand; PAM type: YTN; PAM sequence: TTT
tttgactttagtatgtatgc

SEQ ID NO: 56881 - DNA, 20 bp, Artificial Sequence
  Description of Artificial Sequence: Synthetic oligonucleotide
  Target: ATXN2; (-) strand; PAM type: YTN; PAM sequence: CTT
ttttgactttagtatgtatg

SEQ ID NO: 56882 - DNA, 20 bp, Artificial Sequence
  Description of Artificial Sequence: Synthetic oligonucleotide
  Target: ATXN2; (-) strand; PAM type: YTN; PAM sequence: CTG
gggcagtagtcttttttgac

SEQ ID NO: 56883 - DNA, 20 bp, Artificial Sequence
  Description of Artificial Sequence: Synthetic oligonucleotide
  Target: ATXN2; (-) strand; PAM type: YTN; PAM sequence: TTC
cctggggcagtagtcttttt

SEQ ID NO: 56884 - DNA, 20 bp, Artificial Sequence
  Description of Artificial Sequence: Synthetic oligonucleotide
  Target: ATXN2; (-) strand; PAM type: YTN; PAM sequence: CTA
tcagttccctggggcagtag

SEQ ID NO: 56885 - DNA, 20 bp, Artificial Sequence
  Description of Artificial Sequence: Synthetic oligonucleotide
  Target: ATXN2; (-) strand; PAM type: YTN; PAM sequence: TTG
atatctatcagttccctggg

SEQ ID NO: 56886 - DNA, 20 bp, Artificial Sequence
  Description of Artificial Sequence: Synthetic oligonucleotide
  Target: ATXN2; (-) strand; PAM type: YTN; PAM sequence: TTT
gatatctatcagttccctgg

SEQ ID NO: 56887 - DNA, 20 bp, Artificial Sequence
  Description of Artificial Sequence: Synthetic oligonucleotide
  Target: ATXN2; (-) strand; PAM type: YTN; PAM sequence: CTT
tgatatctatcagttccctg

SEQ ID NO: 56888 - DNA, 20 bp, Artificial Sequence
  Description of Artificial Sequence: Synthetic oligonucleotide
  Target: ATXN2; (-) strand; PAM type: YTN; PAM sequence: TTA
aagatgtctttgatatctat

SEQ ID NO: 56889 - DNA, 20 bp, Artificial Sequence
  Description of Artificial Sequence: Synthetic oligonucleotide
  Target: ATXN2; (-) strand; PAM type: YTN; PAM sequence: CTA
atggaggcagttaaagatgt

SEQ ID NO: 56890 - DNA, 20 bp, Artificial Sequence
  Description of Artificial Sequence: Synthetic oligonucleotide
  Target: ATXN2; (-) strand; PAM type: YTN; PAM sequence: TTG
ctaatggaggcagttaaaga

SEQ ID NO: 56891 - DNA, 20 bp, Artificial Sequence
  Description of Artificial Sequence: Synthetic oligonucleotide
  Target: ATXN2; (-) strand; PAM type: YTN; PAM sequence: TTT
gctaatggaggcagttaaag

SEQ ID NO: 56892 - DNA, 20 bp, Artificial Sequence
  Description of Artificial Sequence: Synthetic oligonucleotide
  Target: ATXN2; (-) strand; PAM type: YTN; PAM sequence: TTA
tgtttgctaatggaggcagt

SEQ ID NO: 56893 - DNA, 20 bp, Artificial Sequence
  Description of Artificial Sequence: Synthetic oligonucleotide
  Target: ATXN2; (-) strand; PAM type: YTN; PAM sequence: TTG
aattatgtttgctaatggag

SEQ ID NO: 56894 - DNA, 20 bp, Artificial Sequence
  Description of Artificial Sequence: Synthetic oligonucleotide
  Target: ATXN2; (-) strand; PAM type: YTN; PAM sequence: CTT
gaattatgtttgctaatgga

SEQ ID NO: 56895 - DNA, 20 bp, Artificial Sequence
  Description of Artificial Sequence: Synthetic oligonucleotide
  Target: ATXN2; (-) strand; PAM type: YTN; PAM sequence: TTC
ttgaattatgtttgctaatg

SEQ ID NO: 56896 - DNA, 20 bp, Artificial Sequence
  Description of Artificial Sequence: Synthetic oligonucleotide
  Target: ATXN2; (-) strand; PAM type: YTN; PAM sequence: CTT
cttgaattatgtttgctaat

SEQ ID NO: 56897 - DNA, 20 bp, Artificial Sequence
  Description of Artificial Sequence: Synthetic oligonucleotide
  Target: ATXN2; (-) strand; PAM type: YTN; PAM sequence: CTA
tgagcttcttgaattatgtt

SEQ ID NO: 56898 - DNA, 20 bp, Artificial Sequence
  Description of Artificial Sequence: Synthetic oligonucleotide
  Target: ATXN2; (-) strand; PAM type: YTN; PAM sequence: TTC
ctatgagcttcttgaattat

SEQ ID NO: 56899 - DNA, 20 bp, Artificial Sequence
  Description of Artificial Sequence: Synthetic oligonucleotide
  Target: ATXN2; (-) strand; PAM type: YTN; PAM sequence: TTT
cctatgagcttcttgaatta

SEQ ID NO: 56900 - DNA, 20 bp, Artificial Sequence
  Description of Artificial Sequence: Synthetic oligonucleotide
  Target: ATXN2; (-) strand; PAM type: YTN; PAM sequence: TTT
tcctatgagcttcttgaatt

SEQ ID NO: 56901 - DNA, 20 bp, Artificial Sequence
  Description of Artificial Sequence: Synthetic oligonucleotide
  Target: ATXN2; (-) strand; PAM type: YTN; PAM sequence: TTA
ttttcctatgagcttcttga

SEQ ID NO: 56902 - DNA, 20 bp, Artificial Sequence
  Description of Artificial Sequence: Synthetic oligonucleotide
  Target: ATXN2; (-) strand; PAM type: YTN; PAM sequence: TTA
tgtgatgaggttattttcct

SEQ ID NO: 56903 - DNA, 20 bp, Artificial Sequence
  Description of Artificial Sequence: Synthetic oligonucleotide
  Target: ATXN2; (-) strand; PAM type: YTN; PAM sequence: TTT
atgtgatgaggttattttcc

SEQ ID NO: 56904 - DNA, 20 bp, Artificial Sequence
  Description of Artificial Sequence: Synthetic oligonucleotide
  Target: ATXN2; (-) strand; PAM type: YTN; PAM sequence: CTA
aggtttatgtgatgaggtta

SEQ ID NO: 56905 - DNA, 20 bp, Artificial Sequence
  Description of Artificial Sequence: Synthetic oligonucleotide
  Target: ATXN2; (-) strand; PAM type: YTN; PAM sequence: TTC
taaggtttatgtgatgaggt

SEQ ID NO: 56906 - DNA, 20 bp, Artificial Sequence
  Description of Artificial Sequence: Synthetic oligonucleotide
  Target: ATXN2; (-) strand; PAM type: YTN; PAM sequence: TTT
ctaaggtttatgtgatgagg

SEQ ID NO: 56907 - DNA, 20 bp, Artificial Sequence
  Description of Artificial Sequence: Synthetic oligonucleotide
  Target: ATXN2; (-) strand; PAM type: YTN; PAM sequence: TTA
atttctaaggtttatgtgat

SEQ ID NO: 56908 - DNA, 20 bp, Artificial Sequence
  Description of Artificial Sequence: Synthetic oligonucleotide
  Target: ATXN2; (-) strand; PAM type: YTN; PAM sequence: TTT
aatttctaaggtttatgtga

SEQ ID NO: 56909 - DNA, 20 bp, Artificial Sequence
  Description of Artificial Sequence: Synthetic oligonucleotide
  Target: ATXN2; (-) strand; PAM type: YTN; PAM sequence: TTT
taatttctaaggtttatgtg

SEQ ID NO: 56910 - DNA, 20 bp, Artificial Sequence
  Description of Artificial Sequence: Synthetic oligonucleotide
  Target: ATXN2; (-) strand; PAM type: YTN; PAM sequence: TTT
ttaatttctaaggtttatgt

SEQ ID NO: 56911 - DNA, 20 bp, Artificial Sequence
  Description of Artificial Sequence: Synthetic oligonucleotide
  Target: ATXN2; (-) strand; PAM type: YTN; PAM sequence: CTT
tttaatttctaaggtttatg

SEQ ID NO: 56912 - DNA, 20 bp, Artificial Sequence
  Description of Artificial Sequence: Synthetic oligonucleotide
  Target: ATXN2; (-) strand; PAM type: YTN; PAM sequence: TTG
ggactttttaatttctaagg

SEQ ID NO: 56913 - DNA, 20 bp, Artificial Sequence
  Description of Artificial Sequence: Synthetic oligonucleotide
  Target: ATXN2; (-) strand; PAM type: YTN; PAM sequence: CTT
gggactttttaatttctaag

SEQ ID NO: 56914 - DNA, 20 bp, Artificial Sequence
  Description of Artificial Sequence: Synthetic oligonucleotide
  Target: ATXN2; (-) strand; PAM type: YTN; PAM sequence: TTG
cttgggactttttaatttct

SEQ ID NO: 56915 - DNA, 20 bp, Artificial Sequence
  Description of Artificial Sequence: Synthetic oligonucleotide
  Target: ATXN2; (-) strand; PAM type: YTN; PAM sequence: TTT
gcttgggactttttaatttc

SEQ ID NO: 56916 - DNA, 20 bp, Artificial Sequence
  Description of Artificial Sequence: Synthetic oligonucleotide
  Target: ATXN2; (-) strand; PAM type: YTN; PAM sequence: CTA
tttgcttgggactttttaat

SEQ ID NO: 56917 - DNA, 20 bp, Artificial Sequence
  Description of Artificial Sequence: Synthetic oligonucleotide
  Target: ATXN2; (-) strand; PAM type: YTN; PAM sequence: TTC
ctatttgcttgggacttttt

SEQ ID NO: 56918 - DNA, 20 bp, Artificial Sequence
  Description of Artificial Sequence: Synthetic oligonucleotide
  Target: ATXN2; (-) strand; PAM type: YTN; PAM sequence: TTC
ataaggcaaattcctatttg

SEQ ID NO: 56919 - DNA, 20 bp, Artificial Sequence
  Description of Artificial Sequence: Synthetic oligonucleotide
  Target: ATXN2; (-) strand; PAM type: YTN; PAM sequence: TTA
acataaagttcataaggcaa

SEQ ID NO: 56920 - DNA, 20 bp, Artificial Sequence
  Description of Artificial Sequence: Synthetic oligonucleotide
  Target: ATXN2; (-) strand; PAM type: YTN; PAM sequence: TTT
aacataaagttcataaggca

SEQ ID NO: 56921 - DNA, 20 bp, Artificial Sequence
  Description of Artificial Sequence: Synthetic oligonucleotide
  Target: ATXN2; (-) strand; PAM type: YTN; PAM sequence: TTG
cagtaatgaaaaatcaaatt

SEQ ID NO: 56922 - DNA, 20 bp, Artificial Sequence
  Description of Artificial Sequence: Synthetic oligonucleotide
  Target: ATXN2; (-) strand; PAM type: YTN; PAM sequence: CTT
gcagtaatgaaaaatcaaat

SEQ ID NO: 56923 - DNA, 20 bp, Artificial Sequence
  Description of Artificial Sequence: Synthetic oligonucleotide
  Target: ATXN2; (-) strand; PAM type: YTN; PAM sequence: CTG
gaaacttgcagtaatgaaaa

SEQ ID NO: 56924 - DNA, 20 bp, Artificial Sequence
  Description of Artificial Sequence: Synthetic oligonucleotide
  Target: ATXN2; (-) strand; PAM type: YTN; PAM sequence: CTC
tggaaacttgcagtaatgaa

SEQ ID NO: 56925 - DNA, 20 bp, Artificial Sequence
  Description of Artificial Sequence: Synthetic oligonucleotide
  Target: ATXN2; (-) strand; PAM type: YTN; PAM sequence: TTG
gataagctctggaaacttgc

SEQ ID NO: 56926 - DNA, 20 bp, Artificial Sequence
  Description of Artificial Sequence: Synthetic oligonucleotide
  Target: ATXN2; (-) strand; PAM type: YTN; PAM sequence: TTG
ataataaggtgattggataa

SEQ ID NO: 56927 - DNA, 20 bp, Artificial Sequence
  Description of Artificial Sequence: Synthetic oligonucleotide
  Target: ATXN2; (-) strand; PAM type: YTN; PAM sequence: TTA
agatacatgttgataataag

SEQ ID NO: 56928 - DNA, 20 bp, Artificial Sequence
  Description of Artificial Sequence: Synthetic oligonucleotide
  Target: ATXN2; (-) strand; PAM type: YTN; PAM sequence: TTT
aagatacatgttgataataa

SEQ ID NO: 56929 - DNA, 20 bp, Artificial Sequence
  Description of Artificial Sequence: Synthetic oligonucleotide
  Target: ATXN2; (-) strand; PAM type: YTN; PAM sequence: TTA
aaaaaaatcacatttaagat

SEQ ID NO: 56930 - DNA, 20 bp, Artificial Sequence
  Description of Artificial Sequence: Synthetic oligonucleotide
  Target: ATXN2; (-) strand; PAM type: YTN; PAM sequence: CTC
aaaaaaataaaaaattaaaa

SEQ ID NO: 56931 - DNA, 20 bp, Artificial Sequence
  Description of Artificial Sequence: Synthetic oligonucleotide
  Target: ATXN2; (-) strand; PAM type: YTN; PAM sequence: CTG
tctcaaaaaaataaaaaatt

SEQ ID NO: 56932 - DNA, 20 bp, Artificial Sequence
  Description of Artificial Sequence: Synthetic oligonucleotide
  Target: ATXN2; (-) strand; PAM type: YTN; PAM sequence: CTC
tgtctcaaaaaaataaaaaa

SEQ ID NO: 56933 - DNA, 20 bp, Artificial Sequence
  Description of Artificial Sequence: Synthetic oligonucleotide
  Target: ATXN2; (-) strand; PAM type: YTN; PAM sequence: TTG
gacaacagcgagactctgtc

SEQ ID NO: 56934 - DNA, 20 bp, Artificial Sequence
  Description of Artificial Sequence: Synthetic oligonucleotide
  Target: ATXN2; (-) strand; PAM type: YTN; PAM sequence: CTT
ggacaacagcgagactctgt

SEQ ID NO: 56935 - DNA, 20 bp, Artificial Sequence
  Description of Artificial Sequence: Synthetic oligonucleotide
  Target: ATXN2; (-) strand; PAM type: YTN; PAM sequence: CTC
cagcttggacaacagcgaga

SEQ ID NO: 56936 - DNA, 20 bp, Artificial Sequence
  Description of Artificial Sequence: Synthetic oligonucleotide
  Target: ATXN2; (-) strand; PAM type: YTN; PAM sequence: CTG
cactccagcttggacaacag

SEQ ID NO: 56937 - DNA, 20 bp, Artificial Sequence
  Description of Artificial Sequence: Synthetic oligonucleotide
  Target: ATXN2; (-) strand; PAM type: YTN; PAM sequence: TTG
cagtgagcagagatcgcgcc

SEQ ID NO: 56938 - DNA, 20 bp, Artificial Sequence
  Description of Artificial Sequence: Synthetic oligonucleotide
  Target: ATXN2; (-) strand; PAM type: YTN; PAM sequence: CTT
gcagtgagcagagatcgcgc

SEQ ID NO: 56939 - DNA, 20 bp, Artificial Sequence
  Description of Artificial Sequence: Synthetic oligonucleotide
  Target: ATXN2; (-) strand; PAM type: YTN; PAM sequence: CTG
aggaaggagaatggcgtgaa

SEQ ID NO: 56940 - DNA, 20 bp, Artificial Sequence
  Description of Artificial Sequence: Synthetic oligonucleotide
  Target: ATXN2; (-) strand; PAM type: YTN; PAM sequence: CTC
gggaggctgaggaaggagaa

SEQ ID NO: 56941 - DNA, 20 bp, Artificial Sequence
  Description of Artificial Sequence: Synthetic oligonucleotide
  Target: ATXN2; (-) strand; PAM type: YTN; PAM sequence: TTC
tcgggaggctgaggaaggag

SEQ ID NO: 56942 - DNA, 20 bp, Artificial Sequence
  Description of Artificial Sequence: Synthetic oligonucleotide
  Target: ATXN2; (-) strand; PAM type: YTN; PAM sequence: CTT
ctcgggaggctgaggaagga

SEQ ID NO: 56943 - DNA, 20 bp, Artificial Sequence
  Description of Artificial Sequence: Synthetic oligonucleotide
  Target: ATXN2; (-) strand; PAM type: YTN; PAM sequence: CTG
tagtcccagcttctcgggag

SEQ ID NO: 56944 - DNA, 20 bp, Artificial Sequence
  Description of Artificial Sequence: Synthetic oligonucleotide
  Target: ATXN2; (-) strand; PAM type: YTN; PAM sequence: TTA
gccgggcgtggtggtgggcg

SEQ ID NO: 56945 - DNA, 20 bp, Artificial Sequence
  Description of Artificial Sequence: Synthetic oligonucleotide
  Target: ATXN2; (-) strand; PAM type: YTN; PAM sequence: CTA
ataaaaatacaaaaaaatta

SEQ ID NO: 56946 - DNA, 20 bp, Artificial Sequence
  Description of Artificial Sequence: Synthetic oligonucleotide
  Target: ATXN2; (-) strand; PAM type: YTN; PAM sequence: CTC
taataaaaatacaaaaaaat

SEQ ID NO: 56947 - DNA, 20 bp, Artificial Sequence
  Description of Artificial Sequence: Synthetic oligonucleotide
  Target: ATXN2; (-) strand; PAM type: YTN; PAM sequence: CTC
cgtctctaataaaaatacaa

SEQ ID NO: 56948 - DNA, 20 bp, Artificial Sequence
  Description of Artificial Sequence: Synthetic oligonucleotide
  Target: ATXN2; (-) strand; PAM type: YTN; PAM sequence: CTG
tgaaactccgtctctaataa

SEQ ID NO: 56949 - DNA, 20 bp, Artificial Sequence
  Description of Artificial Sequence: Synthetic oligonucleotide
  Target: ATXN2; (-) strand; PAM type: YTN; PAM sequence: CTG
gcgaacactgtgaaactccg

SEQ ID NO: 56950 - DNA, 20 bp, Artificial Sequence
  Description of Artificial Sequence: Synthetic oligonucleotide
  Target: ATXN2; (-) strand; PAM type: YTN; PAM sequence: TTG
agaccatcctggcgaacact

SEQ ID NO: 56951 - DNA, 20 bp, Artificial Sequence
  Description of Artificial Sequence: Synthetic oligonucleotide
  Target: ATXN2; (-) strand; PAM type: YTN; PAM sequence: TTG
ggaggccgaggcgggtggat

SEQ ID NO: 56952 - DNA, 20 bp, Artificial Sequence
  Description of Artificial Sequence: Synthetic oligonucleotide
  Target: ATXN2; (-) strand; PAM type: YTN; PAM sequence: TTT
gggaggccgaggcgggtgga

SEQ ID NO: 56953 - DNA, 20 bp, Artificial Sequence
  Description of Artificial Sequence: Synthetic oligonucleotide
  Target: ATXN2; (-) strand; PAM type: YTN; PAM sequence: CTT
tgggaggccgaggcgggtgg

SEQ ID NO: 56954 - DNA, 20 bp, Artificial Sequence
  Description of Artificial Sequence: Synthetic oligonucleotide
  Target: ATXN2; (-) strand; PAM type: YTN; PAM sequence: CTG
taatcccaccactttgggag

SEQ ID NO: 56955 - DNA, 20 bp, Artificial Sequence
  Description of Artificial Sequence: Synthetic oligonucleotide
  Target: ATXN2; (-) strand; PAM type: YTN; PAM sequence: CTC
acgcctgtaatcccaccact

SEQ ID NO: 56956 - DNA, 20 bp, Artificial Sequence
  Description of Artificial Sequence: Synthetic oligonucleotide
  Target: ATXN2; (-) strand; PAM type: YTN; PAM sequence: CTG
ggcgcagtggctcacgcctg

SEQ ID NO: 56957 - DNA, 20 bp, Artificial Sequence
  Description of Artificial Sequence: Synthetic oligonucleotide
  Target: ATXN2; (-) strand; PAM type: YTN; PAM sequence: TTA
aaggctgggcgcagtggctc

SEQ ID NO: 56958 - DNA, 20 bp, Artificial Sequence
  Description of Artificial Sequence: Synthetic oligonucleotide
  Target: ATXN2; (-) strand; PAM type: YTN; PAM sequence: TTT
aaaggctgggcgcagtggct

SEQ ID NO: 56959 - DNA, 20 bp, Artificial Sequence
  Description of Artificial Sequence: Synthetic oligonucleotide
  Target: ATXN2; (-) strand; PAM type: YTN; PAM sequence: TTA
agaatcacatttaaaggctg

SEQ ID NO: 56960 - DNA, 20 bp, Artificial Sequence
  Description of Artificial Sequence: Synthetic oligonucleotide
  Target: ATXN2; (-) strand; PAM type: YTN; PAM sequence: TTT
aagaatcacatttaaaggct

SEQ ID NO: 56961 - DNA, 20 bp, Artificial Sequence
  Description of Artificial Sequence: Synthetic oligonucleotide
  Target: ATXN2; (-) strand; PAM type: YTN; PAM sequence: TTT
taagaatcacatttaaaggc

SEQ ID NO: 56962 - DNA, 20 bp, Artificial Sequence
  Description of Artificial Sequence: Synthetic oligonucleotide
  Target: ATXN2; (-) strand; PAM type: YTN; PAM sequence: CTG
gggtggtggttttaagaatc

SEQ ID NO: 56963 - DNA, 20 bp, Artificial Sequence
  Description of Artificial Sequence: Synthetic oligonucleotide
  Target: ATXN2; (-) strand; PAM type: YTN; PAM sequence: CTG
tgcccctggggtggtggttt

SEQ ID NO: 56964 - DNA, 20 bp, Artificial Sequence
  Description of Artificial Sequence: Synthetic oligonucleotide
  Target: ATXN2; (-) strand; PAM type: YTN; PAM sequence: CTC
gtgaagatggatacagctgt

SEQ ID NO: 56965 - DNA, 20 bp, Artificial Sequence
  Description of Artificial Sequence: Synthetic oligonucleotide
  Target: ATXN2; (-) strand; PAM type: YTN; PAM sequence: TTC
aggtgccaggtatcgcatcg

SEQ ID NO: 56966 - DNA, 20 bp, Artificial Sequence
  Description of Artificial Sequence: Synthetic oligonucleotide
  Target: ATXN2; (-) strand; PAM type: YTN; PAM sequence: CTT
caggtgccaggtatcgcatc

SEQ ID NO: 56967 - DNA, 20 bp, Artificial Sequence
  Description of Artificial Sequence: Synthetic oligonucleotide
  Target: ATXN2; (-) strand; PAM type: YTN; PAM sequence: TTC
ttcaggtgccaggtatcgca

SEQ ID NO: 56968 - DNA, 20 bp, Artificial Sequence
  Description of Artificial Sequence: Synthetic oligonucleotide
  Target: ATXN2; (-) strand; PAM type: YTN; PAM sequence: TTT
cttcaggtgccaggtatcgc

SEQ ID NO: 56969 - DNA, 20 bp, Artificial Sequence
  Description of Artificial Sequence: Synthetic oligonucleotide
  Target: ATXN2; (-) strand; PAM type: YTN; PAM sequence: CTT
tcttcaggtgccaggtatcg

SEQ ID NO: 56970 - DNA, 20 bp, Artificial Sequence
  Description of Artificial Sequence: Synthetic oligonucleotide
  Target: ATXN2; (-) strand; PAM type: YTN; PAM sequence: CTG
agtgctttcttcaggtgcca

SEQ ID NO: 56971 - DNA, 20 bp, Artificial Sequence
  Description of Artificial Sequence: Synthetic oligonucleotide
  Target: ATXN2; (-) strand; PAM type: YTN; PAM sequence: CTA
gtatctgagtgctttcttca

SEQ ID NO: 56972 - DNA, 20 bp, Artificial Sequence
  Description of Artificial Sequence: Synthetic oligonucleotide
  Target: ATXN2; (-) strand; PAM type: YTN; PAM sequence: TTA
tcctagtatctgagtgcttt

SEQ ID NO: 56973 - DNA, 20 bp, Artificial Sequence
  Description of Artificial Sequence: Synthetic oligonucleotide
  Target: ATXN2; (-) strand; PAM type: YTN; PAM sequence: TTT
atcctagtatctgagtgctt

SEQ ID NO: 56974 - DNA, 20 bp, Artificial Sequence
  Description of Artificial Sequence: Synthetic oligonucleotide
  Target: ATXN2; (-) strand; PAM type: YTN; PAM sequence: CTT
tatcctagtatctgagtgct

SEQ ID NO: 56975 - DNA, 20 bp, Artificial Sequence
  Description of Artificial Sequence: Synthetic oligonucleotide
  Target: ATXN2; (-) strand; PAM type: YTN; PAM sequence: TTC
tttatcctagtatctgagtg

SEQ ID NO: 56976 - DNA, 20 bp, Artificial Sequence
  Description of Artificial Sequence: Synthetic oligonucleotide
  Target: ATXN2; (-) strand; PAM type: YTN; PAM sequence: CTT
ctttatcctagtatctgagt

SEQ ID NO: 56977 - DNA, 20 bp, Artificial Sequence
  Description of Artificial Sequence: Synthetic oligonucleotide
  Target: ATXN2; (-) strand; PAM type: YTN; PAM sequence: CTG
catggagtggcttctttatc

SEQ ID NO: 56978 - DNA, 20 bp, Artificial Sequence
  Description of Artificial Sequence: Synthetic oligonucleotide
  Target: ATXN2; (-) strand; PAM type: YTN; PAM sequence: CTC
agaggtctgcatggagtggc

SEQ ID NO: 56979 - DNA, 20 bp, Artificial Sequence
  Description of Artificial Sequence: Synthetic oligonucleotide
  Target: ATXN2; (-) strand; PAM type: YTN; PAM sequence: TTC
aggtaagggcaactcagagg

SEQ ID NO: 56980 - DNA, 20 bp, Artificial Sequence
  Description of Artificial Sequence: Synthetic oligonucleotide
  Target: ATXN2; (-) strand; PAM type: YTN; PAM sequence: CTG
ttcaggtaagggcaactcag

SEQ ID NO: 56981 - DNA, 20 bp, Artificial Sequence
  Description of Artificial Sequence: Synthetic oligonucleotide
  Target: ATXN2; (-) strand; PAM type: YTN; PAM sequence: CTG
cacccagtcctgttcaggta

SEQ ID NO: 56982 - DNA, 20 bp, Artificial Sequence
  Description of Artificial Sequence: Synthetic oligonucleotide
  Target: ATXN2; (-) strand; PAM type: YTN; PAM sequence: CTG
gacagcagcaaagccaacat

SEQ ID NO: 56983 - DNA, 20 bp, Artificial Sequence
  Description of Artificial Sequence: Synthetic oligonucleotide
  Target: ATXN2; (-) strand; PAM type: YTN; PAM sequence: CTA
cccccactggacagcagcaa

SEQ ID NO: 56984 - DNA, 20 bp, Artificial Sequence
  Description of Artificial Sequence: Synthetic oligonucleotide
  Target: ATXN2; (-) strand; PAM type: YTN; PAM sequence: TTC
agctacccccactggacagc

SEQ ID NO: 56985 - DNA, 20 bp, Artificial Sequence
  Description of Artificial Sequence: Synthetic oligonucleotide
  Target: ATXN2; (-) strand; PAM type: YTN; PAM sequence: CTT
cagctacccccactggacag

SEQ ID NO: 56986 - DNA, 20 bp, Artificial Sequence
  Description of Artificial Sequence: Synthetic oligonucleotide
  Target: ATXN2; (-) strand; PAM type: YTN; PAM sequence: CTC
agccttcagctacccccact

SEQ ID NO: 56987 - DNA, 20 bp, Artificial Sequence
  Description of Artificial Sequence: Synthetic oligonucleotide
  Target: ATXN2; (-) strand; PAM type: YTN; PAM sequence: CTC
cacaccctcagccttcagct

SEQ ID NO: 56988 - DNA, 20 bp, Artificial Sequence
  Description of Artificial Sequence: Synthetic oligonucleotide
  Target: ATXN2; (-) strand; PAM type: YTN; PAM sequence: CTG
cacccacatactccacaccc

SEQ ID NO: 56989 - DNA, 20 bp, Artificial Sequence
  Description of Artificial Sequence: Synthetic oligonucleotide
  Target: ATXN2; (-) strand; PAM type: YTN; PAM sequence: CTA
ccctgcacccacatactcca

SEQ ID NO: 56990 - DNA, 20 bp, Artificial Sequence
  Description of Artificial Sequence: Synthetic oligonucleotide
  Target: ATXN2; (-) strand; PAM type: YTN; PAM sequence: CTA
acgctaccctgcacccacat

SEQ ID NO: 56991 - DNA, 20 bp, Artificial Sequence
  Description of Artificial Sequence: Synthetic oligonucleotide
  Target: ATXN2; (-) strand; PAM type: YTN; PAM sequence: CTC
agcagtatgcgcaccctaac

SEQ ID NO: 56992 - DNA, 20 bp, Artificial Sequence
  Description of Artificial Sequence: Synthetic oligonucleotide
  Target: ATXN2; (-) strand; PAM type: YTN; PAM sequence: TTG
ctcagcagtatgcgcaccct

SEQ ID NO: 56993 - DNA, 20 bp, Artificial Sequence
  Description of Artificial Sequence: Synthetic oligonucleotide
  Target: ATXN2; (-) strand; PAM type: YTN; PAM sequence: CTT
gctcagcagtatgcgcaccc

SEQ ID NO: 56994 - DNA, 20 bp, Artificial Sequence
  Description of Artificial Sequence: Synthetic oligonucleotide
  Target: ATXN2; (-) strand; PAM type: YTN; PAM sequence: CTC
ccttgctcagcagtatgcgc

SEQ ID NO: 56995 - DNA, 20 bp, Artificial Sequence
  Description of Artificial Sequence: Synthetic oligonucleotide
  Target: ATXN2; (-) strand; PAM type: YTN; PAM sequence: TTC
cacgggctcccttgctcagc

SEQ ID NO: 56996 - DNA, 20 bp, Artificial Sequence
  Description of Artificial Sequence: Synthetic oligonucleotide
  Target: ATXN2; (-) strand; PAM type: YTN; PAM sequence: TTT
ccacgggctcccttgctcag

SEQ ID NO: 56997 - DNA, 20 bp, Artificial Sequence
  Description of Artificial Sequence: Synthetic oligonucleotide
  Target: ATXN2; (-) strand; PAM type: YTN; PAM sequence: TTA
gtttccacgggctcccttgc

SEQ ID NO: 56998 - DNA, 20 bp, Artificial Sequence
  Description of Artificial Sequence: Synthetic oligonucleotide
  Target: ATXN2; (-) strand; PAM type: YTN; PAM sequence: TTT
agtttccacgggctcccttg

SEQ ID NO: 56999 - DNA, 20 bp, Artificial Sequence
  Description of Artificial Sequence: Synthetic oligonucleotide
  Target: ATXN2; (-) strand; PAM type: YTN; PAM sequence: CTT
tagtttccacgggctccctt

SEQ ID NO: 57000 - DNA, 20 bp, Artificial Sequence
  Description of Artificial Sequence: Synthetic oligonucleotide
  Target: ATXN2; (-) strand; PAM type: YTN; PAM sequence: TTC
actttagtttccacgggctc

SEQ ID NO: 57001 - DNA, 20 bp, Artificial Sequence
  Description of Artificial Sequence: Synthetic oligonucleotide
  Target: ATXN2; (-) strand; PAM type: YTN; PAM sequence: TTT
cactttagtttccacgggct

SEQ ID NO: 57002 - DNA, 20 bp, Artificial Sequence
  Description of Artificial Sequence: Synthetic oligonucleotide
  Target: ATXN2; (-) strand; PAM type: YTN; PAM sequence: CTT
tcactttagtttccacgggc

SEQ ID NO: 57003 - DNA, 20 bp, Artificial Sequence
  Description of Artificial Sequence: Synthetic oligonucleotide
  Target: ATXN2; (-) strand; PAM type: YTN; PAM sequence: TTC
tttcactttagtttccacgg

SEQ ID NO: 57004 - DNA, 20 bp, Artificial Sequence
  Description of Artificial Sequence: Synthetic oligonucleotide
  Target: ATXN2; (-) strand; PAM type: YTN; PAM sequence: TTT
ctttcactttagtttccacg

SEQ ID NO: 57005 - DNA, 20 bp, Artificial Sequence
  Description of Artificial Sequence: Synthetic oligonucleotide
  Target: ATXN2; (-) strand; PAM type: YTN; PAM sequence: TTT
tctttcactttagtttccac

SEQ ID NO: 57006 - DNA, 20 bp, Artificial Sequence
  Description of Artificial Sequence: Synthetic oligonucleotide
  Target: ATXN2; (-) strand; PAM type: YTN; PAM sequence: TTT
ttctttcactttagtttcca

SEQ ID NO: 57007 - DNA, 20 bp, Artificial Sequence
  Description of Artificial Sequence: Synthetic oligonucleotide
  Target: ATXN2; (-) strand; PAM type: YTN; PAM sequence: CTT
tttctttcactttagtttcc

SEQ ID NO: 57008 - DNA, 20 bp, Artificial Sequence
  Description of Artificial Sequence: Synthetic oligonucleotide
  Target: ATXN2; (-) strand; PAM type: YTN; PAM sequence: CTC
ctttttctttcactttagtt

SEQ ID NO: 57009 - DNA, 20 bp, Artificial Sequence
  Description of Artificial Sequence: Synthetic oligonucleotide
  Target: ATXN2; (-) strand; PAM type: YTN; PAM sequence: TTG
tgtacatgctcctttttctt

SEQ ID NO: 57010 - DNA, 20 bp, Artificial Sequence
  Description of Artificial Sequence: Synthetic oligonucleotide
  Target: ATXN2; (-) strand; PAM type: YTN; PAM sequence: TTG
tcagacatcggttgtgtaca

SEQ ID NO: 57011 - DNA, 20 bp, Artificial Sequence
  Description of Artificial Sequence: Synthetic oligonucleotide
  Target: ATXN2; (-) strand; PAM type: YTN; PAM sequence: TTG
atgaagtgtagaggagcgat

SEQ ID NO: 57012 - DNA, 20 bp, Artificial Sequence
  Description of Artificial Sequence: Synthetic oligonucleotide
  Target: ATXN2; (-) strand; PAM type: YTN; PAM sequence: TTC
agttgatgaagtgtagagga

SEQ ID NO: 57013 - DNA, 20 bp, Artificial Sequence
  Description of Artificial Sequence: Synthetic oligonucleotide
  Target: ATXN2; (-) strand; PAM type: YTN; PAM sequence: TTG
taaccatcaagaaagttcag

SEQ ID NO: 57014 - DNA, 20 bp, Artificial Sequence
  Description of Artificial Sequence: Synthetic oligonucleotide
  Target: ATXN2; (-) strand; PAM type: YTN; PAM sequence: TTA
tgcattgtaaccatcaagaa

SEQ ID NO: 57015 - DNA, 20 bp, Artificial Sequence
  Description of Artificial Sequence: Synthetic oligonucleotide
  Target: ATXN2; (-) strand; PAM type: YTN; PAM sequence: TTG
gtagtggcgtgagttatgca

SEQ ID NO: 57016 - DNA, 20 bp, Artificial Sequence
  Description of Artificial Sequence: Synthetic oligonucleotide
  Target: ATXN2; (-) strand; PAM type: YTN; PAM sequence: CTA
tagaaattggtagtggcgtg

SEQ ID NO: 57017 - DNA, 20 bp, Artificial Sequence
  Description of Artificial Sequence: Synthetic oligonucleotide
  Target: ATXN2; (-) strand; PAM type: YTN; PAM sequence: TTA
aatggagtcatctatagaaa

SEQ ID NO: 57018 - DNA, 20 bp, Artificial Sequence
  Description of Artificial Sequence: Synthetic oligonucleotide
  Target: ATXN2; (-) strand; PAM type: YTN; PAM sequence: TTT
aaatggagtcatctatagaa

SEQ ID NO: 57019 - DNA, 20 bp, Artificial Sequence
  Description of Artificial Sequence: Synthetic oligonucleotide
  Target: ATXN2; (-) strand; PAM type: YTN; PAM sequence: TTC
aagacaatggatggtttaaa

SEQ ID NO: 57020 - DNA, 20 bp, Artificial Sequence
  Description of Artificial Sequence: Synthetic oligonucleotide
  Target: ATXN2; (-) strand; PAM type: YTN; PAM sequence: TTT
caagacaatggatggtttaa

SEQ ID NO: 57021 - DNA, 20 bp, Artificial Sequence
  Description of Artificial Sequence: Synthetic oligonucleotide
  Target: ATXN2; (-) strand; PAM type: YTN; PAM sequence: TTT
tcaagacaatggatggttta

SEQ ID NO: 57022 - DNA, 20 bp, Artificial Sequence
  Description of Artificial Sequence: Synthetic oligonucleotide
  Target: ATXN2; (-) strand; PAM type: YTN; PAM sequence: TTT
ttcaagacaatggatggttt

SEQ ID NO: 57023 - DNA, 20 bp, Artificial Sequence
  Description of Artificial Sequence: Synthetic oligonucleotide
  Target: ATXN2; (-) strand; PAM type: YTN; PAM sequence: TTT
tttcaagacaatggatggtt

SEQ ID NO: 57024 - DNA, 20 bp, Artificial Sequence
  Description of Artificial Sequence: Synthetic oligonucleotide
  Target: ATXN2; (-) strand; PAM type: YTN; PAM sequence: TTA
ttttttcaagacaatggatg

SEQ ID NO: 57025 - DNA, 20 bp, Artificial Sequence
  Description of Artificial Sequence: Synthetic oligonucleotide
  Target: ATXN2; (-) strand; PAM type: YTN; PAM sequence: CTT
attttttcaagacaatggat

SEQ ID NO: 57026 - DNA, 20 bp, Artificial Sequence
  Description of Artificial Sequence: Synthetic oligonucleotide
  Target: ATXN2; (-) strand; PAM type: YTN; PAM sequence: CTA
cacttattttttcaagacaa

SEQ ID NO: 57027 - DNA, 20 bp, Artificial Sequence
  Description of Artificial Sequence: Synthetic oligonucleotide
  Target: ATXN2; (-) strand; PAM type: YTN; PAM sequence: TTA
agcaatagctacacttattt

SEQ ID NO: 57028 - DNA, 20 bp, Artificial Sequence
  Description of Artificial Sequence: Synthetic oligonucleotide
  Target: ATXN2; (-) strand; PAM type: YTN; PAM sequence: CTG
ttaagcaatagctacactta

SEQ ID NO: 57029 - DNA, 20 bp, Artificial Sequence
  Description of Artificial Sequence: Synthetic oligonucleotide
  Target: ATXN2; (-) strand; PAM type: YTN; PAM sequence: CTA
gtctgttaagcaatagctac

SEQ ID NO: 57030 - DNA, 20 bp, Artificial Sequence
  Description of Artificial Sequence: Synthetic oligonucleotide
  Target: ATXN2; (-) strand; PAM type: YTN; PAM sequence: TTA
tatgaaccaaatgctagtct

SEQ ID NO: 57031 - DNA, 20 bp, Artificial Sequence
  Description of Artificial Sequence: Synthetic oligonucleotide
  Target: ATXN2; (-) strand; PAM type: YTN; PAM sequence: CTG
tattatatgaaccaaatgct

SEQ ID NO: 57032 - DNA, 20 bp, Artificial Sequence
  Description of Artificial Sequence: Synthetic oligonucleotide
  Target: ATXN2; (-) strand; PAM type: YTN; PAM sequence: TTA
atatcatatgtagagctgta

SEQ ID NO: 57033 - DNA, 20 bp, Artificial Sequence
  Description of Artificial Sequence: Synthetic oligonucleotide
  Target: ATXN2; (-) strand; PAM type: YTN; PAM sequence: TTT
aatatcatatgtagagctgt

SEQ ID NO: 57034 - DNA, 20 bp, Artificial Sequence
  Description of Artificial Sequence: Synthetic oligonucleotide
  Target: ATXN2; (-) strand; PAM type: YTN; PAM sequence: TTT
taatatcatatgtagagctg

SEQ ID NO: 57035 - DNA, 20 bp, Artificial Sequence
  Description of Artificial Sequence: Synthetic oligonucleotide
  Target: ATXN2; (-) strand; PAM type: YTN; PAM sequence: TTG
attttaatatcatatgtaga

SEQ ID NO: 57036 - DNA, 20 bp, Artificial Sequence
  Description of Artificial Sequence: Synthetic oligonucleotide
  Target: ATXN2; (-) strand; PAM type: YTN; PAM sequence: TTT
gattttaatatcatatgtag

SEQ ID NO: 57037 - DNA, 20 bp, Artificial Sequence
  Description of Artificial Sequence: Synthetic oligonucleotide
  Target: ATXN2; (-) strand; PAM type: YTN; PAM sequence: CTA
atttgattttaatatcatat

SEQ ID NO: 57038 - DNA, 20 bp, Artificial Sequence
  Description of Artificial Sequence: Synthetic oligonucleotide
  Target: ATXN2; (-) strand; PAM type: YTN; PAM sequence: TTA
agagtaaatgcaaactaatt

SEQ ID NO: 57039 - DNA, 20 bp, Artificial Sequence
  Description of Artificial Sequence: Synthetic oligonucleotide
  Target: ATXN2; (-) strand; PAM type: YTN; PAM sequence: CTA
gtgaccgttaagagtaaatg

SEQ ID NO: 57040 - DNA, 20 bp, Artificial Sequence
  Description of Artificial Sequence: Synthetic oligonucleotide
  Target: ATXN2; (-) strand; PAM type: YTN; PAM sequence: TTG
ggaaaacctagtgaccgtta

SEQ ID NO: 57041 - DNA, 20 bp, Artificial Sequence
  Description of Artificial Sequence: Synthetic oligonucleotide
  Target: ATXN2; (-) strand; PAM type: YTN; PAM sequence: TTT
gggaaaacctagtgaccgtt

SEQ ID NO: 57042 - DNA, 20 bp, Artificial Sequence
  Description of Artificial Sequence: Synthetic oligonucleotide
  Target: ATXN2; (-) strand; PAM type: YTN; PAM sequence: TTT
tgggaaaacctagtgaccgt

SEQ ID NO: 57043 - DNA, 20 bp, Artificial Sequence
  Description of Artificial Sequence: Synthetic oligonucleotide
  Target: ATXN2; (-) strand; PAM type: YTN; PAM sequence: TTT
ttgggaaaacctagtgaccg

SEQ ID NO: 57044 - DNA, 20 bp, Artificial Sequence
  Description of Artificial Sequence: Synthetic oligonucleotide
  Target: ATXN2; (-) strand; PAM type: YTN; PAM sequence: CTT
tttgggaaaacctagtgacc

SEQ ID NO: 57045 - DNA, 20 bp, Artificial Sequence
  Description of Artificial Sequence: Synthetic oligonucleotide
  Target: ATXN2; (-) strand; PAM type: YTN; PAM sequence: TTG
cctttttgggaaaacctagt

SEQ ID NO: 57046 - DNA, 20 bp, Artificial Sequence
  Description of Artificial Sequence: Synthetic oligonucleotide
  Target: ATXN2; (-) strand; PAM type: YTN; PAM sequence: TTC
aagttgcctttttgggaaaa

SEQ ID NO: 57047 - DNA, 20 bp, Artificial Sequence
  Description of Artificial Sequence: Synthetic oligonucleotide
  Target: ATXN2; (-) strand; PAM type: YTN; PAM sequence: CTT
caagttgcctttttgggaaa

SEQ ID NO: 57048 - DNA, 20 bp, Artificial Sequence
  Description of Artificial Sequence: Synthetic oligonucleotide
  Target: ATXN2; (-) strand; PAM type: YTN; PAM sequence: CTA
tgccttcaagttgccttttt

SEQ ID NO: 57049 - DNA, 20 bp, Artificial Sequence
  Description of Artificial Sequence: Synthetic oligonucleotide
  Target: ATXN2; (-) strand; PAM type: YTN; PAM sequence: CTG
cctatgccttcaagttgcct

SEQ ID NO: 57050 - DNA, 20 bp, Artificial Sequence
  Description of Artificial Sequence: Synthetic oligonucleotide
  Target: ATXN2; (-) strand; PAM type: YTN; PAM sequence: TTC
tgcctatgccttcaagttgc

SEQ ID NO: 57051 - DNA, 20 bp, Artificial Sequence
  Description of Artificial Sequence: Synthetic oligonucleotide
  Target: ATXN2; (-) strand; PAM type: YTN; PAM sequence: TTT
ctgcctatgccttcaagttg

SEQ ID NO: 57052 - DNA, 20 bp, Artificial Sequence
  Description of Artificial Sequence: Synthetic oligonucleotide
  Target: ATXN2; (-) strand; PAM type: YTN; PAM sequence: TTG
agtagtttctgcctatgcct

SEQ ID NO: 57053 - DNA, 20 bp, Artificial Sequence
  Description of Artificial Sequence: Synthetic oligonucleotide
  Target: ATXN2; (-) strand; PAM type: YTN; PAM sequence: TTT
gagtagtttctgcctatgcc

SEQ ID NO: 57054 - DNA, 20 bp, Artificial Sequence
  Description of Artificial Sequence: Synthetic oligonucleotide
  Target: ATXN2; (-) strand; PAM type: YTN; PAM sequence: TTG
tttgagtagtttctgcctat

SEQ ID NO: 57055 - DNA, 20 bp, Artificial Sequence
  Description of Artificial Sequence: Synthetic oligonucleotide
  Target: ATXN2; (-) strand; PAM type: YTN; PAM sequence: CTT
gtttgagtagtttctgccta

SEQ ID NO: 57056 - DNA, 20 bp, Artificial Sequence
  Description of Artificial Sequence: Synthetic oligonucleotide
  Target: ATXN2; (-) strand; PAM type: YTN; PAM sequence: CTA
aaatgcacttgtttgagtag

SEQ ID NO: 57057 - DNA, 20 bp, Artificial Sequence
  Description of Artificial Sequence: Synthetic oligonucleotide
  Target: ATXN2; (-) strand; PAM type: YTN; PAM sequence: CTA
aagagtgtgcacctaaaatg

SEQ ID NO: 57058 - DNA, 20 bp, Artificial Sequence
  Description of Artificial Sequence: Synthetic oligonucleotide
  Target: ATXN2; (-) strand; PAM type: YTN; PAM sequence: TTG
agctaaagagtgtgcaccta

SEQ ID NO: 57059 - DNA, 20 bp, Artificial Sequence
  Description of Artificial Sequence: Synthetic oligonucleotide
  Target: ATXN2; (-) strand; PAM type: YTN; PAM sequence: CTT
gagctaaagagtgtgcacct

SEQ ID NO: 57060 - DNA, 20 bp, Artificial Sequence
  Description of Artificial Sequence: Synthetic oligonucleotide
  Target: ATXN2; (-) strand; PAM type: YTN; PAM sequence: CTG
atgatggccttgagctaaag

SEQ ID NO: 57061 - DNA, 20 bp, Artificial Sequence
  Description of Artificial Sequence: Synthetic oligonucleotide
  Target: ATXN2; (-) strand; PAM type: YTN; PAM sequence: TTA
gcctgatgatggccttgagc

SEQ ID NO: 57062 - DNA, 20 bp, Artificial Sequence
  Description of Artificial Sequence: Synthetic oligonucleotide
  Target: ATXN2; (-) strand; PAM type: YTN; PAM sequence: CTC
cagggcagtagcatggtgag

SEQ ID NO: 57063 - DNA, 20 bp, Artificial Sequence
  Description of Artificial Sequence: Synthetic oligonucleotide
  Target: ATXN2; (-) strand; PAM type: YTN; PAM sequence: TTG
ctccagggcagtagcatggt

SEQ ID NO: 57064 - DNA, 20 bp, Artificial Sequence
  Description of Artificial Sequence: Synthetic oligonucleotide
  Target: ATXN2; (-) strand; PAM type: YTN; PAM sequence: CTC
aggacattgctccagggcag

SEQ ID NO: 57065 - DNA, 20 bp, Artificial Sequence
  Description of Artificial Sequence: Synthetic oligonucleotide
  Target: ATXN2; (-) strand; PAM type: YTN; PAM sequence: CTG
tgccctcaggacattgctcc

SEQ ID NO: 57066 - DNA, 20 bp, Artificial Sequence
  Description of Artificial Sequence: Synthetic oligonucleotide
  Target: ATXN2; (-) strand; PAM type: YTN; PAM sequence: TTG
ccacataccatacacagtgc

SEQ ID NO: 57067 - DNA, 20 bp, Artificial Sequence
  Description of Artificial Sequence: Synthetic oligonucleotide
  Target: ATXN2; (-) strand; PAM type: YTN; PAM sequence: CTT
gccacataccatacacagtg

SEQ ID NO: 57068 - DNA, 20 bp, Artificial Sequence
  Description of Artificial Sequence: Synthetic oligonucleotide
  Target: ATXN2; (-) strand; PAM type: YTN; PAM sequence: CTG
gccttgccacataccataca

SEQ ID NO: 57069 - DNA, 20 bp, Artificial Sequence
  Description of Artificial Sequence: Synthetic oligonucleotide
  Target: ATXN2; (-) strand; PAM type: YTN; PAM sequence: CTG
atgatagatccctggccttg

SEQ ID NO: 57070 - DNA, 20 bp, Artificial Sequence
  Description of Artificial Sequence: Synthetic oligonucleotide
  Target: ATXN2; (-) strand; PAM type: YTN; PAM sequence: TTC
ggccctgatgatagatccct

SEQ ID NO: 57071 - DNA, 20 bp, Artificial Sequence
  Description of Artificial Sequence: Synthetic oligonucleotide
  Target: ATXN2; (-) strand; PAM type: YTN; PAM sequence: CTT
cggccctgatgatagatccc

SEQ ID NO: 57072 - DNA, 20 bp, Artificial Sequence
  Description of Artificial Sequence: Synthetic oligonucleotide
  Target: ATXN2; (-) strand; PAM type: YTN; PAM sequence: CTG
tggtccttcggccctgatga

SEQ ID NO: 57073 - DNA, 20 bp, Artificial Sequence
  Description of Artificial Sequence: Synthetic oligonucleotide
  Target: ATXN2; (-) strand; PAM type: YTN; PAM sequence: CTG
agagagactgtggtccttcg

SEQ ID NO: 57074 - DNA, 20 bp, Artificial Sequence
  Description of Artificial Sequence: Synthetic oligonucleotide
  Target: ATXN2; (-) strand; PAM type: YTN; PAM sequence: TTA
gctgagagagactgtggtcc

SEQ ID NO: 57075 - DNA, 20 bp, Artificial Sequence
  Description of Artificial Sequence: Synthetic oligonucleotide
  Target: ATXN2; (-) strand; PAM type: YTN; PAM sequence: CTG
tgattagctgagagagactg

SEQ ID NO: 57076 - DNA, 20 bp, Artificial Sequence
  Description of Artificial Sequence: Synthetic oligonucleotide
  Target: ATXN2; (-) strand; PAM type: YTN; PAM sequence: CTC
ctgtgattagctgagagaga

SEQ ID NO: 57077 - DNA, 20 bp, Artificial Sequence
  Description of Artificial Sequence: Synthetic oligonucleotide
  Target: ATXN2; (-) strand; PAM type: YTN; PAM sequence: CTG
agtggcagaagggctcctgt

SEQ ID NO: 57078 - DNA, 20 bp, Artificial Sequence
  Description of Artificial Sequence: Synthetic oligonucleotide
  Target: ATXN2; (-) strand; PAM type: YTN; PAM sequence: TTG
ggaaagtaaactgagtggca

SEQ ID NO: 57079 - DNA, 20 bp, Artificial Sequence
  Description of Artificial Sequence: Synthetic oligonucleotide
  Target: ATXN2; (-) strand; PAM type: YTN; PAM sequence: CTT
gggaaagtaaactgagtggc

SEQ ID NO: 57080 - DNA, 20 bp, Artificial Sequence
  Description of Artificial Sequence: Synthetic oligonucleotide
  Target: ATXN2; (-) strand; PAM type: YTN; PAM sequence: TTA
gggcttgggaaagtaaactg

SEQ ID NO: 57081 - DNA, 20 bp, Artificial Sequence
  Description of Artificial Sequence: Synthetic oligonucleotide
  Target: ATXN2; (-) strand; PAM type: YTN; PAM sequence: CTC
cattagggcttgggaaagta

SEQ ID NO: 57082 - DNA, 20 bp, Artificial Sequence
  Description of Artificial Sequence: Synthetic oligonucleotide
  Target: ATXN2; (-) strand; PAM type: YTN; PAM sequence: TTC
ataaagcaaagatgggagat

SEQ ID NO: 57083 - DNA, 20 bp, Artificial Sequence
  Description of Artificial Sequence: Synthetic oligonucleotide
  Target: ATXN2; (-) strand; PAM type: YTN; PAM sequence: TTT
cataaagcaaagatgggaga

SEQ ID NO: 57084 - DNA, 20 bp, Artificial Sequence
  Description of Artificial Sequence: Synthetic oligonucleotide
  Target: ATXN2; (-) strand; PAM type: YTN; PAM sequence: TTA
tttcataaagcaaagatggg

SEQ ID NO: 57085 - DNA, 20 bp, Artificial Sequence
  Description of Artificial Sequence: Synthetic oligonucleotide
  Target: ATXN2; (-) strand; PAM type: YTN; PAM sequence: TTT
atttcataaagcaaagatgg

SEQ ID NO: 57086 - DNA, 20 bp, Artificial Sequence
  Description of Artificial Sequence: Synthetic oligonucleotide
  Target: ATXN2; (-) strand; PAM type: YTN; PAM sequence: CTA
tatttatttcataaagcaaa

SEQ ID NO: 57087 - DNA, 20 bp, Artificial Sequence
  Description of Artificial Sequence: Synthetic oligonucleotide
  Target: ATXN2; (-) strand; PAM type: YTN; PAM sequence: TTC
tatatttatttcataaagca

SEQ ID NO: 57088 - DNA, 20 bp, Artificial Sequence
  Description of Artificial Sequence: Synthetic oligonucleotide
  Target: ATXN2; (-) strand; PAM type: YTN; PAM sequence: TTT
ctatatttatttcataaagc

SEQ ID NO: 57089 - DNA, 20 bp, Artificial Sequence
  Description of Artificial Sequence: Synthetic oligonucleotide
  Target: ATXN2; (-) strand; PAM type: YTN; PAM sequence: TTT
tctatatttatttcataaag

SEQ ID NO: 57090 - DNA, 20 bp, Artificial Sequence
  Description of Artificial Sequence: Synthetic oligonucleotide
  Target: ATXN2; (-) strand; PAM type: YTN; PAM sequence: CTT
ttctatatttatttcataaa

SEQ ID NO: 57091 - DNA, 20 bp, Artificial Sequence
  Description of Artificial Sequence: Synthetic oligonucleotide
  Target: ATXN2; (-) strand; PAM type: YTN; PAM sequence: TTA
cttttctatatttatttcat

SEQ ID NO: 57092 - DNA, 20 bp, Artificial Sequence
  Description of Artificial Sequence: Synthetic oligonucleotide
  Target: ATXN2; (-) strand; PAM type: YTN; PAM sequence: TTT
acttttctatatttatttca

SEQ ID NO: 57093 - DNA, 20 bp, Artificial Sequence
  Description of Artificial Sequence: Synthetic oligonucleotide
  Target: ATXN2; (-) strand; PAM type: YTN; PAM sequence: CTC
agaagggagtttacttttct

SEQ ID NO: 57094 - DNA, 20 bp, Artificial Sequence
  Description of Artificial Sequence: Synthetic oligonucleotide
  Target: ATXN2; (-) strand; PAM type: YTN; PAM sequence: CTG
gggcactcagaagggagttt

SEQ ID NO: 57095 - DNA, 20 bp, Artificial Sequence
  Description of Artificial Sequence: Synthetic oligonucleotide
  Target: ATXN2; (-) strand; PAM type: YTN; PAM sequence: TTC
caaagggctggggcactcag

SEQ ID NO: 57096 - DNA, 20 bp, Artificial Sequence
  Description of Artificial Sequence: Synthetic oligonucleotide
  Target: ATXN2; (-) strand; PAM type: YTN; PAM sequence: TTT
ccaaagggctggggcactca

SEQ ID NO: 57097 - DNA, 20 bp, Artificial Sequence
  Description of Artificial Sequence: Synthetic oligonucleotide
  Target: ATXN2; (-) strand; PAM type: YTN; PAM sequence: CTT
tccaaagggctggggcactc

SEQ ID NO: 57098 - DNA, 20 bp, Artificial Sequence
  Description of Artificial Sequence: Synthetic oligonucleotide
  Target: ATXN2; (-) strand; PAM type: YTN; PAM sequence: TTC
tttccaaagggctggggcac

SEQ ID NO: 57099 - DNA, 20 bp, Artificial Sequence
  Description of Artificial Sequence: Synthetic oligonucleotide
  Target: ATXN2; (-) strand; PAM type: YTN; PAM sequence: TTT
ctttccaaagggctggggca

SEQ ID NO: 57100 - DNA, 20 bp, Artificial Sequence
  Description of Artificial Sequence: Synthetic oligonucleotide
  Target: ATXN2; (-) strand; PAM type: YTN; PAM sequence: CTA
gtaaatttctttccaaaggg

SEQ ID NO: 57101 - DNA, 20 bp, Artificial Sequence
  Description of Artificial Sequence: Synthetic oligonucleotide
  Target: ATXN2; (-) strand; PAM type: YTN; PAM sequence: TTA
gtctagtaaatttctttcca

SEQ ID NO: 57102 - DNA, 20 bp, Artificial Sequence
  Description of Artificial Sequence: Synthetic oligonucleotide
  Target: ATXN2; (-) strand; PAM type: YTN; PAM sequence: TTG
aagttagtctagtaaatttc

SEQ ID NO: 57103 - DNA, 20 bp, Artificial Sequence
  Description of Artificial Sequence: Synthetic oligonucleotide
  Target: ATXN2; (-) strand; PAM type: YTN; PAM sequence: TTT
gaagttagtctagtaaattt

SEQ ID NO: 57104 - DNA, 20 bp, Artificial Sequence
  Description of Artificial Sequence: Synthetic oligonucleotide
  Target: ATXN2; (-) strand; PAM type: YTN; PAM sequence: CTT
tgaagttagtctagtaaatt

SEQ ID NO: 57105 - DNA, 20 bp, Artificial Sequence
  Description of Artificial Sequence: Synthetic oligonucleotide
  Target: ATXN2; (-) strand; PAM type: YTN; PAM sequence: TTG
tcctttgaagttagtctagt

SEQ ID NO: 57106 - DNA, 20 bp, Artificial Sequence
  Description of Artificial Sequence: Synthetic oligonucleotide
  Target: ATXN2; (-) strand; PAM type: YTN; PAM sequence: CTG
gcccatcatgttgtcctttg

SEQ ID NO: 57107 - DNA, 20 bp, Artificial Sequence
  Description of Artificial Sequence: Synthetic oligonucleotide
  Target: ATXN2; (-) strand; PAM type: YTN; PAM sequence: TTA
aactggcccatcatgttgtc

SEQ ID NO: 57108 - DNA, 20 bp, Artificial Sequence
  Description of Artificial Sequence: Synthetic oligonucleotide
  Target: ATXN2; (-) strand; PAM type: YTN; PAM sequence: TTT
aaactggcccatcatgttgt

SEQ ID NO: 57109 - DNA, 20 bp, Artificial Sequence
  Description of Artificial Sequence: Synthetic oligonucleotide
  Target: ATXN2; (-) strand; PAM type: YTN; PAM sequence: TTG
atttaaactggcccatcatg

SEQ ID NO: 57110 - DNA, 20 bp, Artificial Sequence
  Description of Artificial Sequence: Synthetic oligonucleotide
  Target: ATXN2; (-) strand; PAM type: YTN; PAM sequence: TTT
gatttaaactggcccatcat

SEQ ID NO: 57111 - DNA, 20 bp, Artificial Sequence
  Description of Artificial Sequence: Synthetic oligonucleotide
  Target: ATXN2; (-) strand; PAM type: YTN; PAM sequence: TTT
tgatttaaactggcccatca

SEQ ID NO: 57112 - DNA, 20 bp, Artificial Sequence
  Description of Artificial Sequence: Synthetic oligonucleotide
  Target: ATXN2; (-) strand; PAM type: YTN; PAM sequence: TTA
ttttgatttaaactggccca

SEQ ID NO: 57113 - DNA, 20 bp, Artificial Sequence
  Description of Artificial Sequence: Synthetic oligonucleotide
  Target: ATXN2; (-) strand; PAM type: YTN; PAM sequence: TTT
attttgatttaaactggccc

SEQ ID NO: 57114 - DNA, 20 bp, Artificial Sequence
  Description of Artificial Sequence: Synthetic oligonucleotide
  Target: ATXN2; (-) strand; PAM type: YTN; PAM sequence: CTT
tattttgatttaaactggcc

SEQ ID NO: 57115 - DNA, 20 bp, Artificial Sequence
  Description of Artificial Sequence: Synthetic oligonucleotide
  Target: ATXN2; (-) strand; PAM type: YTN; PAM sequence: TTA
tctttattttgatttaaact

SEQ ID NO: 57116 - DNA, 20 bp, Artificial Sequence
  Description of Artificial Sequence: Synthetic oligonucleotide
  Target: ATXN2; (-) strand; PAM type: YTN; PAM sequence: CTT
atctttattttgatttaaac

SEQ ID NO: 57117 - DNA, 20 bp, Artificial Sequence
  Description of Artificial Sequence: Synthetic oligonucleotide
  Target: ATXN2; (-) strand; PAM type: YTN; PAM sequence: TTC
ttatctttattttgatttaa

SEQ ID NO: 57118 - DNA, 20 bp, Artificial Sequence
  Description of Artificial Sequence: Synthetic oligonucleotide
  Target: ATXN2; (-) strand; PAM type: YTN; PAM sequence: TTC
agttcttatctttattttga

SEQ ID NO: 57119 - DNA, 20 bp, Artificial Sequence
  Description of Artificial Sequence: Synthetic oligonucleotide
  Target: ATXN2; (-) strand; PAM type: YTN; PAM sequence: TTT
cagttcttatctttattttg

SEQ ID NO: 57120 - DNA, 20 bp, Artificial Sequence
  Description of Artificial Sequence: Synthetic oligonucleotide
  Target: ATXN2; (-) strand; PAM type: YTN; PAM sequence: CTT
tcagttcttatctttatttt

SEQ ID NO: 57121 - DNA, 20 bp, Artificial Sequence
  Description of Artificial Sequence: Synthetic oligonucleotide
  Target: ATXN2; (-) strand; PAM type: YTN; PAM sequence: CTG
gctttcagttcttatcttta

SEQ ID NO: 57122 - DNA, 20 bp, Artificial Sequence
  Description of Artificial Sequence: Synthetic oligonucleotide
  Target: ATXN2; (-) strand; PAM type: YTN; PAM sequence: TTC
acaaagaactggctttcagt

SEQ ID NO: 57123 - DNA, 20 bp, Artificial Sequence
  Description of Artificial Sequence: Synthetic oligonucleotide
  Target: ATXN2; (-) strand; PAM type: YTN; PAM sequence: CTG
agattcacaaagaactggct

SEQ ID NO: 57124 - DNA, 20 bp, Artificial Sequence
  Description of Artificial Sequence: Synthetic oligonucleotide
  Target: ATXN2; (-) strand; PAM type: YTN; PAM sequence: TTG
gcccacgctgagattcacaa

SEQ ID NO: 57125 - DNA, 20 bp, Artificial Sequence
  Description of Artificial Sequence: Synthetic oligonucleotide
  Target: ATXN2; (-) strand; PAM type: YTN; PAM sequence: TTT
ggcccacgctgagattcaca

SEQ ID NO: 57126 - DNA, 20 bp, Artificial Sequence
  Description of Artificial Sequence: Synthetic oligonucleotide
  Target: ATXN2; (-) strand; PAM type: YTN; PAM sequence: TTG
taccaaggtttggcccacgc

SEQ ID NO: 57127 - DNA, 20 bp, Artificial Sequence
  Description of Artificial Sequence: Synthetic oligonucleotide
  Target: ATXN2; (-) strand; PAM type: YTN; PAM sequence: TTT
gtaccaaggtttggcccacg

SEQ ID NO: 57128 - DNA, 20 bp, Artificial Sequence
  Description of Artificial Sequence: Synthetic oligonucleotide
  Target: ATXN2; (-) strand; PAM type: YTN; PAM sequence: TTT
tgtaccaaggtttggcccac

SEQ ID NO: 57129 - DNA, 20 bp, Artificial Sequence
  Description of Artificial Sequence: Synthetic oligonucleotide
  Target: ATXN2; (-) strand; PAM type: YTN; PAM sequence: TTT
ttgtaccaaggtttggccca

SEQ ID NO: 57130 - DNA, 20 bp, Artificial Sequence
  Description of Artificial Sequence: Synthetic oligonucleotide
  Target: ATXN2; (-) strand; PAM type: YTN; PAM sequence: CTG
aaagacatgaagaaatggtt

SEQ ID NO: 57131 - DNA, 20 bp, Artificial Sequence
  Description of Artificial Sequence: Synthetic oligonucleotide
  Target: ATXN2; (-) strand; PAM type: YTN; PAM sequence: CTC
aaaaaaaaacaaaaaacaaa

SEQ ID NO: 57132 - DNA, 20 bp, Artificial Sequence
  Description of Artificial Sequence: Synthetic oligonucleotide
  Target: ATXN2; (-) strand; PAM type: YTN; PAM sequence: TTA
tatctcaaaaaaaaacaaaa

SEQ ID NO: 57133 - DNA, 20 bp, Artificial Sequence
  Description of Artificial Sequence: Synthetic oligonucleotide
  Target: ATXN2; (-) strand; PAM type: YTN; PAM sequence: CTT
atatctcaaaaaaaaacaaa

SEQ ID NO: 57134 - DNA, 20 bp, Artificial Sequence
  Description of Artificial Sequence: Synthetic oligonucleotide
  Target: ATXN2; (-) strand; PAM type: YTN; PAM sequence: CTG
ggcaacagagtgagtgagac

SEQ ID NO: 57135 - DNA, 20 bp, Artificial Sequence
  Description of Artificial Sequence: Synthetic oligonucleotide
  Target: ATXN2; (-) strand; PAM type: YTN; PAM sequence: TTG
cagtgagcctgggcaacaga

SEQ ID NO: 57136 - DNA, 20 bp, Artificial Sequence
  Description of Artificial Sequence: Synthetic oligonucleotide
  Target: ATXN2; (-) strand; PAM type: YTN; PAM sequence: CTG
ggaggcagaggttgcagtga

SEQ ID NO: 57137 - DNA, 20 bp, Artificial Sequence
  Description of Artificial Sequence: Synthetic oligonucleotide
  Target: ATXN2; (-) strand; PAM type: YTN; PAM sequence: TTG
aacctgggaggcagaggttg

SEQ ID NO: 57138 - DNA, 20 bp, Artificial Sequence
  Description of Artificial Sequence: Synthetic oligonucleotide
  Target: ATXN2; (-) strand; PAM type: YTN; PAM sequence: CTT
gaacctgggaggcagaggtt

SEQ ID NO: 57139 - DNA, 20 bp, Artificial Sequence
  Description of Artificial Sequence: Synthetic oligonucleotide
  Target: ATXN2; (-) strand; PAM type: YTN; PAM sequence: TTG
cttgaacctgggaggcagag

SEQ ID NO: 57140 - DNA, 20 bp, Artificial Sequence
  Description of Artificial Sequence: Synthetic oligonucleotide
  Target: ATXN2; (-) strand; PAM type: YTN; PAM sequence: CTG
aggcaggagaattgcttgaa

SEQ ID NO: 57141 - DNA, 20 bp, Artificial Sequence
  Description of Artificial Sequence: Synthetic oligonucleotide
  Target: ATXN2; (-) strand; PAM type: YTN; PAM sequence: CTC
gggaggctgaggcaggagaa

SEQ ID NO: 57142 - DNA, 20 bp, Artificial Sequence
  Description of Artificial Sequence: Synthetic oligonucleotide
  Target: ATXN2; (-) strand; PAM type: YTN; PAM sequence: CTA
ctcgggaggctgaggcagga

SEQ ID NO: 57143 - DNA, 20 bp, Artificial Sequence
  Description of Artificial Sequence: Synthetic oligonucleotide
  Target: ATXN2; (-) strand; PAM type: YTN; PAM sequence: CTC
agctactcgggaggctgagg

SEQ ID NO: 57144 - DNA, 20 bp, Artificial Sequence
  Description of Artificial Sequence: Synthetic oligonucleotide
  Target: ATXN2; (-) strand; PAM type: YTN; PAM sequence: CTG
taatctcagctactcgggag

SEQ ID NO: 57145 - DNA, 20 bp, Artificial Sequence
  Description of Artificial Sequence: Synthetic oligonucleotide
  Target: ATXN2; (-) strand; PAM type: YTN; PAM sequence: CTG
ggcgtggtggcacatgcctg

SEQ ID NO: 57146 - DNA, 20 bp, Artificial Sequence
  Description of Artificial Sequence: Synthetic oligonucleotide
  Target: ATXN2; (-) strand; PAM type: YTN; PAM sequence: TTA
gctgggcgtggtggcacatg

SEQ ID NO: 57147 - DNA, 20 bp, Artificial Sequence
  Description of Artificial Sequence: Synthetic oligonucleotide
  Target: ATXN2; (-) strand; PAM type: YTN; PAM sequence: CTA
aaaatacaaaaattagctgg

SEQ ID NO: 57148 - DNA, 20 bp, Artificial Sequence
  Description of Artificial Sequence: Synthetic oligonucleotide
  Target: ATXN2; (-) strand; PAM type: YTN; PAM sequence: CTA
ctaaaaatacaaaaattagc

SEQ ID NO: 57149 - DNA, 20 bp, Artificial Sequence
  Description of Artificial Sequence: Synthetic oligonucleotide
  Target: ATXN2; (-) strand; PAM type: YTN; PAM sequence: CTC
tactaaaaatacaaaaatta

SEQ ID NO: 57150 - DNA, 20 bp, Artificial Sequence
  Description of Artificial Sequence: Synthetic oligonucleotide
  Target: ATXN2; (-) strand; PAM type: YTN; PAM sequence: CTG
gccagcatggcgaaacccca

SEQ ID NO: 57151 - DNA, 20 bp, Artificial Sequence
  Description of Artificial Sequence: Synthetic oligonucleotide
  Target: ATXN2; (-) strand; PAM type: YTN; PAM sequence: TTG
agatcagcctggccagcatg

SEQ ID NO: 57152 - DNA, 20 bp, Artificial Sequence
  Description of Artificial Sequence: Synthetic oligonucleotide
  Target: ATXN2; (-) strand; PAM type: YTN; PAM sequence: TTT
gagatcagcctggccagcat

SEQ ID NO: 57153 - DNA, 20 bp, Artificial Sequence
  Description of Artificial Sequence: Synthetic oligonucleotide
  Target: ATXN2; (-) strand; PAM type: YTN; PAM sequence: TTG
aggtcaggagtttgagatca

SEQ ID NO: 57154 - DNA, 20 bp, Artificial Sequence
  Description of Artificial Sequence: Synthetic oligonucleotide
  Target: ATXN2; (-) strand; PAM type: YTN; PAM sequence: TTT
gaggtcaggagtttgagatc

SEQ ID NO: 57155 - DNA, 20 bp, Artificial Sequence
  Description of Artificial Sequence: Synthetic oligonucleotide
  Target: ATXN2; (-) strand; PAM type: YTN; PAM sequence: CTG
aagtgggcggatcatttgag

SEQ ID NO: 57156 - DNA, 20 bp, Artificial Sequence
  Description of Artificial Sequence: Synthetic oligonucleotide
  Target: ATXN2; (-) strand; PAM type: YTN; PAM sequence: TTG
ggaggctgaagtgggcggat

SEQ ID NO: 57157 - DNA, 20 bp, Artificial Sequence
  Description of Artificial Sequence: Synthetic oligonucleotide
  Target: ATXN2; (-) strand; PAM type: YTN; PAM sequence: TTT
gggaggctgaagtgggcgga

SEQ ID NO: 57158 - DNA, 20 bp, Artificial Sequence
  Description of Artificial Sequence: Synthetic oligonucleotide
  Target: ATXN2; (-) strand; PAM type: YTN; PAM sequence: CTT
tgggaggctgaagtgggcgg

SEQ ID NO: 57159 - DNA, 20 bp, Artificial Sequence
  Description of Artificial Sequence: Synthetic oligonucleotide
  Target: ATXN2; (-) strand; PAM type: YTN; PAM sequence: CTG
taatcccagcactttgggag

SEQ ID NO: 57160 - DNA, 20 bp, Artificial Sequence
  Description of Artificial Sequence: Synthetic oligonucleotide
  Target: ATXN2; (-) strand; PAM type: YTN; PAM sequence: CTC
acgtctgtaatcccagcact

SEQ ID NO: 57161 - DNA, 20 bp, Artificial Sequence
  Description of Artificial Sequence: Synthetic oligonucleotide
  Target: ATXN2; (-) strand; PAM type: YTN; PAM sequence: TTG
aagcacatgaacaggccagg

SEQ ID NO: 57162 - DNA, 20 bp, Artificial Sequence
  Description of Artificial Sequence: Synthetic oligonucleotide
  Target: ATXN2; (-) strand; PAM type: YTN; PAM sequence: TTT
gaagcacatgaacaggccag

SEQ ID NO: 57163 - DNA, 20 bp, Artificial Sequence
  Description of Artificial Sequence: Synthetic oligonucleotide
  Target: ATXN2; (-) strand; PAM type: YTN; PAM sequence: TTT
tgaagcacatgaacaggcca

SEQ ID NO: 57164 - DNA, 20 bp, Artificial Sequence
  Description of Artificial Sequence: Synthetic oligonucleotide
  Target: ATXN2; (-) strand; PAM type: YTN; PAM sequence: TTT
ttgaagcacatgaacaggcc

SEQ ID NO: 57165 - DNA, 20 bp, Artificial Sequence
  Description of Artificial Sequence: Synthetic oligonucleotide
  Target: ATXN2; (-) strand; PAM type: YTN; PAM sequence: CTG
tttttgaagcacatgaacag

SEQ ID NO: 57166 - DNA, 20 bp, Artificial Sequence
  Description of Artificial Sequence: Synthetic oligonucleotide
  Target: ATXN2; (-) strand; PAM type: YTN; PAM sequence: TTA
ctgtttttgaagcacatgaa

SEQ ID NO: 57167 - DNA, 20 bp, Artificial Sequence
  Description of Artificial Sequence: Synthetic oligonucleotide
  Target: ATXN2; (-) strand; PAM type: YTN; PAM sequence: CTT
actgtttttgaagcacatga

SEQ ID NO: 57168 - DNA, 20 bp, Artificial Sequence
  Description of Artificial Sequence: Synthetic oligonucleotide
  Target: ATXN2; (-) strand; PAM type: YTN; PAM sequence: CTC
aacttactgtttttgaagca

SEQ ID NO: 57169 - DNA, 20 bp, Artificial Sequence
  Description of Artificial Sequence: Synthetic oligonucleotide
  Target: ATXN2; (-) strand; PAM type: YTN; PAM sequence: TTC
tcaacttactgtttttgaag

SEQ ID NO: 57170 - DNA, 20 bp, Artificial Sequence
  Description of Artificial Sequence: Synthetic oligonucleotide
  Target: ATXN2; (-) strand; PAM type: YTN; PAM sequence: CTG
attctcaacttactgttttt

SEQ ID NO: 57171 - DNA, 20 bp, Artificial Sequence
  Description of Artificial Sequence: Synthetic oligonucleotide
  Target: ATXN2; (-) strand; PAM type: YTN; PAM sequence: TTC
tgattctcaacttactgttt

SEQ ID NO: 57172 - DNA, 20 bp, Artificial Sequence
  Description of Artificial Sequence: Synthetic oligonucleotide
  Target: ATXN2; (-) strand; PAM type: YTN; PAM sequence: CTT
ctgattctcaacttactgtt

SEQ ID NO: 57173 - DNA, 20 bp, Artificial Sequence
  Description of Artificial Sequence: Synthetic oligonucleotide
  Target: ATXN2; (-) strand; PAM type: YTN; PAM sequence: CTG
cttctgattctcaacttact

SEQ ID NO: 57174 - DNA, 20 bp, Artificial Sequence
  Description of Artificial Sequence: Synthetic oligonucleotide
  Target: ATXN2; (-) strand; PAM type: YTN; PAM sequence: CTC
tgcttctgattctcaactta

SEQ ID NO: 57175 - DNA, 20 bp, Artificial Sequence
  Description of Artificial Sequence: Synthetic oligonucleotide
  Target: ATXN2; (-) strand; PAM type: YTN; PAM sequence: CTA
ctctgcttctgattctcaac

SEQ ID NO: 57176 - DNA, 20 bp, Artificial Sequence
  Description of Artificial Sequence: Synthetic oligonucleotide
  Target: ATXN2; (-) strand; PAM type: YTN; PAM sequence: CTG
gaagcagtgaacacatccta

SEQ ID NO: 57177 - DNA, 20 bp, Artificial Sequence
  Description of Artificial Sequence: Synthetic oligonucleotide
  Target: ATXN2; (-) strand; PAM type: YTN; PAM sequence: CTG
tccatagtcactggaagcag

SEQ ID NO: 57178 - DNA, 20 bp, Artificial Sequence
  Description of Artificial Sequence: Synthetic oligonucleotide
  Target: ATXN2; (-) strand; PAM type: YTN; PAM sequence: TTA
tcatcggtgtgctgtccata

SEQ ID NO: 57179 - DNA, 20 bp, Artificial Sequence
  Description of Artificial Sequence: Synthetic oligonucleotide
  Target: ATXN2; (-) strand; PAM type: YTN; PAM sequence: TTT
atcatcggtgtgctgtccat

SEQ ID NO: 57180 - DNA, 20 bp, Artificial Sequence
  Description of Artificial Sequence: Synthetic oligonucleotide
  Target: ATXN2; (-) strand; PAM type: YTN; PAM sequence: TTT
tatcatcggtgtgctgtcca

SEQ ID NO: 57181 - DNA, 20 bp, Artificial Sequence
  Description of Artificial Sequence: Synthetic oligonucleotide
  Target: ATXN2; (-) strand; PAM type: YTN; PAM sequence: TTT
ttatcatcggtgtgctgtcc

SEQ ID NO: 57182 - DNA, 20 bp, Artificial Sequence
  Description of Artificial Sequence: Synthetic oligonucleotide
  Target: ATXN2; (-) strand; PAM type: YTN; PAM sequence: TTT
tttatcatcggtgtgctgtc

SEQ ID NO: 57183 - DNA, 20 bp, Artificial Sequence
  Description of Artificial Sequence: Synthetic oligonucleotide
  Target: ATXN2; (-) strand; PAM type: YTN; PAM sequence: TTA
gttttttatcatcggtgtgc

SEQ ID NO: 57184 - DNA, 20 bp, Artificial Sequence
  Description of Artificial Sequence: Synthetic oligonucleotide
  Target: ATXN2; (-) strand; PAM type: YTN; PAM sequence: CTC
gtggaggttagttttttatc

SEQ ID NO: 57185 - DNA, 20 bp, Artificial Sequence
  Description of Artificial Sequence: Synthetic oligonucleotide
  Target: ATXN2; (-) strand; PAM type: YTN; PAM sequence: TTG
cctcgtggaggttagttttt

SEQ ID NO: 57186 - DNA, 20 bp, Artificial Sequence
  Description of Artificial Sequence: Synthetic oligonucleotide
  Target: ATXN2; (-) strand; PAM type: YTN; PAM sequence: CTC
attgcctcgtggaggttagt

SEQ ID NO: 57187 - DNA, 20 bp, Artificial Sequence
  Description of Artificial Sequence: Synthetic oligonucleotide
  Target: ATXN2; (-) strand; PAM type: YTN; PAM sequence: CTC
agctcattgcctcgtggagg

SEQ ID NO: 57188 - DNA, 20 bp, Artificial Sequence
  Description of Artificial Sequence: Synthetic oligonucleotide
  Target: ATXN2; (-) strand; PAM type: YTN; PAM sequence: TTC
tcagctcattgcctcgtgga

SEQ ID NO: 57189 - DNA, 20 bp, Artificial Sequence
  Description of Artificial Sequence: Synthetic oligonucleotide
  Target: ATXN2; (-) strand; PAM type: YTN; PAM sequence: CTA
ttctcagctcattgcctcgt

SEQ ID NO: 57190 - DNA, 20 bp, Artificial Sequence
  Description of Artificial Sequence: Synthetic oligonucleotide
  Target: ATXN2; (-) strand; PAM type: YTN; PAM sequence: CTC
tattctcagctcattgcctc

SEQ ID NO: 57191 - DNA, 20 bp, Artificial Sequence
  Description of Artificial Sequence: Synthetic oligonucleotide
  Target: ATXN2; (-) strand; PAM type: YTN; PAM sequence: TTG
agaacgctctattctcagct

SEQ ID NO: 57192 - DNA, 20 bp, Artificial Sequence
  Description of Artificial Sequence: Synthetic oligonucleotide
  Target: ATXN2; (-) strand; PAM type: YTN; PAM sequence: CTT
gagaacgctctattctcagc

SEQ ID NO: 57193 - DNA, 20 bp, Artificial Sequence
  Description of Artificial Sequence: Synthetic oligonucleotide
  Target: ATXN2; (-) strand; PAM type: YTN; PAM sequence: TTG
tcttgagaacgctctattct

SEQ ID NO: 57194 - DNA, 20 bp, Artificial Sequence
  Description of Artificial Sequence: Synthetic oligonucleotide
  Target: ATXN2; (-) strand; PAM type: YTN; PAM sequence: CTA
gagttgtcttgagaacgctc

SEQ ID NO: 57195 - DNA, 20 bp, Artificial Sequence
  Description of Artificial Sequence: Synthetic oligonucleotide
  Target: ATXN2; (-) strand; PAM type: YTN; PAM sequence: TTG
ctagagttgtcttgagaacg

SEQ ID NO: 57196 - DNA, 20 bp, Artificial Sequence
  Description of Artificial Sequence: Synthetic oligonucleotide
  Target: ATXN2; (-) strand; PAM type: YTN; PAM sequence: CTT
gctagagttgtcttgagaac

SEQ ID NO: 57197 - DNA, 20 bp, Artificial Sequence
  Description of Artificial Sequence: Synthetic oligonucleotide
  Target: ATXN2; (-) strand; PAM type: YTN; PAM sequence: CTA
taccttgctagagttgtctt

SEQ ID NO: 57198 - DNA, 20 bp, Artificial Sequence
  Description of Artificial Sequence: Synthetic oligonucleotide
  Target: ATXN2; (-) strand; PAM type: YTN; PAM sequence: CTG
ggaactataccttgctagag

SEQ ID NO: 57199 - DNA, 20 bp, Artificial Sequence
  Description of Artificial Sequence: Synthetic oligonucleotide
  Target: ATXN2; (-) strand; PAM type: YTN; PAM sequence: CTC
aagagagggctgggaactat

SEQ ID NO: 57200 - DNA, 20 bp, Artificial Sequence
  Description of Artificial Sequence: Synthetic oligonucleotide
  Target: ATXN2; (-) strand; PAM type: YTN; PAM sequence: TTC
tcaagagagggctgggaact

SEQ ID NO: 57201 - DNA, 20 bp, Artificial Sequence
  Description of Artificial Sequence: Synthetic oligonucleotide
  Target: ATXN2; (-) strand; PAM type: YTN; PAM sequence: TTT
ctcaagagagggctgggaac

SEQ ID NO: 57202 - DNA, 20 bp, Artificial Sequence
  Description of Artificial Sequence: Synthetic oligonucleotide
  Target: ATXN2; (-) strand; PAM type: YTN; PAM sequence: TTG
tttctcaagagagggctggg

SEQ ID NO: 57203 - DNA, 20 bp, Artificial Sequence
  Description of Artificial Sequence: Synthetic oligonucleotide
  Target: ATXN2; (-) strand; PAM type: YTN; PAM sequence: TTT
gtttctcaagagagggctgg

SEQ ID NO: 57204 - DNA, 20 bp, Artificial Sequence
  Description of Artificial Sequence: Synthetic oligonucleotide
  Target: ATXN2; (-) strand; PAM type: YTN; PAM sequence: TTA
ggatttgtttctcaagagag

SEQ ID NO: 57205 - DNA, 20 bp, Artificial Sequence
  Description of Artificial Sequence: Synthetic oligonucleotide
  Target: ATXN2; (-) strand; PAM type: YTN; PAM sequence: TTT
aggatttgtttctcaagaga

SEQ ID NO: 57206 - DNA, 20 bp, Artificial Sequence
  Description of Artificial Sequence: Synthetic oligonucleotide
  Target: ATXN2; (-) strand; PAM type: YTN; PAM sequence: TTT
taggatttgtttctcaagag

SEQ ID NO: 57207 - DNA, 20 bp, Artificial Sequence
  Description of Artificial Sequence: Synthetic oligonucleotide
  Target: ATXN2; (-) strand; PAM type: YTN; PAM sequence: TTG
agggattttaggatttgttt

SEQ ID NO: 57208 - DNA, 20 bp, Artificial Sequence
  Description of Artificial Sequence: Synthetic oligonucleotide
  Target: ATXN2; (-) strand; PAM type: YTN; PAM sequence: CTT
gagggattttaggatttgtt

SEQ ID NO: 57209 - DNA, 20 bp, Artificial Sequence
  Description of Artificial Sequence: Synthetic oligonucleotide
  Target: ATXN2; (-) strand; PAM type: YTN; PAM sequence: TTA
tcttgagggattttaggatt

SEQ ID NO: 57210 - DNA, 20 bp, Artificial Sequence
  Description of Artificial Sequence: Synthetic oligonucleotide
  Target: ATXN2; (-) strand; PAM type: YTN; PAM sequence: TTA
ttatcttgagggattttagg

SEQ ID NO: 57211 - DNA, 20 bp, Artificial Sequence
  Description of Artificial Sequence: Synthetic oligonucleotide
  Target: ATXN2; (-) strand; PAM type: YTN; PAM sequence: CTT
attatcttgagggattttag

SEQ ID NO: 57212 - DNA, 20 bp, Artificial Sequence
  Description of Artificial Sequence: Synthetic oligonucleotide
  Target: ATXN2; (-) strand; PAM type: YTN; PAM sequence: CTG
tgtatgggcttattatcttg

SEQ ID NO: 57213 - DNA, 20 bp, Artificial Sequence
  Description of Artificial Sequence: Synthetic oligonucleotide
  Target: ATXN2; (-) strand; PAM type: YTN; PAM sequence: TTC
tgtgtatgggcttattatct

SEQ ID NO: 57214 - DNA, 20 bp, Artificial Sequence
  Description of Artificial Sequence: Synthetic oligonucleotide
  Target: ATXN2; (-) strand; PAM type: YTN; PAM sequence: TTT
ctgtgtatgggcttattatc

SEQ ID NO: 57215 - DNA, 20 bp, Artificial Sequence
  Description of Artificial Sequence: Synthetic oligonucleotide
  Target: ATXN2; (-) strand; PAM type: YTN; PAM sequence: TTG
gaatcatttctgtgtatggg

SEQ ID NO: 57216 - DNA, 20 bp, Artificial Sequence
  Description of Artificial Sequence: Synthetic oligonucleotide
  Target: ATXN2; (-) strand; PAM type: YTN; PAM sequence: TTT
ggaatcatttctgtgtatgg

SEQ ID NO: 57217 - DNA, 20 bp, Artificial Sequence
  Description of Artificial Sequence: Synthetic oligonucleotide
  Target: ATXN2; (-) strand; PAM type: YTN; PAM sequence: TTT
tggaatcatttctgtgtatg

SEQ ID NO: 57218 - DNA, 20 bp, Artificial Sequence
  Description of Artificial Sequence: Synthetic oligonucleotide
  Target: ATXN2; (-) strand; PAM type: YTN; PAM sequence: CTA
ttttggaatcatttctgtgt

SEQ ID NO: 57219 - DNA, 20 bp, Artificial Sequence
  Description of Artificial Sequence: Synthetic oligonucleotide
  Target: ATXN2; (-) strand; PAM type: YTN; PAM sequence: TTA
tatgaagaatgtggggaact

SEQ ID NO: 57220 - DNA, 20 bp, Artificial Sequence
  Description of Artificial Sequence: Synthetic oligonucleotide
  Target: ATXN2; (-) strand; PAM type: YTN; PAM sequence: CTA
acacgttatatgaagaatgt

SEQ ID NO: 57221 - DNA, 20 bp, Artificial Sequence
  Description of Artificial Sequence: Synthetic oligonucleotide
  Target: ATXN2; (-) strand; PAM type: YTN; PAM sequence: TTG
ctaacacgttatatgaagaa

SEQ ID NO: 57222 - DNA, 20 bp, Artificial Sequence
  Description of Artificial Sequence: Synthetic oligonucleotide
  Target: ATXN2; (-) strand; PAM type: YTN; PAM sequence: TTT
gctaacacgttatatgaaga

SEQ ID NO: 57223 - DNA, 20 bp, Artificial Sequence
  Description of Artificial Sequence: Synthetic oligonucleotide
  Target: ATXN2; (-) strand; PAM type: YTN; PAM sequence: CTG
tgtttgctaacacgttatat

SEQ ID NO: 57224 - DNA, 20 bp, Artificial Sequence
  Description of Artificial Sequence: Synthetic oligonucleotide
  Target: ATXN2; (-) strand; PAM type: YTN; PAM sequence: CTG
catatgtctgtgtttgctaa

SEQ ID NO: 57225 - DNA, 20 bp, Artificial Sequence
  Description of Artificial Sequence: Synthetic oligonucleotide
  Target: ATXN2; (-) strand; PAM type: YTN; PAM sequence: CTC
accaatcagtcctgcatatg

SEQ ID NO: 57226 - DNA, 20 bp, Artificial Sequence
  Description of Artificial Sequence: Synthetic oligonucleotide
  Target: ATXN2; (-) strand; PAM type: YTN; PAM sequence: CTC
tcaccaatcagtcctgcata

SEQ ID NO: 57227 - DNA, 20 bp, Artificial Sequence
  Description of Artificial Sequence: Synthetic oligonucleotide
  Target: ATXN2; (-) strand; PAM type: YTN; PAM sequence: TTC
tctcaccaatcagtcctgca

SEQ ID NO: 57228 - DNA, 20 bp, Artificial Sequence
  Description of Artificial Sequence: Synthetic oligonucleotide
  Target: ATXN2; (-) strand; PAM type: YTN; PAM sequence: CTT
ctctcaccaatcagtcctgc

SEQ ID NO: 57229 - DNA, 20 bp, Artificial Sequence
  Description of Artificial Sequence: Synthetic oligonucleotide
  Target: ATXN2; (-) strand; PAM type: YTN; PAM sequence: TTG
cttctctcaccaatcagtcc

SEQ ID NO: 57230 - DNA, 20 bp, Artificial Sequence
  Description of Artificial Sequence: Synthetic oligonucleotide
  Target: ATXN2; (-) strand; PAM type: YTN; PAM sequence: CTT
gcttctctcaccaatcagtc

SEQ ID NO: 57231 - DNA, 20 bp, Artificial Sequence
  Description of Artificial Sequence: Synthetic oligonucleotide
  Target: ATXN2; (-) strand; PAM type: YTN; PAM sequence: CTG
tgcttgcttctctcaccaat

SEQ ID NO: 57232 - DNA, 20 bp, Artificial Sequence
  Description of Artificial Sequence: Synthetic oligonucleotide
  Target: ATXN2; (-) strand; PAM type: YTN; PAM sequence: TTC
ccaaagctgtgcttgcttct

SEQ ID NO: 57233 - DNA, 20 bp, Artificial Sequence
  Description of Artificial Sequence: Synthetic oligonucleotide
  Target: ATXN2; (-) strand; PAM type: YTN; PAM sequence: CTT
cccaaagctgtgcttgcttc

SEQ ID NO: 57234 - DNA, 20 bp, Artificial Sequence
  Description of Artificial Sequence: Synthetic oligonucleotide
  Target: ATXN2; (-) strand; PAM type: YTN; PAM sequence: CTC
ttcccaaagctgtgcttgct

SEQ ID NO: 57235 - DNA, 20 bp, Artificial Sequence
  Description of Artificial Sequence: Synthetic oligonucleotide
  Target: ATXN2; (-) strand; PAM type: YTN; PAM sequence: CTA
gggtgcctcttcccaaagct

SEQ ID NO: 57236 - DNA, 20 bp, Artificial Sequence
  Description of Artificial Sequence: Synthetic oligonucleotide
  Target: ATXN2; (-) strand; PAM type: YTN; PAM sequence: CTG
gaactagggtgcctcttccc

SEQ ID NO: 57237 - DNA, 20 bp, Artificial Sequence
  Description of Artificial Sequence: Synthetic oligonucleotide
  Target: ATXN2; (-) strand; PAM type: YTN; PAM sequence: CTG
ctggaactagggtgcctctt

SEQ ID NO: 57238 - DNA, 20 bp, Artificial Sequence
  Description of Artificial Sequence: Synthetic oligonucleotide
  Target: ATXN2; (-) strand; PAM type: YTN; PAM sequence: CTA
ccagactgctggaactaggg

SEQ ID NO: 57239 - DNA, 20 bp, Artificial Sequence
  Description of Artificial Sequence: Synthetic oligonucleotide
  Target: ATXN2; (-) strand; PAM type: YTN; PAM sequence: TTG
cctaccagactgctggaact

SEQ ID NO: 57240 - DNA, 20 bp, Artificial Sequence
  Description of Artificial Sequence: Synthetic oligonucleotide
  Target: ATXN2; (-) strand; PAM type: YTN; PAM sequence: CTT
gcctaccagactgctggaac

SEQ ID NO: 57241 - DNA, 20 bp, Artificial Sequence
  Description of Artificial Sequence: Synthetic oligonucleotide
  Target: ATXN2; (-) strand; PAM type: YTN; PAM sequence: CTC
ggcagccttgcctaccagac

SEQ ID NO: 57242 - DNA, 20 bp, Artificial Sequence
  Description of Artificial Sequence: Synthetic oligonucleotide
  Target: ATXN2; (-) strand; PAM type: YTN; PAM sequence: CTG
gtgactcggcagccttgcct

SEQ ID NO: 57243 - DNA, 20 bp, Artificial Sequence
  Description of Artificial Sequence: Synthetic oligonucleotide
  Target: ATXN2; (-) strand; PAM type: YTN; PAM sequence: CTA
tgctggtgactcggcagcct

SEQ ID NO: 57244 - DNA, 20 bp, Artificial Sequence
  Description of Artificial Sequence: Synthetic oligonucleotide
  Target: ATXN2; (-) strand; PAM type: YTN; PAM sequence: TTA
cgtggaatatacccagagcc

SEQ ID NO: 57245 - DNA, 20 bp, Artificial Sequence
  Description of Artificial Sequence: Synthetic oligonucleotide
  Target: ATXN2; (-) strand; PAM type: YTN; PAM sequence: TTT
acgtggaatatacccagagc

SEQ ID NO: 57246 - DNA, 20 bp, Artificial Sequence
  Description of Artificial Sequence: Synthetic oligonucleotide
  Target: ATXN2; (-) strand; PAM type: YTN; PAM sequence: CTG
cacaccatttacgtggaata

SEQ ID NO: 57247 - DNA, 20 bp, Artificial Sequence
  Description of Artificial Sequence: Synthetic oligonucleotide
  Target: ATXN2; (-) strand; PAM type: YTN; PAM sequence: CTC
tgcacaccatttacgtggaa

SEQ ID NO: 57248 - DNA, 20 bp, Artificial Sequence
  Description of Artificial Sequence: Synthetic oligonucleotide
  Target: ATXN2; (-) strand; PAM type: YTN; PAM sequence: CTA
accctctgcacaccatttac

SEQ ID NO: 57249 - DNA, 20 bp, Artificial Sequence
  Description of Artificial Sequence: Synthetic oligonucleotide
  Target: ATXN2; (-) strand; PAM type: YTN; PAM sequence: CTA
gcctaaccctctgcacacca

SEQ ID NO: 57250 - DNA, 20 bp, Artificial Sequence
  Description of Artificial Sequence: Synthetic oligonucleotide
  Target: ATXN2; (-) strand; PAM type: YTN; PAM sequence: CTC
catgtgcctagcctaaccct

SEQ ID NO: 57251 - DNA, 20 bp, Artificial Sequence
  Description of Artificial Sequence: Synthetic oligonucleotide
  Target: ATXN2; (-) strand; PAM type: YTN; PAM sequence: CTG
ctccatgtgcctagcctaac

SEQ ID NO: 57252 - DNA, 20 bp, Artificial Sequence
  Description of Artificial Sequence: Synthetic oligonucleotide
  Target: ATXN2; (-) strand; PAM type: YTN; PAM sequence: TTA
tagaactgctccatgtgcct

SEQ ID NO: 57253 - DNA, 20 bp, Artificial Sequence
  Description of Artificial Sequence: Synthetic oligonucleotide
  Target: ATXN2; (-) strand; PAM type: YTN; PAM sequence: CTA
ggattatagaactgctccat

SEQ ID NO: 57254 - DNA, 20 bp, Artificial Sequence
  Description of Artificial Sequence: Synthetic oligonucleotide
  Target: ATXN2; (-) strand; PAM type: YTN; PAM sequence: CTA
caacacctaggattatagaa

SEQ ID NO: 57255 - DNA, 20 bp, Artificial Sequence
  Description of Artificial Sequence: Synthetic oligonucleotide
  Target: ATXN2; (-) strand; PAM type: YTN; PAM sequence: TTA
gccctacaacacctaggatt

SEQ ID NO: 57256 - DNA, 20 bp, Artificial Sequence
  Description of Artificial Sequence: Synthetic oligonucleotide
  Target: ATXN2; (-) strand; PAM type: YTN; PAM sequence: CTT
agccctacaacacctaggat

SEQ ID NO: 57257 - DNA, 20 bp, Artificial Sequence
  Description of Artificial Sequence: Synthetic oligonucleotide
  Target: ATXN2; (-) strand; PAM type: YTN; PAM sequence: TTG
gtggcccttagccctacaac

SEQ ID NO: 57258 - DNA, 20 bp, Artificial Sequence
  Description of Artificial Sequence: Synthetic oligonucleotide
  Target: ATXN2; (-) strand; PAM type: YTN; PAM sequence: CTG
gagagttggtggcccttagc

SEQ ID NO: 57259 - DNA, 20 bp, Artificial Sequence
  Description of Artificial Sequence: Synthetic oligonucleotide
  Target: ATXN2; (-) strand; PAM type: YTN; PAM sequence: TTA
gggctggagagttggtggcc

SEQ ID NO: 57260 - DNA, 20 bp, Artificial Sequence
  Description of Artificial Sequence: Synthetic oligonucleotide
  Target: ATXN2; (-) strand; PAM type: YTN; PAM sequence: CTG
ttagggctggagagttggtg

SEQ ID NO: 57261 - DNA, 20 bp, Artificial Sequence
  Description of Artificial Sequence: Synthetic oligonucleotide
  Target: ATXN2; (-) strand; PAM type: YTN; PAM sequence: CTG
gagacgtaactgttagggct

SEQ ID NO: 57262 - DNA, 20 bp, Artificial Sequence
  Description of Artificial Sequence: Synthetic oligonucleotide
  Target: ATXN2; (-) strand; PAM type: YTN; PAM sequence: TTG
cagctggagacgtaactgtt

SEQ ID NO: 57263 - DNA, 20 bp, Artificial Sequence
  Description of Artificial Sequence: Synthetic oligonucleotide
  Target: ATXN2; (-) strand; PAM type: YTN; PAM sequence: TTT
gcagctggagacgtaactgt

SEQ ID NO: 57264 - DNA, 20 bp, Artificial Sequence
  Description of Artificial Sequence: Synthetic oligonucleotide
  Target: ATXN2; (-) strand; PAM type: YTN; PAM sequence: CTT
tgcagctggagacgtaactg

SEQ ID NO: 57265 - DNA, 20 bp, Artificial Sequence
  Description of Artificial Sequence: Synthetic oligonucleotide
  Target: ATXN2; (-) strand; PAM type: YTN; PAM sequence: CTA
agagatagctttgcagctgg

SEQ ID NO: 57266 - DNA, 20 bp, Artificial Sequence
  Description of Artificial Sequence: Synthetic oligonucleotide
  Target: ATXN2; (-) strand; PAM type: YTN; PAM sequence: CTG
ctaagagatagctttgcagc

SEQ ID NO: 57267 - DNA, 20 bp, Artificial Sequence
  Description of Artificial Sequence: Synthetic oligonucleotide
  Target: ATXN2; (-) strand; PAM type: YTN; PAM sequence: TTC
ccctgctaagagatagcttt

SEQ ID NO: 57268 - DNA, 20 bp, Artificial Sequence
  Description of Artificial Sequence: Synthetic oligonucleotide
  Target: ATXN2; (-) strand; PAM type: YTN; PAM sequence: TTT
cccctgctaagagatagctt

SEQ ID NO: 57269 - DNA, 20 bp, Artificial Sequence
  Description of Artificial Sequence: Synthetic oligonucleotide
  Target: ATXN2; (-) strand; PAM type: YTN; PAM sequence: CTT
tcccctgctaagagatagct

SEQ ID NO: 57270 - DNA, 20 bp, Artificial Sequence
  Description of Artificial Sequence: Synthetic oligonucleotide
  Target: ATXN2; (-) strand; PAM type: YTN; PAM sequence: TTG
ccctttcccctgctaagaga

SEQ ID NO: 57271 - DNA, 20 bp, Artificial Sequence
  Description of Artificial Sequence: Synthetic oligonucleotide
  Target: ATXN2; (-) strand; PAM type: YTN; PAM sequence: CTT
gccctttcccctgctaagag

SEQ ID NO: 57272 - DNA, 20 bp, Artificial Sequence
  Description of Artificial Sequence: Synthetic oligonucleotide
  Target: ATXN2; (-) strand; PAM type: YTN; PAM sequence: TTG
ccttgccctttcccctgcta

SEQ ID NO: 57273 - DNA, 20 bp, Artificial Sequence
  Description of Artificial Sequence: Synthetic oligonucleotide
  Target: ATXN2; (-) strand; PAM type: YTN; PAM sequence: TTT
gccttgccctttcccctgct

SEQ ID NO: 57274 - DNA, 20 bp, Artificial Sequence
  Description of Artificial Sequence: Synthetic oligonucleotide
  Target: ATXN2; (-) strand; PAM type: YTN; PAM sequence: CTT
tgccttgccctttcccctgc

SEQ ID NO: 57275 - DNA, 20 bp, Artificial Sequence
  Description of Artificial Sequence: Synthetic oligonucleotide
  Target: ATXN2; (-) strand; PAM type: YTN; PAM sequence: CTC
tttgccttgccctttcccct

SEQ ID NO: 57276 - DNA, 20 bp, Artificial Sequence
  Description of Artificial Sequence: Synthetic oligonucleotide
  Target: ATXN2; (-) strand; PAM type: YTN; PAM sequence: CTG
gctctttgccttgccctttc

SEQ ID NO: 57277 - DNA, 20 bp, Artificial Sequence
  Description of Artificial Sequence: Synthetic oligonucleotide
  Target: ATXN2; (-) strand; PAM type: YTN; PAM sequence: CTA
gaactggctctttgccttgc

SEQ ID NO: 57278 - DNA, 20 bp, Artificial Sequence
  Description of Artificial Sequence: Synthetic oligonucleotide
  Target: ATXN2; (-) strand; PAM type: YTN; PAM sequence: TTG
gcagtggatgcacaggtgat

SEQ ID NO: 57279 - DNA, 20 bp, Artificial Sequence
  Description of Artificial Sequence: Synthetic oligonucleotide
  Target: ATXN2; (-) strand; PAM type: YTN; PAM sequence: CTG
tggcattggcagtggatgca

SEQ ID NO: 57280 - DNA, 20 bp, Artificial Sequence
  Description of Artificial Sequence: Synthetic oligonucleotide
  Target: ATXN2; (-) strand; PAM type: YTN; PAM sequence: TTA
atgccagctgtggcattggc

SEQ ID NO: 57281 - DNA, 20 bp, Artificial Sequence
  Description of Artificial Sequence: Synthetic oligonucleotide
  Target: ATXN2; (-) strand; PAM type: YTN; PAM sequence: CTG
gatatgaaggaatattaatg

SEQ ID NO: 57282 - DNA, 20 bp, Artificial Sequence
  Description of Artificial Sequence: Synthetic oligonucleotide
  Target: ATXN2; (-) strand; PAM type: YTN; PAM sequence: CTA
aactggatatgaaggaatat

SEQ ID NO: 57283 - DNA, 20 bp, Artificial Sequence
  Description of Artificial Sequence: Synthetic oligonucleotide
  Target: ATXN2; (-) strand; PAM type: YTN; PAM sequence: CTG
tatccagtctaaactggata

SEQ ID NO: 57284 - DNA, 20 bp, Artificial Sequence
  Description of Artificial Sequence: Synthetic oligonucleotide
  Target: ATXN2; (-) strand; PAM type: YTN; PAM sequence: CTG
ctgtatccagtctaaactgg

SEQ ID NO: 57285 - DNA, 20 bp, Artificial Sequence
  Description of Artificial Sequence: Synthetic oligonucleotide
  Target: ATXN2; (-) strand; PAM type: YTN; PAM sequence: TTC
ccagtgtataaacaaagctg

SEQ ID NO: 57286 - DNA, 20 bp, Artificial Sequence
  Description of Artificial Sequence: Synthetic oligonucleotide
  Target: ATXN2; (-) strand; PAM type: YTN; PAM sequence: TTT
cccagtgtataaacaaagct

SEQ ID NO: 57287 - DNA, 20 bp, Artificial Sequence
  Description of Artificial Sequence: Synthetic oligonucleotide
  Target: ATXN2; (-) strand; PAM type: YTN; PAM sequence: TTT
tcccagtgtataaacaaagc

SEQ ID NO: 57288 - DNA, 20 bp, Artificial Sequence
  Description of Artificial Sequence: Synthetic oligonucleotide
  Target: ATXN2; (-) strand; PAM type: YTN; PAM sequence: CTG
gaaaattttcccagtgtata

SEQ ID NO: 57289 - DNA, 20 bp, Artificial Sequence
  Description of Artificial Sequence: Synthetic oligonucleotide
  Target: ATXN2; (-) strand; PAM type: YTN; PAM sequence: CTA
cagtctggaaaattttccca

SEQ ID NO: 57290 - DNA, 20 bp, Artificial Sequence
  Description of Artificial Sequence: Synthetic oligonucleotide
  Target: ATXN2; (-) strand; PAM type: YTN; PAM sequence: TTC
ctacagtctggaaaattttc

SEQ ID NO: 57291 - DNA, 20 bp, Artificial Sequence
  Description of Artificial Sequence: Synthetic oligonucleotide
  Target: ATXN2; (-) strand; PAM type: YTN; PAM sequence: TTA
attcctacagtctggaaaat

SEQ ID NO: 57292 - DNA, 20 bp, Artificial Sequence
  Description of Artificial Sequence: Synthetic oligonucleotide
  Target: ATXN2; (-) strand; PAM type: YTN; PAM sequence: CTG
gcatatgttaattcctacag

SEQ ID NO: 57293 - DNA, 20 bp, Artificial Sequence
  Description of Artificial Sequence: Synthetic oligonucleotide
  Target: ATXN2; (-) strand; PAM type: YTN; PAM sequence: TTC
tggcatatgttaattcctac

SEQ ID NO: 57294 - DNA, 20 bp, Artificial Sequence
  Description of Artificial Sequence: Synthetic oligonucleotide
  Target: ATXN2; (-) strand; PAM type: YTN; PAM sequence: TTA
aaatattctggcatatgtta

SEQ ID NO: 57295 - DNA, 20 bp, Artificial Sequence
  Description of Artificial Sequence: Synthetic oligonucleotide
  Target: ATXN2; (-) strand; PAM type: YTN; PAM sequence: TTG
ttaaaatattctggcatatg

SEQ ID NO: 57296 - DNA, 20 bp, Artificial Sequence
  Description of Artificial Sequence: Synthetic oligonucleotide
  Target: ATXN2; (-) strand; PAM type: YTN; PAM sequence: CTT
gttaaaatattctggcatat

SEQ ID NO: 57297 - DNA, 20 bp, Artificial Sequence
  Description of Artificial Sequence: Synthetic oligonucleotide
  Target: ATXN2; (-) strand; PAM type: YTN; PAM sequence: TTC
ttgttaaaatattctggcat

SEQ ID NO: 57298 - DNA, 20 bp, Artificial Sequence
  Description of Artificial Sequence: Synthetic oligonucleotide
  Target: ATXN2; (-) strand; PAM type: YTN; PAM sequence: TTT
cttgttaaaatattctggca

SEQ ID NO: 57299 - DNA, 20 bp, Artificial Sequence
  Description of Artificial Sequence: Synthetic oligonucleotide
  Target: ATXN2; (-) strand; PAM type: YTN; PAM sequence: TTT
tcttgttaaaatattctggc

SEQ ID NO: 57300 - DNA, 20 bp, Artificial Sequence
  Description of Artificial Sequence: Synthetic oligonucleotide
  Target: ATXN2; (-) strand; PAM type: YTN; PAM sequence: TTG
ccacagttttcttgttaaaa

SEQ ID NO: 57301 - DNA, 20 bp, Artificial Sequence
  Description of Artificial Sequence: Synthetic oligonucleotide
  Target: ATXN2; (-) strand; PAM type: YTN; PAM sequence: CTA
tgttgccacagttttcttgt

SEQ ID NO: 57302 - DNA, 20 bp, Artificial Sequence
  Description of Artificial Sequence: Synthetic oligonucleotide
  Target: ATXN2; (-) strand; PAM type: YTN; PAM sequence: TTC
agagactatgttgccacagt

SEQ ID NO: 57303 - DNA, 20 bp, Artificial Sequence
  Description of Artificial Sequence: Synthetic oligonucleotide
  Target: ATXN2; (-) strand; PAM type: YTN; PAM sequence: TTA
aaaacattcagagactatgt

SEQ ID NO: 57304 - DNA, 20 bp, Artificial Sequence
  Description of Artificial Sequence: Synthetic oligonucleotide
  Target: ATXN2; (-) strand; PAM type: YTN; PAM sequence: CTT
aaaaacattcagagactatg

SEQ ID NO: 57305 - DNA, 20 bp, Artificial Sequence
  Description of Artificial Sequence: Synthetic oligonucleotide
  Target: ATXN2; (-) strand; PAM type: YTN; PAM sequence: CTC
ttaaaaacattcagagacta

SEQ ID NO: 57306 - DNA, 20 bp, Artificial Sequence
  Description of Artificial Sequence: Synthetic oligonucleotide
  Target: ATXN2; (-) strand; PAM type: YTN; PAM sequence: CTA
ctcttaaaaacattcagaga

SEQ ID NO: 57307 - DNA, 20 bp, Artificial Sequence
  Description of Artificial Sequence: Synthetic oligonucleotide
  Target: ATXN2; (-) strand; PAM type: YTN; PAM sequence: TTC
actactcttaaaaacattca

SEQ ID NO: 57308 - DNA, 20 bp, Artificial Sequence
  Description of Artificial Sequence: Synthetic oligonucleotide
  Target: ATXN2; (-) strand; PAM type: YTN; PAM sequence: CTC
ccagaagacgttcactactc

SEQ ID NO: 57309 - DNA, 20 bp, Artificial Sequence
  Description of Artificial Sequence: Synthetic oligonucleotide
  Target: ATXN2; (-) strand; PAM type: YTN; PAM sequence: CTA
gctcccagaagacgttcact

SEQ ID NO: 57310 - DNA, 20 bp, Artificial Sequence
  Description of Artificial Sequence: Synthetic oligonucleotide
  Target: ATXN2; (-) strand; PAM type: YTN; PAM sequence: TTC
tagctcccagaagacgttca

SEQ ID NO: 57311 - DNA, 20 bp, Artificial Sequence
  Description of Artificial Sequence: Synthetic oligonucleotide
  Target: ATXN2; (-) strand; PAM type: YTN; PAM sequence: TTG
ttctagctcccagaagacgt

SEQ ID NO: 57312 - DNA, 20 bp, Artificial Sequence
  Description of Artificial Sequence: Synthetic oligonucleotide
  Target: ATXN2; (-) strand; PAM type: YTN; PAM sequence: TTT
gttctagctcccagaagacg

SEQ ID NO: 57313 - DNA, 20 bp, Artificial Sequence
  Description of Artificial Sequence: Synthetic oligonucleotide
  Target: ATXN2; (-) strand; PAM type: YTN; PAM sequence: TTG
tacatcatttgttctagctc

SEQ ID NO: 57314 - DNA, 20 bp, Artificial Sequence
  Description of Artificial Sequence: Synthetic oligonucleotide
  Target: ATXN2; (-) strand; PAM type: YTN; PAM sequence: TTT
gtacatcatttgttctagct

SEQ ID NO: 57315 - DNA, 20 bp, Artificial Sequence
  Description of Artificial Sequence: Synthetic oligonucleotide
  Target: ATXN2; (-) strand; PAM type: YTN; PAM sequence: TTC
atcgtttgtacatcatttgt

SEQ ID NO: 57316 - DNA, 20 bp, Artificial Sequence
  Description of Artificial Sequence: Synthetic oligonucleotide
  Target: ATXN2; (-) strand; PAM type: YTN; PAM sequence: CTT
catcgtttgtacatcatttg

SEQ ID NO: 57317 - DNA, 20 bp, Artificial Sequence
  Description of Artificial Sequence: Synthetic oligonucleotide
  Target: ATXN2; (-) strand; PAM type: YTN; PAM sequence: CTC
aggaaggcttcatcgtttgt

SEQ ID NO: 57318 - DNA, 20 bp, Artificial Sequence
  Description of Artificial Sequence: Synthetic oligonucleotide
  Target: ATXN2; (-) strand; PAM type: YTN; PAM sequence: CTG
tgaagctcaggaaggcttca

SEQ ID NO: 57319 - DNA, 20 bp, Artificial Sequence
  Description of Artificial Sequence: Synthetic oligonucleotide
  Target: ATXN2; (-) strand; PAM type: YTN; PAM sequence: TTA
tgggactgtgaagctcagga

SEQ ID NO: 57320 - DNA, 20 bp, Artificial Sequence
  Description of Artificial Sequence: Synthetic oligonucleotide
  Target: ATXN2; (-) strand; PAM type: YTN; PAM sequence: CTT
atgggactgtgaagctcagg

SEQ ID NO: 57321 - DNA, 20 bp, Artificial Sequence
  Description of Artificial Sequence: Synthetic oligonucleotide
  Target: ATXN2; (-) strand; PAM type: YTN; PAM sequence: TTA
tagacttatgggactgtgaa

SEQ ID NO: 57322 - DNA, 20 bp, Artificial Sequence
  Description of Artificial Sequence: Synthetic oligonucleotide
  Target: ATXN2; (-) strand; PAM type: YTN; PAM sequence: CTT
atagacttatgggactgtga

SEQ ID NO: 57323 - DNA, 20 bp, Artificial Sequence
  Description of Artificial Sequence: Synthetic oligonucleotide
  Target: ATXN2; (-) strand; PAM type: YTN; PAM sequence: CTG
tcttatagacttatgggact

SEQ ID NO: 57324 - DNA, 20 bp, Artificial Sequence
  Description of Artificial Sequence: Synthetic oligonucleotide
  Target: ATXN2; (-) strand; PAM type: YTN; PAM sequence: TTA
gaaaaaaaggactgtcttat

SEQ ID NO: 57325 - DNA, 20 bp, Artificial Sequence
  Description of Artificial Sequence: Synthetic oligonucleotide
  Target: ATXN2; (-) strand; PAM type: YTN; PAM sequence: TTA
ataagccaccaagttagaaa

SEQ ID NO: 57326 - DNA, 20 bp, Artificial Sequence
  Description of Artificial Sequence: Synthetic oligonucleotide
  Target: ATXN2; (-) strand; PAM type: YTN; PAM sequence: CTG
ttaataagccaccaagttag

SEQ ID NO: 57327 - DNA, 20 bp, Artificial Sequence
  Description of Artificial Sequence: Synthetic oligonucleotide
  Target: ATXN2; (-) strand; PAM type: YTN; PAM sequence: TTA
atgagtatgatgatgatgga

SEQ ID NO: 57328 - DNA, 20 bp, Artificial Sequence
  Description of Artificial Sequence: Synthetic oligonucleotide
  Target: ATXN2; (-) strand; PAM type: YTN; PAM sequence: CTT
aatgagtatgatgatgatgg

SEQ ID NO: 57329 - DNA, 20 bp, Artificial Sequence
  Description of Artificial Sequence: Synthetic oligonucleotide
  Target: ATXN2; (-) strand; PAM type: YTN; PAM sequence: CTG
gaagtaaacttaatgagtat

SEQ ID NO: 57330 - DNA, 20 bp, Artificial Sequence
  Description of Artificial Sequence: Synthetic oligonucleotide
  Target: ATXN2; (-) strand; PAM type: YTN; PAM sequence: TTG
gaggagctggaagtaaactt

SEQ ID NO: 57331 - DNA, 20 bp, Artificial Sequence
  Description of Artificial Sequence: Synthetic oligonucleotide
  Target: ATXN2; (-) strand; PAM type: YTN; PAM sequence: CTT
ggaggagctggaagtaaact

SEQ ID NO: 57332 - DNA, 20 bp, Artificial Sequence
  Description of Artificial Sequence: Synthetic oligonucleotide
  Target: ATXN2; (-) strand; PAM type: YTN; PAM sequence: CTA
tacaacttggaggagctgga

SEQ ID NO: 57333 - DNA, 20 bp, Artificial Sequence
  Description of Artificial Sequence: Synthetic oligonucleotide
  Target: ATXN2; (-) strand; PAM type: YTN; PAM sequence: TTA
gaccaagtcagtgcctatac

SEQ ID NO: 57334 - DNA, 20 bp, Artificial Sequence
  Description of Artificial Sequence: Synthetic oligonucleotide
  Target: ATXN2; (-) strand; PAM type: YTN; PAM sequence: TTT
agaccaagtcagtgcctata

SEQ ID NO: 57335 - DNA, 20 bp, Artificial Sequence
  Description of Artificial Sequence: Synthetic oligonucleotide
  Target: ATXN2; (-) strand; PAM type: YTN; PAM sequence: TTT
tagaccaagtcagtgcctat

SEQ ID NO: 57336 - DNA, 20 bp, Artificial Sequence
  Description of Artificial Sequence: Synthetic oligonucleotide
  Target: ATXN2; (-) strand; PAM type: YTN; PAM sequence: CTT
ttagaccaagtcagtgccta

SEQ ID NO: 57337 - DNA, 20 bp, Artificial Sequence
  Description of Artificial Sequence: Synthetic oligonucleotide
  Target: ATXN2; (-) strand; PAM type: YTN; PAM sequence: TTA
catcaaatcttttagaccaa

SEQ ID NO: 57338 - DNA, 20 bp, Artificial Sequence
  Description of Artificial Sequence: Synthetic oligonucleotide
  Target: ATXN2; (-) strand; PAM type: YTN; PAM sequence: TTT
acatcaaatcttttagacca

SEQ ID NO: 57339 - DNA, 20 bp, Artificial Sequence
  Description of Artificial Sequence: Synthetic oligonucleotide
  Target: ATXN2; (-) strand; PAM type: YTN; PAM sequence: TTC
gaaatttacatcaaatcttt

SEQ ID NO: 57340 - DNA, 20 bp, Artificial Sequence
  Description of Artificial Sequence: Synthetic oligonucleotide
  Target: ATXN2; (-) strand; PAM type: YTN; PAM sequence: CTC
aggttcgaaatttacatcaa

SEQ ID NO: 57341 - DNA, 20 bp, Artificial Sequence
  Description of Artificial Sequence: Synthetic oligonucleotide
  Target: ATXN2; (-) strand; PAM type: YTN; PAM sequence: TTA
caagtacaacaaactcaggt

SEQ ID NO: 57342 - DNA, 20 bp, Artificial Sequence
  Description of Artificial Sequence: Synthetic oligonucleotide
  Target: ATXN2; (-) strand; PAM type: YTN; PAM sequence: TTT
acaagtacaacaaactcagg

SEQ ID NO: 57343 - DNA, 20 bp, Artificial Sequence
  Description of Artificial Sequence: Synthetic oligonucleotide
  Target: ATXN2; (-) strand; PAM type: YTN; PAM sequence: TTT
tacaagtacaacaaactcag

SEQ ID NO: 57344 - DNA, 20 bp, Artificial Sequence
  Description of Artificial Sequence: Synthetic oligonucleotide
  Target: ATXN2; (-) strand; PAM type: YTN; PAM sequence: TTT
ttacaagtacaacaaactca

SEQ ID NO: 57345 - DNA, 20 bp, Artificial Sequence
  Description of Artificial Sequence: Synthetic oligonucleotide
  Target: ATXN2; (-) strand; PAM type: YTN; PAM sequence: TTA
aaatgaacgtaagattttta

SEQ ID NO: 57346 - DNA, 20 bp, Artificial Sequence
  Description of Artificial Sequence: Synthetic oligonucleotide
  Target: ATXN2; (-) strand; PAM type: YTN; PAM sequence: TTT
aaaatgaacgtaagattttt

SEQ ID NO: 57347 - DNA, 20 bp, Artificial Sequence
  Description of Artificial Sequence: Synthetic oligonucleotide
  Target: ATXN2; (-) strand; PAM type: YTN; PAM sequence: TTT
taaaatgaacgtaagatttt

SEQ ID NO: 57348 - DNA, 20 bp, Artificial Sequence
  Description of Artificial Sequence: Synthetic oligonucleotide
  Target: ATXN2; (-) strand; PAM type: YTN; PAM sequence: TTT
ttaaaatgaacgtaagattt

SEQ ID NO: 57349 - DNA, 20 bp, Artificial Sequence
  Description of Artificial Sequence: Synthetic oligonucleotide
  Target: ATXN2; (-) strand; PAM type: YTN; PAM sequence: TTA
aacaaataaatacattttta

SEQ ID NO: 57350 - DNA, 20 bp, Artificial Sequence
  Description of Artificial Sequence: Synthetic oligonucleotide
  Target: ATXN2; (-) strand; PAM type: YTN; PAM sequence: CTG
tcaaaaattaaacaaataaa

SEQ ID NO: 57351 - DNA, 20 bp, Artificial Sequence
  Description of Artificial Sequence: Synthetic oligonucleotide
  Target: ATXN2; (-) strand; PAM type: YTN; PAM sequence: CTC
tgtcaaaaattaaacaaata

SEQ ID NO: 57352 - DNA, 20 bp, Artificial Sequence
  Description of Artificial Sequence: Synthetic oligonucleotide
  Target: ATXN2; (-) strand; PAM type: YTN; PAM sequence: CTG
ggcaacagagcgagactctg

SEQ ID NO: 57353 - DNA, 20 bp, Artificial Sequence
  Description of Artificial Sequence: Synthetic oligonucleotide
  Target: ATXN2; (-) strand; PAM type: YTN; PAM sequence: CTC
cagcctgggcaacagagcga

SEQ ID NO: 57354 - DNA, 20 bp, Artificial Sequence
  Description of Artificial Sequence: Synthetic oligonucleotide
  Target: ATXN2; (-) strand; PAM type: YTN; PAM sequence: CTG
cactccagcctgggcaacag

SEQ ID NO: 57355 - DNA, 20 bp, Artificial Sequence
  Description of Artificial Sequence: Synthetic oligonucleotide
  Target: ATXN2; (-) strand; PAM type: YTN; PAM sequence: TTG
cagtgagccgagatggtgcc

SEQ ID NO: 57356 - DNA, 20 bp, Artificial Sequence
  Description of Artificial Sequence: Synthetic oligonucleotide
  Target: ATXN2; (-) strand; PAM type: YTN; PAM sequence: TTG
aacccgggaggcggaggttg

SEQ ID NO: 57357 - DNA, 20 bp, Artificial Sequence
  Description of Artificial Sequence: Synthetic oligonucleotide
  Target: ATXN2; (-) strand; PAM type: YTN; PAM sequence: CTT
gaacccgggaggcggaggtt

SEQ ID NO: 57358 - DNA, 20 bp, Artificial Sequence
  Description of Artificial Sequence: Synthetic oligonucleotide
  Target: ATXN2; (-) strand; PAM type: YTN; PAM sequence: CTG
aggcaggagaatcgcttgaa

SEQ ID NO: 57359 - DNA, 20 bp, Artificial Sequence
  Description of Artificial Sequence: Synthetic oligonucleotide
  Target: ATXN2; (-) strand; PAM type: YTN; PAM sequence: CTC
ggcaggctgaggcaggagaa

SEQ ID NO: 57360 - DNA, 20 bp, Artificial Sequence
  Description of Artificial Sequence: Synthetic oligonucleotide
  Target: ATXN2; (-) strand; PAM type: YTN; PAM sequence: CTA
ctcggcaggctgaggcagga

SEQ ID NO: 57361 - DNA, 20 bp, Artificial Sequence
  Description of Artificial Sequence: Synthetic oligonucleotide
  Target: ATXN2; (-) strand; PAM type: YTN; PAM sequence: TTC
cagctactcggcaggctgag

SEQ ID NO: 57362 - DNA, 20 bp, Artificial Sequence
  Description of Artificial Sequence: Synthetic oligonucleotide
  Target: ATXN2; (-) strand; PAM type: YTN; PAM sequence: CTA
tagttccagctactcggcag

SEQ ID NO: 57363 - DNA, 20 bp, Artificial Sequence
  Description of Artificial Sequence: Synthetic oligonucleotide
  Target: ATXN2; (-) strand; PAM type: YTN; PAM sequence: TTG
cctatagttccagctactcg

SEQ ID NO: 57364 - DNA, 20 bp, Artificial Sequence
  Description of Artificial Sequence: Synthetic oligonucleotide
  Target: ATXN2; (-) strand; PAM type: YTN; PAM sequence: CTT
gcctatagttccagctactc

SEQ ID NO: 57365 - DNA, 20 bp, Artificial Sequence
  Description of Artificial Sequence: Synthetic oligonucleotide
  Target: ATXN2; (-) strand; PAM type: YTN; PAM sequence: CTA
aaaatacaaaaatcagccag

SEQ ID NO: 57366 - DNA, 20 bp, Artificial Sequence
  Description of Artificial Sequence: Synthetic oligonucleotide
  Target: ATXN2; (-) strand; PAM type: YTN; PAM sequence: CTA
ctaaaaatacaaaaatcagc

SEQ ID NO: 57367 - DNA, 20 bp, Artificial Sequence
  Description of Artificial Sequence: Synthetic oligonucleotide
  Target: ATXN2; (-) strand; PAM type: YTN; PAM sequence: CTC
tactaaaaatacaaaaatca

SEQ ID NO: 57368 - DNA, 20 bp, Artificial Sequence
  Description of Artificial Sequence: Synthetic oligonucleotide
  Target: ATXN2; (-) strand; PAM type: YTN; PAM sequence: CTG
gccaacatggtgaaacccgt

SEQ ID NO: 57369 - DNA, 20 bp, Artificial Sequence
  Description of Artificial Sequence: Synthetic oligonucleotide
  Target: ATXN2; (-) strand; PAM type: YTN; PAM sequence: TTC
gagaccagcctggccaacat

SEQ ID NO: 57370 - DNA, 20 bp, Artificial Sequence
  Description of Artificial Sequence: Synthetic oligonucleotide
  Target: ATXN2; (-) strand; PAM type: YTN; PAM sequence: TTG
aggccagtagttcgagacca

SEQ ID NO: 57371 - DNA, 20 bp, Artificial Sequence
  Description of Artificial Sequence: Synthetic oligonucleotide
  Target: ATXN2; (-) strand; PAM type: YTN; PAM sequence: CTT
gaggccagtagttcgagacc

SEQ ID NO: 57372 - DNA, 20 bp, Artificial Sequence
  Description of Artificial Sequence: Synthetic oligonucleotide
  Target: ATXN2; (-) strand; PAM type: YTN; PAM sequence: TTG
ggaggccgaggcggatggat

SEQ ID NO: 57373 - DNA, 20 bp, Artificial Sequence
  Description of Artificial Sequence: Synthetic oligonucleotide
  Target: ATXN2; (-) strand; PAM type: YTN; PAM sequence: TTT
gggaggccgaggcggatgga

SEQ ID NO: 57374 - DNA, 20 bp, Artificial Sequence
  Description of Artificial Sequence: Synthetic oligonucleotide
  Target: ATXN2; (-) strand; PAM type: YTN; PAM sequence: CTT
tgggaggccgaggcggatgg

SEQ ID NO: 57375 - DNA, 20 bp, Artificial Sequence
  Description of Artificial Sequence: Synthetic oligonucleotide
  Target: ATXN2; (-) strand; PAM type: YTN; PAM sequence: CTG
taatcccagcactttgggag

SEQ ID NO: 57376 - DNA, 20 bp, Artificial Sequence
  Description of Artificial Sequence: Synthetic oligonucleotide
  Target: ATXN2; (-) strand; PAM type: YTN; PAM sequence: CTC
atgcctgtaatcccagcact

SEQ ID NO: 57377 - DNA, 20 bp, Artificial Sequence
  Description of Artificial Sequence: Synthetic oligonucleotide
  Target: ATXN2; (-) strand; PAM type: YTN; PAM sequence: CTC
aaaaataaacaaacatggcc

SEQ ID NO: 57378 - DNA, 20 bp, Artificial Sequence
  Description of Artificial Sequence: Synthetic oligonucleotide
  Target: ATXN2; (-) strand; PAM type: YTN; PAM sequence: CTG
ggtctcaaaaataaacaaac

SEQ ID NO: 57379 - DNA, 20 bp, Artificial Sequence
  Description of Artificial Sequence: Synthetic oligonucleotide
  Target: ATXN2; (-) strand; PAM type: YTN; PAM sequence: CTG
ggtgacagcaagactgggtc

SEQ ID NO: 57380 - DNA, 20 bp, Artificial Sequence
  Description of Artificial Sequence: Synthetic oligonucleotide
  Target: ATXN2; (-) strand; PAM type: YTN; PAM sequence: CTC
cagcctgggtgacagcaaga

SEQ ID NO: 57381 - DNA, 20 bp, Artificial Sequence
  Description of Artificial Sequence: Synthetic oligonucleotide
  Target: ATXN2; (-) strand; PAM type: YTN; PAM sequence: CTG
cactccagcctgggtgacag

SEQ ID NO: 57382 - DNA, 20 bp, Artificial Sequence
  Description of Artificial Sequence: Synthetic oligonucleotide
  Target: ATXN2; (-) strand; PAM type: YTN; PAM sequence: CTC
cactgcactccagcctgggt

SEQ ID NO: 57383 - DNA, 20 bp, Artificial Sequence
  Description of Artificial Sequence: Synthetic oligonucleotide
  Target: ATXN2; (-) strand; PAM type: YTN; PAM sequence: CTG
cagtgagccgagatcgctcc

SEQ ID NO: 57384 - DNA, 20 bp, Artificial Sequence
  Description of Artificial Sequence: Synthetic oligonucleotide
  Target: ATXN2; (-) strand; PAM type: YTN; PAM sequence: TTA
acccaggaggcggaggctgc

SEQ ID NO: 57385 - DNA, 20 bp, Artificial Sequence
  Description of Artificial Sequence: Synthetic oligonucleotide
  Target: ATXN2; (-) strand; PAM type: YTN; PAM sequence: TTT
aacccaggaggcggaggctg

SEQ ID NO: 57386 - DNA, 20 bp, Artificial Sequence
  Description of Artificial Sequence: Synthetic oligonucleotide
  Target: ATXN2; (-) strand; PAM type: YTN; PAM sequence: CTT
taacccaggaggcggaggct

SEQ ID NO: 57387 - DNA, 20 bp, Artificial Sequence
  Description of Artificial Sequence: Synthetic oligonucleotide
  Target: ATXN2; (-) strand; PAM type: YTN; PAM sequence: CTG
aagcaggagtatcactttaa

SEQ ID NO: 57388 - DNA, 20 bp, Artificial Sequence
  Description of Artificial Sequence: Synthetic oligonucleotide
  Target: ATXN2; (-) strand; PAM type: YTN; PAM sequence: CTC
agaggctgaagcaggagtat

SEQ ID NO: 57389 - DNA, 20 bp, Artificial Sequence
  Description of Artificial Sequence: Synthetic oligonucleotide
  Target: ATXN2; (-) strand; PAM type: YTN; PAM sequence: CTA
ctcagaggctgaagcaggag

SEQ ID NO: 57390 - DNA, 20 bp, Artificial Sequence
  Description of Artificial Sequence: Synthetic oligonucleotide
  Target: ATXN2; (-) strand; PAM type: YTN; PAM sequence: TTA
gccaggtaatcccagctact

SEQ ID NO: 57391 - DNA, 20 bp, Artificial Sequence
  Description of Artificial Sequence: Synthetic oligonucleotide
  Target: ATXN2; (-) strand; PAM type: YTN; PAM sequence: CTA
aaaatacaaaaattagccag

SEQ ID NO: 57392 - DNA, 20 bp, Artificial Sequence
  Description of Artificial Sequence: Synthetic oligonucleotide
  Target: ATXN2; (-) strand; PAM type: YTN; PAM sequence: CTA
ctaaaaatacaaaaattagc

SEQ ID NO: 57393 - DNA, 20 bp, Artificial Sequence
  Description of Artificial Sequence: Synthetic oligonucleotide
  Target: ATXN2; (-) strand; PAM type: YTN; PAM sequence: CTC
tactaaaaatacaaaaatta

SEQ ID NO: 57394 - DNA, 20 bp, Artificial Sequence
  Description of Artificial Sequence: Synthetic oligonucleotide
  Target: ATXN2; (-) strand; PAM type: YTN; PAM sequence: CTG
gccaacatggtgaaaccccg

SEQ ID NO: 57395 - DNA, 20 bp, Artificial Sequence
  Description of Artificial Sequence: Synthetic oligonucleotide
  Target: ATXN2; (-) strand; PAM type: YTN; PAM sequence: TTG
agaccagcctggccaacatg

SEQ ID NO: 57396 - DNA, 20 bp, Artificial Sequence
  Description of Artificial Sequence: Synthetic oligonucleotide
  Target: ATXN2; (-) strand; PAM type: YTN; PAM sequence: TTT
gagaccagcctggccaacat

SEQ ID NO: 57397 - DNA, 20 bp, Artificial Sequence
  Description of Artificial Sequence: Synthetic oligonucleotide
  Target: ATXN2; (-) strand; PAM type: YTN; PAM sequence: TTG
aggccaggagtttgagacca

SEQ ID NO: 57398 - DNA, 20 bp, Artificial Sequence
  Description of Artificial Sequence: Synthetic oligonucleotide
  Target: ATXN2; (-) strand; PAM type: YTN; PAM sequence: CTT
gaggccaggagtttgagacc

SEQ ID NO: 57399 - DNA, 20 bp, Artificial Sequence
  Description of Artificial Sequence: Synthetic oligonucleotide
  Target: ATXN2; (-) strand; PAM type: YTN; PAM sequence: TTG
ggaggccgagatggacggat

SEQ ID NO: 57400 - DNA, 20 bp, Artificial Sequence
  Description of Artificial Sequence: Synthetic oligonucleotide
  Target: ATXN2; (-) strand; PAM type: YTN; PAM sequence: TTT
gggaggccgagatggacgga

SEQ ID NO: 57401 - DNA, 20 bp, Artificial Sequence
  Description of Artificial Sequence: Synthetic oligonucleotide
  Target: ATXN2; (-) strand; PAM type: YTN; PAM sequence: CTT
tgggaggccgagatggacgg

SEQ ID NO: 57402 - DNA, 20 bp, Artificial Sequence
  Description of Artificial Sequence: Synthetic oligonucleotide
  Target: ATXN2; (-) strand; PAM type: YTN; PAM sequence: CTG
taatcccaacactttgggag

SEQ ID NO: 57403 - DNA, 20 bp, Artificial Sequence
  Description of Artificial Sequence: Synthetic oligonucleotide
  Target: ATXN2; (-) strand; PAM type: YTN; PAM sequence: CTC
acacctgtaatcccaacact

SEQ ID NO: 57404 - DNA, 20 bp, Artificial Sequence
  Description of Artificial Sequence: Synthetic oligonucleotide
  Target: ATXN2; (-) strand; PAM type: YTN; PAM sequence: TTG
ctcacacctgtaatcccaac

SEQ ID NO: 57405 - DNA, 20 bp, Artificial Sequence
  Description of Artificial Sequence: Synthetic oligonucleotide
  Target: ATXN2; (-) strand; PAM type: YTN; PAM sequence: TTA
ggccgggtgcagttgctcac

SEQ ID NO: 57406 - DNA, 20 bp, Artificial Sequence
  Description of Artificial Sequence: Synthetic oligonucleotide
  Target: ATXN2; (-) strand; PAM type: YTN; PAM sequence: TTT
aggccgggtgcagttgctca

SEQ ID NO: 57407 - DNA, 20 bp, Artificial Sequence
  Description of Artificial Sequence: Synthetic oligonucleotide
  Target: ATXN2; (-) strand; PAM type: YTN; PAM sequence: TTT
taggccgggtgcagttgctc

SEQ ID NO: 57408 - DNA, 20 bp, Artificial Sequence
  Description of Artificial Sequence: Synthetic oligonucleotide
  Target: ATXN2; (-) strand; PAM type: YTN; PAM sequence: TTT
ttaggccgggtgcagttgct

SEQ ID NO: 57409 - DNA, 20 bp, Artificial Sequence
  Description of Artificial Sequence: Synthetic oligonucleotide
  Target: ATXN2; (-) strand; PAM type: YTN; PAM sequence: TTC
aaaaataaatttttaggccg

SEQ ID NO: 57410 - DNA, 20 bp, Artificial Sequence
  Description of Artificial Sequence: Synthetic oligonucleotide
  Target: ATXN2; (-) strand; PAM type: YTN; PAM sequence: TTA
ttcaaaaataaatttttagg

SEQ ID NO: 57411 - DNA, 20 bp, Artificial Sequence
  Description of Artificial Sequence: Synthetic oligonucleotide
  Target: ATXN2; (-) strand; PAM type: YTN; PAM sequence: TTA
ttattcaaaaataaattttt

SEQ ID NO: 57412 - DNA, 20 bp, Artificial Sequence
  Description of Artificial Sequence: Synthetic oligonucleotide
  Target: ATXN2; (-) strand; PAM type: YTN; PAM sequence: TTT
attattcaaaaataaatttt

SEQ ID NO: 57413 - DNA, 20 bp, Artificial Sequence
  Description of Artificial Sequence: Synthetic oligonucleotide
  Target: ATXN2; (-) strand; PAM type: YTN; PAM sequence: TTT
tattattcaaaaataaattt

SEQ ID NO: 57414 - DNA, 20 bp, Artificial Sequence
  Description of Artificial Sequence: Synthetic oligonucleotide
  Target: ATXN2; (-) strand; PAM type: YTN; PAM sequence: TTT
ttattattcaaaaataaatt

SEQ ID NO: 57415 - DNA, 20 bp, Artificial Sequence
  Description of Artificial Sequence: Synthetic oligonucleotide
  Target: ATXN2; (-) strand; PAM type: YTN; PAM sequence: TTT
tttattattcaaaaataaat

SEQ ID NO: 57416 - DNA, 20 bp, Artificial Sequence
  Description of Artificial Sequence: Synthetic oligonucleotide
  Target: ATXN2; (-) strand; PAM type: YTN; PAM sequence: CTT
ttttattattcaaaaataaa

SEQ ID NO: 57417 - DNA, 20 bp, Artificial Sequence
  Description of Artificial Sequence: Synthetic oligonucleotide
  Target: ATXN2; (-) strand; PAM type: YTN; PAM sequence: CTA
catgtggcttttttattatt

SEQ ID NO: 57418 - DNA, 20 bp, Artificial Sequence
  Description of Artificial Sequence: Synthetic oligonucleotide
  Target: ATXN2; (-) strand; PAM type: YTN; PAM sequence: TTA
gctacatgtggcttttttat

SEQ ID NO: 57419 - DNA, 20 bp, Artificial Sequence
  Description of Artificial Sequence: Synthetic oligonucleotide
  Target: ATXN2; (-) strand; PAM type: YTN; PAM sequence: CTT
agctacatgtggctttttta

SEQ ID NO: 57420 - DNA, 20 bp, Artificial Sequence
  Description of Artificial Sequence: Synthetic oligonucleotide
  Target: ATXN2; (-) strand; PAM type: YTN; PAM sequence: CTA
cttagctacatgtggctttt

SEQ ID NO: 57421 - DNA, 20 bp, Artificial Sequence
  Description of Artificial Sequence: Synthetic oligonucleotide
  Target: ATXN2; (-) strand; PAM type: YTN; PAM sequence: TTA
gctacttagctacatgtggc

SEQ ID NO: 57422 - DNA, 20 bp, Artificial Sequence
  Description of Artificial Sequence: Synthetic oligonucleotide
  Target: ATXN2; (-) strand; PAM type: YTN; PAM sequence: CTG
tccaccgtattagctactta

SEQ ID NO: 57423 - DNA, 20 bp, Artificial Sequence
  Description of Artificial Sequence: Synthetic oligonucleotide
  Target: ATXN2; (-) strand; PAM type: YTN; PAM sequence: CTG
cactgtccaccgtattagct

SEQ ID NO: 57424 - DNA, 20 bp, Artificial Sequence
  Description of Artificial Sequence: Synthetic oligonucleotide
  Target: ATXN2; (-) strand; PAM type: YTN; PAM sequence: CTC
aaaacaacaacaaaactgca

SEQ ID NO: 57425 - DNA, 20 bp, Artificial Sequence
  Description of Artificial Sequence: Synthetic oligonucleotide
  Target: ATXN2; (-) strand; PAM type: YTN; PAM sequence: CTC
cgtctcaaaacaacaacaaa

SEQ ID NO: 57426 - DNA, 20 bp, Artificial Sequence
  Description of Artificial Sequence: Synthetic oligonucleotide
  Target: ATXN2; (-) strand; PAM type: YTN; PAM sequence: CTG
ggcaacagagcgagactccg

SEQ ID NO: 57427 - DNA, 20 bp, Artificial Sequence
  Description of Artificial Sequence: Synthetic oligonucleotide
  Target: ATXN2; (-) strand; PAM type: YTN; PAM sequence: CTC
caccctgggcaacagagcga

SEQ ID NO: 57428 - DNA, 20 bp, Artificial Sequence
  Description of Artificial Sequence: Synthetic oligonucleotide
  Target: ATXN2; (-) strand; PAM type: YTN; PAM sequence: CTG
cactccaccctgggcaacag

SEQ ID NO: 57429 - DNA, 20 bp, Artificial Sequence
  Description of Artificial Sequence: Synthetic oligonucleotide
  Target: ATXN2; (-) strand; PAM type: YTN; PAM sequence: CTG
atatcacgccactgcactcc

SEQ ID NO: 57430 - DNA, 20 bp, Artificial Sequence
  Description of Artificial Sequence: Synthetic oligonucleotide
  Target: ATXN2; (-) strand; PAM type: YTN; PAM sequence: TTG
cggtgagctgatatcacgcc

SEQ ID NO: 57431 - DNA, 20 bp, Artificial Sequence
  Description of Artificial Sequence: Synthetic oligonucleotide
  Target: ATXN2; (-) strand; PAM type: YTN; PAM sequence: TTG
aacccgggaggcagaggttg

SEQ ID NO: 57432 - DNA, 20 bp, Artificial Sequence
  Description of Artificial Sequence: Synthetic oligonucleotide
  Target: ATXN2; (-) strand; PAM type: YTN; PAM sequence: CTT
gaacccgggaggcagaggtt

SEQ ID NO: 57433 - DNA, 20 bp, Artificial Sequence
  Description of Artificial Sequence: Synthetic oligonucleotide
  Target: ATXN2; (-) strand; PAM type: YTN; PAM sequence: CTG
acacaggagaatcgcttgaa

SEQ ID NO: 57434 - DNA, 20 bp, Artificial Sequence
  Description of Artificial Sequence: Synthetic oligonucleotide
  Target: ATXN2; (-) strand; PAM type: YTN; PAM sequence: CTC
aggaggctgacacaggagaa

SEQ ID NO: 57435 - DNA, 20 bp, Artificial Sequence
  Description of Artificial Sequence: Synthetic oligonucleotide
  Target: ATXN2; (-) strand; PAM type: YTN; PAM sequence: CTA
ctcaggaggctgacacagga

SEQ ID NO: 57436 - DNA, 20 bp, Artificial Sequence
  Description of Artificial Sequence: Synthetic oligonucleotide
  Target: ATXN2; (-) strand; PAM type: YTN; PAM sequence: CTA
gctactcaggaggctgacac

SEQ ID NO: 57437 - DNA, 20 bp, Artificial Sequence
  Description of Artificial Sequence: Synthetic oligonucleotide
  Target: ATXN2; (-) strand; PAM type: YTN; PAM sequence: CTG
tagtcctagctactcaggag

SEQ ID NO: 57438 - DNA, 20 bp, Artificial Sequence
  Description of Artificial Sequence: Synthetic oligonucleotide
  Target: ATXN2; (-) strand; PAM type: YTN; PAM sequence: TTA
gccaggcgcgcctgtagtcc

SEQ ID NO: 57439 - DNA, 20 bp, Artificial Sequence
  Description of Artificial Sequence: Synthetic oligonucleotide
  Target: ATXN2; (-) strand; PAM type: YTN; PAM sequence: CTA
aaaatacaaaaaagttagcc

SEQ ID NO: 57440 - DNA, 20 bp, Artificial Sequence
  Description of Artificial Sequence: Synthetic oligonucleotide
  Target: ATXN2; (-) strand; PAM type: YTN; PAM sequence: CTA
ctaaaaatacaaaaaagtta

SEQ ID NO: 57441 - DNA, 20 bp, Artificial Sequence
  Description of Artificial Sequence: Synthetic oligonucleotide
  Target: ATXN2; (-) strand; PAM type: YTN; PAM sequence: CTC
tactaaaaatacaaaaaagt

SEQ ID NO: 57442 - DNA, 20 bp, Artificial Sequence
  Description of Artificial Sequence: Synthetic oligonucleotide
  Target: ATXN2; (-) strand; PAM type: YTN; PAM sequence: CTG
tctctactaaaaatacaaaa

SEQ ID NO: 57443 - DNA, 20 bp, Artificial Sequence
  Description of Artificial Sequence: Synthetic oligonucleotide
  Target: ATXN2; (-) strand; PAM type: YTN; PAM sequence: TTC
aagaccagccagaccaacat

SEQ ID NO: 57444 - DNA, 20 bp, Artificial Sequence
  Description of Artificial Sequence: Synthetic oligonucleotide
  Target: ATXN2; (-) strand; PAM type: YTN; PAM sequence: CTG
aggtcaggagttcaagacca

SEQ ID NO: 57445 - DNA, 20 bp, Artificial Sequence
  Description of Artificial Sequence: Synthetic oligonucleotide
  Target: ATXN2; (-) strand; PAM type: YTN; PAM sequence: TTG
ggaggccaagacaagtggat

SEQ ID NO: 57446 - DNA, 20 bp, Artificial Sequence
  Description of Artificial Sequence: Synthetic oligonucleotide
  Target: ATXN2; (-) strand; PAM type: YTN; PAM sequence: TTT
gggaggccaagacaagtgga

SEQ ID NO: 57447 - DNA, 20 bp, Artificial Sequence
  Description of Artificial Sequence: Synthetic oligonucleotide
  Target: ATXN2; (-) strand; PAM type: YTN; PAM sequence: CTT
tgggaggccaagacaagtgg

SEQ ID NO: 57448 - DNA, 20 bp, Artificial Sequence
  Description of Artificial Sequence: Synthetic oligonucleotide
  Target: ATXN2; (-) strand; PAM type: YTN; PAM sequence: CTG
tagtcccagcactttgggag

SEQ ID NO: 57449 - DNA, 20 bp, Artificial Sequence
  Description of Artificial Sequence: Synthetic oligonucleotide
  Target: ATXN2; (-) strand; PAM type: YTN; PAM sequence: CTC
acgcctgtagtcccagcact

SEQ ID NO: 57450 - DNA, 20 bp, Artificial Sequence
  Description of Artificial Sequence: Synthetic oligonucleotide
  Target: ATXN2; (-) strand; PAM type: YTN; PAM sequence: CTG
ggcgcggtggctcacgcctg

SEQ ID NO: 57451 - DNA, 20 bp, Artificial Sequence
  Description of Artificial Sequence: Synthetic oligonucleotide
  Target: ATXN2; (-) strand; PAM type: YTN; PAM sequence: TTG
tggctgggcgcggtggctca

SEQ ID NO: 57452 - DNA, 20 bp, Artificial Sequence
  Description of Artificial Sequence: Synthetic oligonucleotide
  Target: ATXN2; (-) strand; PAM type: YTN; PAM sequence: TTT
gtggctgggcgcggtggctc

SEQ ID NO: 57453 - DNA, 20 bp, Artificial Sequence
  Description of Artificial Sequence: Synthetic oligonucleotide
  Target: ATXN2; (-) strand; PAM type: YTN; PAM sequence: TTT
tgtggctgggcgcggtggct

SEQ ID NO: 57454 - DNA, 20 bp, Artificial Sequence
  Description of Artificial Sequence: Synthetic oligonucleotide
  Target: ATXN2; (-) strand; PAM type: YTN; PAM sequence: CTA
tccagtagaacattttgtgg

SEQ ID NO: 57455 - DNA, 20 bp, Artificial Sequence
  Description of Artificial Sequence: Synthetic oligonucleotide
  Target: ATXN2; (-) strand; PAM type: YTN; PAM sequence: CTG
tagacatcactatccagtag

SEQ ID NO: 57456 - DNA, 20 bp, Artificial Sequence
  Description of Artificial Sequence: Synthetic oligonucleotide
  Target: ATXN2; (-) strand; PAM type: YTN; PAM sequence: TTA
acagtaggggaccatggaca

SEQ ID NO: 57457 - DNA, 20 bp, Artificial Sequence
  Description of Artificial Sequence: Synthetic oligonucleotide
  Target: ATXN2; (-) strand; PAM type: YTN; PAM sequence: TTT
aacagtaggggaccatggac

SEQ ID NO: 57458 - DNA, 20 bp, Artificial Sequence
  Description of Artificial Sequence: Synthetic oligonucleotide
  Target: ATXN2; (-) strand; PAM type: YTN; PAM sequence: CTA
atggtttaacagtaggggac

SEQ ID NO: 57459 - DNA, 20 bp, Artificial Sequence
  Description of Artificial Sequence: Synthetic oligonucleotide
  Target: ATXN2; (-) strand; PAM type: YTN; PAM sequence: TTA
gtgctaatggtttaacagta

SEQ ID NO: 57460 - DNA, 20 bp, Artificial Sequence
  Description of Artificial Sequence: Synthetic oligonucleotide
  Target: ATXN2; (-) strand; PAM type: YTN; PAM sequence: CTG
gggtggcggtaggggttagt

SEQ ID NO: 57461 - DNA, 20 bp, Artificial Sequence
  Description of Artificial Sequence: Synthetic oligonucleotide
  Target: ATXN2; (-) strand; PAM type: YTN; PAM sequence: TTA
agaggctggggtggcggtag

SEQ ID NO: 57462 - DNA, 20 bp, Artificial Sequence
  Description of Artificial Sequence: Synthetic oligonucleotide
  Target: ATXN2; (-) strand; PAM type: YTN; PAM sequence: TTT
aagaggctggggtggcggta

SEQ ID NO: 57463 - DNA, 20 bp, Artificial Sequence
  Description of Artificial Sequence: Synthetic oligonucleotide
  Target: ATXN2; (-) strand; PAM type: YTN; PAM sequence: TTT
taagaggctggggtggcggt

SEQ ID NO: 57464 - DNA, 20 bp, Artificial Sequence
  Description of Artificial Sequence: Synthetic oligonucleotide
  Target: ATXN2; (-) strand; PAM type: YTN; PAM sequence: TTT
ttaagaggctggggtggcgg

SEQ ID NO: 57465 - DNA, 20 bp, Artificial Sequence
  Description of Artificial Sequence: Synthetic oligonucleotide
  Target: ATXN2; (-) strand; PAM type: YTN; PAM sequence: TTA
caaatgacatttttaagagg

SEQ ID NO: 57466 - DNA, 20 bp, Artificial Sequence
  Description of Artificial Sequence: Synthetic oligonucleotide
  Target: ATXN2; (-) strand; PAM type: YTN; PAM sequence: TTG
ttacaaatgacatttttaag

SEQ ID NO: 57467 - DNA, 20 bp, Artificial Sequence
  Description of Artificial Sequence: Synthetic oligonucleotide
  Target: ATXN2; (-) strand; PAM type: YTN; PAM sequence: TTA
gattgttacaaatgacattt

SEQ ID NO: 57468 - DNA, 20 bp, Artificial Sequence
  Description of Artificial Sequence: Synthetic oligonucleotide
  Target: ATXN2; (-) strand; PAM type: YTN; PAM sequence: TTT
agattgttacaaatgacatt

SEQ ID NO: 57469 - DNA, 20 bp, Artificial Sequence
  Description of Artificial Sequence: Synthetic oligonucleotide
  Target: ATXN2; (-) strand; PAM type: YTN; PAM sequence: TTA
gacagatttagattgttaca

SEQ ID NO: 57470 - DNA, 20 bp, Artificial Sequence
  Description of Artificial Sequence: Synthetic oligonucleotide
  Target: ATXN2; (-) strand; PAM type: YTN; PAM sequence: CTT
agacagatttagattgttac

SEQ ID NO: 57471 - DNA, 20 bp, Artificial Sequence
  Description of Artificial Sequence: Synthetic oligonucleotide
  Target: ATXN2; (-) strand; PAM type: YTN; PAM sequence: TTC
cttagacagatttagattgt

SEQ ID NO: 57472 - DNA, 20 bp, Artificial Sequence
  Description of Artificial Sequence: Synthetic oligonucleotide
  Target: ATXN2; (-) strand; PAM type: YTN; PAM sequence: TTT
ccttagacagatttagattg

SEQ ID NO: 57473 - DNA, 20 bp, Artificial Sequence
  Description of Artificial Sequence: Synthetic oligonucleotide
  Target: ATXN2; (-) strand; PAM type: YTN; PAM sequence: TTT
tccttagacagatttagatt

SEQ ID NO: 57474 - DNA, 20 bp, Artificial Sequence
  Description of Artificial Sequence: Synthetic oligonucleotide
  Target: ATXN2; (-) strand; PAM type: YTN; PAM sequence: CTT
ttccttagacagatttagat

SEQ ID NO: 57475 - DNA, 20 bp, Artificial Sequence
  Description of Artificial Sequence: Synthetic oligonucleotide
  Target: ATXN2; (-) strand; PAM type: YTN; PAM sequence: TTG
cttttccttagacagattta

SEQ ID NO: 57476 - DNA, 20 bp, Artificial Sequence
  Description of Artificial Sequence: Synthetic oligonucleotide
  Target: ATXN2; (-) strand; PAM type: YTN; PAM sequence: TTG
ggaattgcttttccttagac

SEQ ID NO: 57477 - DNA, 20 bp, Artificial Sequence
  Description of Artificial Sequence: Synthetic oligonucleotide
  Target: ATXN2; (-) strand; PAM type: YTN; PAM sequence: TTT
gggaattgcttttccttaga

SEQ ID NO: 57478 - DNA, 20 bp, Artificial Sequence
  Description of Artificial Sequence: Synthetic oligonucleotide
  Target: ATXN2; (-) strand; PAM type: YTN; PAM sequence: TTG
ggatttgggaattgcttttc

SEQ ID NO: 57479 - DNA, 20 bp, Artificial Sequence
  Description of Artificial Sequence: Synthetic oligonucleotide
  Target: ATXN2; (-) strand; PAM type: YTN; PAM sequence: TTT
gggatttgggaattgctttt

SEQ ID NO: 57480 - DNA, 20 bp, Artificial Sequence
  Description of Artificial Sequence: Synthetic oligonucleotide
  Target: ATXN2; (-) strand; PAM type: YTN; PAM sequence: CTC
catgaacagaatttgggatt

SEQ ID NO: 57481 - DNA, 20 bp, Artificial Sequence
  Description of Artificial Sequence: Synthetic oligonucleotide
  Target: ATXN2; (-) strand; PAM type: YTN; PAM sequence: TTA
tgaacctccatgaacagaat

SEQ ID NO: 57482 - DNA, 20 bp, Artificial Sequence
  Description of Artificial Sequence: Synthetic oligonucleotide
  Target: ATXN2; (-) strand; PAM type: YTN; PAM sequence: TTT
atgaacctccatgaacagaa

SEQ ID NO: 57483 - DNA, 20 bp, Artificial Sequence
  Description of Artificial Sequence: Synthetic oligonucleotide
  Target: ATXN2; (-) strand; PAM type: YTN; PAM sequence: CTT
tatgaacctccatgaacaga

SEQ ID NO: 57484 - DNA, 20 bp, Artificial Sequence
  Description of Artificial Sequence: Synthetic oligonucleotide
  Target: ATXN2; (-) strand; PAM type: YTN; PAM sequence: CTG
tatctttatgaacctccatg

SEQ ID NO: 57485 - DNA, 20 bp, Artificial Sequence
  Description of Artificial Sequence: Synthetic oligonucleotide
  Target: ATXN2; (-) strand; PAM type: YTN; PAM sequence: TTC
cgtactgtatctttatgaac

SEQ ID NO: 57486 - DNA, 20 bp, Artificial Sequence
  Description of Artificial Sequence: Synthetic oligonucleotide
  Target: ATXN2; (-) strand; PAM type: YTN; PAM sequence: CTG
agattccgtactgtatcttt

SEQ ID NO: 57487 - DNA, 20 bp, Artificial Sequence
  Description of Artificial Sequence: Synthetic oligonucleotide
  Target: ATXN2; (-) strand; PAM type: YTN; PAM sequence: CTC
tgagattccgtactgtatct

SEQ ID NO: 57488 - DNA, 20 bp, Artificial Sequence
  Description of Artificial Sequence: Synthetic oligonucleotide
  Target: ATXN2; (-) strand; PAM type: YTN; PAM sequence: TTA
caaaaaaaaaacaaaaacct

SEQ ID NO: 57489 - DNA, 20 bp, Artificial Sequence
  Description of Artificial Sequence: Synthetic oligonucleotide
  Target: ATXN2; (-) strand; PAM type: YTN; PAM sequence: TTG
aataaataaagttacaaaaa

SEQ ID NO: 57490 - DNA, 20 bp, Artificial Sequence
  Description of Artificial Sequence: Synthetic oligonucleotide
  Target: ATXN2; (-) strand; PAM type: YTN; PAM sequence: CTT
gaataaataaagttacaaaa

SEQ ID NO: 57491 - DNA, 20 bp, Artificial Sequence
  Description of Artificial Sequence: Synthetic oligonucleotide
  Target: ATXN2; (-) strand; PAM type: YTN; PAM sequence: TTC
ttgaataaataaagttacaa

SEQ ID NO: 57492 - DNA, 20 bp, Artificial Sequence
  Description of Artificial Sequence: Synthetic oligonucleotide
  Target: ATXN2; (-) strand; PAM type: YTN; PAM sequence: TTT
cttgaataaataaagttaca

SEQ ID NO: 57493 - DNA, 20 bp, Artificial Sequence
  Description of Artificial Sequence: Synthetic oligonucleotide
  Target: ATXN2; (-) strand; PAM type: YTN; PAM sequence: TTA
gtacaaaatttcttgaataa

SEQ ID NO: 57494 - DNA, 20 bp, Artificial Sequence
  Description of Artificial Sequence: Synthetic oligonucleotide
  Target: ATXN2; (-) strand; PAM type: YTN; PAM sequence: TTT
agtacaaaatttcttgaata

SEQ ID NO: 57495 - DNA, 20 bp, Artificial Sequence
  Description of Artificial Sequence: Synthetic oligonucleotide
  Target: ATXN2; (-) strand; PAM type: YTN; PAM sequence: TTT
tagtacaaaatttcttgaat

SEQ ID NO: 57496 - DNA, 20 bp, Artificial Sequence
  Description of Artificial Sequence: Synthetic oligonucleotide
  Target: ATXN2; (-) strand; PAM type: YTN; PAM sequence: TTT
ttagtacaaaatttcttgaa

SEQ ID NO: 57497 - DNA, 20 bp, Artificial Sequence
  Description of Artificial Sequence: Synthetic oligonucleotide
  Target: ATXN2; (-) strand; PAM type: YTN; PAM sequence: CTT
tttagtacaaaatttcttga

SEQ ID NO: 57498 - DNA, 20 bp, Artificial Sequence
  Description of Artificial Sequence: Synthetic oligonucleotide
  Target: ATXN2; (-) strand; PAM type: YTN; PAM sequence: TTC
aaactttttagtacaaaatt

SEQ ID NO: 57499 - DNA, 20 bp, Artificial Sequence
  Description of Artificial Sequence: Synthetic oligonucleotide
  Target: ATXN2; (-) strand; PAM type: YTN; PAM sequence: TTT
caaactttttagtacaaaat

SEQ ID NO: 57500 - DNA, 20 bp, Artificial Sequence
  Description of Artificial Sequence: Synthetic oligonucleotide
  Target: ATXN2; (-) strand; PAM type: YTN; PAM sequence: TTA
aaagtgaaatttcaaacttt

SEQ ID NO: 57501 - DNA, 20 bp, Artificial Sequence
  Description of Artificial Sequence: Synthetic oligonucleotide
  Target: ATXN2; (-) strand; PAM type: YTN; PAM sequence: TTT
aaaagtgaaatttcaaactt

SEQ ID NO: 57502 - DNA, 20 bp, Artificial Sequence
  Description of Artificial Sequence: Synthetic oligonucleotide
  Target: ATXN2; (-) strand; PAM type: YTN; PAM sequence: TTA
gaaggtatttaaaagtgaaa

SEQ ID NO: 57503 - DNA, 20 bp, Artificial Sequence
  Description of Artificial Sequence: Synthetic oligonucleotide
  Target: ATXN2; (-) strand; PAM type: YTN; PAM sequence: CTT
agaaggtatttaaaagtgaa

SEQ ID NO: 57504 - DNA, 20 bp, Artificial Sequence
  Description of Artificial Sequence: Synthetic oligonucleotide
  Target: ATXN2; (-) strand; PAM type: YTN; PAM sequence: TTG
cttagaaggtatttaaaagt

SEQ ID NO: 57505 - DNA, 20 bp, Artificial Sequence
  Description of Artificial Sequence: Synthetic oligonucleotide
  Target: ATXN2; (-) strand; PAM type: YTN; PAM sequence: TTT
gcttagaaggtatttaaaag

SEQ ID NO: 57506 - DNA, 20 bp, Artificial Sequence
  Description of Artificial Sequence: Synthetic oligonucleotide
  Target: ATXN2; (-) strand; PAM type: YTN; PAM sequence: CTT
tgcttagaaggtatttaaaa

SEQ ID NO: 57507 - DNA, 20 bp, Artificial Sequence
  Description of Artificial Sequence: Synthetic oligonucleotide
  Target: ATXN2; (-) strand; PAM type: YTN; PAM sequence: TTA
atactttgcttagaaggtat

SEQ ID NO: 57508 - DNA, 20 bp, Artificial Sequence
  Description of Artificial Sequence: Synthetic oligonucleotide
  Target: ATXN2; (-) strand; PAM type: YTN; PAM sequence: CTT
aatactttgcttagaaggta

SEQ ID NO: 57509 - DNA, 20 bp, Artificial Sequence
  Description of Artificial Sequence: Synthetic oligonucleotide
  Target: ATXN2; (-) strand; PAM type: YTN; PAM sequence: TTC
ttaatactttgcttagaagg

SEQ ID NO: 57510 - DNA, 20 bp, Artificial Sequence
  Description of Artificial Sequence: Synthetic oligonucleotide
  Target: ATXN2; (-) strand; PAM type: YTN; PAM sequence: TTA
atattcttaatactttgctt

SEQ ID NO: 57511 - DNA, 20 bp, Artificial Sequence
  Description of Artificial Sequence: Synthetic oligonucleotide
  Target: ATXN2; (-) strand; PAM type: YTN; PAM sequence: TTT
aatattcttaatactttgct

SEQ ID NO: 57512 - DNA, 20 bp, Artificial Sequence
  Description of Artificial Sequence: Synthetic oligonucleotide
  Target: ATXN2; (-) strand; PAM type: YTN; PAM sequence: TTT
taatattcttaatactttgc

SEQ ID NO: 57513 - DNA, 20 bp, Artificial Sequence
  Description of Artificial Sequence: Synthetic oligonucleotide
  Target: ATXN2; (-) strand; PAM type: YTN; PAM sequence: TTT
ttaatattcttaatactttg

SEQ ID NO: 57514 - DNA, 20 bp, Artificial Sequence
  Description of Artificial Sequence: Synthetic oligonucleotide
  Target: ATXN2; (-) strand; PAM type: YTN; PAM sequence: CTT
tttaatattcttaatacttt

SEQ ID NO: 57515 - DNA, 20 bp, Artificial Sequence
  Description of Artificial Sequence: Synthetic oligonucleotide
  Target: ATXN2; (-) strand; PAM type: YTN; PAM sequence: TTA
ctttttaatattcttaatac

SEQ ID NO: 57516 - DNA, 20 bp, Artificial Sequence
  Description of Artificial Sequence: Synthetic oligonucleotide
  Target: ATXN2; (-) strand; PAM type: YTN; PAM sequence: TTG
ttactttttaatattcttaa

SEQ ID NO: 57517 - DNA, 20 bp, Artificial Sequence
  Description of Artificial Sequence: Synthetic oligonucleotide
  Target: ATXN2; (-) strand; PAM type: YTN; PAM sequence: TTA
ttgttactttttaatattct

SEQ ID NO: 57518 - DNA, 20 bp, Artificial Sequence
  Description of Artificial Sequence: Synthetic oligonucleotide
  Target: ATXN2; (-) strand; PAM type: YTN; PAM sequence: TTT
attgttactttttaatattc

SEQ ID NO: 57519 - DNA, 20 bp, Artificial Sequence
  Description of Artificial Sequence: Synthetic oligonucleotide
  Target: ATXN2; (-) strand; PAM type: YTN; PAM sequence: CTA
tatttattgttactttttaa

SEQ ID NO: 57520 - DNA, 20 bp, Artificial Sequence
  Description of Artificial Sequence: Synthetic oligonucleotide
  Target: ATXN2; (-) strand; PAM type: YTN; PAM sequence: TTC
tatatttattgttacttttt

SEQ ID NO: 57521 - DNA, 20 bp, Artificial Sequence
  Description of Artificial Sequence: Synthetic oligonucleotide
  Target: ATXN2; (-) strand; PAM type: YTN; PAM sequence: TTT
ctatatttattgttactttt

SEQ ID NO: 57522 - DNA, 20 bp, Artificial Sequence
  Description of Artificial Sequence: Synthetic oligonucleotide
  Target: ATXN2; (-) strand; PAM type: YTN; PAM sequence: TTT
tctatatttattgttacttt

SEQ ID NO: 57523 - DNA, 20 bp, Artificial Sequence
  Description of Artificial Sequence: Synthetic oligonucleotide
  Target: ATXN2; (-) strand; PAM type: YTN; PAM sequence: TTA
ttttctatatttattgttac

SEQ ID NO: 57524 - DNA, 20 bp, Artificial Sequence
  Description of Artificial Sequence: Synthetic oligonucleotide
  Target: ATXN2; (-) strand; PAM type: YTN; PAM sequence: TTC
atgggcataattattttcta

SEQ ID NO: 57525 - DNA, 20 bp, Artificial Sequence
  Description of Artificial Sequence: Synthetic oligonucleotide
  Target: ATXN2; (-) strand; PAM type: YTN; PAM sequence: TTT
catgggcataattattttct

SEQ ID NO: 57526 - DNA, 20 bp, Artificial Sequence
  Description of Artificial Sequence: Synthetic oligonucleotide
  Target: ATXN2; (-) strand; PAM type: YTN; PAM sequence: TTA
tgagatttcatgggcataat

SEQ ID NO: 57527 - DNA, 20 bp, Artificial Sequence
  Description of Artificial Sequence: Synthetic oligonucleotide
  Target: ATXN2; (-) strand; PAM type: YTN; PAM sequence: TTA
aattatgagatttcatgggc

SEQ ID NO: 57528 - DNA, 20 bp, Artificial Sequence
  Description of Artificial Sequence: Synthetic oligonucleotide
  Target: ATXN2; (-) strand; PAM type: YTN; PAM sequence: CTT
aaattatgagatttcatggg

SEQ ID NO: 57529 - DNA, 20 bp, Artificial Sequence
  Description of Artificial Sequence: Synthetic oligonucleotide
  Target: ATXN2; (-) strand; PAM type: YTN; PAM sequence: TTG
atgaataacttaaattatga

SEQ ID NO: 57530 - DNA, 20 bp, Artificial Sequence
  Description of Artificial Sequence: Synthetic oligonucleotide
  Target: ATXN2; (-) strand; PAM type: YTN; PAM sequence: TTC
cagttgatgaataacttaaa

SEQ ID NO: 57531 - DNA, 20 bp, Artificial Sequence
  Description of Artificial Sequence: Synthetic oligonucleotide
  Target: ATXN2; (-) strand; PAM type: YTN; PAM sequence: TTT
ccagttgatgaataacttaa

SEQ ID NO: 57532 - DNA, 20 bp, Artificial Sequence
  Description of Artificial Sequence: Synthetic oligonucleotide
  Target: ATXN2; (-) strand; PAM type: YTN; PAM sequence: TTT
tccagttgatgaataactta

SEQ ID NO: 57533 - DNA, 20 bp, Artificial Sequence
  Description of Artificial Sequence: Synthetic oligonucleotide
  Target: ATXN2; (-) strand; PAM type: YTN; PAM sequence: TTT
ttccagttgatgaataactt

SEQ ID NO: 57534 - DNA, 20 bp, Artificial Sequence
  Description of Artificial Sequence: Synthetic oligonucleotide
  Target: ATXN2; (-) strand; PAM type: YTN; PAM sequence: TTA
catttttccagttgatgaat

SEQ ID NO: 57535 - DNA, 20 bp, Artificial Sequence
  Description of Artificial Sequence: Synthetic oligonucleotide
  Target: ATXN2; (-) strand; PAM type: YTN; PAM sequence: TTT
acatttttccagttgatgaa

SEQ ID NO: 57536 - DNA, 20 bp, Artificial Sequence
  Description of Artificial Sequence: Synthetic oligonucleotide
  Target: ATXN2; (-) strand; PAM type: YTN; PAM sequence: TTT
tacatttttccagttgatga

SEQ ID NO: 57537 - DNA, 20 bp, Artificial Sequence
  Description of Artificial Sequence: Synthetic oligonucleotide
  Target: ATXN2; (-) strand; PAM type: YTN; PAM sequence: TTT
ttacatttttccagttgatg

SEQ ID NO: 57538 - DNA, 20 bp, Artificial Sequence
  Description of Artificial Sequence: Synthetic oligonucleotide
  Target: ATXN2; (-) strand; PAM type: YTN; PAM sequence: TTA
agatttttacatttttccag

SEQ ID NO: 57539 - DNA, 20 bp, Artificial Sequence
  Description of Artificial Sequence: Synthetic oligonucleotide
  Target: ATXN2; (-) strand; PAM type: YTN; PAM sequence: TTT
aagatttttacatttttcca

SEQ ID NO: 57540 - DNA, 20 bp, Artificial Sequence
  Description of Artificial Sequence: Synthetic oligonucleotide
  Target: ATXN2; (-) strand; PAM type: YTN; PAM sequence: TTT
taagatttttacatttttcc

SEQ ID NO: 57541 - DNA, 20 bp, Artificial Sequence
  Description of Artificial Sequence: Synthetic oligonucleotide
  Target: ATXN2; (-) strand; PAM type: YTN; PAM sequence: TTC
aaatgattttaagattttta

SEQ ID NO: 57542 - DNA, 20 bp, Artificial Sequence
  Description of Artificial Sequence: Synthetic oligonucleotide
  Target: ATXN2; (-) strand; PAM type: YTN; PAM sequence: CTT
caaatgattttaagattttt

SEQ ID NO: 57543 - DNA, 20 bp, Artificial Sequence
  Description of Artificial Sequence: Synthetic oligonucleotide
  Target: ATXN2; (-) strand; PAM type: YTN; PAM sequence: CTC
ttcaaatgattttaagattt

SEQ ID NO: 57544 - DNA, 20 bp, Artificial Sequence
  Description of Artificial Sequence: Synthetic oligonucleotide
  Target: ATXN2; (-) strand; PAM type: YTN; PAM sequence: TTC
tcttcaaatgattttaagat

SEQ ID NO: 57545 - DNA, 20 bp, Artificial Sequence
  Description of Artificial Sequence: Synthetic oligonucleotide
  Target: ATXN2; (-) strand; PAM type: YTN; PAM sequence: TTT
ctcttcaaatgattttaaga

SEQ ID NO: 57546 - DNA, 20 bp, Artificial Sequence
  Description of Artificial Sequence: Synthetic oligonucleotide
  Target: ATXN2; (-) strand; PAM type: YTN; PAM sequence: TTT
tctcttcaaatgattttaag

SEQ ID NO: 57547 - DNA, 20 bp, Artificial Sequence
  Description of Artificial Sequence: Synthetic oligonucleotide
  Target: ATXN2; (-) strand; PAM type: YTN; PAM sequence: CTT
ttctcttcaaatgattttaa

SEQ ID NO: 57548 - DNA, 20 bp, Artificial Sequence
  Description of Artificial Sequence: Synthetic oligonucleotide
  Target: ATXN2; (-) strand; PAM type: YTN; PAM sequence: TTA
cttttctcttcaaatgattt

SEQ ID NO: 57549 - DNA, 20 bp, Artificial Sequence
  Description of Artificial Sequence: Synthetic oligonucleotide
  Target: ATXN2; (-) strand; PAM type: YTN; PAM sequence: TTT
acttttctcttcaaatgatt

SEQ ID NO: 57550 - DNA, 20 bp, Artificial Sequence
  Description of Artificial Sequence: Synthetic oligonucleotide
  Target: ATXN2; (-) strand; PAM type: YTN; PAM sequence: CTT
tacttttctcttcaaatgat

SEQ ID NO: 57551 - DNA, 20 bp, Artificial Sequence
  Description of Artificial Sequence: Synthetic oligonucleotide
  Target: ATXN2; (-) strand; PAM type: YTN; PAM sequence: TTC
atctttacttttctcttcaa

SEQ ID NO: 57552 - DNA, 20 bp, Artificial Sequence
  Description of Artificial Sequence: Synthetic oligonucleotide
  Target: ATXN2; (-) strand; PAM type: YTN; PAM sequence: TTT
catctttacttttctcttca

SEQ ID NO: 57553 - DNA, 20 bp, Artificial Sequence
  Description of Artificial Sequence: Synthetic oligonucleotide
  Target: ATXN2; (-) strand; PAM type: YTN; PAM sequence: TTA
aaaatgcatagtaaaaatat

SEQ ID NO: 57554 - DNA, 20 bp, Artificial Sequence
  Description of Artificial Sequence: Synthetic oligonucleotide
  Target: ATXN2; (-) strand; PAM type: YTN; PAM sequence: TTT
aaaaatgcatagtaaaaata

SEQ ID NO: 57555 - DNA, 20 bp, Artificial Sequence
  Description of Artificial Sequence: Synthetic oligonucleotide
  Target: ATXN2; (-) strand; PAM type: YTN; PAM sequence: TTT
taaaaatgcatagtaaaaat

SEQ ID NO: 57556 - DNA, 20 bp, Artificial Sequence
  Description of Artificial Sequence: Synthetic oligonucleotide
  Target: ATXN2; (-) strand; PAM type: YTN; PAM sequence: CTT
ttaaaaatgcatagtaaaaa

SEQ ID NO: 57557 - DNA, 20 bp, Artificial Sequence
  Description of Artificial Sequence: Synthetic oligonucleotide
  Target: ATXN2; (-) strand; PAM type: YTN; PAM sequence: TTG
cagagatgccttttaaaaat

SEQ ID NO: 57558 - DNA, 20 bp, Artificial Sequence
  Description of Artificial Sequence: Synthetic oligonucleotide
  Target: ATXN2; (-) strand; PAM type: YTN; PAM sequence: TTA
aattgcagagatgcctttta

SEQ ID NO: 57559 - DNA, 20 bp, Artificial Sequence
  Description of Artificial Sequence: Synthetic oligonucleotide
  Target: ATXN2; (-) strand; PAM type: YTN; PAM sequence: CTT
aaattgcagagatgcctttt

SEQ ID NO: 57560 - DNA, 20 bp, Artificial Sequence
  Description of Artificial Sequence: Synthetic oligonucleotide
  Target: ATXN2; (-) strand; PAM type: YTN; PAM sequence: CTG
gtaaacttaaattgcagaga

SEQ ID NO: 57561 - DNA, 20 bp, Artificial Sequence
  Description of Artificial Sequence: Synthetic oligonucleotide
  Target: ATXN2; (-) strand; PAM type: YTN; PAM sequence: TTA
aatactggtaaacttaaatt

SEQ ID NO: 57562 - DNA, 20 bp, Artificial Sequence
  Description of Artificial Sequence: Synthetic oligonucleotide
  Target: ATXN2; (-) strand; PAM type: YTN; PAM sequence: TTT
aaatactggtaaacttaaat

SEQ ID NO: 57563 - DNA, 20 bp, Artificial Sequence
  Description of Artificial Sequence: Synthetic oligonucleotide
  Target: ATXN2; (-) strand; PAM type: YTN; PAM sequence: CTT
taaatactggtaaacttaaa

SEQ ID NO: 57564 - DNA, 20 bp, Artificial Sequence
  Description of Artificial Sequence: Synthetic oligonucleotide
  Target: ATXN2; (-) strand; PAM type: YTN; PAM sequence: TTA
tagtctttaaatactggtaa

SEQ ID NO: 57565 - DNA, 20 bp, Artificial Sequence
  Description of Artificial Sequence: Synthetic oligonucleotide
  Target: ATXN2; (-) strand; PAM type: YTN; PAM sequence: TTA
gaaaaccgtattatagtctt

SEQ ID NO: 57566 - DNA, 20 bp, Artificial Sequence
  Description of Artificial Sequence: Synthetic oligonucleotide
  Target: ATXN2; (-) strand; PAM type: YTN; PAM sequence: CTA
tagattagaaaaccgtatta

SEQ ID NO: 57567 - DNA, 20 bp, Artificial Sequence
  Description of Artificial Sequence: Synthetic oligonucleotide
  Target: ATXN2; (-) strand; PAM type: YTN; PAM sequence: TTA
gctatagattagaaaaccgt

SEQ ID NO: 57568 - DNA, 20 bp, Artificial Sequence
  Description of Artificial Sequence: Synthetic oligonucleotide
  Target: ATXN2; (-) strand; PAM type: YTN; PAM sequence: CTA
tgcatgcaaattagctatag

SEQ ID NO: 57569 - DNA, 20 bp, Artificial Sequence
  Description of Artificial Sequence: Synthetic oligonucleotide
  Target: ATXN2; (-) strand; PAM type: YTN; PAM sequence: TTG
tgctatgcatgcaaattagc

SEQ ID NO: 57570 - DNA, 20 bp, Artificial Sequence
  Description of Artificial Sequence: Synthetic oligonucleotide
  Target: ATXN2; (-) strand; PAM type: YTN; PAM sequence: TTT
gtgctatgcatgcaaattag

SEQ ID NO: 57571 - DNA, 20 bp, Artificial Sequence
  Description of Artificial Sequence: Synthetic oligonucleotide
  Target: ATXN2; (-) strand; PAM type: YTN; PAM sequence: TTG
ggtatttgtgctatgcatgc

SEQ ID NO: 57572 - DNA, 20 bp, Artificial Sequence
  Description of Artificial Sequence: Synthetic oligonucleotide
  Target: ATXN2; (-) strand; PAM type: YTN; PAM sequence: CTT
gggtatttgtgctatgcatg

SEQ ID NO: 57573 - DNA, 20 bp, Artificial Sequence
  Description of Artificial Sequence: Synthetic oligonucleotide
  Target: ATXN2; (-) strand; PAM type: YTN; PAM sequence: CTC
agcttgggtatttgtgctat

SEQ ID NO: 57574 - DNA, 20 bp, Artificial Sequence
  Description of Artificial Sequence: Synthetic oligonucleotide
  Target: ATXN2; (-) strand; PAM type: YTN; PAM sequence: TTC
actcagcttgggtatttgtg

SEQ ID NO: 57575 - DNA, 20 bp, Artificial Sequence
  Description of Artificial Sequence: Synthetic oligonucleotide
  Target: ATXN2; (-) strand; PAM type: YTN; PAM sequence: CTA
tgtacattcactcagcttgg

SEQ ID NO: 57576 - DNA, 20 bp, Artificial Sequence
  Description of Artificial Sequence: Synthetic oligonucleotide
  Target: ATXN2; (-) strand; PAM type: YTN; PAM sequence: TTA
aacaaagcctatgtacattc

SEQ ID NO: 57577 - DNA, 20 bp, Artificial Sequence
  Description of Artificial Sequence: Synthetic oligonucleotide
  Target: ATXN2; (-) strand; PAM type: YTN; PAM sequence: TTT
aaacaaagcctatgtacatt

SEQ ID NO: 57578 - DNA, 20 bp, Artificial Sequence
  Description of Artificial Sequence: Synthetic oligonucleotide
  Target: ATXN2; (-) strand; PAM type: YTN; PAM sequence: TTT
taaacaaagcctatgtacat

SEQ ID NO: 57579 - DNA, 20 bp, Artificial Sequence
  Description of Artificial Sequence: Synthetic oligonucleotide
  Target: ATXN2; (-) strand; PAM type: YTN; PAM sequence: TTT
ttaaacaaagcctatgtaca

SEQ ID NO: 57580 - DNA, 20 bp, Artificial Sequence
  Description of Artificial Sequence: Synthetic oligonucleotide
  Target: ATXN2; (-) strand; PAM type: YTN; PAM sequence: TTT
tttaaacaaagcctatgtac

SEQ ID NO: 57581 - DNA, 20 bp, Artificial Sequence
  Description of Artificial Sequence: Synthetic oligonucleotide
  Target: ATXN2; (-) strand; PAM type: YTN; PAM sequence: TTT
ttttaaacaaagcctatgta

SEQ ID NO: 57582 - DNA, 20 bp, Artificial Sequence
  Description of Artificial Sequence: Synthetic oligonucleotide
  Target: ATXN2; (-) strand; PAM type: YTN; PAM sequence: TTG
tttttttaaacaaagcctat

SEQ ID NO: 57583 - DNA, 20 bp, Artificial Sequence
  Description of Artificial Sequence: Synthetic oligonucleotide
  Target: ATXN2; (-) strand; PAM type: YTN; PAM sequence: TTT
gtttttttaaacaaagccta

SEQ ID NO: 57584 - DNA, 20 bp, Artificial Sequence
  Description of Artificial Sequence: Synthetic oligonucleotide
  Target: ATXN2; (-) strand; PAM type: YTN; PAM sequence: TTT
tgtttttttaaacaaagcct

SEQ ID NO: 57585 - DNA, 20 bp, Artificial Sequence
  Description of Artificial Sequence: Synthetic oligonucleotide
  Target: ATXN2; (-) strand; PAM type: YTN; PAM sequence: TTT
ttgtttttttaaacaaagcc

SEQ ID NO: 57586 - DNA, 20 bp, Artificial Sequence
  Description of Artificial Sequence: Synthetic oligonucleotide
  Target: ATXN2; (-) strand; PAM type: YTN; PAM sequence: TTG
tttttgtttttttaaacaaa

SEQ ID NO: 57587 - DNA, 20 bp, Artificial Sequence
  Description of Artificial Sequence: Synthetic oligonucleotide
  Target: ATXN2; (-) strand; PAM type: YTN; PAM sequence: TTT
gtttttgtttttttaaacaa

SEQ ID NO: 57588 - DNA, 20 bp, Artificial Sequence
  Description of Artificial Sequence: Synthetic oligonucleotide
  Target: ATXN2; (-) strand; PAM type: YTN; PAM sequence: TTT
tgtttttgtttttttaaaca

SEQ ID NO: 57589 - DNA, 20 bp, Artificial Sequence
  Description of Artificial Sequence: Synthetic oligonucleotide
  Target: ATXN2; (-) strand; PAM type: YTN; PAM sequence: TTA
ggtagggaaaggattttgtt

SEQ ID NO: 57590 - DNA, 20 bp, Artificial Sequence
  Description of Artificial Sequence: Synthetic oligonucleotide
  Target: ATXN2; (-) strand; PAM type: YTN; PAM sequence: TTT
aggtagggaaaggattttgt

SEQ ID NO: 57591 - DNA, 20 bp, Artificial Sequence
  Description of Artificial Sequence: Synthetic oligonucleotide
  Target: ATXN2; (-) strand; PAM type: YTN; PAM sequence: TTA
ccggtatttaggtagggaaa

SEQ ID NO: 57592 - DNA, 20 bp, Artificial Sequence
  Description of Artificial Sequence: Synthetic oligonucleotide
  Target: ATXN2; (-) strand; PAM type: YTN; PAM sequence: TTT
accggtatttaggtagggaa

SEQ ID NO: 57593 - DNA, 20 bp, Artificial Sequence
  Description of Artificial Sequence: Synthetic oligonucleotide
  Target: ATXN2; (-) strand; PAM type: YTN; PAM sequence: TTG
caagtttaccggtatttagg

SEQ ID NO: 57594 - DNA, 20 bp, Artificial Sequence
  Description of Artificial Sequence: Synthetic oligonucleotide
  Target: ATXN2; (-) strand; PAM type: YTN; PAM sequence: CTT
gcaagtttaccggtatttag

SEQ ID NO: 57595 - DNA, 20 bp, Artificial Sequence
  Description of Artificial Sequence: Synthetic oligonucleotide
  Target: ATXN2; (-) strand; PAM type: YTN; PAM sequence: TTA
atcaatgccttgcaagttta

SEQ ID NO: 57596 - DNA, 20 bp, Artificial Sequence
  Description of Artificial Sequence: Synthetic oligonucleotide
  Target: ATXN2; (-) strand; PAM type: YTN; PAM sequence: TTT
aatcaatgccttgcaagttt

SEQ ID NO: 57597 - DNA, 20 bp, Artificial Sequence
  Description of Artificial Sequence: Synthetic oligonucleotide
  Target: ATXN2; (-) strand; PAM type: YTN; PAM sequence: TTT
taatcaatgccttgcaagtt

SEQ ID NO: 57598 - DNA, 20 bp, Artificial Sequence
  Description of Artificial Sequence: Synthetic oligonucleotide
  Target: ATXN2; (-) strand; PAM type: YTN; PAM sequence: TTT
ttaatcaatgccttgcaagt

SEQ ID NO: 57599 - DNA, 20 bp, Artificial Sequence
  Description of Artificial Sequence: Synthetic oligonucleotide
  Target: ATXN2; (-) strand; PAM type: YTN; PAM sequence: TTG
tttttaatcaatgccttgca

SEQ ID NO: 57600 - DNA, 20 bp, Artificial Sequence
  Description of Artificial Sequence: Synthetic oligonucleotide
  Target: ATXN2; (-) strand; PAM type: YTN; PAM sequence: CTT
gtttttaatcaatgccttgc

SEQ ID NO: 57601 - DNA, 20 bp, Artificial Sequence
  Description of Artificial Sequence: Synthetic oligonucleotide
  Target: ATXN2; (-) strand; PAM type: YTN; PAM sequence: TTC
gtcttgtttttaatcaatgc

SEQ ID NO: 57602 - DNA, 20 bp, Artificial Sequence
  Description of Artificial Sequence: Synthetic oligonucleotide
  Target: ATXN2; (-) strand; PAM type: YTN; PAM sequence: TTG
ttcgtcttgtttttaatcaa

SEQ ID NO: 57603 - DNA, 20 bp, Artificial Sequence
  Description of Artificial Sequence: Synthetic oligonucleotide
  Target: ATXN2; (-) strand; PAM type: YTN; PAM sequence: TTT
gttcgtcttgtttttaatca

SEQ ID NO: 57604 - DNA, 20 bp, Artificial Sequence
  Description of Artificial Sequence: Synthetic oligonucleotide
  Target: ATXN2; (-) strand; PAM type: YTN; PAM sequence: TTT
tgttcgtcttgtttttaatc

SEQ ID NO: 57605 - DNA, 20 bp, Artificial Sequence
  Description of Artificial Sequence: Synthetic oligonucleotide
  Target: ATXN2; (-) strand; PAM type: YTN; PAM sequence: TTT
ttgttcgtcttgtttttaat

SEQ ID NO: 57606 - DNA, 20 bp, Artificial Sequence
  Description of Artificial Sequence: Synthetic oligonucleotide
  Target: ATXN2; (-) strand; PAM type: YTN; PAM sequence: TTG
tggtttttgttcgtcttgtt

SEQ ID NO: 57607 - DNA, 20 bp, Artificial Sequence
  Description of Artificial Sequence: Synthetic oligonucleotide
  Target: ATXN2; (-) strand; PAM type: YTN; PAM sequence: TTT
gtggtttttgttcgtcttgt

SEQ ID NO: 57608 - DNA, 20 bp, Artificial Sequence
  Description of Artificial Sequence: Synthetic oligonucleotide
  Target: ATXN2; (-) strand; PAM type: YTN; PAM sequence: CTT
tgtggtttttgttcgtcttg

SEQ ID NO: 57609 - DNA, 20 bp, Artificial Sequence
  Description of Artificial Sequence: Synthetic oligonucleotide
  Target: ATXN2; (-) strand; PAM type: YTN; PAM sequence: TTA
cacatcctttgtggtttttg

SEQ ID NO: 57610 - DNA, 20 bp, Artificial Sequence
  Description of Artificial Sequence: Synthetic oligonucleotide
  Target: ATXN2; (-) strand; PAM type: YTN; PAM sequence: TTT
acacatcctttgtggttttt

SEQ ID NO: 57611 - DNA, 20 bp, Artificial Sequence
  Description of Artificial Sequence: Synthetic oligonucleotide
  Target: ATXN2; (-) strand; PAM type: YTN; PAM sequence: TTT
tacacatcctttgtggtttt

SEQ ID NO: 57612 - DNA, 20 bp, Artificial Sequence
  Description of Artificial Sequence: Synthetic oligonucleotide
  Target: ATXN2; (-) strand; PAM type: YTN; PAM sequence: TTA
caacgtatgatacatatttt

SEQ ID NO: 57613 - DNA, 20 bp, Artificial Sequence
  Description of Artificial Sequence: Synthetic oligonucleotide
  Target: ATXN2; (-) strand; PAM type: YTN; PAM sequence: TTT
acaacgtatgatacatattt

SEQ ID NO: 57614 - DNA, 20 bp, Artificial Sequence
  Description of Artificial Sequence: Synthetic oligonucleotide
  Target: ATXN2; (-) strand; PAM type: YTN; PAM sequence: TTG
tttacaacgtatgatacata

SEQ ID NO: 57615 - DNA, 20 bp, Artificial Sequence
  Description of Artificial Sequence: Synthetic oligonucleotide
  Target: ATXN2; (-) strand; PAM type: YTN; PAM sequence: TTT
gtttacaacgtatgatacat

SEQ ID NO: 57616 - DNA, 20 bp, Artificial Sequence
  Description of Artificial Sequence: Synthetic oligonucleotide
  Target: ATXN2; (-) strand; PAM type: YTN; PAM sequence: TTT
tgtttacaacgtatgataca

SEQ ID NO: 57617 - DNA, 20 bp, Artificial Sequence
  Description of Artificial Sequence: Synthetic oligonucleotide
  Target: ATXN2; (-) strand; PAM type: YTN; PAM sequence: TTA
aattttgtttacaacgtatg

SEQ ID NO: 57618 - DNA, 20 bp, Artificial Sequence
  Description of Artificial Sequence: Synthetic oligonucleotide
  Target: ATXN2; (-) strand; PAM type: YTN; PAM sequence: TTT
aaattttgtttacaacgtat

SEQ ID NO: 57619 - DNA, 20 bp, Artificial Sequence
  Description of Artificial Sequence: Synthetic oligonucleotide
  Target: ATXN2; (-) strand; PAM type: YTN; PAM sequence: TTT
taaattttgtttacaacgta

SEQ ID NO: 57620 - DNA, 20 bp, Artificial Sequence
  Description of Artificial Sequence: Synthetic oligonucleotide
  Target: ATXN2; (-) strand; PAM type: YTN; PAM sequence: TTT
ttaaattttgtttacaacgt

SEQ ID NO: 57621 - DNA, 20 bp, Artificial Sequence
  Description of Artificial Sequence: Synthetic oligonucleotide
  Target: ATXN2; (-) strand; PAM type: YTN; PAM sequence: CTT
tttaaattttgtttacaacg

SEQ ID NO: 57622 - DNA, 20 bp, Artificial Sequence
  Description of Artificial Sequence: Synthetic oligonucleotide
  Target: ATXN2; (-) strand; PAM type: YTN; PAM sequence: CTC
tttttaaattttgtttacaa

SEQ ID NO: 57623 - DNA, 20 bp, Artificial Sequence
  Description of Artificial Sequence: Synthetic oligonucleotide
  Target: ATXN2; (-) strand; PAM type: YTN; PAM sequence: TTA
actctttttaaattttgttt

SEQ ID NO: 57624 - DNA, 20 bp, Artificial Sequence
  Description of Artificial Sequence: Synthetic oligonucleotide
  Target: ATXN2; (-) strand; PAM type: YTN; PAM sequence: CTA
attaactctttttaaatttt

SEQ ID NO: 57625 - DNA, 20 bp, Artificial Sequence
  Description of Artificial Sequence: Synthetic oligonucleotide
  Target: ATXN2; (-) strand; PAM type: YTN; PAM sequence: TTC
taattaactctttttaaatt

SEQ ID NO: 57626 - DNA, 20 bp, Artificial Sequence
  Description of Artificial Sequence: Synthetic oligonucleotide
  Target: ATXN2; (-) strand; PAM type: YTN; PAM sequence: TTT
ctaattaactctttttaaat

SEQ ID NO: 57627 - DNA, 20 bp, Artificial Sequence
  Description of Artificial Sequence: Synthetic oligonucleotide
  Target: ATXN2; (-) strand; PAM type: YTN; PAM sequence: CTA
gaacaaaaaaacaaagggaa

SEQ ID NO: 57628 - DNA, 20 bp, Artificial Sequence
  Description of Artificial Sequence: Synthetic oligonucleotide
  Target: ATXN2; (-) strand; PAM type: YTN; PAM sequence: TTG
agctagaacaaaaaaacaaa

SEQ ID NO: 57629 - DNA, 20 bp, Artificial Sequence
  Description of Artificial Sequence: Synthetic oligonucleotide
  Target: ATXN2; (-) strand; PAM type: YTN; PAM sequence: TTT
gagctagaacaaaaaaacaa

SEQ ID NO: 57630 - DNA, 20 bp, Artificial Sequence
  Description of Artificial Sequence: Synthetic oligonucleotide
  Target: ATXN2; (-) strand; PAM type: YTN; PAM sequence: TTT
tgagctagaacaaaaaaaca

SEQ ID NO: 57631 - DNA, 20 bp, Artificial Sequence
  Description of Artificial Sequence: Synthetic oligonucleotide
  Target: ATXN2; (-) strand; PAM type: YTN; PAM sequence: CTT
ttgagctagaacaaaaaaac

SEQ ID NO: 57632 - DNA, 20 bp, Artificial Sequence
  Description of Artificial Sequence: Synthetic oligonucleotide
  Target: ATXN2; (-) strand; PAM type: YTN; PAM sequence: TTC
agatcttttgagctagaaca

SEQ ID NO: 57633 - DNA, 20 bp, Artificial Sequence
  Description of Artificial Sequence: Synthetic oligonucleotide
  Target: ATXN2; (-) strand; PAM type: YTN; PAM sequence: TTT
cagatcttttgagctagaac

SEQ ID NO: 57634 - DNA, 20 bp, Artificial Sequence
  Description of Artificial Sequence: Synthetic oligonucleotide
  Target: ATXN2; (-) strand; PAM type: YTN; PAM sequence: CTT
tcagatcttttgagctagaa

SEQ ID NO: 57635 - DNA, 20 bp, Artificial Sequence
  Description of Artificial Sequence: Synthetic oligonucleotide
  Target: ATXN2; (-) strand; PAM type: YTN; PAM sequence: TTC
tttcagatcttttgagctag

SEQ ID NO: 57636 - DNA, 20 bp, Artificial Sequence
  Description of Artificial Sequence: Synthetic oligonucleotide
  Target: ATXN2; (-) strand; PAM type: YTN; PAM sequence: CTT
ctttcagatcttttgagcta

SEQ ID NO: 57637 - DNA, 20 bp, Artificial Sequence
  Description of Artificial Sequence: Synthetic oligonucleotide
  Target: ATXN2; (-) strand; PAM type: YTN; PAM sequence: TTA
aggtacttctttcagatctt

SEQ ID NO: 57638 - DNA, 20 bp, Artificial Sequence
  Description of Artificial Sequence: Synthetic oligonucleotide
  Target: ATXN2; (-) strand; PAM type: YTN; PAM sequence: CTG
attaaggtacttctttcaga

SEQ ID NO: 57639 - DNA, 20 bp, Artificial Sequence
  Description of Artificial Sequence: Synthetic oligonucleotide
  Target: ATXN2; (-) strand; PAM type: YTN; PAM sequence: TTC
ctgattaaggtacttctttc

SEQ ID NO: 57640 - DNA, 20 bp, Artificial Sequence
  Description of Artificial Sequence: Synthetic oligonucleotide
  Target: ATXN2; (-) strand; PAM type: YTN; PAM sequence: TTC
aaggaggaaaagaattcctg

SEQ ID NO: 57641 - DNA, 20 bp, Artificial Sequence
  Description of Artificial Sequence: Synthetic oligonucleotide
  Target: ATXN2; (-) strand; PAM type: YTN; PAM sequence: TTC
aaattcaaggaggaaaagaa

SEQ ID NO: 57642 - DNA, 20 bp, Artificial Sequence
  Description of Artificial Sequence: Synthetic oligonucleotide
  Target: ATXN2; (-) strand; PAM type: YTN; PAM sequence: TTT
caaattcaaggaggaaaaga

SEQ ID NO: 57643 - DNA, 20 bp, Artificial Sequence
  Description of Artificial Sequence: Synthetic oligonucleotide
  Target: ATXN2; (-) strand; PAM type: YTN; PAM sequence: CTC
ccaatttcaaattcaaggag

SEQ ID NO: 57644 - DNA, 20 bp, Artificial Sequence
  Description of Artificial Sequence: Synthetic oligonucleotide
  Target: ATXN2; (-) strand; PAM type: YTN; PAM sequence: TTC
tcccaatttcaaattcaagg

SEQ ID NO: 57645 - DNA, 20 bp, Artificial Sequence
  Description of Artificial Sequence: Synthetic oligonucleotide
  Target: ATXN2; (-) strand; PAM type: YTN; PAM sequence: TTT
ctcccaatttcaaattcaag

SEQ ID NO: 57646 - DNA, 20 bp, Artificial Sequence
  Description of Artificial Sequence: Synthetic oligonucleotide
  Target: ATXN2; (-) strand; PAM type: YTN; PAM sequence: CTC
catttctcccaatttcaaat

SEQ ID NO: 57647 - DNA, 20 bp, Artificial Sequence
  Description of Artificial Sequence: Synthetic oligonucleotide
  Target: ATXN2; (-) strand; PAM type: YTN; PAM sequence: TTA
caagcgtgagccaccgtgcc

SEQ ID NO: 57648 - DNA, 20 bp, Artificial Sequence
  Description of Artificial Sequence: Synthetic oligonucleotide
  Target: ATXN2; (-) strand; PAM type: YTN; PAM sequence: CTG
ggattacaagcgtgagccac

SEQ ID NO: 57649 - DNA, 20 bp, Artificial Sequence
  Description of Artificial Sequence: Synthetic oligonucleotide
  Target: ATXN2; (-) strand; PAM type: YTN; PAM sequence: CTC
ccaaaatgctgggattacaa

SEQ ID NO: 57650 - DNA, 20 bp, Artificial Sequence
  Description of Artificial Sequence: Synthetic oligonucleotide
  Target: ATXN2; (-) strand; PAM type: YTN; PAM sequence: CTC
ggcctcccaaaatgctggga

SEQ ID NO: 57651 - DNA, 20 bp, Artificial Sequence
  Description of Artificial Sequence: Synthetic oligonucleotide
  Target: ATXN2; (-) strand; PAM type: YTN; PAM sequence: CTC
aggtgatccgcccgcctcgg

SEQ ID NO: 57652 - DNA, 20 bp, Artificial Sequence
  Description of Artificial Sequence: Synthetic oligonucleotide
  Target: ATXN2; (-) strand; PAM type: YTN; PAM sequence: CTA
acctcaggtgatccgcccgc

SEQ ID NO: 57653 - DNA, 20 bp, Artificial Sequence
  Description of Artificial Sequence: Synthetic oligonucleotide
  Target: ATXN2; (-) strand; PAM type: YTN; PAM sequence: CTC
ctaacctcaggtgatccgcc

SEQ ID NO: 57654 - DNA, 20 bp, Artificial Sequence
  Description of Artificial Sequence: Synthetic oligonucleotide
  Target: ATXN2; (-) strand; PAM type: YTN; PAM sequence: CTC
gaactcctaacctcaggtga

SEQ ID NO: 57655 - DNA, 20 bp, Artificial Sequence
  Description of Artificial Sequence: Synthetic oligonucleotide
  Target: ATXN2; (-) strand; PAM type: YTN; PAM sequence: CTG
gtctcgaactcctaacctca

SEQ ID NO: 57656 - DNA, 20 bp, Artificial Sequence
  Description of Artificial Sequence: Synthetic oligonucleotide
  Target: ATXN2; (-) strand; PAM type: YTN; PAM sequence: TTG
gccaagctggtctcgaactc

SEQ ID NO: 57657 - DNA, 20 bp, Artificial Sequence
  Description of Artificial Sequence: Synthetic oligonucleotide
  Target: ATXN2; (-) strand; PAM type: YTN; PAM sequence: TTC
gccgtgttggccaagctggt

SEQ ID NO: 57658 - DNA, 20 bp, Artificial Sequence
  Description of Artificial Sequence: Synthetic oligonucleotide
  Target: ATXN2; (-) strand; PAM type: YTN; PAM sequence: TTT
cgccgtgttggccaagctgg

SEQ ID NO: 57659 - DNA, 20 bp, Artificial Sequence
  Description of Artificial Sequence: Synthetic oligonucleotide
  Target: ATXN2; (-) strand; PAM type: YTN; PAM sequence: TTA
gtagagacagggtttcgccg

SEQ ID NO: 57660 - DNA, 20 bp, Artificial Sequence
  Description of Artificial Sequence: Synthetic oligonucleotide
  Target: ATXN2; (-) strand; PAM type: YTN; PAM sequence: TTT
agtagagacagggtttcgcc

SEQ ID NO: 57661 - DNA, 20 bp, Artificial Sequence
  Description of Artificial Sequence: Synthetic oligonucleotide
  Target: ATXN2; (-) strand; PAM type: YTN; PAM sequence: TTT
tagtagagacagggtttcgc

SEQ ID NO: 57662 - DNA, 20 bp, Artificial Sequence
  Description of Artificial Sequence: Synthetic oligonucleotide
  Target: ATXN2; (-) strand; PAM type: YTN; PAM sequence: TTT
ttagtagagacagggtttcg

SEQ ID NO: 57663 - DNA, 20 bp, Artificial Sequence
  Description of Artificial Sequence: Synthetic oligonucleotide
  Target: ATXN2; (-) strand; PAM type: YTN; PAM sequence: TTG
tatttttagtagagacaggg

SEQ ID NO: 57664 - DNA, 20 bp, Artificial Sequence
  Description of Artificial Sequence: Synthetic oligonucleotide
  Target: ATXN2; (-) strand; PAM type: YTN; PAM sequence: TTT
gtatttttagtagagacagg

SEQ ID NO: 57665 - DNA, 20 bp, Artificial Sequence
  Description of Artificial Sequence: Synthetic oligonucleotide
  Target: ATXN2; (-) strand; PAM type: YTN; PAM sequence: TTT
tgtatttttagtagagacag

SEQ ID NO: 57666 - DNA, 20 bp, Artificial Sequence
  Description of Artificial Sequence: Synthetic oligonucleotide
  Target: ATXN2; (-) strand; PAM type: YTN; PAM sequence: TTT
ttgtatttttagtagagaca

SEQ ID NO: 57667 - DNA, 20 bp, Artificial Sequence
  Description of Artificial Sequence: Synthetic oligonucleotide
  Target: ATXN2; (-) strand; PAM type: YTN; PAM sequence: CTA
atttttgtatttttagtaga

SEQ ID NO: 57668 - DNA, 20 bp, Artificial Sequence
  Description of Artificial Sequence: Synthetic oligonucleotide
  Target: ATXN2; (-) strand; PAM type: YTN; PAM sequence: CTG
ccaccacgcccagctaattt

SEQ ID NO: 57669 - DNA, 20 bp, Artificial Sequence
  Description of Artificial Sequence: Synthetic oligonucleotide
  Target: ATXN2; (-) strand; PAM type: YTN; PAM sequence: TTA
caggtgcctgccaccacgcc

SEQ ID NO: 57670 - DNA, 20 bp, Artificial Sequence
  Description of Artificial Sequence: Synthetic oligonucleotide
  Target: ATXN2; (-) strand; PAM type: YTN; PAM sequence: CTG
tgattacaggtgcctgccac

SEQ ID NO: 57671 - DNA, 20 bp, Artificial Sequence
  Description of Artificial Sequence: Synthetic oligonucleotide
  Target: ATXN2; (-) strand; PAM type: YTN; PAM sequence: CTA
gtagctgtgattacaggtgc

SEQ ID NO: 57672 - DNA, 20 bp, Artificial Sequence
  Description of Artificial Sequence: Synthetic oligonucleotide
  Target: ATXN2; (-) strand; PAM type: YTN; PAM sequence: CTC
cctagtagctgtgattacag

SEQ ID NO: 57673 - DNA, 20 bp, Artificial Sequence
  Description of Artificial Sequence: Synthetic oligonucleotide
  Target: ATXN2; (-) strand; PAM type: YTN; PAM sequence: CTC
tccctagtagctgtgattac

SEQ ID NO: 57674 - DNA, 20 bp, Artificial Sequence
  Description of Artificial Sequence: Synthetic oligonucleotide
  Target: ATXN2; (-) strand; PAM type: YTN; PAM sequence: TTC
cccactctccctagtagctg

SEQ ID NO: 57675 - DNA, 20 bp, Artificial Sequence
  Description of Artificial Sequence: Synthetic oligonucleotide
  Target: ATXN2; (-) strand; PAM type: YTN; PAM sequence: CTT
ccccactctccctagtagct

SEQ ID NO: 57676 - DNA, 20 bp, Artificial Sequence
  Description of Artificial Sequence: Synthetic oligonucleotide
  Target: ATXN2; (-) strand; PAM type: YTN; PAM sequence: CTC
cttccccactctccctagta

SEQ ID NO: 57677 - DNA, 20 bp, Artificial Sequence
  Description of Artificial Sequence: Synthetic oligonucleotide
  Target: ATXN2; (-) strand; PAM type: YTN; PAM sequence: TTC
tccttccccactctccctag

SEQ ID NO: 57678 - DNA, 20 bp, Artificial Sequence
  Description of Artificial Sequence: Synthetic oligonucleotide
  Target: ATXN2; (-) strand; PAM type: YTN; PAM sequence: CTA
ttctccttccccactctccc

SEQ ID NO: 57679 - DNA, 20 bp, Artificial Sequence
  Description of Artificial Sequence: Synthetic oligonucleotide
  Target: ATXN2; (-) strand; PAM type: YTN; PAM sequence: TTC
aagctattctccttccccac

SEQ ID NO: 57680 - DNA, 20 bp, Artificial Sequence
  Description of Artificial Sequence: Synthetic oligonucleotide
  Target: ATXN2; (-) strand; PAM type: YTN; PAM sequence: CTC
ccgggttcaagctattctcc

SEQ ID NO: 57681 - DNA, 20 bp, Artificial Sequence
  Description of Artificial Sequence: Synthetic oligonucleotide
  Target: ATXN2; (-) strand; PAM type: YTN; PAM sequence: CTC
cacctcccgggttcaagcta

SEQ ID NO: 57682 - DNA, 20 bp, Artificial Sequence
  Description of Artificial Sequence: Synthetic oligonucleotide
  Target: ATXN2; (-) strand; PAM type: YTN; PAM sequence: CTG
caacctccacctcccgggtt

SEQ ID NO: 57683 - DNA, 20 bp, Artificial Sequence
  Description of Artificial Sequence: Synthetic oligonucleotide
  Target: ATXN2; (-) strand; PAM type: YTN; PAM sequence: TTC
actgcaacctccacctcccg

SEQ ID NO: 57684 - DNA, 20 bp, Artificial Sequence
  Description of Artificial Sequence: Synthetic oligonucleotide
  Target: ATXN2; (-) strand; PAM type: YTN; PAM sequence: CTG
gagtgcaatggtgtgatgtc

SEQ ID NO: 57685 - DNA, 20 bp, Artificial Sequence
  Description of Artificial Sequence: Synthetic oligonucleotide
  Target: ATXN2; (-) strand; PAM type: YTN; PAM sequence: TTG
cccaagctggagtgcaatgg

SEQ ID NO: 57686 - DNA, 20 bp, Artificial Sequence
  Description of Artificial Sequence: Synthetic oligonucleotide
  Target: ATXN2; (-) strand; PAM type: YTN; PAM sequence: TTG
ttgcccaagctggagtgcaa

SEQ ID NO: 57687 - DNA, 20 bp, Artificial Sequence
  Description of Artificial Sequence: Synthetic oligonucleotide
  Target: ATXN2; (-) strand; PAM type: YTN; PAM sequence: CTT
gttgcccaagctggagtgca

SEQ ID NO: 57688 - DNA, 20 bp, Artificial Sequence
  Description of Artificial Sequence: Synthetic oligonucleotide
  Target: ATXN2; (-) strand; PAM type: YTN; PAM sequence: CTC
ttgttgcccaagctggagtg

SEQ ID NO: 57689 - DNA, 20 bp, Artificial Sequence
  Description of Artificial Sequence: Synthetic oligonucleotide
  Target: ATXN2; (-) strand; PAM type: YTN; PAM sequence: TTC
gctcttgttgcccaagctgg

SEQ ID NO: 57690 - DNA, 20 bp, Artificial Sequence
  Description of Artificial Sequence: Synthetic oligonucleotide
  Target: ATXN2; (-) strand; PAM type: YTN; PAM sequence: TTT
cgctcttgttgcccaagctg

SEQ ID NO: 57691 - DNA, 20 bp, Artificial Sequence
  Description of Artificial Sequence: Synthetic oligonucleotide
  Target: ATXN2; (-) strand; PAM type: YTN; PAM sequence: TTG
agacggagtttcgctcttgt

SEQ ID NO: 57692 - DNA, 20 bp, Artificial Sequence
  Description of Artificial Sequence: Synthetic oligonucleotide
  Target: ATXN2; (-) strand; PAM type: YTN; PAM sequence: TTT
gagacggagtttcgctcttg

SEQ ID NO: 57693 - DNA, 20 bp, Artificial Sequence
  Description of Artificial Sequence: Synthetic oligonucleotide
  Target: ATXN2; (-) strand; PAM type: YTN; PAM sequence: TTT
tgagacggagtttcgctctt

SEQ ID NO: 57694 - DNA, 20 bp, Artificial Sequence
  Description of Artificial Sequence: Synthetic oligonucleotide
  Target: ATXN2; (-) strand; PAM type: YTN; PAM sequence: TTT
ttgagacggagtttcgctct

SEQ ID NO: 57695 - DNA, 20 bp, Artificial Sequence
  Description of Artificial Sequence: Synthetic oligonucleotide
  Target: ATXN2; (-) strand; PAM type: YTN; PAM sequence: TTT
tttgagacggagtttcgctc

SEQ ID NO: 57696 - DNA, 20 bp, Artificial Sequence
  Description of Artificial Sequence: Synthetic oligonucleotide
  Target: ATXN2; (-) strand; PAM type: YTN; PAM sequence: TTA
ttttttgagacggagtttcg

SEQ ID NO: 57697 - DNA, 20 bp, Artificial Sequence
  Description of Artificial Sequence: Synthetic oligonucleotide
  Target: ATXN2; (-) strand; PAM type: YTN; PAM sequence: TTT
attttttgagacggagtttc

SEQ ID NO: 57698 - DNA, 20 bp, Artificial Sequence
  Description of Artificial Sequence: Synthetic oligonucleotide
  Target: ATXN2; (-) strand; PAM type: YTN; PAM sequence: TTT
tattttttgagacggagttt

SEQ ID NO: 57699 - DNA, 20 bp, Artificial Sequence
  Description of Artificial Sequence: Synthetic oligonucleotide
  Target: ATXN2; (-) strand; PAM type: YTN; PAM sequence: TTA
ttttattttttgagacggag

SEQ ID NO: 57700 - DNA, 20 bp, Artificial Sequence
  Description of Artificial Sequence: Synthetic oligonucleotide
  Target: ATXN2; (-) strand; PAM type: YTN; PAM sequence: TTT
attttattttttgagacgga

SEQ ID NO: 57701 - DNA, 20 bp, Artificial Sequence
  Description of Artificial Sequence: Synthetic oligonucleotide
  Target: ATXN2; (-) strand; PAM type: YTN; PAM sequence: TTG
tttattttattttttgagac

SEQ ID NO: 57702 - DNA, 20 bp, Artificial Sequence
  Description of Artificial Sequence: Synthetic oligonucleotide
  Target: ATXN2; (-) strand; PAM type: YTN; PAM sequence: TTT
gtttattttattttttgaga

SEQ ID NO: 57703 - DNA, 20 bp, Artificial Sequence
  Description of Artificial Sequence: Synthetic oligonucleotide
  Target: ATXN2; (-) strand; PAM type: YTN; PAM sequence: TTA
tttgtttattttattttttg

SEQ ID NO: 57704 - DNA, 20 bp, Artificial Sequence
  Description of Artificial Sequence: Synthetic oligonucleotide
  Target: ATXN2; (-) strand; PAM type: YTN; PAM sequence: TTT
atttgtttattttatttttt

SEQ ID NO: 57705 - DNA, 20 bp, Artificial Sequence
  Description of Artificial Sequence: Synthetic oligonucleotide
  Target: ATXN2; (-) strand; PAM type: YTN; PAM sequence: TTA
tttatttgtttattttattt

SEQ ID NO: 57706 - DNA, 20 bp, Artificial Sequence
  Description of Artificial Sequence: Synthetic oligonucleotide
  Target: ATXN2; (-) strand; PAM type: YTN; PAM sequence: TTT
atttatttgtttattttatt

SEQ ID NO: 57707 - DNA, 20 bp, Artificial Sequence
  Description of Artificial Sequence: Synthetic oligonucleotide
  Target: ATXN2; (-) strand; PAM type: YTN; PAM sequence: TTA
tttatttatttgtttatttt

SEQ ID NO: 57708 - DNA, 20 bp, Artificial Sequence
  Description of Artificial Sequence: Synthetic oligonucleotide
  Target: ATXN2; (-) strand; PAM type: YTN; PAM sequence: TTT
atttatttatttgtttattt

SEQ ID NO: 57709 - DNA, 20 bp, Artificial Sequence
  Description of Artificial Sequence: Synthetic oligonucleotide
  Target: ATXN2; (-) strand; PAM type: YTN; PAM sequence: TTA
tttatttatttatttgttta

SEQ ID NO: 57710 - DNA, 20 bp, Artificial Sequence
  Description of Artificial Sequence: Synthetic oligonucleotide
  Target: ATXN2; (-) strand; PAM type: YTN; PAM sequence: TTA
ttatttatttatttatttgt

SEQ ID NO: 57711 - DNA, 20 bp, Artificial Sequence
  Description of Artificial Sequence: Synthetic oligonucleotide
  Target: ATXN2; (-) strand; PAM type: YTN; PAM sequence: TTA
ttattatttatttatttatt

SEQ ID NO: 57712 - DNA, 20 bp, Artificial Sequence
  Description of Artificial Sequence: Synthetic oligonucleotide
  Target: ATXN2; (-) strand; PAM type: YTN; PAM sequence: TTA
ttattattatttatttattt

SEQ ID NO: 57713 - DNA, 20 bp, Artificial Sequence
  Description of Artificial Sequence: Synthetic oligonucleotide
  Target: ATXN2; (-) strand; PAM type: YTN; PAM sequence: TTT
attattattatttatttatt

SEQ ID NO: 57714 - DNA, 20 bp, Artificial Sequence
  Description of Artificial Sequence: Synthetic oligonucleotide
  Target: ATXN2; (-) strand; PAM type: YTN; PAM sequence: CTC
ccaatttattattattattt

SEQ ID NO: 57715 - DNA, 20 bp, Artificial Sequence
  Description of Artificial Sequence: Synthetic oligonucleotide
  Target: ATXN2; (-) strand; PAM type: YTN; PAM sequence: TTC
tcccaatttattattattat

SEQ ID NO: 57716 - DNA, 20 bp, Artificial Sequence
  Description of Artificial Sequence: Synthetic oligonucleotide
  Target: ATXN2; (-) strand; PAM type: YTN; PAM sequence: TTT
ctcccaatttattattatta

SEQ ID NO: 57717 - DNA, 20 bp, Artificial Sequence
  Description of Artificial Sequence: Synthetic oligonucleotide
  Target: ATXN2; (-) strand; PAM type: YTN; PAM sequence: TTC
acatttctcccaatttatta

SEQ ID NO: 57718 - DNA, 20 bp, Artificial Sequence
  Description of Artificial Sequence: Synthetic oligonucleotide
  Target: ATXN2; (-) strand; PAM type: YTN; PAM sequence: TTT
cacatttctcccaatttatt

SEQ ID NO: 57719 - DNA, 20 bp, Artificial Sequence
  Description of Artificial Sequence: Synthetic oligonucleotide
  Target: ATXN2; (-) strand; PAM type: YTN; PAM sequence: TTA
aagtataagtttcacatttc

SEQ ID NO: 57720 - DNA, 20 bp, Artificial Sequence
  Description of Artificial Sequence: Synthetic oligonucleotide
  Target: ATXN2; (-) strand; PAM type: YTN; PAM sequence: TTT
aaagtataagtttcacattt

SEQ ID NO: 57721 - DNA, 20 bp, Artificial Sequence
  Description of Artificial Sequence: Synthetic oligonucleotide
  Target: ATXN2; (-) strand; PAM type: YTN; PAM sequence: TTG
atttaaagtataagtttcac

SEQ ID NO: 57722 - DNA, 20 bp, Artificial Sequence
  Description of Artificial Sequence: Synthetic oligonucleotide
  Target: ATXN2; (-) strand; PAM type: YTN; PAM sequence: CTA
gtattgatttaaagtataag

SEQ ID NO: 57723 - DNA, 20 bp, Artificial Sequence
  Description of Artificial Sequence: Synthetic oligonucleotide
  Target: ATXN2; (-) strand; PAM type: YTN; PAM sequence: TTA
ctagtattgatttaaagtat

SEQ ID NO: 57724 - DNA, 20 bp, Artificial Sequence
  Description of Artificial Sequence: Synthetic oligonucleotide
  Target: ATXN2; (-) strand; PAM type: YTN; PAM sequence: TTG
ttactagtattgatttaaag

SEQ ID NO: 57725 - DNA, 20 bp, Artificial Sequence
  Description of Artificial Sequence: Synthetic oligonucleotide
  Target: ATXN2; (-) strand; PAM type: YTN; PAM sequence: TTT
gttactagtattgatttaaa

SEQ ID NO: 57726 - DNA, 20 bp, Artificial Sequence
  Description of Artificial Sequence: Synthetic oligonucleotide
  Target: ATXN2; (-) strand; PAM type: YTN; PAM sequence: TTT
tgttactagtattgatttaa

SEQ ID NO: 57727 - DNA, 20 bp, Artificial Sequence
  Description of Artificial Sequence: Synthetic oligonucleotide
  Target: ATXN2; (-) strand; PAM type: YTN; PAM sequence: TTT
ttgttactagtattgattta

SEQ ID NO: 57728 - DNA, 20 bp, Artificial Sequence
  Description of Artificial Sequence: Synthetic oligonucleotide
  Target: ATXN2; (-) strand; PAM type: YTN; PAM sequence: CTG
tatttttgttactagtattg

SEQ ID NO: 57729 - DNA, 20 bp, Artificial Sequence
  Description of Artificial Sequence: Synthetic oligonucleotide
  Target: ATXN2; (-) strand; PAM type: YTN; PAM sequence: CTA
tcaaggaaccgaactgtatt

SEQ ID NO: 57730 - DNA, 20 bp, Artificial Sequence
  Description of Artificial Sequence: Synthetic oligonucleotide
  Target: ATXN2; (-) strand; PAM type: YTN; PAM sequence: CTG
gcctatcaaggaaccgaact

SEQ ID NO: 57731 - DNA, 20 bp, Artificial Sequence
  Description of Artificial Sequence: Synthetic oligonucleotide
  Target: ATXN2; (-) strand; PAM type: YTN; PAM sequence: TTA
actggcctatcaaggaaccg

SEQ ID NO: 57732 - DNA, 20 bp, Artificial Sequence
  Description of Artificial Sequence: Synthetic oligonucleotide
  Target: ATXN2; (-) strand; PAM type: YTN; PAM sequence: CTT
aactggcctatcaaggaacc

SEQ ID NO: 57733 - DNA, 20 bp, Artificial Sequence
  Description of Artificial Sequence: Synthetic oligonucleotide
  Target: ATXN2; (-) strand; PAM type: YTN; PAM sequence: CTG
tcacttaactggcctatcaa

SEQ ID NO: 57734 - DNA, 20 bp, Artificial Sequence
  Description of Artificial Sequence: Synthetic oligonucleotide
  Target: ATXN2; (-) strand; PAM type: YTN; PAM sequence: TTG
tgtcactgtcacttaactgg

SEQ ID NO: 57735 - DNA, 20 bp, Artificial Sequence
  Description of Artificial Sequence: Synthetic oligonucleotide
  Target: ATXN2; (-) strand; PAM type: YTN; PAM sequence: TTT
gtgtcactgtcacttaactg

SEQ ID NO: 57736 - DNA, 20 bp, Artificial Sequence
  Description of Artificial Sequence: Synthetic oligonucleotide
  Target: ATXN2; (-) strand; PAM type: YTN; PAM sequence: CTT
tgtgtcactgtcacttaact

SEQ ID NO: 57737 - DNA, 20 bp, Artificial Sequence
  Description of Artificial Sequence: Synthetic oligonucleotide
  Target: ATXN2; (-) strand; PAM type: YTN; PAM sequence: CTG
ctttgtgtcactgtcactta

SEQ ID NO: 57738 - DNA, 20 bp, Artificial Sequence
  Description of Artificial Sequence: Synthetic oligonucleotide
  Target: ATXN2; (-) strand; PAM type: YTN; PAM sequence: CTA
ccctgctttgtgtcactgtc

SEQ ID NO: 57739 - DNA, 20 bp, Artificial Sequence
  Description of Artificial Sequence: Synthetic oligonucleotide
  Target: ATXN2; (-) strand; PAM type: YTN; PAM sequence: TTC
ctaccctgctttgtgtcact

SEQ ID NO: 57740 - DNA, 20 bp, Artificial Sequence
  Description of Artificial Sequence: Synthetic oligonucleotide
  Target: ATXN2; (-) strand; PAM type: YTN; PAM sequence: CTT
cctaccctgctttgtgtcac

SEQ ID NO: 57741 - DNA, 20 bp, Artificial Sequence
  Description of Artificial Sequence: Synthetic oligonucleotide
  Target: ATXN2; (-) strand; PAM type: YTN; PAM sequence: TTC
ttcctaccctgctttgtgtc

SEQ ID NO: 57742 - DNA, 20 bp, Artificial Sequence
  Description of Artificial Sequence: Synthetic oligonucleotide
  Target: ATXN2; (-) strand; PAM type: YTN; PAM sequence: TTT
cttcctaccctgctttgtgt

SEQ ID NO: 57743 - DNA, 20 bp, Artificial Sequence
  Description of Artificial Sequence: Synthetic oligonucleotide
  Target: ATXN2; (-) strand; PAM type: YTN; PAM sequence: TTT
tcttcctaccctgctttgtg

SEQ ID NO: 57744 - DNA, 20 bp, Artificial Sequence
  Description of Artificial Sequence: Synthetic oligonucleotide
  Target: ATXN2; (-) strand; PAM type: YTN; PAM sequence: TTA
aattttcttcctaccctgct

SEQ ID NO: 57745 - DNA, 20 bp, Artificial Sequence
  Description of Artificial Sequence: Synthetic oligonucleotide
  Target: ATXN2; (-) strand; PAM type: YTN; PAM sequence: TTT
aaattttcttcctaccctgc

SEQ ID NO: 57746 - DNA, 20 bp, Artificial Sequence
  Description of Artificial Sequence: Synthetic oligonucleotide
  Target: ATXN2; (-) strand; PAM type: YTN; PAM sequence: TTT
taaattttcttcctaccctg

SEQ ID NO: 57747 - DNA, 20 bp, Artificial Sequence
  Description of Artificial Sequence: Synthetic oligonucleotide
  Target: ATXN2; (-) strand; PAM type: YTN; PAM sequence: CTT
ttaaattttcttcctaccct

SEQ ID NO: 57748 - DNA, 20 bp, Artificial Sequence
  Description of Artificial Sequence: Synthetic oligonucleotide
  Target: ATXN2; (-) strand; PAM type: YTN; PAM sequence: TTG
gcttttaaattttcttccta

SEQ ID NO: 57749 - DNA, 20 bp, Artificial Sequence
  Description of Artificial Sequence: Synthetic oligonucleotide
  Target: ATXN2; (-) strand; PAM type: YTN; PAM sequence: CTT
ggcttttaaattttcttcct

SEQ ID NO: 57750 - DNA, 20 bp, Artificial Sequence
  Description of Artificial Sequence: Synthetic oligonucleotide
  Target: ATXN2; (-) strand; PAM type: YTN; PAM sequence: TTC
cttggcttttaaattttctt

SEQ ID NO: 57751 - DNA, 20 bp, Artificial Sequence
  Description of Artificial Sequence: Synthetic oligonucleotide
  Target: ATXN2; (-) strand; PAM type: YTN; PAM sequence: TTT
ccttggcttttaaattttct

SEQ ID NO: 57752 - DNA, 20 bp, Artificial Sequence
  Description of Artificial Sequence: Synthetic oligonucleotide
  Target: ATXN2; (-) strand; PAM type: YTN; PAM sequence: TTT
tccttggcttttaaattttc

SEQ ID NO: 57753 - DNA, 20 bp, Artificial Sequence
  Description of Artificial Sequence: Synthetic oligonucleotide
  Target: ATXN2; (-) strand; PAM type: YTN; PAM sequence: TTT
ttccttggcttttaaatttt

SEQ ID NO: 57754 - DNA, 20 bp, Artificial Sequence
  Description of Artificial Sequence: Synthetic oligonucleotide
  Target: ATXN2; (-) strand; PAM type: YTN; PAM sequence: TTT
tttccttggcttttaaattt

SEQ ID NO: 57755 - DNA, 20 bp, Artificial Sequence
  Description of Artificial Sequence: Synthetic oligonucleotide
  Target: ATXN2; (-) strand; PAM type: YTN; PAM sequence: TTT
ttttccttggcttttaaatt

SEQ ID NO: 57756 - DNA, 20 bp, Artificial Sequence
  Description of Artificial Sequence: Synthetic oligonucleotide
  Target: ATXN2; (-) strand; PAM type: YTN; PAM sequence: CTA
tttttttccttggcttttaa

SEQ ID NO: 57757 - DNA, 20 bp, Artificial Sequence
  Description of Artificial Sequence: Synthetic oligonucleotide
  Target: ATXN2; (-) strand; PAM type: YTN; PAM sequence: TTC
caagctatttttttccttgg

SEQ ID NO: 57758 - DNA, 20 bp, Artificial Sequence
  Description of Artificial Sequence: Synthetic oligonucleotide
  Target: ATXN2; (-) strand; PAM type: YTN; PAM sequence: CTT
ccaagctatttttttccttg

SEQ ID NO: 57759 - DNA, 20 bp, Artificial Sequence
  Description of Artificial Sequence: Synthetic oligonucleotide
  Target: ATXN2; (-) strand; PAM type: YTN; PAM sequence: TTG
tcttccaagctatttttttc

SEQ ID NO: 57760 - DNA, 20 bp, Artificial Sequence
  Description of Artificial Sequence: Synthetic oligonucleotide
  Target: ATXN2; (-) strand; PAM type: YTN; PAM sequence: CTT
gtcttccaagctattttttt

SEQ ID NO: 57761 - DNA, 20 bp, Artificial Sequence
  Description of Artificial Sequence: Synthetic oligonucleotide
  Target: ATXN2; (-) strand; PAM type: YTN; PAM sequence: CTC
ttgtcttccaagctattttt

SEQ ID NO: 57762 - DNA, 20 bp, Artificial Sequence
  Description of Artificial Sequence: Synthetic oligonucleotide
  Target: ATXN2; (-) strand; PAM type: YTN; PAM sequence: CTC
tcttgtcttccaagctattt

SEQ ID NO: 57763 - DNA, 20 bp, Artificial Sequence
  Description of Artificial Sequence: Synthetic oligonucleotide
  Target: ATXN2; (-) strand; PAM type: YTN; PAM sequence: TTG
tctctcttgtcttccaagct

SEQ ID NO: 57764 - DNA, 20 bp, Artificial Sequence
  Description of Artificial Sequence: Synthetic oligonucleotide
  Target: ATXN2; (-) strand; PAM type: YTN; PAM sequence: TTT
gtctctcttgtcttccaagc

SEQ ID NO: 57765 - DNA, 20 bp, Artificial Sequence
  Description of Artificial Sequence: Synthetic oligonucleotide
  Target: ATXN2; (-) strand; PAM type: YTN; PAM sequence: TTT
tgtctctcttgtcttccaag

SEQ ID NO: 57766 - DNA, 20 bp, Artificial Sequence
  Description of Artificial Sequence: Synthetic oligonucleotide
  Target: ATXN2; (-) strand; PAM type: YTN; PAM sequence: TTT
ttgtctctcttgtcttccaa

SEQ ID NO: 57767 - DNA, 20 bp, Artificial Sequence
  Description of Artificial Sequence: Synthetic oligonucleotide
  Target: ATXN2; (-) strand; PAM type: YTN; PAM sequence: TTT
tttgtctctcttgtcttcca

SEQ ID NO: 57768 - DNA, 20 bp, Artificial Sequence
  Description of Artificial Sequence: Synthetic oligonucleotide
  Target: ATXN2; (-) strand; PAM type: YTN; PAM sequence: CTT
ttttgtctctcttgtcttcc

SEQ ID NO: 57769 - DNA, 20 bp, Artificial Sequence
  Description of Artificial Sequence: Synthetic oligonucleotide
  Target: ATXN2; (-) strand; PAM type: YTN; PAM sequence: TTC
cttttttgtctctcttgtct

SEQ ID NO: 57770 - DNA, 20 bp, Artificial Sequence
  Description of Artificial Sequence: Synthetic oligonucleotide
  Target: ATXN2; (-) strand; PAM type: YTN; PAM sequence: CTG
gttccttttttgtctctctt

SEQ ID NO: 57771 - DNA, 20 bp, Artificial Sequence
  Description of Artificial Sequence: Synthetic oligonucleotide
  Target: ATXN2; (-) strand; PAM type: YTN; PAM sequence: CTC
ggcccctggttccttttttg

SEQ ID NO: 57772 - DNA, 20 bp, Artificial Sequence
  Description of Artificial Sequence: Synthetic oligonucleotide
  Target: ATXN2; (-) strand; PAM type: YTN; PAM sequence: CTA
cctcggcccctggttccttt

SEQ ID NO: 57773 - DNA, 20 bp, Artificial Sequence
  Description of Artificial Sequence: Synthetic oligonucleotide
  Target: ATXN2; (-) strand; PAM type: YTN; PAM sequence: CTC
gtgatcacctacctcggccc

SEQ ID NO: 57774 - DNA, 20 bp, Artificial Sequence
  Description of Artificial Sequence: Synthetic oligonucleotide
  Target: ATXN2; (-) strand; PAM type: YTN; PAM sequence: CTG
acctcgtgatcacctacctc

SEQ ID NO: 57775 - DNA, 20 bp, Artificial Sequence
  Description of Artificial Sequence: Synthetic oligonucleotide
  Target: ATXN2; (-) strand; PAM type: YTN; PAM sequence: CTC
ctgacctcgtgatcacctac

SEQ ID NO: 57776 - DNA, 20 bp, Artificial Sequence
  Description of Artificial Sequence: Synthetic oligonucleotide
  Target: ATXN2; (-) strand; PAM type: YTN; PAM sequence: TTG
aactcctgacctcgtgatca

SEQ ID NO: 57777 - DNA, 20 bp, Artificial Sequence
  Description of Artificial Sequence: Synthetic oligonucleotide
  Target: ATXN2; (-) strand; PAM type: YTN; PAM sequence: CTT
gaactcctgacctcgtgatc

SEQ ID NO: 57778 - DNA, 20 bp, Artificial Sequence
  Description of Artificial Sequence: Synthetic oligonucleotide
  Target: ATXN2; (-) strand; PAM type: YTN; PAM sequence: CTG
gtcttgaactcctgacctcg

SEQ ID NO: 57779 - DNA, 20 bp, Artificial Sequence
  Description of Artificial Sequence: Synthetic oligonucleotide
  Target: ATXN2; (-) strand; PAM type: YTN; PAM sequence: TTG
gccaggctggtcttgaactc

SEQ ID NO: 57780 - DNA, 20 bp, Artificial Sequence
  Description of Artificial Sequence: Synthetic oligonucleotide
  Target: ATXN2; (-) strand; PAM type: YTN; PAM sequence: CTT
ggccaggctggtcttgaact

SEQ ID NO: 57781 - DNA, 20 bp, Artificial Sequence
  Description of Artificial Sequence: Synthetic oligonucleotide
  Target: ATXN2; (-) strand; PAM type: YTN; PAM sequence: TTC
accatcttggccaggctggt

SEQ ID NO: 57782 - DNA, 20 bp, Artificial Sequence
  Description of Artificial Sequence: Synthetic oligonucleotide
  Target: ATXN2; (-) strand; PAM type: YTN; PAM sequence: TTT
caccatcttggccaggctgg

SEQ ID NO: 57783 - DNA, 20 bp, Artificial Sequence
  Description of Artificial Sequence: Synthetic oligonucleotide
  Target: ATXN2; (-) strand; PAM type: YTN; PAM sequence: TTA
gtagagacagggtttcacca

SEQ ID NO: 57784 - DNA, 20 bp, Artificial Sequence
  Description of Artificial Sequence: Synthetic oligonucleotide
  Target: ATXN2; (-) strand; PAM type: YTN; PAM sequence: TTT
agtagagacagggtttcacc

SEQ ID NO: 57785 - DNA, 20 bp, Artificial Sequence
  Description of Artificial Sequence: Synthetic oligonucleotide
  Target: ATXN2; (-) strand; PAM type: YTN; PAM sequence: TTT
tagtagagacagggtttcac

SEQ ID NO: 57786 - DNA, 20 bp, Artificial Sequence
  Description of Artificial Sequence: Synthetic oligonucleotide
  Target: ATXN2; (-) strand; PAM type: YTN; PAM sequence: TTT
ttagtagagacagggtttca

SEQ ID NO: 57787 - DNA, 20 bp, Artificial Sequence
  Description of Artificial Sequence: Synthetic oligonucleotide
  Target: ATXN2; (-) strand; PAM type: YTN; PAM sequence: TTG
tatttttagtagagacaggg

SEQ ID NO: 57788 - DNA, 20 bp, Artificial Sequence
  Description of Artificial Sequence: Synthetic oligonucleotide
  Target: ATXN2; (-) strand; PAM type: YTN; PAM sequence: TTT
gtatttttagtagagacagg

SEQ ID NO: 57789 - DNA, 20 bp, Artificial Sequence
  Description of Artificial Sequence: Synthetic oligonucleotide
  Target: ATXN2; (-) strand; PAM type: YTN; PAM sequence: TTT
tgtatttttagtagagacag

SEQ ID NO: 57790 - DNA, 20 bp, Artificial Sequence
  Description of Artificial Sequence: Synthetic oligonucleotide
  Target: ATXN2; (-) strand; PAM type: YTN; PAM sequence: TTT
ttgtatttttagtagagaca

SEQ ID NO: 57791 - DNA, 20 bp, Artificial Sequence
  Description of Artificial Sequence: Synthetic oligonucleotide
  Target: ATXN2; (-) strand; PAM type: YTN; PAM sequence: TTT
tttgtatttttagtagagac

SEQ ID NO: 57792 - DNA, 20 bp, Artificial Sequence
  Description of Artificial Sequence: Synthetic oligonucleotide
  Target: ATXN2; (-) strand; PAM type: YTN; PAM sequence: TTT
ttttgtatttttagtagaga

SEQ ID NO: 57793 - DNA, 20 bp, Artificial Sequence
  Description of Artificial Sequence: Synthetic oligonucleotide
  Target: ATXN2; (-) strand; PAM type: YTN; PAM sequence: TTT
tttttgtatttttagtagag

SEQ ID NO: 57794 - DNA, 20 bp, Artificial Sequence
  Description of Artificial Sequence: Synthetic oligonucleotide
  Target: ATXN2; (-) strand; PAM type: YTN; PAM sequence: CTA
attttttttgtatttttagt

SEQ ID NO: 57795 - DNA, 20 bp, Artificial Sequence
  Description of Artificial Sequence: Synthetic oligonucleotide
  Target: ATXN2; (-) strand; PAM type: YTN; PAM sequence: CTG
ccacacccagctaatttttt

SEQ ID NO: 57796 - DNA, 20 bp, Artificial Sequence
  Description of Artificial Sequence: Synthetic oligonucleotide
  Target: ATXN2; (-) strand; PAM type: YTN; PAM sequence: CTG
ctgccacacccagctaattt

SEQ ID NO: 57797 - DNA, 20 bp, Artificial Sequence
  Description of Artificial Sequence: Synthetic oligonucleotide
  Target: ATXN2; (-) strand; PAM type: YTN; PAM sequence: TTA
caggcgcctgctgccacacc

SEQ ID NO: 57798 - DNA, 20 bp, Artificial Sequence
  Description of Artificial Sequence: Synthetic oligonucleotide
  Target: ATXN2; (-) strand; PAM type: YTN; PAM sequence: CTG
ggattacaggcgcctgctgc

SEQ ID NO: 57799 - DNA, 20 bp, Artificial Sequence
  Description of Artificial Sequence: Synthetic oligonucleotide
  Target: ATXN2; (-) strand; PAM type: YTN; PAM sequence: TTC
cagagtagctgggattacag

SEQ ID NO: 57800 - DNA, 20 bp, Artificial Sequence
  Description of Artificial Sequence: Synthetic oligonucleotide
  Target: ATXN2; (-) strand; PAM type: YTN; PAM sequence: CTT
ccagagtagctgggattaca

SEQ ID NO: 57801 - DNA, 20 bp, Artificial Sequence
  Description of Artificial Sequence: Synthetic oligonucleotide
  Target: ATXN2; (-) strand; PAM type: YTN; PAM sequence: CTC
agcttccagagtagctggga

SEQ ID NO: 57802 - DNA, 20 bp, Artificial Sequence
  Description of Artificial Sequence: Synthetic oligonucleotide
  Target: ATXN2; (-) strand; PAM type: YTN; PAM sequence: CTG
cctcagcttccagagtagct

SEQ ID NO: 57803 - DNA, 20 bp, Artificial Sequence
  Description of Artificial Sequence: Synthetic oligonucleotide
  Target: ATXN2; (-) strand; PAM type: YTN; PAM sequence: CTC
tgcctcagcttccagagtag

SEQ ID NO: 57804 - DNA, 20 bp, Artificial Sequence
  Description of Artificial Sequence: Synthetic oligonucleotide
  Target: ATXN2; (-) strand; PAM type: YTN; PAM sequence: TTC
tctgcctcagcttccagagt

SEQ ID NO: 57805 - DNA, 20 bp, Artificial Sequence
  Description of Artificial Sequence: Synthetic oligonucleotide
  Target: ATXN2; (-) strand; PAM type: YTN; PAM sequence: TTC
aagcaattctctgcctcagc

SEQ ID NO: 57806 - DNA, 20 bp, Artificial Sequence
  Description of Artificial Sequence: Synthetic oligonucleotide
  Target: ATXN2; (-) strand; PAM type: YTN; PAM sequence: CTA
ggttcaagcaattctctgcc

SEQ ID NO: 57807 - DNA, 20 bp, Artificial Sequence
  Description of Artificial Sequence: Synthetic oligonucleotide
  Target: ATXN2; (-) strand; PAM type: YTN; PAM sequence: CTC
ctaggttcaagcaattctct

SEQ ID NO: 57808 - DNA, 20 bp, Artificial Sequence
  Description of Artificial Sequence: Synthetic oligonucleotide
  Target: ATXN2; (-) strand; PAM type: YTN; PAM sequence: CTC
cgcctcctaggttcaagcaa

SEQ ID NO: 57809 - DNA, 20 bp, Artificial Sequence
  Description of Artificial Sequence: Synthetic oligonucleotide
  Target: ATXN2; (-) strand; PAM type: YTN; PAM sequence: CTG
caacctccgcctcctaggtt

SEQ ID NO: 57810 - DNA, 20 bp, Artificial Sequence
  Description of Artificial Sequence: Synthetic oligonucleotide
  Target: ATXN2; (-) strand; PAM type: YTN; PAM sequence: CTC
actgcaacctccgcctccta

SEQ ID NO: 57811 - DNA, 20 bp, Artificial Sequence
  Description of Artificial Sequence: Synthetic oligonucleotide
  Target: ATXN2; (-) strand; PAM type: YTN; PAM sequence: CTC
ggctcactgcaacctccgcc

SEQ ID NO: 57812 - DNA, 20 bp, Artificial Sequence
  Description of Artificial Sequence: Synthetic oligonucleotide
  Target: ATXN2; (-) strand; PAM type: YTN; PAM sequence: CTG
gagtgcagtggtgcgatctc

SEQ ID NO: 57813 - DNA, 20 bp, Artificial Sequence
  Description of Artificial Sequence: Synthetic oligonucleotide
  Target: ATXN2; (-) strand; PAM type: YTN; PAM sequence: CTG
tcgtccaggctggagtgcag

SEQ ID NO: 57814 - DNA, 20 bp, Artificial Sequence
  Description of Artificial Sequence: Synthetic oligonucleotide
  Target: ATXN2; (-) strand; PAM type: YTN; PAM sequence: CTC
tgtcgtccaggctggagtgc

SEQ ID NO: 57815 - DNA, 20 bp, Artificial Sequence
  Description of Artificial Sequence: Synthetic oligonucleotide
  Target: ATXN2; (-) strand; PAM type: YTN; PAM sequence: CTC
actctgtcgtccaggctgga

SEQ ID NO: 57816 - DNA, 20 bp, Artificial Sequence
  Description of Artificial Sequence: Synthetic oligonucleotide
  Target: ATXN2; (-) strand; PAM type: YTN; PAM sequence: TTG
agatggagtctcactctgtc

SEQ ID NO: 57817 - DNA, 20 bp, Artificial Sequence
  Description of Artificial Sequence: Synthetic oligonucleotide
  Target: ATXN2; (-) strand; PAM type: YTN; PAM sequence: TTT
gagatggagtctcactctgt

SEQ ID NO: 57818 - DNA, 20 bp, Artificial Sequence
  Description of Artificial Sequence: Synthetic oligonucleotide
  Target: ATXN2; (-) strand; PAM type: YTN; PAM sequence: TTT
tgagatggagtctcactctg

SEQ ID NO: 57819 - DNA, 20 bp, Artificial Sequence
  Description of Artificial Sequence: Synthetic oligonucleotide
  Target: ATXN2; (-) strand; PAM type: YTN; PAM sequence: CTT
ttgagatggagtctcactct

SEQ ID NO: 57820 - DNA, 20 bp, Artificial Sequence
  Description of Artificial Sequence: Synthetic oligonucleotide
  Target: ATXN2; (-) strand; PAM type: YTN; PAM sequence: TTC
ttttgagatggagtctcact

SEQ ID NO: 57821 - DNA, 20 bp, Artificial Sequence
  Description of Artificial Sequence: Synthetic oligonucleotide
  Target: ATXN2; (-) strand; PAM type: YTN; PAM sequence: TTT
cttttgagatggagtctcac

SEQ ID NO: 57822 - DNA, 20 bp, Artificial Sequence
  Description of Artificial Sequence: Synthetic oligonucleotide
  Target: ATXN2; (-) strand; PAM type: YTN; PAM sequence: TTT
tcttttgagatggagtctca

SEQ ID NO: 57823 - DNA, 20 bp, Artificial Sequence
  Description of Artificial Sequence: Synthetic oligonucleotide
  Target: ATXN2; (-) strand; PAM type: YTN; PAM sequence: TTT
ttcttttgagatggagtctc

SEQ ID NO: 57824 - DNA, 20 bp, Artificial Sequence
  Description of Artificial Sequence: Synthetic oligonucleotide
  Target: ATXN2; (-) strand; PAM type: YTN; PAM sequence: TTT
tttcttttgagatggagtct

SEQ ID NO: 57825 - DNA, 20 bp, Artificial Sequence
  Description of Artificial Sequence: Synthetic oligonucleotide
  Target: ATXN2; (-) strand; PAM type: YTN; PAM sequence: TTT
ttttcttttgagatggagtc

SEQ ID NO: 57826 - DNA, 20 bp, Artificial Sequence
  Description of Artificial Sequence: Synthetic oligonucleotide
  Target: ATXN2; (-) strand; PAM type: YTN; PAM sequence: TTT
tttttcttttgagatggagt

SEQ ID NO: 57827 - DNA, 20 bp, Artificial Sequence
  Description of Artificial Sequence: Synthetic oligonucleotide
  Target: ATXN2; (-) strand; PAM type: YTN; PAM sequence: TTT
ttttttcttttgagatggag

SEQ ID NO: 57828 - DNA, 20 bp, Artificial Sequence
  Description of Artificial Sequence: Synthetic oligonucleotide
  Target: ATXN2; (-) strand; PAM type: YTN; PAM sequence: TTT
tttttttcttttgagatgga

SEQ ID NO: 57829 - DNA, 20 bp, Artificial Sequence
  Description of Artificial Sequence: Synthetic oligonucleotide
  Target: ATXN2; (-) strand; PAM type: YTN; PAM sequence: TTT
ttttttttcttttgagatgg

SEQ ID NO: 57830 - DNA, 20 bp, Artificial Sequence
  Description of Artificial Sequence: Synthetic oligonucleotide
  Target: ATXN2; (-) strand; PAM type: YTN; PAM sequence: TTT
tttttttttcttttgagatg

SEQ ID NO: 57831 - DNA, 20 bp, Artificial Sequence
  Description of Artificial Sequence: Synthetic oligonucleotide
  Target: ATXN2; (-) strand; PAM type: YTN; PAM sequence: TTT
ttttttttttcttttgagat

SEQ ID NO: 57832 - DNA, 20 bp, Artificial Sequence
  Description of Artificial Sequence: Synthetic oligonucleotide
  Target: ATXN2; (-) strand; PAM type: YTN; PAM sequence: TTT
tttttttttttcttttgaga

SEQ ID NO: 57833 - DNA, 20 bp, Artificial Sequence
  Description of Artificial Sequence: Synthetic oligonucleotide
  Target: ATXN2; (-) strand; PAM type: YTN; PAM sequence: TTT
ttttttttttttcttttgag

SEQ ID NO: 57834 - DNA, 20 bp, Artificial Sequence
  Description of Artificial Sequence: Synthetic oligonucleotide
  Target: ATXN2; (-) strand; PAM type: YTN; PAM sequence: CTT
tttttttttttttcttttga

SEQ ID NO: 57835 - DNA, 20 bp, Artificial Sequence
  Description of Artificial Sequence: Synthetic oligonucleotide
  Target: ATXN2; (-) strand; PAM type: YTN; PAM sequence: TTC
ctttttttttttttttcttt

SEQ ID NO: 57836 - DNA, 20 bp, Artificial Sequence
  Description of Artificial Sequence: Synthetic oligonucleotide
  Target: ATXN2; (-) strand; PAM type: YTN; PAM sequence: TTG
gttccttttttttttttttt

SEQ ID NO: 57837 - DNA, 20 bp, Artificial Sequence
  Description of Artificial Sequence: Synthetic oligonucleotide
  Target: ATXN2; (-) strand; PAM type: YTN; PAM sequence: CTT
ggttcctttttttttttttt

SEQ ID NO: 57838 - DNA, 20 bp, Artificial Sequence
  Description of Artificial Sequence: Synthetic oligonucleotide
  Target: ATXN2; (-) strand; PAM type: YTN; PAM sequence: TTA
tcttggttcctttttttttt

SEQ ID NO: 57839 - DNA, 20 bp, Artificial Sequence
  Description of Artificial Sequence: Synthetic oligonucleotide
  Target: ATXN2; (-) strand; PAM type: YTN; PAM sequence: CTT
atcttggttccttttttttt

SEQ ID NO: 57840 - DNA, 20 bp, Artificial Sequence
  Description of Artificial Sequence: Synthetic oligonucleotide
  Target: ATXN2; (-) strand; PAM type: YTN; PAM sequence: TTA
ccttatcttggttccttttt

SEQ ID NO: 57841 - DNA, 20 bp, Artificial Sequence
  Description of Artificial Sequence: Synthetic oligonucleotide
  Target: ATXN2; (-) strand; PAM type: YTN; PAM sequence: TTT
accttatcttggttcctttt

SEQ ID NO: 57842 - DNA, 20 bp, Artificial Sequence
  Description of Artificial Sequence: Synthetic oligonucleotide
  Target: ATXN2; (-) strand; PAM type: YTN; PAM sequence: CTT
taccttatcttggttccttt

SEQ ID NO: 57843 - DNA, 20 bp, Artificial Sequence
  Description of Artificial Sequence: Synthetic oligonucleotide
  Target: ATXN2; (-) strand; PAM type: YTN; PAM sequence: TTC
tttaccttatcttggttcct

SEQ ID NO: 57844 - DNA, 20 bp, Artificial Sequence
  Description of Artificial Sequence: Synthetic oligonucleotide
  Target: ATXN2; (-) strand; PAM type: YTN; PAM sequence: CTT
ctttaccttatcttggttcc

SEQ ID NO: 57845 - DNA, 20 bp, Artificial Sequence
  Description of Artificial Sequence: Synthetic oligonucleotide
  Target: ATXN2; (-) strand; PAM type: YTN; PAM sequence: TTC
cttctttaccttatcttggt

SEQ ID NO: 57846 - DNA, 20 bp, Artificial Sequence
  Description of Artificial Sequence: Synthetic oligonucleotide
  Target: ATXN2; (-) strand; PAM type: YTN; PAM sequence: TTT
ccttctttaccttatcttgg

SEQ ID NO: 57847 - DNA, 20 bp, Artificial Sequence
  Description of Artificial Sequence: Synthetic oligonucleotide
  Target: ATXN2; (-) strand; PAM type: YTN; PAM sequence: TTT
tccttctttaccttatcttg

SEQ ID NO: 57848 - DNA, 20 bp, Artificial Sequence
  Description of Artificial Sequence: Synthetic oligonucleotide
  Target: ATXN2; (-) strand; PAM type: YTN; PAM sequence: TTT
ttccttctttaccttatctt

SEQ ID NO: 57849 - DNA, 20 bp, Artificial Sequence
  Description of Artificial Sequence: Synthetic oligonucleotide
  Target: ATXN2; (-) strand; PAM type: YTN; PAM sequence: TTT
tttccttctttaccttatct

SEQ ID NO: 57850 - DNA, 20 bp, Artificial Sequence
  Description of Artificial Sequence: Synthetic oligonucleotide
  Target: ATXN2; (-) strand; PAM type: YTN; PAM sequence: CTG
tgttttttccttctttacct

SEQ ID NO: 57851 - DNA, 20 bp, Artificial Sequence
  Description of Artificial Sequence: Synthetic oligonucleotide
  Target: ATXN2; (-) strand; PAM type: YTN; PAM sequence: CTC
ctgtgttttttccttcttta

SEQ ID NO: 57852 - DNA, 20 bp, Artificial Sequence
  Description of Artificial Sequence: Synthetic oligonucleotide
  Target: ATXN2; (-) strand; PAM type: YTN; PAM sequence: TTC
tcctgtgttttttccttctt

SEQ ID NO: 57853 - DNA, 20 bp, Artificial Sequence
  Description of Artificial Sequence: Synthetic oligonucleotide
  Target: ATXN2; (-) strand; PAM type: YTN; PAM sequence: CTG
attctcctgtgttttttcct

SEQ ID NO: 57854 - DNA, 20 bp, Artificial Sequence
  Description of Artificial Sequence: Synthetic oligonucleotide
  Target: ATXN2; (-) strand; PAM type: YTN; PAM sequence: TTC
cctgattctcctgtgttttt

SEQ ID NO: 57855 - DNA, 20 bp, Artificial Sequence
  Description of Artificial Sequence: Synthetic oligonucleotide
  Target: ATXN2; (-) strand; PAM type: YTN; PAM sequence: TTT
ccctgattctcctgtgtttt

SEQ ID NO: 57856 - DNA, 20 bp, Artificial Sequence
  Description of Artificial Sequence: Synthetic oligonucleotide
  Target: ATXN2; (-) strand; PAM type: YTN; PAM sequence: TTT
tccctgattctcctgtgttt

SEQ ID NO: 57857 - DNA, 20 bp, Artificial Sequence
  Description of Artificial Sequence: Synthetic oligonucleotide
  Target: ATXN2; (-) strand; PAM type: YTN; PAM sequence: CTT
ttccctgattctcctgtgtt

SEQ ID NO: 57858 - DNA, 20 bp, Artificial Sequence
  Description of Artificial Sequence: Synthetic oligonucleotide
  Target: ATXN2; (-) strand; PAM type: YTN; PAM sequence: CTC
cttttccctgattctcctgt

SEQ ID NO: 57859 - DNA, 20 bp, Artificial Sequence
  Description of Artificial Sequence: Synthetic oligonucleotide
  Target: ATXN2; (-) strand; PAM type: YTN; PAM sequence: CTC
tccttttccctgattctcct

SEQ ID NO: 57860 - DNA, 20 bp, Artificial Sequence
  Description of Artificial Sequence: Synthetic oligonucleotide
  Target: ATXN2; (-) strand; PAM type: YTN; PAM sequence: CTC
cactctccttttccctgatt

SEQ ID NO: 57861 - DNA, 20 bp, Artificial Sequence
  Description of Artificial Sequence: Synthetic oligonucleotide
  Target: ATXN2; (-) strand; PAM type: YTN; PAM sequence: TTC
ccactccactctccttttcc

SEQ ID NO: 57862 - DNA, 20 bp, Artificial Sequence
  Description of Artificial Sequence: Synthetic oligonucleotide
  Target: ATXN2; (-) strand; PAM type: YTN; PAM sequence: CTT
cccactccactctccttttc

SEQ ID NO: 57863 - DNA, 20 bp, Artificial Sequence
  Description of Artificial Sequence: Synthetic oligonucleotide
  Target: ATXN2; (-) strand; PAM type: YTN; PAM sequence: CTG
cccttcccactccactctcc

SEQ ID NO: 57864 - DNA, 20 bp, Artificial Sequence
  Description of Artificial Sequence: Synthetic oligonucleotide
  Target: ATXN2; (-) strand; PAM type: YTN; PAM sequence: TTA
gccagaatgagcatatataa

SEQ ID NO: 57865 - DNA, 20 bp, Artificial Sequence
  Description of Artificial Sequence: Synthetic oligonucleotide
  Target: ATXN2; (-) strand; PAM type: YTN; PAM sequence: TTT
agccagaatgagcatatata

SEQ ID NO: 57866 - DNA, 20 bp, Artificial Sequence
  Description of Artificial Sequence: Synthetic oligonucleotide
  Target: ATXN2; (-) strand; PAM type: YTN; PAM sequence: CTT
tagccagaatgagcatatat

SEQ ID NO: 57867 - DNA, 20 bp, Artificial Sequence
  Description of Artificial Sequence: Synthetic oligonucleotide
  Target: ATXN2; (-) strand; PAM type: YTN; PAM sequence: CTG
ggatctttagccagaatgag

SEQ ID NO: 57868 - DNA, 20 bp, Artificial Sequence
  Description of Artificial Sequence: Synthetic oligonucleotide
  Target: ATXN2; (-) strand; PAM type: YTN; PAM sequence: CTC
tgggatctttagccagaatg

SEQ ID NO: 57869 - DNA, 20 bp, Artificial Sequence
  Description of Artificial Sequence: Synthetic oligonucleotide
  Target: ATXN2; (-) strand; PAM type: YTN; PAM sequence: CTC
tctgggatctttagccagaa

SEQ ID NO: 57870 - DNA, 20 bp, Artificial Sequence
  Description of Artificial Sequence: Synthetic oligonucleotide
  Target: ATXN2; (-) strand; PAM type: YTN; PAM sequence: TTA
acctctctgggatctttagc

SEQ ID NO: 57871 - DNA, 20 bp, Artificial Sequence
  Description of Artificial Sequence: Synthetic oligonucleotide
  Target: ATXN2; (-) strand; PAM type: YTN; PAM sequence: TTT
aacctctctgggatctttag

SEQ ID NO: 57872 - DNA, 20 bp, Artificial Sequence
  Description of Artificial Sequence: Synthetic oligonucleotide
  Target: ATXN2; (-) strand; PAM type: YTN; PAM sequence: TTT
taacctctctgggatcttta

SEQ ID NO: 57873 - DNA, 20 bp, Artificial Sequence
  Description of Artificial Sequence: Synthetic oligonucleotide
  Target: ATXN2; (-) strand; PAM type: YTN; PAM sequence: TTT
ttaacctctctgggatcttt

SEQ ID NO: 57874 - DNA, 20 bp, Artificial Sequence
  Description of Artificial Sequence: Synthetic oligonucleotide
  Target: ATXN2; (-) strand; PAM type: YTN; PAM sequence: TTA
tttttaacctctctgggatc

SEQ ID NO: 57875 - DNA, 20 bp, Artificial Sequence
  Description of Artificial Sequence: Synthetic oligonucleotide
  Target: ATXN2; (-) strand; PAM type: YTN; PAM sequence: TTT
atttttaacctctctgggat

SEQ ID NO: 57876 - DNA, 20 bp, Artificial Sequence
  Description of Artificial Sequence: Synthetic oligonucleotide
  Target: ATXN2; (-) strand; PAM type: YTN; PAM sequence: CTT
tatttttaacctctctggga

SEQ ID NO: 57877 - DNA, 20 bp, Artificial Sequence
  Description of Artificial Sequence: Synthetic oligonucleotide
  Target: ATXN2; (-) strand; PAM type: YTN; PAM sequence: TTA
actttatttttaacctctct

SEQ ID NO: 57878 - DNA, 20 bp, Artificial Sequence
  Description of Artificial Sequence: Synthetic oligonucleotide
  Target: ATXN2; (-) strand; PAM type: YTN; PAM sequence: TTA
caaataaaattaactttatt

SEQ ID NO: 57879 - DNA, 20 bp, Artificial Sequence
  Description of Artificial Sequence: Synthetic oligonucleotide
  Target: ATXN2; (-) strand; PAM type: YTN; PAM sequence: CTG
atgaataaatcagtattaca

SEQ ID NO: 57880 - DNA, 20 bp, Artificial Sequence
  Description of Artificial Sequence: Synthetic oligonucleotide
  Target: ATXN2; (-) strand; PAM type: YTN; PAM sequence: TTA
actgatgaataaatcagtat

SEQ ID NO: 57881 - DNA, 20 bp, Artificial Sequence
  Description of Artificial Sequence: Synthetic oligonucleotide
  Target: ATXN2; (-) strand; PAM type: YTN; PAM sequence: TTT
aactgatgaataaatcagta

SEQ ID NO: 57882 - DNA, 20 bp, Artificial Sequence
  Description of Artificial Sequence: Synthetic oligonucleotide
  Target: ATXN2; (-) strand; PAM type: YTN; PAM sequence: TTA
taaatagaagtttaactgat

SEQ ID NO: 57883 - DNA, 20 bp, Artificial Sequence
  Description of Artificial Sequence: Synthetic oligonucleotide
  Target: ATXN2; (-) strand; PAM type: YTN; PAM sequence: TTT
ataaatagaagtttaactga

SEQ ID NO: 57884 - DNA, 20 bp, Artificial Sequence
  Description of Artificial Sequence: Synthetic oligonucleotide
  Target: ATXN2; (-) strand; PAM type: YTN; PAM sequence: TTT
tataaatagaagtttaactg

SEQ ID NO: 57885 - DNA, 20 bp, Artificial Sequence
  Description of Artificial Sequence: Synthetic oligonucleotide
  Target: ATXN2; (-) strand; PAM type: YTN; PAM sequence: CTA
aagttttataaatagaagtt

SEQ ID NO: 57886 - DNA, 20 bp, Artificial Sequence
  Description of Artificial Sequence: Synthetic oligonucleotide
  Target: ATXN2; (-) strand; PAM type: YTN; PAM sequence: TTA
tgaagactaaagttttataa

SEQ ID NO: 57887 - DNA, 20 bp, Artificial Sequence
  Description of Artificial Sequence: Synthetic oligonucleotide
  Target: ATXN2; (-) strand; PAM type: YTN; PAM sequence: TTT
atgaagactaaagttttata

SEQ ID NO: 57888 - DNA, 20 bp, Artificial Sequence
  Description of Artificial Sequence: Synthetic oligonucleotide
  Target: ATXN2; (-) strand; PAM type: YTN; PAM sequence: TTT
tatgaagactaaagttttat

SEQ ID NO: 57889 - DNA, 20 bp, Artificial Sequence
  Description of Artificial Sequence: Synthetic oligonucleotide
  Target: ATXN2; (-) strand; PAM type: YTN; PAM sequence: CTA
aaagattttatgaagactaa

SEQ ID NO: 57890 - DNA, 20 bp, Artificial Sequence
  Description of Artificial Sequence: Synthetic oligonucleotide
  Target: ATXN2; (-) strand; PAM type: YTN; PAM sequence: TTA
atctaaaagattttatgaag

SEQ ID NO: 57891 - DNA, 20 bp, Artificial Sequence
  Description of Artificial Sequence: Synthetic oligonucleotide
  Target: ATXN2; (-) strand; PAM type: YTN; PAM sequence: TTT
aatctaaaagattttatgaa

SEQ ID NO: 57892 - DNA, 20 bp, Artificial Sequence
  Description of Artificial Sequence: Synthetic oligonucleotide
  Target: ATXN2; (-) strand; PAM type: YTN; PAM sequence: CTT
taatctaaaagattttatga

SEQ ID NO: 57893 - DNA, 20 bp, Artificial Sequence
  Description of Artificial Sequence: Synthetic oligonucleotide
  Target: ATXN2; (-) strand; PAM type: YTN; PAM sequence: TTA
tctttaatctaaaagatttt

SEQ ID NO: 57894 - DNA, 20 bp, Artificial Sequence
  Description of Artificial Sequence: Synthetic oligonucleotide
  Target: ATXN2; (-) strand; PAM type: YTN; PAM sequence: TTG
attatctttaatctaaaaga

SEQ ID NO: 57895 - DNA, 20 bp, Artificial Sequence
  Description of Artificial Sequence: Synthetic oligonucleotide
  Target: ATXN2; (-) strand; PAM type: YTN; PAM sequence: TTT
gattatctttaatctaaaag

SEQ ID NO: 57896 - DNA, 20 bp, Artificial Sequence
  Description of Artificial Sequence: Synthetic oligonucleotide
  Target: ATXN2; (-) strand; PAM type: YTN; PAM sequence: CTT
tgattatctttaatctaaaa

SEQ ID NO: 57897 - DNA, 20 bp, Artificial Sequence
  Description of Artificial Sequence: Synthetic oligonucleotide
  Target: ATXN2; (-) strand; PAM type: YTN; PAM sequence: CTG
gaccaaagaagcatatgtct

SEQ ID NO: 57898 - DNA, 20 bp, Artificial Sequence
  Description of Artificial Sequence: Synthetic oligonucleotide
  Target: ATXN2; (-) strand; PAM type: YTN; PAM sequence: CTA
ggtctggaccaaagaagcat

SEQ ID NO: 57899 - DNA, 20 bp, Artificial Sequence
  Description of Artificial Sequence: Synthetic oligonucleotide
  Target: ATXN2; (-) strand; PAM type: YTN; PAM sequence: CTG
gactaggtctggaccaaaga

SEQ ID NO: 57900 - DNA, 20 bp, Artificial Sequence
  Description of Artificial Sequence: Synthetic oligonucleotide
  Target: ATXN2; (-) strand; PAM type: YTN; PAM sequence: TTC
tggactaggtctggaccaaa

SEQ ID NO: 57901 - DNA, 20 bp, Artificial Sequence
  Description of Artificial Sequence: Synthetic oligonucleotide
  Target: ATXN2; (-) strand; PAM type: YTN; PAM sequence: CTT
ctggactaggtctggaccaa

SEQ ID NO: 57902 - DNA, 20 bp, Artificial Sequence
  Description of Artificial Sequence: Synthetic oligonucleotide
  Target: ATXN2; (-) strand; PAM type: YTN; PAM sequence: CTG
agtgggaaacttctggacta

SEQ ID NO: 57903 - DNA, 20 bp, Artificial Sequence
  Description of Artificial Sequence: Synthetic oligonucleotide
  Target: ATXN2; (-) strand; PAM type: YTN; PAM sequence: TTA
tgtcaaggaacactgagtgg

SEQ ID NO: 57904 - DNA, 20 bp, Artificial Sequence
  Description of Artificial Sequence: Synthetic oligonucleotide
  Target: ATXN2; (-) strand; PAM type: YTN; PAM sequence: TTT
atgtcaaggaacactgagtg

SEQ ID NO: 57905 - DNA, 20 bp, Artificial Sequence
  Description of Artificial Sequence: Synthetic oligonucleotide
  Target: ATXN2; (-) strand; PAM type: YTN; PAM sequence: TTA
aatatttatgtcaaggaaca

SEQ ID NO: 57906 - DNA, 20 bp, Artificial Sequence
  Description of Artificial Sequence: Synthetic oligonucleotide
  Target: ATXN2; (-) strand; PAM type: YTN; PAM sequence: CTT
aaatatttatgtcaaggaac

SEQ ID NO: 57907 - DNA, 20 bp, Artificial Sequence
  Description of Artificial Sequence: Synthetic oligonucleotide
  Target: ATXN2; (-) strand; PAM type: YTN; PAM sequence: TTA
gaatcttaaatatttatgtc

SEQ ID NO: 57908 - DNA, 20 bp, Artificial Sequence
  Description of Artificial Sequence: Synthetic oligonucleotide
  Target: ATXN2; (-) strand; PAM type: YTN; PAM sequence: TTT
agaatcttaaatatttatgt

SEQ ID NO: 57909 - DNA, 20 bp, Artificial Sequence
  Description of Artificial Sequence: Synthetic oligonucleotide
  Target: ATXN2; (-) strand; PAM type: YTN; PAM sequence: CTG
atcatatgtttagaatctta

SEQ ID NO: 57910 - DNA, 20 bp, Artificial Sequence
  Description of Artificial Sequence: Synthetic oligonucleotide
  Target: ATXN2; (-) strand; PAM type: YTN; PAM sequence: TTG
actgatcatatgtttagaat

SEQ ID NO: 57911 - DNA, 20 bp, Artificial Sequence
  Description of Artificial Sequence: Synthetic oligonucleotide
  Target: ATXN2; (-) strand; PAM type: YTN; PAM sequence: TTT
gactgatcatatgtttagaa

SEQ ID NO: 57912 - DNA, 20 bp, Artificial Sequence
  Description of Artificial Sequence: Synthetic oligonucleotide
  Target: ATXN2; (-) strand; PAM type: YTN; PAM sequence: TTT
tgactgatcatatgtttaga

SEQ ID NO: 57913 - DNA, 20 bp, Artificial Sequence
  Description of Artificial Sequence: Synthetic oligonucleotide
  Target: ATXN2; (-) strand; PAM type: YTN; PAM sequence: TTT
ttgactgatcatatgtttag

SEQ ID NO: 57914 - DNA, 20 bp, Artificial Sequence
  Description of Artificial Sequence: Synthetic oligonucleotide
  Target: ATXN2; (-) strand; PAM type: YTN; PAM sequence: TTA
aggatttttgactgatcata

SEQ ID NO: 57915 - DNA, 20 bp, Artificial Sequence
  Description of Artificial Sequence: Synthetic oligonucleotide
  Target: ATXN2; (-) strand; PAM type: YTN; PAM sequence: TTA
ttaaggatttttgactgatc

SEQ ID NO: 57916 - DNA, 20 bp, Artificial Sequence
  Description of Artificial Sequence: Synthetic oligonucleotide
  Target: ATXN2; (-) strand; PAM type: YTN; PAM sequence: TTA
gtgttattaaggatttttga

SEQ ID NO: 57917 - DNA, 20 bp, Artificial Sequence
  Description of Artificial Sequence: Synthetic oligonucleotide
  Target: ATXN2; (-) strand; PAM type: YTN; PAM sequence: CTG
gaatgtggttagtgttatta

SEQ ID NO: 57918 - DNA, 20 bp, Artificial Sequence
  Description of Artificial Sequence: Synthetic oligonucleotide
  Target: ATXN2; (-) strand; PAM type: YTN; PAM sequence: TTC
tggaatgtggttagtgttat

SEQ ID NO: 57919 - DNA, 20 bp, Artificial Sequence
  Description of Artificial Sequence: Synthetic oligonucleotide
  Target: ATXN2; (-) strand; PAM type: YTN; PAM sequence: CTA
gttctggaatgtggttagtg

SEQ ID NO: 57920 - DNA, 20 bp, Artificial Sequence
  Description of Artificial Sequence: Synthetic oligonucleotide
  Target: ATXN2; (-) strand; PAM type: YTN; PAM sequence: CTG
aggaaactagttctggaatg

SEQ ID NO: 57921 - DNA, 20 bp, Artificial Sequence
  Description of Artificial Sequence: Synthetic oligonucleotide
  Target: ATXN2; (-) strand; PAM type: YTN; PAM sequence: TTC
agtgagatcacagctgagga

SEQ ID NO: 57922 - DNA, 20 bp, Artificial Sequence
  Description of Artificial Sequence: Synthetic oligonucleotide
  Target: ATXN2; (-) strand; PAM type: YTN; PAM sequence: CTT
cagtgagatcacagctgagg

SEQ ID NO: 57923 - DNA, 20 bp, Artificial Sequence
  Description of Artificial Sequence: Synthetic oligonucleotide
  Target: ATXN2; (-) strand; PAM type: YTN; PAM sequence: TTG
cttcagtgagatcacagctg

SEQ ID NO: 57924 - DNA, 20 bp, Artificial Sequence
  Description of Artificial Sequence: Synthetic oligonucleotide
  Target: ATXN2; (-) strand; PAM type: YTN; PAM sequence: TTT
gcttcagtgagatcacagct

SEQ ID NO: 57925 - DNA, 20 bp, Artificial Sequence
  Description of Artificial Sequence: Synthetic oligonucleotide
  Target: ATXN2; (-) strand; PAM type: YTN; PAM sequence: TTA
atttgcttcagtgagatcac

SEQ ID NO: 57926 - DNA, 20 bp, Artificial Sequence
  Description of Artificial Sequence: Synthetic oligonucleotide
  Target: ATXN2; (-) strand; PAM type: YTN; PAM sequence: CTT
aatttgcttcagtgagatca

SEQ ID NO: 57927 - DNA, 20 bp, Artificial Sequence
  Description of Artificial Sequence: Synthetic oligonucleotide
  Target: ATXN2; (-) strand; PAM type: YTN; PAM sequence: CTG
tacttaatttgcttcagtga

SEQ ID NO: 57928 - DNA, 20 bp, Artificial Sequence
  Description of Artificial Sequence: Synthetic oligonucleotide
  Target: ATXN2; (-) strand; PAM type: YTN; PAM sequence: TTC
tgtacttaatttgcttcagt

SEQ ID NO: 57929 - DNA, 20 bp, Artificial Sequence
  Description of Artificial Sequence: Synthetic oligonucleotide
  Target: ATXN2; (-) strand; PAM type: YTN; PAM sequence: TTT
ctgtacttaatttgcttcag

SEQ ID NO: 57930 - DNA, 20 bp, Artificial Sequence
  Description of Artificial Sequence: Synthetic oligonucleotide
  Target: ATXN2; (-) strand; PAM type: YTN; PAM sequence: CTT
tctgtacttaatttgcttca

SEQ ID NO: 57931 - DNA, 20 bp, Artificial Sequence
  Description of Artificial Sequence: Synthetic oligonucleotide
  Target: ATXN2; (-) strand; PAM type: YTN; PAM sequence: TTA
aacacacagctttctgtact

SEQ ID NO: 57932 - DNA, 20 bp, Artificial Sequence
  Description of Artificial Sequence: Synthetic oligonucleotide
  Target: ATXN2; (-) strand; PAM type: YTN; PAM sequence: TTA
caaattaaacacacagcttt

SEQ ID NO: 57933 - DNA, 20 bp, Artificial Sequence
  Description of Artificial Sequence: Synthetic oligonucleotide
  Target: ATXN2; (-) strand; PAM type: YTN; PAM sequence: CTA
gttacaaattaaacacacag

SEQ ID NO: 57934 - DNA, 20 bp, Artificial Sequence
  Description of Artificial Sequence: Synthetic oligonucleotide
  Target: ATXN2; (-) strand; PAM type: YTN; PAM sequence: TTG
tgcatccaaagtcaaaatga

SEQ ID NO: 57935 - DNA, 20 bp, Artificial Sequence
  Description of Artificial Sequence: Synthetic oligonucleotide
  Target: ATXN2; (-) strand; PAM type: YTN; PAM sequence: CTT
gtgcatccaaagtcaaaatg

SEQ ID NO: 57936 - DNA, 20 bp, Artificial Sequence
  Description of Artificial Sequence: Synthetic oligonucleotide
  Target: ATXN2; (-) strand; PAM type: YTN; PAM sequence: TTA
tgacttgtgcatccaaagtc

SEQ ID NO: 57937 - DNA, 20 bp, Artificial Sequence
  Description of Artificial Sequence: Synthetic oligonucleotide
  Target: ATXN2; (-) strand; PAM type: YTN; PAM sequence: CTT
atgacttgtgcatccaaagt

SEQ ID NO: 57938 - DNA, 20 bp, Artificial Sequence
  Description of Artificial Sequence: Synthetic oligonucleotide
  Target: ATXN2; (-) strand; PAM type: YTN; PAM sequence: CTC
ttatgacttgtgcatccaaa

SEQ ID NO: 57939 - DNA, 20 bp, Artificial Sequence
  Description of Artificial Sequence: Synthetic oligonucleotide
  Target: ATXN2; (-) strand; PAM type: YTN; PAM sequence: CTG
gtgatctcttatgacttgtg

SEQ ID NO: 57940 - DNA, 20 bp, Artificial Sequence
  Description of Artificial Sequence: Synthetic oligonucleotide
  Target: ATXN2; (-) strand; PAM type: YTN; PAM sequence: TTG
caatgctggtgatctcttat

SEQ ID NO: 57941 - DNA, 20 bp, Artificial Sequence
  Description of Artificial Sequence: Synthetic oligonucleotide
  Target: ATXN2; (-) strand; PAM type: YTN; PAM sequence: TTT
gcaatgctggtgatctctta

SEQ ID NO: 57942 - DNA, 20 bp, Artificial Sequence
  Description of Artificial Sequence: Synthetic oligonucleotide
  Target: ATXN2; (-) strand; PAM type: YTN; PAM sequence: TTT
tgcaatgctggtgatctctt

SEQ ID NO: 57943 - DNA, 20 bp, Artificial Sequence
  Description of Artificial Sequence: Synthetic oligonucleotide
  Target: ATXN2; (-) strand; PAM type: YTN; PAM sequence: TTA
taagttttgcaatgctggtg

SEQ ID NO: 57944 - DNA, 20 bp, Artificial Sequence
  Description of Artificial Sequence: Synthetic oligonucleotide
  Target: ATXN2; (-) strand; PAM type: YTN; PAM sequence: TTT
ataagttttgcaatgctggt

SEQ ID NO: 57945 - DNA, 20 bp, Artificial Sequence
  Description of Artificial Sequence: Synthetic oligonucleotide
  Target: ATXN2; (-) strand; PAM type: YTN; PAM sequence: TTT
tataagttttgcaatgctgg

SEQ ID NO: 57946 - DNA, 20 bp, Artificial Sequence
  Description of Artificial Sequence: Synthetic oligonucleotide
  Target: ATXN2; (-) strand; PAM type: YTN; PAM sequence: TTG
ttttataagttttgcaatgc

SEQ ID NO: 57947 - DNA, 20 bp, Artificial Sequence
  Description of Artificial Sequence: Synthetic oligonucleotide
  Target: ATXN2; (-) strand; PAM type: YTN; PAM sequence: TTT
gttttataagttttgcaatg

SEQ ID NO: 57948 - DNA, 20 bp, Artificial Sequence
  Description of Artificial Sequence: Synthetic oligonucleotide
  Target: ATXN2; (-) strand; PAM type: YTN; PAM sequence: TTT
tgttttataagttttgcaat

SEQ ID NO: 57949 - DNA, 20 bp, Artificial Sequence
  Description of Artificial Sequence: Synthetic oligonucleotide
  Target: ATXN2; (-) strand; PAM type: YTN; PAM sequence: TTG
ttttgttttataagttttgc

SEQ ID NO: 57950 - DNA, 20 bp, Artificial Sequence
  Description of Artificial Sequence: Synthetic oligonucleotide
  Target: ATXN2; (-) strand; PAM type: YTN; PAM sequence: TTT
gttttgttttataagttttg

SEQ ID NO: 57951 - DNA, 20 bp, Artificial Sequence
  Description of Artificial Sequence: Synthetic oligonucleotide
  Target: ATXN2; (-) strand; PAM type: YTN; PAM sequence: TTT
tgttttgttttataagtttt

SEQ ID NO: 57952 - DNA, 20 bp, Artificial Sequence
  Description of Artificial Sequence: Synthetic oligonucleotide
  Target: ATXN2; (-) strand; PAM type: YTN; PAM sequence: TTG
gaagattttgttttgtttta

SEQ ID NO: 57953 - DNA, 20 bp, Artificial Sequence
  Description of Artificial Sequence: Synthetic oligonucleotide
  Target: ATXN2; (-) strand; PAM type: YTN; PAM sequence: TTA
caagttggaagattttgttt

SEQ ID NO: 57954 - DNA, 20 bp, Artificial Sequence
  Description of Artificial Sequence: Synthetic oligonucleotide
  Target: ATXN2; (-) strand; PAM type: YTN; PAM sequence: TTT
acaagttggaagattttgtt

SEQ ID NO: 57955 - DNA, 20 bp, Artificial Sequence
  Description of Artificial Sequence: Synthetic oligonucleotide
  Target: ATXN2; (-) strand; PAM type: YTN; PAM sequence: TTA
acatcagatttacaagttgg

SEQ ID NO: 57956 - DNA, 20 bp, Artificial Sequence
  Description of Artificial Sequence: Synthetic oligonucleotide
  Target: ATXN2; (-) strand; PAM type: YTN; PAM sequence: TTT
aacatcagatttacaagttg

SEQ ID NO: 57957 - DNA, 20 bp, Artificial Sequence
  Description of Artificial Sequence: Synthetic oligonucleotide
  Target: ATXN2; (-) strand; PAM type: YTN; PAM sequence: CTG
aatttaacatcagatttaca

SEQ ID NO: 57958 - DNA, 20 bp, Artificial Sequence
  Description of Artificial Sequence: Synthetic oligonucleotide
  Target: ATXN2; (-) strand; PAM type: YTN; PAM sequence: TTC
tgaatttaacatcagattta

SEQ ID NO: 57959 - DNA, 20 bp, Artificial Sequence
  Description of Artificial Sequence: Synthetic oligonucleotide
  Target: ATXN2; (-) strand; PAM type: YTN; PAM sequence: TTT
ctgaatttaacatcagattt

SEQ ID NO: 57960 - DNA, 20 bp, Artificial Sequence
  Description of Artificial Sequence: Synthetic oligonucleotide
  Target: ATXN2; (-) strand; PAM type: YTN; PAM sequence: TTT
tctgaatttaacatcagatt

SEQ ID NO: 57961 - DNA, 20 bp, Artificial Sequence
  Description of Artificial Sequence: Synthetic oligonucleotide
  Target: ATXN2; (-) strand; PAM type: YTN; PAM sequence: TTT
ttctgaatttaacatcagat

SEQ ID NO: 57962 - DNA, 20 bp, Artificial Sequence
  Description of Artificial Sequence: Synthetic oligonucleotide
  Target: ATXN2; (-) strand; PAM type: YTN; PAM sequence: CTT
tttctgaatttaacatcaga

SEQ ID NO: 57963 - DNA, 20 bp, Artificial Sequence
  Description of Artificial Sequence: Synthetic oligonucleotide
  Target: ATXN2; (-) strand; PAM type: YTN; PAM sequence: TTC
cctttttctgaatttaacat

SEQ ID NO: 57964 - DNA, 20 bp, Artificial Sequence
  Description of Artificial Sequence: Synthetic oligonucleotide
  Target: ATXN2; (-) strand; PAM type: YTN; PAM sequence: CTT
ccctttttctgaatttaaca

SEQ ID NO: 57965 - DNA, 20 bp, Artificial Sequence
  Description of Artificial Sequence: Synthetic oligonucleotide
  Target: ATXN2; (-) strand; PAM type: YTN; PAM sequence: TTC
acttccctttttctgaattt

SEQ ID NO: 57966 - DNA, 20 bp, Artificial Sequence
  Description of Artificial Sequence: Synthetic oligonucleotide
  Target: ATXN2; (-) strand; PAM type: YTN; PAM sequence: CTT
cacttccctttttctgaatt

SEQ ID NO: 57967 - DNA, 20 bp, Artificial Sequence
  Description of Artificial Sequence: Synthetic oligonucleotide
  Target: ATXN2; (-) strand; PAM type: YTN; PAM sequence: TTC
cttcacttccctttttctga

SEQ ID NO: 57968 - DNA, 20 bp, Artificial Sequence
  Description of Artificial Sequence: Synthetic oligonucleotide
  Target: ATXN2; (-) strand; PAM type: YTN; PAM sequence: TTT
ccttcacttccctttttctg

SEQ ID NO: 57969 - DNA, 20 bp, Artificial Sequence
  Description of Artificial Sequence: Synthetic oligonucleotide
  Target: ATXN2; (-) strand; PAM type: YTN; PAM sequence: CTT
tccttcacttccctttttct

SEQ ID NO: 57970 - DNA, 20 bp, Artificial Sequence
  Description of Artificial Sequence: Synthetic oligonucleotide
  Target: ATXN2; (-) strand; PAM type: YTN; PAM sequence: TTC
aactttccttcacttccctt

SEQ ID NO: 57971 - DNA, 20 bp, Artificial Sequence
  Description of Artificial Sequence: Synthetic oligonucleotide
  Target: ATXN2; (-) strand; PAM type: YTN; PAM sequence: TTT
caactttccttcacttccct

SEQ ID NO: 57972 - DNA, 20 bp, Artificial Sequence
  Description of Artificial Sequence: Synthetic oligonucleotide
  Target: ATXN2; (-) strand; PAM type: YTN; PAM sequence: TTT
tcaactttccttcacttccc

SEQ ID NO: 57973 - DNA, 20 bp, Artificial Sequence
  Description of Artificial Sequence: Synthetic oligonucleotide
  Target: ATXN2; (-) strand; PAM type: YTN; PAM sequence: TTA
gagttttcaactttccttca

SEQ ID NO: 57974 - DNA, 20 bp, Artificial Sequence
  Description of Artificial Sequence: Synthetic oligonucleotide
  Target: ATXN2; (-) strand; PAM type: YTN; PAM sequence: TTT
agagttttcaactttccttc

SEQ ID NO: 57975 - DNA, 20 bp, Artificial Sequence
  Description of Artificial Sequence: Synthetic oligonucleotide
  Target: ATXN2; (-) strand; PAM type: YTN; PAM sequence: TTT
tagagttttcaactttcctt

SEQ ID NO: 57976 - DNA, 20 bp, Artificial Sequence
  Description of Artificial Sequence: Synthetic oligonucleotide
  Target: ATXN2; (-) strand; PAM type: YTN; PAM sequence: CTT
ttagagttttcaactttcct

SEQ ID NO: 57977 - DNA, 20 bp, Artificial Sequence
  Description of Artificial Sequence: Synthetic oligonucleotide
  Target: ATXN2; (-) strand; PAM type: YTN; PAM sequence: TTC
cccttttagagttttcaact

SEQ ID NO: 57978 - DNA, 20 bp, Artificial Sequence
  Description of Artificial Sequence: Synthetic oligonucleotide
  Target: ATXN2; (-) strand; PAM type: YTN; PAM sequence: TTA
ttccccttttagagttttca

SEQ ID NO: 57979 - DNA, 20 bp, Artificial Sequence
  Description of Artificial Sequence: Synthetic oligonucleotide
  Target: ATXN2; (-) strand; PAM type: YTN; PAM sequence: TTT
attccccttttagagttttc

SEQ ID NO: 57980 - DNA, 20 bp, Artificial Sequence
  Description of Artificial Sequence: Synthetic oligonucleotide
  Target: ATXN2; (-) strand; PAM type: YTN; PAM sequence: TTT
tattccccttttagagtttt

SEQ ID NO: 57981 - DNA, 20 bp, Artificial Sequence
  Description of Artificial Sequence: Synthetic oligonucleotide
  Target: ATXN2; (-) strand; PAM type: YTN; PAM sequence: CTT
ttattccccttttagagttt

SEQ ID NO: 57982 - DNA, 20 bp, Artificial Sequence
  Description of Artificial Sequence: Synthetic oligonucleotide
  Target: ATXN2; (-) strand; PAM type: YTN; PAM sequence: TTG
ccttttattccccttttaga

SEQ ID NO: 57983 - DNA, 20 bp, Artificial Sequence
  Description of Artificial Sequence: Synthetic oligonucleotide
  Target: ATXN2; (-) strand; PAM type: YTN; PAM sequence: TTG
gtcaagttgccttttattcc

SEQ ID NO: 57984 - DNA, 20 bp, Artificial Sequence
  Description of Artificial Sequence: Synthetic oligonucleotide
  Target: ATXN2; (-) strand; PAM type: YTN; PAM sequence: TTT
ggtcaagttgccttttattc

SEQ ID NO: 57985 - DNA, 20 bp, Artificial Sequence
  Description of Artificial Sequence: Synthetic oligonucleotide
  Target: ATXN2; (-) strand; PAM type: YTN; PAM sequence: TTA
tgatggtttggtcaagttgc

SEQ ID NO: 57986 - DNA, 20 bp, Artificial Sequence
  Description of Artificial Sequence: Synthetic oligonucleotide
  Target: ATXN2; (-) strand; PAM type: YTN; PAM sequence: TTT
atgatggtttggtcaagttg

SEQ ID NO: 57987 - DNA, 20 bp, Artificial Sequence
  Description of Artificial Sequence: Synthetic oligonucleotide
  Target: ATXN2; (-) strand; PAM type: YTN; PAM sequence: TTT
tatgatggtttggtcaagtt

SEQ ID NO: 57988 - DNA, 20 bp, Artificial Sequence
  Description of Artificial Sequence: Synthetic oligonucleotide
  Target: ATXN2; (-) strand; PAM type: YTN; PAM sequence: CTA
agccattttatgatggtttg

SEQ ID NO: 57989 - DNA, 20 bp, Artificial Sequence
  Description of Artificial Sequence: Synthetic oligonucleotide
  Target: ATXN2; (-) strand; PAM type: YTN; PAM sequence: TTC
taagccattttatgatggtt

SEQ ID NO: 57990 - DNA, 20 bp, Artificial Sequence
  Description of Artificial Sequence: Synthetic oligonucleotide
  Target: ATXN2; (-) strand; PAM type: YTN; PAM sequence: CTG
ttctaagccattttatgatg

SEQ ID NO: 57991 - DNA, 20 bp, Artificial Sequence
  Description of Artificial Sequence: Synthetic oligonucleotide
  Target: ATXN2; (-) strand; PAM type: YTN; PAM sequence: TTC
cccctgttctaagccatttt

SEQ ID NO: 57992 - DNA, 20 bp, Artificial Sequence
  Description of Artificial Sequence: Synthetic oligonucleotide
  Target: ATXN2; (-) strand; PAM type: YTN; PAM sequence: TTT
ccccctgttctaagccattt

SEQ ID NO: 57993 - DNA, 20 bp, Artificial Sequence
  Description of Artificial Sequence: Synthetic oligonucleotide
  Target: ATXN2; (-) strand; PAM type: YTN; PAM sequence: TTC
atttccccctgttctaagcc

SEQ ID NO: 57994 - DNA, 20 bp, Artificial Sequence
  Description of Artificial Sequence: Synthetic oligonucleotide
  Target: ATXN2; (-) strand; PAM type: YTN; PAM sequence: CTT
catttccccctgttctaagc

SEQ ID NO: 57995 - DNA, 20 bp, Artificial Sequence
  Description of Artificial Sequence: Synthetic oligonucleotide
  Target: ATXN2; (-) strand; PAM type: YTN; PAM sequence: CTG
cttcatttccccctgttcta

SEQ ID NO: 57996 - DNA, 20 bp, Artificial Sequence
  Description of Artificial Sequence: Synthetic oligonucleotide
  Target: ATXN2; (-) strand; PAM type: YTN; PAM sequence: CTG
ctgcttcatttccccctgtt

SEQ ID NO: 57997 - DNA, 20 bp, Artificial Sequence
  Description of Artificial Sequence: Synthetic oligonucleotide
  Target: ATXN2; (-) strand; PAM type: YTN; PAM sequence: TTA
atctgctgcttcatttcccc

SEQ ID NO: 57998 - DNA, 20 bp, Artificial Sequence
  Description of Artificial Sequence: Synthetic oligonucleotide
  Target: ATXN2; (-) strand; PAM type: YTN; PAM sequence: TTT
aatctgctgcttcatttccc

SEQ ID NO: 57999 - DNA, 20 bp, Artificial Sequence
  Description of Artificial Sequence: Synthetic oligonucleotide
  Target: ATXN2; (-) strand; PAM type: YTN; PAM sequence: CTA
atttaatctgctgcttcatt

SEQ ID NO: 58000 - DNA, 20 bp, Artificial Sequence
  Description of Artificial Sequence: Synthetic oligonucleotide
  Target: ATXN2; (-) strand; PAM type: YTN; PAM sequence: CTG
ctaatttaatctgctgcttc

SEQ ID NO: 58001 - DNA, 20 bp, Artificial Sequence
  Description of Artificial Sequence: Synthetic oligonucleotide
  Target: ATXN2; (-) strand; PAM type: YTN; PAM sequence: TTG
ggctgctaatttaatctgct

SEQ ID NO: 58002 - DNA, 20 bp, Artificial Sequence
  Description of Artificial Sequence: Synthetic oligonucleotide
  Target: ATXN2; (-) strand; PAM type: YTN; PAM sequence: CTA
acagttgggctgctaattta

SEQ ID NO: 58003 - DNA, 20 bp, Artificial Sequence
  Description of Artificial Sequence: Synthetic oligonucleotide
  Target: ATXN2; (-) strand; PAM type: YTN; PAM sequence: TTA
aaagaaactaacagttgggc

SEQ ID NO: 58004 - DNA, 20 bp, Artificial Sequence
  Description of Artificial Sequence: Synthetic oligonucleotide
  Target: ATXN2; (-) strand; PAM type: YTN; PAM sequence: TTT
aaaagaaactaacagttggg

SEQ ID NO: 58005 - DNA, 20 bp, Artificial Sequence
  Description of Artificial Sequence: Synthetic oligonucleotide
  Target: ATXN2; (-) strand; PAM type: YTN; PAM sequence: TTT
taaaagaaactaacagttgg

SEQ ID NO: 58006 - DNA, 20 bp, Artificial Sequence
  Description of Artificial Sequence: Synthetic oligonucleotide
  Target: ATXN2; (-) strand; PAM type: YTN; PAM sequence: TTT
ttaaaagaaactaacagttg

SEQ ID NO: 58007 - DNA, 20 bp, Artificial Sequence
  Description of Artificial Sequence: Synthetic oligonucleotide
  Target: ATXN2; (-) strand; PAM type: YTN; PAM sequence: CTT
tttaaaagaaactaacagtt

SEQ ID NO: 58008 - DNA, 20 bp, Artificial Sequence
  Description of Artificial Sequence: Synthetic oligonucleotide
  Target: ATXN2; (-) strand; PAM type: YTN; PAM sequence: CTA
aaagggagtatcagtacttt

SEQ ID NO: 58009 - DNA, 20 bp, Artificial Sequence
  Description of Artificial Sequence: Synthetic oligonucleotide
  Target: ATXN2; (-) strand; PAM type: YTN; PAM sequence: TTC
ccctaaaagggagtatcagt

SEQ ID NO: 58010 - DNA, 20 bp, Artificial Sequence
  Description of Artificial Sequence: Synthetic oligonucleotide
  Target: ATXN2; (-) strand; PAM type: YTN; PAM sequence: CTT
cccctaaaagggagtatcag

SEQ ID NO: 58011 - DNA, 20 bp, Artificial Sequence
  Description of Artificial Sequence: Synthetic oligonucleotide
  Target: ATXN2; (-) strand; PAM type: YTN; PAM sequence: TTA
gcacaacttcccctaaaagg

SEQ ID NO: 58012 - DNA, 20 bp, Artificial Sequence
  Description of Artificial Sequence: Synthetic oligonucleotide
  Target: ATXN2; (-) strand; PAM type: YTN; PAM sequence: CTT
agcacaacttcccctaaaag

SEQ ID NO: 58013 - DNA, 20 bp, Artificial Sequence
  Description of Artificial Sequence: Synthetic oligonucleotide
  Target: ATXN2; (-) strand; PAM type: YTN; PAM sequence: TTG
ccttagcacaacttccccta

SEQ ID NO: 58014 - DNA, 20 bp, Artificial Sequence
  Description of Artificial Sequence: Synthetic oligonucleotide
  Target: ATXN2; (-) strand; PAM type: YTN; PAM sequence: TTA
attgccttagcacaacttcc

SEQ ID NO: 58015 - DNA, 20 bp, Artificial Sequence
  Description of Artificial Sequence: Synthetic oligonucleotide
  Target: ATXN2; (-) strand; PAM type: YTN; PAM sequence: CTT
aattgccttagcacaacttc

SEQ ID NO: 58016 - DNA, 20 bp, Artificial Sequence
  Description of Artificial Sequence: Synthetic oligonucleotide
  Target: ATXN2; (-) strand; PAM type: YTN; PAM sequence: CTA
agccttaattgccttagcac

SEQ ID NO: 58017 - DNA, 20 bp, Artificial Sequence
  Description of Artificial Sequence: Synthetic oligonucleotide
  Target: ATXN2; (-) strand; PAM type: YTN; PAM sequence: TTA
acacctaagccttaattgcc

SEQ ID NO: 58018 - DNA, 20 bp, Artificial Sequence
  Description of Artificial Sequence: Synthetic oligonucleotide
  Target: ATXN2; (-) strand; PAM type: YTN; PAM sequence: TTA
atcattaacacctaagcctt

SEQ ID NO: 58019 - DNA, 20 bp, Artificial Sequence
  Description of Artificial Sequence: Synthetic oligonucleotide
  Target: ATXN2; (-) strand; PAM type: YTN; PAM sequence: CTT
aatcattaacacctaagcct

SEQ ID NO: 58020 - DNA, 20 bp, Artificial Sequence
  Description of Artificial Sequence: Synthetic oligonucleotide
  Target: ATXN2; (-) strand; PAM type: YTN; PAM sequence: CTA
aggtccttaatcattaacac

SEQ ID NO: 58021 - DNA, 20 bp, Artificial Sequence
  Description of Artificial Sequence: Synthetic oligonucleotide
  Target: ATXN2; (-) strand; PAM type: YTN; PAM sequence: CTG
gtaagtagctaaggtcctta

SEQ ID NO: 58022 - DNA, 20 bp, Artificial Sequence
  Description of Artificial Sequence: Synthetic oligonucleotide
  Target: ATXN2; (-) strand; PAM type: YTN; PAM sequence: TTC
ctggtaagtagctaaggtcc

SEQ ID NO: 58023 - DNA, 20 bp, Artificial Sequence
  Description of Artificial Sequence: Synthetic oligonucleotide
  Target: ATXN2; (-) strand; PAM type: YTN; PAM sequence: TTT
cctggtaagtagctaaggtc

SEQ ID NO: 58024 - DNA, 20 bp, Artificial Sequence
  Description of Artificial Sequence: Synthetic oligonucleotide
  Target: ATXN2; (-) strand; PAM type: YTN; PAM sequence: TTT
tcctggtaagtagctaaggt

SEQ ID NO: 58025 - DNA, 20 bp, Artificial Sequence
  Description of Artificial Sequence: Synthetic oligonucleotide
  Target: ATXN2; (-) strand; PAM type: YTN; PAM sequence: TTG
ttttcctggtaagtagctaa

SEQ ID NO: 58026 - DNA, 20 bp, Artificial Sequence
  Description of Artificial Sequence: Synthetic oligonucleotide
  Target: ATXN2; (-) strand; PAM type: YTN; PAM sequence: TTG
gtgttgttttcctggtaagt

SEQ ID NO: 58027 - DNA, 20 bp, Artificial Sequence
  Description of Artificial Sequence: Synthetic oligonucleotide
  Target: ATXN2; (-) strand; PAM type: YTN; PAM sequence: TTT
ggtgttgttttcctggtaag

SEQ ID NO: 58028 - DNA, 20 bp, Artificial Sequence
  Description of Artificial Sequence: Synthetic oligonucleotide
  Target: ATXN2; (-) strand; PAM type: YTN; PAM sequence: TTA
gtagtttggtgttgttttcc

SEQ ID NO: 58029 - DNA, 20 bp, Artificial Sequence
  Description of Artificial Sequence: Synthetic oligonucleotide
  Target: ATXN2; (-) strand; PAM type: YTN; PAM sequence: CTG
ttagtagtttggtgttgttt

SEQ ID NO: 58030 - DNA, 20 bp, Artificial Sequence
  Description of Artificial Sequence: Synthetic oligonucleotide
  Target: ATXN2; (-) strand; PAM type: YTN; PAM sequence: CTC
tgttagtagtttggtgttgt

SEQ ID NO: 58031 - DNA, 20 bp, Artificial Sequence
  Description of Artificial Sequence: Synthetic oligonucleotide
  Target: ATXN2; (-) strand; PAM type: YTN; PAM sequence: CTG
tctctgttagtagtttggtg

SEQ ID NO: 58032 - DNA, 20 bp, Artificial Sequence
  Description of Artificial Sequence: Synthetic oligonucleotide
  Target: ATXN2; (-) strand; PAM type: YTN; PAM sequence: TTA
ctgtctctgttagtagtttg

SEQ ID NO: 58033 - DNA, 20 bp, Artificial Sequence
  Description of Artificial Sequence: Synthetic oligonucleotide
  Target: ATXN2; (-) strand; PAM type: YTN; PAM sequence: CTT
actgtctctgttagtagttt

SEQ ID NO: 58034 - DNA, 20 bp, Artificial Sequence
  Description of Artificial Sequence: Synthetic oligonucleotide
  Target: ATXN2; (-) strand; PAM type: YTN; PAM sequence: CTC
accatcttactgtctctgtt

SEQ ID NO: 58035 - DNA, 20 bp, Artificial Sequence
  Description of Artificial Sequence: Synthetic oligonucleotide
  Target: ATXN2; (-) strand; PAM type: YTN; PAM sequence: TTA
tcctcaccatcttactgtct

SEQ ID NO: 58036 - DNA, 20 bp, Artificial Sequence
  Description of Artificial Sequence: Synthetic oligonucleotide
  Target: ATXN2; (-) strand; PAM type: YTN; PAM sequence: CTC
aaatgtagttatcctcacca

SEQ ID NO: 58037 - DNA, 20 bp, Artificial Sequence
  Description of Artificial Sequence: Synthetic oligonucleotide
  Target: ATXN2; (-) strand; PAM type: YTN; PAM sequence: TTG
aggtctcaaatgtagttatc

SEQ ID NO: 58038 - DNA, 20 bp, Artificial Sequence
  Description of Artificial Sequence: Synthetic oligonucleotide
  Target: ATXN2; (-) strand; PAM type: YTN; PAM sequence: TTT
gaggtctcaaatgtagttat

SEQ ID NO: 58039 - DNA, 20 bp, Artificial Sequence
  Description of Artificial Sequence: Synthetic oligonucleotide
  Target: ATXN2; (-) strand; PAM type: YTN; PAM sequence: CTC
aatttgaggtctcaaatgta

SEQ ID NO: 58040 - DNA, 20 bp, Artificial Sequence
  Description of Artificial Sequence: Synthetic oligonucleotide
  Target: ATXN2; (-) strand; PAM type: YTN; PAM sequence: TTA
tgtactcaatttgaggtctc

SEQ ID NO: 58041 - DNA, 20 bp, Artificial Sequence
  Description of Artificial Sequence: Synthetic oligonucleotide
  Target: ATXN2; (-) strand; PAM type: YTN; PAM sequence: TTA
ttatgtactcaatttgaggt

SEQ ID NO: 58042 - DNA, 20 bp, Artificial Sequence
  Description of Artificial Sequence: Synthetic oligonucleotide
  Target: ATXN2; (-) strand; PAM type: YTN; PAM sequence: TTT
attatgtactcaatttgagg

SEQ ID NO: 58043 - DNA, 20 bp, Artificial Sequence
  Description of Artificial Sequence: Synthetic oligonucleotide
  Target: ATXN2; (-) strand; PAM type: YTN; PAM sequence: TTT
tattatgtactcaatttgag

SEQ ID NO: 58044 - DNA, 20 bp, Artificial Sequence
  Description of Artificial Sequence: Synthetic oligonucleotide
  Target: ATXN2; (-) strand; PAM type: YTN; PAM sequence: TTG
tagtgtgtaaaagatagtag

SEQ ID NO: 58045 - DNA, 20 bp, Artificial Sequence
  Description of Artificial Sequence: Synthetic oligonucleotide
  Target: ATXN2; (-) strand; PAM type: YTN; PAM sequence: CTG
tgattgtagtgtgtaaaaga

SEQ ID NO: 58046 - DNA, 20 bp, Artificial Sequence
  Description of Artificial Sequence: Synthetic oligonucleotide
  Target: ATXN2; (-) strand; PAM type: YTN; PAM sequence: CTA
tgtctgtgattgtagtgtgt

SEQ ID NO: 58047 - DNA, 20 bp, Artificial Sequence
  Description of Artificial Sequence: Synthetic oligonucleotide
  Target: ATXN2; (-) strand; PAM type: YTN; PAM sequence: TTA
aaggggaaactatgtctgtg

SEQ ID NO: 58048 - DNA, 20 bp, Artificial Sequence
  Description of Artificial Sequence: Synthetic oligonucleotide
  Target: ATXN2; (-) strand; PAM type: YTN; PAM sequence: CTA
ttaaaggggaaactatgtct

SEQ ID NO: 58049 - DNA, 20 bp, Artificial Sequence
  Description of Artificial Sequence: Synthetic oligonucleotide
  Target: ATXN2; (-) strand; PAM type: YTN; PAM sequence: CTG
tatgtatatactattaaagg

SEQ ID NO: 58050 - DNA, 20 bp, Artificial Sequence
  Description of Artificial Sequence: Synthetic oligonucleotide
  Target: ATXN2; (-) strand; PAM type: YTN; PAM sequence: TTG
ctgtatgtatatactattaa

SEQ ID NO: 58051 - DNA, 20 bp, Artificial Sequence
  Description of Artificial Sequence: Synthetic oligonucleotide
  Target: ATXN2; (-) strand; PAM type: YTN; PAM sequence: CTT
gctgtatgtatatactatta

SEQ ID NO: 58052 - DNA, 20 bp, Artificial Sequence
  Description of Artificial Sequence: Synthetic oligonucleotide
  Target: ATXN2; (-) strand; PAM type: YTN; PAM sequence: TTA
aaaaggagtcttgctgtatg

SEQ ID NO: 58053 - DNA, 20 bp, Artificial Sequence
  Description of Artificial Sequence: Synthetic oligonucleotide
  Target: ATXN2; (-) strand; PAM type: YTN; PAM sequence: TTT
aaaaaggagtcttgctgtat

SEQ ID NO: 58054 - DNA, 20 bp, Artificial Sequence
  Description of Artificial Sequence: Synthetic oligonucleotide
  Target: ATXN2; (-) strand; PAM type: YTN; PAM sequence: CTT
taaaaaggagtcttgctgta

SEQ ID NO: 58055 - DNA, 20 bp, Artificial Sequence
  Description of Artificial Sequence: Synthetic oligonucleotide
  Target: ATXN2; (-) strand; PAM type: YTN; PAM sequence: CTC
tttaaaaaggagtcttgctg

SEQ ID NO: 58056 - DNA, 20 bp, Artificial Sequence
  Description of Artificial Sequence: Synthetic oligonucleotide
  Target: ATXN2; (-) strand; PAM type: YTN; PAM sequence: TTA
atagatgctctttaaaaagg

SEQ ID NO: 58057 - DNA, 20 bp, Artificial Sequence
  Description of Artificial Sequence: Synthetic oligonucleotide
  Target: ATXN2; (-) strand; PAM type: YTN; PAM sequence: TTT
aatagatgctctttaaaaag

SEQ ID NO: 58058 - DNA, 20 bp, Artificial Sequence
  Description of Artificial Sequence: Synthetic oligonucleotide
  Target: ATXN2; (-) strand; PAM type: YTN; PAM sequence: CTT
taatagatgctctttaaaaa

SEQ ID NO: 58059 - DNA, 20 bp, Artificial Sequence
  Description of Artificial Sequence: Synthetic oligonucleotide
  Target: ATXN2; (-) strand; PAM type: YTN; PAM sequence: TTA
atcctttaatagatgctctt

SEQ ID NO: 58060 - DNA, 20 bp, Artificial Sequence
  Description of Artificial Sequence: Synthetic oligonucleotide
  Target: ATXN2; (-) strand; PAM type: YTN; PAM sequence: TTT
aatcctttaatagatgctct

SEQ ID NO: 58061 - DNA, 20 bp, Artificial Sequence
  Description of Artificial Sequence: Synthetic oligonucleotide
  Target: ATXN2; (-) strand; PAM type: YTN; PAM sequence: TTA
aatttaatcctttaatagat

SEQ ID NO: 58062 - DNA, 20 bp, Artificial Sequence
  Description of Artificial Sequence: Synthetic oligonucleotide
  Target: ATXN2; (-) strand; PAM type: YTN; PAM sequence: CTA
ggaaatgttaaatttaatcc

SEQ ID NO: 58063 - DNA, 20 bp, Artificial Sequence
  Description of Artificial Sequence: Synthetic oligonucleotide
  Target: ATXN2; (-) strand; PAM type: YTN; PAM sequence: TTG
gtgctaggaaatgttaaatt

SEQ ID NO: 58064 - DNA, 20 bp, Artificial Sequence
  Description of Artificial Sequence: Synthetic oligonucleotide
  Target: ATXN2; (-) strand; PAM type: YTN; PAM sequence: TTT
ggtgctaggaaatgttaaat

SEQ ID NO: 58065 - DNA, 20 bp, Artificial Sequence
  Description of Artificial Sequence: Synthetic oligonucleotide
  Target: ATXN2; (-) strand; PAM type: YTN; PAM sequence: TTA
tttggtgctaggaaatgtta

SEQ ID NO: 58066 - DNA, 20 bp, Artificial Sequence
  Description of Artificial Sequence: Synthetic oligonucleotide
  Target: ATXN2; (-) strand; PAM type: YTN; PAM sequence: TTT
atttggtgctaggaaatgtt

SEQ ID NO: 58067 - DNA, 20 bp, Artificial Sequence
  Description of Artificial Sequence: Synthetic oligonucleotide
  Target: ATXN2; (-) strand; PAM type: YTN; PAM sequence: CTG
atacatacatacatacatat

SEQ ID NO: 58068 - DNA, 20 bp, Artificial Sequence
  Description of Artificial Sequence: Synthetic oligonucleotide
  Target: ATXN2; (-) strand; PAM type: YTN; PAM sequence: TTG
gtatccaaaaataagctgat

SEQ ID NO: 58069 - DNA, 20 bp, Artificial Sequence
  Description of Artificial Sequence: Synthetic oligonucleotide
  Target: ATXN2; (-) strand; PAM type: YTN; PAM sequence: CTT
ggtatccaaaaataagctga

SEQ ID NO: 58070 - DNA, 20 bp, Artificial Sequence
  Description of Artificial Sequence: Synthetic oligonucleotide
  Target: ATXN2; (-) strand; PAM type: YTN; PAM sequence: TTA
tgccatgacttggtatccaa

SEQ ID NO: 58071 - DNA, 20 bp, Artificial Sequence
  Description of Artificial Sequence: Synthetic oligonucleotide
  Target: ATXN2; (-) strand; PAM type: YTN; PAM sequence: TTA
attatgccatgacttggtat

SEQ ID NO: 58072 - DNA, 20 bp, Artificial Sequence
  Description of Artificial Sequence: Synthetic oligonucleotide
  Target: ATXN2; (-) strand; PAM type: YTN; PAM sequence: TTG
ttaattatgccatgacttgg

SEQ ID NO: 58073 - DNA, 20 bp, Artificial Sequence
  Description of Artificial Sequence: Synthetic oligonucleotide
  Target: ATXN2; (-) strand; PAM type: YTN; PAM sequence: TTT
gttaattatgccatgacttg

SEQ ID NO: 58074 - DNA, 20 bp, Artificial Sequence
  Description of Artificial Sequence: Synthetic oligonucleotide
  Target: ATXN2; (-) strand; PAM type: YTN; PAM sequence: CTT
tgttaattatgccatgactt

SEQ ID NO: 58075 - DNA, 20 bp, Artificial Sequence
  Description of Artificial Sequence: Synthetic oligonucleotide
  Target: ATXN2; (-) strand; PAM type: YTN; PAM sequence: TTA
aatctttgttaattatgcca

SEQ ID NO: 58076 - DNA, 20 bp, Artificial Sequence
  Description of Artificial Sequence: Synthetic oligonucleotide
  Target: ATXN2; (-) strand; PAM type: YTN; PAM sequence: CTT
aaatctttgttaattatgcc

SEQ ID NO: 58077 - DNA, 20 bp, Artificial Sequence
  Description of Artificial Sequence: Synthetic oligonucleotide
  Target: ATXN2; (-) strand; PAM type: YTN; PAM sequence: TTG
accttaaatctttgttaatt

SEQ ID NO: 58078 - DNA, 20 bp, Artificial Sequence
  Description of Artificial Sequence: Synthetic oligonucleotide
  Target: ATXN2; (-) strand; PAM type: YTN; PAM sequence: TTT
gaccttaaatctttgttaat

SEQ ID NO: 58079 - DNA, 20 bp, Artificial Sequence
  Description of Artificial Sequence: Synthetic oligonucleotide
  Target: ATXN2; (-) strand; PAM type: YTN; PAM sequence: TTA
aaatgcatttgaccttaaat

SEQ ID NO: 58080 - DNA, 20 bp, Artificial Sequence
  Description of Artificial Sequence: Synthetic oligonucleotide
  Target: ATXN2; (-) strand; PAM type: YTN; PAM sequence: TTT
aaaatgcatttgaccttaaa

SEQ ID NO: 58081 - DNA, 20 bp, Artificial Sequence
  Description of Artificial Sequence: Synthetic oligonucleotide
  Target: ATXN2; (-) strand; PAM type: YTN; PAM sequence: TTA
gcatttaaaatgcatttgac

SEQ ID NO: 58082 - DNA, 20 bp, Artificial Sequence
  Description of Artificial Sequence: Synthetic oligonucleotide
  Target: ATXN2; (-) strand; PAM type: YTN; PAM sequence: CTA
aatgccatattagcatttaa

SEQ ID NO: 58083 - DNA, 20 bp, Artificial Sequence
  Description of Artificial Sequence: Synthetic oligonucleotide
  Target: ATXN2; (-) strand; PAM type: YTN; PAM sequence: CTA
ctaaatgccatattagcatt

SEQ ID NO: 58084 - DNA, 20 bp, Artificial Sequence
  Description of Artificial Sequence: Synthetic oligonucleotide
  Target: ATXN2; (-) strand; PAM type: YTN; PAM sequence: CTC
tactaaatgccatattagca

SEQ ID NO: 58085 - DNA, 20 bp, Artificial Sequence
  Description of Artificial Sequence: Synthetic oligonucleotide
  Target: ATXN2; (-) strand; PAM type: YTN; PAM sequence: CTG
actctactaaatgccatatt

SEQ ID NO: 58086 - DNA, 20 bp, Artificial Sequence
  Description of Artificial Sequence: Synthetic oligonucleotide
  Target: ATXN2; (-) strand; PAM type: YTN; PAM sequence: CTC
aatgtctgactctactaaat

SEQ ID NO: 58087 - DNA, 20 bp, Artificial Sequence
  Description of Artificial Sequence: Synthetic oligonucleotide
  Target: ATXN2; (-) strand; PAM type: YTN; PAM sequence: TTG
gggtgactcaatgtctgact

SEQ ID NO: 58088 - DNA, 20 bp, Artificial Sequence
  Description of Artificial Sequence: Synthetic oligonucleotide
  Target: ATXN2; (-) strand; PAM type: YTN; PAM sequence: TTT
ggggtgactcaatgtctgac

SEQ ID NO: 58089 - DNA, 20 bp, Artificial Sequence
  Description of Artificial Sequence: Synthetic oligonucleotide
  Target: ATXN2; (-) strand; PAM type: YTN; PAM sequence: TTT
tggggtgactcaatgtctga

SEQ ID NO: 58090 - DNA, 20 bp, Artificial Sequence
  Description of Artificial Sequence: Synthetic oligonucleotide
  Target: ATXN2; (-) strand; PAM type: YTN; PAM sequence: TTA
ttttggggtgactcaatgtc

SEQ ID NO: 58091 - DNA, 20 bp, Artificial Sequence
  Description of Artificial Sequence: Synthetic oligonucleotide
  Target: ATXN2; (-) strand; PAM type: YTN; PAM sequence: TTG
agttattttggggtgactca

SEQ ID NO: 58092 - DNA, 20 bp, Artificial Sequence
  Description of Artificial Sequence: Synthetic oligonucleotide
  Target: ATXN2; (-) strand; PAM type: YTN; PAM sequence: TTT
gagttattttggggtgactc

SEQ ID NO: 58093 - DNA, 20 bp, Artificial Sequence
  Description of Artificial Sequence: Synthetic oligonucleotide
  Target: ATXN2; (-) strand; PAM type: YTN; PAM sequence: TTT
tgagttattttggggtgact

SEQ ID NO: 58094 - DNA, 20 bp, Artificial Sequence
  Description of Artificial Sequence: Synthetic oligonucleotide
  Target: ATXN2; (-) strand; PAM type: YTN; PAM sequence: TTA
ggcacattttgagttatttt

SEQ ID NO: 58095 - DNA, 20 bp, Artificial Sequence
  Description of Artificial Sequence: Synthetic oligonucleotide
  Target: ATXN2; (-) strand; PAM type: YTN; PAM sequence: TTA
tgttaggcacattttgagtt

SEQ ID NO: 58096 - DNA, 20 bp, Artificial Sequence
  Description of Artificial Sequence: Synthetic oligonucleotide
  Target: ATXN2; (-) strand; PAM type: YTN; PAM sequence: TTT
atgttaggcacattttgagt

SEQ ID NO: 58097 - DNA, 20 bp, Artificial Sequence
  Description of Artificial Sequence: Synthetic oligonucleotide
  Target: ATXN2; (-) strand; PAM type: YTN; PAM sequence: TTT
tatgttaggcacattttgag

SEQ ID NO: 58098 - DNA, 20 bp, Artificial Sequence
  Description of Artificial Sequence: Synthetic oligonucleotide
  Target: ATXN2; (-) strand; PAM type: YTN; PAM sequence: TTC
aaattttatgttaggcacat

SEQ ID NO: 58099 - DNA, 20 bp, Artificial Sequence
  Description of Artificial Sequence: Synthetic oligonucleotide
  Target: ATXN2; (-) strand; PAM type: YTN; PAM sequence: TTA
aggattcaaattttatgtta

SEQ ID NO: 58100 - DNA, 20 bp, Artificial Sequence
  Description of Artificial Sequence: Synthetic oligonucleotide
  Target: ATXN2; (-) strand; PAM type: YTN; PAM sequence: CTA
gaggatattaaggattcaaa

SEQ ID NO: 58101 - DNA, 20 bp, Artificial Sequence
  Description of Artificial Sequence: Synthetic oligonucleotide
  Target: ATXN2; (-) strand; PAM type: YTN; PAM sequence: TTC
tagaggatattaaggattca

SEQ ID NO: 58102 - DNA, 20 bp, Artificial Sequence
  Description of Artificial Sequence: Synthetic oligonucleotide
  Target: ATXN2; (-) strand; PAM type: YTN; PAM sequence: TTG
tgttctagaggatattaagg

SEQ ID NO: 58103 - DNA, 20 bp, Artificial Sequence
  Description of Artificial Sequence: Synthetic oligonucleotide
  Target: ATXN2; (-) strand; PAM type: YTN; PAM sequence: TTG
tatgaaatgttgtgttctag

SEQ ID NO: 58104 - DNA, 20 bp, Artificial Sequence
  Description of Artificial Sequence: Synthetic oligonucleotide
  Target: ATXN2; (-) strand; PAM type: YTN; PAM sequence: CTT
gtatgaaatgttgtgttcta
